United States Patent Application Publication US 2013/0267429 A1 - sequence listing, part 12

SEQ ID NO: 261919 - DNA, 55 bp, Artificial
  Synthetic oligonucleotide
gttggatctgccccattactacgtaagtaagccgcagcgtcaaaagttcttgatc

SEQ ID NO: 261920 - DNA, 53 bp, Artificial
  Synthetic oligonucleotide
gttggacgtctgacgggaaaacctggtgtcgctttagttacttcaggacctgg

SEQ ID NO: 261921 - DNA, 55 bp, Artificial
  Synthetic oligonucleotide
gttcgttctgataatagtccgaagtattctatgtacgccatagtatggggtgccg

SEQ ID NO: 261922 - DNA, 55 bp, Artificial
  Synthetic oligonucleotide
gtaatcctactaaccagtttacactcttatgtattctctctgggtgctctgggtg

SEQ ID NO: 261923 - DNA, 55 bp, Artificial
  Synthetic oligonucleotide
ggtttgcctgtcctaaccatctacggtgagctataccgttagttacatttccgaa

SEQ ID NO: 261924 - DNA, 52 bp, Artificial
  Synthetic oligonucleotide
ccgtgtttattaccaagagaaccagttaaacagtttgccttagtcgtataaa

SEQ ID NO: 261925 - DNA, 55 bp, Artificial
  Synthetic oligonucleotide
ggtgttaggttaatcggtgcagtcacgggaagtattatcggatgctttgaaccga

SEQ ID NO: 261926 - DNA, 55 bp, Artificial
  Synthetic oligonucleotide
ggtgctagtgtaattgccgctccaatcgcacatagtcttatagctaattatggag

SEQ ID NO: 261927 - DNA, 55 bp, Artificial
  Synthetic oligonucleotide
ggtgccttagtctcaacattacgtgttaaactcgacattccctattctacccgca

SEQ ID NO: 261928 - DNA, 55 bp, Artificial
  Synthetic oligonucleotide
ggtgaaagcttcattctcactccttgttcacgaagttcctgcgttggctgaataa

SEQ ID NO: 261929 - DNA, 55 bp, Artificial
  Synthetic oligonucleotide
ggggtttccctgtatgcatatccaccctattctctccgttaggcttatagctacc

SEQ ID NO: 261930 - DNA, 55 bp, Artificial
  Synthetic oligonucleotide
ggaggatacgcattactttacagcagctagtacgataaaagtaatatatgcgatg

SEQ ID NO: 261931 - DNA, 55 bp, Artificial
  Synthetic oligonucleotide
aaagattatcgtaccttatacacttccacaagttgcaggtaatgaggtagtgggg

SEQ ID NO: 261932 - DNA, 55 bp, Artificial
  Synthetic oligonucleotide
aactacccttcttactactggccttgccactgctcttcttgctaccggttttgca

SEQ ID NO: 261933 - DNA, 54 bp, Artificial
  Synthetic oligonucleotide
acactagcgactatttctaatctatcaaaacgtggagttctcgttaaaggtggg

SEQ ID NO: 261934 - DNA, 55 bp, Artificial
  Synthetic oligonucleotide
acagagttaaaatacccgtagtaagtcttatcaagcacccgcgcgacataagttc

SEQ ID NO: 261935 - DNA, 55 bp, Artificial
  Synthetic oligonucleotide
gcttgtttgtactccgtcaatagtagacacttcagttagaactgtacgctcacca

SEQ ID NO: 261936 - DNA, 55 bp, Artificial
  Synthetic oligonucleotide
agcaaatgatgtttgcgtttggaaccaagctgaccagaataaagtagagaatacg

SEQ ID NO: 261937 - DNA, 55 bp, Artificial
  Synthetic oligonucleotide
atagcggagagctaatgggcgacgtaacaaaagagttagttctcgcttcaatcga

SEQ ID NO: 261938 - DNA, 55 bp, Artificial
  Synthetic oligonucleotide
atcttatcgccaaatttccccggtaggcagaatacatcagaacctacatctaagg

SEQ ID NO: 261939 - DNA, 55 bp, Artificial
  Synthetic oligonucleotide
atgaagtacgcgaaatcaacgtaccaagtggatatactgtaactactacagtagg

SEQ ID NO: 261940 - DNA, 55 bp, Artificial
  Synthetic oligonucleotide
cataatgctataacgggcatccccgtcactatcttaatctaagtatatcgatctc

SEQ ID NO: 261941 - DNA, 55 bp, Artificial
  Synthetic oligonucleotide
cattaagatgttccacgtcagtttcgtaaataacatcctcgattggagaaacgcc

SEQ ID NO: 261942 - DNA, 53 bp, Artificial
  Synthetic oligonucleotide
cccctgtaatttgtaggaaacgatcctctaacgacgtagttagttctcgaaca

SEQ ID NO: 261943 - DNA, 55 bp, Artificial
  Synthetic oligonucleotide
ccgttactactacttcatgttcagtttgatcgtacgttataccctgttcatttcc

SEQ ID NO: 261944 - DNA, 55 bp, Artificial
  Synthetic oligonucleotide
cgccgccttctaatgaagacatctcctcaaaagcaccgtaacgtagttttcttgc

SEQ ID NO: 261945 - DNA, 55 bp, Artificial
  Synthetic oligonucleotide
cggaatactttactgaagggcgcggttcgtagacaatagcgtcatcaggtacact

SEQ ID NO: 261946 - DNA, 55 bp, Artificial
  Synthetic oligonucleotide
gcttagttgcagagaaacctattagtactggtaagaatacgaacggtgcattagc

SEQ ID NO: 261947 - DNA, 55 bp, Artificial
  Synthetic oligonucleotide
cggtcagcagttgtgtattctttgttaccgtgtaagtatccgttaactactctga

SEQ ID NO: 261948 - DNA, 55 bp, Artificial
  Synthetic oligonucleotide
cggtggacaaactctatactggcttgacgatgtacaaggtttagtaatacgtaga

SEQ ID NO: 261949 - DNA, 55 bp, Artificial
  Synthetic oligonucleotide
cgtaacaataactccatacgctaatactttgaataacgccatcgcaggtcgtagt

SEQ ID NO: 261950 - DNA, 55 bp, Artificial
  Synthetic oligonucleotide
ctcatatgtacctgttaatcctgtacgtataacagaagtaaaccgtgaatctgcg

SEQ ID NO: 261951 - DNA, 55 bp, Artificial
  Synthetic oligonucleotide
ctagtacgtatcccagcagctcgtggtaaatcaactcgtgttgaagttagatcgg

SEQ ID NO: 261952 - DNA, 55 bp, Artificial
  Synthetic oligonucleotide
cgtcacatattcagcggttcactgttaccgtatcactactcctctacgacagcta

SEQ ID NO: 261953 - DNA, 55 bp, Artificial
  Synthetic oligonucleotide
ctactgcccttggtggtatgaactatggggtgtctgtagcggaaaacacagctgc

SEQ ID NO: 261954 - DNA, 54 bp, Artificial
  Synthetic oligonucleotide
ctactcacttaaatgaccgccttgtttacttcggtgatttcggtcgccgtgaag

SEQ ID NO: 261955 - DNA, 55 bp, Artificial
  Synthetic oligonucleotide
cgtgtccatgcgaaattatctgctggtctaggtaattactatgatgagaattacg

SEQ ID NO: 261956 - DNA, 55 bp, Artificial
  Synthetic oligonucleotide
cgtgtatttgcaatgtaacactataacgacgagcatttaagctttctacccattc

SEQ ID NO: 261957 - DNA, 55 bp, Artificial
  Synthetic oligonucleotide
gctatgcatctagaatatatccgagatagtgtgcgtttgtaacgtaacgcctacg

SEQ ID NO: 261958 - DNA, 55 bp, Artificial
  Synthetic oligonucleotide
cgtcgtaagatgccttagtctcaacattacgtgttaaactcgacattccctagtc

SEQ ID NO: 261959 - DNA, 52 bp, Artificial
  Synthetic oligonucleotide
ctccggtttagtaaactctaccatacttcggtttactcctttggagaatata

SEQ ID NO: 261960 - DNA, 54 bp, Artificial
  Synthetic oligonucleotide
ttcttacgtataacgtatgcaaggacacaccaagaagtgagtcataagacgaaa

SEQ ID NO: 261961 - DNA, 54 bp, Artificial
  Synthetic oligonucleotide
acagtgaggggccggtgttttatagacaagagcgtattactacttatgggcgtc

SEQ ID NO: 261962 - DNA, 54 bp, Artificial
  Synthetic oligonucleotide
gcgttcctaactctaagtgtcttcgcaggtatgttcccacgtgctataataaac

SEQ ID NO: 261963 - DNA, 53 bp, Artificial
  Synthetic oligonucleotide
cacctacgattggtactaaccaccaagctgttttaggaccttgaagtactcca

SEQ ID NO: 261964 - DNA, 53 bp, Artificial
  Synthetic oligonucleotide
caatccaaacgcgcaatacggaggacaaccacaagggttcaatccaaacgcgc

SEQ ID NO: 261965 - DNA, 53 bp, Artificial
  Synthetic oligonucleotide
agtaatctccgttatagcactccatacataagcccgaataaggtgcatcatag

SEQ ID NO: 261966 - DNA, 53 bp, Artificial
  Synthetic oligonucleotide
agcaaccactcgcaacccgcttcctagagcctctacagctataagacctaacc

SEQ ID NO: 261967 - DNA, 53 bp, Artificial
  Synthetic oligonucleotide
taagctttaagtacaccaggtcctcccaaaccactcgtccatactgtcacacc

SEQ ID NO: 261968 - DNA, 55 bp, Artificial
  Synthetic oligonucleotide
gcatatacaccatgagatgacaactctagcttatctgctaccgctgacatagagt

SEQ ID NO: 261969 - DNA, 53 bp, Artificial
  Synthetic oligonucleotide
acagcaacgataccagagacaccgatatgctctgctagatagaatactataac

SEQ ID NO: 261970 - DNA, 53 bp, Artificial
  Synthetic oligonucleotide
tagcattggtagggtttccgttagtgtatgctttcacctacattatagcccga

SEQ ID NO: 261971 - DNA, 53 bp, Artificial
  Synthetic oligonucleotide
tccggcactgttaacacgaagtggtaagaatgttgaacgagctcctaacattc

SEQ ID NO: 261972 - DNA, 52 bp, Artificial
  Synthetic oligonucleotide
ggctctctccggtaagtgcagattcttgaacttgtagtgagcttgcttcaat

SEQ ID NO: 261973 - DNA, 52 bp, Artificial
  Synthetic oligonucleotide
ggagagtacaatgtgaactctctaaaactctggatagacctacatcattacc

SEQ ID NO: 261974 - DNA, 52 bp, Artificial
  Synthetic oligonucleotide
ctgcggagggtatagtacctcgtttgcgttggactaaaagaataagtaacgg

SEQ ID NO: 261975 - DNA, 52 bp, Artificial
  Synthetic oligonucleotide
gcttagaagaacatatttaccaccctatcgctagtgcagttgttagtaaagc

SEQ ID NO: 261976 - DNA, 51 bp, Artificial
  Synthetic oligonucleotide
gattaactctccacgaagatcttcaacgctaatacgtgttcttacaccttc

SEQ ID NO: 261977 - DNA, 51 bp, Artificial
  Synthetic oligonucleotide
ttcgtacctattgttattactttagccctagtagctggaggaatgtggtat

SEQ ID NO: 261978 - DNA, 51 bp, Artificial
  Synthetic oligonucleotide
tcgttccatacggtccaatcccaatgtctccagctctaaacgtcctacatt

SEQ ID NO: 261979 - DNA, 55 bp, Artificial
  Synthetic oligonucleotide
gcagatgatcctcatttagggctaggtactccatcagtttggtatcagatgtcgc

SEQ ID NO: 261980 - DNA, 51 bp, Artificial
  Synthetic oligonucleotide
tactggctaggagccgacggaagaatggcgacaaacgcttgggtagacgga

SEQ ID NO: 261981 - DNA, 51 bp, Artificial
  Synthetic oligonucleotide
gacgtttaggagaagggattacacatactctgacaggtgtttatatgattc

SEQ ID NO: 261982 - DNA, 50 bp, Artificial
  Synthetic oligonucleotide
tcgagccctctgctatgtgtatgctaatggtaaatccgttcaagaacagc

SEQ ID NO: 261983 - DNA, 50 bp, Artificial
  Synthetic oligonucleotide
ccgcttgcaagtagtttagcagcagttccagcgattacttctccagcgtt

SEQ ID NO: 261984 - DNA, 50 bp, Artificial
  Synthetic oligonucleotide
tctcactagtcaccccagacttaccaacttgaaatattggtgataagtga

SEQ ID NO: 261985 - DNA, 50 bp, Artificial
  Synthetic oligonucleotide
tatcgccccatctaagcctggctgaaggaacgctcgaatgagattgtctc

SEQ ID NO: 261986 - DNA, 50 bp, Artificial
  Synthetic oligonucleotide
tggagacactccagttaaagttactatccctactgaaggtttagaaaacg

SEQ ID NO: 261987 - DNA, 50 bp, Artificial
  Synthetic oligonucleotide
acactacctcctatgaaaactagtggtcttcgtttaggagctcccgcaat

SEQ ID NO: 261988 - DNA, 50 bp, Artificial
  Synthetic oligonucleotide
ttaggacgtgatctagaatctcttaatgctgctcgtggagagtttcctcg

SEQ ID NO: 261989 - DNA, 50 bp, Artificial
  Synthetic oligonucleotide
ccaacaggtacaggtattagaacggagacttacggaagtaatggtagata

SEQ ID NO: 261990 - DNA, 55 bp, Artificial
  Synthetic oligonucleotide
gcaagaccgaataccgagatgcgggtagaatagggaatgtcgagtttaacacgta

SEQ ID NO: 261991 - DNA, 50 bp, Artificial
  Synthetic oligonucleotide
ggggctcatagaatagagttggtaagtgcaagttatttaggtggactaac

SEQ ID NO: 261992 - DNA, 55 bp, Artificial
  Synthetic oligonucleotide
ccaactggcttgagacttgggaggcgcgcttttgcctacgcgaaaacgaggtggc

SEQ ID NO: 261993 - DNA, 55 bp, Artificial
  Synthetic oligonucleotide
ctggacaaaccgggatctcaggctcaatgcccgctacttgctcaaccagtgcgat

SEQ ID NO: 261994 - DNA, 55 bp, Artificial
  Synthetic oligonucleotide
aaggttgtgaaaggctcgcgatatagagcgtcggtaagattggtcaccccgatcc

SEQ ID NO: 261995 - DNA, 52 bp, Artificial
  Synthetic oligonucleotide
ctggttgaggagccatcgcccggtaagaacccgcggaagtttcgtttaatct

SEQ ID NO: 261996 - DNA, 55 bp, Artificial
  Synthetic oligonucleotide
gacacagcgtcggatgttgaactgctcataacgcggaacaagtggaaaggcacgg

SEQ ID NO: 261997 - DNA, 55 bp, Artificial
  Synthetic oligonucleotide
ttcaagactcccgatacggcaaaggattgagcgcacggcttcacagggtgctcct

SEQ ID NO: 261998 - DNA, 55 bp, Artificial
  Synthetic oligonucleotide
tcttagtcggatcgctcggtacgccgatcacgtgataaccaaaccctctaccgct

SEQ ID NO: 261999 - DNA, 55 bp, Artificial
  Synthetic oligonucleotide
tcgattgcccggaaggggtgttactgagccgctatgccctcacccggcgtcctca

SEQ ID NO: 262000 - DNA, 55 bp, Artificial
  Synthetic oligonucleotide
taccgatcaactgcggcaactgttggtactcgatcgctcggagattatcgacacg

SEQ ID NO: 262001 - DNA, 55 bp, Artificial
  Synthetic oligonucleotide
taatactcgccgtacagagctagttcggcaagcatcacccggtcggaagacggat

SEQ ID NO: 262002 - DNA, 55 bp, Artificial
  Synthetic oligonucleotide
ggtccgaatcaaccgggaacaaacgtcaatcccagttcctctggtgtttacagca

SEQ ID NO: 262003 - DNA, 55 bp, Artificial
  Synthetic oligonucleotide
ccttgtcaagtcgggcagcacggcatactccaagactggattgtaaggaataggc

SEQ ID NO: 262004 - DNA, 55 bp, Artificial
  Synthetic oligonucleotide
gctgccttcgcttcggcgtactgagccttcaccgtggagtgtccaagcttgtagg

SEQ ID NO: 262005 - DNA, 55 bp, Artificial
  Synthetic oligonucleotide
gcgtcggctgttaatctgaagggtgtgtaagacaaaagagttcgctccgatgcca

SEQ ID NO: 262006 - DNA, 54 bp, Artificial
  Synthetic oligonucleotide
gcggcagggtgggaacgagactgtgtgggtgggatcggtttattcttttagggc

SEQ ID NO: 262007 - DNA, 55 bp, Artificial
  Synthetic oligonucleotide
gcgatgcctggaatgctcgtccagtctggttctcaagctactttgtcaccccttg

SEQ ID NO: 262008 - DNA, 55 bp, Artificial
  Synthetic oligonucleotide
gccgaggcgattagaatcgttgctttggcaaacttctgaggaaccgtgtctaccg

SEQ ID NO: 262009 - DNA, 55 bp, Artificial
  Synthetic oligonucleotide
gccgagaatcagaatcaatctcacattggacatgcagtagaccggcgcagaccgg

SEQ ID NO: 262010 - DNA, 55 bp, Artificial
  Synthetic oligonucleotide
gacgcctttgcgtttgatgctgtgggagccggtcaaccagaggtaaggagccgca

SEQ ID NO: 262011 - DNA, 53 bp, Artificial
  Synthetic oligonucleotide
cgtctggttttcgatgtgcaccaggaagaaagactggtggtcacgaaagcggg

SEQ ID NO: 262012 - DNA, 51 bp, Artificial
  Synthetic oligonucleotide
ggcgccaagctagaacacaggaagcgatccatgggtgagaagaaccgttcg

SEQ ID NO: 262013 - DNA, 51 bp, Artificial
  Synthetic oligonucleotide
accgaacaggtcagcacagcatggaccgtgggaaaaccgattgcgcacggc

SEQ ID NO: 262014 - DNA, 55 bp, Artificial
  Synthetic oligonucleotide
cgaagagcgggcattgctcgaagaattgagagcgcactacgaggcaggcttttcc

SEQ ID NO: 262015 - DNA, 50 bp, Artificial
  Synthetic oligonucleotide
ccttcagccgtcgccacttaaaggtttgtctacagcaactattaagcgtc

SEQ ID NO: 262016 - DNA, 50 bp, Artificial
  Synthetic oligonucleotide
acgggatccgacaatgggcgcgtaagggttcccaaggaggacacatgccg

SEQ ID NO: 262017 - DNA, 50 bp, Artificial
  Synthetic oligonucleotide
acggcgacggaactgggagaggcgagtatcgcccctggtgtgctctttgg

SEQ ID NO: 262018 - DNA, 50 bp, Artificial
  Synthetic oligonucleotide
acggcccaatgccgatgagtcgggggtggcagtgcccatggtctcgcttt

SEQ ID NO: 262019 - DNA, 50 bp, Artificial
  Synthetic oligonucleotide
acgctatgtctacacaccggatccgcaggaggggacgctgcttaccccgg

SEQ ID NO: 262020 - DNA, 50 bp, Artificial
  Synthetic oligonucleotide
aaacagattggggcgggcgaatttcaggtggcggtagttgccatcggcag

SEQ ID NO: 262021 - DNA, 50 bp, Artificial
  Synthetic oligonucleotide
aaactcgacgaggccgttagattcaccccggctgcctggaccaccaaagg

SEQ ID NO: 262022 - DNA, 50 bp, Artificial
  Synthetic oligonucleotide
aaagcgacacccgcatctacgtcgggacgccattcactgtgcagggaacg

SEQ ID NO: 262023 - DNA, 50 bp, Artificial
  Synthetic oligonucleotide
aaagcgcctccggagatccgcattcctggacggttggggaatactaccga

SEQ ID NO: 262024 - DNA, 50 bp, Artificial
  Synthetic oligonucleotide
aaagcgtgccgggggcgaaagtcatggcctgttgggatgaagactgcgct

SEQ ID NO: 262025 - DNA, 55 bp, Artificial
  Synthetic oligonucleotide
cgactgcgatcggatagaccacaggctcgctgtagttcgcgggcaccagaaaacc

SEQ ID NO: 262026 - DNA, 50 bp, Artificial
  Synthetic oligonucleotide
aaagtgccgccgcacgcacaccagggatttttcgactatggcgttcggtg

SEQ ID NO: 262027 - DNA, 50 bp, Artificial
  Synthetic oligonucleotide
aaatcggcggcgaacacccatggccggttgtctccgattggcccctctgg

SEQ ID NO: 262028 - DNA, 50 bp, Artificial
  Synthetic oligonucleotide
aaccaactgagtgcgctgcccggtcgggtctgacagaaaatgcacctccg

SEQ ID NO: 262029 - DNA, 50 bp, Artificial
  Synthetic oligonucleotide
aactctcagccgggccggagcttgaatctccctaccttcgaagcgcacag

SEQ ID NO: 262030 - DNA, 50 bp, Artificial
  Synthetic oligonucleotide
aagaactgccgggagcagtccttgcacagcaaccgttgcatgaacccctc

SEQ ID NO: 262031 - DNA, 50 bp, Artificial
  Synthetic oligonucleotide
aagagtgagatggggataggcatgcaacagggcctcgggtccgtaagccc

SEQ ID NO: 262032 - DNA, 50 bp, Artificial
  Synthetic oligonucleotide
aagcacgtgtatcgcgcaatgccttaccatatcgggccgggggcttcggg

SEQ ID NO: 262033 - DNA, 50 bp, Artificial
  Synthetic oligonucleotide
aaggcccactcccggtaaatttgcgcactagttcagcgggccagccccgc

SEQ ID NO: 262034 - DNA, 50 bp, Artificial
  Synthetic oligonucleotide
aaggcccgggctcgaaaaccgcgaattaatcacccacggttgacgccatg

SEQ ID NO: 262035 - DNA, 50 bp, Artificial
  Synthetic oligonucleotide
aaggtgcgccggggtagacaccggtcctgaagttggccgactcgatgtac

SEQ ID NO: 262036 - DNA, 55 bp, Artificial
  Synthetic oligonucleotide
cgaggtggacgctaaagcgctcctcaaacacgctatccttcaccgagtgcgtgtg

SEQ ID NO: 262037 - DNA, 50 bp, Artificial
  Synthetic oligonucleotide
accttcgccccgggctacctcccacggatcgagaaaagcggtcacccggc

SEQ ID NO: 262038 - DNA, 50 bp, Artificial
  Synthetic oligonucleotide
acctctggtgcgtgaggtggaaaggggcgtgccctccgcaggttcgaagg

SEQ ID NO: 262039 - DNA, 50 bp, Artificial
  Synthetic oligonucleotide
accgtctccgagtactcccggcggcagattacccgcttcacaggcatcag

SEQ ID NO: 262040 - DNA, 50 bp, Artificial
  Synthetic oligonucleotide
accgggcgtcagtgaccgcctcccgacacgagtgcttagaccacggactg

SEQ ID NO: 262041 - DNA, 50 bp, Artificial
  Synthetic oligonucleotide
accgctgcggtcggagataaagtgtagcgtcccgcctggggaccactcag

SEQ ID NO: 262042 - DNA, 50 bp, Artificial
  Synthetic oligonucleotide
accgccgcgttaggctggaagcacgaacggatcgcagctggagcgcacac

SEQ ID NO: 262043 - DNA, 50 bp, Artificial
  Synthetic oligonucleotide
accctcaatcggcacaacgcgtatggccccacaacttgcgattccctcga

SEQ ID NO: 262044 - DNA, 50 bp, Artificial
  Synthetic oligonucleotide
acccgggcttttgtgatcgggcgcaatcgggccacaagcagtgcgtcttc

SEQ ID NO: 262045 - DNA, 50 bp, Artificial
  Synthetic oligonucleotide
acccgctcccaccttgaaaccaacaccgacgccccgggttgtggcgccca

SEQ ID NO: 262046 - DNA, 50 bp, Artificial
  Synthetic oligonucleotide
accccggccataccccaagggtgataaggtgtcgggtgccagtacgctct

SEQ ID NO: 262047 - DNA, 53 bp, Artificial
  Synthetic oligonucleotide
cgcatgttaagtaggggaatggtacggttacagaacccagtttcggtagccag

SEQ ID NO: 262048 - DNA, 50 bp, Artificial
  Synthetic oligonucleotide
accccaagcccgcgcactcatcgaacggctgggtaaccctgaaatttccg

SEQ ID NO: 262049 - DNA, 50 bp, Artificial
  Synthetic oligonucleotide
acccacgagttggacccgcgcgatcgtagtgtccccaccctaagtgcagg

SEQ ID NO: 262050 - DNA, 50 bp, Artificial
  Synthetic oligonucleotide
accagcccacccgatgcaagctctcaagatccgcccggatccatccgtaa

SEQ ID NO: 262051 - DNA, 50 bp, Artificial
  Synthetic oligonucleotide
accactgcccccgaccaggagcataaacgaccaatccccggcggttgagg

SEQ ID NO: 262052 - DNA, 50 bp, Artificial
  Synthetic oligonucleotide
acatcgtccacctggagggttcgcccgcggctctgcatgccttccacggg

SEQ ID NO: 262053 - DNA, 50 bp, Artificial
  Synthetic oligonucleotide
acaagggtccgctcgcatccgccctttagcttcccgcgaaaccgctgcag

SEQ ID NO: 262054 - DNA, 50 bp, Artificial
  Synthetic oligonucleotide
aatgggtagtgcgcgccacctgaaaacttcaggcaccccgcaggcttctt

SEQ ID NO: 262055 - DNA, 55 bp, Artificial
  Synthetic oligonucleotide
cgggccatttattaccattacccacggaaaagctcgaacacgactggtgtgctcc

SEQ ID NO: 262056 - DNA, 55 bp, Artificial
  Synthetic oligonucleotide
ctacggaaataatgtgggcagaggacgtcagccggcgtctgaaatttgtcggcag

SEQ ID NO: 262057 - DNA, 55 bp, Artificial
  Synthetic oligonucleotide
ctgcggctcatccagggccctaagtgtattcaagaaggaagctaattcttcgccc

SEQ ID NO: 262058 - DNA, 60 bp, Artificial
  Synthetic oligonucleotide
cggatgctgcgatcgcactggttggaaccaataaggctgtaaccctctatctgttaagtg

SEQ ID NO: 262059 - DNA, 60 bp, Artificial
  Synthetic oligonucleotide
tcagatagagggttacagacgttcagaaaagtattgcaagacatgaaaataggggctatg

SEQ ID NO: 262060 - DNA, 50 bp, Artificial
  Synthetic oligonucleotide
ccccaagacgaacccgatccccgtgcgttgctgccagtagtcccgcgtca

SEQ ID NO: 262061 - DNA, 50 bp, Artificial
  Synthetic oligonucleotide
tcagaacgagatcggtgtgggattctcaccgtagtagcagcgataaagtt

SEQ ID NO: 262062 - DNA, 59 bp, Artificial
  Synthetic oligonucleotide
tatgcggaacggattcactattgcagtgattttttggacttccggttagtcccagatca

SEQ ID NO: 262063 - DNA, 56 bp, Artificial
  Synthetic oligonucleotide
ctttgcccaaaacgttttgggcaacagctcgatcgagaatttgtggtcgttgcaac

SEQ ID NO: 262064 - DNA, 56 bp, Artificial
  Synthetic oligonucleotide
gactgaattcgggcgttctgcggactttcacgctgtaccgaggaaatcccggctcg

SEQ ID NO: 262065 - DNA, 60 bp, Artificial
  Synthetic oligonucleotide
gagataatagcgtgtactgaggttcaagagaagcggtatgaaagaactggtgaagttgcc

SEQ ID NO: 262066 - DNA, 60 bp, Artificial
  Synthetic oligonucleotide
gagcgtacatacggacgtaacaggctgtcgtttatcactctgactctgcctccagcggtc

SEQ ID NO: 262067 - DNA, 60 bp, Artificial
  Synthetic oligonucleotide
gagcttggtgctatagtcctagacagttggaaaaaatgtggagtgaatgctgcgaaactg

SEQ ID NO: 262068 - DNA, 60 bp, Artificial
  Synthetic oligonucleotide
gatagcagccctcggaacatgccacgcggcgagcggtctttctctgaaatcaagcaatct

SEQ ID NO: 262069 - DNA, 58 bp, Artificial
  Synthetic oligonucleotide
gatcgcactggttggaaccaataaggctgtaaccctctatctgttaagtgatcgaggg

SEQ ID NO: 262070 - DNA, 60 bp, Artificial
  Synthetic oligonucleotide
gatttgagtgggcggtgggcacatgtggtcgatttgatgaaacggcggctcatctactcc

SEQ ID NO: 262071 - DNA, 59 bp, Artificial
  Synthetic oligonucleotide
tcctggcgcagaagtctcgcaatgaaggcgagggcttataagactttgcccaaagtagt

SEQ ID NO: 262072 - DNA, 60 bp, Artificial
  Synthetic oligonucleotide
gccaatcccaacccaaagcgacccagcatcaagtgcttgagtgcgtacagaagcactgtc

SEQ ID NO: 262073 - DNA, 56 bp, Artificial
  Synthetic oligonucleotide
gccgtgaaatttatcgagcaggagattcgccctgactctcaaggttacgtaggggt

SEQ ID NO: 262074 - DNA, 60 bp, Artificial
  Synthetic oligonucleotide
ggaatgctctatgaggtaggctttcttctttgttatcagttatgttatcaacctcattat

SEQ ID NO: 262075 - DNA, 54 bp, Artificial
  Synthetic oligonucleotide
ggactacaacccaattttggatgttcaagcgcttaaaacagagtcttccttggt

SEQ ID NO: 262076 - DNA, 59 bp, Artificial
  Synthetic oligonucleotide
taatagtagaactgagagtgaatctaacggaaatggaaacgctactggtaatacaagca

SEQ ID NO: 262077 - DNA, 54 bp, Artificial
  Synthetic oligonucleotide
ggatcgctcccggtggcgttgcgagaacttgcggggaaagaacgggcgtttatc

SEQ ID NO: 262078 - DNA, 59 bp, Artificial
  Synthetic oligonucleotide
taaaagcagctaataacaggaagcttgctgactctggtgaagggtataaaaacaagcag

SEQ ID NO: 262079 - DNA, 58 bp, Artificial
  Synthetic oligonucleotide
gggaacgcaaacgacacagaaaattatcgattctgggaaagctcatctactgcccaaa

SEQ ID NO: 262080 - DNA, 60 bp, Artificial
  Synthetic oligonucleotide
gttcgccacttatacagatcgttgggtgttacgcaccgatctggaattaagcagctctca

SEQ ID NO: 262081 - DNA, 60 bp, Artificial
  Synthetic oligonucleotide
gggcggtgggcacatgtggtcgatttgatgaaacggcggctcatctactccaatggactg

SEQ ID NO: 262082 - DNA, 60 bp, Artificial
  Synthetic oligonucleotide
tcctcaatgtattcgagcaagtcgcacgaggtcaaactgagctaatgttggtgtcgggtt

SEQ ID NO: 262083 - DNA, 55 bp, Artificial
  Synthetic oligonucleotide
gtatccttgacagcaatacctaacaccctaaaacccgttcagatagagggttaca

SEQ ID NO: 262084 - DNA, 53 bp, Artificial
  Synthetic oligonucleotide
aagtaagcccacccgattgaggtcaacctaggtcgtacgaagagtattcggtc

SEQ ID NO: 262085 - DNA, 55 bp, Artificial
  Synthetic oligonucleotide
acagagaacctttaccgatcggtaagggggcattcatggatttgattaaagtcta

SEQ ID NO: 262086 - DNA, 60 bp, Artificial
  Synthetic oligonucleotide
aacggcgatcgctgatgtaggttggcggtagcagtttgtcgaggagtcgcaacgccactc

SEQ ID NO: 262087 - DNA, 60 bp, Artificial
  Synthetic oligonucleotide
tgggaatatacatacggaagtgaattggaatgcagcggtaaatgtgcaaaggatcaaaaa

SEQ ID NO: 262088 - DNA, 60 bp, Artificial
  Synthetic oligonucleotide
tgatgaaacggcggctcatctactccaatggactgcatgggctacccaccgagataatag

SEQ ID NO: 262089 - DNA, 60 bp, Artificial
  Synthetic oligonucleotide
aatgttatcaaggcaagtcaagggatcgtggaatagcggactgagcggtaggagagcata

SEQ ID NO: 262090 - DNA, 60 bp, Artificial
  Synthetic oligonucleotide
tgataacagatagtgttctcttgcatctttcttcgataacaattgataacaatgttatca

SEQ ID NO: 262091 - DNA, 60 bp, Artificial
  Synthetic oligonucleotide
aacaacagccatgcgaacgctagcatactccggcaaattacggatgctgcgatcgcactg

SEQ ID NO: 262092 - DNA, 56 bp, Artificial
  Synthetic oligonucleotide
cagatttttgctacccacccgaaactgtatggaattttagctttgatctctcctaa

SEQ ID NO: 262093 - DNA, 53 bp, Artificial
  Synthetic oligonucleotide
cgtaaacgctgccaacacgggcgttcccaagggtgcggcgatatccgtccccg

SEQ ID NO: 262094 - DNA, 59 bp, Artificial
  Synthetic oligonucleotide
ccaaagcattgtaaagactctgaggaatgcgaccggagaaaaaaggtctagtcatgctc

SEQ ID NO: 262095 - DNA, 57 bp, Artificial
  Synthetic oligonucleotide
ccaagccggagaggttgatgagggacacctctattttggctggaacgcgtaaagaga

SEQ ID NO: 262096 - DNA, 57 bp, Artificial
  Synthetic oligonucleotide
tgtggtctagggggcagtcccctctgggagatttagacgcaccgtcgctgttaacaa

SEQ ID NO: 262097 - DNA, 60 bp, Artificial
  Synthetic oligonucleotide
tgaagttgccttgcacttgcacattgtcatggtcggacggcatagtagaggagcttggtg

SEQ ID NO: 262098 - DNA, 53 bp, Artificial
  Synthetic oligonucleotide
cgaagccgaagggtatccttagcagcaatacctaacaccctaaaacccgttca

SEQ ID NO: 262099 - DNA, 56 bp, Artificial
  Synthetic oligonucleotide
ttgatccgtaagcaaacttcttacaggacgggcaactcacgcaatttggggcgtaa

SEQ ID NO: 262100 - DNA, 51 bp, Artificial
  Synthetic oligonucleotide
ccgaaggctaccttggtttatcaaagcccgctaaatcggagaaaaccaaaa

SEQ ID NO: 262101 - DNA, 56 bp, Artificial
  Synthetic oligonucleotide
cctctgggtgtggtctagggggcagtcccctctgggagatttagacgcaccgtcgc

SEQ ID NO: 262102 - DNA, 55 bp, Artificial
  Synthetic oligonucleotide
aaaatcagcagcctaaaattgccgctttgtacgaagaggggatttttaaggatgc

SEQ ID NO: 262103 - DNA, 60 bp, Artificial
  Synthetic oligonucleotide
tcgtagcgagtcaggtatcgatcgatgcaacgttatggacgacgagcaattgcgacagtg

SEQ ID NO: 262104 - DNA, 60 bp, Artificial
  Synthetic oligonucleotide
cgtcgctgttaacaacagccatgcgaagcctagcatactccggcaaattacggatgctgc

SEQ ID NO: 262105 - DNA, 59 bp, Artificial
  Synthetic oligonucleotide
gtctacccctgtgggcaaataacagcaagttcgcagcgtagattcacccctgagcctct

SEQ ID NO: 262106 - DNA, 58 bp, Artificial
  Synthetic oligonucleotide
aacaagcaggattgctacaacgcgatcgggatggtttcaacgtctggcaattctcctg

SEQ ID NO: 262107 - DNA, 58 bp, Artificial
  Synthetic oligonucleotide
caactcagtatagttgttctagttatcatcaacgttatcgatttgataacgttctggt

SEQ ID NO: 262108 - DNA, 51 bp, Artificial
  Synthetic oligonucleotide
gaagggaagccccgcaacgtggccgcccccgtgttggaaatgttatttccc

SEQ ID NO: 262109 - DNA, 57 bp, Artificial
  Synthetic oligonucleotide
gggattaacacctggcaacatctcgaatgggttaaagcggcagacgggtgtatggcg

SEQ ID NO: 262110 - DNA, 57 bp, Artificial
  Synthetic oligonucleotide
cgattctgggaaagctcatctactgcccaaagcgtggtatttctgcacccaagtttt

SEQ ID NO: 262111 - DNA, 56 bp, Artificial
  Synthetic oligonucleotide
gggcagtcccctctgggagatttagacgcaccgtcgctgttaacaacagccatgcg

SEQ ID NO: 262112 - DNA, 56 bp, Artificial
  Synthetic oligonucleotide
tagacgcaccgtcgctgttaacaacagccatgcgaagcctagcatactccggcaaa

SEQ ID NO: 262113 - DNA, 55 bp, Artificial
  Synthetic oligonucleotide
gctcgggcgactcaacggctcgactggaactagccgaacgtctgatacggaatcc

SEQ ID NO: 262114 - DNA, 55 bp, Artificial
  Synthetic oligonucleotide
tacacgatcgatctcgttcccagtgacggaaccgcaggcttagatcgcttagccc

SEQ ID NO: 262115 - DNA, 60 bp, Artificial
  Synthetic oligonucleotide
ctacttaggatgttatcaagatggttatcagatacgataacatcttgaaggtctaatgga

SEQ ID NO: 262116 - DNA, 54 bp, Artificial
  Synthetic oligonucleotide
gctcaaagaccgaaatcgcaagccaaccaactcgttgtaaaccgggttgagttc

SEQ ID NO: 262117 - DNA, 55 bp, Artificial
  Synthetic oligonucleotide
ggacgtaacaggctgtcgtttatcactctgactctgcctccagcggtcgctgaag

SEQ ID NO: 262118 - DNA, 55 bp, Artificial
  Synthetic oligonucleotide
ttattctccgcgattcacctgtagcgaaggcggttagaacagcagcgattcgagt

SEQ ID NO: 262119 - DNA, 55 bp, Artificial
  Synthetic oligonucleotide
ggtatcgatcgatgcaacgttatggacgacgagcaattgcgacagtgggcgatcg

SEQ ID NO: 262120 - DNA, 55 bp, Artificial
  Synthetic oligonucleotide
gttacagacgttcagaaaagtattgcaagacatgaaaataggggctatgctagcc

SEQ ID NO: 262121 - DNA, 55 bp, Artificial
  Synthetic oligonucleotide
cgacaggtggtagcccctcgcatcactacgttgaagtaccagtcgttgggaggaa

SEQ ID NO: 262122 - DNA, 55 bp, Artificial
  Synthetic oligonucleotide
cgggtggattcggctgaggggacgaccacttacgtttatgacgataacgatcgcc

SEQ ID NO: 262123 - DNA, 55 bp, Artificial
  Synthetic oligonucleotide
ccgtctcgacatttacggaagtatgcgacgacgaaggatctcgtccgccagtggc

SEQ ID NO: 262124 - DNA, 55 bp, Artificial
  Synthetic oligonucleotide
tccgactgcacgataccttttcctcacgctgacagtgaagaactgcgcgattacc

SEQ ID NO: 262125 - DNA, 55 bp, Artificial
  Synthetic oligonucleotide
ctgctgtcgatactcctccaaagcattgtaaagactctgaggaatgcgaccggag

SEQ ID NO: 262126 - DNA, 56 bp, Artificial
  Synthetic oligonucleotide
ctcatttccactgcctattgatggtaaaagcttcctatttcggtcggaactacatt

SEQ ID NO: 262127 - DNA, 55 bp, Artificial
  Synthetic oligonucleotide
gaatctctcaatgggctgcaacttcaggcatcgcaaatgcgcgaagataatcagc

SEQ ID NO: 262128 - DNA, 55 bp, Artificial
  Synthetic oligonucleotide
atgtgtgcgacaatccagggacagtcgatcgcgcaacagagatcgcacaaattcc

SEQ ID NO: 262129 - DNA, 55 bp, Artificial
  Synthetic oligonucleotide
gagggtgttaggtactgctgtcaaggacggagcgaagcgaagccgaagggtatcc

SEQ ID NO: 262130 - DNA, 55 bp, Artificial
  Synthetic oligonucleotide
gcaaacttcttacaggacgggcaactcacgcaatttggggcgtaatcgaagcgta

SEQ ID NO: 262131 - DNA, 55 bp, Artificial
  Synthetic oligonucleotide
gcgaaacgccttgacggcagattgaaccgctacactcttgggctgttccgagggc

SEQ ID NO: 262132 - DNA, 55 bp, Artificial
  Synthetic oligonucleotide
gcgcctgacagatatggctatcctcatctaacctctgattcttttcctgtagagg

SEQ ID NO: 262133 - DNA, 54 bp, Artificial
  Synthetic oligonucleotide
gcggcaacgatggggactcgaacccgcccactcgttgtagaaaggctaaccgtc

SEQ ID NO: 262134 - DNA, 54 bp, Artificial
  Synthetic oligonucleotide
aaccgatcgcacttgcgtcaaattcatctctaaaaattctacgaggtcgggaac

SEQ ID NO: 262135 - DNA, 54 bp, Artificial
  Synthetic oligonucleotide
ctcgtaggattcagctgtgatttcaaaacaccatgtcgcgcctttatatcggta

SEQ ID NO: 262136 - DNA, 53 bp, Artificial
  Synthetic oligonucleotide
accgatcgctcgtcacgcaccgctaatgtacaccgccaacagaccagcatggg

SEQ ID NO: 262137 - DNA, 59 bp, Artificial
  Synthetic oligonucleotide
ctgttaagtgatcgagggtgttaggtactgctgtcaaggacggagcgaagcgaagccga

SEQ ID NO: 262138 - DNA, 52 bp, Artificial
  Synthetic oligonucleotide
tcgtcggttcctactgcaaggatctctcgtccggggttgccgtatgaacccg

SEQ ID NO: 262139 - DNA, 52 bp, Artificial
  Synthetic oligonucleotide
tcgcaagccaaccaactcgttgtaaaccgggttgagttcgcacagagccgga

SEQ ID NO: 262140 - DNA, 52 bp, Artificial
  Synthetic oligonucleotide
ggcttcgcaccccaattcccgctatccccacgctccgatgctagagccgacg

SEQ ID NO: 262141 - DNA, 51 bp, Artificial
  Synthetic oligonucleotide
aaaccgcgttgaatcccgagggaacctatctcattaccggggcgtttggcg

SEQ ID NO: 262142 - DNA, 52 bp, Artificial
  Synthetic oligonucleotide
attgtgctacggcgggggaaagtgcgcggtaaatcgcatcgccactcgaatt

SEQ ID NO: 262143 - DNA, 52 bp, Artificial
  Synthetic oligonucleotide
gagtgcaacccctgcactcgccccgaacgtgataccactgcaacgcagacag

SEQ ID NO: 262144 - DNA, 52 bp, Artificial
  Synthetic oligonucleotide
ccgaacgtccgaacggtagctgtggggacggttgcctcgcgctaggatattt

SEQ ID NO: 262145 - DNA, 52 bp, Artificial
  Synthetic oligonucleotide
ctaccgccgagttcatgaaagccctagtctttaccgcattcgggcgctcgca

SEQ ID NO: 262146 - DNA, 52 bp, Artificial
  Synthetic oligonucleotide
cggggcgatacaagcgcggcgggtatgggattcggagaagtcgtcaaatccc

SEQ ID NO: 262147 - DNA, 51 bp, Artificial
  Synthetic oligonucleotide
agatccgacacgagaaagcgatcgctcaacttcgatccgactcccaatccg

SEQ ID NO: 262148 - DNA, 60 bp, Artificial
  Synthetic oligonucleotide
tccagcggtcgctgaagatttgagtgggcggtgggcacatgtggtcgatttgatgaaacg

SEQ ID NO: 262149 - DNA, 51 bp, Artificial
  Synthetic oligonucleotide
ccgttaccaaagtgctgggcgctattcttaaccctgccgacttgttgcgta

SEQ ID NO: 262150 - DNA, 51 bp, Artificial
  Synthetic oligonucleotide
cgaaactgatgtcgcgtcacgcccgaaaaaccgtgtgagggaaaatcgtaa

SEQ ID NO: 262151 - DNA, 51 bp, Artificial
  Synthetic oligonucleotide
cggtaaacgctcgggcgactcaacggctcgactggaactagccgaacgtct

SEQ ID NO: 262152 - DNA, 51 bp, Artificial
  Synthetic oligonucleotide
cttccggttagtcccagatcaggacagctcctaccgtttgaagttggcatc

SEQ ID NO: 262153 - DNA, 51 bp, Artificial
  Synthetic oligonucleotide
cttgtcctacgttagcctcgattggatgctggacgtttcgggggcgcggcg

SEQ ID NO: 262154 - DNA, 51 bp, Artificial
  Synthetic oligonucleotide
ttatttcaactctagcgtcagttcttacagcgcggacagtcacgttcctaa

SEQ ID NO: 262155 - DNA, 51 bp, Artificial
  Synthetic oligonucleotide
ggaaaacgtgcatacgaagcgcagcacgcctctgacgtacctatccccacg

SEQ ID NO: 262156 - DNA, 50 bp, Artificial
  Synthetic oligonucleotide
aaacgtcttctttcgtgctgttaaacgaagggtttactcgggaagcactc

SEQ ID NO: 262157 - DNA, 50 bp, Artificial
  Synthetic oligonucleotide
ttttggaactgactaggcaacttcaccgaacgaaagcgatcgcatttgga

SEQ ID NO: 262158 - DNA, 50 bp, Artificial
  Synthetic oligonucleotide
agatgctgttatgtctagtgtatcgtctcgtcacgagacagccaatagga

SEQ ID NO: 262159 - DNA, 55 bp, Artificial
  Synthetic oligonucleotide
cacagaggcactttgccggtgcatgctggtaaggtgtcggccattccttcccagg

SEQ ID NO: 262160 - DNA, 55 bp, Artificial
  Synthetic oligonucleotide
ctacatcgggcgacggcgtgccaactctgtcacaagacttcgggtggattaccgt

SEQ ID NO: 262161 - DNA, 55 bp, Artificial
  Synthetic oligonucleotide
agaggcagaactcacccgacgtcgcgcccgcttaccatcggatccatgccaactg

SEQ ID NO: 262162 - DNA, 55 bp, Artificial
  Synthetic oligonucleotide
gaaccgggcgtggcttcttgcggagcgaacgatgaccagcgtggctagaaaggct

SEQ ID NO: 262163 - DNA, 55 bp, Artificial
  Synthetic oligonucleotide
ttgcacacgcctctcctgcggttatttgaggcgggagtgtgcggggcttcagcga

SEQ ID NO: 262164 - DNA, 55 bp, Artificial
  Synthetic oligonucleotide
gccccgatgggctcaggctgaacgcccggctaagatgattcgactgccttttggt

SEQ ID NO: 262165 - DNA, 55 bp, Artificial
  Synthetic oligonucleotide
gcggcgcgaacaacaagtcgaacgggaaactggcgtgggtacagtcgtggacaag

SEQ ID NO: 262166 - DNA, 55 bp, Artificial
  Synthetic oligonucleotide
tgtgactgcacatcgaccccgggtttgatgaactcgacctcccgtttggcaaacg

SEQ ID NO: 262167 - DNA, 55 bp, Artificial
  Synthetic oligonucleotide
gggcgtatgacactcgaaaacccttagagtgcccatcgggtgttacgactacgcg

SEQ ID NO: 262168 - DNA, 55 bp, Artificial
  Synthetic oligonucleotide
ggtcctctgcccggttcacgtcgtctgatgcatcacgccgtgcatcaagccgcta

SEQ ID NO: 262169 - DNA, 54 bp, Artificial
  Synthetic oligonucleotide
cacagaccgatattataaagttgcaacccgattgcactcggtacaaacacgggg

SEQ ID NO: 262170 - DNA, 55 bp, Artificial
  Synthetic oligonucleotide
caatcgctcaggcttcggcgtcggaaagggctccacatcacgcaggagcttgttt

SEQ ID NO: 262171 - DNA, 54 bp, Artificial
  Synthetic oligonucleotide
taatatgaagcgtcctaggatggaacgtgaaggtggtcagagccacatttgtta

SEQ ID NO: 262172 - DNA, 54 bp, Artificial
  Synthetic oligonucleotide
ggagcgatcgccacaggcgatgggtcgacattgtctcaggacacccgacgcaca

SEQ ID NO: 262173 - DNA, 54 bp, Artificial
  Synthetic oligonucleotide
actcatggatcgaaaagcacgcattgtctcgaagtgtccggggcccaagaatag

SEQ ID NO: 262174 - DNA, 53 bp, Artificial
  Synthetic oligonucleotide
ggtctgagacgggtcacgacacccggttgattggagtacgaatggacgcgacc

SEQ ID NO: 262175 - DNA, 53 bp, Artificial
  Synthetic oligonucleotide
ccctgagaacagcgagggctgatcgaaagccctagactcacgaccctgcagga

SEQ ID NO: 262176 - DNA, 53 bp, Artificial
  Synthetic oligonucleotide
caaatgtggtgtgccccaacagccggccgtcacaatggcgtcattcgagacag

SEQ ID NO: 262177 - DNA, 53 bp, Artificial
  Synthetic oligonucleotide
gagtctcacgttcccgtacccgcactgacgcgtgcgtttccctagaccctctg

SEQ ID NO: 262178 - DNA, 52 bp, Artificial
  Synthetic oligonucleotide
cgactgatcactgttcagccgggccactggcgtctcagggcttgtagctggg

SEQ ID NO: 262179 - DNA, 52 bp, Artificial
  Synthetic oligonucleotide
tcgcagtcatctcgaacagtcgtttgcatactgagcacctccacgagcaaca

SEQ ID NO: 262180 - DNA, 51 bp, Artificial
  Synthetic oligonucleotide
tgatcgggaagaccttttgcaagttgtccacagaaagatgcggcccctact

SEQ ID NO: 262181 - DNA, 55 bp, Artificial
  Synthetic oligonucleotide
catccagcccgcctgaacgtgacgcattgcgcgtttcacgtgtcaaccggaccca

SEQ ID NO: 262182 - DNA, 50 bp, Artificial
  Synthetic oligonucleotide
ggggatattctcatcacagttaagggttccggcgttggaaaactcaatgt

SEQ ID NO: 262183 - DNA, 50 bp, Artificial
  Synthetic oligonucleotide
ccacccgtcagacacggacaaactccggtcggaactcactgtgcggaggg

SEQ ID NO: 262184 - DNA, 50 bp, Artificial
  Synthetic oligonucleotide
catggatacgtgaccgcgctgcgatgactgactggctcgtcgtgcgcaac

SEQ ID NO: 262185 - DNA, 50 bp, Artificial
  Synthetic oligonucleotide
cagcgtgcccctgctgccgtgagaactgctcgctcgatggcaaggaacga

SEQ ID NO: 262186 - DNA, 50 bp, Artificial
  Synthetic oligonucleotide
cacgccgtcagtcggactctgtcgcgcaccggggatgtaggacgtcgtag

SEQ ID NO: 262187 - DNA, 50 bp, Artificial
  Synthetic oligonucleotide
aactggcctgcaagccacgcacgcagaggtagggttgattcatggttggg

SEQ ID NO: 262188 - DNA, 50 bp, Artificial
  Synthetic oligonucleotide
aaggaccttgttcgtcaggcgggtgactgtatcaccagggacccgacgcg

SEQ ID NO: 262189 - DNA, 50 bp, Artificial
  Synthetic oligonucleotide
aaggccctctgtacgcaggctgggggagagccgaacatgcgtccacatgg

SEQ ID NO: 262190 - DNA, 50 bp, Artificial
  Synthetic oligonucleotide
aaggcgttttcccagggacaccgggtcgggtcacacctgtcacacccgtc

SEQ ID NO: 262191 - DNA, 50 bp, Artificial
  Synthetic oligonucleotide
aaggtgctgcctgactacccgagttggtgtcgctacctgccgatgcgtct

SEQ ID NO: 262192 - DNA, 55 bp, Artificial
  Synthetic oligonucleotide
cctagtgcacttttcaggggccgaccagacacctccgaacgttgcggagaggctg

SEQ ID NO: 262193 - DNA, 50 bp, Artificial
  Synthetic oligonucleotide
accagggacccgacgcgaaacttgcagcgacgcctgaaaagtgacggggt

SEQ ID NO: 262194 - DNA, 50 bp, Artificial
  Synthetic oligonucleotide
accgtgctcgtgtgccctgaccgactaggcagtgctcggccgcaccacag

SEQ ID NO: 262195 - DNA, 50 bp, Artificial
  Synthetic oligonucleotide
acctggggatcacgcacggccccggagggttgggacggtagttgcacgac

SEQ ID NO: 262196 - DNA, 50 bp, Artificial
  Synthetic oligonucleotide
acgaaacgtgctcatggtgcacctgacctcgtgtatgcccaggcgccagt

SEQ ID NO: 262197 - DNA, 50 bp, Artificial
  Synthetic oligonucleotide
acgcaggctgggggagagccgaacatgcgtccacatggaagcttgtggac

SEQ ID NO: 262198 - DNA, 50 bp, Artificial
  Synthetic oligonucleotide
acggcatgtgtgcaaccggcttgcgcgtgttcttccagacctgcttgcag

SEQ ID NO: 262199 - DNA, 50 bp, Artificial
  Synthetic oligonucleotide
actcgtgtggggtggttcgccaccgcttctcaacgcatccggtcccagcc

SEQ ID NO: 262200 - DNA, 50 bp, Artificial
  Synthetic oligonucleotide
agcaagcggtaagcggggtgacacggtgatgcgaagggttggcgcgctgt

SEQ ID NO: 262201 - DNA, 50 bp, Artificial
  Synthetic oligonucleotide
agggatccgatcaaggctccgtacacccctcccaccggtacaaccgcgcg

SEQ ID NO: 262202 - DNA, 50 bp, Artificial
  Synthetic oligonucleotide
aggggcatgcgtctggcttgctgtcgatgaatctgcccccgaagtcatcg

SEQ ID NO: 262203 - DNA, 55 bp, Artificial
  Synthetic oligonucleotide
cctgggtctgcgtgtcaggccttgtcttcagtcacttcgactgcagcgctcggat

SEQ ID NO: 262204 - DNA, 50 bp, Artificial
  Synthetic oligonucleotide
agggggttggcatctgggccgggcgaactctaaccgcagactcacgataa

SEQ ID NO: 262205 - DNA, 50 bp, Artificial
  Synthetic oligonucleotide
atgccccaatcgagggctgaacgtgaacgggtgcgggattgtttcgcatc

SEQ ID NO: 262206 - DNA, 50 bp, Artificial
  Synthetic oligonucleotide
atgcgggcacatccgacccctttgcagcgtgaatagtggacgcggcgtat

SEQ ID NO: 262207 - DNA, 50 bp, Artificial
  Synthetic oligonucleotide
atgctcgccccgccgtgtgaacgccgtgtcaagcacttggcacaaactgt

SEQ ID NO: 262208 - DNA, 50 bp, Artificial
  Synthetic oligonucleotide
attgcacctcagcgtgcccctgctgccgtgagaactgctcgctcgatggc

SEQ ID NO: 262209 - DNA, 50 bp, Artificial
  Synthetic oligonucleotide
attggggtgacagcgcggtttccacggactattccatcaggcagggcagc

SEQ ID NO: 262210 - DNA, 50 bp, Artificial
  Synthetic oligonucleotide
caacaactcggtccctggtcgggacggggacggcaattggggcttgttca

SEQ ID NO: 262211 - DNA, 50 bp, Artificial
  Synthetic oligonucleotide
caacccgattgcactcggtacaaacacgggggagaccgccaggtgaacgc

SEQ ID NO: 262212 - DNA, 50 bp, Artificial
  Synthetic oligonucleotide
caacgcacacggggacgtggtgagcggatgccgatcgacatgcactgacc

SEQ ID NO: 262213 - DNA, 50 bp, Artificial
  Synthetic oligonucleotide
cacacaccgatcctcgtcgaccccagcacgtctcccgcgttggtgcgccg

SEQ ID NO: 262214 - DNA, 55 bp, Artificial
  Synthetic oligonucleotide
agtcgcaaggccaccgggcgaggcgagtcatccacagcctcgacggaagcagctt

SEQ ID NO: 262215 - DNA, 50 bp, Artificial
  Synthetic oligonucleotide
cacaccgcccactcgtgagcctagcctccccagaatcgaacacgtccact

SEQ ID NO: 262216 - DNA, 50 bp, Artificial
  Synthetic oligonucleotide
cacctgacctcgtgtatgcccaggcgccagtatcaaccgttgtgcgagcc

SEQ ID NO: 262217 - DNA, 55 bp, Artificial
  Synthetic oligonucleotide
cgcccagagttatgcctactggcgcggtgccgcactcgttcagtactggcgatct

SEQ ID NO: 262218 - DNA, 55 bp, Artificial
  Synthetic oligonucleotide
cgcgcacgcgtatcccaaggaaactcacatgtccgccgtgaccagtgtcaaggat

SEQ ID NO: 262219 - DNA, 55 bp, Artificial
  Synthetic oligonucleotide
cggcctgtcaagtgacaacgctgtggagaagattcgtacagccgtgggcttatcc

SEQ ID NO: 262220 - DNA, 53 bp, Artificial
  Synthetic oligonucleotide
ccaccctaactccttcggagtggcttcgcctacgggtttctcaccgaatgtag

SEQ ID NO: 262221 - DNA, 55 bp, Artificial
  Synthetic oligonucleotide
ctcgtagtagacgttctcgtccttcggaacaatctgtggaacgacctgtagaacg

SEQ ID NO: 262222 - DNA, 50 bp, Artificial
  Synthetic oligonucleotide
catcgtaccgcccaagcaaagctgaccgttgggggagaacgcttttggcc

SEQ ID NO: 262223 - DNA, 50 bp, Artificial
  Synthetic oligonucleotide
actcgtgccatgccccacaaagaggcttgagccagtgctaccggagcagg

SEQ ID NO: 262224 - DNA, 50 bp, Artificial
  Synthetic oligonucleotide
agacgcccacccgtgctgcgtgtctatatccgcaaccccatccgtgacac

SEQ ID NO: 262225 - DNA, 50 bp, Artificial
  Synthetic oligonucleotide
agagacttcccaatgcggacttgacccccgctagcactgctagaccggca

SEQ ID NO: 262226 - DNA, 50 bp, Artificial
  Synthetic oligonucleotide
caacgggcagttgcccctgtgcgagactgtcaagggattgtggcgttgtt

SEQ ID NO: 262227 - DNA, 50 bp, Artificial
  Synthetic oligonucleotide
attagcccccggatcagagccacctgtgcgagccgcaacaatgatctccc

SEQ ID NO: 262228 - DNA, 50 bp, Artificial
  Synthetic oligonucleotide
atggtgtgatggtcgctcggggcgatttaggggtggaactcccggctgaa

SEQ ID NO: 262229 - DNA, 55 bp, Artificial
  Synthetic oligonucleotide
gaaactgagtgtgactacgaaatgatccgacaatttgacgcaccagggaagccga

SEQ ID NO: 262230 - DNA, 55 bp, Artificial
  Synthetic oligonucleotide
cagggacgttggctatcgagtcctattctaaatcgaggtgcgatcggttggacag

SEQ ID NO: 262231 - DNA, 55 bp, Artificial
  Synthetic oligonucleotide
gcgattatggccgccggagggtttaatcagtccagagcgaatcgaaagactgttg

SEQ ID NO: 262232 - DNA, 55 bp, Artificial
  Synthetic oligonucleotide
gctcatactctatcgtgcgggcataggggctagtgtcaccgtagatcagtttcct

SEQ ID NO: 262233 - DNA, 54 bp, Artificial
  Synthetic oligonucleotide
ggcagtaacgaacttacagaactctcccacaacgcccaccgctttctagggtgg

SEQ ID NO: 262234 - DNA, 55 bp, Artificial
  Synthetic oligonucleotide
ggcattgctgtataggtcactgacccgggtatgcacccgcacaatcgtttgagcc

SEQ ID NO: 262235 - DNA, 55 bp, Artificial
  Synthetic oligonucleotide
aatgaggtaccagcctccttgggtcgtagtattaacgaggtgccagcttctttgg

SEQ ID NO: 262236 - DNA, 55 bp, Artificial
  Synthetic oligonucleotide
ggctcagcagactagcccgaatgtcttaaccctgcgcttgcagcccaatgaggga

SEQ ID NO: 262237 - DNA, 55 bp, Artificial
  Synthetic oligonucleotide
gggcaccactggtttcccgacgctctaaatctttcagtcgctccaccctggtctt

SEQ ID NO: 262238 - DNA, 55 bp, Artificial
  Synthetic oligonucleotide
ccaggtggaccgattttatcaactgagacatttgctcaaggtgacttcacagtgg

SEQ ID NO: 262239 - DNA, 55 bp, Artificial
  Synthetic oligonucleotide
ggggaatatagtgataacacgtcccgggatgctaagctggcacgtaaggtcaagg

SEQ ID NO: 262240 - DNA, 55 bp, Artificial
  Synthetic oligonucleotide
gtagtgatgcgggtagtgtttatttagtagactccaccgacaatactccgaagtt

SEQ ID NO: 262241 - DNA, 55 bp, Artificial
  Synthetic oligonucleotide
gtccgcaacagtaacaatagccaattgtactctcactcataacaaacgggaaggg

SEQ ID NO: 262242 - DNA, 55 bp, Artificial
  Synthetic oligonucleotide
gtggtgtgggcgctttgaaactattgcattgtcgccatcttaaggagtatcgggg

SEQ ID NO: 262243 - DNA, 55 bp, Artificial
  Synthetic oligonucleotide
gttagggcgtgagtctgtgtataacagatagcgataacgtctccacacagccgag

SEQ ID NO: 262244 - DNA, 55 bp, Artificial
  Synthetic oligonucleotide
tcgctcttcaagtagaggtatcagcctcccaatggcgcgagtataagtggagcgg

SEQ ID NO: 262245 - DNA, 55 bp, Artificial
  Synthetic oligonucleotide
caatcgtggagggctattgctagcaggatcttcctcgaccgtaggtactgccatg

SEQ ID NO: 262246 - DNA, 55 bp, Artificial
  Synthetic oligonucleotide
tgctaagcgccaacgggataccctgattttacatcgagctttaccccaagtagag

SEQ ID NO: 262247 - DNA, 55 bp, Artificial
  Synthetic oligonucleotide
atgattcccagagctatctatcgacatggctttaatttgtcgcatcagactcgcc

SEQ ID NO: 262248 - DNA, 54 bp, Artificial
  Synthetic oligonucleotide
ctatatctgtggtgactttgcgatccaccccttacctacttatgcctaccgact

SEQ ID NO: 262249 - DNA, 55 bp, Artificial
  Synthetic oligonucleotide
cccctaggtcataagctcccaaatttcctgctaggtctggtgacaaccaggaggg

SEQ ID NO: 262250 - DNA, 54 bp, Artificial
  Synthetic oligonucleotide
gaacccaagtttaccctgactctctacgacaactcctcccgcaactgtggtcaa

SEQ ID NO: 262251 - DNA, 54 bp, Artificial
  Synthetic oligonucleotide
tgaagccgacttgtggggcgctaacttacagtctgcaaacctgagtgaagccaa

SEQ ID NO: 262252 - DNA, 54 bp, Artificial
  Synthetic oligonucleotide
ttgatcaatcaggctctgaatatccctaaacggaatagtttctacggtttgagt

SEQ ID NO: 262253 - DNA, 52 bp, Artificial
  Synthetic oligonucleotide
aaccgttttccgtgttaggtttgctcgccattggagtttggggagttcagac

SEQ ID NO: 262254 - DNA, 53 bp, Artificial
  Synthetic oligonucleotide
ccattggtgcggtattagaatacgatatctccacccgttctcgtcagagtaga

SEQ ID NO: 262255 - DNA, 52 bp, Artificial
  Synthetic oligonucleotide
tgcctgttgaccgggatatagagcattaattaagcgtgaacttacagggact

SEQ ID NO: 262256 - DNA, 52 bp, Artificial
  Synthetic oligonucleotide
tatcctcggctaatttgtaggggttattcgtaacggtttcaattgcttcgtg

SEQ ID NO: 262257 - DNA, 52 bp, Artificial
  Synthetic oligonucleotide
tatagttatcttcagcacggttgaaggttagaccatcatagaaaccccgctg

SEQ ID NO: 262258 - DNA, 52 bp, Artificial
  Synthetic oligonucleotide
gggagtggatttgagcaaatttgtctgatggcaacggagttgggagtgactc

SEQ ID NO: 262259 - DNA, 51 bp, Artificial
  Synthetic oligonucleotide
ggctggtggttgggtttcgtggctcaccgcttctagttcctgacagttagg

SEQ ID NO: 262260 - DNA, 55 bp, Artificial
  Synthetic oligonucleotide
ccggttcatccaccaaattagcgatcgcaccgactactgccatccgcacatcttc

SEQ ID NO: 262261 - DNA, 50 bp, Artificial
  Synthetic oligonucleotide
accccgccttagcccaaatgcttcgcctgagccaacccggacaactgttc

SEQ ID NO: 262262 - DNA, 50 bp, Artificial
  Synthetic oligonucleotide
acccctcaccaagcctcacctctgctccaatagggaaccggcagtggcat

SEQ ID NO: 262263 - DNA, 50 bp, Artificial
  Synthetic oligonucleotide
ctccacccccgcaactcactgaagcgatgggaatgcctgtacccccggca

SEQ ID NO: 262264 - DNA, 50 bp, Artificial
  Synthetic oligonucleotide
acccgggcgttccattgttggtccagcctgtgtcaccgcctacactttgg

SEQ ID NO: 262265 - DNA, 50 bp, Artificial
  Synthetic oligonucleotide
cgtggccccttacccaagcgctaactgcctgccgagaaagcttacgtcct

SEQ ID NO: 262266 - DNA, 50 bp, Artificial
  Synthetic oligonucleotide
cgggttggatcgagtggttaggaactcgacgcggtttccgacgcatgggg

SEQ ID NO: 262267 - DNA, 50 bp, Artificial
  Synthetic oligonucleotide
cgggtgcggctgagacagaggtactggccctaacaatcctccggtgcggg

SEQ ID NO: 262268 - DNA, 50 bp, Artificial
  Synthetic oligonucleotide
cggccaccaactagcacccgccatccgagtcacaacggtacgagcgatag

SEQ ID NO: 262269 - DNA, 50 bp, Artificial
  Synthetic oligonucleotide
acctcatgggtaacgctactcaccgctaaaccccctgctgtgcgccgacg

SEQ ID NO: 262270 - DNA, 50 bp, Artificial
  Synthetic oligonucleotide
acctccccgccacgtaacgccagtcgggttctgaggggctacacaactct

SEQ ID NO: 262271 - DNA, 55 bp, Artificial
  Synthetic oligonucleotide
cgacgaattatcaaaatgctacaggtcagtcattaaatgcgacaaaagtgggttc

SEQ ID NO: 262272 - DNA, 50 bp, Artificial
  Synthetic oligonucleotide
cgctgtacctgtgtcgcaactgcggagcgcactatctgcggtttgtggga

SEQ ID NO: 262273 - DNA, 50 bp, Artificial
  Synthetic oligonucleotide
cgctcggggcgatttaggggtggaactcccggctgaagatgttccgatct

SEQ ID NO: 262274 - DNA, 50 bp, Artificial
  Synthetic oligonucleotide
cgcggtttccgacgcatggggttaggacgggcgatgttatttgcgggaat

SEQ ID NO: 262275 - DNA, 50 bp, Artificial
  Synthetic oligonucleotide
cgagttccgcccccttctgcaaccgtttgacgcaacgcctgggggttagt

SEQ ID NO: 262276 - DNA, 50 bp, Artificial
  Synthetic oligonucleotide
accattcgccctgaggcacttagctttgttaggtccggcacaaggggcga

SEQ ID NO: 262277 - DNA, 50 bp, Artificial
  Synthetic oligonucleotide
gacgcccagtccgtccaaacccacacaaaatgtagtgtttcgtcaaacta

SEQ ID NO: 262278 - DNA, 50 bp, Artificial
  Synthetic oligonucleotide
accaggcatcgtacatggcagtacccaagatgccataggcccgggaggct

SEQ ID NO: 262279 - DNA, 50 bp, Artificial
  Synthetic oligonucleotide
acatgggggagcgggagtgtggggaaccttggcggtaggattgttcggtc

SEQ ID NO: 262280 - DNA, 50 bp, Artificial
  Synthetic oligonucleotide
aattcgccacgggtcgcacctgtggaatgggcatcttgtgtggaactggc

SEQ ID NO: 262281 - DNA, 50 bp, Artificial
  Synthetic oligonucleotide
aatggcgatagctggggttggcgagaagcccacacctacccccgatcccc

SEQ ID NO: 262282 - DNA, 55 bp, Artificial
  Synthetic oligonucleotide
acgattaattgcccgtcaaaagatcgaaaatggcggtaattatcctgagactatt

SEQ ID NO: 262283 - DNA, 50 bp, Artificial
  Synthetic oligonucleotide
aagtagccgccccattggcacctcaagtagcgtggccaaaggccaatagc

SEQ ID NO: 262284 - DNA, 50 bp, Artificial
  Synthetic oligonucleotide
aaggttgctgcgtgggtcacatgcaagcaccgctgtttgccccgtgagaa

SEQ ID NO: 262285 - DNA, 50 bp, Artificial
  Synthetic oligonucleotide
aagctgttcggtgtagcgtgcgccattcgcgtagcgtagcccaaaggcca

SEQ ID NO: 262286 - DNA, 50 bp, Artificial
  Synthetic oligonucleotide
aacccggcattgcggctgggacagggtcgaggtaggaacctatcggagaa

SEQ ID NO: 262287 - DNA, 50 bp, Artificial
  Synthetic oligonucleotide
aaccccgccgacgagaccttgtttgatccagccctgcgttgtgccttgac

SEQ ID NO: 262288 - DNA, 50 bp, Artificial
  Synthetic oligonucleotide
aaccccataacttcagtgcgtcaaggtgcgctgcctttcggcgactgggt

SEQ ID NO: 262289 - DNA, 50 bp, Artificial
  Synthetic oligonucleotide
aacccagttgcgccaagaccagtggttaccccgactagtgacagcgctgg

SEQ ID NO: 262290 - DNA, 50 bp, Artificial
  Synthetic oligonucleotide
aaatcgccccaggggttcctgaatcaaggcacgtccgagagagggggtga

SEQ ID NO: 262291 - DNA, 50 bp, Artificial
  Synthetic oligonucleotide
aaagccttggagcgggcattagagagggctgtagccgctcaggagttgcc

SEQ ID NO: 262292 - DNA, 50 bp, Artificial
  Synthetic oligonucleotide
aaaccagccctgatccaacgactgaactcccgactgtaccgccgcctgac

SEQ ID NO: 262293 - DNA, 55 bp, Artificial
  Synthetic oligonucleotide
cggagatggtggtttgtagtcgaattaaagactatcaagccctctcaaatcgtct

SEQ ID NO: 262294 - DNA, 50 bp, Artificial
  Synthetic oligonucleotide
agagagcgcggcactaaaatgggggcgcgacgaccagggactaacactgc

SEQ ID NO: 262295 - DNA, 50 bp, Artificial
  Synthetic oligonucleotide
agttcaggttggggacgttcaacctcgccgcaagtcgccccctattgtgc

SEQ ID NO: 262296 - DNA, 50 bp, Artificial
  Synthetic oligonucleotide
aggcgctcataacgacattgcccgtcgggaagttgctcatgcggtttggc

SEQ ID NO: 262297 - DNA, 50 bp, Artificial
  Synthetic oligonucleotide
aggcccttgggaagacgcaatgttagcacctaggcgttggtcacgggcta

SEQ ID NO: 262298 - DNA, 50 bp, Artificial
  Synthetic oligonucleotide
aggccacgctacgcgaacaagctaccctacaagggaagcctcaggcgaac

SEQ ID NO: 262299 - DNA, 50 bp, Artificial
  Synthetic oligonucleotide
aggcatagttgcgcccttgaggttaatgccctggcgcttagccctcctga

SEQ ID NO: 262300 - DNA, 50 bp, Artificial
  Synthetic oligonucleotide
aggcagtttacctgcccattggaacgcgcgcctcccctgaacttttgcga

SEQ ID NO: 262301 - DNA, 50 bp, Artificial
  Synthetic oligonucleotide
aggcaaaaagctagccatgaccctagaggcagcccactctcgtccccgcg

SEQ ID NO: 262302 - DNA, 50 bp, Artificial
  Synthetic oligonucleotide
agctcttcgcatcagcagggctgtcgaaccgagcgaaaaccactggtggc

SEQ ID NO: 262303 - DNA, 50 bp, Artificial
  Synthetic oligonucleotide
agcgtcccactgcctcacgccacaccgcaccgatcaaaccagggggtttt

SEQ ID NO: 262304 - DNA, 55 bp, Artificial
  Synthetic oligonucleotide
cggcaattgggattgatttgggtaacgatggtgtaacgataaatgacgcgggaga

SEQ ID NO: 262305 - DNA, 50 bp, Artificial
  Synthetic oligonucleotide
agcggtgcatccaactagcacggcaagccctgggacgtactacacccaac

SEQ ID NO: 262306 - DNA, 50 bp, Artificial
  Synthetic oligonucleotide
agcgggcattagagagggctgtagccgctcaggagttgccaagggaggct

SEQ ID NO: 262307 - DNA, 50 bp, Artificial
  Synthetic oligonucleotide
agccttagtcctaaacgctggggatgtaacctggcccccacccaagcggc

SEQ ID NO: 262308 - DNA, 50 bp, Artificial
  Synthetic oligonucleotide
agcccctcggagattcgccccctccaaaccagcacgattcagttgagctc

SEQ ID NO: 262309 - DNA, 50 bp, Artificial
  Synthetic oligonucleotide
agcccactctcgtccccgcgtcctccattccgcagacaccaccggtcgag

SEQ ID NO: 262310 - DNA, 50 bp, Artificial
  Synthetic oligonucleotide
agcatttgtgttcctccggctagaagcacccccaccgtgcgactcgcagc

SEQ ID NO: 262311 - DNA, 50 bp, Artificial
  Synthetic oligonucleotide
agcagatgggactttccgcattaacggacgaagtgcccgtcccaacgcca

SEQ ID NO: 262312 - DNA, 50 bp, Artificial
  Synthetic oligonucleotide
agattggggatcaaccgcagcccccgcaaataaatctgtcgccccatggg

SEQ ID NO: 262313 - DNA, 50 bp, Artificial
  Synthetic oligonucleotide
acgccacaccgcaccgatcaaaccagggggttttcccgaagcggtaacca

SEQ ID NO: 262314 - DNA, 50 bp, Artificial
  Synthetic oligonucleotide
cgaattgttcgcaatggcacccttgaccccacaccgatctccggggttcc

SEQ ID NO: 262315 - DNA, 55 bp, Artificial
  Synthetic oligonucleotide
cataattccggattcaattgccaaactctcattatttgcccaccctacgctactg

SEQ ID NO: 262316 - DNA, 50 bp, Artificial
  Synthetic oligonucleotide
ccttccgcttccgccctcgttgcagatttagccccagaatcactccgggg

SEQ ID NO: 262317 - DNA, 50 bp, Artificial
  Synthetic oligonucleotide
ccttagttcctccgaccttgctcccacctggggtttaccgagccaacgcc

SEQ ID NO: 262318 - DNA, 50 bp, Artificial
  Synthetic oligonucleotide
cctcctcatcgtttccccgtgtacctcctccggctgaactttgcgcccct

SEQ ID NO: 262319 - DNA, 50 bp, Artificial
  Synthetic oligonucleotide
ccgtcgcttccgggggcaaattgtacgccgctaaatccctgaacgggttg

SEQ ID NO: 262320 - DNA, 50 bp, Artificial
  Synthetic oligonucleotide
acgccatccctcccaagccgaccattcgccacaggggagaaggatcacta

SEQ ID NO: 262321 - DNA, 50 bp, Artificial
  Synthetic oligonucleotide
acgctactcaccgctaaaccccctgctgtgcgccgacgttgcgatcgcaa

SEQ ID NO: 262322 - DNA, 50 bp, Artificial
  Synthetic oligonucleotide
cccactccgcaggtgcagcggtaaaagcacatcccccaggtttgcgacta

SEQ ID NO: 262323 - DNA, 50 bp, Artificial
  Synthetic oligonucleotide
ccagtcgccgaaaggcagcgcaccttgacgcactgaagttatggggttcc

SEQ ID NO: 262324 - DNA, 50 bp, Artificial
  Synthetic oligonucleotide
acgggtcagttgtgggttctcggttgttcgcgtagcctggccgaaaggcc

SEQ ID NO: 262325 - DNA, 50 bp, Artificial
  Synthetic oligonucleotide
acgtccacgccttgatgaggcagcccgatcgcagacgcgactcggttcgc

SEQ ID NO: 262326 - DNA, 50 bp, Artificial
  Synthetic oligonucleotide
acgaattttactgggttggaaagtccgtttcacggttcccctcctctata

SEQ ID NO: 262327 - DNA, 55 bp, Artificial
  Synthetic oligonucleotide
gacagcggatctcaatcgggccaggcgctttacgctccattatgagcttacgctc

SEQ ID NO: 262328 - DNA, 55 bp, Artificial
  Synthetic oligonucleotide
gaggaagtggcggtttcatatgcagatccggtatctatggtgagtgtcggtcgcc

SEQ ID NO: 262329 - DNA, 55 bp, Artificial
  Synthetic oligonucleotide
gatgacccctggttcggccaatctggcggtatttgaccactttcgccaccatctg

SEQ ID NO: 262330 - DNA, 55 bp, Artificial
  Synthetic oligonucleotide
gatgtttggctttgtcgggaagatcaagtgaccttggcccgtttcagttcatggc

SEQ ID NO: 262331 - DNA, 55 bp, Artificial
  Synthetic oligonucleotide
gcgagtgggccttttcacgggacatctgctcgggattataacggtaacgtagcag

SEQ ID NO: 262332 - DNA, 55 bp, Artificial
  Synthetic oligonucleotide
gcgttggtggaggattgcctcttggcagagacgcttccccagggagggactcgtt

SEQ ID NO: 262333 - DNA, 55 bp, Artificial
  Synthetic oligonucleotide
gctacggtatagtggtacacataggcgcattgtggtatcacacccggcgcacggc

SEQ ID NO: 262334 - DNA, 54 bp, Artificial
  Synthetic oligonucleotide
ggaggcctccccaacgggataggcacggataccagagggaccacccagttgaaa

SEQ ID NO: 262335 - DNA, 55 bp, Artificial
  Synthetic oligonucleotide
gggtatgtttgatgtgtgccatatggggcatgtacaggtaagcggccctcaggcc

SEQ ID NO: 262336 - DNA, 55 bp, Artificial
  Synthetic oligonucleotide
ggtacgtagggcgctggtcacaacattggtcaaggcgcggataacctggtcatcc

SEQ ID NO: 262337 - DNA, 55 bp, Artificial
  Synthetic oligonucleotide
cacgcctaccttcattttgctcgcacccttttgccgtaacaatggcctctacctt

SEQ ID NO: 262338 - DNA, 55 bp, Artificial
  Synthetic oligonucleotide
tacagaggggtcggcggtcccgttatgcacaggctggcccaaacagatacggtgg

SEQ ID NO: 262339 - DNA, 55 bp, Artificial
  Synthetic oligonucleotide
ggtggagcttggcactggctatcgcgctcaatctgttggttccacaggttccgcc

SEQ ID NO: 262340 - DNA, 55 bp, Artificial
  Synthetic oligonucleotide
gtctacagctagccataggatatgcccatcccaaacaccatccgaaacactacca

SEQ ID NO: 262341 - DNA, 53 bp, Artificial
  Synthetic oligonucleotide
gcgtcatgctctcaggaacattggtaatgaccaccgagctaatggattcagaa

SEQ ID NO: 262342 - DNA, 53 bp, Artificial
  Synthetic oligonucleotide
aaagagaccgaacgttccatcaccaacatgttagaggggcgggataaagatct

SEQ ID NO: 262343 - DNA, 53 bp, Artificial
  Synthetic oligonucleotide
acttcggccagtctggtacggagcctatcatggactcaaacgggcgatctaaa

SEQ ID NO: 262344 - DNA, 52 bp, Artificial
  Synthetic oligonucleotide
aagggtaacgcccgttaccgattcagacccatccgtgtcttgcagagcaaag

SEQ ID NO: 262345 - DNA, 52 bp, Artificial
  Synthetic oligonucleotide
accgctaccccggcatagcctaacaactctatggcgatttcctggtttattg

SEQ ID NO: 262346 - DNA, 52 bp, Artificial
  Synthetic oligonucleotide
ccccgccctcgaccctcatttagacccatggagtatcaccgcaaccttatga

SEQ ID NO: 262347 - DNA, 52 bp, Artificial
  Synthetic oligonucleotide
ctaaatcagtgatcattgtcatcaagagcgcgtccacgtagcactcttctac

SEQ ID NO: 262348 - DNA, 55 bp, Artificial
  Synthetic oligonucleotide
cccataggggttcaatgtgcgtactctataatctccttgggcaatgccccttgag

SEQ ID NO: 262349 - DNA, 52 bp, Artificial
  Synthetic oligonucleotide
gcgctttctctaagttcgccttagccccatcaagatctcctatatctttacg

SEQ ID NO: 262350 - DNA, 50 bp, Artificial
  Synthetic oligonucleotide
acaacctgcttgccacgacccatcaatgccgcaatctccgcacaacgggc

SEQ ID NO: 262351 - DNA, 50 bp, Artificial
  Synthetic oligonucleotide
aatgcctcctgggccgccggtattacagtcggtggtagcggaagtaacgg

SEQ ID NO: 262352 - DNA, 50 bp, Artificial
  Synthetic oligonucleotide
aatcgggtgttgcatcgttcaccctaccggctaacatggcggggtcaggg

SEQ ID NO: 262353 - DNA, 50 bp, Artificial
  Synthetic oligonucleotide
aatcccataacagggcaacccctagctccccctaagtgcccagcggtgca

SEQ ID NO: 262354 - DNA, 50 bp, Artificial
  Synthetic oligonucleotide
aaaaccggttgtcaccccatgcccctcggcacgatggctccaggaccaaa

SEQ ID NO: 262355 - DNA, 50 bp, Artificial
  Synthetic oligonucleotide
aaacagggtccgctcaccagagagacggggcgcctgtttggcccaacgac

SEQ ID NO: 262356 - DNA, 50 bp, Artificial
  Synthetic oligonucleotide
aaaccagcaagcgccgtgggtcaggaccgtcagagcccctttacacgtaa

SEQ ID NO: 262357 - DNA, 50 bp, Artificial
  Synthetic oligonucleotide
aaagcgccgcacagtcccaccgggatccgtcgcttggccccgatactctt

SEQ ID NO: 262358 - DNA, 50 bp, Artificial
  Synthetic oligonucleotide
aaagcgggggtttcccgcacctacaagggacatgacggattcgcgcccat

SEQ ID NO: 262359 - DNA, 55 bp, Artificial
  Synthetic oligonucleotide
cgcactacattttactgcggctgtagctataccaagcataaggaagttcggtcgg

SEQ ID NO: 262360 - DNA, 50 bp, Artificial
  Synthetic oligonucleotide
aaagtgcgtctactgcttgggttatggggatgcatggtgccgtgtggggc

SEQ ID NO: 262361 - DNA, 50 bp, Artificial
  Synthetic oligonucleotide
aacaccaccacactaacaaccttgctccacgccccggtaggatccgcact

SEQ ID NO: 262362 - DNA, 50 bp, Artificial
  Synthetic oligonucleotide
aaccataggcaggcggattggagcgttcggctggttgcgtgtaacgggga

SEQ ID NO: 262363 - DNA, 50 bp, Artificial
  Synthetic oligonucleotide
aaccatgttgcacattacctcaacggcacatcgtccccaggggccgacgc

SEQ ID NO: 262364 - DNA, 50 bp, Artificial
  Synthetic oligonucleotide
aaccccactggcggccaaatagagtgctaccggtgaacccaagccaccgg

SEQ ID NO: 262365 - DNA, 50 bp, Artificial
  Synthetic oligonucleotide
aaccccagcgatgagttgcccccgttcacagagacccgttagccagacac

SEQ ID NO: 262366 - DNA, 50 bp, Artificial
  Synthetic oligonucleotide
aaccggggttggacaggtgggtatgctacgcgtaatgccgacactggggc

SEQ ID NO: 262367 - DNA, 50 bp, Artificial
  Synthetic oligonucleotide
aaccgtcgctgccgcacatgatagagctgcgcacgaatgccgggaggtcc

SEQ ID NO: 262368 - DNA, 50 bp, Artificial
  Synthetic oligonucleotide
aacgagcctccaacccccgcccaacctgaaccttccacgaagcggtaaga

SEQ ID NO: 262369 - DNA, 50 bp, Artificial
  Synthetic oligonucleotide
aacgatcctccgtgtcggttcgccccttccaacgccgcacggtatccgtt

SEQ ID NO: 262370 - DNA, 55 bp, Artificial
  Synthetic oligonucleotide
cgcagcttgaccaccggtgcgtaagcgatcaaaacctgcttaccccgatagtcgg

SEQ ID NO: 262371 - DNA, 50 bp, Artificial
  Synthetic oligonucleotide
aagacggggatgccccggtggtagctctcgacaattagccccaccttgca

SEQ ID NO: 262372 - DNA, 50 bp, Artificial
  Synthetic oligonucleotide
aagtgccagcggcgcagacattgtgctcctgggccataagcatctggtca

SEQ ID NO: 262373 - DNA, 50 bp, Artificial
  Synthetic oligonucleotide
aagtcaatgcctgtcggtatggcggtcacatgctccctgggcagcccatt

SEQ ID NO: 262374 - DNA, 50 bp, Artificial
  Synthetic oligonucleotide
aaggtgcctaccagggcggactcagcacaccacaaaggggcgacacatgg

SEQ ID NO: 262375 - DNA, 49 bp, Artificial
  Synthetic oligonucleotide
aaggggtgcgctttaaaccggcggataaccggagtcgggtagggggatg

SEQ ID NO: 262376 - DNA, 50 bp, Artificial
  Synthetic oligonucleotide
aaggggctctgacggtcctgacccacggcgcttgctggtttacatagccg

SEQ ID NO: 262377 - DNA, 50 bp, Artificial
  Synthetic oligonucleotide
aagggcagatccgggccagcctgactcgcttagaagaggagccttggcga

SEQ ID NO: 262378 - DNA, 50 bp, Artificial
  Synthetic oligonucleotide
aaggcgggggtaccgtattgtttgttgggaccaagcgccaagccgttgaa

SEQ ID NO: 262379 - DNA, 50 bp, Artificial
  Synthetic oligonucleotide
aaggcaccggccataaaaaccccgccttacatgccttgcctatggcggct

SEQ ID NO: 262380 - DNA, 50 bp, Artificial
  Synthetic oligonucleotide
aaggatcgtgctccgcgattgttaccgggctgaccacgcgaccaatgagg

SEQ ID NO: 262381 - DNA, 55 bp, Artificial
  Synthetic oligonucleotide
cgggcatcccgtaacaaaggttgggtgacactcagactgtaggaggcacgatggt

SEQ ID NO: 262382 - DNA, 50 bp, Artificial
  Synthetic oligonucleotide
aagctgactccgcatcccctatggtggtcggctcaagcataacgcctgga

SEQ ID NO: 262383 - DNA, 50 bp, Artificial
  Synthetic oligonucleotide
aagctctcgcgtgatgggcaacctttgccccgtcgtgttggcccaagttt

SEQ ID NO: 262384 - DNA, 50 bp, Artificial
  Synthetic oligonucleotide
aagcgtcacactgagggctgtcacccacgccaagcgtcgagcggttgcca

SEQ ID NO: 262385 - DNA, 50 bp, Artificial
  Synthetic oligonucleotide
aagcgtagtgggtggtttcgggccgataggggcgttcagccgaaaaagca

SEQ ID NO: 262386 - DNA, 50 bp, Artificial
  Synthetic oligonucleotide
aagcggtaagggactgcggccaaacaaattcacccagcgcccatggcgtg

SEQ ID NO: 262387 - DNA, 50 bp, Artificial
  Synthetic oligonucleotide
aagcatgcacgctaggtgggcacgacacgctgtgggcatgggcaacccaa

SEQ ID NO: 262388 - DNA, 50 bp, Artificial
  Synthetic oligonucleotide
aagcatccacacgactcatctgacccgccccaacacccaacgtgcgctgt

SEQ ID NO: 262389 - DNA, 50 bp, Artificial
  Synthetic oligonucleotide
aagatctaccggttgccctagcgcgaccgccccagtggcaagattaagcg

SEQ ID NO: 262390 - DNA, 55 bp, Artificial
  Synthetic oligonucleotide
cggtcaagaaccccacattatataaccttatccctccataatgacgaaccgctgc

SEQ ID NO: 262391 - DNA, 54 bp, Artificial
  Synthetic oligonucleotide
ctacgcaacaggggaaaatggccctcacccgcaaaacgaggctcgcgtttatag

SEQ ID NO: 262392 - DNA, 55 bp, Artificial
  Synthetic oligonucleotide
ctcctgggcacggtaggagagggtcgccgaaaagagcatagaaagccgctcacta

SEQ ID NO: 262393 - DNA, 58 bp, Artificial
  Synthetic oligonucleotide
acaaaacgccgatgggccatgcgtaccgtttcatatcgcgatatcgcgtctccccgga

SEQ ID NO: 262394 - DNA, 55 bp, Artificial
  Synthetic oligonucleotide
ctggtccccagggaggagcggcaacagcgagccagtgctacggtcctatgtcgaa

SEQ ID NO: 262395 - DNA, 55 bp, Artificial
  Synthetic oligonucleotide
tcacggcggtgcgataatggatacagtgcacgtattgtgacgtgttatagtcgac

SEQ ID NO: 262396 - DNA, 55 bp, Artificial
  Synthetic oligonucleotide
gcaagacccacggagatgcagattcctgcatagttgagcccggtaaggtcgagcg

SEQ ID NO: 262397 - DNA, 55 bp, Artificial
  Synthetic oligonucleotide
taggctgactgcaggaacggaccggcacggaagcgagaaagcatgggcaagcgac

SEQ ID NO: 262398 - DNA, 55 bp, Artificial
  Synthetic oligonucleotide
gcgaccgactccgttgaactgaagaagtccggtcaagatgtatggtattccatac

SEQ ID NO: 262399 - DNA, 55 bp, Artificial
  Synthetic oligonucleotide
gcgagtcgacgtgcaagctactgttttcctctttggggttggcctgtgctagaga

SEQ ID NO: 262400 - DNA, 55 bp, Artificial
  Synthetic oligonucleotide
gcggcgggatgtgacagagccaaatcatccccggatatccggacggcattgtggg

SEQ ID NO: 262401 - DNA, 55 bp, Artificial
  Synthetic oligonucleotide
ggcaccaacttgactggcggccgatcgttctcgggtgagtttgtattcatcacgc

SEQ ID NO: 262402 - DNA, 55 bp, Artificial
  Synthetic oligonucleotide
tacagcccggttgtccacacgggcgagtggaatgcttgggttgccggcgggcttt

SEQ ID NO: 262403 - DNA, 55 bp, Artificial
  Synthetic oligonucleotide
ggctcttgcgcccctgcatggagttcctttaggacctcaaagtgcgccaggtact

SEQ ID NO: 262404 - DNA, 60 bp, Artificial
  Synthetic oligonucleotide
tgtgcagcagcgcggtgtggtagtggtcgatctggttttcgtagacctgaagccagttgc

SEQ ID NO: 262405 - DNA, 55 bp, Artificial
  Synthetic oligonucleotide
gggcacaggggtgagctggactttgcacacttgctgtacttcgtcgttcctcgtg

SEQ ID NO: 262406 - DNA, 55 bp, Artificial
  Synthetic oligonucleotide
gttgggaacgattcggactggctcccgaacatggtcagagacctcgaactctcgg

SEQ ID NO: 262407 - DNA, 55 bp, Artificial
  Synthetic oligonucleotide
ggtccaatgtcacatcgaatggccgcaacgaatcgtccttgagtccaattacggg

SEQ ID NO: 262408 - DNA, 55 bp, Artificial
  Synthetic oligonucleotide
gtagcaacatcccgatgatgaccacggttgtgatcgatcatgtattggccgtagg

SEQ ID NO: 262409 - DNA, 55 bp, Artificial
  Synthetic oligonucleotide
gtgcgtacagtcgatcattcaggtgggtatcaagcgggtagtcttcttggacaag

SEQ ID NO: 262410 - DNA, 55 bp, Artificial
  Synthetic oligonucleotide
ttcccttcgtggtgagggctacgacagtcgtgaagttccatcgtgacgcgcattg

SEQ ID NO: 262411 - DNA, 55 bp, Artificial
  Synthetic oligonucleotide
tgttgagtccctgcactcagcgtgctgaggctcggtggtagcgaagcgatcccca

SEQ ID NO: 262412 - DNA, 55 bp, Artificial
  Synthetic oligonucleotide
tgcgctcgtacatccgagccgactacatccccgtcgaagtgacggactcgaggtg

SEQ ID NO: 262413 - DNA, 55 bp, Artificial
  Synthetic oligonucleotide
acgcctatgcccacgaccggtatcggaaagtctttcatgaggtgcttccgtgaaa

SEQ ID NO: 262414 - DNA, 55 bp, Artificial
  Synthetic oligonucleotide
acggactgcgatgctgatgtccattaccgtacgcgtgaagactagacactgccgg

SEQ ID NO: 262415 - DNA, 59 bp, Artificial
  Synthetic oligonucleotide
gatatccggacggcattgtgggtacgtcgctatagctacgaagggcttggtagctacgc

SEQ ID NO: 262416 - DNA, 55 bp, Artificial
  Synthetic oligonucleotide
aggcaagtcatgtcgagagatgaatcccgacaggacgtagtgccagttggcatag

SEQ ID NO: 262417 - DNA, 55 bp, Artificial
  Synthetic oligonucleotide
agtagagcggagctaacgcagccagggcgcaacgaggcttgctgagaccagcttc

SEQ ID NO: 262418 - DNA, 55 bp, Artificial
  Synthetic oligonucleotide
atcggttgccacgctgagtggcgtgctggttgcaacggcactggtccttttgccg

SEQ ID NO: 262419 - DNA, 55 bp, Artificial
  Synthetic oligonucleotide
cacgtggactttggagtttcgcaccggatcgacagtcggtggcttgtggccgctg

SEQ ID NO: 262420 - DNA, 55 bp, Artificial
  Synthetic oligonucleotide
catacatcagcgtgctagcggtaccgctctgtgtgcgagccgggtccgtagcaga

SEQ ID NO: 262421 - DNA, 55 bp, Artificial
  Synthetic oligonucleotide
tgagaattgtggtcgacgcggtatccgcactggccccgacgattcgagaacgccg

SEQ ID NO: 262422 - DNA, 55 bp, Artificial
  Synthetic oligonucleotide
cgagtcgtcatcgtttgagtgtgagtcttgctggacacacttcgcgcggcgcatc

SEQ ID NO: 262423 - DNA, 55 bp, Artificial
  Synthetic oligonucleotide
cgcactccgtgtgtggcatccccggaggtattggattccctgaaaggagatgcgt

SEQ ID NO: 262424 - DNA, 55 bp, Artificial
  Synthetic oligonucleotide
cgcgtgccgatatgcgtgggtcaagggtattcgcccgatccgggctcacccttaa

SEQ ID NO: 262425 - DNA, 55 bp, Artificial
  Synthetic oligonucleotide
cgggtgacgtccctggttctccgcctccgtgaaacgtctcatcctgagatgagcc

SEQ ID NO: 262426 - DNA, 60 bp, Artificial
  Synthetic oligonucleotide
cgatcgcaagaccattggcaagacccacggagatgcagattcctgcatagttgagcccgg

SEQ ID NO: 262427 - DNA, 55 bp, Artificial
  Synthetic oligonucleotide
cgtcgggagcgccagtacagatcggtagttgatgcgagattctgtactgttagtg

SEQ ID NO: 262428 - DNA, 54 bp, Artificial
  Synthetic oligonucleotide
tgcaccctagggttcccactgaaggatcagccgccgatgggccacgaccgtgcg

SEQ ID NO: 262429 - DNA, 53 bp, Artificial
  Synthetic oligonucleotide
ggacttcgactgagttcgtctgcaatcgtgttcaacagagcgaccaggggttc

SEQ ID NO: 262430 - DNA, 53 bp, Artificial
  Synthetic oligonucleotide
gtgcgtcacttctcgatgcagcgtccacccgtaaaccgcggactacgaacggt

SEQ ID NO: 262431 - DNA, 52 bp, Artificial
  Synthetic oligonucleotide
ggggttctgggcgataggctccaccttggagaacggagttgccggtagccac

SEQ ID NO: 262432 - DNA, 52 bp, Artificial
  Synthetic oligonucleotide
ggccatgagttgcatgtagtcaacgacaactaggccgagccgccccattgcg

SEQ ID NO: 262433 - DNA, 52 bp, Artificial
  Synthetic oligonucleotide
gcatctaagacgaacgctgaaaggcgggggttctgggcgataggctccacct

SEQ ID NO: 262434 - DNA, 52 bp, Artificial
  Synthetic oligonucleotide
gacgaacgctgaaaggcgggggttctgggcgataggctccaccttggagaac

SEQ ID NO: 262435 - DNA, 52 bp, Artificial
  Synthetic oligonucleotide
cgggcgagtggaatgcttgggttgccggcgggctttgaaaggtgtggtcctc

SEQ ID NO: 262436 - DNA, 52 bp, Artificial
  Synthetic oligonucleotide
acacccatgaggtgtgtacagcccggttgtccacacgggcgagtggaatgct

SEQ ID NO: 262437 - DNA, 60 bp, Artificial
  Synthetic oligonucleotide
agtcctcaggagtagcaacatcccgatgatgaccacggttgtgatcgatcatgtattggc

SEQ ID NO: 262438 - DNA, 52 bp, Artificial
  Synthetic oligonucleotide
aatggcccgaaggatgggttggtccaggtaacgcgccgttgtggttgacgta

SEQ ID NO: 262439 - DNA, 52 bp, Artificial
  Synthetic oligonucleotide
aacatggcttcgcatcattcgcatatcggcgccaatgaataggcgcagtgga

SEQ ID NO: 262440 - DNA, 51 bp, Artificial
  Synthetic oligonucleotide
cctgtgatcgaagggatgaccgtgcgagaggaagccaaacccacgaagcga

SEQ ID NO: 262441 - DNA, 51 bp, Artificial
  Synthetic oligonucleotide
caaaactacctgaccgggtggcggaatttgcaatgccggcgggttcaatcg

SEQ ID NO: 262442 - DNA, 51 bp, Artificial
  Synthetic oligonucleotide
acaagcacgtagggctcaagagatctgggattgcggtgccctactttgatt

SEQ ID NO: 262443 - DNA, 60 bp, Artificial
  Synthetic oligonucleotide
catgacggctcgaaacagcggcgggatgtgacagagccaaatcatccccggatatccgga

SEQ ID NO: 262444 - DNA, 60 bp, Artificial
  Synthetic oligonucleotide
cacatggaaatagatcacattcgaggcaatgtgatcagtgttccatgagtgctcaggtcg

SEQ ID NO: 262445 - DNA, 55 bp, Artificial
  Synthetic oligonucleotide
ctgggtcgatgtttggcggaaagagcttgtgctctagcagccagcgcctagtctc

SEQ ID NO: 262446 - DNA, 55 bp, Artificial
  Synthetic oligonucleotide
tcgaggcaatgtgatcagtgttccatgagtgctcaggtcggacccgctcgtaacg

SEQ ID NO: 262447 - DNA, 55 bp, Artificial
  Synthetic oligonucleotide
tgactcgactaagctactatccattacagccaatctcggggatgtgaaaacaact

SEQ ID NO: 262448 - DNA, 55 bp, Artificial
  Synthetic oligonucleotide
gcgctatgtcgcttggttcaatatccacggaggcgcacgctactcttgcagtggc

SEQ ID NO: 262449 - DNA, 55 bp, Artificial
  Synthetic oligonucleotide
ctttgttaaggactccactcttaccggtgtaattttagattcgtgcataggatcg

SEQ ID NO: 262450 - DNA, 53 bp, Artificial
  Synthetic oligonucleotide
ctaaaggaaaaccctgacagggtccgcacctcttttagcgattaggccttatc

SEQ ID NO: 262451 - DNA, 55 bp, Artificial
  Synthetic oligonucleotide
cgggtctaagcttatgtagcgcgttgttggttctgagtgttactaggtcatgctg

SEQ ID NO: 262452 - DNA, 55 bp, Artificial
  Synthetic oligonucleotide
cgactcctgaacaactactggtaggagcccgtcttcattccatacgatactgtca

SEQ ID NO: 262453 - DNA, 55 bp, Artificial
  Synthetic oligonucleotide
aagtaaatgacgtacgttccacgctcaatataggtgaatctagtgagacccctag

SEQ ID NO: 262454 - DNA, 55 bp, Artificial
  Synthetic oligonucleotide
ccccatattggtaatacgggaaccaatgaagaagatctcgaatcgtcgcaggttt

SEQ ID NO: 262455 - DNA, 55 bp, Artificial
  Synthetic oligonucleotide
cattgaccatactaccggagcgacattaagcgccatgagcataagcacgactcca

SEQ ID NO: 262456 - DNA, 55 bp, Artificial
  Synthetic oligonucleotide
aagtgatgtgcatctactaagtaatcactgggaatcagtttagttaggcgcctct

SEQ ID NO: 262457 - DNA, 55 bp, Artificial
  Synthetic oligonucleotide
acatgcgattcggttcttccggatatgatgcggtagcctcttgtttgcagttgac

SEQ ID NO: 262458 - DNA, 55 bp, Artificial
  Synthetic oligonucleotide
tcctatggcgagaagttatgttgctcggcagttatcggccttaggaggccaaccg

SEQ ID NO: 262459 - DNA, 55 bp, Artificial
  Synthetic oligonucleotide
aggcgagtccgaatcgcccacacccggagttggatctcccggaagcatagtcagc

SEQ ID NO: 262460 - DNA, 55 bp, Artificial
  Synthetic oligonucleotide
agccgcacatttcctatgcgcacccgcttaagagctgttaccttcaccccgacta

SEQ ID NO: 262461 - DNA, 55 bp, Artificial
  Synthetic oligonucleotide
agccatagggagtagacgcccaggggctgctaaggaatgcctcctcaagcacgca

SEQ ID NO: 262462 - DNA, 55 bp, Artificial
  Synthetic oligonucleotide
acggagcatggggccaagagcagctctaccgtctccccctcgtgagtaaggagtt

SEQ ID NO: 262463 - DNA, 54 bp, Artificial
  Synthetic oligonucleotide
gggttaggctactcctttgccgagaaccgtcccttcggcaccattggtgtccaa

SEQ ID NO: 262464 - DNA, 54 bp, Artificial
  Synthetic oligonucleotide
gggccaagagcagctctaccgtctccccctcgtgagtaaggagttggtcccgaa

SEQ ID NO: 262465 - DNA, 54 bp, Artificial
  Synthetic oligonucleotide
ggccatccgaccccaacacaccgtaaccatgggcgtcgtcaacaaagaggtgcg

SEQ ID NO: 262466 - DNA, 53 bp, Artificial
  Synthetic oligonucleotide
ggctggcattacccgaggcctcattttcaatagaaactcggtaaccgttggct

SEQ ID NO: 262467 - DNA, 53 bp, Artificial
  Synthetic oligonucleotide
accgatgatgtaaggcgtatgccgccattgattaactacacggacagcatgct

SEQ ID NO: 262468 - DNA, 53 bp, Artificial
  Synthetic oligonucleotide
ctgtctttagtaaggcttagcagtaactcttctgacctgtcatacagcccagc

SEQ ID NO: 262469 - DNA, 55 bp, Artificial
  Synthetic oligonucleotide
taccggttatacttagacttagcgaaccctggctcctccgaactgccccacaagc

SEQ ID NO: 262470 - DNA, 53 bp, Artificial
  Synthetic oligonucleotide
tcgacaaccaaaggggaaagcgcgaaagatagcgcccaaagaatagcggggct

SEQ ID NO: 262471 - DNA, 52 bp, Artificial
  Synthetic oligonucleotide
ggtagccataccaactaaataccgagaggtgttgatgcacgaatcatccggg

SEQ ID NO: 262472 - DNA, 52 bp, Artificial
  Synthetic oligonucleotide
taaggtattcacggagcatggggccaagagcagctctaccgtctccccctcg

SEQ ID NO: 262473 - DNA, 51 bp, Artificial
  Synthetic oligonucleotide
agtttcagcagttgggccttgattgtgccgacctctgtaacgaattttcca

SEQ ID NO: 262474 - DNA, 51 bp, Artificial
  Synthetic oligonucleotide
cggcgaagttagatttagggttaatgggcttctcctcaagcgatttgacct

SEQ ID NO: 262475 - DNA, 51 bp, Artificial
  Synthetic oligonucleotide
aacacaagcatatcgggtaacctagtcaatcactatcaacccaccacaaaa

SEQ ID NO: 262476 - DNA, 51 bp, Artificial
  Synthetic oligonucleotide
tcgcacacattatgccgattccgatacacgcacctagtgcgcctaaaccaa

SEQ ID NO: 262477 - DNA, 50 bp, Artificial
  Synthetic oligonucleotide
gtcgaggaccgttgttagtcctcctagcccttgggcgccaatacccaggt

SEQ ID NO: 262478 - DNA, 50 bp, Artificial
  Synthetic oligonucleotide
tcactcgctcaggttacagcgtcatatagagagactcggggattgttggg

SEQ ID NO: 262479 - DNA, 50 bp, Artificial
  Synthetic oligonucleotide
aaaacctaaccctctcatcattccacgtacaaacgttgtcttaccggccc

SEQ ID NO: 262480 - DNA, 55 bp, Artificial
  Synthetic oligonucleotide
gtgttagcccagaaaattccacagaatccaataactcctacaagcgcagtaaacc

SEQ ID NO: 262481 - DNA, 55 bp, Artificial
  Synthetic oligonucleotide
gtgggtcaataaggctgaccgttgttcctcacttaaggctttggtcatgtccgta

SEQ ID NO: 262482 - DNA, 55 bp, Artificial
  Synthetic oligonucleotide
gtactgacgacaatagtccgtaaggaatggctacacgcaacatcggtgcatgccg

SEQ ID NO: 262483 - DNA, 55 bp, Artificial
  Synthetic oligonucleotide
gggagaactatggcaacattatccgccactggaagcagacgagcccaggctgggt

SEQ ID NO: 262484 - DNA, 55 bp, Artificial
  Synthetic oligonucleotide
ggcgtctacaatattattcaagcgcccattgtccttcatgcgctaaaccctatat

SEQ ID NO: 262485 - DNA, 55 bp, Artificial
  Synthetic oligonucleotide
gcgtgtttcgtattcttcgatagttgtctgaaactctctttaggatttcgtctga

SEQ ID NO: 262486 - DNA, 55 bp, Artificial
  Synthetic oligonucleotide
cgcgttaatctggcccgaaatttcaacctgttacggataatcgcgtgatgagcaa

SEQ ID NO: 262487 - DNA, 55 bp, Artificial
  Synthetic oligonucleotide
gccacgttttgcacgaggtcgcacacgccattgatatgacggtcaacgacaatga

SEQ ID NO: 262488 - DNA, 55 bp, Artificial
  Synthetic oligonucleotide
ggaattattatgtcacgcaggtggcgcgagatgattatgaggcgacgttactctc

SEQ ID NO: 262489 - DNA, 50 bp, Artificial
  Synthetic oligonucleotide
ggagccggtttgaccccgcgttacaggttggaaacgtcacgttccgttgg

SEQ ID NO: 262490 - DNA, 55 bp, Artificial
  Synthetic oligonucleotide
ggcacacttgctgcaagaccatataataacgcagacgaattgcgtgacgcgcttg

SEQ ID NO: 262491 - DNA, 55 bp, Artificial
  Synthetic oligonucleotide
ggtggtttgcaggccagccgtgtcgcgtaaagcgtgtggggtccgtgaatactgg

SEQ ID NO: 262492 - DNA, 55 bp, Artificial
  Synthetic oligonucleotide
ccgggtggaatacgtgcgtactctctgaataacggctgtggggctatgggttgtg

SEQ ID NO: 262493 - DNA, 54 bp, Artificial
  Synthetic oligonucleotide
ccgattggatgtcgtgttaccaaagccgcgtgggcccgttaaaatggattggcc

SEQ ID NO: 262494 - DNA, 55 bp, Artificial
  Synthetic oligonucleotide
gttatccagccgggtgaattgtcaccgcagtggaaagccatcgtttgcgtgcccc

SEQ ID NO: 262495 - DNA, 55 bp, Artificial
  Synthetic oligonucleotide
gtttcggctgctggggttcgatcttctgtagctgtagagcctaatgatgacatgc

SEQ ID NO: 262496 - DNA, 55 bp, Artificial
  Synthetic oligonucleotide
tcatccgcggggaccaggggttgccctatggtgacgtgatggacgtgattgggtc

SEQ ID NO: 262497 - DNA, 55 bp, Artificial
  Synthetic oligonucleotide
cgtaccgtatgatttggactttacggattccgatgaagcgctacaggtgagtgcg

SEQ ID NO: 262498 - DNA, 55 bp, Artificial
  Synthetic oligonucleotide
ccatcaattttacccgctggaccaccccatctgggtggaacggtttgtcgatcat

SEQ ID NO: 262499 - DNA, 55 bp, Artificial
  Synthetic oligonucleotide
cacatcgcatggatcccgttttcacggggatgcccagagaggaccataagacaat

SEQ ID NO: 262500 - DNA, 54 bp, Artificial
  Synthetic oligonucleotide
aatttcgcaagccccgccataggtcacaaccaattttgtgcccgcctgtttcaa

SEQ ID NO: 262501 - DNA, 53 bp, Artificial
  Synthetic oligonucleotide
gtaatattcttctgcccatacagccccgctgacggatgaaaccgtcaggaaaa

SEQ ID NO: 262502 - DNA, 51 bp, Artificial
  Synthetic oligonucleotide
acgttcccagaatttgggtcggatcggaattgcggcccgttacgcggttaa

SEQ ID NO: 262503 - DNA, 52 bp, Artificial
  Synthetic oligonucleotide
agatatatcggaatcatccaaggccaaatgtcgtattgtgcgcgtcataaaa

SEQ ID NO: 262504 - DNA, 52 bp, Artificial
  Synthetic oligonucleotide
acagcaatccacccagaatgtgatagcgccctttatacgcacccgtgcgttc

SEQ ID NO: 262505 - DNA, 52 bp, Artificial
  Synthetic oligonucleotide
ttcacacggttcgcatggagtataggcggctttgctcaacgtggtgacattt

SEQ ID NO: 262506 - DNA, 52 bp, Artificial
  Synthetic oligonucleotide
ttggcgtgttaatacccttgtgaataagtcgcgggatagaatgcaatcccca

SEQ ID NO: 262507 - DNA, 51 bp, Artificial
  Synthetic oligonucleotide
gtgttgttttgtacagcatcacgggaattttgattgccaatggtcaagcgc

SEQ ID NO: 262508 - DNA, 55 bp, Artificial
  Synthetic oligonucleotide
cgtgcgtaacgtccgcgtcacgctgttggggtcgtttaatgtgatcgttgtcgcc

SEQ ID NO: 262509 - DNA, 51 bp, Artificial
  Synthetic oligonucleotide
atatgcgtgtgcggttgggtattggccacccgggagataaagatcgcgttc

SEQ ID NO: 262510 - DNA, 50 bp, Artificial
  Synthetic oligonucleotide
attgtcacggataccgtaaccgcccgcccctttggtcgtggagccaatcg

SEQ ID NO: 262511 - DNA, 50 bp, Artificial
  Synthetic oligonucleotide
attgtcaccgcagtggaaagccatcgtttgcgtgccccgcattccgcaag

SEQ ID NO: 262512 - DNA, 50 bp, Artificial
  Synthetic oligonucleotide
atggccccgcatggtggtccctctaaacgcgcagccattttaatcgcgcg

SEQ ID NO: 262513 - DNA, 50 bp, Artificial
  Synthetic oligonucleotide
atgcgcgatacccgatcccgcgatcatccagttaacagcgccgggtgtaa

SEQ ID NO: 262514 - DNA, 50 bp, Artificial
  Synthetic oligonucleotide
atgcaaacacactccttcgctgtgacgaaagggagaccctacgggcggga

SEQ ID NO: 262515 - DNA, 50 bp, Artificial
  Synthetic oligonucleotide
aaacgcctgctgttcccgtgacggatgtgaagaacacaaccggggccggg

SEQ ID NO: 262516 - DNA, 50 bp, Artificial
  Synthetic oligonucleotide
aaactcgcaaatggcactcggaacctgtgtggcctggctggcgcagttga

SEQ ID NO: 262517 - DNA, 50 bp, Artificial
  Synthetic oligonucleotide
aaagccatcgtttgcgtgccccgcattccgcaagaccgcatgggtgataa

SEQ ID NO: 262518 - DNA, 50 bp, Artificial
  Synthetic oligonucleotide
aaccgattgcgcttgaccccgcccccggtttggatatggtacacccacct

SEQ ID NO: 262519 - DNA, 55 bp, Artificial
  Synthetic oligonucleotide
cgcagttgaaccaggcgcataatatcgccgcccgcaatgaaacggtcgtgacccc

SEQ ID NO: 262520 - DNA, 50 bp, Artificial
  Synthetic oligonucleotide
aacggcacccatccgcgggctgtatttatatggtcccgtagggcggggaa

SEQ ID NO: 262521 - DNA, 50 bp, Artificial
  Synthetic oligonucleotide
acattgaatgggcccctgtaccgggtgcgggcattaaacaacgcgcaccg

SEQ ID NO: 262522 - DNA, 50 bp, Artificial
  Synthetic oligonucleotide
accacctgatctggctccggccacgcaagacggtggggcgtgctgacaca

SEQ ID NO: 262523 - DNA, 50 bp, Artificial
  Synthetic oligonucleotide
acccggtccttcaattccggccttcgcggtgctattgtggccccgcattt

SEQ ID NO: 262524 - DNA, 50 bp, Artificial
  Synthetic oligonucleotide
accgcgtttaagaacggctgacaaagggggcctctccggatcacggcatg

SEQ ID NO: 262525 - DNA, 50 bp, Artificial
  Synthetic oligonucleotide
acgaactgcatcaggagggcaaggggcgggcgttcaaaagcggtctgttc

SEQ ID NO: 262526 - DNA, 50 bp, Artificial
  Synthetic oligonucleotide
acgaatcggccctacaccctggctgaacgattttggcaccagcgcttccc

SEQ ID NO: 262527 - DNA, 50 bp, Artificial
  Synthetic oligonucleotide
acgaccactccgcgaaagcgcacccggcgtgactaccataatcggtgtta

SEQ ID NO: 262528 - DNA, 50 bp, Artificial
  Synthetic oligonucleotide
acgcggcattgaaagaactaacccacgcgcatcgtttttccgggggccgg

SEQ ID NO: 262529 - DNA, 50 bp, Artificial
  Synthetic oligonucleotide
agaccaaaagaacgcgcgtaacggaccctgtgcgggcgcaatcagccaca

SEQ ID NO: 262530 - DNA, 55 bp, Artificial
  Synthetic oligonucleotide
cgtggtcgcctatctttccacgtgccagctctttacagcccgcctgcacttgtcg

SEQ ID NO: 262531 - DNA, 50 bp, Artificial
  Synthetic oligonucleotide
agacgcgcttggcatcatccattacccgcacggacaaaccataggccgca

SEQ ID NO: 262532 - DNA, 50 bp, Artificial
  Synthetic oligonucleotide
agccagccataggtgccgtcagacgggaacaacgtgctgttccgtgagtc

SEQ ID NO: 262533 - DNA, 50 bp, Artificial
  Synthetic oligonucleotide
aggacatggttccggttttacggcggatttccggggctgaacaggggtgg

SEQ ID NO: 262534 - DNA, 50 bp, Artificial
  Synthetic oligonucleotide
agggcccctcctcgtatcccgcaagcttgccctaaactcacatccagcac

SEQ ID NO: 262535 - DNA, 50 bp, Artificial
  Synthetic oligonucleotide
agggtgtttttccgcatcccgcccatatcggtcagaacgccggacaagcg

SEQ ID NO: 262536 - DNA, 50 bp, Artificial
  Synthetic oligonucleotide
agtattttgagggccatccggtctcatcgcagacggcccgtggtgccaac

SEQ ID NO: 262537 - DNA, 50 bp, Artificial
  Synthetic oligonucleotide
atccatatggtgccccggtccgcgttcactataacgcctgcggtgccttg

SEQ ID NO: 262538 - DNA, 50 bp, Artificial
  Synthetic oligonucleotide
atccccagttataagaagacaccgggacgaaatgcgggggtgaccgggcc

SEQ ID NO: 262539 - DNA, 50 bp, Artificial
  Synthetic oligonucleotide
atcccgcccatatcggtcagaacgccggacaagcgtacaacggccacacg

SEQ ID NO: 262540 - DNA, 50 bp, Artificial
  Synthetic oligonucleotide
atccggtctcatcgcagacggcccgtggtgccaacgtgacgcgacagatt

SEQ ID NO: 262541 - DNA, 55 bp, Artificial
  Synthetic oligonucleotide
gagcctgccggggattatccctgcgcccgaaacacccgtagcaaaagagccgatg

SEQ ID NO: 262542 - DNA, 50 bp, Artificial
  Synthetic oligonucleotide
atcgcagacggcccgtggtgccaacgtgacgcgacagattcattaagggg

SEQ ID NO: 262543 - DNA, 50 bp, Artificial
  Synthetic oligonucleotide
atcgtctgggcgaagtgctggtttacaccggggccttaacgccgcaggaa

SEQ ID NO: 262544 - DNA, 50 bp, Artificial
  Synthetic oligonucleotide
atgaattgctggccgtgttgccctttgtccggcgtgaggcctgtatcgcc

SEQ ID NO: 262545 - DNA, 55 bp, Artificial
  Synthetic oligonucleotide
acgggatacacgggtaaagggagcacaccattatgatgcgttcattagatatcgg

SEQ ID NO: 262546 - DNA, 54 bp, Artificial
  Synthetic oligonucleotide
gataatcatggaaagactccgtttgaatggggtgtggccgggttataggttacc

SEQ ID NO: 262547 - DNA, 55 bp, Artificial
  Synthetic oligonucleotide
gattgttttgcgcttaacgacatactccgcaagtgatgcctgctcttgttcggag

SEQ ID NO: 262548 - DNA, 55 bp, Artificial
  Synthetic oligonucleotide
ctaaccgttggtcggtctgcatgagttggtgaacggagggaacttgcaggtagag

SEQ ID NO: 262549 - DNA, 55 bp, Artificial
  Synthetic oligonucleotide
cccctaaccattgaacccaaattagacagttttgagcgagcattagaacgggcgc

SEQ ID NO: 262550 - DNA, 50 bp, Artificial
  Synthetic oligonucleotide
actgctgacggggtttatgacgacgttggcaatcctggcggcttggcccg

SEQ ID NO: 262551 - DNA, 50 bp, Artificial
  Synthetic oligonucleotide
actaacccgctgagacgctacacccagcgccgctcgcttactatggtgga

SEQ ID NO: 262552 - DNA, 50 bp, Artificial
  Synthetic oligonucleotide
acgtctctacaatcggggcgggtgtagggtgcgttagcggagcgtaacgc

SEQ ID NO: 262553 - DNA, 50 bp, Artificial
  Synthetic oligonucleotide
acgtcagcaagtttagtcacttgcggtgtgcgggtgcgaactgggccgtt

SEQ ID NO: 262554 - DNA, 50 bp, Artificial
  Synthetic oligonucleotide
acgtagacgcatcaggaacccatggtggcgggacagtgcgagtcggcgga

SEQ ID NO: 262555 - DNA, 50 bp, Artificial
  Synthetic oligonucleotide
acggttcgcgcaccccaataccctggcaagcggatgcccctcatgcgggg

SEQ ID NO: 262556 - DNA, 50 bp, Artificial
  Synthetic oligonucleotide
acgggcagcggattacaaagccgggccccgatcgcatggtggtgtttcag

SEQ ID NO: 262557 - DNA, 50 bp, Artificial
  Synthetic oligonucleotide
acgctgggcttcttgcagacggttcgcgccatactgttcccgtcgctgtt

SEQ ID NO: 262558 - DNA, 50 bp, Artificial
  Synthetic oligonucleotide
acgcgccagaaacgaaggctttgcccgcttgctggaactagcgccagaca

SEQ ID NO: 262559 - DNA, 50 bp, Artificial
  Synthetic oligonucleotide
acgatcggcacccccgaatccccaccttcccgcaacggaatttccagcgg

SEQ ID NO: 262560 - DNA, 55 bp, Artificial
  Synthetic oligonucleotide
ccagccagttagatatacgaccggtgctttccatactaatgagcgctgaatgcta

SEQ ID NO: 262561 - DNA, 50 bp, Artificial
  Synthetic oligonucleotide
acgacagcacgagaaatcaggacaggcgacgccccagcatccaagggagg

SEQ ID NO: 262562 - DNA, 50 bp, Artificial
  Synthetic oligonucleotide
acgaaatcagccgccccgctgtggatgtgggctttaatctgcggtgcaga

SEQ ID NO: 262563 - DNA, 50 bp, Artificial
  Synthetic oligonucleotide
acctttcgttcccaacccaatcccgcccctgttgctggtgtggcggcgaa

SEQ ID NO: 262564 - DNA, 50 bp, Artificial
  Synthetic oligonucleotide
accttgccccttcccccggaacactagaggcggtaatcgttcccccgtga

SEQ ID NO: 262565 - DNA, 50 bp, Artificial
  Synthetic oligonucleotide
acctgttccctgggcgcaaggcgaccgaatccctgtaggggcgacccgct

SEQ ID NO: 262566 - DNA, 50 bp, Artificial
  Synthetic oligonucleotide
acctggcgataggcggcgccccaagcattaaacagaggagcatagctggg

SEQ ID NO: 262567 - DNA, 50 bp, Artificial
  Synthetic oligonucleotide
acctgctgctacgtcccaaggggcgagtccccgttcccagtatccgtccg

SEQ ID NO: 262568 - DNA, 55 bp, Artificial
  Synthetic oligonucleotide
ccagcatcgtagccaagcgtttgaggcgagccgggagatgattgatccagcgacc

SEQ ID NO: 262569 - DNA, 55 bp, Artificial
  Synthetic oligonucleotide
ccacaaaagtctggcggttaacattcttcagaacgtcgcttcccgcaagagattt

SEQ ID NO: 262570 - DNA, 55 bp, Artificial
  Synthetic oligonucleotide
cagtacgttttgcagacgaacttactgggcactgtgaatgttttggagttggcga

SEQ ID NO: 262571 - DNA, 55 bp, Artificial
  Synthetic oligonucleotide
caggatacgcggtggacttgcactcccaatcatgacttatgctcagacaacttgg

SEQ ID NO: 262572 - DNA, 55 bp, Artificial
  Synthetic oligonucleotide
caagctacgggatagttagtatcggcacgggagaaggttcgtagactggtactaa

SEQ ID NO: 262573 - DNA, 55 bp, Artificial
  Synthetic oligonucleotide
acacaatcgcctgataatcagggtcctcgatgccttttgttcgtggatttaccgt

SEQ ID NO: 262574 - DNA, 55 bp, Artificial
  Synthetic oligonucleotide
atgtatcacgagtgtagcgaacgtgtaaacggctaataaacacattattcggtgc

SEQ ID NO: 262575 - DNA, 55 bp, Artificial
  Synthetic oligonucleotide
gtttccaggcgggtggcagataggcagactccccactatttgccgattgtaagac

SEQ ID NO: 262576 - DNA, 55 bp, Artificial
  Synthetic oligonucleotide
cgctctgggagtgaggtttaagatgccctacagttccaaattccgtgaagcgtag

SEQ ID NO: 262577 - DNA, 55 bp, Artificial
  Synthetic oligonucleotide
gtgggcagtctatttgtaagcgttgcacaaagtctgcgatcgcctctgttgttcc

SEQ ID NO: 262578 - DNA, 55 bp, Artificial
  Synthetic oligonucleotide
gtccggtgaataattgacaggtgggttcgttgggtgatagccgtgcgatcgtccg

SEQ ID NO: 262579 - DNA, 55 bp, Artificial
  Synthetic oligonucleotide
gtataatcgtctccgggttccaattgaatcgaataagctttagctgcgttataca

SEQ ID NO: 262580 - DNA, 55 bp, Artificial
  Synthetic oligonucleotide
ggtgggttagatgcgattagtgtctcaccggatttctattccctacttaagcggg

SEQ ID NO: 262581 - DNA, 55 bp, Artificial
  Synthetic oligonucleotide
ggtatagcgtcctaaagcatcgacagaccaaatcatgtcttgggaggtttctacc

SEQ ID NO: 262582 - DNA, 55 bp, Artificial
  Synthetic oligonucleotide
ggctactgtctacaccgaagcgcgttgggcacttcagccaaaagattggctgcgg

SEQ ID NO: 262583 - DNA, 55 bp, Artificial
  Synthetic oligonucleotide
gctgcgacgtgcttgcgagttcccaaaacgcaccagtacaaaggcaatacagaga

SEQ ID NO: 262584 - DNA, 55 bp, Artificial
  Synthetic oligonucleotide
gcgtggtaaacagttcctcagttgtgtgttgccataagtccaacaactcggcggt

SEQ ID NO: 262585 - DNA, 55 bp, Artificial
  Synthetic oligonucleotide
gcgccgcccgctgtaataatgttagaaattgtacccaagctaccagtaggtgcgg

SEQ ID NO: 262586 - DNA, 55 bp, Artificial
  Synthetic oligonucleotide
gatctctggtgtgagaaagtcgggtgaaggtgtttctgtttcgggttcctctagc

SEQ ID NO: 262587 - DNA, 53 bp, Artificial
  Synthetic oligonucleotide
ccggttagttttaattcccttgccagttctaggcgagctactggggataggct

SEQ ID NO: 262588 - DNA, 55 bp, Artificial
  Synthetic oligonucleotide
gactagaggagtcttattgtgccttgcctcgcaaagtctctcaacaagtcctgcg

SEQ ID NO: 262589 - DNA, 55 bp, Artificial
  Synthetic oligonucleotide
ctgcaagcggcactagaagataagttgagcaagtttaagcgaccgaaatattggg

SEQ ID NO: 262590 - DNA, 55 bp, Artificial
  Synthetic oligonucleotide
ctcgcgaatcggcaccgacgatacttcccgcagacgttgcaccatgcgctgtcgt

SEQ ID NO: 262591 - DNA, 54 bp, Artificial
  Synthetic oligonucleotide
tgatgattatggtgcaaacggcggtgagaacgttattggaaggagcgaaaacgg

SEQ ID NO: 262592 - DNA, 53 bp, Artificial
  Synthetic oligonucleotide
cccgctagtcccaaagaacatttgacctagataacctcccactagggcgccca

SEQ ID NO: 262593 - DNA, 53 bp, Artificial
  Synthetic oligonucleotide
aaaatacgctaaagcacctcatttctggacgaggactgccacgggatttcgcg

SEQ ID NO: 262594 - DNA, 52 bp, Artificial
  Synthetic oligonucleotide
cagttctcgcctctagtttgggaccactattaatcttacgggtttggcaaaa

SEQ ID NO: 262595 - DNA, 51 bp, Artificial
  Synthetic oligonucleotide
cgaatttcgcggatatgtatgtgcatccccaagagattgactacacgattg

SEQ ID NO: 262596 - DNA, 51 bp, Artificial
  Synthetic oligonucleotide
ctctgagtatctcgtcttatttgctgacgggttacacaaaacgcgacccgc

SEQ ID NO: 262597 - DNA, 51 bp, Artificial
  Synthetic oligonucleotide
tcgctctaattctcgaaccagaggttgtgtactgacgggtcggaataaatc

SEQ ID NO: 262598 - DNA, 55 bp, Artificial
  Synthetic oligonucleotide
ccgcataagcgataggtaagtccggagaaatggcattaatcagttgtaactcttt

SEQ ID NO: 262599 - DNA, 51 bp, Artificial
  Synthetic oligonucleotide
tgcggccctcaagccaaacgtccaatcctaatgatacgtgcccgatcatac

SEQ ID NO: 262600 - DNA, 50 bp, Artificial
  Synthetic oligonucleotide
aagcgaagcaacttctgacccctccatgttggcgaagcctgcgcgttagc

SEQ ID NO: 262601 - DNA, 50 bp, Artificial
  Synthetic oligonucleotide
aagcggggtggttgcgccactgagtagtgccggctgattcgacagaaata

SEQ ID NO: 262602 - DNA, 50 bp, Artificial
  Synthetic oligonucleotide
aaggacgagacggttcgcgcaccccaataccctggcaagcggatgcccct

SEQ ID NO: 262603 - DNA, 50 bp, Artificial
  Synthetic oligonucleotide
aaggatggcaagttgcacccgcacccggttctcagggttgggcggaagca

SEQ ID NO: 262604 - DNA, 50 bp, Artificial
  Synthetic oligonucleotide
aaggcgcatcgccttactggggtgtgattcgtcaagcggcggggttactg

SEQ ID NO: 262605 - DNA, 50 bp, Artificial
  Synthetic oligonucleotide
aaggcgcgactcagtgaccaagccagatggggcgaccaggttagcatggt

SEQ ID NO: 262606 - DNA, 50 bp, Artificial
  Synthetic oligonucleotide
aaggcgtcagcgacctttcggggcggggagtcgggcttgacgtggtgcga

SEQ ID NO: 262607 - DNA, 50 bp, Artificial
  Synthetic oligonucleotide
aagttgtgacactcccgcgactggggtcatactgcccgcctctgggggct

SEQ ID NO: 262608 - DNA, 50 bp, Artificial
  Synthetic oligonucleotide
aatagcgggactacccggttgcagtgccacagtctgagtcgaaccgccgt

SEQ ID NO: 262609 - DNA, 53 bp, Artificial
  Synthetic oligonucleotide
ccgattcgtgaccgggttctaagtattccgcaacgcaaggaaggtggggataa

SEQ ID NO: 262610 - DNA, 50 bp, Artificial
  Synthetic oligonucleotide
aatccgccctccaacaacagggctacaccacccgcaagcgacccaaacaa

SEQ ID NO: 262611 - DNA, 50 bp, Artificial
  Synthetic oligonucleotide
aatcgcccgacgcacggctttcttggcaatgggtaaacgaggactgcgct

SEQ ID NO: 262612 - DNA, 50 bp, Artificial
  Synthetic oligonucleotide
aatcgtgggactaacgatcgcattcgtcgcttcacccacccctcgcgcga

SEQ ID NO: 262613 - DNA, 50 bp, Artificial
  Synthetic oligonucleotide
aatgcgatcgcgccaccagttgagagtgggttcggcttcgctgagggaat

SEQ ID NO: 262614 - DNA, 50 bp, Artificial
  Synthetic oligonucleotide
aatgcgctggcataggatggacgtgcggtgtaccgacgacccggtaacag

SEQ ID NO: 262615 - DNA, 50 bp, Artificial
  Synthetic oligonucleotide
acaacggcgctcgcaaaaagtcccgcttggcaagaaccctcaagccgcac

SEQ ID NO: 262616 - DNA, 50 bp, Artificial
  Synthetic oligonucleotide
acaagacgcgatcgcacgccaacgccctagactctgccattccctacccg

SEQ ID NO: 262617 - DNA, 50 bp, Artificial
  Synthetic oligonucleotide
acaagcgggcggtatccgagggtgcggttgatgtgaagtcgcaaacgcct

SEQ ID NO: 262618 - DNA, 50 bp, Artificial
  Synthetic oligonucleotide
acagggacgcgctacacgggggtagttagcgtgataaccgcgagcggaac

SEQ ID NO: 262619 - DNA, 50 bp, Artificial
  Synthetic oligonucleotide
aaacagccgcccgatgggtggtaaccattcacgagtgagatccccgtcgg

SEQ ID NO: 262620 - DNA, 55 bp, Artificial
  Synthetic oligonucleotide
cccttgctttcacaagacattccccgacagccgaaactatccagtcgccagaaga

SEQ ID NO: 262621 - DNA, 50 bp, Artificial
  Synthetic oligonucleotide
aaaccatcgggactccccagcgtttgagaggtggttgccctcccgacatt

SEQ ID NO: 262622 - DNA, 50 bp, Artificial
  Synthetic oligonucleotide
aaaccgccgcgggtgagtaagccgcccaaaggatctcttccgtagttcga

SEQ ID NO: 262623 - DNA, 50 bp, Artificial
  Synthetic oligonucleotide
aaaccgtgaggtggttgcagcaagaatgtcgggcatcagggcgtaagcgg

SEQ ID NO: 262624 - DNA, 50 bp, Artificial
  Synthetic oligonucleotide
aaagcgaaccgattgttgtccgccgtggtttgggttcggaagctgtcgcc

SEQ ID NO: 262625 - DNA, 50 bp, Artificial
  Synthetic oligonucleotide
aaagcggatcattgggcggatgagacacttcgtcgggcgatcgcgtctcg

SEQ ID NO: 262626 - DNA, 50 bp, Artificial
  Synthetic oligonucleotide
aaaggtccgcgacgctgggcttcttgcagacggttcgcgccatactgttc

SEQ ID NO: 262627 - DNA, 50 bp, Artificial
  Synthetic oligonucleotide
aaagtcgcgtgggcaaagcgattagccgtccgtctacgttccgcaccgac

SEQ ID NO: 262628 - DNA, 50 bp, Artificial
  Synthetic oligonucleotide
aaagttcgcgggccgccccttgggcaacgcaaccgggaaagtaagcatat

SEQ ID NO: 262629 - DNA, 50 bp, Artificial
  Synthetic oligonucleotide
aaatagccacccctcgggcattccgcttgtaaaccccagaagcacgctgc

SEQ ID NO: 262630 - DNA, 50 bp, Artificial
  Synthetic oligonucleotide
aacagcatccggcaatcctcaccctacgcacgggacaagggcgatcgaat

SEQ ID NO: 262631 - DNA, 55 bp, Artificial
  Synthetic oligonucleotide
cccgtcgcaaatgcttcccacagcagcttgttttgcacgtgcggggttttgccct

SEQ ID NO: 262632 - DNA, 50 bp, Artificial
  Synthetic oligonucleotide
aacccgtcgggttgcccatggactgatggtgtagcagcaggaacggactc

SEQ ID NO: 262633 - DNA, 50 bp, Artificial
  Synthetic oligonucleotide
aacgccgttgcctatgttggcgacgatcgcagtatcgctcccagtcaggg

SEQ ID NO: 262634 - DNA, 50 bp, Artificial
  Synthetic oligonucleotide
aacgggcaaacttgcacagagccgacctcagtagggcagacttgcgagga

SEQ ID NO: 262635 - DNA, 50 bp, Artificial
  Synthetic oligonucleotide
aacgtgggaatttagcagcaaccgccctccgtggcgctctaaaccgcgta

SEQ ID NO: 262636 - DNA, 50 bp, Artificial
  Synthetic oligonucleotide
aactggtgggcgcgggtagtcagtgggcagttgtagtatggggaggttgc

SEQ ID NO: 262637 - DNA, 50 bp, Artificial
  Synthetic oligonucleotide
aacttctgacccctccatgttggcgaagcctgcgcgttagcgatagcgca

SEQ ID NO: 262638 - DNA, 50 bp, Artificial
  Synthetic oligonucleotide
aagattggcagcgcatctctgccgtctccgtggggcttgcgacaagaacc

SEQ ID NO: 262639 - DNA, 50 bp, Artificial
  Synthetic oligonucleotide
aagcacgggcgacccctaggcagccccaacttgaccacagccgtccaaga

SEQ ID NO: 262640 - DNA, 50 bp, Artificial
  Synthetic oligonucleotide
acctccggtaatcccacatcccgtcaactctatgcggctgcccccggtat

SEQ ID NO: 262641 - DNA, 50 bp, Artificial
  Synthetic oligonucleotide
acctcaacggtcagtgagcctagccgaactgcgctcggtaacacgctcgg

SEQ ID NO: 262642 - DNA, 55 bp, Artificial
  Synthetic oligonucleotide
cccggagacttgcatttggtggatgacgttcccgagggctttacctctgaaggtc

SEQ ID NO: 262643 - DNA, 50 bp, Artificial
  Synthetic oligonucleotide
acctacccaacggtgaactccccatcgccgtgtggcgtcccctaggtgac

SEQ ID NO: 262644 - DNA, 50 bp, Artificial
  Synthetic oligonucleotide
accgttggtttctttgcgcccaaggctggctatgcggcaactggcaaact

SEQ ID NO: 262645 - DNA, 50 bp, Artificial
  Synthetic oligonucleotide
accgtcagacagtgatcgcgtgttggggaagtgccagcggttgggtcggt

SEQ ID NO: 262646 - DNA, 50 bp, Artificial
  Synthetic oligonucleotide
accgggactcacctcagcagcgggaggcggtttcctcttagcccataccc

SEQ ID NO: 262647 - DNA, 50 bp, Artificial
  Synthetic oligonucleotide
accggcccgcctagtagagcgcaaacacccccgcgtctcccctcaggtgt

SEQ ID NO: 262648 - DNA, 50 bp, Artificial
  Synthetic oligonucleotide
accgctccacccttgcgatgggacgaagctgggggtatccgtatcggtca

SEQ ID NO: 262649 - DNA, 50 bp, Artificial
  Synthetic oligonucleotide
accgcaagtggctgacaatgagcgagcccacctggccccacgtcaactat

SEQ ID NO: 262650 - DNA, 50 bp, Artificial
  Synthetic oligonucleotide
acccgaacgtgaatttgagcccggaaactctggctttggccaacccgccc

SEQ ID NO: 262651 - DNA, 50 bp, Artificial
  Synthetic oligonucleotide
acccctaggcagccccaacttgaccacagccgtccaagagacgatcgggc

SEQ ID NO: 262652 - DNA, 50 bp, Artificial
  Synthetic oligonucleotide
acccccgcaacgaatacgaatgtggcgctattgggtgggcggaacaccag

SEQ ID NO: 262653 - DNA, 53 bp, Artificial
  Synthetic oligonucleotide
cccgaagataccctaaccgcgattaaagaatacggcgttgccatcaaaggacc

SEQ ID NO: 262654 - DNA, 50 bp, Artificial
  Synthetic oligonucleotide
acccccgacttccggtaagctgaggagtcgtagggcggttcccgtgggtg

SEQ ID NO: 262655 - DNA, 50 bp, Artificial
  Synthetic oligonucleotide
accccagtttgcccggtttccaacatcgctaccgctaggttgactcgcgc

SEQ ID NO: 262656 - DNA, 50 bp, Artificial
  Synthetic oligonucleotide
accccagcccacccgaggcgatacaccgtcgtctctgacaagtgcgcgac

SEQ ID NO: 262657 - DNA, 50 bp, Artificial
  Synthetic oligonucleotide
accccaataccctggcaagcggatgcccctcatgcggggtttaccacggc

SEQ ID NO: 262658 - DNA, 50 bp, Artificial
  Synthetic oligonucleotide
accatcgaagacagcaagtgcgatgatccgcaggggcccagcagccaaat

SEQ ID NO: 262659 - DNA, 50 bp, Artificial
  Synthetic oligonucleotide
acatcgccccttggtcagcgtgcttgggactgatagccggggcaagtcgt

SEQ ID NO: 262660 - DNA, 50 bp, Artificial
  Synthetic oligonucleotide
acatccccgcatcgcgaatgcccgatcgcactatttccgccatcactcga

SEQ ID NO: 262661 - DNA, 50 bp, Artificial
  Synthetic oligonucleotide
agaatggggcgcggacgattaccaccgccagtgaccccgaaacgcggtta

SEQ ID NO: 262662 - DNA, 50 bp, Artificial
  Synthetic oligonucleotide
agaacgcagggttgctacggattgacgcacgtcttgcagtgcagtcgcgg

SEQ ID NO: 262663 - DNA, 50 bp, Artificial
  Synthetic oligonucleotide
acttaattccgcccagcgtagatccgtacctgccacatccgccccggcta

SEQ ID NO: 262664 - DNA, 57 bp, Artificial
  Synthetic oligonucleotide
gtataaatactcgctacctgccgggcttgggtctttatgctgatcccacggtttatc

SEQ ID NO: 262665 - DNA, 59 bp, Artificial
  Synthetic oligonucleotide
atctaaccaaagcatttaactctgatgctacagggggtttaagcttatcatctaagtca

SEQ ID NO: 262666 - DNA, 53 bp, Artificial
  Synthetic oligonucleotide
tttcaggaaaggcttcacgggtacagacttctaaagacaggttataagcttta

SEQ ID NO: 262667 - DNA, 53 bp, Artificial
  Synthetic oligonucleotide
ccccgacaattaaagtagaaggccggcggacaaatcgaccgatactcagaaaa

SEQ ID NO: 262668 - DNA, 52 bp, Artificial
  Synthetic oligonucleotide
gcaaccacatcgggtggtcgcaaccgaggcaggacaggtctcggcccggttg

SEQ ID NO: 262669 - DNA, 52 bp, Artificial
  Synthetic oligonucleotide
tcaggctttggcctctgtccatcaccccttgaatacggttgtctctcttatc

SEQ ID NO: 262670 - DNA, 52 bp, Artificial
  Synthetic oligonucleotide
gttacttggcatggttcgataggggagcataaatcgactaaatccttatctg

SEQ ID NO: 262671 - DNA, 52 bp, Artificial
  Synthetic oligonucleotide
gtcgccctcaatttggaatctctagagggggatacagccctagagaggctca

SEQ ID NO: 262672 - DNA, 51 bp, Artificial
  Synthetic oligonucleotide
cgattctctcagagaattacttaggattacagtgagtacaggggaaaaaat

SEQ ID NO: 262673 - DNA, 51 bp, Artificial
  Synthetic oligonucleotide
tccgttttgccgctgcccatcggtgcagccagggctaccagtggcgctact

SEQ ID NO: 262674 - DNA, 51 bp, Artificial
  Synthetic oligonucleotide
tatctatgaaggctatcgggtatgtgcaatccctaatagggtattctgtcc

SEQ ID NO: 262675 - DNA, 51 bp, Artificial
  Synthetic oligonucleotide
cggtgtataatctaccttgaggcattctttccacatcttagtccagttagc

SEQ ID NO: 262676 - DNA, 55 bp, Artificial
  Synthetic oligonucleotide
gcaccccaccttcctatttcctcttgcgctttgtcgtccgcaagagggggatagg

SEQ ID NO: 262677 - DNA, 51 bp, Artificial
  Synthetic oligonucleotide
taacagaattgggaacggttcaaccgacctgaaacaactattagcagggga

SEQ ID NO: 262678 - DNA, 51 bp, Artificial
  Synthetic oligonucleotide
cgtgcctgcgctccagctggaagccaggcgggggctgtgaccggtcgccca

SEQ ID NO: 262679 - DNA, 51 bp, Artificial
  Synthetic oligonucleotide
ggctatgtgctatgtgtcgatagcttacatggtaaagccaaccctaaattt

SEQ ID NO: 262680 - DNA, 50 bp, Artificial
  Synthetic oligonucleotide
agtacgttgacgagcaagcgggacgttatgcgggtagggctgccgtgcgt

SEQ ID NO: 262681 - DNA, 50 bp, Artificial
  Synthetic oligonucleotide
accgattccgaatgggcccgcaggacgggaacccttacacaggtggcgct

SEQ ID NO: 262682 - DNA, 50 bp, Artificial
  Synthetic oligonucleotide
accctggcgggtactgctaccctcggcagcgactacaatgaccctggagc

SEQ ID NO: 262683 - DNA, 50 bp, Artificial
  Synthetic oligonucleotide
atattgccgcggccgcctatcgtgtccattccttcgagtggtcctctggg

SEQ ID NO: 262684 - DNA, 50 bp, Artificial
  Synthetic oligonucleotide
aatcgcaccacaccctacaccctaccccgttaagacagcgccggagttgg

SEQ ID NO: 262685 - DNA, 50 bp, Artificial
  Synthetic oligonucleotide
aactcaccgcgccagccgtgagccaagggtcagttacgtcatgatccggc

SEQ ID NO: 262686 - DNA, 50 bp, Artificial
  Synthetic oligonucleotide
aaccgtcatccccgcggaacctcctaaaaaggccgtggttgtagccggca

SEQ ID NO: 262687 - DNA, 60 bp, Artificial
  Synthetic oligonucleotide
gattactgcaatcagtgggattaagagagattccagaatttacctatttagaagatggtg

SEQ ID NO: 262688 - DNA, 50 bp, Artificial
  Synthetic oligonucleotide
aaccgactgtgtggggacttccctgcgtcataactgccgtagcgtcaccc

SEQ ID NO: 262689 - DNA, 50 bp, Artificial
  Synthetic oligonucleotide
aacccggggcgaaccgggcgcttcaactccactgtctcccgcacttctct

SEQ ID NO: 262690 - DNA, 49 bp, Artificial
  Synthetic oligonucleotide
aaccaccacttggcgggtttactcggcttaggttccctaggttgggccg

SEQ ID NO: 262691 - DNA, 50 bp, Artificial
  Synthetic oligonucleotide
aacatagcccccgccgtagcggaaactagggcgcagccagttaagcctag

SEQ ID NO: 262692 - DNA, 50 bp, Artificial
  Synthetic oligonucleotide
aacaacctcggcgatcgattctctccgggggttagagggagcgggaagcg

SEQ ID NO: 262693 - DNA, 50 bp, Artificial
  Synthetic oligonucleotide
ttaaagttcccgatcgcattcgttttcctgaacgtctgacgattccggtg

SEQ ID NO: 262694 - DNA, 50 bp, Artificial
  Synthetic oligonucleotide
aaactcgatcaggggatgaaggacttcgggcaagggttcgcgctcgtgga

SEQ ID NO: 262695 - DNA, 50 bp, Artificial
  Synthetic oligonucleotide
aaacgccgcgagaagtacaggcagccccgggaccgataccgactaaaacc

SEQ ID NO: 262696 - DNA, 50 bp, Artificial
  Synthetic oligonucleotide
aaacgaagtccacggggtaggatagcgcgagcgatgatgcccctggtgta

SEQ ID NO: 262697 - DNA, 50 bp, Artificial
  Synthetic oligonucleotide
aaaatttgcccgatttgagcggcggtagcggcatctacccgtcccgaagc

SEQ ID NO: 262698 - DNA, 60 bp, Artificial
  Synthetic oligonucleotide
gatagtattagatgatattatataaagattagatgtaagcatctaagcaatcaaatctac

SEQ ID NO: 262699 - DNA, 50 bp, Artificial
  Synthetic oligonucleotide
cgagaaaaaaggatgtaattttcgatcgcttcagcgcactcatccttaat

SEQ ID NO: 262700 - DNA, 50 bp, Artificial
  Synthetic oligonucleotide
cacaattcccctgggaacggagagaacgaaaacactcggtaacagcagtc

SEQ ID NO: 262701 - DNA, 50 bp, Artificial
  Synthetic oligonucleotide
aggcatccctgggggtactaccggcaaaagtcagggaacccgtgtcaacg

SEQ ID NO: 262702 - DNA, 50 bp, Artificial
  Synthetic oligonucleotide
agcttgaccggtccgcgagtcttgtggcgctatggtccgcaattggacgc

SEQ ID NO: 262703 - DNA, 50 bp, Artificial
  Synthetic oligonucleotide
agcggacgcggggttaaccataatggcggtggtagggcgactttcacctc

SEQ ID NO: 262704 - DNA, 50 bp, Artificial
  Synthetic oligonucleotide
aggcgcgtaaccccaacgggcaagctgagtaagggtccatagggcctcac

SEQ ID NO: 262705 - DNA, 50 bp, Artificial
  Synthetic oligonucleotide
agccccactacgccacaacaagcggcgggaaccctcacggaaccattagt

SEQ ID NO: 262706 - DNA, 50 bp, Artificial
  Synthetic oligonucleotide
agggactgacctccggggagccgacctcggcaaaactctcctagcgggag

SEQ ID NO: 262707 - DNA, 50 bp, Artificial
  Synthetic oligonucleotide
agccactaccgccgctttcgaggcacaataggcggccaaatttgcccccg

SEQ ID NO: 262708 - DNA, 50 bp, Artificial
  Synthetic oligonucleotide
agccaactgacatctcccaggataaagcgatcgcgccctaacccgccggt

SEQ ID NO: 262709 - DNA, 56 bp, Artificial
  Synthetic oligonucleotide
cagattaaatcaattctagggttttccctctcaatgggggatactgcgatcggctt

SEQ ID NO: 262710 - DNA, 50 bp, Artificial
  Synthetic oligonucleotide
agcagaatcgcccgacaggggagaatcggcagtaggtcttctggcagcgg

SEQ ID NO: 262711 - DNA, 50 bp, Artificial
  Synthetic oligonucleotide
agatcagcgatgaaagagacaaccccagccgcgatgcccccatgctttga

SEQ ID NO: 262712 - DNA, 50 bp, Artificial
  Synthetic oligonucleotide
aggggcgcagttactgaaagccaagggggcgcgacaggtttatgcttgtg

SEQ ID NO: 262713 - DNA, 50 bp, Artificial
  Synthetic oligonucleotide
agaaatcggccgtacttcgtccagttggcgaccatcaacccgcaccccat

SEQ ID NO: 262714 - DNA, 50 bp, Artificial
  Synthetic oligonucleotide
agggggtaaacacagcgcggcatacaatcccgccgctcccgatcccacca

SEQ ID NO: 262715 - DNA, 50 bp, Artificial
  Synthetic oligonucleotide
actcggaccgacaattttcgccccgtcttcaatgcgcgtcattgccccga

SEQ ID NO: 262716 - DNA, 50 bp, Artificial
  Synthetic oligonucleotide
cagtataggcctcgtttccacacagaaaccagggctcttctcgtttctgt

SEQ ID NO: 262717 - DNA, 50 bp, Artificial
  Synthetic oligonucleotide
actcccccttgcagacagtccatcccgactcgatggtgtaaccgcgtggg

SEQ ID NO: 262718 - DNA, 50 bp, Artificial
  Synthetic oligonucleotide
acgcatttctggcactggatccaccgcaatgactccccctggacgacggg

SEQ ID NO: 262719 - DNA, 50 bp, Artificial
  Synthetic oligonucleotide
aggtggcgaaaacaccaggagctaagacgcgagtcccacctcccacggga

SEQ ID NO: 262720 - DNA, 59 bp, Artificial
  Synthetic oligonucleotide
gagggggctaaaaaggcagggagcctgcttagtgccgcgtacgctgccatagccttgcc

SEQ ID NO: 262721 - DNA, 59 bp, Artificial
  Synthetic oligonucleotide
gagatagtgaggatagggtcggaattttatcctcaagtaacctcaattgcatccaagaa

SEQ ID NO: 262722 - DNA, 49 bp, Artificial
  Synthetic oligonucleotide
caggtaaagggctttgaatattttacccttgttaaaatgggttttccac

SEQ ID NO: 262723 - DNA, 60 bp, Artificial
  Synthetic oligonucleotide
cagttcccagtcctggcggatctcagcgcggcgggcgatgtaccgatcaaccgttctgga

SEQ ID NO: 262724 - DNA, 60 bp, Artificial
  Synthetic oligonucleotide
ctttcggctcagaacggccagaaatctactgcatggatgcaatactgtactacttttttg

SEQ ID NO: 262725 - DNA, 57 bp, Artificial
  Synthetic oligonucleotide
agccttgccgggcatttactcaggatatcggcaattgagggatccccacgggaaagc

SEQ ID NO: 262726 - DNA, 50 bp, Artificial
  Synthetic oligonucleotide
cccaggggagggacgtgggttgccatccaacggcaaaggtcttacttttt

SEQ ID NO: 262727 - DNA, 60 bp, Artificial
  Synthetic oligonucleotide
ctctcagatagatcaccgatcagctttcccatagcatcatctaacctcgcatctaaccaa

SEQ ID NO: 262728 - DNA, 56 bp, Artificial
  Synthetic oligonucleotide
ctcccatttagccaattcctcccattcgattgggctaccatccgacttatggcttt

SEQ ID NO: 262729 - DNA, 57 bp, Artificial
  Synthetic oligonucleotide
ccggtagcggtagtcgccacgattcggtccgttacggatgcgctcagcctccagcgg

SEQ ID NO: 262730 - DNA, 60 bp, Artificial
  Synthetic oligonucleotide
ctagcagcaaccatcgtcatcagaagcgaagctaatcggtggtttactcattgttgacat

SEQ ID NO: 262731 - DNA, 60 bp, Artificial
  Synthetic oligonucleotide
ctagagcagggaaattttttcgcttgatcatcttcagccatgaggcattcatccatgcga

SEQ ID NO: 262732 - DNA, 58 bp, Artificial
  Synthetic oligonucleotide
cggtcgcaccatgggcgcccttcctgctatgggccaggggggcgacgtagcaccgctc

SEQ ID NO: 262733 - DNA, 56 bp, Artificial
  Synthetic oligonucleotide
cgcgacctatgttggttgctttggtcatagggatctccctttttggacaattccga

SEQ ID NO: 262734 - DNA, 57 bp, Artificial
  Synthetic oligonucleotide
cgcgggctttggtgatccggcagaaactcctacaggaagggatcgaatccgagatag

SEQ ID NO: 262735 - DNA, 60 bp, Artificial
  Synthetic oligonucleotide
tatactctgaatgcagcgccaaaggcactgcaagggaagggcgatttctccgagacttcc

SEQ ID NO: 262736 - DNA, 60 bp, Artificial
  Synthetic oligonucleotide
gcgggaatctatgaggacaagaggcagttccctggagatgtgggcctgaatctgtcaatg

SEQ ID NO: 262737 - DNA, 56 bp, Artificial
  Synthetic oligonucleotide
acgcgctatgtctggacttcggggcattctcctaacagaattgggaacggttcaac

SEQ ID NO: 262738 - DNA, 60 bp, Artificial
  Synthetic oligonucleotide
aatatgacaagctgtcacaagcacaaggaaacctgagaaggttcggactatggcgagttc

SEQ ID NO: 262739 - DNA, 60 bp, Artificial
  Synthetic oligonucleotide
tagccgggctgctgtcagcgagatcgactctccgggctgctgattagattctagcagcaa

SEQ ID NO: 262740 - DNA, 60 bp, Artificial
  Synthetic oligonucleotide
tgagttgtcctctaatattatagcatctaagctatcatctaagctactatctaatatagt

SEQ ID NO: 262741 - DNA, 60 bp, Artificial
  Synthetic oligonucleotide
taacgctatcgatctggtcttgtgaagctgtctagttagctcggctaaccagtcttgagg

SEQ ID NO: 262742 - DNA, 50 bp, Artificial
  Synthetic oligonucleotide
actggtttgttgtcaaaagttttttcggttttctccccagcaatcaccgg

SEQ ID NO: 262743 - DNA, 59 bp, Artificial
  Synthetic oligonucleotide
gttgctcaggtgccgctactggtgtcgattccggttgcggtcgtttcgagagcgcgtta

SEQ ID NO: 262744 - DNA, 60 bp, Artificial
  Synthetic oligonucleotide
tgatcagcgcggagtgcctctccattaggcgcatgagcgtgtcagagctcaggggcggac

SEQ ID NO: 262745 - DNA, 57 bp, Artificial
  Synthetic oligonucleotide
tggagatccgcaaagtttgtctgtctcgccccgcgaacttgcaaggcgttttggaaa

SEQ ID NO: 262746 - DNA, 60 bp, Artificial
  Synthetic oligonucleotide
tggatagcgagcgccatcgatcctgcgattgtcgccctcaatttggaatctctagagggg

SEQ ID NO: 262747 - DNA, 60 bp, Artificial
  Synthetic oligonucleotide
gcgcagaggcaggagtcacgatcaggggcgcaacagctcaatccccagagccaccgcatc

SEQ ID NO: 262748 - DNA, 56 bp, Artificial
  Synthetic oligonucleotide
tggcgagttcttaaaactccctgcttacttacttctcaggttccttgggcaattgc

SEQ ID NO: 262749 - DNA, 60 bp, Artificial
  Synthetic oligonucleotide
tggtaaggctttcaggattggcttgtgggtagtgacatcattagtcctcactttcggctc

SEQ ID NO: 262750 - DNA, 51 bp, Artificial
  Synthetic oligonucleotide
aaagtgttaaccgtttttgtcaaacattagcacgggtaagggctgacgaaa

SEQ ID NO: 262751 - DNA, 60 bp, Artificial
  Synthetic oligonucleotide
ttcagccatcttgctccggttcgagggctcccggttcgatgcctgcagcgaccagacggg

SEQ ID NO: 262752 - DNA, 60 bp, Artificial
  Synthetic oligonucleotide
ttgttgacatctcctgttgactgtacacttaccagtttacatctcctgtaaacttatgtc

SEQ ID NO: 262753 - DNA, 59 bp, Artificial
  Synthetic oligonucleotide
gtgggcaaagtctgtctcacccggcgttacctcaatacacttgatccaccctagagcag

SEQ ID NO: 262754 - DNA, 60 bp, Artificial
  Synthetic oligonucleotide
ttgtttatcatcggtcaaaacgcgaaattcgagggattggctgcactccagatctctgga

SEQ ID NO: 262755 - DNA, 57 bp, Artificial
  Synthetic oligonucleotide
gtgcctccagggccttgctcccgttcctttcgtccttacagcagtggtggcgaccca

SEQ ID NO: 262756 - DNA, 58 bp, Artificial
  Synthetic oligonucleotide
caacagggcttaatcctgtccagttctgtccaatttgccgctggacataaaagccgtc

SEQ ID NO: 262757 - DNA, 58 bp, Artificial
  Synthetic oligonucleotide
cgagacttccttctagaagtctcttgagaaaccgttttatgatcaaggctgtgactct

SEQ ID NO: 262758 - DNA, 47 bp, Artificial
  Synthetic oligonucleotide
gcgaccccccacctcacaaacccgttcccggttggctccgggggggt

SEQ ID NO: 262759 - DNA, 56 bp, Artificial
  Synthetic oligonucleotide
caatctcagatttgacccgacgtagaaacgctgagggtcgttacggatgtattccc

SEQ ID NO: 262760 - DNA, 49 bp, Artificial
  Synthetic oligonucleotide
agggcggttaagcacccattggggagtttttggccggttttgtctgggg

SEQ ID NO: 262761 - DNA, 58 bp, Artificial
  Synthetic oligonucleotide
acgggccaacttctaggctctcaaggatgcaaggtatccgtggcacgatgggcgagcg

SEQ ID NO: 262762 - DNA, 57 bp, Artificial
  Synthetic oligonucleotide
tggatggtatccacagatcagattgcattatttcctaactgtagggaatgacttttt

SEQ ID NO: 262763 - DNA, 57 bp, Artificial
  Synthetic oligonucleotide
caatttacgagattagagcgtgttcatatagcactgcgctagtgtgttagttgcatg

SEQ ID NO: 262764 - DNA, 56 bp, Artificial
  Synthetic oligonucleotide
cgagctttaggataagtcagcacagatttttggtaaggctttaaggaaccgcgcac

SEQ ID NO: 262765 - DNA, 56 bp, Artificial
  Synthetic oligonucleotide
ccataacctgagagttaatcggactattaatactaaatccgttgagtataggctac

SEQ ID NO: 262766 - DNA, 56 bp, Artificial
  Synthetic oligonucleotide
caaattcgagcgctgaaccaacagactcactatagcctaaacgtttctatgttgtc

SEQ ID NO: 262767 - DNA, 55 bp, Artificial
  Synthetic oligonucleotide
cggaattgtcatcgagtgagaacggcagtttattgggctatgtgctatgtgtcga

SEQ ID NO: 262768 - DNA, 53 bp, Artificial
  Synthetic oligonucleotide
ggggcatcggggctaaattctactggtaaaccgtagagacggggaatagtggc

SEQ ID NO: 262769 - DNA, 59 bp, Artificial
  Synthetic oligonucleotide
agtcttgaggggttacaaacatataatcttcaccgattagatcagcaggcttaactgag

SEQ ID NO: 262770 - DNA, 55 bp, Artificial
  Synthetic oligonucleotide
gtgtcaacgctcacgaaatgggacagcacattacttgatttcaacggtgaatcgg

SEQ ID NO: 262771 - DNA, 55 bp, Artificial
  Synthetic oligonucleotide
cggctttgctcaaaggcttttagcgggctttggattgaggcttagttatgtctct

SEQ ID NO: 262772 - DNA, 55 bp, Artificial
  Synthetic oligonucleotide
ttctcaatgccgttaccgattaatttctacccagtaggggtgagagctttccacc

SEQ ID NO: 262773 - DNA, 51 bp, Artificial
  Synthetic oligonucleotide
gtctaaaagagcgaatacccatagtttagttttccgttatcgggtttcttg

SEQ ID NO: 262774 - DNA, 55 bp, Artificial
  Synthetic oligonucleotide
cgcttgatcatcttcagccatgaggcattcatccatgcgatcgtctctcgcagat

SEQ ID NO: 262775 - DNA, 55 bp, Artificial
  Synthetic oligonucleotide
ttcgagggctcccggttcgatgcctgcagcgaccagacgggtgagtagctctatc

SEQ ID NO: 262776 - DNA, 54 bp, Artificial
  Synthetic oligonucleotide
ggggattaaattgccttccgagtcataaaatctcgcccaaattgccgtttctcg

SEQ ID NO: 262777 - DNA, 55 bp, Artificial
  Synthetic oligonucleotide
ggggaggatttagaatcatagtagggactatcggtatcgaattgtgtgggatcga

SEQ ID NO: 262778 - DNA, 52 bp, Artificial
  Synthetic oligonucleotide
ggggagataaggtcgctgtttattggcattagggcggaacccttacccttac

SEQ ID NO: 262779 - DNA, 55 bp, Artificial
  Synthetic oligonucleotide
gggctaaatcgccgatgttccttaatcctcgacggattgagctatgctcggcccc

SEQ ID NO: 262780 - DNA, 59 bp, Artificial
  Synthetic oligonucleotide
atatgaacatccggcaaaatgccctacagaaatattcgcgctccgggtatcgtacagaa

SEQ ID NO: 262781 - DNA, 55 bp, Artificial
  Synthetic oligonucleotide
ctgctgtgcgtcatgcgtccagctccagcaaatcggcgtcgtcagggtctgggaa

SEQ ID NO: 262782 - DNA, 55 bp, Artificial
  Synthetic oligonucleotide
cttgccacggcagctgatagacgcaattctcccgatacataccaacgaaattcta

SEQ ID NO: 262783 - DNA, 54 bp, Artificial
  Synthetic oligonucleotide
ggagaagactagcaccccgaaataaatagggcttacaagggcataaaatcggtc

SEQ ID NO: 262784 - DNA, 55 bp, Artificial
  Synthetic oligonucleotide
gactaattcccctaattccgaatttgatcccctgacacgcacacaagtcctcacc

SEQ ID NO: 262785 - DNA, 55 bp, Artificial
  Synthetic oligonucleotide
gctcgctcccttcgcaacggtgatcctaatctgagggtggcgatcgatttagggg

SEQ ID NO: 262786 - DNA, 55 bp, Artificial
  Synthetic oligonucleotide
taaggcgttcgggcgtgtgcttgcagtggagtggcaacggttagcaaggccgctg

SEQ ID NO: 262787 - DNA, 54 bp, Artificial
  Synthetic oligonucleotide
tcctcgatagtggttcggggacggcagcgaaaactagggttttaatcgagtcga

SEQ ID NO: 262788 - DNA, 55 bp, Artificial
  Synthetic oligonucleotide
gcagcgccaaaggcactgcaagggaagggcgatttctccgagacttccttctaga

SEQ ID NO: 262789 - DNA, 55 bp, Artificial
  Synthetic oligonucleotide
tccgatcgagtgcagacatcagcagcggtggagaggaacgattgatgtggcgggg

SEQ ID NO: 262790 - DNA, 55 bp, Artificial
  Synthetic oligonucleotide
tccattaggcgcatgagcgtgtcagagctcaggggcggacgttcgcggtcccaat

SEQ ID NO: 262791 - DNA, 60 bp, Artificial
  Synthetic oligonucleotide
gcatcacgccacgcaaggctttaactcagttttccgcttgtgagacgctatggcttcagc

SEQ ID NO: 262792 - DNA, 55 bp, Artificial
  Synthetic oligonucleotide
caaacattagcacgggtaagggctgacgaaacgcgctatgtctggacttcggggc

SEQ ID NO: 262793 - DNA, 55 bp, Artificial
  Synthetic oligonucleotide
caactcccattagatcatattttctcggtctgctatcggggactatcttaaaact

SEQ ID NO: 262794 - DNA, 55 bp, Artificial
  Synthetic oligonucleotide
caaaagtcgcaagggagtcaatctaccccgtctcaatttgcgcttaccttccatg

SEQ ID NO: 262795 - DNA, 55 bp, Artificial
  Synthetic oligonucleotide
caggatatcggcaattgagggatccccacgggaaagcgatcgagatgccgcgcct

SEQ ID NO: 262796 - DNA, 55 bp, Artificial
  Synthetic oligonucleotide
caggatccagctcgctgctttccagtcagatcctgcgcaacgaccgatggcctcg

SEQ ID NO: 262797 - DNA, 55 bp, Artificial
  Synthetic oligonucleotide
aggtatcatctaagcttgaatctaagcggtctgtaaggaattgcttggctgccag

SEQ ID NO: 262798 - DNA, 55 bp, Artificial
  Synthetic oligonucleotide
cccaccgtgttagtgctggcatcgcaaacatagatactgcccatagaggaattag

SEQ ID NO: 262799 - DNA, 55 bp, Artificial
  Synthetic oligonucleotide
cccagttgggtttagataaactgatcaccgatcaaaagaccctgcaaatcgtccg

SEQ ID NO: 262800 - DNA, 55 bp, Artificial
  Synthetic oligonucleotide
ccccggataaaggatactattcagggcatcgagatcgctatacgaagtcactccg

SEQ ID NO: 262801 - DNA, 55 bp, Artificial
  Synthetic oligonucleotide
ccgattggaaacggcttcggattgggagtggtgcgatttggtaatcatctccgcc

SEQ ID NO: 262802 - DNA, 60 bp, Artificial
  Synthetic oligonucleotide
atcgctgcctaatctggcacaccctctgtaatatactattattaatatcacccccggcgc

SEQ ID NO: 262803 - DNA, 55 bp, Artificial
  Synthetic oligonucleotide
cctatactatcgccgtttccgtgccaattggtagcaatgtcaacaccgccctaga

SEQ ID NO: 262804 - DNA, 55 bp, Artificial
  Synthetic oligonucleotide
cgaaactagccacagcgagagggtttaatagcgagacttgtagtcagagtttagg

SEQ ID NO: 262805 - DNA, 53 bp, Artificial
  Synthetic oligonucleotide
actccctgcttacttacttctcaggttccttgggcaattgccggggcctacgt

SEQ ID NO: 262806 - DNA, 55 bp, Artificial
  Synthetic oligonucleotide
cgacggaatttcgagcttgcactcgttgaccagcaaactgcgcttacatacgaac

SEQ ID NO: 262807 - DNA, 55 bp, Artificial
  Synthetic oligonucleotide
aaaacccgtgaccagggcgggcgggtggatgagacatggacggttggtgcaactg

SEQ ID NO: 262808 - DNA, 55 bp, Artificial
  Synthetic oligonucleotide
cgctacctgccgggcttgggtctttatgctgatcccacggtttatcgcgaagaga

SEQ ID NO: 262809 - DNA, 54 bp, Artificial
  Synthetic oligonucleotide
ctaacccggaattagtcgcgaggggaatatcggcaatgaatcaagctgtatcga

SEQ ID NO: 262810 - DNA, 54 bp, Artificial
  Synthetic oligonucleotide
ggtgatgccctagaaaatggtgaggggaaagtattcaagccggacattaatcga

SEQ ID NO: 262811 - DNA, 54 bp, Artificial
  Synthetic oligonucleotide
gagtgcagacatcagcagcggtggagaggaacgattgatgtggcgggggagcac

SEQ ID NO: 262812 - DNA, 53 bp, Artificial
  Synthetic oligonucleotide
agcgatcgcacctcggcacacttccgggttaggggcaaaactgactcgcacat

SEQ ID NO: 262813 - DNA, 55 bp, Artificial
  Synthetic oligonucleotide
atgtccaatggttaccggtgttgtgccgcatgtgggcggacccgttctgccggca

SEQ ID NO: 262814 - DNA, 54 bp, Artificial
  Synthetic oligonucleotide
cgcttcttattaaactggtacattttgctgggacggccctttccttcgctcttc

SEQ ID NO: 262815 - DNA, 55 bp, Artificial
  Synthetic oligonucleotide
cggccgggcggtgtaaacctctctcatacggttcaaacctatatgatgcctaacc

SEQ ID NO: 262816 - DNA, 55 bp, Artificial
  Synthetic oligonucleotide
cgtcatcaggtcccagttaacccgaatgggttggccaataaaccagccgttcgca

SEQ ID NO: 262817 - DNA, 55 bp, Artificial
  Synthetic oligonucleotide
atcgaccggggtaacctggtaaaccacattacaggcagcatccatagtgatggcc

SEQ ID NO: 262818 - DNA, 55 bp, Artificial
  Synthetic oligonucleotide
ctgaagggctgcgacaccccaaatcacgaataagaacgcccacgcaatagcgtga

SEQ ID NO: 262819 - DNA, 55 bp, Artificial
  Synthetic oligonucleotide
ctggcaggccagtaataaacgcattaacctcgaatcccaggtagaagagcccttg

SEQ ID NO: 262820 - DNA, 55 bp, Artificial
  Synthetic oligonucleotide
gacgactcaataaacggtctgagctgggtaaatgaactgctatagatcgagagtt

SEQ ID NO: 262821 - DNA, 55 bp, Artificial
  Synthetic oligonucleotide
atcacaatcggtaacaagagctcgaatgagatgtcgcaggtactggcctggaaaa

SEQ ID NO: 262822 - DNA, 55 bp, Artificial
  Synthetic oligonucleotide
gccggtagcaaccaggagaacgcttcgttccccgtgggattatgcgcagaacggg

SEQ ID NO: 262823 - DNA, 52 bp, Artificial
  Synthetic oligonucleotide
gggcggataaaagaacaccttacgcccctcgatttcctggttgtagaacaac

SEQ ID NO: 262824 - DNA, 54 bp, Artificial
  Synthetic oligonucleotide
catggcaaaatagggcgcggtttatcggtagagatgtcggtaaagaacggaccg

SEQ ID NO: 262825 - DNA, 55 bp, Artificial
  Synthetic oligonucleotide
gtaatggtgtggataagtccgttcataagtcccgatagcgaaacattcagggagt

SEQ ID NO: 262826 - DNA, 53 bp, Artificial
  Synthetic oligonucleotide
gtcggtacggtagccgaagttatcggagttccagttggtatacgcacttcccc

SEQ ID NO: 262827 - DNA, 55 bp, Artificial
  Synthetic oligonucleotide
agctcgtaaatccacagagccggtcttacagggttgcgtagctgacgcaagcacc

SEQ ID NO: 262828 - DNA, 52 bp, Artificial
  Synthetic oligonucleotide
aaagccgccgtgttcttctttaatgcggaatacttttagtttcaccggttgc

SEQ ID NO: 262829 - DNA, 55 bp, Artificial
  Synthetic oligonucleotide
actcggttagtatgttcgacataagcaatgcccatgaaccgcgtaaatcgggtga

SEQ ID NO: 262830 - DNA, 54 bp, Artificial
  Synthetic oligonucleotide
gaagtgtgaaacacgttctggagtgccgggctgatatggagcttgacgacttcg

SEQ ID NO: 262831 - DNA, 54 bp, Artificial
  Synthetic oligonucleotide
tgctgcgaaaagacaatgaaccccgcagtgcacaggtggccataaaacggttac

SEQ ID NO: 262832 - DNA, 53 bp, Artificial
  Synthetic oligonucleotide
aattaccacccactcatacactgggcacccggtataaattatggctgtcaagg

SEQ ID NO: 262833 - DNA, 53 bp, Artificial
  Synthetic oligonucleotide
tgtgactctggggcgagggttagttgtggtggcggtgattccaggtaggccca

SEQ ID NO: 262834 - DNA, 52 bp, Artificial
  Synthetic oligonucleotide
gcaaactacagcaattaccccgctctatacaattggacaggatctatgcccc

SEQ ID NO: 262835 - DNA, 50 bp, Artificial
  Synthetic oligonucleotide
cccatacctgttggccctattaccgtttaccaccggttacactaccgaaa

SEQ ID NO: 262836 - DNA, 52 bp, Artificial
  Synthetic oligonucleotide
taacgctgcgggagcaaagaaaagattcggcctttaccctcaccagttccga

SEQ ID NO: 262837 - DNA, 49 bp, Artificial
  Synthetic oligonucleotide
agccctaccccaccggtggcctccctgtttaaccggttaatggcgtttc

SEQ ID NO: 262838 - DNA, 50 bp, Artificial
  Synthetic oligonucleotide
agcccggggaaagtccataggcacccggctgctgcaaacagtgattgacc

SEQ ID NO: 262839 - DNA, 50 bp, Artificial
  Synthetic oligonucleotide
agcaccaatggttgggcacatccgcgtataggggcggcctaaagactggg

SEQ ID NO: 262840 - DNA, 50 bp, Artificial
  Synthetic oligonucleotide
agcaaaggtgcagtaacggtgttgggtggaccgcatgcccggtgctatcc

SEQ ID NO: 262841 - DNA, 50 bp, Artificial
  Synthetic oligonucleotide
agatgcatagccacggaggtgcgattgccggaacccaatgaatgccgggt

SEQ ID NO: 262842 - DNA, 50 bp, Artificial
  Synthetic oligonucleotide
aaaaccgtgttgcctgactgcagtgagcgccgggttaagggaggctgccc

SEQ ID NO: 262843 - DNA, 50 bp, Artificial
  Synthetic oligonucleotide
aaaactggtgcgtccctgggctattccgggtgtgcctggtttggaacacc

SEQ ID NO: 262844 - DNA, 50 bp, Artificial
  Synthetic oligonucleotide
aaagttggaagccgaggccgtataaggagccgctacgattccgctgccgg

SEQ ID NO: 262845 - DNA, 50 bp, Artificial
  Synthetic oligonucleotide
aacaggggttgcagccaggtaggccgagtcacccgcctgtgaagccgtga

SEQ ID NO: 262846 - DNA, 55 bp, Artificial
  Synthetic oligonucleotide
ccccgtaacaccacactcatgccgctgtctctttgtgcaggttgaatagggccgg

SEQ ID NO: 262847 - DNA, 50 bp, Artificial
  Synthetic oligonucleotide
aacccggcgcaatcgtgtactatcccccggcttttacccgcaatacccgg

SEQ ID NO: 262848 - DNA, 50 bp, Artificial
  Synthetic oligonucleotide
aaccgtacgttgccattcgggcaaacccgcactctcattccggcgaatga

SEQ ID NO: 262849 - DNA, 50 bp, Artificial
  Synthetic oligonucleotide
aacggaacacgcctgtggctggctaactactccggcccgggaaggaacga

SEQ ID NO: 262850 - DNA, 50 bp, Artificial
  Synthetic oligonucleotide
aagcggggttcggaaatacccgggccacttcggtgatgccacagtggctt

SEQ ID NO: 262851 - DNA, 50 bp, Artificial
  Synthetic oligonucleotide
aagctacccaacccggactgtacgttggcaccccaccgaagttagccgta

SEQ ID NO: 262852 - DNA, 50 bp, Artificial
  Synthetic oligonucleotide
aagctgccgtcaagcgcccgtatcattgtactggggtcctgcggtggata

SEQ ID NO: 262853 - DNA, 50 bp, Artificial
  Synthetic oligonucleotide
aaggcattacgcacggcggcttcaggaccgctgtactctgttccccacat

SEQ ID NO: 262854 - DNA, 50 bp, Artificial
  Synthetic oligonucleotide
aatgggtaagcagctggaatgccgcctccctgcaggcaggtaccgtagca

SEQ ID NO: 262855 - DNA, 50 bp, Artificial
  Synthetic oligonucleotide
aattcctgccgcattttccagtcacgggtaagccccgaggccgcgaattt

SEQ ID NO: 262856 - DNA, 50 bp, Artificial
  Synthetic oligonucleotide
acaccggggttgccaatgcagcctatgccacatcgggttcgcgcaatttg

SEQ ID NO: 262857 - DNA, 55 bp, Artificial
  Synthetic oligonucleotide
cccctgtactcagtggacgcctcttatatgatagacaccactaccggctacatac

SEQ ID NO: 262858 - DNA, 50 bp, Artificial
  Synthetic oligonucleotide
acacgccctcacgcgaagggtacggcccgaataaaccaggggattcggac

SEQ ID NO: 262859 - DNA, 50 bp, Artificial
  Synthetic oligonucleotide
acccacaactgccgcactcctggtggacaccccgaaggctacctcgaagc

SEQ ID NO: 262860 - DNA, 50 bp, Artificial
  Synthetic oligonucleotide
agatagctggccacgctgccttcccaggagaccacgcctgttgcaggtgt

SEQ ID NO: 262861 - DNA, 50 bp, Artificial
  Synthetic oligonucleotide
actgttccggtaaaatgccaccccactcgccactccctccaaccgtccca

SEQ ID NO: 262862 - DNA, 50 bp, Artificial
  Synthetic oligonucleotide
actgcccgtgcagtggcccaaaacgtttacacgacagcgaatgcgcatgc

SEQ ID NO: 262863 - DNA, 50 bp, Artificial
  Synthetic oligonucleotide
acgctgctttaacccgctgcactacgtcccaggtactggcgtctgcccgt

SEQ ID NO: 262864 - DNA, 50 bp, Artificial
  Synthetic oligonucleotide
acgcgcccatagccagtgcaatcaccgcagccgctgcccaatacagggta

SEQ ID NO: 262865 - DNA, 50 bp, Artificial
  Synthetic oligonucleotide
acgcacggcggcttcaggaccgctgtactctgttccccacataggatgcg

SEQ ID NO: 262866 - DNA, 50 bp, Artificial
  Synthetic oligonucleotide
acgagcacgtcgaaaaaccccgccataagtgcagccggcacttacaccgc

SEQ ID NO: 262867 - DNA, 50 bp, Artificial
  Synthetic oligonucleotide
acctgtagacagggccgcgggtaacagccccaatgctgccatcgttgctg

SEQ ID NO: 262868 - DNA, 55 bp, Artificial
  Synthetic oligonucleotide
cccgaagtctgattatccggcaacaggaacgaatctttatacggaccatcggccc

SEQ ID NO: 262869 - DNA, 50 bp, Artificial
  Synthetic oligonucleotide
acctgccgggttcaatgtactggccactaccgacggtatccccttcgccg

SEQ ID NO: 262870 - DNA, 50 bp, Artificial
  Synthetic oligonucleotide
acctgcagaggcgggcaactgccaacggaatcagatatcgtgaacccggc

SEQ ID NO: 262871 - DNA, 50 bp, Artificial
  Synthetic oligonucleotide
acctgcactttggcggtatcggaacaaccattggccagggtccctgccag

SEQ ID NO: 262872 - DNA, 50 bp, Artificial
  Synthetic oligonucleotide
accgtgccggggcttactatagggcaaaccactacagcgggcagcgatcc

SEQ ID NO: 262873 - DNA, 50 bp, Artificial
  Synthetic oligonucleotide
accgtagcatatcgcagccgtggggcgtggtttgtgcagaacccggtagc

SEQ ID NO: 262874 - DNA, 50 bp, Artificial
  Synthetic oligonucleotide
accggcctaccgttccttcacacaaggggccatctgctcccaggttcggt

SEQ ID NO: 262875 - DNA, 50 bp, Artificial
  Synthetic oligonucleotide
acccggcgcaaaaagcctcgcggctcgatcctattgaagcgttgcggtat

SEQ ID NO: 262876 - DNA, 50 bp, Artificial
  Synthetic oligonucleotide
acccgctatggcaccctgcttggccagcgttttagtatggcatcggccgt

SEQ ID NO: 262877 - DNA, 50 bp, Artificial
  Synthetic oligonucleotide
acccgcggcggaagaaatcagctgggttgccccagagtgctgtagggatc

SEQ ID NO: 262878 - DNA, 50 bp, Artificial
  Synthetic oligonucleotide
cccgaggagcaaaccgggaccgtacaggttaagtttaaggtgcgggtata

SEQ ID NO: 262879 - DNA, 55 bp, Artificial
  Synthetic oligonucleotide
cgaccatttgttcaacgaatactatactcagctgcaatacttcgcagaacgcctc

SEQ ID NO: 262880 - DNA, 51 bp, Artificial
  Synthetic oligonucleotide
cgagcccaaacatacccgggataccgtaccggtaattatacaggtgtaaac

SEQ ID NO: 262881 - DNA, 55 bp, Artificial
  Synthetic oligonucleotide
ccgactccagtatcccctccatcgcccttcgaatcacttcactcttacgttcgcc

SEQ ID NO: 262882 - DNA, 55 bp, Artificial
  Synthetic oligonucleotide
cacaagcgctcctgggacattgagacctgtgaatgtctccaccggctaatagccg

SEQ ID NO: 262883 - DNA, 55 bp, Artificial
  Synthetic oligonucleotide
caatccaatactgggaagtcaaagcaaacggggaggtgaacaatgtccagattcg

SEQ ID NO: 262884 - DNA, 55 bp, Artificial
  Synthetic oligonucleotide
gcacaccataaactctcttctattcgctacagtgtcaaaatcgatcgaccgctgg

SEQ ID NO: 262885 - DNA, 55 bp, Artificial
  Synthetic oligonucleotide
atctcttttccgactcttcgggagttacttcacggggatctttgctcattggttc

SEQ ID NO: 262886 - DNA, 55 bp, Artificial
  Synthetic oligonucleotide
ggatcccgtaccgatcgaagggcaggagtgtcagtcggatatcctcgagttcgat

SEQ ID NO: 262887 - DNA, 55 bp, Artificial
  Synthetic oligonucleotide
tgccaacctttactgtccctcagagcatagatttccggaggtgtcagatcctcgt

SEQ ID NO: 262888 - DNA, 55 bp, Artificial
  Synthetic oligonucleotide
tgagctgtccaatgtcgggcataccccatcgagggccttcagtcctccggcgttc

SEQ ID NO: 262889 - DNA, 55 bp, Artificial
  Synthetic oligonucleotide
tctggcggcgactggaggggtgcgatgtgattttggtgccggctcagtggggctt

SEQ ID NO: 262890 - DNA, 55 bp, Artificial
  Synthetic oligonucleotide
tccgaaacccgatcgcggcactcaattcacgatagagctcatcatcgatcacccc

SEQ ID NO: 262891 - DNA, 55 bp, Artificial
  Synthetic oligonucleotide
agagagttctatgcccgggcccatccattgctggagaagcttcgtcacgcctcgg

SEQ ID NO: 262892 - DNA, 55 bp, Artificial
  Synthetic oligonucleotide
cccctgatgcgcggtggtatcaactgtccccgctatgatcttcgtgccatccggc

SEQ ID NO: 262893 - DNA, 55 bp, Artificial
  Synthetic oligonucleotide
tcatatgcattacggatcctatacactcagtacccggtttgactattcgatacgc

SEQ ID NO: 262894 - DNA, 55 bp, Artificial
  Synthetic oligonucleotide
taattcgccttttatgccgtgtaaacatcctcacctcttgagacgatagatccgg

SEQ ID NO: 262895 - DNA, 55 bp, Artificial
  Synthetic oligonucleotide
atcaccgctatcacgccccgatggatctaaagatcgagagtatcacccatatccc

SEQ ID NO: 262896 - DNA, 55 bp, Artificial
  Synthetic oligonucleotide
gggccctttgagtatggcacgctcgtttggataggattctacgataacggggtga

SEQ ID NO: 262897 - DNA, 54 bp, Artificial
  Synthetic oligonucleotide
tatttcccgatgctgtcgtacacataaattccgtggctagttactcttcctgcg

SEQ ID NO: 262898 - DNA, 53 bp, Artificial
  Synthetic oligonucleotide
gattgataccgcccagctccgaggagctcactaggaggaccggagcttccaaa

SEQ ID NO: 262899 - DNA, 53 bp, Artificial
  Synthetic oligonucleotide
agcgtatgagccgggctttccacgagtattacgacggattggggcttgagtgg

SEQ ID NO: 262900 - DNA, 51 bp, Artificial
  Synthetic oligonucleotide
ggggtgatacggaattgtatcggggagacggggagcccgattcctgtcggt

SEQ ID NO: 262901 - DNA, 51 bp, Artificial
  Synthetic oligonucleotide
tcgaaaagcgtgtggctatcttcggagtaggtgaggatactggggaccagc

SEQ ID NO: 262902 - DNA, 51 bp, Artificial
  Synthetic oligonucleotide
gccccacatcgatgcacagccggtctccaatttccaggggaccttcaaaga

SEQ ID NO: 262903 - DNA, 55 bp, Artificial
  Synthetic oligonucleotide
ccccagcgatagacggcactgtctccaccgcctacataatcctggttgaattgat

SEQ ID NO: 262904 - DNA, 50 bp, Artificial
  Synthetic oligonucleotide
cgaagaggagtagccgaaaaggctcagagcgtcgggggcttgcgtttccg

SEQ ID NO: 262905 - DNA, 50 bp, Artificial
  Synthetic oligonucleotide
tgaaacagccaagaccgtgactctacatgcttagtcggtgtcgatagtat

SEQ ID NO: 262906 - DNA, 50 bp, Artificial
  Synthetic oligonucleotide
cctatgccgacctggcatgacgagtggaagttcagcgttccggagggcaa

SEQ ID NO: 262907 - DNA, 50 bp, Artificial
  Synthetic oligonucleotide
ccgttaacctctttggcgtgtcgggcgttggcactgcgatgcaaacccaa

SEQ ID NO: 262908 - DNA, 50 bp, Artificial
  Synthetic oligonucleotide
ccgggcggggcataaatcgggaagcccccaggagcgttctgacggcatag

SEQ ID NO: 262909 - DNA, 50 bp, Artificial
  Synthetic oligonucleotide
ccgcaggcccgtgcttgcgacttgtgacgataatcctcccgatgaccgat

SEQ ID NO: 262910 - DNA, 50 bp, Artificial
  Synthetic oligonucleotide
aaggtccccggagcctatgtctggctcgggagcaaaagcgatccggaagc

SEQ ID NO: 262911 - DNA, 50 bp, Artificial
  Synthetic oligonucleotide
acatagtgggcccccggtttacccagggcaatctcacggggcaggacgcg

SEQ ID NO: 262912 - DNA, 50 bp, Artificial
  Synthetic oligonucleotide
acccccggccattaggaccgctttggttgcgctcatccttgaacctccag

SEQ ID NO: 262913 - DNA, 50 bp, Artificial
  Synthetic oligonucleotide
acccgcgaaggttgatcggtgaagcctgattttggcggacagagccgcgt

SEQ ID NO: 262914 - DNA, 53 bp, Artificial
  Synthetic oligonucleotide
ccatcgttccggtaaaggcttcccacttcgcggagagtgttcgtaagccggct

SEQ ID NO: 262915 - DNA, 50 bp, Artificial
  Synthetic oligonucleotide
accgccttggcccgtttgagacccagggcgtggttgtattcgtcggtccc

SEQ ID NO: 262916 - DNA, 50 bp, Artificial
  Synthetic oligonucleotide
acgtcagcgtcgaaagagctctaccatccggacacccgaccggccccttt

SEQ ID NO: 262917 - DNA, 50 bp, Artificial
  Synthetic oligonucleotide
agcagcctccgggtctccccgacacttcacctctcgctcttttaaccccc

SEQ ID NO: 262918 - DNA, 50 bp, Artificial
  Synthetic oligonucleotide
agcccccttcacaccctaccacgatcgaacgctctgtccaatcccctccg

SEQ ID NO: 262919 - DNA, 50 bp, Artificial
  Synthetic oligonucleotide
agccgtgccacggggtatttgacatagctgcccaccgagggggtcgcgct

SEQ ID NO: 262920 - DNA, 50 bp, Artificial
  Synthetic oligonucleotide
ataccctgcacaacggggacagggtcctggtctgtggatatgccggtgca

SEQ ID NO: 262921 - DNA, 50 bp, Artificial
  Synthetic oligonucleotide
atccctacctgttcgggggtgggtttcgcctcggctttcgtgtacttcgc

SEQ ID NO: 262922 - DNA, 50 bp, Artificial
  Synthetic oligonucleotide
atccgggaacgctccatccgtgatgcctcccacaagctccaatggcccct

SEQ ID NO: 262923 - DNA, 50 bp, Artificial
  Synthetic oligonucleotide
caacggggacagggtcctggtctgtggatatgccggtgcatggagaagga

SEQ ID NO: 262924 - DNA, 50 bp, Artificial
  Synthetic oligonucleotide
caaggacaaggtggatcgagaacgcaacatcgcactgcggcttgcaggga

SEQ ID NO: 262925 - DNA, 55 bp, Artificial
  Synthetic oligonucleotide
cgactctgtgcagcttgggcctcttcgacattggcacctatggaagtccctgaac

SEQ ID NO: 262926 - DNA, 50 bp, Artificial
  Synthetic oligonucleotide
cacatccgtggagagaaaggggagtcgccaacgccgtttcaggcgccgca

SEQ ID NO: 262927 - DNA, 50 bp, Artificial
  Synthetic oligonucleotide
caccctaccacgatcgaacgctctgtccaatcccctccgcagggcagcct

SEQ ID NO: 262928 - DNA, 50 bp, Artificial
  Synthetic oligonucleotide
cacctggaggccaaagaggtactcaccagcggggtaggcgtgcgggaggg

SEQ ID NO: 262929 - DNA, 50 bp, Artificial
  Synthetic oligonucleotide
ccaagtacagggcggtgggccgaccttccgaaatggagccagcttttggc

SEQ ID NO: 262930 - DNA, 50 bp, Artificial
  Synthetic oligonucleotide
ccaatcacggagtagacaccgcccagggggcagatgtgaccgcaccatcc

SEQ ID NO: 262931 - DNA, 50 bp, Artificial
  Synthetic oligonucleotide
ccccagacgtgtggcccgaagagctgtttcccgcaagagtagaacggtgg

SEQ ID NO: 262932 - DNA, 50 bp, Artificial
  Synthetic oligonucleotide
ccccgcaaaccggtctatgcgcataaaaaggcgtggcagcgcaatggaga

SEQ ID NO: 262933 - DNA, 50 bp, Artificial
  Synthetic oligonucleotide
cccgggcggtagcacgcaagtggccgtgcctgctctggactattcagatc

SEQ ID NO: 262934 - DNA, 50 bp, Artificial
  Synthetic oligonucleotide
cccgggggttgggaaggtcgtagagggtatgggcggtccggttgatgcag

SEQ ID NO: 262935 - DNA, 50 bp, Artificial
  Synthetic oligonucleotide
ccgaacgatcatcgagtgggcacagccgggacagaggagatgcgctcctt

SEQ ID NO: 262936 - DNA, 55 bp, Artificial
  Synthetic oligonucleotide
cacttcgaatcggagcgccatcctaaccgcctggcgaccaagatccgggatctgg

SEQ ID NO: 262937 - DNA, 55 bp, Artificial
  Synthetic oligonucleotide
cacttcagcgatttgccatccctttcccggaagcgaatcctccattctaaagctc

SEQ ID NO: 262938 - DNA, 53 bp, Artificial
  Synthetic oligonucleotide
cggctcaaccctaacggggtccttctatgcgatctcaataccttatacggttt

SEQ ID NO: 262939 - DNA, 55 bp, Artificial
  Synthetic oligonucleotide
ctccaatcgggaagtgttccgtgaagggtgcgaggggatgatctgtgtcaacgag

SEQ ID NO: 262940 - DNA, 55 bp, Artificial
  Synthetic oligonucleotide
gtgactatttcattagcctccgcaatagaacaaaattcgccaataaggttcacgc

SEQ ID NO: 262941 - DNA, 55 bp, Artificial
  Synthetic oligonucleotide
ttaaacgtcttagagccggttttgcatccctaacctgatcaaagcagccatagcg

SEQ ID NO: 262942 - DNA, 55 bp, Artificial
  Synthetic oligonucleotide
gagtgccatatgtattggacttatacaaccccttgacaagagcgcagaaacttca

SEQ ID NO: 262943 - DNA, 55 bp, Artificial
  Synthetic oligonucleotide
ctttgcacgtacttgctcgtggagtagctcatcgaataaactataagcttgtcat

SEQ ID NO: 262944 - DNA, 55 bp, Artificial
  Synthetic oligonucleotide
ctgtatggaagaccgccagggtcgctcgatgcttcatgctgcaagaaactttgcc

SEQ ID NO: 262945 - DNA, 55 bp, Artificial
  Synthetic oligonucleotide
ctgtacataccacagtgcgacagaaagaatatatcccgccaacactgtccaggca

SEQ ID NO: 262946 - DNA, 55 bp, Artificial
  Synthetic oligonucleotide
ctcggtatgaatgcaagtagactggaagtggatgtgcatatcatcgctgcaccaa

SEQ ID NO: 262947 - DNA, 54 bp, Artificial
  Synthetic oligonucleotide
ataaacggaggaaaaggggtatcggtatagataagaccgtgatagctcgtatcc

SEQ ID NO: 262948 - DNA, 55 bp, Artificial
  Synthetic oligonucleotide
atcacaactgcgggatagtgagagaagagttggccctgaaaggcgttttgtctgt

SEQ ID NO: 262949 - DNA, 55 bp, Artificial
  Synthetic oligonucleotide
tacgtagtttcggccaaagtgccgaaatgttacagacgagatttgtatcgtctga

SEQ ID NO: 262950 - DNA, 55 bp, Artificial
  Synthetic oligonucleotide
cagcttggatcttccgcccacagatcgccatgaatcgcccatgctctgggacggc

SEQ ID NO: 262951 - DNA, 55 bp, Artificial
  Synthetic oligonucleotide
ggtttaggcttgtttagtgtcagcggaatgggtgtggaatatccggtctcttcgc

SEQ ID NO: 262952 - DNA, 55 bp, Artificial
  Synthetic oligonucleotide
ccacaacagccaatatgggtattactatcgtacttagcaaccaggatagcttgag

SEQ ID NO: 262953 - DNA, 55 bp, Artificial
  Synthetic oligonucleotide
cgcattatcatctgtgttccctacggcttgacgcaggtagagcgaaaagctgtga

SEQ ID NO: 262954 - DNA, 55 bp, Artificial
  Synthetic oligonucleotide
cggcagatattgagctacaacacacgcttcctgagtttattacaagtcgaggtgg

SEQ ID NO: 262955 - DNA, 55 bp, Artificial
  Synthetic oligonucleotide
cgtcatacctatgctcacactcaacggatactcgaaatgttgactcaatgcttca

SEQ ID NO: 262956 - DNA, 54 bp, Artificial
  Synthetic oligonucleotide
gtatatgatttgagccatccagctactttgccaactactaaatgtcgtgccgat

SEQ ID NO: 262957 - DNA, 53 bp, Artificial
  Synthetic oligonucleotide
cctcttttgaatgctccgttcagacccgtgcaacgggctttcgcggcaaagct

SEQ ID NO: 262958 - DNA, 53 bp, Artificial
  Synthetic oligonucleotide
taccaaatagggttcccgttgtcgcacttgcacagcctacacatgcgcccata

SEQ ID NO: 262959 - DNA, 53 bp, Artificial
  Synthetic oligonucleotide
agatgcaagcgacctcagggcctacgcggtatgcgaagggggcaatcttggtt

SEQ ID NO: 262960 - DNA, 52 bp, Artificial
  Synthetic oligonucleotide
tacccctttttcgatcccggctctggtgagaatggacctgtccgcaagcctc

SEQ ID NO: 262961 - DNA, 52 bp, Artificial
  Synthetic oligonucleotide
taggtggcggagcgagcattcttggagttctcagcggtacaagcggcaatcc

SEQ ID NO: 262962 - DNA, 55 bp, Artificial
  Synthetic oligonucleotide
gggatagacgagataccgttcaccatccaggacagctcttgtcaaagggtgccgc

SEQ ID NO: 262963 - DNA, 52 bp, Artificial
  Synthetic oligonucleotide
tgccggaagtgcagcccaaagggccaagaaaccgactgccgcaacataaccg

SEQ ID NO: 262964 - DNA, 52 bp, Artificial
  Synthetic oligonucleotide
tgtgccctttttgcctcccagttcgcacccaacagtgcctgcaaagagtgcc

SEQ ID NO: 262965 - DNA, 52 bp, Artificial
  Synthetic oligonucleotide
gtggggcaagattgacccacagctctgttcgaatcggtggcgtgccgttaga

SEQ ID NO: 262966 - DNA, 52 bp, Artificial
  Synthetic oligonucleotide
cacctccgtgatttgttgcaacgacaggggtatttaacgccatcgcttcaac

SEQ ID NO: 262967 - DNA, 51 bp, Artificial
  Synthetic oligonucleotide
ttcgtaacatagagccacagcggctcattgccgcaccaaagccactgtttt

SEQ ID NO: 262968 - DNA, 51 bp, Artificial
  Synthetic oligonucleotide
ccacattgagtggaggcagatggggttgcatatcagaccttcagacgctct

SEQ ID NO: 262969 - DNA, 51 bp, Artificial
  Synthetic oligonucleotide
tagcgcccgtggaggcagggatgccgcacaaagagtggtcaactacatgct

SEQ ID NO: 262970 - DNA, 51 bp, Artificial
  Synthetic oligonucleotide
accaccgattgtcgggccaagagcgggagcaaaactgacaccaagggcaaa

SEQ ID NO: 262971 - DNA, 51 bp, Artificial
  Synthetic oligonucleotide
aacatgcagcactctctcttacgatgagtccagctgttgagctgaatacgc

SEQ ID NO: 262972 - DNA, 50 bp, Artificial
  Synthetic oligonucleotide
ttgcctcccagttcgcacccaacagtgcctgcaaagagtgccacccactg

SEQ ID NO: 262973 - DNA, 55 bp, Artificial
  Synthetic oligonucleotide
gggaacaactacgagtgtcgttttgtccttgagatgcatcacccattctgtagct

SEQ ID NO: 262974 - DNA, 50 bp, Artificial
  Synthetic oligonucleotide
gcactctcttttggggacagatcacggtactttagaggctgcaggaccac

SEQ ID NO: 262975 - DNA, 50 bp, Artificial
  Synthetic oligonucleotide
cgtacgcaggaatagcaaaagaggtcgtctataatggtcatacgattaag

SEQ ID NO: 262976 - DNA, 50 bp, Artificial
  Synthetic oligonucleotide
atctggatagagattaccgcctgcatggagatggcacgccggtggccctg

SEQ ID NO: 262977 - DNA, 55 bp, Artificial
  Synthetic oligonucleotide
ggcacacacacccataatcataacggacgattcagaaggctcaaacccttcgggc

SEQ ID NO: 262978 - DNA, 55 bp, Artificial
  Synthetic oligonucleotide
ggagccggtgcaacaatgagaacagttgtcaacattaaagcaggtggacgtacac

SEQ ID NO: 262979 - DNA, 55 bp, Artificial
  Synthetic oligonucleotide
gctatggaagatggatagcatatcggaaggggttcacttgctgggatagtagcac

SEQ ID NO: 262980 - DNA, 55 bp, Artificial
  Synthetic oligonucleotide
gccggctgtcaacccctgcacatcaaccggtcctgtagctgtagtaccattacct

SEQ ID NO: 262981 - DNA, 55 bp, Artificial
  Synthetic oligonucleotide
gccaaagattcatatcgcctgtatggctgagaactccggccataactaggccggt

SEQ ID NO: 262982 - DNA, 57 bp, Artificial
  Synthetic oligonucleotide
cgcggcgggaaggaaacgcttcagtcgccagatggttctatcgctaaagcgagttcc

SEQ ID NO: 262983 - DNA, 55 bp, Artificial
  Synthetic oligonucleotide
cgggtcccagtgttacatcagcgtccgtgcgctgggtatttagtctagtactgct

SEQ ID NO: 262984 - DNA, 50 bp, Artificial
  Synthetic oligonucleotide
aaccgcataggattcgagggtgaccccagtggacaaacggccggctcgca

SEQ ID NO: 262985 - DNA, 50 bp, Artificial
  Synthetic oligonucleotide
aaccgtcttcggcagggaaaaagcgccagtaccctagcgaatcacccgct

SEQ ID NO: 262986 - DNA, 50 bp, Artificial
  Synthetic oligonucleotide
aacctcgcctttcctcggtggttcacgcacagcccattacggttggcgct

SEQ ID NO: 262987 - DNA, 50 bp, Artificial
  Synthetic oligonucleotide
aacgaactatggactgggcacccgcaggccacgaaacatgggcgaacccc

SEQ ID NO: 262988 - DNA, 50 bp, Artificial
  Synthetic oligonucleotide
aacgatcccgatgccgatagtgagatggcgtcagaggcggctactgccga

SEQ ID NO: 262989 - DNA, 50 bp, Artificial
  Synthetic oligonucleotide
aacgcaatgcgaatgttctgggccgatgcgacagggtcaggtttgcccat

SEQ ID NO: 262990 - DNA, 50 bp, Artificial
  Synthetic oligonucleotide
aacgcacttgcacctcaccacggctgttcggttgaaggcgcctaaccaca

SEQ ID NO: 262991 - DNA, 50 bp, Artificial
  Synthetic oligonucleotide
aacgcaggtcagcgccactctcgacgagtaagcggccgacgagcaattca

SEQ ID NO: 262992 - DNA, 50 bp, Artificial
  Synthetic oligonucleotide
aacgcccagcgactggcgtctgaacgtcagtgcaacaggtctatgaggcc

SEQ ID NO: 262993 - DNA, 50 bp, Artificial
  Synthetic oligonucleotide
aacgcctgtcctggcgcagttgtttggcagatgcgagaacgcgcactatt

SEQ ID NO: 262994 - DNA, 55 bp, Artificial
  Synthetic oligonucleotide
cgcttctatggaagccgcagcgcaaccgatgcttgaagaggtgatcgtgactgcg

SEQ ID NO: 262995 - DNA, 50 bp, Artificial
  Synthetic oligonucleotide
aacgcgagtctggcttgcgtcaaccacgcccgagcgactgtcgtgattga

SEQ ID NO: 262996 - DNA, 50 bp, Artificial
  Synthetic oligonucleotide
aactatcgcgaacctgcgaggaatcctttgcccccgccccgacgctgggc

SEQ ID NO: 262997 - DNA, 50 bp, Artificial
  Synthetic oligonucleotide
aactcactgcccgcgagaggcgttaaccccgtgctatgcactagggcgaa

SEQ ID NO: 262998 - DNA, 50 bp, Artificial
  Synthetic oligonucleotide
aactgcgagaccggcgagtgcgtgcttgggctcactttaggggtcagcca

SEQ ID NO: 262999 - DNA, 50 bp, Artificial
  Synthetic oligonucleotide
aactggggcgttggtcccgtgcgctactctccctttgctgcctgggttta

SEQ ID NO: 263000 - DNA, 50 bp, Artificial
  Synthetic oligonucleotide
aaaaggcagcgtggatgcccgccattcgctgggaagacaggcttcatgag

SEQ ID NO: 263001 - DNA, 50 bp, Artificial
  Synthetic oligonucleotide
aaacaggccgccgtttcagctgccagccgacacttcactccgccatctcg

SEQ ID NO: 263002 - DNA, 50 bp, Artificial
  Synthetic oligonucleotide
aaaccacccggcgttgggccttgcattacgccatccctgaaggtcaccgc

SEQ ID NO: 263003 - DNA, 50 bp, Artificial
  Synthetic oligonucleotide
aaacctatgccacctcggggccacgtatcgggctgcgtttttatgccgct

SEQ ID NO: 263004 - DNA, 50 bp, Artificial
  Synthetic oligonucleotide
aaacctctcgagccgcccttggttgcgttggattgcaccccaggcaacgg

SEQ ID NO: 263005 - DNA, 55 bp, Artificial
  Synthetic oligonucleotide
cgctgtgccgtttagtcacgccaagtaacacagtgagtacaggctagggttgttc

SEQ ID NO: 263006 - DNA, 50 bp, Artificial
  Synthetic oligonucleotide
aaacctgcgctgcccgccaataacatgcagaaacctcctagccagcccgc

SEQ ID NO: 263007 - DNA, 50 bp, Artificial
  Synthetic oligonucleotide
aaacgccgaggaagctcttcccgtagcgcctccaaggtggcacccgttgc

SEQ ID NO: 263008 - DNA, 50 bp, Artificial
  Synthetic oligonucleotide
aaacgcgagctattgccggtagcgactgggagttacggtacgcccccagc

SEQ ID NO: 263009 - DNA, 50 bp, Artificial
  Synthetic oligonucleotide
aaagatgccgcgtggttgaaacctctcgagccgcccttggttgcgttgga

SEQ ID NO: 263010 - DNA, 50 bp, Artificial
  Synthetic oligonucleotide
aaagcgggacggcggggctctcagagtggctcttaatcggggagttctga

SEQ ID NO: 263011 - DNA, 50 bp, Artificial
  Synthetic oligonucleotide
aaaggtgcgcagcacgcttcataagccgcaccggatccacacggacactg

SEQ ID NO: 263012 - DNA, 50 bp, Artificial
  Synthetic oligonucleotide
aaagtggaagatcgacgagggtcgctgtgcacgctaacggagcgccagtc

SEQ ID NO: 263013 - DNA, 50 bp, Artificial
  Synthetic oligonucleotide
aacaatgacacggggccgacctctccggtataagtgctgggaagctgcga

SEQ ID NO: 263014 - DNA, 50 bp, Artificial
  Synthetic oligonucleotide
aacacacccggccaaacccacttcgatcgccagtgcctcaatggcgtgca

SEQ ID NO: 263015 - DNA, 50 bp, Artificial
  Synthetic oligonucleotide
aacaccctgtcgcccaagacggggtacagcagggttcgcggctttagggg

SEQ ID NO: 263016 - DNA, 55 bp, Artificial
  Synthetic oligonucleotide
cgcgtgcgccatttcaacagcttgacgcgtcactcgaacattgtaatcgtagtcc

SEQ ID NO: 263017 - DNA, 50 bp, Artificial
  Synthetic oligonucleotide
aacacgccatgcaatagcgccacacgtgccttaggggactcgctttgcga

SEQ ID NO: 263018 - DNA, 50 bp, Artificial
  Synthetic oligonucleotide
aacacttttgcgccatcaacgggcgattgaaaggcaacgccctcctcgga

SEQ ID NO: 263019 - DNA, 50 bp, Artificial
  Synthetic oligonucleotide
aacagaagccgacctggaaactctggcatccgcgcaccctgggctcatcg

SEQ ID NO: 263020 - DNA, 50 bp, Artificial
  Synthetic oligonucleotide
aacatcgcgccaagtagtgcccaagatgccgggaaataccacgcgagcgc

SEQ ID NO: 263021 - DNA, 50 bp, Artificial
  Synthetic oligonucleotide
aaccacgcccgagcgactgtcgtgattgaagtcacacgatgccagaggct

SEQ ID NO: 263022 - DNA, 50 bp, Artificial
  Synthetic oligonucleotide
aaccagagtgaggcacccgggcgtctttactaccttgccacgctgccttc

SEQ ID NO: 263023 - DNA, 50 bp, Artificial
  Synthetic oligonucleotide
aaccagcctcagcacaacgtcggcgcagctctttgacagcgctattccga

SEQ ID NO: 263024 - DNA, 50 bp, Artificial
  Synthetic oligonucleotide
aaccagcgatgcagcgggtcaaaaatcgcgccgggagcaacctcctctgg

SEQ ID NO: 263025 - DNA, 50 bp, Artificial
  Synthetic oligonucleotide
aagtgcccgccttgtaaacacaacctccggtgcaggattgcagggctcgg

SEQ ID NO: 263026 - DNA, 50 bp, Artificial
  Synthetic oligonucleotide
aagtggtactgcaatgcgcccagcttcaaaccactcgcccgggccaaagc

SEQ ID NO: 263027 - DNA, 55 bp, Artificial
  Synthetic oligonucleotide
cgagttggaagagtaattcgggctgtggcagtcttataagggcgtggcagtattg

SEQ ID NO: 263028 - DNA, 50 bp, Artificial
  Synthetic oligonucleotide
aagtgtcgccagcgaacaggactctcccatggtgcgtcggttccgcaaat

SEQ ID NO: 263029 - DNA, 50 bp, Artificial
  Synthetic oligonucleotide
aataccgcgcaacaatgcggtgtcacggctctgccaggcccacagtaata

SEQ ID NO: 263030 - DNA, 50 bp, Artificial
  Synthetic oligonucleotide
aatactccggcggctcgattgaaagagctggggtgggcgagctcccttgg

SEQ ID NO: 263031 - DNA, 50 bp, Artificial
  Synthetic oligonucleotide
aatcacaagcgcggcagagtctacggcaaagggcgactcaccccgtgacc

SEQ ID NO: 263032 - DNA, 50 bp, Artificial
  Synthetic oligonucleotide
aatcagggcgtgtgggctttgcggatcaagtccctgggttaaggccggcg

SEQ ID NO: 263033 - DNA, 50 bp, Artificial
  Synthetic oligonucleotide
aatcattggacgccagggctctgccacaggcagcaaacgggaaagtaccg

SEQ ID NO: 263034 - DNA, 50 bp, Artificial
  Synthetic oligonucleotide
aatcccgccccaatggcggttcattcggacgcggctaaacgacggaaata

SEQ ID NO: 263035 - DNA, 50 bp, Artificial
  Synthetic oligonucleotide
aatcgcgtacgaacccggcaaacctgtgccctggatcaactgggcgggca

SEQ ID NO: 263036 - DNA, 50 bp, Artificial
  Synthetic oligonucleotide
aatcgtaccctgcgttggtcccccttcagacaaccagagtgcgggcggta

SEQ ID NO: 263037 - DNA, 50 bp, Artificial
  Synthetic oligonucleotide
aatctcccgcattgcgccgcgttaggcacacaaacaagggcgagaaagcg

SEQ ID NO: 263038 - DNA, 55 bp, Artificial
  Synthetic oligonucleotide
ccttgaaatcccttttctagtccccacatatgacacagaggcccgttgtgggtcc

SEQ ID NO: 263039 - DNA, 50 bp, Artificial
  Synthetic oligonucleotide
aatgaacgcccattgttggagcgccagttgccgctaacccgcagatcctg

SEQ ID NO: 263040 - DNA, 50 bp, Artificial
  Synthetic oligonucleotide
aatgccagtctgttgggggaacgccggcccatagagagctctagctacgc

SEQ ID NO: 263041 - DNA, 50 bp, Artificial
  Synthetic oligonucleotide
aatgcgtcagtgggcgggcacaactgacatgacgcccgattacagtccga

SEQ ID NO: 263042 - DNA, 50 bp, Artificial
  Synthetic oligonucleotide
aatggccgccgtctttgggggcaggccccgaacatcgactcatttggagt

SEQ ID NO: 263043 - DNA, 50 bp, Artificial
  Synthetic oligonucleotide
aatgtggcggcactgtccgttgcccgcgttgcctagcgagctgtaaatcg

SEQ ID NO: 263044 - DNA, 50 bp, Artificial
  Synthetic oligonucleotide
aatgtgggtggttcgccttaccgaattggggcggcgtaaagggctgtgcc

SEQ ID NO: 263045 - DNA, 50 bp, Artificial
  Synthetic oligonucleotide
aattaacgccgcacaacgcgcccccagagaatgagccgctcgtgttgcta

SEQ ID NO: 263046 - DNA, 50 bp, Artificial
  Synthetic oligonucleotide
aattagcggtgcggtcctgcccccgttgcccactttcggactggggcaaa

SEQ ID NO: 263047 - DNA, 50 bp, Artificial
  Synthetic oligonucleotide
aattcgcccgagtcagcaagatctcggcaccccggtagcgcgcaaaattc

SEQ ID NO: 263048 - DNA, 50 bp, Artificial
  Synthetic oligonucleotide
aattggcgccttatctctgggtgccggcctagcgttgcaagggctgcttt

SEQ ID NO: 263049 - DNA, 55 bp, Artificial
  Synthetic oligonucleotide
cccgcaaggtggcactgttacgcctggccagtcctcgcaaatctcagatggcgct

SEQ ID NO: 263050 - DNA, 50 bp, Artificial
  Synthetic oligonucleotide
aactgtcgcgtgtcccggggtttcatccggccttgctagagtcggcacct

SEQ ID NO: 263051 - DNA, 50 bp, Artificial
  Synthetic oligonucleotide
aactgtgacgggtggccccgaagtagggcaggcctttacctctttgccgt

SEQ ID NO: 263052 - DNA, 50 bp, Artificial
  Synthetic oligonucleotide
aagaccaggggctcgccagagtctaaccccgccaccgtgcctcctactga

SEQ ID NO: 263053 - DNA, 50 bp, Artificial
  Synthetic oligonucleotide
aagacgctacgcagcggtcccgcccgagaggtttttagaggtgccctccc

SEQ ID NO: 263054 - DNA, 50 bp, Artificial
  Synthetic oligonucleotide
aagactatcagtcagcgcttggggagctgccagaacacccgggagagggg

SEQ ID NO: 263055 - DNA, 50 bp, Artificial
  Synthetic oligonucleotide
aagcaacctgcaggggatcacctacacgcgcccatcaagacgccatggcg

SEQ ID NO: 263056 - DNA, 50 bp, Artificial
  Synthetic oligonucleotide
aagcacaccgccatcgttaaccaccgcccgcttatcgtcccagcgctctg

SEQ ID NO: 263057 - DNA, 50 bp, Artificial
  Synthetic oligonucleotide
aagcacatgcccttcagctgcgtaggcgtgtccacgagcaatgagctgcg

SEQ ID NO: 263058 - DNA, 50 bp, Artificial
  Synthetic oligonucleotide
aagcaccctgttccgatttggcgaactgccgccctaacgccgtgatcgcc

SEQ ID NO: 263059 - DNA, 50 bp, Artificial
  Synthetic oligonucleotide
aagcatggtggggctatgggcgcactatggctgcgaaaccgtcctcggag

SEQ ID NO: 263060 - DNA, 55 bp, Artificial
  Synthetic oligonucleotide
ccccttgaccaaacggccttcagtatttagcgctttatagcgaaaggcactcata

SEQ ID NO: 263061 - DNA, 50 bp, Artificial
  Synthetic oligonucleotide
aagccaagactcgcccctttataaccgaactaggacgccgccgaggggtg

SEQ ID NO: 263062 - DNA, 50 bp, Artificial
  Synthetic oligonucleotide
aagcctgactctgggagggcagtcgttatccctctcgggcttggttgcta

SEQ ID NO: 263063 - DNA, 50 bp, Artificial
  Synthetic oligonucleotide
aagcgcacctgggcgtgcaacgggaagccaaatttatgtctgcgttggcg

SEQ ID NO: 263064 - DNA, 50 bp, Artificial
  Synthetic oligonucleotide
aagcgccattttcgatatgccactcgcctcgggtgccagcctgaatgctc

SEQ ID NO: 263065 - DNA, 50 bp, Artificial
  Synthetic oligonucleotide
aagcgctcagttgagcccatggtcgagagtatcacgcgcaaccctgacgc

SEQ ID NO: 263066 - DNA, 50 bp, Artificial
  Synthetic oligonucleotide
aagcgtcgatgcaataacagcgtcggtgggaatttgagtgggcccacccg

SEQ ID NO: 263067 - DNA, 50 bp, Artificial
  Synthetic oligonucleotide
aagctccaatgcaaggcctgagacgaccaatgcagatagcgtccggcgcc

SEQ ID NO: 263068 - DNA, 50 bp, Artificial
  Synthetic oligonucleotide
aaggaattgaccaacgcggccctctgacggctagccatctcggccagact

SEQ ID NO: 263069 - DNA, 50 bp, Artificial
  Synthetic oligonucleotide
aaggctcgctgagttggctactgccaaagctgacgagatgcctgcggggg

SEQ ID NO: 263070 - DNA, 50 bp, Artificial
  Synthetic oligonucleotide
aagggaagccatagcgcctttgtagccccctacccgttagcgaaccgtgg

SEQ ID NO: 263071 - DNA, 55 bp, Artificial
  Synthetic oligonucleotide
cccaggtctttactaataagctctactggtatggcaagggcttcacctgccaggc

SEQ ID NO: 263072 - DNA, 50 bp, Artificial
  Synthetic oligonucleotide
aagggactggtggtccagttggatacggctgtcgcgacgggaggctcaaa

SEQ ID NO: 263073 - DNA, 50 bp, Artificial
  Synthetic oligonucleotide
aaggtcaattgggaggagggaccccgagcgacaaggaagtagcgggtcgc

SEQ ID NO: 263074 - DNA, 50 bp, Artificial
  Synthetic oligonucleotide
aagtgccacccgagcggggtgtcatacccagcaattcagccacaaccgaa

SEQ ID NO: 263075 - DNA, 55 bp, Artificial
  Synthetic oligonucleotide
cccagcgggctctaatgagtggtatctgcgagggctctacaagtacaccgatgag

SEQ ID NO: 263076 - DNA, 55 bp, Artificial
  Synthetic oligonucleotide
gcagtcaacaggctatctcgtacaggccgggtgattggaccggacgagcgcataa

SEQ ID NO: 263077 - DNA, 55 bp, Artificial
  Synthetic oligonucleotide
ccactccgaggcaccagagatgacatcgaccaagttatcgcagctcaatgcgaaa

SEQ ID NO: 263078 - DNA, 55 bp, Artificial
  Synthetic oligonucleotide
ccacctggccatcaaaacagggaaacgcattttcgatgactataattggatccgt

SEQ ID NO: 263079 - DNA, 55 bp, Artificial
  Synthetic oligonucleotide
catccagaaacacataaactgcgcggctgttgaggggcgaatcgttaacattgcc

SEQ ID NO: 263080 - DNA, 55 bp, Artificial
  Synthetic oligonucleotide
cacacttcccacagggtccgtcaatttaaagactattgtggtcgcccaatcgggc

SEQ ID NO: 263081 - DNA, 55 bp, Artificial
  Synthetic oligonucleotide
attgcataaaagagacggttacacggtggcagcacgcagtttgcgcgaagctgac

SEQ ID NO: 263082 - DNA, 55 bp, Artificial
  Synthetic oligonucleotide
atcttgagtcaagttcacaaccggaaccggccagaataaaccatcagtcgtgtgc

SEQ ID NO: 263083 - DNA, 55 bp, Artificial
  Synthetic oligonucleotide
agtttactgcgcagttagacagtaatgcgtgggcgactcgcgctgatatttaccg

SEQ ID NO: 263084 - DNA, 55 bp, Artificial
  Synthetic oligonucleotide
agtcagtccagcaagggcgcttgtgtaaacgccaggccctgtgcatctttgccag

SEQ ID NO: 263085 - DNA, 55 bp, Artificial
  Synthetic oligonucleotide
aggtatgaccgccaacctaagggctcagggcgtttattaatctcgagcttcgtgc

SEQ ID NO: 263086 - DNA, 55 bp, Artificial
  Synthetic oligonucleotide
actccagtggccgagcagggtacgtctgcaagaatggcgtcaaattgtctagggc

SEQ ID NO: 263087 - DNA, 55 bp, Artificial
  Synthetic oligonucleotide
gcacaccccgatgtggaccccttggcactcaatttcgtcgatcttcgtcaatggg

SEQ ID NO: 263088 - DNA, 51 bp, Artificial
  Synthetic oligonucleotide
acgccaacgatggggttccaattttacgcgctgtaaatacccgtttcttac

SEQ ID NO: 263089 - DNA, 55 bp, Artificial
  Synthetic oligonucleotide
acatcataaacctctgtgccacccgcactgggcgcgctaaccgcagccgctttgg

SEQ ID NO: 263090 - DNA, 55 bp, Artificial
  Synthetic oligonucleotide
acaagctccgaataagcaatgactgtttcgtcgtctaggtttagctgcttgctgc

SEQ ID NO: 263091 - DNA, 55 bp, Artificial
  Synthetic oligonucleotide
tatgggcatcagtcagtcggtaattggcaacgcgtgtcactggctatagctcccg

SEQ ID NO: 263092 - DNA, 55 bp, Artificial
  Synthetic oligonucleotide
taaagataccggctcggctaactgtataatttgccagggtggcatgctctcgggg

SEQ ID NO: 263093 - DNA, 55 bp, Artificial
  Synthetic oligonucleotide
gttggagtcgttacattggcgaacaagcccgcagtattgcgctggagtgcaaaat

SEQ ID NO: 263094 - DNA, 55 bp, Artificial
  Synthetic oligonucleotide
ttaggcgttcgttacattggccgtcttcggaggcaaagttagatcccatggcggc

SEQ ID NO: 263095 - DNA, 55 bp, Artificial
  Synthetic oligonucleotide
gtgcaggtattcatcacggaaccaccggaagtggtcagaatcgcgtgttcacatt

SEQ ID NO: 263096 - DNA, 55 bp, Artificial
  Synthetic oligonucleotide
gtcgcccagacgatagtgcgataacaggcaatagcaaccagactatgactcccgc

SEQ ID NO: 263097 - DNA, 55 bp, Artificial
  Synthetic oligonucleotide
ggtgttaaccacagcgatttgaatgccagtaatattttattgcgcgatgacgaag

SEQ ID NO: 263098 - DNA, 55 bp, Artificial
  Synthetic oligonucleotide
gatcgccctctgcaccaattcgcacgacataagttcctccataggattccccgaa

SEQ ID NO: 263099 - DNA, 55 bp, Artificial
  Synthetic oligonucleotide
ggtcgtttccagacccgacgaagtaatgacatggtgagctacgcacaagctgtcg

SEQ ID NO: 263100 - DNA, 55 bp, Artificial
  Synthetic oligonucleotide
ggtcgcggccgtgatatggagacgcttattcgtaaggttcgcgcggcagatagcg

SEQ ID NO: 263101 - DNA, 55 bp, Artificial
  Synthetic oligonucleotide
ggtcaagtcgcgacccctgagcaaatagcgggttgggatattgatgtgcgcccgg

SEQ ID NO: 263102 - DNA, 53 bp, Artificial
  Synthetic oligonucleotide
ggcccggttaatccgttttctatggcccaattgtaacccgctatatgcccgga

SEQ ID NO: 263103 - DNA, 55 bp, Artificial
  Synthetic oligonucleotide
ggcactgctgcagagcgccgttagagctgtatccttgaggtttatctagaatgag

SEQ ID NO: 263104 - DNA, 55 bp, Artificial
  Synthetic oligonucleotide
ggcaatgaactaatgcataggatggtcgacaccagagctatccaacagtctgacg

SEQ ID NO: 263105 - DNA, 55 bp, Artificial
  Synthetic oligonucleotide
gcattggtgttcgcagcgttggcgtagtcacccaatagccatcccgaaatgccgc

SEQ ID NO: 263106 - DNA, 55 bp, Artificial
  Synthetic oligonucleotide
gcccgagtcggtgacattttggcgtcggtagcggccgagttattgccgtttctca

SEQ ID NO: 263107 - DNA, 54 bp, Artificial
  Synthetic oligonucleotide
gccgcaacgggtctaactgtggttgtagtccggaaagttgtctggtgaacccaa

SEQ ID NO: 263108 - DNA, 55 bp, Artificial
  Synthetic oligonucleotide
gccggtggcctgattgttcctgacgaatgtatcgcgcagatattcaagtccggcg

SEQ ID NO: 263109 - DNA, 55 bp, Artificial
  Synthetic oligonucleotide
gagcggcaggtctagcggcgatatgggcccgcgagaatacgcgcgacgagttatt

SEQ ID NO: 263110 - DNA, 55 bp, Artificial
  Synthetic oligonucleotide
gcctggagcataaactcgtcccgctgactgctggagggttcgccataccaccggt

SEQ ID NO: 263111 - DNA, 55 bp, Artificial
  Synthetic oligonucleotide
tttctactgcaggcaattgaggcatacatcgatagccaggacactagcgtgctcg

SEQ ID NO: 263112 - DNA, 55 bp, Artificial
  Synthetic oligonucleotide
ttcggtagcgttctctcaatcctgtgagggttgccttcacgtaaccaaccaagcc

SEQ ID NO: 263113 - DNA, 55 bp, Artificial
  Synthetic oligonucleotide
gcgatgccaaagcatggaggtaggtcgtcttatgactgtaaacaacgcccttagg

SEQ ID NO: 263114 - DNA, 55 bp, Artificial
  Synthetic oligonucleotide
gcgttttcctatagtgtgccgcaaatttctcagaggccaacacgatggcacaggc

SEQ ID NO: 263115 - DNA, 55 bp, Artificial
  Synthetic oligonucleotide
gcttcccggtatcggtaccgttgaccatcttaaaatggcggtcgattgcggtatc

SEQ ID NO: 263116 - DNA, 55 bp, Artificial
  Synthetic oligonucleotide
ggacgaagtcttcggaggtgtaagtgacggcattgtctaaactatagcggtacat

SEQ ID NO: 263117 - DNA, 55 bp, Artificial
  Synthetic oligonucleotide
ggatgataacgcccttcccagattttcttgtacgtaattgcctaagctggagcag

SEQ ID NO: 263118 - DNA, 54 bp, Artificial
  Synthetic oligonucleotide
gacgtgactaacagcgtctttaataccacgggtagttcggtgacggttgatgag

SEQ ID NO: 263119 - DNA, 53 bp, Artificial
  Synthetic oligonucleotide
ttataacactcaacacctactcggtgacaccagaacgactgcaacgagacggc

SEQ ID NO: 263120 - DNA, 55 bp, Artificial
  Synthetic oligonucleotide
gagcccttcaagaattacatgtttccgagcgagtagcctcattttctctagttgg

SEQ ID NO: 263121 - DNA, 53 bp, Artificial
  Synthetic oligonucleotide
aagtggtcattggatcattgatcaacaaaggctcactgcgtaatacgcgtgcg

SEQ ID NO: 263122 - DNA, 53 bp, Artificial
  Synthetic oligonucleotide
tgtctcagctgaagctctagcagggctcattactcgaatagcagacagcacct

SEQ ID NO: 263123 - DNA, 53 bp, Artificial
  Synthetic oligonucleotide
tctaccctatggtgacgccagtattccaccaacagatcccgcagatcccaatg

SEQ ID NO: 263124 - DNA, 52 bp, Artificial
  Synthetic oligonucleotide
catcgcggaacatacgatccaaaatcagacgagccttatgagctttcgagag

SEQ ID NO: 263125 - DNA, 52 bp, Artificial
  Synthetic oligonucleotide
aagtgccttctcatgtgaggcgataacaatactggcgccgcaatcatttgcc

SEQ ID NO: 263126 - DNA, 52 bp, Artificial
  Synthetic oligonucleotide
cctgaattgctctgcgaatagcgtcgagcagattcctgaaatgtaccgtgtt

SEQ ID NO: 263127 - DNA, 52 bp, Artificial
  Synthetic oligonucleotide
gcctgtaagcttcgcgctcgaaaatttgcccggtctatccgtaggccgatct

SEQ ID NO: 263128 - DNA, 51 bp, Artificial
  Synthetic oligonucleotide
accgatcctgcgcgcggaatgttcatcctggtgtttctcgcaatcgtggtg

SEQ ID NO: 263129 - DNA, 51 bp, Artificial
  Synthetic oligonucleotide
ggcactgctgcctccgtcatagaacaatgctgcggttagtgctagagccac

SEQ ID NO: 263130 - DNA, 51 bp, Artificial
  Synthetic oligonucleotide
catcatttggtgcgggtggctcgcaaacactctttggcagtgtgggtagcg

SEQ ID NO: 263131 - DNA, 55 bp, Artificial
  Synthetic oligonucleotide
gagacgccaaaatgcaccacgagcgctcccagactaaatcaaatcggttcagagc

SEQ ID NO: 263132 - DNA, 51 bp, Artificial
  Synthetic oligonucleotide
taatccgttcctttccataggcctgcggccactgtctcttcgaaaatctta

SEQ ID NO: 263133 - DNA, 50 bp, Artificial
  Synthetic oligonucleotide
acaatacctcgtgcgctgaacgggggtcgaaggcctctccgtaacgtcgc

SEQ ID NO: 263134 - DNA, 50 bp, Artificial
  Synthetic oligonucleotide
aatttcgactctggcagtcgctcggtaacgcgtctcgcggaccccgctct

SEQ ID NO: 263135 - DNA, 50 bp, Artificial
  Synthetic oligonucleotide
acacgggtagcgtcggcgattgggggtgccaaatacaccctgcaattcga

SEQ ID NO: 263136 - DNA, 50 bp, Artificial
  Synthetic oligonucleotide
acacggttggccccggctatacctctgcacacggtcaccccgtactgagc

SEQ ID NO: 263137 - DNA, 50 bp, Artificial
  Synthetic oligonucleotide
acacttagttcgcgcttggttggccgagctaagcctgtaccggccctcga

SEQ ID NO: 263138 - DNA, 50 bp, Artificial
  Synthetic oligonucleotide
acagcgcggagtcatctgccatacagccgcctaatcgcgcccttggggta

SEQ ID NO: 263139 - DNA, 50 bp, Artificial
  Synthetic oligonucleotide
acaggagctacagtctgccgcctgggttcctgcagacgccatggcttttg

SEQ ID NO: 263140 - DNA, 50 bp, Artificial
  Synthetic oligonucleotide
acatagcgccctcggctagcacgacttcgctcgccgctaaacttgacggc

SEQ ID NO: 263141 - DNA, 50 bp, Artificial
  Synthetic oligonucleotide
gacattgaccaaattttacagcgcactaccgtcactcatttctggatggg

SEQ ID NO: 263142 - DNA, 55 bp, Artificial
  Synthetic oligonucleotide
cttcgtgccacaaatgtggaccgataatgagaccggagaaacgaatcgatcgggt

SEQ ID NO: 263143 - DNA, 50 bp, Artificial
  Synthetic oligonucleotide
accattcgcgtcgcgacacactgtaccgaggctaacgtctcgcgccagca

SEQ ID NO: 263144 - DNA, 50 bp, Artificial
  Synthetic oligonucleotide
acccaagccaatcgccatggatatgcccgcggatacggcgctcacaacaa

SEQ ID NO: 263145 - DNA, 50 bp, Artificial
  Synthetic oligonucleotide
acccaagccttgggcgccgggagggtacacgagtgagccgagacccaaac

SEQ ID NO: 263146 - DNA, 50 bp, Artificial
  Synthetic oligonucleotide
accccgtgcaactgcctttactgacgcctcattaagcccagcgttccgga

SEQ ID NO: 263147 - DNA, 50 bp, Artificial
  Synthetic oligonucleotide
accgagggtactgcgcgtcctgattgcgtcgcgaccacatagttctgggc

SEQ ID NO: 263148 - DNA, 50 bp, Artificial
  Synthetic oligonucleotide
accgctccaagcgtctttgttagcggccatgtaacgcgccgtacccacca

SEQ ID NO: 263149 - DNA, 50 bp, Artificial
  Synthetic oligonucleotide
accgcttgcatcgggggccatcaagtcgctctatacccttgccaaaggcg

SEQ ID NO: 263150 - DNA, 50 bp, Artificial
  Synthetic oligonucleotide
accgtcggcacctgcgtagcgtgagattaggtggagcgaggcaaccggaa

SEQ ID NO: 263151 - DNA, 50 bp, Artificial
  Synthetic oligonucleotide
accgtttggttgccctcggatagcctgcagctgaccgttaacgccacgta

SEQ ID NO: 263152 - DNA, 50 bp, Artificial
  Synthetic oligonucleotide
acctgagggcggaatgacaacttcaacgcggctcttgggctggttggcat

SEQ ID NO: 263153 - DNA, 55 bp, Artificial
  Synthetic oligonucleotide
ctctatcacgggatgacgagcttgtttgatcgcttcgattatctactgctaccgg

SEQ ID NO: 263154 - DNA, 50 bp, Artificial
  Synthetic oligonucleotide
acctgtgctcgcggggtcagtgcgggcaacgacaaagcaaaactgggact

SEQ ID NO: 263155 - DNA, 50 bp, Artificial
  Synthetic oligonucleotide
ttattttgggtatgaccgtccagcatttgtgtgccgcttaagctggacgt

SEQ ID NO: 263156 - DNA, 50 bp, Artificial
  Synthetic oligonucleotide
agctaaaccaaacctgttatctgcaagcgcccgtacgacaagatacttcc

SEQ ID NO: 263157 - DNA, 50 bp, Artificial
  Synthetic oligonucleotide
aaccagcgcatgcagtgaaagatgcgaccgggccctagccgtttttgggc

SEQ ID NO: 263158 - DNA, 50 bp, Artificial
  Synthetic oligonucleotide
aaccagggtcagccattagcatgccgtccccgggattcatcagcagtgca

SEQ ID NO: 263159 - DNA, 50 bp, Artificial
  Synthetic oligonucleotide
aaccatacaggttctctaccgagcgcccccgcaagtcctcggctgcgaaa

SEQ ID NO: 263160 - DNA, 50 bp, Artificial
  Synthetic oligonucleotide
aacccacgcccagagcacagtctatcgctgcagagctccccgcgttgttg

SEQ ID NO: 263161 - DNA, 50 bp, Artificial
  Synthetic oligonucleotide
aaccccacatcatttgcacgtaacctgggagcggttgcactgggggcaga

SEQ ID NO: 263162 - DNA, 50 bp, Artificial
  Synthetic oligonucleotide
aaccccagagtccaatcgcgtacgaacccggcaaacctgtgccctggatc

SEQ ID NO: 263163 - DNA, 50 bp, Artificial
  Synthetic oligonucleotide
aacccgtggtgtccaccaaccatcccgccgtcgcaactccaatgatgccc

SEQ ID NO: 263164 - DNA, 55 bp, Artificial
  Synthetic oligonucleotide
aggtcggcacggggcgctgcaaatcttcatctcgatattgagctatatcgatcgc

SEQ ID NO: 263165 - DNA, 53 bp, Artificial
  Synthetic oligonucleotide
cggcggtactggatagtttaggcgtgggactttgtactttagatactaggggc

SEQ ID NO: 263166 - DNA, 55 bp, Artificial
  Synthetic oligonucleotide
ctgccgccagactttgcacccctaaagctaggagtgatgcgcgtagtctttatac

SEQ ID NO: 263167 - DNA, 55 bp, Artificial
  Synthetic oligonucleotide
gactgttagctagtacaagagttcgcaaacgaccgccgtatagggttctaagtac

SEQ ID NO: 263168 - DNA, 55 bp, Artificial
  Synthetic oligonucleotide
gccaagacttgctcgtaaccccgccctctgagcggtttagcaactagccttactg

SEQ ID NO: 263169 - DNA, 55 bp, Artificial
  Synthetic oligonucleotide
gcgaaatcgtgccgagtccttctattctgcggcgaaagatgggattgttagtaat

SEQ ID NO: 263170 - DNA, 55 bp, Artificial
  Synthetic oligonucleotide
gcgtaagctcccgactgctgtgcgtttaggtctgaggttggaaacaatataagcg

SEQ ID NO: 263171 - DNA, 55 bp, Artificial
  Synthetic oligonucleotide
gctcgttaacaattcgccagccactattaacaattgcgagggaggcttgagcatc

SEQ ID NO: 263172 - DNA, 55 bp, Artificial
  Synthetic oligonucleotide
gcttaatcctggtagttgtggtacagctatcgctggaagagtatctaacgcagag

SEQ ID NO: 263173 - DNA, 55 bp, Artificial
  Synthetic oligonucleotide
ggcaattagtacaatcttggatggtagacgcaggaatgactgttcgcattgatac

SEQ ID NO: 263174 - DNA, 55 bp, Artificial
  Synthetic oligonucleotide
gggtagaggcgatcgctactgtcggattagtctttgttagcaagcaagcgagagg

SEQ ID NO: 263175 - DNA, 55 bp, Artificial
  Synthetic oligonucleotide
cacaaaacccgcagtcaccaaggcgatgagtagggattccgggcccacagccacc

SEQ ID NO: 263176 - DNA, 55 bp, Artificial
  Synthetic oligonucleotide
ggtcaagggaatattaatcgtttagcgatcggcgttggtatgattccgcgaggcg

SEQ ID NO: 263177 - DNA, 54 bp, Artificial
  Synthetic oligonucleotide
tccattccgttcgtagttaaaccccagacagactcttgacgttctatactttta

SEQ ID NO: 263178 - DNA, 55 bp, Artificial
  Synthetic oligonucleotide
tgcatcgtcaacgccagagtctaaccaatcttggcggtagtcagtgcgatcgctg

SEQ ID NO: 263179 - DNA, 55 bp, Artificial
  Synthetic oligonucleotide
ttataaatcattagtgcgaaaactttgcccaaatgctgaggtaacagtggacaga

SEQ ID NO: 263180 - DNA, 55 bp, Artificial
  Synthetic oligonucleotide
tttacaaaagcggatgtcatctcggataaattgaccattaggtacattctcgcga

SEQ ID NO: 263181 - DNA, 54 bp, Artificial
  Synthetic oligonucleotide
tgtcagtgctgcggttaagtttgtagaagtcctgattagtttaggtttgggtac

SEQ ID NO: 263182 - DNA, 54 bp, Artificial
  Synthetic oligonucleotide
aaagaggactgacaatcgcgggtacacgcaaacctggtcaagaagctattcgat

SEQ ID NO: 263183 - DNA, 54 bp, Artificial
  Synthetic oligonucleotide
atcgccacaaacggaacgcactgcctttcgtccccgcaacccttatggtgtggc

SEQ ID NO: 263184 - DNA, 53 bp, Artificial
  Synthetic oligonucleotide
ggtggaggatttagcacaacctcctgataatgttcctcgtctacccgaaggtt

SEQ ID NO: 263185 - DNA, 52 bp, Artificial
  Synthetic oligonucleotide
ccatgctagtagaaccatcaatcttcaacgcagtgcccgcaggtacagaagc

SEQ ID NO: 263186 - DNA, 55 bp, Artificial
  Synthetic oligonucleotide
cacgtagcgcgtcagattttgacccctatcatctttataacgcaacctgactgtg

SEQ ID NO: 263187 - DNA, 50 bp, Artificial
  Synthetic oligonucleotide
acgccggcccaaggctttgctaagtacgcgatcgcaccactcccgattta

SEQ ID NO: 263188 - DNA, 50 bp, Artificial
  Synthetic oligonucleotide
cggagttagcagaagatttatccaccagcgtccaaatccaagccgatcgc

SEQ ID NO: 263189 - DNA, 50 bp, Artificial
  Synthetic oligonucleotide
acgcccctgccataccttcccgcaaaattacttgcagggggcccattgcc

SEQ ID NO: 263190 - DNA, 50 bp, Artificial
  Synthetic oligonucleotide
acgcaccacggggatttggcagactgtttgggccgaacttgtaccctcga

SEQ ID NO: 263191 - DNA, 50 bp, Artificial
  Synthetic oligonucleotide
accggcggactttcccacagcgatcgtagttgtgcagcacattcctgccc

SEQ ID NO: 263192 - DNA, 50 bp, Artificial
  Synthetic oligonucleotide
accgctcccaacgtccagtggctaggggtaagctgggacatccctacagc

SEQ ID NO: 263193 - DNA, 50 bp, Artificial
  Synthetic oligonucleotide
acccgatgaatcgccacaaacggaacgcactgcctttcgtccccgcaacc

SEQ ID NO: 263194 - DNA, 50 bp, Artificial
  Synthetic oligonucleotide
acatacttccaaggctggcggggcacgcttcctccaccgctcgatcgcaa

SEQ ID NO: 263195 - DNA, 50 bp, Artificial
  Synthetic oligonucleotide
aatccgcgacctacaggcggctcagggagggtgcagcacttatgtgatgg

SEQ ID NO: 263196 - DNA, 50 bp, Artificial
  Synthetic oligonucleotide
aagcgccgagcactccagaatataatgctgaggccccagccagccccaat

SEQ ID NO: 263197 - DNA, 55 bp, Artificial
  Synthetic oligonucleotide
ccagtataccttcacacctgctctttcatgtgtgtaatagtagatgccgcgtgca

SEQ ID NO: 263198 - DNA, 50 bp, Artificial
  Synthetic oligonucleotide
aacgcggtcggctgatgcaagcactacctccaaatggcgagatggttgcg

SEQ ID NO: 263199 - DNA, 50 bp, Artificial
  Synthetic oligonucleotide
aacgcctgctaatctcaccgcatcggcgttctgacgaccaaccgccgcct

SEQ ID NO: 263200 - DNA, 50 bp, Artificial
  Synthetic oligonucleotide
aacaccctgcgattgcttcgggcaagatccgtaccctcgcaactgcgcgg

SEQ ID NO: 263201 - DNA, 50 bp, Artificial
  Synthetic oligonucleotide
aacacccccgccggtactaaccgcactcccgccataaataggggcgttgt

SEQ ID NO: 263202 - DNA, 50 bp, Artificial
  Synthetic oligonucleotide
aaatcgatgcttccgggaaacgttcgcgtctgcggccacaagcgatcgcg

SEQ ID NO: 263203 - DNA, 50 bp, Artificial
  Synthetic oligonucleotide
aaactcgaagggcccggcgactgcaccccagatgtgctcgtcagtttcgg

SEQ ID NO: 263204 - DNA, 50 bp, Artificial
  Synthetic oligonucleotide
agctcacttgcagtttggtgggggccctgtcgggagcttataatggcgct

SEQ ID NO: 263205 - DNA, 50 bp, Artificial
  Synthetic oligonucleotide
agcttgggtcactccctactgttcctctggggcccggaagctcaatggga

SEQ ID NO: 263206 - DNA, 50 bp, Artificial
  Synthetic oligonucleotide
aggagcaaaacccgtcaccgcagagcgtaaacgtctcatgccgacgcgca

SEQ ID NO: 263207 - DNA, 50 bp, Artificial
  Synthetic oligonucleotide
aggagtattggggccaagctaaggcgcgatcgcactcggagggaattgct

SEQ ID NO: 263208 - DNA, 54 bp, Artificial
  Synthetic oligonucleotide
ccgtaggcaaaccgagagtaaggcgaattccgattagattttctactagccgaa

SEQ ID NO: 263209 - DNA, 50 bp, Artificial
  Synthetic oligonucleotide
aggcccgcaacggacatttagccgaccgccattggtgcggacataggcgg

SEQ ID NO: 263210 - DNA, 50 bp, Artificial
  Synthetic oligonucleotide
aggctggctctaccaagcttatacaggcgctcggaagctgcccgctggtt

SEQ ID NO: 263211 - DNA, 50 bp, Artificial
  Synthetic oligonucleotide
agggcgatcgcgcctgtgcgggaacgtcagggggtggttgctctttttga

SEQ ID NO: 263212 - DNA, 50 bp, Artificial
  Synthetic oligonucleotide
aggggatgcgacacagggggccataaccttgaacgcagtcgttggagtcg

SEQ ID NO: 263213 - DNA, 50 bp, Artificial
  Synthetic oligonucleotide
aggggtcttcgtagaccaagctggcgcgtcgaagcacatgacggcgggtg

SEQ ID NO: 263214 - DNA, 50 bp, Artificial
  Synthetic oligonucleotide
agcgcctttttgagtcgtggagtctcccgcgtcgccagtaccctgtggac

SEQ ID NO: 263215 - DNA, 50 bp, Artificial
  Synthetic oligonucleotide
aggttgaccgtcttttggcggcgggaacaagtcggcgcggcctctgagtc

SEQ ID NO: 263216 - DNA, 50 bp, Artificial
  Synthetic oligonucleotide
agttagaaggggcggatggtttgggcgcaacgcaattgcgggggttagaa

SEQ ID NO: 263217 - DNA, 50 bp, Artificial
  Synthetic oligonucleotide
agttgccgctgtcttgcgtagtcccgaattgcccgcagtccaccaaccct

SEQ ID NO: 263218 - DNA, 50 bp, Artificial
  Synthetic oligonucleotide
agtttgcgtcgctgtccctactcgcttgcaccacgctgtggggatgactt

SEQ ID NO: 263219 - DNA, 55 bp, Artificial
  Synthetic oligonucleotide
cgagggaatttccggcgctaatttctatccaagcttctgtatcgcggacgtagct

SEQ ID NO: 263220 - DNA, 50 bp, Artificial
  Synthetic oligonucleotide
agcgccgcgagtcaaacgcataaactcgcctcggaacccaatcaaaccgc

SEQ ID NO: 263221 - DNA, 50 bp, Artificial
  Synthetic oligonucleotide
agcgcaggtctgagatcgaactggctaggagcagccgtcccgtcgcttaa

SEQ ID NO: 263222 - DNA, 50 bp, Artificial
  Synthetic oligonucleotide
agccacaggcgatgctggggaaacggctgtacccacctcaaccccatagc

SEQ ID NO: 263223 - DNA, 50 bp, Artificial
  Synthetic oligonucleotide
agagccgttaccgaaacgccgcaaagacggccacacaggagcaactttgc

SEQ ID NO: 263224 - DNA, 50 bp, Artificial
  Synthetic oligonucleotide
agaagccctagtcggtgctgatttctcagggcgcgatctcactgacgcgc

SEQ ID NO: 263225 - DNA, 50 bp, Artificial
  Synthetic oligonucleotide
actggtggggcgacgcacctgcacctggcgaatatccgcttgaggcttga

SEQ ID NO: 263226 - DNA, 55 bp, Artificial
  Synthetic oligonucleotide
cgatttctgggtactctgcgactaggacgaggagaacttagattagtggctctac

SEQ ID NO: 263227 - DNA, 55 bp, Artificial
  Synthetic oligonucleotide
cgcatactcggccaccaacgtcagtaacctgggaacccacaccacgttagcacgg

SEQ ID NO: 263228 - DNA, 54 bp, Artificial
  Synthetic oligonucleotide
cggccatttccaggcgcataggtatcccgttaagttggccttttgtcacccatt

SEQ ID NO: 263229 - DNA, 60 bp, Artificial
  Synthetic oligonucleotide
acgtgccagttcggtcactgaaaggtccggaaaattgtgcgctgtggcgagaatgatcca

SEQ ID NO: 263230 - DNA, 54 bp, Artificial
  Synthetic oligonucleotide
ggcgtctacattataagttcgaacgagaacgtgattgaacgaaaccaggttacg

SEQ ID NO: 263231 - DNA, 55 bp, Artificial
  Synthetic oligonucleotide
ggcgacaaagacgccagtcatggcgtaacgcgaggcagggttcggatatttcgcg

SEQ ID NO: 263232 - DNA, 55 bp, Artificial
  Synthetic oligonucleotide
aggatacgtgccggatagcaagcgcggcacgccctttagcccgaacgatcgcgtg

SEQ ID NO: 263233 - DNA, 55 bp, Artificial
  Synthetic oligonucleotide
ggcaaccgttgttgatgggtcgattaaagtagccgcgtagtcgcttagtttctcg

SEQ ID NO: 263234 - DNA, 55 bp, Artificial
  Synthetic oligonucleotide
ggatttcaaggtgcgtgtcatcgtggattcccctcttgttgtcgcttcagtgcgg

SEQ ID NO: 263235 - DNA, 55 bp, Artificial
  Synthetic oligonucleotide
atagcgaacacttcttcgtgactacttcttgctataggggcgaacctgtgtgggg

SEQ ID NO: 263236 - DNA, 55 bp, Artificial
  Synthetic oligonucleotide
gcggttccttggcgtttcagccccgcattcgagcgcggagaacgttcgacaggtt

SEQ ID NO: 263237 - DNA, 55 bp, Artificial
  Synthetic oligonucleotide
ctgaaaggtccggaaaattgtgcgctgtggcgagaatgatccaggtcactggcgt

SEQ ID NO: 263238 - DNA, 55 bp, Artificial
  Synthetic oligonucleotide
gccgtcgccttaagcgaatgttgatctttaagggcgaagcatgaaagcatcccgg

SEQ ID NO: 263239 - DNA, 55 bp, Artificial
  Synthetic oligonucleotide
gcccctctactgctggcgacagtaaaaccgcttccaatattttcgaggcagcccg

SEQ ID NO: 263240 - DNA, 58 bp, Artificial
  Synthetic oligonucleotide
agaaaggaactcctttcatggcgaaaatagtgccgcccgagcctcagtccgcagcgga

SEQ ID NO: 263241 - DNA, 55 bp, Artificial
  Synthetic oligonucleotide
acgcgtctcggcaggcggtatggagggttacggaagcggtctattgtgcgtggct

SEQ ID NO: 263242 - DNA, 53 bp, Artificial
  Synthetic oligonucleotide
ctaggtcgtggtggaccggacctgcgaaaacggttgtctcgtggcgcgaaacg

SEQ ID NO: 263243 - DNA, 55 bp, Artificial
  Synthetic oligonucleotide
cgtgagttttccggcgacgtgactgtaggtgggagttcaacggtcagtggctccc

SEQ ID NO: 263244 - DNA, 55 bp, Artificial
  Synthetic oligonucleotide
gtcgggtgtctttccggcactttcacgaacgctaacagcagacaggagcagtcgc

SEQ ID NO: 263245 - DNA, 55 bp, Artificial
  Synthetic oligonucleotide
cgggaaccgcgcaagtcggatttgagctaaatgcacgagcctacttgtcaccctc

SEQ ID NO: 263246 - DNA, 55 bp, Artificial
  Synthetic oligonucleotide
gtggtcggtcgatacgctcagaatctgcattgtgatctccgcatgaactggtcag

SEQ ID NO: 263247 - DNA, 52 bp, Artificial
  Synthetic oligonucleotide
cccgattatcgggatacgggaaattaacaggtcttcccctagccttgccggc

SEQ ID NO: 263248 - DNA, 55 bp, Artificial
  Synthetic oligonucleotide
tccgccacggctcccctgattcgtctcgaccataccccgtttgcgaatcgcgcag

SEQ ID NO: 263249 - DNA, 55 bp, Artificial
  Synthetic oligonucleotide
cccgccgaggaaggatacctcaagcaggacgatcttccccatgagagggcatttg

SEQ ID NO: 263250 - DNA, 55 bp, Artificial
  Synthetic oligonucleotide
tggcgaaaatagtgccgcccgagcctcagtccgcagcggattatgaggaccgcac

SEQ ID NO: 263251 - DNA, 58 bp, Artificial
  Synthetic oligonucleotide
caggatggtcgcctgtaaatcacacctcgtccaacgagagttttgaatcggtcgctcc

SEQ ID NO: 263252 - DNA, 55 bp, Artificial
  Synthetic oligonucleotide
ttgacctttgcagccgcccgtgcgaccgagtgagacattgacctatgcggtcccg

SEQ ID NO: 263253 - DNA, 55 bp, Artificial
  Synthetic oligonucleotide
aaacgattcaacgcgttcatgcggtgagtcatcgtgcgggcggtccgaaaggcga

SEQ ID NO: 263254 - DNA, 55 bp, Artificial
  Synthetic oligonucleotide
aaaccagagcgtatagtctgccgaggcgccggagaggtgccacaaggtctcgcag

SEQ ID NO: 263255 - DNA, 55 bp, Artificial
  Synthetic oligonucleotide
ttgtcgtgacgactagcgcggatgaaatacacgaggcactcgctgggtacgtatc

SEQ ID NO: 263256 - DNA, 54 bp, Artificial
  Synthetic oligonucleotide
cagacttgctgcatgcccgcctactagacgaaagttgcaagcgcaggctcgttg

SEQ ID NO: 263257 - DNA, 54 bp, Artificial
  Synthetic oligonucleotide
cgaggcgccaagcacgaggttatcatttcttcaccgtggatcaccggcggagcc

SEQ ID NO: 263258 - DNA, 54 bp, Artificial
  Synthetic oligonucleotide
gcgggcgctttacagcggccgaaaattgtccgcacaagtgccggtcacattcat

SEQ ID NO: 263259 - DNA, 54 bp, Artificial
  Synthetic oligonucleotide
tcaaagccaaattcgccggtcccgttgtctgaagcaaactcatccgccgtacaa

SEQ ID NO: 263260 - DNA, 54 bp, Artificial
  Synthetic oligonucleotide
acctacacgaaacgaggggtctcactggcgcatagtgtgccgagtcacccttaa

SEQ ID NO: 263261 - DNA, 53 bp, Artificial
  Synthetic oligonucleotide
aactagccgccgaatacggtgtacatccgacgatgatccaccagtggaagaag

SEQ ID NO: 263262 - DNA, 60 bp, Artificial
  Synthetic oligonucleotide
tggttgcggttacttgcgtagtggtcggtcgatacgctcagaatctgcattgtgatctcc

SEQ ID NO: 263263 - DNA, 53 bp, Artificial
  Synthetic oligonucleotide
tggatatcctcggacactcttgcgacggttcgcctccaatcgggactgtgcgc

SEQ ID NO: 263264 - DNA, 53 bp, Artificial
  Synthetic oligonucleotide
ggagtgactgcgtttgttgcttgctatgcgggtcgagaccgacttacgtttca

SEQ ID NO: 263265 - DNA, 53 bp, Artificial
  Synthetic oligonucleotide
aggtcaacgaaatcgctaggcgtccaaaccttgcgcggtgaatccccacgtat

SEQ ID NO: 263266 - DNA, 53 bp, Artificial
  Synthetic oligonucleotide
acagcggccgaaaattgtccgcacaagtgccggtcacattcatgacgcgcaaa

SEQ ID NO: 263267 - DNA, 52 bp, Artificial
  Synthetic oligonucleotide
acaggacgcccaaggataggcgctccgggacttgaatgcccgcttgtgaatg

SEQ ID NO: 263268 - DNA, 52 bp, Artificial
  Synthetic oligonucleotide
gtagctttggtcgcactcaccgccgctcggactatcggacgccgctccaaac

SEQ ID NO: 263269 - DNA, 52 bp, Artificial
  Synthetic oligonucleotide
gatggtaagcagtcgggcacgggtgaggaatttggacacgtcgggtcagccg

SEQ ID NO: 263270 - DNA, 51 bp, Artificial
  Synthetic oligonucleotide
gtcacattatggccccattgaccggtcagacgacgccccaccgaaactctg

SEQ ID NO: 263271 - DNA, 50 bp, Artificial
  Synthetic oligonucleotide
ctgcgaacgctttgtcgcgataagttcggatcgttttttcggaacgacct

SEQ ID NO: 263272 - DNA, 50 bp, Artificial
  Synthetic oligonucleotide
tttgtttcggatgcgaactccccgcgagcgagcctatggctgactattat

SEQ ID NO: 263273 - DNA, 55 bp, Artificial
  Synthetic oligonucleotide
cctgatggacgtctctttcgtgtccgccaagaggcggttagaaaggggcgcaatt

SEQ ID NO: 263274 - DNA, 50 bp, Artificial
  Synthetic oligonucleotide
agcgtgttttcgcgtgccgccaagagctggttcgggctttcccccaagcg

SEQ ID NO: 263275 - DNA, 50 bp, Artificial
  Synthetic oligonucleotide
agcgcaactcgttgtgtcggatgcggatgcttcggcctgacttctggtcc

SEQ ID NO: 263276 - DNA, 50 bp, Artificial
  Synthetic oligonucleotide
agacccagtcggaaccgaactcccctgcgccgatatctcctcagacgtga

SEQ ID NO: 263277 - DNA, 50 bp, Artificial
  Synthetic oligonucleotide
acgcaaactctgctcaggcgccccatgtctttccgacctcggaaccgtcg

SEQ ID NO: 263278 - DNA, 50 bp, Artificial
  Synthetic oligonucleotide
acctgtgtctgtgccgcatataggccgaaacggcccgtgctcaaacccgc

SEQ ID NO: 263279 - DNA, 50 bp, Artificial
  Synthetic oligonucleotide
acccgtttgtggacgcgacggtattccattgcgacgcctcatggccggtt

SEQ ID NO: 263280 - DNA, 50 bp, Artificial
  Synthetic oligonucleotide
aattggcgtccagccttctagggagcggtaggccgagcgatcacgacgtg

SEQ ID NO: 263281 - DNA, 50 bp, Artificial
  Synthetic oligonucleotide
aagttactgtacggatcggagcgcacatgtcgggaggtggcccagagcta

SEQ ID NO: 263282 - DNA, 50 bp, Artificial
  Synthetic oligonucleotide
aaggcggggcctcttacgatatgctcgccgagtcgctcagacggctccag

SEQ ID NO: 263283 - DNA, 50 bp, Artificial
  Synthetic oligonucleotide
aagcgacccgcagacgcgtttcctaggacccatgcacgtgtcgagacact

SEQ ID NO: 263284 - DNA, 56 bp, Artificial
  Synthetic oligonucleotide
ctcgtttccggtccggtgtccttgccaaagttgagtccgcgtgtcgtgaggccata

SEQ ID NO: 263285 - DNA, 50 bp, Artificial
  Synthetic oligonucleotide
aagccggcatgacttgtccacggacacgcaatcagtgcgcctagggtgcg

SEQ ID NO: 263286 - DNA, 50 bp, Artificial
  Synthetic oligonucleotide
aacggatcgcgcccagaaagtgaacagcgcagttgtcccacgggtcatgt

SEQ ID NO: 263287 - DNA, 50 bp, Artificial
  Synthetic oligonucleotide
aacggatattgcaatgcagcacaggctggccgcgttcctagcacgcccgg

SEQ ID NO: 263288 - DNA, 50 bp, Artificial
  Synthetic oligonucleotide
aaccgccctaccccattgactcaagagcaccgccccgcttcttatccgcc

SEQ ID NO: 263289 - DNA, 50 bp, Artificial
  Synthetic oligonucleotide
aaacaagtcgaggcgtggtccagtgcgagttaacccggtcgtggcccttg

SEQ ID NO: 263290 - DNA, 50 bp, Artificial
  Synthetic oligonucleotide
ccatccggaatgaggtcgaacaggttcgttcccccggtcgcaggtgcctt

SEQ ID NO: 263291 - DNA, 50 bp, Artificial
  Synthetic oligonucleotide
ccaattcggcccatagtgacccgtggtgcttcgaccccggatgaatcgcc

SEQ ID NO: 263292 - DNA, 50 bp, Artificial
  Synthetic oligonucleotide
ccaaagtcccaacggcttgcctcccccttttccgggccgccttcttaggc

SEQ ID NO: 263293 - DNA, 50 bp, Artificial
  Synthetic oligonucleotide
cactcggcacgcctctccgttctggcatggcgaatgcattgaagccggac

SEQ ID NO: 263294 - DNA, 50 bp, Artificial
  Synthetic oligonucleotide
cacattagggcccttgtgtcgcggaggtttgcccgaggtgtcgcaaactg

SEQ ID NO: 263295 - DNA, 59 bp, Artificial
  Synthetic oligonucleotide
tctgagggcagtggaccacttgcgggcgctttacagcggccgaaaattgtccgcacaag

SEQ ID NO: 263296 - DNA, 50 bp, Artificial
  Synthetic oligonucleotide
cacagtgggtgccaaatgggacggcgtttcgctccgaccgcggcgtttca

SEQ ID NO: 263297 - DNA, 50 bp, Artificial
  Synthetic oligonucleotide
atgccgcctcagaccggtgaaaccgcatggcaccttgcgctcatgtccga

SEQ ID NO: 263298 - DNA, 50 bp, Artificial
  Synthetic oligonucleotide
atgaccgttggggcaaggggcgcggtcacgacacatactcagtcgtcact

SEQ ID NO: 263299 - DNA, 50 bp, Artificial
  Synthetic oligonucleotide
atcttatgatgcgccgtgttggtgcgtgcccgcgcaaacgttgaccgtac

SEQ ID NO: 263300 - DNA, 50 bp, Artificial
  Synthetic oligonucleotide
atccggaaccatccggctgcggagagtggaatgtcgaagaccgaagacgc

SEQ ID NO: 263301 - DNA, 50 bp, Artificial
  Synthetic oligonucleotide
atatccggagccgggtagagagtcgattcctgctcgccagacacggcgtc

SEQ ID NO: 263302 - DNA, 50 bp, Artificial
  Synthetic oligonucleotide
atagcttcccgcaagcaccgctggcgcattggaatgccgatcgttgagcg

SEQ ID NO: 263303 - DNA, 50 bp, Artificial
  Synthetic oligonucleotide
agttcgcgccttcagtgtcggtggacgttgcggagggggtgccgaaaaag

SEQ ID NO: 263304 - DNA, 50 bp, Artificial
  Synthetic oligonucleotide
agtggctggaggtgtcgtccgagtatctggcgcgtgtacgcaagcgtgct

SEQ ID NO: 263305 - DNA, 50 bp, Artificial
  Synthetic oligonucleotide
agggctgtgccgtgcgttcctgcgaccagaaaaaggcagacttcagggtg

SEQ ID NO: 263306 - DNA, 60 bp, Artificial
  Synthetic oligonucleotide
ccatgtttcgttattgtcgtgacgactagcgcggatgaaatacacgaggcactcgctggg

SEQ ID NO: 263307 - DNA, 55 bp, Artificial
  Synthetic oligonucleotide
cagagccgggaggtccgtcgaggcaaccgtgttgttgctcacgtaggcagaaacg

SEQ ID NO: 263308 - DNA, 55 bp, Artificial
  Synthetic oligonucleotide
ccagaaacatatccatgagctgcgtcttccaaaaccttgcgggtctccaaaacag

SEQ ID NO: 263309 - DNA, 55 bp, Artificial
  Synthetic oligonucleotide
cttaaagtttccgtgctaggataatttcagacatgaggtgaacgagttgtacaac

SEQ ID NO: 263310 - DNA, 55 bp, Artificial
  Synthetic oligonucleotide
cttcgtaatctgaaccatgggtggttacctccgtaaatctctaggatatgggtag

SEQ ID NO: 263311 - DNA, 55 bp, Artificial
  Synthetic oligonucleotide
gaatcttggacataacgagtcctccttatgaagtattagggatgcacgactgggg

SEQ ID NO: 263312 - DNA, 55 bp, Artificial
  Synthetic oligonucleotide
gcgggcttcacaaggcctgtgatggtcaattcttttggaacggtctgtccatgga

SEQ ID NO: 263313 - DNA, 55 bp, Artificial
  Synthetic oligonucleotide
aagagattccttaaggatgtaacagatggtgttgttcctcagacctactggccct

SEQ ID NO: 263314 - DNA, 54 bp, Artificial
  Synthetic oligonucleotide
tattgcggcgaaaacgggcgtccccgtctgccactctagttttaacatacgccg

SEQ ID NO: 263315 - DNA, 55 bp, Artificial
  Synthetic oligonucleotide
tccaggggcagacggggcagaccgccgtaaatcaggtcaacattggcatgaccgg

SEQ ID NO: 263316 - DNA, 55 bp, Artificial
  Synthetic oligonucleotide
attccgccccgctgtctgtctccgtggggctgtcagtcgtttcagcagcactgtc

SEQ ID NO: 263317 - DNA, 55 bp, Artificial
  Synthetic oligonucleotide
ttgctatccccggcgtgacttctgcgaacaccaccctcacttatgtgaaggctag

SEQ ID NO: 263318 - DNA, 54 bp, Artificial
  Synthetic oligonucleotide
tactcgttccagggacaatgccccggcacagaggactttccaggtcggacgtca

SEQ ID NO: 263319 - DNA, 55 bp, Artificial
  Synthetic oligonucleotide
ccatggggagctttatgcagcgacagagcaaatctacgcaagcctgattactggc

SEQ ID NO: 263320 - DNA, 54 bp, Artificial
  Synthetic oligonucleotide
cgcaacaggtatatggtgtttccatccagaagctcggtatgagcgtccaagtat

SEQ ID NO: 263321 - DNA, 53 bp, Artificial
  Synthetic oligonucleotide
taagctgcaccccatgttccattcttacctctattactcctcgggaggttttc

SEQ ID NO: 263322 - DNA, 53 bp, Artificial
  Synthetic oligonucleotide
ataccctttgcgctcaatggcctctgcggtaggagtgagggcggtatttgcgc

SEQ ID NO: 263323 - DNA, 52 bp, Artificial
  Synthetic oligonucleotide
acgtctcccacaccggtaaggaattctggctccagtaccttgggtcctaccg

SEQ ID NO: 263324 - DNA, 52 bp, Artificial
  Synthetic oligonucleotide
cgcgctctgtgtgggactcctgttggacgagtcgggaagtatgtcctggaac

SEQ ID NO: 263325 - DNA, 51 bp, Artificial
  Synthetic oligonucleotide
cgttcgccgtccatacgccttaacggcaaggagctgtctgtctccggcgtc

SEQ ID NO: 263326 - DNA, 51 bp, Artificial
  Synthetic oligonucleotide
cgttgcatcgccggatatcgtagtgcgtaatagtacgaacaccgggtttca

SEQ ID NO: 263327 - DNA, 51 bp, Artificial
  Synthetic oligonucleotide
tgtggagggacagtccggtaatgtgcagctctccctttccgcaccggtagc

SEQ ID NO: 263328 - DNA, 51 bp, Artificial
  Synthetic oligonucleotide
ttttcgtacggttttatctatgctggacctatctctggcgttggcattgct

SEQ ID NO: 263329 - DNA, 51 bp, Artificial
  Synthetic oligonucleotide
aaaacaccgtcgctggtgtaggtgttcagctcaccctcatacttgcggaca

SEQ ID NO: 263330 - DNA, 55 bp, Artificial
  Synthetic oligonucleotide
cccgtctaagtacaagccgagatgcagatgaggccccgtggagtagaaacccgta

SEQ ID NO: 263331 - DNA, 50 bp, Artificial
  Synthetic oligonucleotide
agcggcagtttccgtgtttacggctgtctggctgccccagtccacatgat

SEQ ID NO: 263332 - DNA, 50 bp, Artificial
  Synthetic oligonucleotide
agcctgagcgggacgtccgaattaagggttgagtggagcaagagcgggtt

SEQ ID NO: 263333 - DNA, 50 bp, Artificial
  Synthetic oligonucleotide
acgggcctgacagaggtgcccaacccgtctgagatgctgctctccggacg

SEQ ID NO: 263334 - DNA, 50 bp, Artificial
  Synthetic oligonucleotide
acctcttggtaactgcgtacacgcctaacgtggggcacagccaggcaccc

SEQ ID NO: 263335 - DNA, 50 bp, Artificial
  Synthetic oligonucleotide
accgcatgggagtccaccgccgtccggtgcgcaacgattactgcacctat

SEQ ID NO: 263336 - DNA, 50 bp, Artificial
  Synthetic oligonucleotide
accccgaactttttgccgcactccgccccagtcaggccctcaaagaaacg

SEQ ID NO: 263337 - DNA, 50 bp, Artificial
  Synthetic oligonucleotide
acagccaatgtacggatcaccccgtggcaaaccgctacggaacatggcgc

SEQ ID NO: 263338 - DNA, 50 bp, Artificial
  Synthetic oligonucleotide
aatccacgcagcctgtgtcccggtggtagcccggataggaaacgtcccag

SEQ ID NO: 263339 - DNA, 50 bp, Artificial
  Synthetic oligonucleotide
aagcgacaccccctgcatggtggtaccccaccggcgtgaggccatccgac

SEQ ID NO: 263340 - DNA, 50 bp, Artificial
  Synthetic oligonucleotide
aagaccagcgactgtgcctgcaacacgccttggactgtcggaggcagtat

SEQ ID NO: 263341 - DNA, 55 bp, Artificial
  Synthetic oligonucleotide
ccgcgtccgcagttgattgcctcgtgaccaacgcgcttaaccgcacgaacaactc

SEQ ID NO: 263342 - DNA, 50 bp, Artificial
  Synthetic oligonucleotide
taccgttccaatggcagacgctgtctcaaacaggcaggtaaggacgggaa

SEQ ID NO: 263343 - DNA, 50 bp, Artificial
  Synthetic oligonucleotide
aacgatgctcagacgcgccgcaaccatgtgggccgtgtcaacgaggcttc

SEQ ID NO: 263344 - DNA, 50 bp, Artificial
  Synthetic oligonucleotide
aacccttacagccagctcggaaacgggaattccgcggcacacgaggcatt

SEQ ID NO: 263345 - DNA, 50 bp, Artificial
  Synthetic oligonucleotide
aacacgccttggactgtcggaggcagtatcggctgcggctgtgtagaacc

SEQ ID NO: 263346 - DNA, 50 bp, Artificial
  Synthetic oligonucleotide
aaatcggtatgaccggtcgggcggagtgcgctgtcacagagcagaacacc

SEQ ID NO: 263347 - DNA, 50 bp, Artificial
  Synthetic oligonucleotide
aaaaccagccgccgatatcgcagcacacctcggcccttggggtgtccaaa

SEQ ID NO: 263348 - DNA, 50 bp, Artificial
  Synthetic oligonucleotide
atcgcagggctcgcactggaaggcctcaatccggccgtggaactcggcaa

SEQ ID NO: 263349 - DNA, 50 bp, Artificial
  Synthetic oligonucleotide
atcggttccgtgggctggaatgaatagaagcagcgggcggggacacgccc

SEQ ID NO: 263350 - DNA, 50 bp, Artificial
  Synthetic oligonucleotide
atgagacctccgcctccgatgagcccaagtaccctgtgggcaccgttgga

SEQ ID NO: 263351 - DNA, 50 bp, Artificial
  Synthetic oligonucleotide
atgcgctctctggtgaccccgaactttttgccgcactccgccccagtcag

SEQ ID NO: 263352 - DNA, 55 bp, Artificial
  Synthetic oligonucleotide
cacccgaatctgcatccggctatagagcgatatgctcgtttggctatgcgggagt

SEQ ID NO: 263353 - DNA, 50 bp, Artificial
  Synthetic oligonucleotide
atggagcatacggaaacaaccgccagcgaaactctggagggtgccccctg

SEQ ID NO: 263354 - DNA, 50 bp, Artificial
  Synthetic oligonucleotide
agttggcgggaagtgcgccctaactttgtaccggcctctcgcagagactc

SEQ ID NO: 263355 - DNA, 50 bp, Artificial
  Synthetic oligonucleotide
agtgtaccaggcctaccggagtaaaggacgagcgtctgagccgctcctgg

SEQ ID NO: 263356 - DNA, 50 bp, Artificial
  Synthetic oligonucleotide
caaagcagtccttggcggcggtaactgcaacagacacgcgcccctccgga

SEQ ID NO: 263357 - DNA, 50 bp, Artificial
  Synthetic oligonucleotide
cacagcgcgcgacctcttggtaactgcgtacacgcctaacgtggggcaca

SEQ ID NO: 263358 - DNA, 50 bp, Artificial
  Synthetic oligonucleotide
agtccagccaagccggcgaccttctcatttccgcgctgttcccattcacg

SEQ ID NO: 263359 - DNA, 50 bp, Artificial
  Synthetic oligonucleotide
cagacggatgcctatgggcgctccattgtcgagtctgcctcctgggagct

SEQ ID NO: 263360 - DNA, 50 bp, Artificial
  Synthetic oligonucleotide
cagacgttcccgctttcaattgcgttccgggactggttttcccgccggtt

SEQ ID NO: 263361 - DNA, 50 bp, Artificial
  Synthetic oligonucleotide
agtactccatgcccgactgctcgcacacccgggagacaaagagcccgtag

SEQ ID NO: 263362 - DNA, 50 bp, Artificial
  Synthetic oligonucleotide
aggggcccccgctttgacatacgggcggcggatttaagtacgggcttaga

SEQ ID NO: 263363 - DNA, 55 bp, Artificial
  Synthetic oligonucleotide
acgtgggtcaccgactgagagcccgccccggagagaagagatggcgcaacacttt

SEQ ID NO: 263364 - DNA, 50 bp, Artificial
  Synthetic oligonucleotide
aggacgggtccagcagagcaaattggggatcgcaaggtgggtagtccctc

SEQ ID NO: 263365 - DNA, 50 bp, Artificial
  Synthetic oligonucleotide
agcgtctgagccgctcctggagtgtctggtagcgtacacgccggttatcc

SEQ ID NO: 263366 - DNA, 50 bp, Artificial
  Synthetic oligonucleotide
agcggtggaataccttcagagccggtccgctggtccccgggatgatgggc

SEQ ID NO: 263367 - DNA, 55 bp, Artificial
  Synthetic oligonucleotide
attgaccagcccgcacccattgacatccagacactcacagaatgtgaggttgtgc

SEQ ID NO: 263368 - DNA, 55 bp, Artificial
  Synthetic oligonucleotide
ctccagagcgcttacggtggtccagtagatgtcaggcgcccagttccactccatg

SEQ ID NO: 263369 - DNA, 55 bp, Artificial
  Synthetic oligonucleotide
ctgtgatacaatcgggagaattttcgtctgcgctcctcagagcacgttcttgtta

SEQ ID NO: 263370 - DNA, 55 bp, Artificial
  Synthetic oligonucleotide
attaacagctgtgcgccgttgtccagcccaaagcggtccgcccagcgctcggatc

SEQ ID NO: 263371 - DNA, 55 bp, Artificial
  Synthetic oligonucleotide
ccgccaaactctcatggggttacgttattgctcgccaaagcgtcgaaacccgagc

SEQ ID NO: 263372 - DNA, 55 bp, Artificial
  Synthetic oligonucleotide
cctcacaggctgagcttatcgggaatcttacagtccccatttagaacgagcagag

SEQ ID NO: 263373 - DNA, 55 bp, Artificial
  Synthetic oligonucleotide
cgccgagtacgaacaatgggccaacggtgcctattgtgaccccgcccaacaacag

SEQ ID NO: 263374 - DNA, 55 bp, Artificial
  Synthetic oligonucleotide
cgtcgtattacgctgcagaaacgattccaccgcaggatggtagtcggtcgctgtg

SEQ ID NO: 263375 - DNA, 55 bp, Artificial
  Synthetic oligonucleotide
cgttgccgctgttaacatgcaccaacaggggtttaaccgtggtgtagtcttgcgc

SEQ ID NO: 263376 - DNA, 55 bp, Artificial
  Synthetic oligonucleotide
ctcaatgatcgccttggcaggtagtacgttatttgagcgcaggattaacctcccg

SEQ ID NO: 263377 - DNA, 55 bp, Artificial
  Synthetic oligonucleotide
gacgggtatagtcagcctcacgatacgagattgcacggtccgaccagtgcgccgc

SEQ ID NO: 263378 - DNA, 55 bp, Artificial
  Synthetic oligonucleotide
aacgactgctcactcgacgagacacagttgctcggggaacgcggacaggggttgc

SEQ ID NO: 263379 - DNA, 55 bp, Artificial
  Synthetic oligonucleotide
gccggtcggattgaggactgtacttcgaacctgatcattaccgcagacgagggtg

SEQ ID NO: 263380 - DNA, 55 bp, Artificial
  Synthetic oligonucleotide
ggacccgataatcatccacagcgatcgcgttattaacgctggcaccaagcgccag

SEQ ID NO: 263381 - DNA, 55 bp, Artificial
  Synthetic oligonucleotide
caacacactattagcttccaacgccgggtttggcgcattggtcttacgccttccg

SEQ ID NO: 263382 - DNA, 55 bp, Artificial
  Synthetic oligonucleotide
ttgtgccaaccgcagagcgccgcaaagaattactggaccgtttgagtcgtcctgc

SEQ ID NO: 263383 - DNA, 54 bp, Artificial
  Synthetic oligonucleotide
ggtgaccgggttaaccgtgattggattaggctattggttggtccgcccgcaggc

SEQ ID NO: 263384 - DNA, 55 bp, Artificial
  Synthetic oligonucleotide
ggtgccggtttatgttaaccgcaatggtatgcgcagcgttgtagtggggacgggc

SEQ ID NO: 263385 - DNA, 55 bp, Artificial
  Synthetic oligonucleotide
tgcgctatccagttgtgccatggggacaaaagaactgaagctcggattgtaacga

SEQ ID NO: 263386 - DNA, 54 bp, Artificial
  Synthetic oligonucleotide
gtattccgtttgtacacacggttaagaagttcgataagcggctgattacattgg

SEQ ID NO: 263387 - DNA, 53 bp, Artificial
  Synthetic oligonucleotide
tgaacggaatagacaactggaacgcgtttgggtgcgtcgtgtcggaagggcgg

SEQ ID NO: 263388 - DNA, 53 bp, Artificial
  Synthetic oligonucleotide
ggggtatcgctattatgtgtaatctgagcagacacttatgagcccgacgcaac

SEQ ID NO: 263389 - DNA, 53 bp, Artificial
  Synthetic oligonucleotide
atccataaatgtacccaagctagtccaatggccaggtataccgctttgtgtaa

SEQ ID NO: 263390 - DNA, 52 bp, Artificial
  Synthetic oligonucleotide
atatgcctgacttatgatgcagacgccgtaaaactcggaaagtacacattga

SEQ ID NO: 263391 - DNA, 51 bp, Artificial
  Synthetic oligonucleotide
tatggtgttcccctgcgatgaaggctgtaaaccgagcggttcgctcagtca

SEQ ID NO: 263392 - DNA, 55 bp, Artificial
  Synthetic oligonucleotide
caaggccttcactaagtcgattcaggcgacgttcagtcgccgtaaagatactgaa

SEQ ID NO: 263393 - DNA, 50 bp, Artificial
  Synthetic oligonucleotide
cagcgtgcgttgattttacagactgggcaatacgtcagtgcgacagacct

SEQ ID NO: 263394 - DNA, 50 bp, Artificial
  Synthetic oligonucleotide
acgacgagggtagagtggcggtgctgttggggttcgggcacccctaaggg

SEQ ID NO: 263395 - DNA, 50 bp, Artificial
  Synthetic oligonucleotide
acctcaggccacagtgtgaccggtttgctcggtttgcagacgcagaacgg

SEQ ID NO: 263396 - DNA, 50 bp, Artificial
  Synthetic oligonucleotide
accgtgaacggccggcatacagcgggtctccgactaacggatagccgatg

SEQ ID NO: 263397 - DNA, 50 bp, Artificial
  Synthetic oligonucleotide
aaaaccgggtcgatgaaacccgactgaacccgctgtcacgtctagggggc

SEQ ID NO: 263398 - DNA, 50 bp, Artificial
  Synthetic oligonucleotide
aaacggagcgtcccagctgtgaaacgaatcaatcgggccgaatggcggga

SEQ ID NO: 263399 - DNA, 50 bp, Artificial
  Synthetic oligonucleotide
aaagccccgagcccaacgtcggagagcgagcgaatactcgactgcccctg

SEQ ID NO: 263400 - DNA, 50 bp, Artificial
  Synthetic oligonucleotide
aaagcggtgcctgggctgagtatgccgtgacccgtgctgagacgttaacc

SEQ ID NO: 263401 - DNA, 50 bp, Artificial
  Synthetic oligonucleotide
aaatgcccacacctgagcagacactgccgggtcgatcaacccccatgtcg

SEQ ID NO: 263402 - DNA, 50 bp, Artificial
  Synthetic oligonucleotide
aacacgcccaggtcggtgttaatctgccgggagttcagaaccgttgccgg

SEQ ID NO: 263403 - DNA, 55 bp, Artificial
  Synthetic oligonucleotide
caattgtgcgtatcatagccggccttattattagaatgcgagcctgagagatgag

SEQ ID NO: 263404 - DNA, 50 bp, Artificial
  Synthetic oligonucleotide
aacacgctcaccacagtcaggcagtcgtgggttcagaggcgaacgagcac

SEQ ID NO: 263405 - DNA, 50 bp, Artificial
  Synthetic oligonucleotide
aacagccgcaaactgagcgatccgatcccgtgagggcacggtaccccagg

SEQ ID NO: 263406 - DNA, 50 bp, Artificial
  Synthetic oligonucleotide
aaccccggtggctacttgttggtaggggcgtcagaagccgtgaatggctt

SEQ ID NO: 263407 - DNA, 50 bp, Artificial
  Synthetic oligonucleotide
aacctggaaggcccgttaccagactgaggcaaccgctgagcaacaggcac

SEQ ID NO: 263408 - DNA, 50 bp, Artificial
  Synthetic oligonucleotide
aacgtgagtcgtgacagatgactgtgatccggcggtagggagtgccgcgg

SEQ ID NO: 263409 - DNA, 50 bp, Artificial
  Synthetic oligonucleotide
aactggcaccgaaggctcgcggcacctgtttcagagccaaaagccggagt

SEQ ID NO: 263410 - DNA, 50 bp, Artificial
  Synthetic oligonucleotide
aaggacacacgcactaactccgtttgtgggttccagggcgtttgcgtgcg

SEQ ID NO: 263411 - DNA, 50 bp, Artificial
  Synthetic oligonucleotide
aaggttcggggcaagggaggcattgcaagcacgcggcagattcgctttat

SEQ ID NO: 263412 - DNA, 50 bp, Artificial
  Synthetic oligonucleotide
aagtcgcccggttcaaactgctggctgaacgctctggcttgctccggtgt

SEQ ID NO: 263413 - DNA, 50 bp, Artificial
  Synthetic oligonucleotide
accgggtgctacccgttgcggctaatcaggagcacaccaaccctcgcctt

SEQ ID NO: 263414 - DNA, 55 bp, Artificial
  Synthetic oligonucleotide
cacaggtaacatgtgaacaagtttagtcggtcagcgcactgccaccacagcacgc

SEQ ID NO: 263415 - DNA, 50 bp, Artificial
  Synthetic oligonucleotide
accgcttcaccctttgccagtgaccggaccgtttgtccacaacgacgctc

SEQ ID NO: 263416 - DNA, 50 bp, Artificial
  Synthetic oligonucleotide
accgcgtaacggccagtgtttatgaggaaggcggacgcccggttacccga

SEQ ID NO: 263417 - DNA, 50 bp, Artificial
  Synthetic oligonucleotide
accgcgaggcactcccattgaccgctctgggcgtcctgttcacaggttcc

SEQ ID NO: 263418 - DNA, 50 bp, Artificial
  Synthetic oligonucleotide
acccgcatgggccgactagtttaacgggggtacgggtctgaaaccagcgc

SEQ ID NO: 263419 - DNA, 50 bp, Artificial
  Synthetic oligonucleotide
accccgatgtggttgccggtagacactcaggccgaagggtcggtacatgc

SEQ ID NO: 263420 - DNA, 50 bp, Artificial
  Synthetic oligonucleotide
accagcaagaacccgctagccaacgaaacggaacgggccaccgtcagggt

SEQ ID NO: 263421 - DNA, 50 bp, Artificial
  Synthetic oligonucleotide
accaaccttatttggcaggcgctgcaagcacagctaccgacgaccgcgga

SEQ ID NO: 263422 - DNA, 50 bp, Artificial
  Synthetic oligonucleotide
accaaaccaacggcgtcgagtaggtcacccagatgcgccaacgtagcgct

SEQ ID NO: 263423 - DNA, 50 bp, Artificial
  Synthetic oligonucleotide
acatgggatccagtttccgtcgcgcctatacggttctcggcgacgcggta

SEQ ID NO: 263424 - DNA, 50 bp, Artificial
  Synthetic oligonucleotide
acatcggactctttgccgtgcaccaacagaatcgggcagcgaagtgcggc

SEQ ID NO: 263425 - DNA, 55 bp, Artificial
  Synthetic oligonucleotide
cagtttatggggttacgcacctacattcgggcgcatggggaaacagcgcaggtgg

SEQ ID NO: 263426 - DNA, 50 bp, Artificial
  Synthetic oligonucleotide
acatagtgcccgccgaggctgattagccgttctgtgcctgcccactcgga

SEQ ID NO: 263427 - DNA, 50 bp, Artificial
  Synthetic oligonucleotide
acagggacccattcgacgtccaaacgcccgatgcggtaccatgcccgtac

SEQ ID NO: 263428 - DNA, 50 bp, Artificial
  Synthetic oligonucleotide
acactggacgacccattgcccagcggcccgactcagaacattcattgggc

SEQ ID NO: 263429 - DNA, 50 bp, Artificial
  Synthetic oligonucleotide
acacaatcgctcccggccagctatggtcgcccacattgcgtcactggagg

SEQ ID NO: 263430 - DNA, 50 bp, Artificial
  Synthetic oligonucleotide
aatgttccgggcaatactcaatcccaacccggcgcctccggtgttgcgat

SEQ ID NO: 263431 - DNA, 50 bp, Artificial
  Synthetic oligonucleotide
aatgcgcgcagcggcttctgtttgcccatacatgacaaacaaccgggtgc

SEQ ID NO: 263432 - DNA, 55 bp, Artificial
  Synthetic oligonucleotide
cccaacttttgcgccgccttaatcactgaaatccgacgcagcacatcggaggtgt

SEQ ID NO: 263433 - DNA, 55 bp, Artificial
  Synthetic oligonucleotide
cccgcaacatcgaaatgcccacacctgagcagacactgccgggtcgatcaacccc

SEQ ID NO: 263434 - DNA, 55 bp, Artificial
  Synthetic oligonucleotide
cccggattgtgaaccaccttcattcacggcaaagcaagcgccggtcaagtccgtc

SEQ ID NO: 263435 - DNA, 56 bp, Artificial
  Synthetic oligonucleotide
aaatgcaggccccctgtcaggcgatgcataatgtccacccacagttttaccggcat

SEQ ID NO: 263436 - DNA, 55 bp, Artificial
  Synthetic oligonucleotide
cgccccatccactacgcctatgcgagatgcgtaactgttcgtgaaatggcccggt

SEQ ID NO: 263437 - DNA, 55 bp, Artificial
  Synthetic oligonucleotide
agtcatagcaacgttaagtgaccgtgctttgccatacatgggtaatttgatgtgt

SEQ ID NO: 263438 - DNA, 55 bp, Artificial
  Synthetic oligonucleotide
ctgcgcaagtggggctatctgctccgccgtgtttgcgtagaattagggcactcga

SEQ ID NO: 263439 - DNA, 55 bp, Artificial
  Synthetic oligonucleotide
ctgccagcttaagccactgcttaggccgccacaatgtgaaagtgcgccccaaatt

SEQ ID NO: 263440 - DNA, 55 bp, Artificial
  Synthetic oligonucleotide
ctagcggtaattcgccgcacttgcagcctagacgacaccgcgtgtccgctatgcg

SEQ ID NO: 263441 - DNA, 55 bp, Artificial
  Synthetic oligonucleotide
cgtctgcagccaagcctactgttcggtattttaggccttccatttgagcagcgct

SEQ ID NO: 263442 - DNA, 55 bp, Artificial
  Synthetic oligonucleotide
cgtaacagcaactaacgttaatccaacatcgacacccattgaaccatcataatgc

SEQ ID NO: 263443 - DNA, 55 bp, Artificial
  Synthetic oligonucleotide
cgcttttacgataggatttcgattttccttcgcgtcaccttgaggttgtggcggc

SEQ ID NO: 263444 - DNA, 55 bp, Artificial
  Synthetic oligonucleotide
gtgccgcagaactatctgctctactggtaagaagtattggaacttttccgcctac

SEQ ID NO: 263445 - DNA, 55 bp, Artificial
  Synthetic oligonucleotide
tagtgttacgtttcgggctgccggcactagcttatccggccaagcagtcagtgat

SEQ ID NO: 263446 - DNA, 56 bp, Artificial
  Synthetic oligonucleotide
cagctcacgctttgcgtcgggtgcacgccttagcccaatccggaccaattgcgaac

SEQ ID NO: 263447 - DNA, 55 bp, Artificial
  Synthetic oligonucleotide
tatcgtctcacttgcaccgcggggccatagcactctaccgccggtcattgtgcgg

SEQ ID NO: 263448 - DNA, 55 bp, Artificial
  Synthetic oligonucleotide
tgagccaaatctaatataggactatcacctgcttgacgatgtactctcgttaagt

SEQ ID NO: 263449 - DNA, 55 bp, Artificial
  Synthetic oligonucleotide
ccccattttaccgtttcaaacataaataggcctatgatctctgatcataaacccg

SEQ ID NO: 263450 - DNA, 54 bp, Artificial
  Synthetic oligonucleotide
tgccttcttgtgccccttccggtaccgcttatatagccggttacaaatttatac

SEQ ID NO: 263451 - DNA, 55 bp, Artificial
  Synthetic oligonucleotide
tgcgataagtcagctcacgctttgcgtcgggtgcacgccttagcccaatccggac

SEQ ID NO: 263452 - DNA, 53 bp, Artificial
  Synthetic oligonucleotide
ttcacgggtaatatcttgacccggcaacaaactaggtccccatctaaaacctg

SEQ ID NO: 263453 - DNA, 55 bp, Artificial
  Synthetic oligonucleotide
ccagggtcacaagttaaattagagtggcgcgcacgtttggaagaacatttaggta

SEQ ID NO: 263454 - DNA, 54 bp, Artificial
  Synthetic oligonucleotide
tatggcgcaccagccgaacgtattacagcaattggctacggcgaatctcgccca

SEQ ID NO: 263455 - DNA, 54 bp, Artificial
  Synthetic oligonucleotide
tcgcctgtcggtaagctaatttgatcagggatggtccactcattacgcgctagt

SEQ ID NO: 263456 - DNA, 54 bp, Artificial
  Synthetic oligonucleotide
tcgttggccacgcccgattggtatcaaagcgtccacagactttagcccagttgc

SEQ ID NO: 263457 - DNA, 56 bp, Artificial
  Synthetic oligonucleotide
aggcccccgcatgtccccatgggccagtcaactcaacatttcgtaatgatggtgtt

SEQ ID NO: 263458 - DNA, 53 bp, Artificial
  Synthetic oligonucleotide
cctcaattgaggctcgcatagagagccttgcccaagagttgcgtcaaacgttg

SEQ ID NO: 263459 - DNA, 53 bp, Artificial
  Synthetic oligonucleotide
cccctgtcaggcgatgcataatgtccacccacagttttaccggcattcatagt

SEQ ID NO: 263460 - DNA, 53 bp, Artificial
  Synthetic oligonucleotide
gactcgaagtcttcataaccggcaaattggaaacggttcggaaccaccgtcag

SEQ ID NO: 263461 - DNA, 53 bp, Artificial
  Synthetic oligonucleotide
ggtcacggggaatcctgctgtttgggtaaacgtcctgcagggcaatttcggaa

SEQ ID NO: 263462 - DNA, 53 bp, Artificial
  Synthetic oligonucleotide
tcacctcgcaacacggatcctctcaacagaggtcgccctgctgaagcctcatg

SEQ ID NO: 263463 - DNA, 52 bp, Artificial
  Synthetic oligonucleotide
tgccaggatttacatgcttgtaatctattagctgtcggcgggctaattcgtc

SEQ ID NO: 263464 - DNA, 51 bp, Artificial
  Synthetic oligonucleotide
ctgctatacagggactgcggccgggcaagtctgatgcgtttccctaacttt

SEQ ID NO: 263465 - DNA, 51 bp, Artificial
  Synthetic oligonucleotide
gtggcgcgacatagcccttttgagaacagatcagggcagccaactgtatag

SEQ ID NO: 263466 - DNA, 51 bp, Artificial
  Synthetic oligonucleotide
tcactcggcttcactattcttggcacccaatcccacgctgacacgggcact

SEQ ID NO: 263467 - DNA, 51 bp, Artificial
  Synthetic oligonucleotide
tggacagttttgggattcacaagccgattcggttatggcatacataaggca

SEQ ID NO: 263468 - DNA, 55 bp, Artificial
  Synthetic oligonucleotide
gtcaaccggggattgcgtacccgtctggtagtaggacatcagctgccgctcctgt

SEQ ID NO: 263469 - DNA, 51 bp, Artificial
  Synthetic oligonucleotide
ttccccgggacccaagcctctgctaagctccgccggactgggctccagacg

SEQ ID NO: 263470 - DNA, 51 bp, Artificial
  Synthetic oligonucleotide
aaccaatgcagttgatccggacgtcactttgcaaatcgtcagagactggat

SEQ ID NO: 263471 - DNA, 51 bp, Artificial
  Synthetic oligonucleotide
atagaccgaattgttatgctattggcgaatgaagacaacataaggcaagtc

SEQ ID NO: 263472 - DNA, 50 bp, Artificial
  Synthetic oligonucleotide
agcccgacatctcgggacaaggggtccggcctccttatctgtgtgtctgc

SEQ ID NO: 263473 - DNA, 50 bp, Artificial
  Synthetic oligonucleotide
agaatgtcctcccggttagcaggggcatgagcgacgtggacattgtgcga

SEQ ID NO: 263474 - DNA, 50 bp, Artificial
  Synthetic oligonucleotide
acggcacgggggttccgcgcgttaaacgctatttgagcgaggtccaaggc

SEQ ID NO: 263475 - DNA, 50 bp, Artificial
  Synthetic oligonucleotide
acggacagcaatcgcgctcgctggcccacgcatgagttatggcaccaagc

SEQ ID NO: 263476 - DNA, 50 bp, Artificial
  Synthetic oligonucleotide
tatcagttgcacttcacgttcagcgtctgtccaactgttcgcttggtttt

SEQ ID NO: 263477 - DNA, 50 bp, Artificial
  Synthetic oligonucleotide
acgctgaggggcgcttagaggacgcagcttaaggcgagttcgctcttgga

SEQ ID NO: 263478 - DNA, 50 bp, Artificial
  Synthetic oligonucleotide
accacagcattattcgccggttcattcggcctcgtctcgggccgctaccg

SEQ ID NO: 263479 - DNA, 55 bp, Artificial
  Synthetic oligonucleotide
cctttgacgcacgttctgacatgtgatcgtgtaatacgctttctgaggaagtttc

SEQ ID NO: 263480 - DNA, 50 bp, Artificial
  Synthetic oligonucleotide
aatacatccgcgcgacacttcgcagaagaggcccggcttgactgctcccg

SEQ ID NO: 263481 - DNA, 50 bp, Artificial
  Synthetic oligonucleotide
aataacccgcaggcaggtctttgatggtccttgcggcccggaggtgtctg

SEQ ID NO: 263482 - DNA, 50 bp, Artificial
  Synthetic oligonucleotide
aagttgtcgccccgatgaccggtagcacccatccgacagttccgcaggac

SEQ ID NO: 263483 - DNA, 50 bp, Artificial
  Synthetic oligonucleotide
aactgccccgcgaggccggaaacccttacgttattctgggcgacgtggat

SEQ ID NO: 263484 - DNA, 50 bp, Artificial
  Synthetic oligonucleotide
aactccacgttccgtcttgttcaggcatgctgccatcggcagggcaaacc

SEQ ID NO: 263485 - DNA, 50 bp, Artificial
  Synthetic oligonucleotide
aacgtgacgaatccacgcagcggtcctgaacggcggaggctcaactcagc

SEQ ID NO: 263486 - DNA, 50 bp, Artificial
  Synthetic oligonucleotide
aacgccgtttcccgatgcggaatgcgttcaattcgcctgcgtgaatcgcg

SEQ ID NO: 263487 - DNA, 50 bp, Artificial
  Synthetic oligonucleotide
aaccttgacgagggtgtttccttgactgcccggccaatgcagccgaacag

SEQ ID NO: 263488 - DNA, 50 bp, Artificial
  Synthetic oligonucleotide
aaaatgaggccatcgcacgaatagcagagcccgacctttcaaatgacgtc

SEQ ID NO: 263489 - DNA, 50 bp, Artificial
  Synthetic oligonucleotide
cagagagtgacccggattcggacggtgtcgccacgaatggcaacgctgcg

SEQ ID NO: 263490 - DNA, 54 bp, Artificial
  Synthetic oligonucleotide
gccggcactccccggttcatcccgttgttatccccaagcacgcgaaggtaaaga

SEQ ID NO: 263491 - DNA, 50 bp, Artificial
  Synthetic oligonucleotide
caccgactttagctttgaactcaccaaaccaccgtgggagtattcattat

SEQ ID NO: 263492 - DNA, 50 bp, Artificial
  Synthetic oligonucleotide
caatccgccgcaaaacactgccccggtctccgaagccgtaatccgcgacc

SEQ ID NO: 263493 - DNA, 50 bp, Artificial
  Synthetic oligonucleotide
caaggggcagtatcatggcacttccggtcattgcgtcgctatgggtgggc

SEQ ID NO: 263494 - DNA, 50 bp, Artificial
  Synthetic oligonucleotide
atttgcgcatggaccgcatgtcccctacatacgggggcgccacacattga

SEQ ID NO: 263495 - DNA, 50 bp, Artificial
  Synthetic oligonucleotide
attgccccaggtgtgaattgccacgaccctgtctgaaatgcagtgcgccg

SEQ ID NO: 263496 - DNA, 50 bp, Artificial
  Synthetic oligonucleotide
atgaccagctctggcacgcagtgaagacacgccagggagaggtgcggcag

SEQ ID NO: 263497 - DNA, 50 bp, Artificial
  Synthetic oligonucleotide
atcggcttgggaaattccccgcgctgaatgtcgcggtagaggcttgcgcg

SEQ ID NO: 263498 - DNA, 50 bp, Artificial
  Synthetic oligonucleotide
atcgcacacgcggacgtctgaggctacgcttttgatcgccttccccttga

SEQ ID NO: 263499 - DNA, 50 bp, Artificial
  Synthetic oligonucleotide
atcccggcgtgaccccaagcgtttttatcggaaaagccccgaggcctcat

SEQ ID NO: 263500 - DNA, 50 bp, Artificial
  Synthetic oligonucleotide
atcatgggcgcagcataaaggaacccgcgatgagcgaagagaccgcaccc

SEQ ID NO: 263501 - DNA, 55 bp, Artificial
  Synthetic oligonucleotide
cgcaggagatgcattaggtgacagctgttatgaggcaagattattcgttcgtggc

SEQ ID NO: 263502 - DNA, 50 bp, Artificial
  Synthetic oligonucleotide
atagacattgtgttacgcaccttatcttcaccgcacgaacagccaaatct

SEQ ID NO: 263503 - DNA, 50 bp, Artificial
  Synthetic oligonucleotide
agggggtgcatcggtgttggacatgtcggggcctccggtcgggtcagccg

SEQ ID NO: 263504 - DNA, 50 bp, Artificial
  Synthetic oligonucleotide
agggggatggagccatgccggagactgcagccagctttacggggaatatt

SEQ ID NO: 263505 - DNA, 50 bp, Artificial
  Synthetic oligonucleotide
aggggcgggctgcggacactcccctttcaagtacaggtacacccaatgag

SEQ ID NO: 263506 - DNA, 50 bp, Artificial
  Synthetic oligonucleotide
agcggacagccgcaacagagcaaggacccagcccgatgcatttcgcctca

SEQ ID NO: 263507 - DNA, 50 bp, Artificial
  Synthetic oligonucleotide
agccttgagaccgggcgccaaccgaaatcgctgacaccgctggatgtaac

SEQ ID NO: 263508 - DNA, 50 bp, Artificial
  Synthetic oligonucleotide
agccgtcagaccaagctgatgtgatccggctccaagcccgtgttgtagcg

SEQ ID NO: 263509 - DNA, 55 bp, Artificial
  Synthetic oligonucleotide
gaagttgagacctaatatcgtctttgcctcaccgttcagatacctagtcacgctg

SEQ ID NO: 263510 - DNA, 55 bp, Artificial
  Synthetic oligonucleotide
cttgggccggcccgaaagaaacgcatagggtagaggcatgatcacaccgcgtttc

SEQ ID NO: 263511 - DNA, 60 bp, Artificial
  Synthetic oligonucleotide
tgcaccggcttcagttataccttcttctagaacttgaccgctttgatcttctctatatga

SEQ ID NO: 263512 - DNA, 55 bp, Artificial
  Synthetic oligonucleotide
ggagggtcctcagttttcatctctagctgaatcaaatttataccgctcgtgggga

SEQ ID NO: 263513 - DNA, 55 bp, Artificial
  Synthetic oligonucleotide
gcgctacgtaatccagtctatcaaaatatggaacggcctgagtatacgtcttatg

SEQ ID NO: 263514 - DNA, 55 bp, Artificial
  Synthetic oligonucleotide
gattagcatgtgtgctggattagctatgagcggaatgaaaccttttgcgtatact

SEQ ID NO: 263515 - DNA, 55 bp, Artificial
  Synthetic oligonucleotide
gatactacgaagacaaaagctataacactaatcactccaaggaactgtgccccaa

SEQ ID NO: 263516 - DNA, 55 bp, Artificial
  Synthetic oligonucleotide
cacgtccttcgtcgactttcagtgccaaggcatccattaaatgctcttaaacgct

SEQ ID NO: 263517 - DNA, 54 bp, Artificial
  Synthetic oligonucleotide
ccatctcttcactaattattaacggagctttcttcccgggtattaatgcggttg

SEQ ID NO: 263518 - DNA, 55 bp, Artificial
  Synthetic oligonucleotide
cggcatttgatctggcgacaaattctgaagagtccccggactctgtatagccttc

SEQ ID NO: 263519 - DNA, 55 bp, Artificial
  Synthetic oligonucleotide
ctgtcgctgagtcatgcacgggaggattgattgcaagtgaaataacttcagttcc

SEQ ID NO: 263520 - DNA, 54 bp, Artificial
  Synthetic oligonucleotide
ttccgctaccagatataaagtccgaagactttataaattcacaacttcggtacg

SEQ ID NO: 263521 - DNA, 54 bp, Artificial
  Synthetic oligonucleotide
cggaactattcatcgttttagatctaagatggtcatacttgcaacgggtggcta

SEQ ID NO: 263522 - DNA, 60 bp, Artificial
  Synthetic oligonucleotide
ggtgtagctgcagctttaacacaaggctatatgaatacagagtctactattcctatggtt

SEQ ID NO: 263523 - DNA, 54 bp, Artificial
  Synthetic oligonucleotide
caagttttactccaggatattatgatgaaggggatggaaaagatttaggccata

SEQ ID NO: 263524 - DNA, 52 bp, Artificial
  Synthetic oligonucleotide
gtaggtacagatcacacggcggtataactggacttctaaaacgcgcattttg

SEQ ID NO: 263525 - DNA, 52 bp, Artificial
  Synthetic oligonucleotide
cttgtattgttgcctcgaggtgattagggttgtaccctgtaatttgagcagg

SEQ ID NO: 263526 - DNA, 52 bp, Artificial
  Synthetic oligonucleotide
atattggatcagtttctgtgaccattactcttgcaccagcttgacgtaaaga

SEQ ID NO: 263527 - DNA, 51 bp, Artificial
  Synthetic oligonucleotide
agcgaggaggctctgcgtaatcttgacgaatctgggattgtgtatgtgggc

SEQ ID NO: 263528 - DNA, 51 bp, Artificial
  Synthetic oligonucleotide
tagtatgatctctcacattattaggagcctctattatggtttcgccgtaac

SEQ ID NO: 263529 - DNA, 51 bp, Artificial
  Synthetic oligonucleotide
tatccactagggacagagtattcaaactctccgattccagcagtatcacta

SEQ ID NO: 263530 - DNA, 51 bp, Artificial
  Synthetic oligonucleotide
ctttatgcaccgccattaaacatggaactccgccgcctttttgatactcag

SEQ ID NO: 263531 - DNA, 50 bp, Artificial
  Synthetic oligonucleotide
cttcacttcctctaatgtcaactgaagttacgttacctttgtctacttcg

SEQ ID NO: 263532 - DNA, 50 bp, Artificial
  Synthetic oligonucleotide
gtgccagttgttacttatgtcaatacatctgcagatgttaaggctgaaac

SEQ ID NO: 263533 - DNA, 59 bp, Artificial
  Synthetic oligonucleotide
gatggagggaggcgatgacttttgactacattccctattggacctctggaagagtgaaa

SEQ ID NO: 263534 - DNA, 50 bp, Artificial
  Synthetic oligonucleotide
tcgtcaatactataattgaacgccacaacccccccaaatgcgcttgtagg

SEQ ID NO: 263535 - DNA, 60 bp, Artificial
  Synthetic oligonucleotide
gacatggggtctatattaaagtccattccaatgtgaattactgcgttctggtcataagga

SEQ ID NO: 263536 - DNA, 60 bp, Artificial
  Synthetic oligonucleotide
cactctagctccaagatctgaaagtatcatggtgcagtagggtccaaccaagactcttgt

SEQ ID NO: 263537 - DNA, 59 bp, Artificial
  Synthetic oligonucleotide
aataaaggaacattgggtggatcgattgctaataatgatccgagtgcgtgttacccatc

SEQ ID NO: 263538 - DNA, 55 bp, Artificial
  Synthetic oligonucleotide
gtccaatactactataagccattagtctctttatattcgtttgacctatcgcggc

SEQ ID NO: 263539 - DNA, 55 bp, Artificial
  Synthetic oligonucleotide
gtcagttgtattagcttgtggaggtttcgagtctagttcagagatgagaacacga

SEQ ID NO: 263540 - DNA, 55 bp, Artificial
  Synthetic oligonucleotide
ggcacaactaggacacaaaacagcatgtattgagtcgagaggttctcttggtggg

SEQ ID NO: 263541 - DNA, 55 bp, Artificial
  Synthetic oligonucleotide
cgcaactagcgactgactctcaggcctatcttggtttgcatgaatgtgtgtggcc

SEQ ID NO: 263542 - DNA, 55 bp, Artificial
  Synthetic oligonucleotide
ggtgaacgggttcacctatgagtatcggcactcctttgcgactccctttgcgaga

SEQ ID NO: 263543 - DNA, 55 bp, Artificial
  Synthetic oligonucleotide
gtacgttcgagtattcaccgatgaccgcaagtcggatcggggattcgtgagttac

SEQ ID NO: 263544 - DNA, 55 bp, Artificial
  Synthetic oligonucleotide
atccccgagggctacagaagccaacccacgtgcgggtagagcacggaaactggtc

SEQ ID NO: 263545 - DNA, 55 bp, Artificial
  Synthetic oligonucleotide
cgctgcctctcgcgcacaattcgtggggtgaacagtcgaggataaggcaaggtga

SEQ ID NO: 263546 - DNA, 55 bp, Artificial
  Synthetic oligonucleotide
agccgtacgcaaagccgcaggctaggaatcggcgaggcttctgcggcgccgacgc

SEQ ID NO: 263547 - DNA, 55 bp, Artificial
  Synthetic oligonucleotide
gccgatgtccggagatctccctggcacgtcagtcgccagacagtcgttgacctag

SEQ ID NO: 263548 - DNA, 55 bp, Artificial
  Synthetic oligonucleotide
taggctgcgggacatcctaggctgaccctcgctacttcatgagtcaaagcacgcc

SEQ ID NO: 263549 - DNA, 52 bp, Artificial
  Synthetic oligonucleotide
ctcccgaaacgcaggtcttttgccccgaccggcagcgaccgttagcccctaa

SEQ ID NO: 263550 - DNA, 55 bp, Artificial
  Synthetic oligonucleotide
ctgaccccgatgcacctcacgggacctgaccccgatgcacctcacgggacctgac

SEQ ID NO: 263551 - DNA, 55 bp, Artificial
  Synthetic oligonucleotide
ctgcctagaatcctgcgcacccgaacctctcaccgctgtcgggatcaggagacac

SEQ ID NO: 263552 - DNA, 55 bp, Artificial
  Synthetic oligonucleotide
gcgattgatgtggccgtttatctccagtgttaggattcgcatgcgaccaataacc

SEQ ID NO: 263553 - DNA, 55 bp, Artificial
  Synthetic oligonucleotide
gacgaggtcaggtctggcgcgcacaacgcgcaaaacggggtcaggtctcgcgaga

SEQ ID NO: 263554 - DNA, 54 bp, Artificial
  Synthetic oligonucleotide
gggttagcgatagataccaggcggggtatcgggactaagatgctctcgtgtgta

SEQ ID NO: 263555 - DNA, 53 bp, Artificial
  Synthetic oligonucleotide
ttttcgccacaagcgtttcgaggacacaaagtgagcatcaacgcgacactgat

SEQ ID NO: 263556 - DNA, 53 bp, Artificial
  Synthetic oligonucleotide
aacaatcctacatcagcccgcggggtatcacgctaagtccttgattcgcaacg

SEQ ID NO: 263557 - DNA, 52 bp, Artificial
  Synthetic oligonucleotide
ccttcggggcagatccgtagtcaattctacgtaacgactacttaacccctta

SEQ ID NO: 263558 - DNA, 52 bp, Artificial
  Synthetic oligonucleotide
aggccttcccagttgagggcggcagactgtcttgcaagccccagaccgtgtc

SEQ ID NO: 263559 - DNA, 52 bp, Artificial
  Synthetic oligonucleotide
gaaggcccagacgcagtgggatctgtcggcccgatactcgctgaccaaggat

SEQ ID NO: 263560 - DNA, 51 bp, Artificial
  Synthetic oligonucleotide
gcgccttccaacagaacgtatggcaactgcttgttgggcgtccattgtagc

SEQ ID NO: 263561 - DNA, 51 bp, Artificial
  Synthetic oligonucleotide
agccagttctctcaactgaagttatttgtgcagcccgaggcggagaactga

SEQ ID NO: 263562 - DNA, 51 bp, Artificial
  Synthetic oligonucleotide
tcttgtgagacctgaccccaggcttgtcgcgagacctgaccccagtctcga

SEQ ID NO: 263563 - DNA, 55 bp, Artificial
  Synthetic oligonucleotide
cgcattcttcggaacctcatgcgttcaccgaatgcgcacccatggcaactagtgc

SEQ ID NO: 263564 - DNA, 50 bp, Artificial
  Synthetic oligonucleotide
gcgagctcccgaaacgcaggtcttttgccccgaccggcagcgaccgttag

SEQ ID NO: 263565 - DNA, 50 bp, Artificial
  Synthetic oligonucleotide
gcaatcgtcccggagcgtccaagtccgctgatcgtctttccgttacccgg

SEQ ID NO: 263566 - DNA, 50 bp, Artificial
  Synthetic oligonucleotide
ttttgtttccataatgcgagactacgacactcgctggatgccggggcttt

SEQ ID NO: 263567 - DNA, 50 bp, Artificial
  Synthetic oligonucleotide
gatcgtcggttctccgaggtggtagcgccctgcaatcgatagcggcagta

SEQ ID NO: 263568 - DNA, 50 bp, Artificial
  Synthetic oligonucleotide
gactaagaaggccgcgatgcctattggggcggagccaaccaaacagccag

SEQ ID NO: 263569 - DNA, 50 bp, Artificial
  Synthetic oligonucleotide
aaccgccacaccggcgattcgaaaagagtcctgactggactgcaacgcct

SEQ ID NO: 263570 - DNA, 50 bp, Artificial
  Synthetic oligonucleotide
aagtggacccgaaatccggtgctccaccgcatgacagaaggcaagaccgc

SEQ ID NO: 263571 - DNA, 50 bp, Artificial
  Synthetic oligonucleotide
agaatgcggcgagctcccgaaacgcaggtcttttgccccgaccggcagcg

SEQ ID NO: 263572 - DNA, 50 bp, Artificial
  Synthetic oligonucleotide
atccgatcgcggctggaagctgggtcttcaagatgggcgtgagcctgcac

SEQ ID NO: 263573 - DNA, 50 bp, Artificial
  Synthetic oligonucleotide
atcttgcgcttgaccccatcttgcgctgaaggtgctccgctaacgcgaac

SEQ ID NO: 263574 - DNA, 55 bp, Artificial
  Synthetic oligonucleotide
gcgctttccgcttgcgattttggggtttccccgggtcgcgtatcccgccagatga

SEQ ID NO: 263575 - DNA, 50 bp, Artificial
  Synthetic oligonucleotide
atgagcggctaccgctcgtcatccgacgcctcgccaacgcttcaggtcaa

SEQ ID NO: 263576 - DNA, 50 bp, Artificial
  Synthetic oligonucleotide
atgggcgtgagcctgcactcatcgacgccgcctgagtttcagaacgacct

SEQ ID NO: 263577 - DNA, 50 bp, Artificial
  Synthetic oligonucleotide
attcggggtgcgctgacctccagaccacaccgacgacccatacaacgtgg

SEQ ID NO: 263578 - DNA, 50 bp, Artificial
  Synthetic oligonucleotide
catcggagtacggcttgggtaggccgtcagggtagcgctcagccgctacg

SEQ ID NO: 263579 - DNA, 50 bp, Artificial
  Synthetic oligonucleotide
catgtcggtagggagtgatccccgagggctacagaagccaacccacgtgc

SEQ ID NO: 263580 - DNA, 50 bp, Artificial
  Synthetic oligonucleotide
cccgcctcgtttgggaggcacccgaaatcccgagggtcgagacccggaga

SEQ ID NO: 263581 - DNA, 50 bp, Artificial
  Synthetic oligonucleotide
cccttcggaattcggggtgcgctgacctccagaccacaccgacgacccat

SEQ ID NO: 263582 - DNA, 50 bp, Artificial
  Synthetic oligonucleotide
ccgaaatccggtgctccaccgcatgacagaaggcaagaccgcgggaacaa

SEQ ID NO: 263583 - DNA, 50 bp, Artificial
  Synthetic oligonucleotide
cctgggcccgtacagccgggacttcatcagaacttccccaggcgaggaag

SEQ ID NO: 263584 - DNA, 50 bp, Artificial
  Synthetic oligonucleotide
cgcagtaagacgcgggaggggcctcacaggtccgacttgtgggggagtac

SEQ ID NO: 263585 - DNA, 55 bp, Artificial
  Synthetic oligonucleotide
ggaagctgggtcttcaagatgggcgtgagcctgcactcatcgacgccgcctgagt

SEQ ID NO: 263586 - DNA, 50 bp, Artificial
  Synthetic oligonucleotide
cggctggaagctgggtcttcaagatgggcgtgagcctgcactcatcgacg

SEQ ID NO: 263587 - DNA, 50 bp, Artificial
  Synthetic oligonucleotide
ctccgaggtggtagcgccctgcaatcgatagcggcagtaaaccggtgccg

SEQ ID NO: 263588 - DNA, 50 bp, Artificial
  Synthetic oligonucleotide
gaagaagaacccgcctcgtttgggaggcacccgaaatcccgagggtcgag

SEQ ID NO: 263589 - DNA, 55 bp, Artificial
  Synthetic oligonucleotide
ggggcgcccgtgccccgtttctggtcatcatagggaaagacttccgtagaatgcc

SEQ ID NO: 263590 - DNA, 55 bp, Artificial
  Synthetic oligonucleotide
cagcagtgtagcgcggccgaccgtgaaggttcgaaatccgctacaatgcggctcc

SEQ ID NO: 263591 - DNA, 55 bp, Artificial
  Synthetic oligonucleotide
gggtagctcttgtcccagaacttgttggacgggctgacgacagtgaagatgtacg

SEQ ID NO: 263592 - DNA, 55 bp, Artificial
  Synthetic oligonucleotide
ggtcaggtctcgcgctgagacggggtcatgagacggggtcaggtctcgtgagacc

SEQ ID NO: 263593 - DNA, 55 bp, Artificial
  Synthetic oligonucleotide
cgccctttattggccgcgctagagtagttccactgaggagcatgggcggtgcact

SEQ ID NO: 263594 - DNA, 55 bp, Artificial
  Synthetic oligonucleotide
gcaccattccgttgacctcagcgtagggcgttacctcagtgaccgatggctggcg

SEQ ID NO: 263595 - DNA, 55 bp, Artificial
  Synthetic oligonucleotide
gcgctatagtctggcacttcacgatcaatacaggtggaatctttgtcgtcatagc

SEQ ID NO: 263596 - DNA, 55 bp, Artificial
  Synthetic oligonucleotide
gcgggcctttcactgatgtcgccctacactccgggtttagagagggatgccacat

SEQ ID NO: 263597 - DNA, 55 bp, Artificial
  Synthetic oligonucleotide
gctaaaggctatcgtgcgtattacgatgcgactaacgacagtagcttcaccggtg

SEQ ID NO: 263598 - DNA, 55 bp, Artificial
  Synthetic oligonucleotide
ggatgaagctatagccgactgcgctcttgtggtaggtaccagtgctcgagaacga

SEQ ID NO: 263599 - DNA, 55 bp, Artificial
  Synthetic oligonucleotide
gggccctcaggcattactgttattccccattcaggtggtcaaaattggctagttt

SEQ ID NO: 263600 - DNA, 55 bp, Artificial
  Synthetic oligonucleotide
ggtcagcggcactattgatatcggcgactactatttgatgagcggttggggacag

SEQ ID NO: 263601 - DNA, 55 bp, Artificial
  Synthetic oligonucleotide
aggcctttcaatagtgagtggcgatgctcagagcaggtcagctctgctagcgggt

SEQ ID NO: 263602 - DNA, 55 bp, Artificial
  Synthetic oligonucleotide
ggtcgggtcccgattcgatgctgtagtaaaccggcagtgttaccagactagctga

SEQ ID NO: 263603 - DNA, 55 bp, Artificial
  Synthetic oligonucleotide
gtgcgctgtcctgagtacagagctgttccactaaacgcagctcgccgtctaatcg

SEQ ID NO: 263604 - DNA, 55 bp, Artificial
  Synthetic oligonucleotide
cggggcccgctatcaagcctatattttgatagggtgcgcgtaacaccagattcgg

SEQ ID NO: 263605 - DNA, 55 bp, Artificial
  Synthetic oligonucleotide
agtctgagtccgtcgatctgatagcattcaaccgattcaactacctcctgcagag

SEQ ID NO: 263606 - DNA, 55 bp, Artificial
  Synthetic oligonucleotide
taaaacgctgtaccgaatcgtgaggctcaatggtcttgatcacatcctgaactcg

SEQ ID NO: 263607 - DNA, 55 bp, Artificial
  Synthetic oligonucleotide
ttaaagcaactggcaattttactgcgtggcatggatgatctctggtcattggtac

SEQ ID NO: 263608 - DNA, 55 bp, Artificial
  Synthetic oligonucleotide
ttggttgagtgccgaccttggttctgcgatcagcgatctaatcgaacgcaacgat

SEQ ID NO: 263609 - DNA, 54 bp, Artificial
  Synthetic oligonucleotide
agacgccggcgcggggcactaaaaccgatttgggtgctactttgattctgggta

SEQ ID NO: 263610 - DNA, 54 bp, Artificial
  Synthetic oligonucleotide
aagctgggtcgctcagcagggtaaggcgcgctatatagtgacattgttggcccg

SEQ ID NO: 263611 - DNA, 54 bp, Artificial
  Synthetic oligonucleotide
aaccgcaaacaagcagcggaatatatcgagctctacttcacccgctatccgggg

SEQ ID NO: 263612 - DNA, 52 bp, Artificial
  Synthetic oligonucleotide
agcctgacctattgcaccggggatgcctgcaactatgccggcgaatataagc

SEQ ID NO: 263613 - DNA, 52 bp, Artificial
  Synthetic oligonucleotide
caggcacagataatctccggcacagatcgatagaggtcggtctttagcaaga

SEQ ID NO: 263614 - DNA, 51 bp, Artificial
  Synthetic oligonucleotide
ataaccgagctttaaatcgtctggccctaagatcgcttgcgctctaatcaa

SEQ ID NO: 263615 - DNA, 55 bp, Artificial
  Synthetic oligonucleotide
agctagtgcgctggccactggagctgtgccagctattggtagaccggggctttcg

SEQ ID NO: 263616 - DNA, 51 bp, Artificial
  Synthetic oligonucleotide
agtaatccagggcatcgccttaagatcagctttcgatgcaaaggggcccgc

SEQ ID NO: 263617 - DNA, 50 bp, Artificial
  Synthetic oligonucleotide
agccgaactgggagactggtatctggtgtttggtcagcgtgcctcggcaa

SEQ ID NO: 263618 - DNA, 50 bp, Artificial
  Synthetic oligonucleotide
agccctgcatagtgccgatgggtgtgtcgagcatcacaccgctgctgtac

SEQ ID NO: 263619 - DNA, 50 bp, Artificial
  Synthetic oligonucleotide
agccaggggctcgccggctatggttagcaacgactgatccgacgcgccga

SEQ ID NO: 263620 - DNA, 50 bp, Artificial
  Synthetic oligonucleotide
agacggtaatcgagctcgcagtgaagggcgtccagctccacagggaggtc

SEQ ID NO: 263621 - DNA, 50 bp, Artificial
  Synthetic oligonucleotide
agaagtcaccagaggcgtgctcaccgtttacccgcagcggtccaatcagg

SEQ ID NO: 263622 - DNA, 50 bp, Artificial
  Synthetic oligonucleotide
acggttgcagctccagagcccgatctgtgggcgtcataccgtcactggta

SEQ ID NO: 263623 - DNA, 50 bp, Artificial
  Synthetic oligonucleotide
acggctaccaagtagcggcgttctctggcaagggtggatgctaccccgat

SEQ ID NO: 263624 - DNA, 50 bp, Artificial
  Synthetic oligonucleotide
acctccgttccctttaccccatctactggcccccgtgtgcgctctgcaca

SEQ ID NO: 263625 - DNA, 50 bp, Artificial
  Synthetic oligonucleotide
acccgccatccccacagagccctaaaacccgtcatcccgacacagctcta

SEQ ID NO: 263626 - DNA, 55 bp, Artificial
  Synthetic oligonucleotide
ctatgcttggaagcgctatatagaaggccgcaaacattattctgccgcagccctc

SEQ ID NO: 263627 - DNA, 50 bp, Artificial
  Synthetic oligonucleotide
accatcggaactagcccgctggcttgaacgtcgtgcgtatgcccggcata

SEQ ID NO: 263628 - DNA, 50 bp, Artificial
  Synthetic oligonucleotide
aatcgggcagggcacttctgtgactgggtgcgctaccaaggcttgactgc

SEQ ID NO: 263629 - DNA, 50 bp, Artificial
  Synthetic oligonucleotide
aatcaacattgccgagccagatcatgtgcccaaggccggccaccagagta

SEQ ID NO: 263630 - DNA, 50 bp, Artificial
  Synthetic oligonucleotide
aactggtcgcctatgaagtgggcaccccagcactcgcagttaccctggca

SEQ ID NO: 263631 - DNA, 50 bp, Artificial
  Synthetic oligonucleotide
aacctcgggccgatagtcgtgctggttgtgagcctttcaacagccgctct

SEQ ID NO: 263632 - DNA, 50 bp, Artificial
  Synthetic oligonucleotide
aaccattggccctcgggccatcagccctgatagtttagcgctgtcgagcc

SEQ ID NO: 263633 - DNA, 50 bp, Artificial
  Synthetic oligonucleotide
aaatgggcgtttgaatagcaccgggacagagcgcgctgacacgaacaccg

SEQ ID NO: 263634 - DNA, 50 bp, Artificial
  Synthetic oligonucleotide
aaaagattcacagccctctggcgcaaagcttgtgtccgtggccgtgggtc

SEQ ID NO: 263635 - DNA, 50 bp, Artificial
  Synthetic oligonucleotide
agggccgcagtttctccgacgcccttcgtcgctccccctacaaaattccc

SEQ ID NO: 263636 - DNA, 50 bp, Artificial
  Synthetic oligonucleotide
aggttcttcctggaccccagggcactctgtacggtgcaagttcgcaggca

SEQ ID NO: 263637 - DNA, 55 bp, Artificial
  Synthetic oligonucleotide
gaagatacctatgcgggcggtctagttgctgcgccggtattttctgaagttaccg

SEQ ID NO: 263638 - DNA, 50 bp, Artificial
  Synthetic oligonucleotide
agggcacttctgtgactgggtgcgctaccaaggcttgactgcctttcgct

SEQ ID NO: 263639 - DNA, 50 bp, Artificial
  Synthetic oligonucleotide
agtcgccatagccctaggcgcagatcctgccaccacattgggcgccgtca

SEQ ID NO: 263640 - DNA, 50 bp, Artificial
  Synthetic oligonucleotide
agtcggttactcgtagcgcaactcatctgcgggcaccatgcgactggcac

SEQ ID NO: 263641 - DNA, 50 bp, Artificial
  Synthetic oligonucleotide
aggctttgtggcgtcagggagcctcagtgcgtgcttatgacccccatgct

SEQ ID NO: 263642 - DNA, 50 bp, Artificial
  Synthetic oligonucleotide
agtgagctccatctggctacgtcccaaccacagagcaaagggcaccgcta

SEQ ID NO: 263643 - DNA, 50 bp, Artificial
  Synthetic oligonucleotide
agtggtttgcactacccgtcctgcagtaggttctgcgctgtcccaagcct

SEQ ID NO: 263644 - DNA, 50 bp, Artificial
  Synthetic oligonucleotide
aggcacatagaagtcaccagaggcgtgctcaccgtttacccgcagcggtc

SEQ ID NO: 263645 - DNA, 50 bp, Artificial
  Synthetic oligonucleotide
atccagtgaacagcacagggagcagatcggcagctggtagagcgggcagt

SEQ ID NO: 263646 - DNA, 50 bp, Artificial
  Synthetic oligonucleotide
atccgccaactaaattgccccgaggtaccgcgtgaattttaccggcgcgc

SEQ ID NO: 263647 - DNA, 50 bp, Artificial
  Synthetic oligonucleotide
atctcaacgggtcgctgcccttaaagcggccaataatggtcaggccccta

SEQ ID NO: 263648 - DNA, 55 bp, Artificial
  Synthetic oligonucleotide
gaattgcgcgtggcactggaagagtggctcaagcggattccgaattttgaggttg

SEQ ID NO: 263649 - DNA, 50 bp, Artificial
  Synthetic oligonucleotide
atggcaactgcgccgaagtgcagtggcagttactgggtatcagcatgccc

SEQ ID NO: 263650 - DNA, 50 bp, Artificial
  Synthetic oligonucleotide
aggatagcatctgtgcgcaactcggggccgttgactctggcgagtggaag

SEQ ID NO: 263651 - DNA, 50 bp, Artificial
  Synthetic oligonucleotide
agctcgacaggtgcaagcggataaagtcgccagcccttaagcgggctgac

SEQ ID NO: 263652 - DNA, 50 bp, Artificial
  Synthetic oligonucleotide
agcgcccctgggcagtgatgttacggatagcgctgaaaagggaggggccc

SEQ ID NO: 263653 - DNA, 50 bp, Artificial
  Synthetic oligonucleotide
agccttgcgcacagccggttgctgcataatctgactgaggttcgacgggc

SEQ ID NO: 263654 - DNA, 55 bp, Artificial
  Synthetic oligonucleotide
gagtcgtctgattacgctcttgcttagtcggccacacaactttgcgcaactcagt

SEQ ID NO: 263655 - DNA, 55 bp, Artificial
  Synthetic oligonucleotide
cactgagcaagctctagcacttcggcccattcagctgcgtcaaagggaccggacg

SEQ ID NO: 263656 - DNA, 55 bp, Artificial
  Synthetic oligonucleotide
gcacactccgtcttcacaagagtacatgggatcgtatccctctcgttgaagcgcc

SEQ ID NO: 263657 - DNA, 55 bp, Artificial
  Synthetic oligonucleotide
gagagtgatatctctcttgtcggacgttatcttagagaacacttcaatctcgact

SEQ ID NO: 263658 - DNA, 55 bp, Artificial
  Synthetic oligonucleotide
gcccgggtacaaagagtgcatcaaagaacttcacagctatactacctaaggagac

SEQ ID NO: 263659 - DNA, 55 bp, Artificial
  Synthetic oligonucleotide
ccatattgaactgccgtatgtccattctctgaaagggcgcaggagtgtggttaac

SEQ ID NO: 263660 - DNA, 55 bp, Artificial
  Synthetic oligonucleotide
gcctgatcagtttggggccatacccttcaccgaaacttacagcggtacgcaggag

SEQ ID NO: 263661 - DNA, 55 bp, Artificial
  Synthetic oligonucleotide
caccttcatgcatcggataaagtgcctggatcgattcattgtagatcggtgcagc

SEQ ID NO: 263662 - DNA, 55 bp, Artificial
  Synthetic oligonucleotide
caatagcctatttgcctgtcgtattcgttatgtttgcctacccgatggtactcta

SEQ ID NO: 263663 - DNA, 55 bp, Artificial
  Synthetic oligonucleotide
aaagtatctcacctttgtgcgaagggtagagccccaccatgatctgcgcaatagt

SEQ ID NO: 263664 - DNA, 55 bp, Artificial
  Synthetic oligonucleotide
ttgaagtgctgccacttcccggtctgcgtattccactggtagttccccaggcggt

SEQ ID NO: 263665 - DNA, 55 bp, Artificial
  Synthetic oligonucleotide
tgcagactattcgagcgggaccacctatgtgatcagcgggacctacctttactcc

SEQ ID NO: 263666 - DNA, 55 bp, Artificial
  Synthetic oligonucleotide
tccggcactaaagcgtataaaacggatcagctcacgtaacaagtccggctcattt

SEQ ID NO: 263667 - DNA, 55 bp, Artificial
  Synthetic oligonucleotide
acgcgcctgaaccttacgatgctgttctttcgtcaaaatgagtcgttttgtctcg

SEQ ID NO: 263668 - DNA, 55 bp, Artificial
  Synthetic oligonucleotide
gaccgtcggtttcaattcggctgcgctggataccctgacaaatgaagcagcgatc

SEQ ID NO: 263669 - DNA, 55 bp, Artificial
  Synthetic oligonucleotide
agaaattgccttccgtattaacttcgtcttgattcacatagttgcctatatctcg

SEQ ID NO: 263670 - DNA, 55 bp, Artificial
  Synthetic oligonucleotide
gctgagggtatagttgtctgcagaaacgatgtctccgcgcagagagcggtcatgg

SEQ ID NO: 263671 - DNA, 55 bp, Artificial
  Synthetic oligonucleotide
ggcatcttttgcgagctccaaaatagtatcctgggtgatagattccagggaattg

SEQ ID NO: 263672 - DNA, 54 bp, Artificial
  Synthetic oligonucleotide
cgttaccgaagagacgcactgaatgaactcgggagtgagaaaagcgcttcggag

SEQ ID NO: 263673 - DNA, 54 bp, Artificial
  Synthetic oligonucleotide
ctatcttcaagagagccttgctgatacgttacgagggtaccgactactcaatgc

SEQ ID NO: 263674 - DNA, 54 bp, Artificial
  Synthetic oligonucleotide
aagcgaacgaaaactgatacacctcatcgtactgcatgcctccgtgggactgac

SEQ ID NO: 263675 - DNA, 50 bp, Artificial
  Synthetic oligonucleotide
gtctactttgttaagagggttccggggacggtccgagaccgtacgtacga

SEQ ID NO: 263676 - DNA, 51 bp, Artificial
  Synthetic oligonucleotide
actggcatgtccgcttccccggcgttttactcctaccctgctgctttgtgc

SEQ ID NO: 263677 - DNA, 51 bp, Artificial
  Synthetic oligonucleotide
ccacgacatcgaccctgcgtgaatcctccacgacgatatagccgtagttaa

SEQ ID NO: 263678 - DNA, 51 bp, Artificial
  Synthetic oligonucleotide
accccaggggaatcgtcatagaccaccgcgccctgacagacggagcgagga

SEQ ID NO: 263679 - DNA, 55 bp, Artificial
  Synthetic oligonucleotide
cttttggcgtcttcggatcatctttgtagtagcgatatgctgaggtataggccgg

SEQ ID NO: 263680 - DNA, 51 bp, Artificial
  Synthetic oligonucleotide
ctctatttcacggttttcgaagaggatggtttggcatatttcaagaacgat

SEQ ID NO: 263681 - DNA, 51 bp, Artificial
  Synthetic oligonucleotide
aaccccgacacgtctgtcctgacctgccgtaagaatgaccccattggcgta

SEQ ID NO: 263682 - DNA, 50 bp, Artificial
  Synthetic oligonucleotide
ggcatctctgtgggaatgaaggatggtgcactcacggtcatcgccccgct

SEQ ID NO: 263683 - DNA, 50 bp, Artificial
  Synthetic oligonucleotide
ggctcgggtgagtctatggagtgacctcccgccaacggtatgccggcatc

SEQ ID NO: 263684 - DNA, 50 bp, Artificial
  Synthetic oligonucleotide
gttatgcaaacggttgagcctgttctgaatcaggtgcggattcccgtcac

SEQ ID NO: 263685 - DNA, 50 bp, Artificial
  Synthetic oligonucleotide
tacaccgttggcagacctggacacagaggcacctgtctgggtactggaga

SEQ ID NO: 263686 - DNA, 50 bp, Artificial
  Synthetic oligonucleotide
tacggcagtatcaactggggtgccctgcaggcgaggctctcaaacctgcg

SEQ ID NO: 263687 - DNA, 50 bp, Artificial
  Synthetic oligonucleotide
taggccaccatcgctcccatacctgcagacgggccctccgtacccacggc

SEQ ID NO: 263688 - DNA, 50 bp, Artificial
  Synthetic oligonucleotide
tagtgccgttgggactggcagggaacttctttgcggggaatcaacgccat

SEQ ID NO: 263689 - DNA, 50 bp, Artificial
  Synthetic oligonucleotide
tatgcccatcacgcatcaggtactccgctgcggccaatgaggctatcccc

SEQ ID NO: 263690 - DNA, 55 bp, Artificial
  Synthetic oligonucleotide
ctgggagtaacaatggtcagagttgtaaagcgtaacggaagagtagagacactgg

SEQ ID NO: 263691 - DNA, 50 bp, Artificial
  Synthetic oligonucleotide
tccaaaccccgtgcctgctatgcgaaagacagaaccgggcttgcattgct

SEQ ID NO: 263692 - DNA, 50 bp, Artificial
  Synthetic oligonucleotide
ttgctcccggacccgtaaccggctttcccccgactgcacccgtaatgtcc

SEQ ID NO: 263693 - DNA, 50 bp, Artificial
  Synthetic oligonucleotide
ggaagcgtccgtacggttccgagcgagggcaagctggggtctttgccgta

SEQ ID NO: 263694 - DNA, 50 bp, Artificial
  Synthetic oligonucleotide
gctgtatgcgccaccccatgctctttggactcacactgctccctttggga

SEQ ID NO: 263695 - DNA, 50 bp, Artificial
  Synthetic oligonucleotide
gcctgtagctgccgtaaacggacgagaggtcacggtagcagccgtccaga

SEQ ID NO: 263696 - DNA, 50 bp, Artificial
  Synthetic oligonucleotide
gcctggctgtcccagtgtgagagggaaggggagcattacatctctcccgc

SEQ ID NO: 263697 - DNA, 50 bp, Artificial
  Synthetic oligonucleotide
ctctgaggcactggcatgtccgcttccccggcgttttactcctaccctgc

SEQ ID NO: 263698 - DNA, 50 bp, Artificial
  Synthetic oligonucleotide
cgaccgctctggcatgtgtagggaatatcgggccgggatttgccctgact

SEQ ID NO: 263699 - DNA, 50 bp, Artificial
  Synthetic oligonucleotide
ccctccaccgagtttgggtagaagcgactgcgcaatgacggcaacgagcg

SEQ ID NO: 263700 - DNA, 50 bp, Artificial
  Synthetic oligonucleotide
ccattcggcggccagtccaaaccccgtgcctgctatgcgaaagacagaac

SEQ ID NO: 263701 - DNA, 55 bp, Artificial
  Synthetic oligonucleotide
cggcgtaatattcggtggtatcatccagtatacccgtgtcgacaaatttgaaaag

SEQ ID NO: 263702 - DNA, 50 bp, Artificial
  Synthetic oligonucleotide
catcgttcccatgcacggatgggcggcagatacctatgcgctggtacgcc

SEQ ID NO: 263703 - DNA, 50 bp, Artificial
  Synthetic oligonucleotide
atgccccagcaggcagagttcatggcggaacgtctcaggcaggcgcttcc

SEQ ID NO: 263704 - DNA, 50 bp, Artificial
  Synthetic oligonucleotide
atccgtccacccctaccggtactggcacgcctgtcgtctacattacggct

SEQ ID NO: 263705 - DNA, 50 bp, Artificial
  Synthetic oligonucleotide
agtcattgttcatacagatgggtgtttctccctatcccggtgttcagata

SEQ ID NO: 263706 - DNA, 50 bp, Artificial
  Synthetic oligonucleotide
acctctgtcatggcctgttgtacccacccggtactctccggaccggcatt

SEQ ID NO: 263707 - DNA, 50 bp, Artificial
  Synthetic oligonucleotide
aaggagggaggtgcccctatgtccatcaccggacagtgcaacgctatggg

SEQ ID NO: 263708 - DNA, 50 bp, Artificial
  Synthetic oligonucleotide
aagataccggtggtcccgccgttgctggggtctgttgcaatgatgccgga

SEQ ID NO: 263709 - DNA, 55 bp, Artificial
  Synthetic oligonucleotide
gatacacgccgttccagaagcaacattgtctacttcaatgcacccaatatgctag

SEQ ID NO: 263710 - DNA, 52 bp, Artificial
  Synthetic oligonucleotide
cctgacacccgttttaagactaaaatagaccgttatgaccagaggttcccca

SEQ ID NO: 263711 - DNA, 55 bp, Artificial
  Synthetic oligonucleotide
ccgactccgaagacttgaccagcggtgtaaggtctggacggttggaactgtctat

SEQ ID NO: 263712 - DNA, 55 bp, Artificial
  Synthetic oligonucleotide
gcagcggttgggtgtagaggtgcgctgttcgcagaaagtgacgggactctcacat

SEQ ID NO: 263713 - DNA, 57 bp, Artificial
  Synthetic oligonucleotide
actgccagaacaggggtgcatccgcagtgggtaacgtcgccgtaaccgcaatctccg

SEQ ID NO: 263714 - DNA, 60 bp, Artificial
  Synthetic oligonucleotide
cttcttaggcaatgggccatagatgtggatgccaccactatggctgctctgacaaatgat

SEQ ID NO: 263715 - DNA, 60 bp, Artificial
  Synthetic oligonucleotide
cgagttgacttagagcggattagcgcagcgggcgagcgtttgctagaacaactcgaggcc

SEQ ID NO: 263716 - DNA, 50 bp, Artificial
  Synthetic oligonucleotide
agcgccatggggcctcttgtcgtaagtggatgcctctagcgtgacaccta

SEQ ID NO: 263717 - DNA, 50 bp, Artificial
  Synthetic oligonucleotide
agcgcactatcccgtggcctacatggctgcgttgctcacggttaacgccg

SEQ ID NO: 263718 - DNA, 50 bp, Artificial
  Synthetic oligonucleotide
agcgatctggatgcacctgccgccagacctacgcgcccgggtacatgcca

SEQ ID NO: 263719 - DNA, 50 bp, Artificial
  Synthetic oligonucleotide
agcgatcgccgaggggtcatcggtctctggatcggactggggcaactgtg

SEQ ID NO: 263720 - DNA, 50 bp, Artificial
  Synthetic oligonucleotide
agcgagggccatacccccgttgtcttcacgagccgcggtgagctccattg

SEQ ID NO: 263721 - DNA, 50 bp, Artificial
  Synthetic oligonucleotide
agcgagcatcgtgcggtgtaacgagtccaacctcaggggcagtccgaagc

SEQ ID NO: 263722 - DNA, 50 bp, Artificial
  Synthetic oligonucleotide
ccgcgggcgttcaacctcaagactacggcctgagcgacgctaccttcttc

SEQ ID NO: 263723 - DNA, 50 bp, Artificial
  Synthetic oligonucleotide
aggcctgctaaaagcagcctatggagcgctgcactcgtccctggggttgg

SEQ ID NO: 263724 - DNA, 50 bp, Artificial
  Synthetic oligonucleotide
aggcccggtgtcgattcaccatggagagcgctccgagacgctgaactgcc

SEQ ID NO: 263725 - DNA, 50 bp, Artificial
  Synthetic oligonucleotide
aggcccagggggacaagggtctggagagcgatgcccagcagtttgttagg

SEQ ID NO: 263726 - DNA, 60 bp, Artificial
  Synthetic oligonucleotide
agcgctctgagtctgtctggagattcagcagtttgctggctgcccaacggtaggggcatt

SEQ ID NO: 263727 - DNA, 50 bp, Artificial
  Synthetic oligonucleotide
aggccatgtcttcccgacgggtcagccttagcagtctctcggcccaagcc

SEQ ID NO: 263728 - DNA, 50 bp, Artificial
  Synthetic oligonucleotide
aggccactgctccccgattgagaattggccccgaacgcaaagctcgattg

SEQ ID NO: 263729 - DNA, 50 bp, Artificial
  Synthetic oligonucleotide
aggcagcactccacgatcgagtgagcatgaaggctgggctgggcctaccc

SEQ ID NO: 263730 - DNA, 50 bp, Artificial
  Synthetic oligonucleotide
aggcacgggtttaacatggccccgtccccgaccgtagctacgcttctgtt

SEQ ID NO: 263731 - DNA, 50 bp, Artificial
  Synthetic oligonucleotide
ccgtgactagagcttcgcggaaagccagatattgatcgcgattgagggga

SEQ ID NO: 263732 - DNA, 50 bp, Artificial
  Synthetic oligonucleotide
aggcaatgcgcaaatctggcaccgtttccgggagtcccacaagttcggtc

SEQ ID NO: 263733 - DNA, 50 bp, Artificial
  Synthetic oligonucleotide
aggcaagctgccccatgcgaaccacgctcgaactgccagatcctctgttc

SEQ ID NO: 263734 - DNA, 50 bp, Artificial
  Synthetic oligonucleotide
cctaatcgaccggcagagatggttgatggatttaaagcgtcgcgtccagc

SEQ ID NO: 263735 - DNA, 50 bp, Artificial
  Synthetic oligonucleotide
aggatccgacgcaggagcgcagtggcatcaaggcttacatcgaggctcag

SEQ ID NO: 263736 - DNA, 50 bp, Artificial
  Synthetic oligonucleotide
aggagtttgctcaaaacccctgccaccgtggagcgacggcgccatgaggg

SEQ ID NO: 263737 - DNA, 60 bp, Artificial
  Synthetic oligonucleotide
cgaaatattagcgactgcgatcgtgggcattattcaatgggctcgcacccaaggtcaaag

SEQ ID NO: 263738 - DNA, 50 bp, Artificial
  Synthetic oligonucleotide
aggagggcttcccattccgaaacaggaggccaacgggtttgcgggcacga

SEQ ID NO: 263739 - DNA, 50 bp, Artificial
  Synthetic oligonucleotide
agcttgtcgccacgcgttttggcccactcactcccgacccaggctcggtg

SEQ ID NO: 263740 - DNA, 50 bp, Artificial
  Synthetic oligonucleotide
agcttcattggacccgatggggacgtcagcaccctgtatctgcgacggcc

SEQ ID NO: 263741 - DNA, 50 bp, Artificial
  Synthetic oligonucleotide
agcttcacggccacgcgacccggtcgttatccgatcgtctgcgcagagct

SEQ ID NO: 263742 - DNA, 50 bp, Artificial
  Synthetic oligonucleotide
agccatctggctcgggtgcattgagagcaaagtccacgcaatcctgcacc

SEQ ID NO: 263743 - DNA, 50 bp, Artificial
  Synthetic oligonucleotide
agccatcgtctgaacgcagtcccgaggacccgttagcgcagcaacagccc

SEQ ID NO: 263744 - DNA, 50 bp, Artificial
  Synthetic oligonucleotide
agccaggccaacgactatcgcttgcgggtgcttggcaaaacttcgcccag

SEQ ID NO: 263745 - DNA, 50 bp, Artificial
  Synthetic oligonucleotide
agccagctgccatcacgtttgacagcgcccagtgggatctgacgcactct

SEQ ID NO: 263746 - DNA, 50 bp, Artificial
  Synthetic oligonucleotide
agccacggtcgcttagcgggcaagggggtgcgcaaatcagacactgacta

SEQ ID NO: 263747 - DNA, 50 bp, Artificial
  Synthetic oligonucleotide
agcatgcgggatccagtcagtccgtatgcagtggccaaggacgctagctt

SEQ ID NO: 263748 - DNA, 59 bp, Artificial
  Synthetic oligonucleotide
tctcagtaatctgggacagtcgccccaaagtccctatccggtgcgagccatccataacc

SEQ ID NO: 263749 - DNA, 50 bp, Artificial
  Synthetic oligonucleotide
agcatcgtgataggccacggctttgggtaggggttgcagctgggcttgga

SEQ ID NO: 263750 - DNA, 50 bp, Artificial
  Synthetic oligonucleotide
agcatcgagggggttgcgggtattttgcaccttgcgggcggtttccaaac

SEQ ID NO: 263751 - DNA, 50 bp, Artificial
  Synthetic oligonucleotide
agcaggggtttttcgctggtggtagacatgggggcggtggttgaaggtcg

SEQ ID NO: 263752 - DNA, 50 bp, Artificial
  Synthetic oligonucleotide
agcagcgctgaagatgcaacgccactcggctgcaatcaaacccaaccgcc

SEQ ID NO: 263753 - DNA, 50 bp, Artificial
  Synthetic oligonucleotide
agcagccgagagctgtcgaatcagcacgagcggtggtcggtccttgtccc

SEQ ID NO: 263754 - DNA, 50 bp, Artificial
  Synthetic oligonucleotide
agcactccccatgcagattgccaggcgctaacggactacaggcggttcga

SEQ ID NO: 263755 - DNA, 50 bp, Artificial
  Synthetic oligonucleotide
agcacctcagctgtgcggtcgctggagccatcgttcaccagaaccaactc

SEQ ID NO: 263756 - DNA, 50 bp, Artificial
  Synthetic oligonucleotide
agcaatttgtcgtgtccaggccccaatctgttgccgctctgtggcagtgc

SEQ ID NO: 263757 - DNA, 50 bp, Artificial
  Synthetic oligonucleotide
agcaagcccatgcgtccctggagtgatcgtccgattcacgacaacgggga

SEQ ID NO: 263758 - DNA, 50 bp, Artificial
  Synthetic oligonucleotide
agcaacccaggtagtggctagcaattccgtgcccctcgagggcctcaaac

SEQ ID NO: 263759 - DNA, 60 bp, Artificial
  Synthetic oligonucleotide
tctctttgcaggtgattgacgctgattgcagacggctgggaggtggtttttagcgagtaa

SEQ ID NO: 263760 - DNA, 50 bp, Artificial
  Synthetic oligonucleotide
agcaaccaaggaatctggcccgaccctccaactcaacgccacccaactcc

SEQ ID NO: 263761 - DNA, 50 bp, Artificial
  Synthetic oligonucleotide
agattctctccatgcgaagcacagcgaccaaccccgtcggtgaagccacg

SEQ ID NO: 263762 - DNA, 50 bp, Artificial
  Synthetic oligonucleotide
cgattgaaggggccgatctgacgaccggagtgagcaagtcccgcataggc

SEQ ID NO: 263763 - DNA, 50 bp, Artificial
  Synthetic oligonucleotide
agcgagagtgattgcatgacccaggcacccgaacgcaagcgtcacgaccc

SEQ ID NO: 263764 - DNA, 50 bp, Artificial
  Synthetic oligonucleotide
agcgagactggccccgtgctgacactcccgcaccatgggttggaccaccg

SEQ ID NO: 263765 - DNA, 50 bp, Artificial
  Synthetic oligonucleotide
agcgactcaccccaaggtctgagccgcgtcagctgctcctcggaactggc

SEQ ID NO: 263766 - DNA, 50 bp, Artificial
  Synthetic oligonucleotide
agcgacgcacccggtgaaggagctccggacccccgttgggctggtgagct

SEQ ID NO: 263767 - DNA, 50 bp, Artificial
  Synthetic oligonucleotide
agcgaaatgcagcgctctggccaagacaatgcccgcgaagtatgcacacc

SEQ ID NO: 263768 - DNA, 50 bp, Artificial
  Synthetic oligonucleotide
agccttgtgcgtttgctcaccgcccctggaagtcgaattggcgtttgggt

SEQ ID NO: 263769 - DNA, 50 bp, Artificial
  Synthetic oligonucleotide
cgcagttccaacacgccccactgctgagtgggaatgcgactcggccagag

SEQ ID NO: 263770 - DNA, 60 bp, Artificial
  Synthetic oligonucleotide
attgtgccttgcaaggcacaatgtctttctcttatgcacagatggggactggaaaccaca

SEQ ID NO: 263771 - DNA, 50 bp, Artificial
  Synthetic oligonucleotide
agccgttgttgagcctgatgcaacgcagcaagccttgggcactcccactc

SEQ ID NO: 263772 - DNA, 50 bp, Artificial
  Synthetic oligonucleotide
agccgtcgtccctagagcaaagagggtgaataaggggccgtgaatccggc

SEQ ID NO: 263773 - DNA, 50 bp, Artificial
  Synthetic oligonucleotide
agccggaacgacgcctccaagctcgccagtacaacgctcaaacttcgcca

SEQ ID NO: 263774 - DNA, 50 bp, Artificial
  Synthetic oligonucleotide
agccgctggtcctcaggctcaacgcacgaacgtcttcaggtggagacagg

SEQ ID NO: 263775 - DNA, 50 bp, Artificial
  Synthetic oligonucleotide
agccgcgtatgagctcccgccccgggttggactattatcgtcgtttccca

SEQ ID NO: 263776 - DNA, 50 bp, Artificial
  Synthetic oligonucleotide
agccgaaccgcaagccagagactcgtgccttccgcgttccgaggtggacg

SEQ ID NO: 263777 - DNA, 50 bp, Artificial
  Synthetic oligonucleotide
agccctcagccaagagctggccgtggattcagcgggaatcgagtcaacgg

SEQ ID NO: 263778 - DNA, 50 bp, Artificial
  Synthetic oligonucleotide
agcccgctgatcggatggattctgagagaactggcggctaacgcgtcacc

SEQ ID NO: 263779 - DNA, 50 bp, Artificial
  Synthetic oligonucleotide
agcccacccgcccgtgggggtcgcgtcatcactccagttttgccaccact

SEQ ID NO: 263780 - DNA, 50 bp, Artificial
  Synthetic oligonucleotide
agccatgcacctgcttggggcgatgcaccgtgatcccggctgaaaggtag

SEQ ID NO: 263781 - DNA, 60 bp, Artificial
  Synthetic oligonucleotide
caaggcttctgggaatgggtactagcccatcctgagctaccgatcatcatcactgagggc

SEQ ID NO: 263782 - DNA, 50 bp, Artificial
  Synthetic oligonucleotide
cagagtgttggccatgacgcgtggggcggcggaggactgccataacgtga

SEQ ID NO: 263783 - DNA, 50 bp, Artificial
  Synthetic oligonucleotide
atgccagcggcctacatccgctcagccgcacgactgcagggtcgcttttg

SEQ ID NO: 263784 - DNA, 50 bp, Artificial
  Synthetic oligonucleotide
atgcatagccgctgggggccagcagattacaggtttgggctctggtccca

SEQ ID NO: 263785 - DNA, 50 bp, Artificial
  Synthetic oligonucleotide
atgagggtaatcacctggagagtccaacggaatctttggctgagtctgat

SEQ ID NO: 263786 - DNA, 50 bp, Artificial
  Synthetic oligonucleotide
cagcgctctggccaagacaatgcccgcgaagtatgcacaccagaccagtg

SEQ ID NO: 263787 - DNA, 50 bp, Artificial
  Synthetic oligonucleotide
atgacgcaccgcttcttccgcactgcccgtcaggaattgcatgggcgggc

SEQ ID NO: 263788 - DNA, 50 bp, Artificial
  Synthetic oligonucleotide
atcggtcgcggccctgagctgtgttgggatccctcccatacgatgacggc

SEQ ID NO: 263789 - DNA, 50 bp, Artificial
  Synthetic oligonucleotide
atcgcccccgcaggctgtggcacctcaatcggagtaccccgcaatcgatc

SEQ ID NO: 263790 - DNA, 50 bp, Artificial
  Synthetic oligonucleotide
cagctgatgagggcctggcttcgtctcttgcgcgactggcttgcagccct

SEQ ID NO: 263791 - DNA, 50 bp, Artificial
  Synthetic oligonucleotide
atcctctgtctgccgtgcgactcctttctgcggaggctgacgccgaatca

SEQ ID NO: 263792 - DNA, 58 bp, Artificial
  Synthetic oligonucleotide
aggattccgccatagctcgtcgtggtctaaagccaaagttaacacattctcactactc

SEQ ID NO: 263793 - DNA, 50 bp, Artificial
  Synthetic oligonucleotide
atccgatagcgcccactcataggcgggggtctgtgcattcggggcggtgt

SEQ ID NO: 263794 - DNA, 50 bp, Artificial
  Synthetic oligonucleotide
cagtgcgcggagccccttaccagtcttcgctggatgccgcagaccagtcg

SEQ ID NO: 263795 - DNA, 50 bp, Artificial
  Synthetic oligonucleotide
atccagcgacaactgtgctgccttgcatctggcacgccgctacagccttg

SEQ ID NO: 263796 - DNA, 50 bp, Artificial
  Synthetic oligonucleotide
atccacgcgtttccccttttgggcggacacctcgtaggcactgagcgatc

SEQ ID NO: 263797 - DNA, 50 bp, Artificial
  Synthetic oligonucleotide
catcagaccgttcgcagcctggagctaacccgtggtggacaggacgggtt

SEQ ID NO: 263798 - DNA, 50 bp, Artificial
  Synthetic oligonucleotide
atcagtggcggcctgaaacgcagcgggaacctcagatctctctgcgaacg

SEQ ID NO: 263799 - DNA, 50 bp, Artificial
  Synthetic oligonucleotide
catcggtcctgtggccactgaggcatccccggaaaacagtcggcggaaac

SEQ ID NO: 263800 - DNA, 50 bp, Artificial
  Synthetic oligonucleotide
caacccgcctcacagagagtggagaccaccgagcctccgtcctcaagact

SEQ ID NO: 263801 - DNA, 50 bp, Artificial
  Synthetic oligonucleotide
caacggttcccgaggcgagagccgggatgcaacacggcattggcatgcac

SEQ ID NO: 263802 - DNA, 50 bp, Artificial
  Synthetic oligonucleotide
caagagcggtcttcctccgagcttcccgccagtcctccgacggtgctcca

SEQ ID NO: 263803 - DNA, 58 bp, Artificial
  Synthetic oligonucleotide
tctggggggctaaccagccccctttttgtagcagcggtcacggacaagatcactgagc

SEQ ID NO: 263804 - DNA, 50 bp, Artificial
  Synthetic oligonucleotide
caagcggattgacacaccccggtgttcgatctctcccaggcgctgcgtcg

SEQ ID NO: 263805 - DNA, 50 bp, Artificial
  Synthetic oligonucleotide
caaggcttgcccgctcatggccccaaccagcgaaagcgtgacatgtcaga

SEQ ID NO: 263806 - DNA, 50 bp, Artificial
  Synthetic oligonucleotide
attccgaaaagccatcgtgaccgggcgtcctccttgagaaggcgaggggg

SEQ ID NO: 263807 - DNA, 50 bp, Artificial
  Synthetic oligonucleotide
caatggttggcgcagctcagacacccttggcatggtgagagacccagggc

SEQ ID NO: 263808 - DNA, 50 bp, Artificial
  Synthetic oligonucleotide
cacaacgtccccgacgatgctgtctgcagccggatcctatggggcccttt

SEQ ID NO: 263809 - DNA, 50 bp, Artificial
  Synthetic oligonucleotide
cacaatggccgtgtctgggctcaggcccccttccacgtcgtatttcacct

SEQ ID NO: 263810 - DNA, 50 bp, Artificial
  Synthetic oligonucleotide
cacagcggctctgcagctgggtggactgaacaccacgagcagcacattga

SEQ ID NO: 263811 - DNA, 50 bp, Artificial
  Synthetic oligonucleotide
caccgaacgtcgagcggcaatgtccctaacgaggtccctcggccattcaa

SEQ ID NO: 263812 - DNA, 50 bp, Artificial
  Synthetic oligonucleotide
atggcgaagcaacgctctttcccctgaagcggatacccccacttcgaggc

SEQ ID NO: 263813 - DNA, 50 bp, Artificial
  Synthetic oligonucleotide
cagaaccgaccacacatggcgaccaggagtggggtggagcgcaggctagg

SEQ ID NO: 263814 - DNA, 55 bp, Artificial
  Synthetic oligonucleotide
tcttcggtgccaggggggcgtaggggtaatacccaccaacgaatctgggcactgc

SEQ ID NO: 263815 - DNA, 50 bp, Artificial
  Synthetic oligonucleotide
atgcggccttccaccaagtcgttgtagcgctcgcgaaacaagccccagcg

SEQ ID NO: 263816 - DNA, 50 bp, Artificial
  Synthetic oligonucleotide
atgcgcgtgtgaggaccaccgtgagtcggcgtagggcttcatcgtcctag

SEQ ID NO: 263817 - DNA, 50 bp, Artificial
  Synthetic oligonucleotide
atgcctgaagggaatcggccaacagacctttagcgggacagccagcacct

SEQ ID NO: 263818 - DNA, 50 bp, Artificial
  Synthetic oligonucleotide
atgccgctacaccgttgatgtgatgggagccaagcgcagccaggtgagcc

SEQ ID NO: 263819 - DNA, 50 bp, Artificial
  Synthetic oligonucleotide
aggtgctttccatcaagactcccaacaggggccgccgtcacagcggtcag

SEQ ID NO: 263820 - DNA, 50 bp, Artificial
  Synthetic oligonucleotide
ccccggcgtctactacaaatcagagcgcgacaagaacggtcgcctcaccc

SEQ ID NO: 263821 - DNA, 50 bp, Artificial
  Synthetic oligonucleotide
agggtgtgacccgaaggtcgtcgttttagggctaagtgacccatgcgggg

SEQ ID NO: 263822 - DNA, 50 bp, Artificial
  Synthetic oligonucleotide
aggggttggaaggggcactcggtcgccagggggtcaccagcaactactcc

SEQ ID NO: 263823 - DNA, 50 bp, Artificial
  Synthetic oligonucleotide
aggggtgtctcgccttctaggggcactaagtttgcagactcgggcgcgat

SEQ ID NO: 263824 - DNA, 50 bp, Artificial
  Synthetic oligonucleotide
agggggcagctccacctgaaactgttgtgccgttctggatcacaggcgac

SEQ ID NO: 263825 - DNA, 54 bp, Artificial
  Synthetic oligonucleotide
cttgccatgaaaaaatccgaaacgaactgtttttttattgtatccatcacttaa

SEQ ID NO: 263826 - DNA, 56 bp, Artificial
  Synthetic oligonucleotide
tttgctcattggttacagcgtgaccaagcaaaattaggggccgtgtccaacccctg

SEQ ID NO: 263827 - DNA, 50 bp, Artificial
  Synthetic oligonucleotide
aggggattgcttcagtctgacctgcgacggcacccatctggcaagcagtt

SEQ ID NO: 263828 - DNA, 50 bp, Artificial
  Synthetic oligonucleotide
agggatctcaacaattgcttctacgccccggcaccccaaccgacagggca

SEQ ID NO: 263829 - DNA, 50 bp, Artificial
  Synthetic oligonucleotide
agggaatcggccaacagacctttagcgggacagccagcacctattcgcgc

SEQ ID NO: 263830 - DNA, 50 bp, Artificial
  Synthetic oligonucleotide
ccctctgggggccgctggacaagacttagcagttggcagttgagctgtct

SEQ ID NO: 263831 - DNA, 50 bp, Artificial
  Synthetic oligonucleotide
aggctctgaactcaggcccctggcgccgaagaattggtgcccgtaacaaa

SEQ ID NO: 263832 - DNA, 50 bp, Artificial
  Synthetic oligonucleotide
aggctaggccgggagcaccgactgcttgtagacatgtaggtcctctccgc

SEQ ID NO: 263833 - DNA, 50 bp, Artificial
  Synthetic oligonucleotide
aggcggatgccttgacgcgaagggggccgatttgttgcaacagcacgggt

SEQ ID NO: 263834 - DNA, 50 bp, Artificial
  Synthetic oligonucleotide
aggcgcctggagatttggcgcacgatctgacgcagtagatggtctccgct

SEQ ID NO: 263835 - DNA, 50 bp, Artificial
  Synthetic oligonucleotide
aggcgcccaccaacatcagcgtcgaaccgttcggatcgttaccccaggtc

SEQ ID NO: 263836 - DNA, 50 bp, Artificial
  Synthetic oligonucleotide
aggcgccacgccacaagtgccgcccattatgaacctttctctgcccgtaa

SEQ ID NO: 263837 - DNA, 60 bp, Artificial
  Synthetic oligonucleotide
cccctagactgtgccagatcataagcctcactgagggtgagggcactaccgggggcatga

SEQ ID NO: 263838 - DNA, 50 bp, Artificial
  Synthetic oligonucleotide
aggcgcaggaattacgcgcgaggggccggcaattggcagggatcctcccc

SEQ ID NO: 263839 - DNA, 50 bp, Artificial
  Synthetic oligonucleotide
aggcctggcgaggtctgcagctgtcccatcccgtgagagctcctcccagc

SEQ ID NO: 263840 - DNA, 50 bp, Artificial
  Synthetic oligonucleotide
atcaggtgcgctagccatcagcggtggtggggatgcagtggttcttagct

SEQ ID NO: 263841 - DNA, 50 bp, Artificial
  Synthetic oligonucleotide
catggtgtgtgcgctgggggtgcgcaatcactcctacggacagaggctgt

SEQ ID NO: 263842 - DNA, 50 bp, Artificial
  Synthetic oligonucleotide
cattccggaggggcacaccccggtgagttatctgcgggaggtgtcggagt

SEQ ID NO: 263843 - DNA, 50 bp, Artificial
  Synthetic oligonucleotide
cattgggccccaaagaggggaccgctggcggaagcatagaggcgaagatc

SEQ ID NO: 263844 - DNA, 50 bp, Artificial
  Synthetic oligonucleotide
ccaaagaggggaccgctggcggaagcatagaggcgaagatccatctcccg

SEQ ID NO: 263845 - DNA, 50 bp, Artificial
  Synthetic oligonucleotide
atatccggtgagtggttgacgcgaccagtgtgcctgatcgccccagcatt

SEQ ID NO: 263846 - DNA, 50 bp, Artificial
  Synthetic oligonucleotide
agttgctgccgctctaggcgatcggggtggttcctgtgggaaccgcatgg

SEQ ID NO: 263847 - DNA, 50 bp, Artificial
  Synthetic oligonucleotide
agttgaccgctacgtatggagcatcggcacaggcccttggggtgaacggc

SEQ ID NO: 263848 - DNA, 58 bp, Artificial
  Synthetic oligonucleotide
aaacaactggcgatcgcttaagcatggcccgaagactgcaaaacattaagggcggagc

SEQ ID NO: 263849 - DNA, 50 bp, Artificial
  Synthetic oligonucleotide
agttcgcaacctgcgagtagccgaaccgcaagccagagactcgtgccttc

SEQ ID NO: 263850 - DNA, 50 bp, Artificial
  Synthetic oligonucleotide
agtggatagcgacgtgccagatgcagcctgaccgcagggctagcttgggc

SEQ ID NO: 263851 - DNA, 50 bp, Artificial
  Synthetic oligonucleotide
agtgctgcttgaagaggtcacaggtgatcgatcgaagggcagggcccaga

SEQ ID NO: 263852 - DNA, 50 bp, Artificial
  Synthetic oligonucleotide
agtgcggttaaccctctcgttcgacacacgccatacggcctattgcccgg

SEQ ID NO: 263853 - DNA, 50 bp, Artificial
  Synthetic oligonucleotide
ccatgacgcgtggggcggcggaggactgccataacgtgacccttcaaatt

SEQ ID NO: 263854 - DNA, 50 bp, Artificial
  Synthetic oligonucleotide
agtctctccgtcaaatcgctaggctgccgccaacgcagtgttgccgtgag

SEQ ID NO: 263855 - DNA, 50 bp, Artificial
  Synthetic oligonucleotide
agtcggaccccatcgccccagacaccctggtgcagcgttaggtcgccatg

SEQ ID NO: 263856 - DNA, 50 bp, Artificial
  Synthetic oligonucleotide
cccacgctatcagcttctgagctgtgccctgaggcgcgatcgcccgacaa

SEQ ID NO: 263857 - DNA, 50 bp, Artificial
  Synthetic oligonucleotide
cccatctggtactagggcgatcgcccctaccctttcaggggtctgggata

SEQ ID NO: 263858 - DNA, 50 bp, Artificial
  Synthetic oligonucleotide
aggtggcctgcgacggagacgcatcaggtaaaaccgtggatggccgtctg

SEQ ID NO: 263859 - DNA, 60 bp, Artificial
  Synthetic oligonucleotide
aggcgtcccagctccagaggtaggttgccgcgtgcaactaggtagtagtagctgccgctc

SEQ ID NO: 263860 - DNA, 50 bp, Artificial
  Synthetic oligonucleotide
acctcagtgccgcgacccaagcattgttgcccctcaattggcctgggaca

SEQ ID NO: 263861 - DNA, 50 bp, Artificial
  Synthetic oligonucleotide
accgttgcctggtccatcccccagctggatcctgatttgcaccgtctcgc

SEQ ID NO: 263862 - DNA, 50 bp, Artificial
  Synthetic oligonucleotide
accgtcccgattgggctgagcgtggacttttgatctggccgcgaggtggc

SEQ ID NO: 263863 - DNA, 50 bp, Artificial
  Synthetic oligonucleotide
accgggtcaaatggacagcccccagttccgcagtagcagacctcgccgac

SEQ ID NO: 263864 - DNA, 50 bp, Artificial
  Synthetic oligonucleotide
accgggcggttccaggcgtcacgcaccgttttgcagttgaagattcgacc

SEQ ID NO: 263865 - DNA, 50 bp, Artificial
  Synthetic oligonucleotide
accggatctgctagaaaaccgcgtagcgcactcccaaagagcgcccagct

SEQ ID NO: 263866 - DNA, 50 bp, Artificial
  Synthetic oligonucleotide
gccggtgtcagcccaatgatctggcgtcggttcctagtgagaggcgacac

SEQ ID NO: 263867 - DNA, 50 bp, Artificial
  Synthetic oligonucleotide
accgctttgagcgttcggaaggaggtggttcggcactgttgcgcaaccgt

SEQ ID NO: 263868 - DNA, 50 bp, Artificial
  Synthetic oligonucleotide
accgctgccgcatccccgttgaaaacgcgatccgtgatgccaaactcgac

SEQ ID NO: 263869 - DNA, 50 bp, Artificial
  Synthetic oligonucleotide
accgctgagaccgcctgtgtttgcaatagttgagggggctttccaccccc

SEQ ID NO: 263870 - DNA, 60 bp, Artificial
  Synthetic oligonucleotide
tgcagagcgggtctgcgcgttagggtctgcaggaatcgccacggcgctcacctccaaaag

SEQ ID NO: 263871 - DNA, 50 bp, Artificial
  Synthetic oligonucleotide
accgcgtccgttgtgggctgcttctcagctggaagtgcagatcgatggca

SEQ ID NO: 263872 - DNA, 50 bp, Artificial
  Synthetic oligonucleotide
accgcgggagttggttgagaagtaaggggctccccatcgctccagtccgt

SEQ ID NO: 263873 - DNA, 50 bp, Artificial
  Synthetic oligonucleotide
accgcggccttgagtctgcgaccccaaggaccgaagaagccgtcgacagc

SEQ ID NO: 263874 - DNA, 50 bp, Artificial
  Synthetic oligonucleotide
accgcggacatagatccatccccgctctgcccccacagcgaaggctgcaa

SEQ ID NO: 263875 - DNA, 50 bp, Artificial
  Synthetic oligonucleotide
accgcgactgcaatggacgctcgggttgggacggtgagcaatacctggat

SEQ ID NO: 263876 - DNA, 50 bp, Artificial
  Synthetic oligonucleotide
gcgactgagtggtcgggctccccggaaggtgcggtcgggataacccacaa

SEQ ID NO: 263877 - DNA, 50 bp, Artificial
  Synthetic oligonucleotide
accgccgtttcaggcctattgccctttggtggcgcgttacggagaaaccc

SEQ ID NO: 263878 - DNA, 50 bp, Artificial
  Synthetic oligonucleotide
accgccaaggcctctcggggtggtttccggcaaagctgccccaactcccg

SEQ ID NO: 263879 - DNA, 50 bp, Artificial
  Synthetic oligonucleotide
acgcaggagacaggggttctgccagctctcggatcgctcttccgaggccg

SEQ ID NO: 263880 - DNA, 50 bp, Artificial
  Synthetic oligonucleotide
acgcagcttcacgctctcgatcccaccgttttgggcggatggtatcggct

SEQ ID NO: 263881 - DNA, 53 bp, Artificial
  Synthetic oligonucleotide
ccgcccaaaagtccttcattttacgactggctttaatgagttcctggacggga

SEQ ID NO: 263882 - DNA, 50 bp, Artificial
  Synthetic oligonucleotide
acgcagcggacctgcgctcagccaccgtgatcgatctcatgtttgcgatc

SEQ ID NO: 263883 - DNA, 50 bp, Artificial
  Synthetic oligonucleotide
acgcacgggaatcgcccctcattgcgcaactgttcgccagagcaacggta

SEQ ID NO: 263884 - DNA, 50 bp, Artificial
  Synthetic oligonucleotide
gcacatatatatagaggctgttggctttagtagacgcggtagttgggaca

SEQ ID NO: 263885 - DNA, 50 bp, Artificial
  Synthetic oligonucleotide
acgcaagtcgtcccatcaactcccggagagcccgggaactgtcatccagg

SEQ ID NO: 263886 - DNA, 50 bp, Artificial
  Synthetic oligonucleotide
acgattgcgctgaccatgcaatccagtcatctaacagggcatcgctgact

SEQ ID NO: 263887 - DNA, 50 bp, Artificial
  Synthetic oligonucleotide
acgatgtggaatcatcctttgcggtcggagcagggcgccccatacggagt

SEQ ID NO: 263888 - DNA, 50 bp, Artificial
  Synthetic oligonucleotide
acgatctccaaaccgtcgttgcgcctctaacgccgtctgtgcggaacgcg

SEQ ID NO: 263889 - DNA, 50 bp, Artificial
  Synthetic oligonucleotide
acgaggtctgccatggagttggggtcgccatcggggcgcaatgccacggg

SEQ ID NO: 263890 - DNA, 50 bp, Artificial
  Synthetic oligonucleotide
gcagcgatcgcccttggattgtgcttgggtgtgggctggagcgcaccagt

SEQ ID NO: 263891 - DNA, 50 bp, Artificial
  Synthetic oligonucleotide
acgacggctcagcaaccaccgttgcacactggccgccaacagatgaccaa

SEQ ID NO: 263892 - DNA, 60 bp, Artificial
  Synthetic oligonucleotide
tgagggagcacttcaacgcccagcatggctagttggtcacggaatgcccaatggcaggtt

SEQ ID NO: 263893 - DNA, 50 bp, Artificial
  Synthetic oligonucleotide
acgaagcactgcggcgccctctaacttgcagcgattgggggatacggctt

SEQ ID NO: 263894 - DNA, 50 bp, Artificial
  Synthetic oligonucleotide
acctgggcctacagctagttcccctcaatccgaggctggctcgcgacaac

SEQ ID NO: 263895 - DNA, 50 bp, Artificial
  Synthetic oligonucleotide
acctggcaggggactgtcgccctccaatgcaccgatcaggcagtgcatcg

SEQ ID NO: 263896 - DNA, 50 bp, Artificial
  Synthetic oligonucleotide
acctgcgacggcacccatctggcaagcagttttcaggggtgtgggttcaa

SEQ ID NO: 263897 - DNA, 50 bp, Artificial
  Synthetic oligonucleotide
acctctccaccgggacgtaccagggcgttttccgatggtgtatggcgaga

SEQ ID NO: 263898 - DNA, 50 bp, Artificial
  Synthetic oligonucleotide
acctcgcaaggtgggccatagcctcacccagcaagggcgtcctgtgagtg

SEQ ID NO: 263899 - DNA, 50 bp, Artificial
  Synthetic oligonucleotide
accccctcgttgtcgacaccccgttaagacaggacccccgggcgaatcaa

SEQ ID NO: 263900 - DNA, 50 bp, Artificial
  Synthetic oligonucleotide
acccccatccacggttgccataccacccggccgtaggggtgctttatcgg

SEQ ID NO: 263901 - DNA, 50 bp, Artificial
  Synthetic oligonucleotide
acccccatcacaccttgagtcatcagcccaacggttccagcgacgcgata

SEQ ID NO: 263902 - DNA, 50 bp, Artificial
  Synthetic oligonucleotide
acccattcaactcgccttccggtggtccgcaggggagaagcgacagtctc

SEQ ID NO: 263903 - DNA, 60 bp, Artificial
  Synthetic oligonucleotide
aaaattgtttgcggtatgccaagccgatcaagtggattcttggcagaacgatcaccgaca

SEQ ID NO: 263904 - DNA, 50 bp, Artificial
  Synthetic oligonucleotide
acccaggtgctaaaccgaatggtggcgcgttccttacagcagcgctacga

SEQ ID NO: 263905 - DNA, 50 bp, Artificial
  Synthetic oligonucleotide
acccaggctgcgtggcggactcccctctgttccgcaacacccccaaggcc

SEQ ID NO: 263906 - DNA, 50 bp, Artificial
  Synthetic oligonucleotide
acccagcagagttttctgcggctggcgtccaccccagcgatcttcacggc

SEQ ID NO: 263907 - DNA, 50 bp, Artificial
  Synthetic oligonucleotide
acccaaccgcggcagccccagaacccagcgtaaagtccttccaacgacct

SEQ ID NO: 263908 - DNA, 50 bp, Artificial
  Synthetic oligonucleotide
accatgcaggggctgttaggtgcgatacgaggcagccagtccgctaagga

SEQ ID NO: 263909 - DNA, 50 bp, Artificial
  Synthetic oligonucleotide
accatctggaggcgcacctggcttccgtgttcctggcagatcagccacca

SEQ ID NO: 263910 - DNA, 50 bp, Artificial
  Synthetic oligonucleotide
accagtgtgcctgatcgccccagcattctgtggcagcgctgagaatctcc

SEQ ID NO: 263911 - DNA, 50 bp, Artificial
  Synthetic oligonucleotide
accagtggtcaccacgcggctaccctcacccaagggaaaccaggggtcct

SEQ ID NO: 263912 - DNA, 50 bp, Artificial
  Synthetic oligonucleotide
accagtgggctccgccttcgcagctccagtggtcacgttcatccagaccc

SEQ ID NO: 263913 - DNA, 50 bp, Artificial
  Synthetic oligonucleotide
accaggggaaaaaccactgcgctgtctggggaaacaccgctgccagttgg

SEQ ID NO: 263914 - DNA, 60 bp, Artificial
  Synthetic oligonucleotide
tgacgatcgccagtacgaaaaactgaagcgtcagcgggcgaaatctgagacggaacggca

SEQ ID NO: 263915 - DNA, 50 bp, Artificial
  Synthetic oligonucleotide
accagcgttccccgtctccacggaagggcatcaccgaatggggttgccag

SEQ ID NO: 263916 - DNA, 50 bp, Artificial
  Synthetic oligonucleotide
accacgcgatcgctctacctacccgatgacaaaccgcccgcagtcggcag

SEQ ID NO: 263917 - DNA, 50 bp, Artificial
  Synthetic oligonucleotide
accaataactcatgctcgtaggcagcgatcgcctctagcccaatcttttg

SEQ ID NO: 263918 - DNA, 50 bp, Artificial
  Synthetic oligonucleotide
accaaggggagttcgcaactggactgctaaacggcgcgtgccctgcggca

SEQ ID NO: 263919 - DNA, 50 bp, Artificial
  Synthetic oligonucleotide
accgcagcagcgttcagtgtcccgccactcacctgcactagcgtgttgtc

SEQ ID NO: 263920 - DNA, 50 bp, Artificial
  Synthetic oligonucleotide
accgcaagaacctacctgccagccgcgcttccgggcaacccctgacgctc

SEQ ID NO: 263921 - DNA, 50 bp, Artificial
  Synthetic oligonucleotide
accgaccggcagctctgcgtgggccccaccctgatggtgatccgcagtgg

SEQ ID NO: 263922 - DNA, 50 bp, Artificial
  Synthetic oligonucleotide
accgacatgtttgcggcggtatggagtgctgagtgctggccgtgcaagcc

SEQ ID NO: 263923 - DNA, 50 bp, Artificial
  Synthetic oligonucleotide
acccttcgctccgattacgtagaagccgcacgcagtcgcgggctgaatga

SEQ ID NO: 263924 - DNA, 50 bp, Artificial
  Synthetic oligonucleotide
acccttccgtgcggcgacgttgtctgcacaaggccccatgtgatggcagc

SEQ ID NO: 263925 - DNA, 56 bp, Artificial
  Synthetic oligonucleotide
ccgcttgttcccgctaattcacgcttgttcctaacagttcactgaactataggtaa

SEQ ID NO: 263926 - DNA, 50 bp, Artificial
  Synthetic oligonucleotide
accctgggttgtcgtggaatgcctgcacgctgcatacttggcttgcgccc

SEQ ID NO: 263927 - DNA, 50 bp, Artificial
  Synthetic oligonucleotide
accctcccccacccgctctggtggaccgatcaagattttgcggtcgttgt

SEQ ID NO: 263928 - DNA, 50 bp, Artificial
  Synthetic oligonucleotide
acccgtgactcgcccctctaccaagacgtgcgccgcttagccagtgagtt

SEQ ID NO: 263929 - DNA, 50 bp, Artificial
  Synthetic oligonucleotide
acccgtaccaagggtcgttggggcatcacaacaggggctcccggcgtcgt

SEQ ID NO: 263930 - DNA, 50 bp, Artificial
  Synthetic oligonucleotide
acccggccgcggttcagacgaatcaggccccgcagctcaagcgacggatc

SEQ ID NO: 263931 - DNA, 50 bp, Artificial
  Synthetic oligonucleotide
acccgcacctttgtgccaaagggtaggcttttgtgggcggcagtcatcgc

SEQ ID NO: 263932 - DNA, 50 bp, Artificial
  Synthetic oligonucleotide
acccgagtgttctgaagccagtgtcgcggtcgttgttccccgtcagggtg

SEQ ID NO: 263933 - DNA, 50 bp, Artificial
  Synthetic oligonucleotide
acccgaggtgccaccagtgggctccgccttcgcagctccagtggtcacgt

SEQ ID NO: 263934 - DNA, 50 bp, Artificial
  Synthetic oligonucleotide
acccctgctcgctcctgtgggactgcggccttggcttcttatcgcatcca

SEQ ID NO: 263935 - DNA, 50 bp, Artificial
  Synthetic oligonucleotide
acccctcttgagcgaggtgcggagggaatcggtgaggcgttcctgaatgc

SEQ ID NO: 263936 - DNA, 54 bp, Artificial
  Synthetic oligonucleotide
gaaaaactccacattcgagtcgaactaaccgagctaaaccctccagaaggaaga

SEQ ID NO: 263937 - DNA, 56 bp, Artificial
  Synthetic oligonucleotide
ccgttgcctctttattcttggcggcacggcgacagggaaaagtgttctcgccctca

SEQ ID NO: 263938 - DNA, 50 bp, Artificial
  Synthetic oligonucleotide
accccgcgatgcctgggatgtgcccttcccggggtggctggatgaacggg

SEQ ID NO: 263939 - DNA, 50 bp, Artificial
  Synthetic oligonucleotide
accccgactgccgcttcaacgcccgtagtcctttgctccgttgtgctgtt

SEQ ID NO: 263940 - DNA, 50 bp, Artificial
  Synthetic oligonucleotide
agaatggtcgaagcccgacacaggcatggccccgttgctctgaccatcat

SEQ ID NO: 263941 - DNA, 50 bp, Artificial
  Synthetic oligonucleotide
actttcccccgccatcagttgggcccaggttcctggtgtgaccccctcga

SEQ ID NO: 263942 - DNA, 50 bp, Artificial
  Synthetic oligonucleotide
acttgtggggaagcgatcgggttcaggggtgccgcaataccaagcacgag

SEQ ID NO: 263943 - DNA, 50 bp, Artificial
  Synthetic oligonucleotide
acttgggtggggcaccccctgatcgacaccttgacccagctgcccagtcg

SEQ ID NO: 263944 - DNA, 50 bp, Artificial
  Synthetic oligonucleotide
ctcaggttgcgtagacttggcccgtcgcagagtggcacacttatcggcct

SEQ ID NO: 263945 - DNA, 50 bp, Artificial
  Synthetic oligonucleotide
actgctgcgggctaagccgcgccagtccaccccaggacgacgcttatcaa

SEQ ID NO: 263946 - DNA, 50 bp, Artificial
  Synthetic oligonucleotide
actgcagccatcgggatggtcgttcggcagggagccaatcacgcgtcaaa

SEQ ID NO: 263947 - DNA, 50 bp, Artificial
  Synthetic oligonucleotide
actgcaagccggtcagctccgtgctctgtcaccattggccgcagttgact

SEQ ID NO: 263948 - DNA, 60 bp, Artificial
  Synthetic oligonucleotide
tcttggatcgccctgtagcttccgacaactgctcaattttttcgagcatctctaccgggc

SEQ ID NO: 263949 - DNA, 50 bp, Artificial
  Synthetic oligonucleotide
actgagccttgccaaacgctaggcagccggaacgcgctctgatccaacag

SEQ ID NO: 263950 - DNA, 50 bp, Artificial
  Synthetic oligonucleotide
actgagccgcctcacgcaccccctcaaatcgactctgaaccgtcaccacg

SEQ ID NO: 263951 - DNA, 50 bp, Artificial
  Synthetic oligonucleotide
actctgcagctggcgtttcgtccctacgcctttgatctgagtcggccgct

SEQ ID NO: 263952 - DNA, 50 bp, Artificial
  Synthetic oligonucleotide
actcggttgccctggcccccgttggggaattcgttcggcattagccccta

SEQ ID NO: 263953 - DNA, 50 bp, Artificial
  Synthetic oligonucleotide
actcgccttccggtggtccgcaggggagaagcgacagtctcgagatcact

SEQ ID NO: 263954 - DNA, 50 bp, Artificial
  Synthetic oligonucleotide
actcgcaccatgcgtcgtcctgaaagcggcttgcctgaacgatcgcgaag

SEQ ID NO: 263955 - DNA, 50 bp, Artificial
  Synthetic oligonucleotide
actcccaacaggggccgccgtcacagcggtcagggccattagagtaacgg

SEQ ID NO: 263956 - DNA, 50 bp, Artificial
  Synthetic oligonucleotide
actcaggcgtcagctggctacccatcgctcggcctggattgtcgcttccg

SEQ ID NO: 263957 - DNA, 50 bp, Artificial
  Synthetic oligonucleotide
actcaggcccctggcgccgaagaattggtgcccgtaacaaagcccggagg

SEQ ID NO: 263958 - DNA, 50 bp, Artificial
  Synthetic oligonucleotide
agattccattcgcgagaatgcgccgacttgcagcccacccccgtgtacgt

SEQ ID NO: 263959 - DNA, 49 bp, Artificial
  Synthetic oligonucleotide
aaccccttaagggcttgggagcgttttatacgagtgcggggaaatttcg

SEQ ID NO: 263960 - DNA, 50 bp, Artificial
  Synthetic oligonucleotide
agatgattcatgcctgggtggatctggtcttgggccgacgcgagagccac

SEQ ID NO: 263961 - DNA, 50 bp, Artificial
  Synthetic oligonucleotide
agaggggttccgtttttgtcacgcaaaaccaggcgtggacccacctgcag

SEQ ID NO: 263962 - DNA, 50 bp, Artificial
  Synthetic oligonucleotide
agaggggacaccgacacaacgtctgtgcctgattcacaacggccggttgg

SEQ ID NO: 263963 - DNA, 50 bp, Artificial
  Synthetic oligonucleotide
agagggagatccctccagcgcgaatcagccgccaacgagagcactaacct

SEQ ID NO: 263964 - DNA, 50 bp, Artificial
  Synthetic oligonucleotide
agaggcgacacatcgagggcctctttagcgaccgcaacggatgagctgct

SEQ ID NO: 263965 - DNA, 50 bp, Artificial
  Synthetic oligonucleotide
agagcgggtgttcccaacatccgtatcggctctgacgagggatccagggc

SEQ ID NO: 263966 - DNA, 50 bp, Artificial
  Synthetic oligonucleotide
agagcgcttgctcacgctcaggggacacaggcatcgtgttgcgacgaacc

SEQ ID NO: 263967 - DNA, 50 bp, Artificial
  Synthetic oligonucleotide
agagcctgctgtgaatggcgtgctggtctggaccttggtcacgggtttgc

SEQ ID NO: 263968 - DNA, 50 bp, Artificial
  Synthetic oligonucleotide
agagcccgacaactgggaggcgttaaccgctggaccgcaactggaggatg

SEQ ID NO: 263969 - DNA, 50 bp, Artificial
  Synthetic oligonucleotide
agagcacttcagccacacgcgcttcgctcggggcttcgcaatagagccgc

SEQ ID NO: 263970 - DNA, 59 bp, Artificial
  Synthetic oligonucleotide
gcagccaactgttccgcgttagcgaagtccgcagacgcgatcgcctcagcttccttcgg

SEQ ID NO: 263971 - DNA, 50 bp, Artificial
  Synthetic oligonucleotide
agagacggctgatagggagtcgcccggcccatcaaccctggctcgcttct

SEQ ID NO: 263972 - DNA, 50 bp, Artificial
  Synthetic oligonucleotide
agacttcgcgaaggcagagcgggcagcccccgtcgtaaagcacggtcaat

SEQ ID NO: 263973 - DNA, 50 bp, Artificial
  Synthetic oligonucleotide
agactgcgcacgggcaaattgcgggtcgtggcaaacaccgggtcaaagga

SEQ ID NO: 263974 - DNA, 50 bp, Artificial
  Synthetic oligonucleotide
agacgttgccttcccgcagggggtaccaacgacgttccgggcagggagtc

SEQ ID NO: 263975 - DNA, 50 bp, Artificial
  Synthetic oligonucleotide
agacgcctcaaatccccctagagcagccccaagcgataccagacgcaacc

SEQ ID NO: 263976 - DNA, 50 bp, Artificial
  Synthetic oligonucleotide
ctacttagaagacgctcgcggcagtgtgttttcggggccgggtagtcgcg

SEQ ID NO: 263977 - DNA, 50 bp, Artificial
  Synthetic oligonucleotide
agacacgggtgatgggctagccagggctaccagtccaggtagctgttcga

SEQ ID NO: 263978 - DNA, 50 bp, Artificial
  Synthetic oligonucleotide
acggcacagacggacgatgtagctgaccgcgcgaatggggactgcgagcc

SEQ ID NO: 263979 - DNA, 50 bp, Artificial
  Synthetic oligonucleotide
acggatgggccggattgaccctcaagcttcgttggggtgggaaatcaccc

SEQ ID NO: 263980 - DNA, 50 bp, Artificial
  Synthetic oligonucleotide
acggatcggctgggcccttaatcttgagggtcagacccgtctgatgccgc

SEQ ID NO: 263981 - DNA, 59 bp, Artificial
  Synthetic oligonucleotide
gctgcccaagtgctcgcgatatcctcagcatcaactagcgatcgctcgcgttcttcaac

SEQ ID NO: 263982 - DNA, 50 bp, Artificial
  Synthetic oligonucleotide
acggacggtcccccattggcgatcactcaggtagctgccccaacgcgacc

SEQ ID NO: 263983 - DNA, 50 bp, Artificial
  Synthetic oligonucleotide
gagcaaaccaatcaggcaagctcccgatcgcagccaattgaggggcgtgg

SEQ ID NO: 263984 - DNA, 50 bp, Artificial
  Synthetic oligonucleotide
acgctctttcccctgaagcggatacccccacttcgaggcccgatccatga

SEQ ID NO: 263985 - DNA, 50 bp, Artificial
  Synthetic oligonucleotide
acgctcggaaatctgctggccctctgcggtctgccgagtcgacaggatgc

SEQ ID NO: 263986 - DNA, 50 bp, Artificial
  Synthetic oligonucleotide
acgctccacgcgtcgtggaagacttggtgcggctgacacagaggctctta

SEQ ID NO: 263987 - DNA, 50 bp, Artificial
  Synthetic oligonucleotide
acgcgtctgcgcagctttcttttgccactgctgagcgccatcgctcttgg

SEQ ID NO: 263988 - DNA, 50 bp, Artificial
  Synthetic oligonucleotide
acgcgatccttgttacggcggccccagaccatcggccccaaccgttactg

SEQ ID NO: 263989 - DNA, 50 bp, Artificial
  Synthetic oligonucleotide
acgcctgcggggccctacagccactggagcttgagccttacccggtcgcg

SEQ ID NO: 263990 - DNA, 50 bp, Artificial
  Synthetic oligonucleotide
acgcctcgcaatacttgccgtccatcaggggtgcctagcaccttacgcgc

SEQ ID NO: 263991 - DNA, 50 bp, Artificial
  Synthetic oligonucleotide
acgccggcctaatgggttgcctgagactcgttctctgcgcgaccgaaagg

SEQ ID NO: 263992 - DNA, 59 bp, Artificial
  Synthetic oligonucleotide
tctactctcagttgagccgccttagcaggcaatcgtcagcgagtacgatgagggcaccc

SEQ ID NO: 263993 - DNA, 50 bp, Artificial
  Synthetic oligonucleotide
acgccgaccgggtcaatgcggtctcaccgacctacgcccaggagatccgc

SEQ ID NO: 263994 - DNA, 50 bp, Artificial
  Synthetic oligonucleotide
gatcggtcagccccacgctatcagcttctgagctgtgccctgaggcgcga

SEQ ID NO: 263995 - DNA, 50 bp, Artificial
  Synthetic oligonucleotide
acgccaagtggattgagctagaaaccagacccatgcggggcagtgggcag

SEQ ID NO: 263996 - DNA, 50 bp, Artificial
  Synthetic oligonucleotide
acgccaacctttgcctgtacgtcaacgagtgccgcgtcacccgtgatggg

SEQ ID NO: 263997 - DNA, 50 bp, Artificial
  Synthetic oligonucleotide
acgcaggcccccgccgtgaacatgctgccttctagcgcatagcctagcgt

SEQ ID NO: 263998 - DNA, 50 bp, Artificial
  Synthetic oligonucleotide
actcacggcactgccggcgagggatggatgacctgaaggtgcgggcttcc

SEQ ID NO: 263999 - DNA, 50 bp, Artificial
  Synthetic oligonucleotide
actcaccctcgattgcgtggtggcgatgcgtggagtgcgtgccaatgggg

SEQ ID NO: 264000 - DNA, 50 bp, Artificial
  Synthetic oligonucleotide
ctggttagccattccggcgttagtgcattccatggattgtctccagcgac

SEQ ID NO: 264001 - DNA, 50 bp, Artificial
  Synthetic oligonucleotide
actagcgaactgctcccgtgcttgctgccattttcctgccacggccatta

SEQ ID NO: 264002 - DNA, 50 bp, Artificial
  Synthetic oligonucleotide
acgttgctgcggccaaattcccggtagggagatgcttggttgccctggtc

SEQ ID NO: 264003 - DNA, 58 bp, Artificial
  Synthetic oligonucleotide
tcccgaagggagcattagctagctatccgccttttggtcctcccttggctaagcgatc

SEQ ID NO: 264004 - DNA, 50 bp, Artificial
  Synthetic oligonucleotide
acgttgcggcttacggcatttgcggcacggacccttcaggcatcgcgtta

SEQ ID NO: 264005 - DNA, 50 bp, Artificial
  Synthetic oligonucleotide
acgttcgtaggtaaacggatcccgccagcggagttgcccggtgctgtgta

SEQ ID NO: 264006 - DNA, 50 bp, Artificial
  Synthetic oligonucleotide
acgtgttctcagggatctgcgtcgttgcggcggcacccattggagactgc

SEQ ID NO: 264007 - DNA, 50 bp, Artificial
  Synthetic oligonucleotide
acgtccccatccgtaacgagccacacgaagtgagcctggtgccgcttgca

SEQ ID NO: 264008 - DNA, 50 bp, Artificial
  Synthetic oligonucleotide
acgtcacacccaaggcgacggagtgcgatgacgatccccagttggcagcg

SEQ ID NO: 264009 - DNA, 50 bp, Artificial
  Synthetic oligonucleotide
acggtggtcgcctgggagtccagccagagtttcggcgggtgggacgcatt

SEQ ID NO: 264010 - DNA, 50 bp, Artificial
  Synthetic oligonucleotide
acggtcgatcgtctcaatcaccgctatgggcgaggcacggtgcaatgggc

SEQ ID NO: 264011 - DNA, 50 bp, Artificial
  Synthetic oligonucleotide
acgggtcgccgtgagggatctgagccgccctcggcccatcgatctcccca

SEQ ID NO: 264012 - DNA, 50 bp, Artificial
  Synthetic oligonucleotide
acggggcatctggacctcgtatcccacccctgagcagacgagcaggaccc

SEQ ID NO: 264013 - DNA, 50 bp, Artificial
  Synthetic oligonucleotide
acgggcaagcactgaaacgggatctgggtttgcatcccccgcaagagtga

SEQ ID NO: 264014 - DNA, 56 bp, Artificial
  Synthetic oligonucleotide
ctggggttgactggtaaaattcagaatatggagccagaaaagatcgaagaaaggat

SEQ ID NO: 264015 - DNA, 50 bp, Artificial
  Synthetic oligonucleotide
acgggagtgccccttgctcgcattgcaacacggctgatggctggagaaag

SEQ ID NO: 264016 - DNA, 50 bp, Artificial
  Synthetic oligonucleotide
acggcgccaagactccgaaggagtgatcagtcgggccttacgcaagccca

SEQ ID NO: 264017 - DNA, 50 bp, Artificial
  Synthetic oligonucleotide
gacctcacccagagtcctgtcaaggcatgggtcacacggccgctccagtc

SEQ ID NO: 264018 - DNA, 50 bp, Artificial
  Synthetic oligonucleotide
acggccaccaatgtttctcgaggcgaacccacggcactgggtcgattggc

SEQ ID NO: 264019 - DNA, 52 bp, Artificial
  Synthetic oligonucleotide
aagtcggcccccatttttgtgggagtcggttgtgaatggaactttgtgaaac

SEQ ID NO: 264020 - DNA, 59 bp, Artificial
  Synthetic oligonucleotide
ttttggcaggcggttatgcgttagtgaccaacctccgagtcgatcgcgaactgtcatca

SEQ ID NO: 264021 - DNA, 60 bp, Artificial
  Synthetic oligonucleotide
gttgtgtcgcctctcactaggaaccgacgccagatcattgggctgacaccggcaataaca

SEQ ID NO: 264022 - DNA, 58 bp, Artificial
  Synthetic oligonucleotide
acaacttgactaacaaatacctgctagtgtatacatattgtattgcaatgtatacgct

SEQ ID NO: 264023 - DNA, 58 bp, Artificial
  Synthetic oligonucleotide
cagacttctaatggtggtgacagctcacccaatcggtagccgacccatcctttctggt

SEQ ID NO: 264024 - DNA, 57 bp, Artificial
  Synthetic oligonucleotide
gcctaccgctggagtctgaaagcggctccttggctcaaacgagcgcaacgggtttgg

SEQ ID NO: 264025 - DNA, 54 bp, Artificial
  Synthetic oligonucleotide
ttatcgagacgaattaaaagcggtgaaagaccataattatctacaggaaagggt

SEQ ID NO: 264026 - DNA, 58 bp, Artificial
  Synthetic oligonucleotide
acgctcccgagtcagcggacggagcagccctccgtcaatatcttgggcatgaccactc

SEQ ID NO: 264027 - DNA, 58 bp, Artificial
  Synthetic oligonucleotide
tggtggaattggcacgctgctagagctggtgactatctggcaactcctacaagtgtct

SEQ ID NO: 264028 - DNA, 58 bp, Artificial
  Synthetic oligonucleotide
ccgccgatctgttccaagctagtcgtcagccgagcctcgcctagctgtcatgcgccga

SEQ ID NO: 264029 - DNA, 56 bp, Artificial
  Synthetic oligonucleotide
cggtctttataatcccactcgattagatcgtggatgggttcgataaattctgggac

SEQ ID NO: 264030 - DNA, 57 bp, Artificial
  Synthetic oligonucleotide
cagtcgccccaaagtccctatccggtgcgagccatccataaccgaaacatcgtggac

SEQ ID NO: 264031 - DNA, 54 bp, Artificial
  Synthetic oligonucleotide
cccacctagcgataagttctgggtggggtttgttattgtttgtccctgatgttc

SEQ ID NO: 264032 - DNA, 58 bp, Artificial
  Synthetic oligonucleotide
gaatcacaacgatgaaatatcaagactggcttaatttattgacaacccttgaaaccgc

SEQ ID NO: 264033 - DNA, 57 bp, Artificial
  Synthetic oligonucleotide
agggatttcgtgacagctccccagtccctgactagatcgggcgttttcaagccaatg

SEQ ID NO: 264034 - DNA, 57 bp, Artificial
  Synthetic oligonucleotide
cgtgatggtcgctatctggcagtctcggcgcggggtaatttctactcgacttggaaa

SEQ ID NO: 264035 - DNA, 57 bp, Artificial
  Synthetic oligonucleotide
cgaccgaggccacctagcacccttggcatcattccgaggtaagaactggcagcaggt

SEQ ID NO: 264036 - DNA, 57 bp, Artificial
  Synthetic oligonucleotide
cgcagtcgcatgttttatatctagcgcgatcgtcggggggtggagctagatcccagc

SEQ ID NO: 264037 - DNA, 57 bp, Artificial
  Synthetic oligonucleotide
caacaattgtgacggaatcagaacgagtggagctaatcttggggtcgggggctcttg

SEQ ID NO: 264038 - DNA, 55 bp, Artificial
  Synthetic oligonucleotide
tcagttagggactcgggttgattgaactgacggcgaaaccaatcgaaaaccatag

SEQ ID NO: 264039 - DNA, 53 bp, Artificial
  Synthetic oligonucleotide
aaatatcgttcgggcctcgtgtttgcgcggatgtctcccgaacaaaaattacg

SEQ ID NO: 264040 - DNA, 57 bp, Artificial
  Synthetic oligonucleotide
gtcagtatgactcgtagcctagcaacaggagaactatcgagatgagtacgcaacgcc

SEQ ID NO: 264041 - DNA, 57 bp, Artificial
  Synthetic oligonucleotide
aaccacgggcattgatctggcgaaatccctaccgggtcaatccgactcgcccgctgc

SEQ ID NO: 264042 - DNA, 57 bp, Artificial
  Synthetic oligonucleotide
tttacgctttccccgcattgcaccgcagcctaagctgcgatcgcaacttcaagcgtt

SEQ ID NO: 264043 - DNA, 60 bp, Artificial
  Synthetic oligonucleotide
gacgcgttcaggaagcgcgctatgattcggcagcattccagcgcttcaaaacggctcaaa

SEQ ID NO: 264044 - DNA, 53 bp, Artificial
  Synthetic oligonucleotide
ccccggagggagcgccgtttactcggaattcttccccaaagtcaccattcaca

SEQ ID NO: 264045 - DNA, 56 bp, Artificial
  Synthetic oligonucleotide
ccccctgcaacaaggctcagtcttactcgatgaagactatgccccctatagcgaca

SEQ ID NO: 264046 - DNA, 56 bp, Artificial
  Synthetic oligonucleotide
acagagcggacggaaatccgaacttttcccgacctgcgcggctagtgcaggctctc

SEQ ID NO: 264047 - DNA, 56 bp, Artificial
  Synthetic oligonucleotide
ggatcttgccaatgcctagtcctgaacgcatcgtgatcaatacttctcccctgtta

SEQ ID NO: 264048 - DNA, 56 bp, Artificial
  Synthetic oligonucleotide
ctctagatccagccaaattcgcaagcgcccctatgcagatacctgatccacttact

SEQ ID NO: 264049 - DNA, 56 bp, Artificial
  Synthetic oligonucleotide
taggattagattttacggtagttagctcgatgggtagacgatgactcgaccaatca

SEQ ID NO: 264050 - DNA, 56 bp, Artificial
  Synthetic oligonucleotide
cctgcactgctgacgggcagtgtgacactagggaacaacgatgtaatttctgtcgt

SEQ ID NO: 264051 - DNA, 56 bp, Artificial
  Synthetic oligonucleotide
gcaatggcttgctcaggagctgacctacctaggctgcgacattgtcacaggtggtg

SEQ ID NO: 264052 - DNA, 56 bp, Artificial
  Synthetic oligonucleotide
ccgaacttttcccgacctgcgcggctagtgcaggctctcctatgatcaagccgtcc

SEQ ID NO: 264053 - DNA, 56 bp, Artificial
  Synthetic oligonucleotide
acgggcacatttatcgagatggcttacatttatggcggctataccctctcgaaaat

SEQ ID NO: 264054 - DNA, 60 bp, Artificial
  Synthetic oligonucleotide
gactggctctcgcctagtgcgctggcaagctaagaatcaatacacaggcgccatacagcc

SEQ ID NO: 264055 - DNA, 56 bp, Artificial
  Synthetic oligonucleotide
ggggcgtaggggtaatacccaccaacgaatctgggcactgctatcccacacacgca

SEQ ID NO: 264056 - DNA, 53 bp, Artificial
  Synthetic oligonucleotide
acggtttctgccaagggctagagcggttacgggataacgtccctcgccatgtt

SEQ ID NO: 264057 - DNA, 55 bp, Artificial
  Synthetic oligonucleotide
gaccaatacattcgagaaggagtggaggaacttgatcgggggaaactgcctaccc

SEQ ID NO: 264058 - DNA, 52 bp, Artificial
  Synthetic oligonucleotide
ctaaggcacggtaccgtaagcccggtgggtacattttggcgaccgtcattgg

SEQ ID NO: 264059 - DNA, 55 bp, Artificial
  Synthetic oligonucleotide
cgcagttgcaacgtagaaattactcccgatcaatggcaagccctaacacccctgc

SEQ ID NO: 264060 - DNA, 55 bp, Artificial
  Synthetic oligonucleotide
cgacgtcagttagaaggagaggcctaattattcgatactggattatgcttggccc

SEQ ID NO: 264061 - DNA, 55 bp, Artificial
  Synthetic oligonucleotide
cgactaagaagccgttggaatctaaagtggacacttctgactcaatgccggtgga

SEQ ID NO: 264062 - DNA, 55 bp, Artificial
  Synthetic oligonucleotide
cgagactcccttttcgctaagtttgctggataagtaggatctgatactctcataa

SEQ ID NO: 264063 - DNA, 55 bp, Artificial
  Synthetic oligonucleotide
cgcagtgaccgcgagagcaaggttggagcgctcgttgaatttgcagagacggagc

SEQ ID NO: 264064 - DNA, 55 bp, Artificial
  Synthetic oligonucleotide
cgagggtctagtgaatctgttcgccatcgactgagaccctatcatgatcgcctac

SEQ ID NO: 264065 - DNA, 58 bp, Artificial
  Synthetic oligonucleotide
gactttcttaggcgatcccatgacgactagaccgaataagaatttaaaatcagcgagc

SEQ ID NO: 264066 - DNA, 55 bp, Artificial
  Synthetic oligonucleotide
tcgctccaacgatcacaagcggtaatcaaggttccatccgcttttagatcagagg

SEQ ID NO: 264067 - DNA, 55 bp, Artificial
  Synthetic oligonucleotide
cgcagggtttaaggatgtgggcaatgctcgggtgagagccatttggtcttacctg

SEQ ID NO: 264068 - DNA, 55 bp, Artificial
  Synthetic oligonucleotide
cgatcacagagctacagggcggtctcaatgcttggaagcaacggggccttcccac

SEQ ID NO: 264069 - DNA, 55 bp, Artificial
  Synthetic oligonucleotide
cgatcctgtcttactcgcttgccagtgtagctctgatgggatttgtgaccgccat

SEQ ID NO: 264070 - DNA, 54 bp, Artificial
  Synthetic oligonucleotide
cgcaacaacgcgagacgggctgatcggttgaggggtaaggccaaaccaacccca

SEQ ID NO: 264071 - DNA, 55 bp, Artificial
  Synthetic oligonucleotide
cgcaggccacctcatagtttcagtcccgtaatcgggatttagtggttggaaagtc

SEQ ID NO: 264072 - DNA, 55 bp, Artificial
  Synthetic oligonucleotide
cgcactcggcgaaacgtaggtcagaattttccttccgactgactgcagtaacgcc

SEQ ID NO: 264073 - DNA, 55 bp, Artificial
  Synthetic oligonucleotide
cgcaagggttctattaactccgtgttgattgctgtggctcaggtttgccctgatc

SEQ ID NO: 264074 - DNA, 55 bp, Artificial
  Synthetic oligonucleotide
cgcaacgactgaaaccgtcgaaagcgagctaatcgagacggcagcagagaccgcc

SEQ ID NO: 264075 - DNA, 55 bp, Artificial
  Synthetic oligonucleotide
ccgtcctcaagactgactaccagaagctcctttgggcttcgtaagaagccggctc

SEQ ID NO: 264076 - DNA, 60 bp, Artificial
  Synthetic oligonucleotide
cgcggatatcagacatatctaaggtttcgtctccgtacagaacagcatcaaatctccgtt

SEQ ID NO: 264077 - DNA, 55 bp, Artificial
  Synthetic oligonucleotide
tctttgaggctgacctaacgacagcagttgctcagatgagtacggatagctgtga

SEQ ID NO: 264078 - DNA, 55 bp, Artificial
  Synthetic oligonucleotide
ccgtttcacctgctgcccgtgcaaccgctagtacgacgcctgtagcaatgggcgt

SEQ ID NO: 264079 - DNA, 55 bp, Artificial
  Synthetic oligonucleotide
tctggcagcaatctggccgttccataggctctggcattgatctcacacccttgcg

SEQ ID NO: 264080 - DNA, 55 bp, Artificial
  Synthetic oligonucleotide
cctacgtcagtcgagccgccgaggaactacggagccggcaactaacgaccagcta

SEQ ID NO: 264081 - DNA, 55 bp, Artificial
  Synthetic oligonucleotide
cctactttgtgccttacaacccatcttggccgattgtggtggatctaccgaaggg

SEQ ID NO: 264082 - DNA, 55 bp, Artificial
  Synthetic oligonucleotide
cctcagttttgccgcgatgagtggcctgagcacgttgattgattacgcaagcgga

SEQ ID NO: 264083 - DNA, 54 bp, Artificial
  Synthetic oligonucleotide
cctccggctaaccggcaagcctacaccttgagtttcgccgggcattctcttcgg

SEQ ID NO: 264084 - DNA, 55 bp, Artificial
  Synthetic oligonucleotide
cctgacgacaaatctgctaactggacatggtccgatggcccagaagctgtctcag

SEQ ID NO: 264085 - DNA, 55 bp, Artificial
  Synthetic oligonucleotide
cctgacgccacaaatggctcgagataacaaccgcgatcccaactccaccgtgcgc

SEQ ID NO: 264086 - DNA, 55 bp, Artificial
  Synthetic oligonucleotide
cctgagaacggcgtcagcacaggcatttcggctgaagaccgagcccgcacgattc

SEQ ID NO: 264087 - DNA, 60 bp, Artificial
  Synthetic oligonucleotide
cgctggcctgcaagctgtagacagccctgttaacagcagcccacatcagacagccttgga

SEQ ID NO: 264088 - DNA, 55 bp, Artificial
  Synthetic oligonucleotide
cctgcttgggcttctgccatgggtagccatagaacacggcccagttgatggctga

SEQ ID NO: 264089 - DNA, 55 bp, Artificial
  Synthetic oligonucleotide
cctggctgaaacatggatccggcaatgaacttgaccgccaattgagaggtccggg

SEQ ID NO: 264090 - DNA, 55 bp, Artificial
  Synthetic oligonucleotide
ccttaaccacccgcccgttttggtcggtagccctcttgcatgagcagggtcaggc

SEQ ID NO: 264091 - DNA, 55 bp, Artificial
  Synthetic oligonucleotide
ccttaagagaacagaatggttgctctcattgggcgctttcaggtctacactctca

SEQ ID NO: 264092 - DNA, 54 bp, Artificial
  Synthetic oligonucleotide
ccttagaaaggccgtaatcttccatcaacgttttgattaataccccttgtgagc

SEQ ID NO: 264093 - DNA, 55 bp, Artificial
  Synthetic oligonucleotide
ccttgatatctaccccggttggaacgtagcagtgaggatctactcgccgacggag

SEQ ID NO: 264094 - DNA, 55 bp, Artificial
  Synthetic oligonucleotide
tctcacgagcacccttgcggaagtggatgatcacgaagctttcatccggggtcgg

SEQ ID NO: 264095 - DNA, 53 bp, Artificial
  Synthetic oligonucleotide
cgaaccccggctgcgctttgcgggttacaacccaactctgtttaagacgatcg

SEQ ID NO: 264096 - DNA, 55 bp, Artificial
  Synthetic oligonucleotide
tctaatcgcacaacaaaagggctgcaatcgctctagattcagcccttgattgtgt

SEQ ID NO: 264097 - DNA, 55 bp, Artificial
  Synthetic oligonucleotide
cgaacgagattccatgggatctgaacgtactgacagatcgcttagtcagcacgct

SEQ ID NO: 264098 - DNA, 60 bp, Artificial
  Synthetic oligonucleotide
tagcgagctcgacagtagcccgaccgggggcgctctagggatggcgatgtgtatcgatag

SEQ ID NO: 264099 - DNA, 55 bp, Artificial
  Synthetic oligonucleotide
cggattattggtgatttatccgaccgtgagaaagttttgattggccttgatttac

SEQ ID NO: 264100 - DNA, 55 bp, Artificial
  Synthetic oligonucleotide
cgaacggtttggcacacacgaaggtctgatcagctgtaccgcccagatgctcagt

SEQ ID NO: 264101 - DNA, 55 bp, Artificial
  Synthetic oligonucleotide
cgaagcgcacaacctttgtatcaacgaaccaattggcacgccagcagatcccgcg

SEQ ID NO: 264102 - DNA, 55 bp, Artificial
  Synthetic oligonucleotide
tcgttgacgtaataaagcggagtcgtgagggtgtagggcatcgttgggtccggac

SEQ ID NO: 264103 - DNA, 55 bp, Artificial
  Synthetic oligonucleotide
tccccgatgccctcctaggtacaaaagaccgctctatcacttatttaccctggca

SEQ ID NO: 264104 - DNA, 55 bp, Artificial
  Synthetic oligonucleotide
tcccatcatccaaggggaacgggtacccaaagatattgccctcgattatccccat

SEQ ID NO: 264105 - DNA, 55 bp, Artificial
  Synthetic oligonucleotide
cggggcaacctcaaaggccagtcgaagctgcgtcatgtggctcgcaaccaccatg

SEQ ID NO: 264106 - DNA, 55 bp, Artificial
  Synthetic oligonucleotide
tccattgctagttctgtgagacccatgccgacccttgagacgtctgaggtcgccg

SEQ ID NO: 264107 - DNA, 55 bp, Artificial
  Synthetic oligonucleotide
tccaattgccggagggtctgaccagaggggccacctgcgagagcaagagcggctt

SEQ ID NO: 264108 - DNA, 55 bp, Artificial
  Synthetic oligonucleotide
cggtgacccagaataaggctaagagtacatccaggggaatattcgccacggtctc

SEQ ID NO: 264109 - DNA, 55 bp, Artificial
  Synthetic oligonucleotide
cggtgctttactcagcctagactgcagatcgtctaggtggtagcacagccgaacg

SEQ ID NO: 264110 - DNA, 57 bp, Artificial
  Synthetic oligonucleotide
tcctaggcaagcttgaccggaaattggaatacaaggggcgctttggatcgcgggata

SEQ ID NO: 264111 - DNA, 54 bp, Artificial
  Synthetic oligonucleotide
cggtgggacgtgttggttccgagttgttcagggaggatccgctcaagggtcctg

SEQ ID NO: 264112 - DNA, 55 bp, Artificial
  Synthetic oligonucleotide
cggtgtagcgcccctctgaattgaagcttgggccacagcggtaaatggcatgagg

SEQ ID NO: 264113 - DNA, 55 bp, Artificial
  Synthetic oligonucleotide
cggttggagagcttgctagtgatggttctcaaggagggagtgtcgcggttgcttc

SEQ ID NO: 264114 - DNA, 54 bp, Artificial
  Synthetic oligonucleotide
cgtaaccagggcaaaccacatgccgttacccacacccctgaggtagtgacgagg

SEQ ID NO: 264115 - DNA, 55 bp, Artificial
  Synthetic oligonucleotide
cgtcagcccttctggcagtgcctcatgagccgttgggccatcgaagtcaactgcg

SEQ ID NO: 264116 - DNA, 55 bp, Artificial
  Synthetic oligonucleotide
cgtcagtgtgattccgtgatccctcacgagggacatcagggattgctcgggcttg

SEQ ID NO: 264117 - DNA, 55 bp, Artificial
  Synthetic oligonucleotide
cgtcctgataggaattcatctccatggggccggttgggaaacgcccggatggtag

SEQ ID NO: 264118 - DNA, 55 bp, Artificial
  Synthetic oligonucleotide
cgtcgtacggccttagatcatgcgcctattgctggcttagaaggcctgctacact

SEQ ID NO: 264119 - DNA, 54 bp, Artificial
  Synthetic oligonucleotide
cgtcgtcttgtaatctccatacggtgttggattgtccggcgaaaacgttcctag

SEQ ID NO: 264120 - DNA, 55 bp, Artificial
  Synthetic oligonucleotide
cgtctaaggatttaccggttagaggttcagattagcttgatacaatcactggcac

SEQ ID NO: 264121 - DNA, 60 bp, Artificial
  Synthetic oligonucleotide
tccgggcccgagcttcccatatggggatagccagcatagttattccattacattcgatgt

SEQ ID NO: 264122 - DNA, 55 bp, Artificial
  Synthetic oligonucleotide
tcatatagatatagctctgtatgttggcagagatgagtctaagctcttcgacaag

SEQ ID NO: 264123 - DNA, 55 bp, Artificial
  Synthetic oligonucleotide
cgtgccgatactcatcttatgcatccgagagattcgagcgtctgtaaccttatag

SEQ ID NO: 264124 - DNA, 55 bp, Artificial
  Synthetic oligonucleotide
cgtgctcatgttggtatgaatgctaacgcctaggatgccatttgctcccaaacgt

SEQ ID NO: 264125 - DNA, 55 bp, Artificial
  Synthetic oligonucleotide
cgtggcctagaagcgctcaccagagctaagaaggggagttcatggagattgcagt

SEQ ID NO: 264126 - DNA, 55 bp, Artificial
  Synthetic oligonucleotide
cgtggggcgatagcgattacggcggggacagctcagctgttgcaagtgacttgac

SEQ ID NO: 264127 - DNA, 55 bp, Artificial
  Synthetic oligonucleotide
cgtgttttacgacattgcttggtatctgggatttgaaatcctaacgggagacgaa

SEQ ID NO: 264128 - DNA, 55 bp, Artificial
  Synthetic oligonucleotide
tcgataatcctaggggaaccgtatcagacaggcaacagcgaatcacctggcgtgc

SEQ ID NO: 264129 - DNA, 55 bp, Artificial
  Synthetic oligonucleotide
cgccacgtcctttgattcgggcgatgattcgggtgattaagccgcagcttgggga

SEQ ID NO: 264130 - DNA, 55 bp, Artificial
  Synthetic oligonucleotide
tcgagacgcaattcgtgaggcccagactagcgcactcgtgggccccagtgtggtt

SEQ ID NO: 264131 - DNA, 55 bp, Artificial
  Synthetic oligonucleotide
cgccgctggcaaactgaagttccctcactagttccaactggactgttttgactgc

SEQ ID NO: 264132 - DNA, 60 bp, Artificial
  Synthetic oligonucleotide
agcattgcaagtatccctttggggggtgccatttgatctttgcaatggcgatagtataat

SEQ ID NO: 264133 - DNA, 53 bp, Artificial
  Synthetic oligonucleotide
cgcctaggccagaagtatccacgcgtttccccttttgggcggacacctcgtag

SEQ ID NO: 264134 - DNA, 55 bp, Artificial
  Synthetic oligonucleotide
cgcctgctagcaatcccggcgatgtgttcatccgatacaagtaggcgcgctgttc

SEQ ID NO: 264135 - DNA, 55 bp, Artificial
  Synthetic oligonucleotide
cgcgcggtgaggtgagtccagcgcgattattcgacagatcgatgttggattcggg

SEQ ID NO: 264136 - DNA, 55 bp, Artificial
  Synthetic oligonucleotide
tcgacgcaatgttaccgtcactccctgccattgttgtatgccccatgggaaacga

SEQ ID NO: 264137 - DNA, 55 bp, Artificial
  Synthetic oligonucleotide
cgcggttcgagcgtcccatccaagggatacactgagcctgttcctgtgaaagatc

SEQ ID NO: 264138 - DNA, 55 bp, Artificial
  Synthetic oligonucleotide
cgctacatccaattcgcgatcatgcttgaactttgcagacacccaaaatcccatc

SEQ ID NO: 264139 - DNA, 55 bp, Artificial
  Synthetic oligonucleotide
cgctcactttggtgagcctgataccccttcggtgctgcccatgacgcatgatccg

SEQ ID NO: 264140 - DNA, 55 bp, Artificial
  Synthetic oligonucleotide
cgctggattcttagctgacgacccttctcaaaagggctggtgattaggtcgtgaa

SEQ ID NO: 264141 - DNA, 55 bp, Artificial
  Synthetic oligonucleotide
tcctcggtgccttgggtttgagtccccaggaaattgtccaaatccaggtcaatgg

SEQ ID NO: 264142 - DNA, 54 bp, Artificial
  Synthetic oligonucleotide
cggaacgtctacccaaactcggattaaccgcggccttggctcacctgcagggga

SEQ ID NO: 264143 - DNA, 56 bp, Artificial
  Synthetic oligonucleotide
cgggaaaacagaatggttagggaaaatcgttaagctcgcccaagatgattgcgctc

SEQ ID NO: 264144 - DNA, 55 bp, Artificial
  Synthetic oligonucleotide
cggatctgtctgagctgaagaccgacgtcaaagaggtgcgatcgtcactagctga

SEQ ID NO: 264145 - DNA, 55 bp, Artificial
  Synthetic oligonucleotide
cggatgccgaaggtcaaaccttattcaacctgcggtcgactgaaactctacagtc

SEQ ID NO: 264146 - DNA, 55 bp, Artificial
  Synthetic oligonucleotide
tcctatcacttcgagttcatacttggaactactgactgcaggcgtacaagtcagg

SEQ ID NO: 264147 - DNA, 55 bp, Artificial
  Synthetic oligonucleotide
cggattggggacttcgttagcaagcacctcctatttagccctcgtcattgatcgc

SEQ ID NO: 264148 - DNA, 55 bp, Artificial
  Synthetic oligonucleotide
cggcactgagatgcgatagggcatatagagagagctgaggttaccactctgcgct

SEQ ID NO: 264149 - DNA, 55 bp, Artificial
  Synthetic oligonucleotide
tccctttcttggctgacggggagtcagttcagcgtttgacgggtgacttgacctc

SEQ ID NO: 264150 - DNA, 55 bp, Artificial
  Synthetic oligonucleotide
cggcgcccctgcatgggacccctagccatcagacacgtttgatgacccggtttca

SEQ ID NO: 264151 - DNA, 55 bp, Artificial
  Synthetic oligonucleotide
cggcgcgagttagtgccttgtctaatctgctgagttctagttggtcgtgcatcac

SEQ ID NO: 264152 - DNA, 55 bp, Artificial
  Synthetic oligonucleotide
cggcgggcgttccatgcgattttctcgaactacccacctgaggtagaccgccagc

SEQ ID NO: 264153 - DNA, 57 bp, Artificial
  Synthetic oligonucleotide
agcacttcagacgaccagacaaagtcatcgtcaaaggttagcccttggggggctgag

SEQ ID NO: 264154 - DNA, 55 bp, Artificial
  Synthetic oligonucleotide
cggcttacctctgctgactcgtaaactcccctgatctgccctcccggagacggtt

SEQ ID NO: 264155 - DNA, 55 bp, Artificial
  Synthetic oligonucleotide
ttcctccagtaaaccaatattacaaaggtctttcaccaatctattcgcattggga

SEQ ID NO: 264156 - DNA, 55 bp, Artificial
  Synthetic oligonucleotide
cagcatgacttgtctaagcgggagctagagattgtggagctagtagcagcaggac

SEQ ID NO: 264157 - DNA, 55 bp, Artificial
  Synthetic oligonucleotide
cagccagggaactacattgatcagcatgggaacccagtttatcgacaggccggac

SEQ ID NO: 264158 - DNA, 55 bp, Artificial
  Synthetic oligonucleotide
cagccccaacgagtccgttctggggcatggagtggtggattagcactctggaacg

SEQ ID NO: 264159 - DNA, 55 bp, Artificial
  Synthetic oligonucleotide
cagcgagtagtgctctaacgagttgctgaacactttccggcgtttgttcccaatc

SEQ ID NO: 264160 - DNA, 55 bp, Artificial
  Synthetic oligonucleotide
cagcgctttacttaagcagggtataagtcaaacgcaaattgctaggtgagtacag

SEQ ID NO: 264161 - DNA, 55 bp, Artificial
  Synthetic oligonucleotide
ttccccgccgggaaactgcccaagatctataacgctcttcgcatcgaggggaaaa

SEQ ID NO: 264162 - DNA, 55 bp, Artificial
  Synthetic oligonucleotide
ttccacctggaacgaatccccgtagtagtgaccaaacttctgaagcgcctcgatt

SEQ ID NO: 264163 - DNA, 55 bp, Artificial
  Synthetic oligonucleotide
cagcggagaagtgagggcgccaatgcgggttgtggccccgatgagggtaaagcgt

SEQ ID NO: 264164 - DNA, 54 bp, Artificial
  Synthetic oligonucleotide
cggtactgggaaccagcatcaacatcaagggcaaaaaaccacgtttctttggta

SEQ ID NO: 264165 - DNA, 55 bp, Artificial
  Synthetic oligonucleotide
ttaggcagcgagctggcgcaagacgaccaagccaggttcccgcttgagctccgtt

SEQ ID NO: 264166 - DNA, 55 bp, Artificial
  Synthetic oligonucleotide
cagctgacttcagctcaccgatatacgcgtgctgaatatagttctcgacgtctgc

SEQ ID NO: 264167 - DNA, 55 bp, Artificial
  Synthetic oligonucleotide
caggagaggatccgataagaacgaaagccccagtgccaagagctaacttgagggg

SEQ ID NO: 264168 - DNA, 55 bp, Artificial
  Synthetic oligonucleotide
ttacaaggtcgatattcaggtcactagcacgtgtattacccatgcgtataacttg

SEQ ID NO: 264169 - DNA, 55 bp, Artificial
  Synthetic oligonucleotide
cagggaacgctgtcgtatcagatcgacaacaacctcagtctttcggggtcggtcg

SEQ ID NO: 264170 - DNA, 55 bp, Artificial
  Synthetic oligonucleotide
caggggaaatgacgagccaaggctgggttccatgcctagacctaaatcaactttt

SEQ ID NO: 264171 - DNA, 55 bp, Artificial
  Synthetic oligonucleotide
caggtgaagagaaacgactacggtagctacggttacctagtcttcgctagaggcg

SEQ ID NO: 264172 - DNA, 55 bp, Artificial
  Synthetic oligonucleotide
tgtcaaccgcaatcttgagccctaccgcgggtaccatcgcttgatgcgttctctt

SEQ ID NO: 264173 - DNA, 55 bp, Artificial
  Synthetic oligonucleotide
cagtcagccagtaccgagacggtaacttaatcgatagtagaaaccatacctacaa

SEQ ID NO: 264174 - DNA, 55 bp, Artificial
  Synthetic oligonucleotide
tgtatcgcatgccctctacaccattgatctgtcgttcaatgatggaagttacccc

SEQ ID NO: 264175 - DNA, 57 bp, Artificial
  Synthetic oligonucleotide
tccataaccgaaacatcgtggacttaagtcaactatccgccactgccctaccggcga

SEQ ID NO: 264176 - DNA, 55 bp, Artificial
  Synthetic oligonucleotide
catatcgaaactatcggcgagagagtgggccggatccgtactcagaactaaggtc

SEQ ID NO: 264177 - DNA, 55 bp, Artificial
  Synthetic oligonucleotide
catcacgcgtgagatcccaaccctttaaaggctgcaaagtcaactgagacgcccg

SEQ ID NO: 264178 - DNA, 55 bp, Artificial
  Synthetic oligonucleotide
tgtaagccgctcggcctaccagccctacatgcttgatctctgcgagtccttgccg

SEQ ID NO: 264179 - DNA, 55 bp, Artificial
  Synthetic oligonucleotide
catgcggttcccacaggaaccaccccgatcgcctagagcggcagcaactaggatc

SEQ ID NO: 264180 - DNA, 55 bp, Artificial
  Synthetic oligonucleotide
catggtctacaccacattcagtggttgtgcatgtgtcaagacctacagatagcgg

SEQ ID NO: 264181 - DNA, 55 bp, Artificial
  Synthetic oligonucleotide
tggtttttcatcgtacctgtacgagattcctgcgccccatatcgttttgttcgga

SEQ ID NO: 264182 - DNA, 55 bp, Artificial
  Synthetic oligonucleotide
tttttgaccatgattactctggaaaccctaacccattggctcaacgaagcaaccg

SEQ ID NO: 264183 - DNA, 55 bp, Artificial
  Synthetic oligonucleotide
caacgttggatcgacgcatgaatgtggttcagcttcctaaccttgcgcccaatac

SEQ ID NO: 264184 - DNA, 55 bp, Artificial
  Synthetic oligonucleotide
caagcaccaccaatcccttaatagtgattgagagaacgtctgccttcagtcgtta

SEQ ID NO: 264185 - DNA, 55 bp, Artificial
  Synthetic oligonucleotide
ttttgcacaccaagactttaccaacatgacccaaacagatcgaattagagcctgc

SEQ ID NO: 264186 - DNA, 60 bp, Artificial
  Synthetic oligonucleotide
agactttgcgattaacagtgatggataacatcagtgaatattttggagtgcagcgctggg

SEQ ID NO: 264187 - DNA, 55 bp, Artificial
  Synthetic oligonucleotide
caagccacgtaggaccaaactacacatggcacggaccacgggcatgcttctgccc

SEQ ID NO: 264188 - DNA, 55 bp, Artificial
  Synthetic oligonucleotide
caagccggcagtcacgtcagccttcccctgttgtaggcacagcactttggattgc

SEQ ID NO: 264189 - DNA, 55 bp, Artificial
  Synthetic oligonucleotide
tttggatggatcagttgtgctgaatcaagcggttcgtgaccagggagcatcgttg

SEQ ID NO: 264190 - DNA, 55 bp, Artificial
  Synthetic oligonucleotide
caaggtggcacagtcactgtattaacgctaccgaatgaaaatgagatcaaagcgc

SEQ ID NO: 264191 - DNA, 55 bp, Artificial
  Synthetic oligonucleotide
caataatatgggcaatgcggggcgtaatggtggggaatattacacgccacgtcct

SEQ ID NO: 264192 - DNA, 55 bp, Artificial
  Synthetic oligonucleotide
caatccgtgattatctcagacttgcgtgcctaaggtcaaagatgcttagaactat

SEQ ID NO: 264193 - DNA, 55 bp, Artificial
  Synthetic oligonucleotide
caatcggctagatcatggcatggacaggtgaacggattgataacgacttctggtg

SEQ ID NO: 264194 - DNA, 55 bp, Artificial
  Synthetic oligonucleotide
cacaaagatttaaggttctggtgttagccggagtgcgctttggtcctgattcgtt

SEQ ID NO: 264195 - DNA, 55 bp, Artificial
  Synthetic oligonucleotide
ttggtggtcggtgcctgttccgcgggctctaacctgcgggcctacagggatccca

SEQ ID NO: 264196 - DNA, 55 bp, Artificial
  Synthetic oligonucleotide
ttgccgcccaccagagattacgggaattatcgtcgcttgcgtgactgcggtagcc

SEQ ID NO: 264197 - DNA, 60 bp, Artificial
  Synthetic oligonucleotide
tcacttgggcgtacccggatgagtacggcgggctgtacaaccaggctggcgctatgataa

SEQ ID NO: 264198 - DNA, 55 bp, Artificial
  Synthetic oligonucleotide
cacagcgggcgacttaagacctctcttcagccactggtttgacacacgcatcggg

SEQ ID NO: 264199 - DNA, 55 bp, Artificial
  Synthetic oligonucleotide
caccacccgcgtcggtgtaagtccccaatcgtttcgacaaggtcctctgcaggcg

SEQ ID NO: 264200 - DNA, 55 bp, Artificial
  Synthetic oligonucleotide
cacgttgccagatggagttttggcctataagggttggctggacgatggttcgctg

SEQ ID NO: 264201 - DNA, 55 bp, Artificial
  Synthetic oligonucleotide
ttgccacggatcgaccagtagcccgacacatagcaatgggtttcagcggagaccg

SEQ ID NO: 264202 - DNA, 55 bp, Artificial
  Synthetic oligonucleotide
cactgacttaagtagcgatcgccattataggcggattgtcgtcacttctgacccc

SEQ ID NO: 264203 - DNA, 55 bp, Artificial
  Synthetic oligonucleotide
cactggtgttcggagccctgatgctcacgatgctctattggtcgggtatgccgat

SEQ ID NO: 264204 - DNA, 55 bp, Artificial
  Synthetic oligonucleotide
ttctggatcgctctctaaagacgccccatacgcttcaagaccccgaattaaatcg

SEQ ID NO: 264205 - DNA, 55 bp, Artificial
  Synthetic oligonucleotide
cagaacgctgcaatcattccagcctagcggtacggagggcagacccgacgcaggt

SEQ ID NO: 264206 - DNA, 55 bp, Artificial
  Synthetic oligonucleotide
cagaccaatagagcatcgtgagcattagggctccgaacacaagcgatgtgccgag

SEQ ID NO: 264207 - DNA, 55 bp, Artificial
  Synthetic oligonucleotide
ttctccctaaagcagccggctcgtaacgcccgtctcgcttagagtggcttaactc

SEQ ID NO: 264208 - DNA, 57 bp, Artificial
  Synthetic oligonucleotide
tagatttgcttatagagttgactgttatcgggacttgtttcagtcccgtaatcggga

SEQ ID NO: 264209 - DNA, 56 bp, Artificial
  Synthetic oligonucleotide
ctacaactgtcccttccgtgacgaaaggagtcatctaagttacggatgtgactacc

SEQ ID NO: 264210 - DNA, 55 bp, Artificial
  Synthetic oligonucleotide
cagagcgctatccgtaatggctacttagattagatattcgtatagacggaccgtt

SEQ ID NO: 264211 - DNA, 55 bp, Artificial
  Synthetic oligonucleotide
ccccttgacacctgacacctctgtgaacgctgcgtcacgctgctatcaatgaccg

SEQ ID NO: 264212 - DNA, 55 bp, Artificial
  Synthetic oligonucleotide
cccgagtcgttcgcttgtaccagtgatgatttgagccctggaacgtaattgctca

SEQ ID NO: 264213 - DNA, 55 bp, Artificial
  Synthetic oligonucleotide
cccggtcgctatagtctgggttatctatggttctctgaatccattctggcttgat

SEQ ID NO: 264214 - DNA, 55 bp, Artificial
  Synthetic oligonucleotide
cccgtacatgtcttgtccctttcgtctagaaggcattccaccaatcgtggtactc

SEQ ID NO: 264215 - DNA, 55 bp, Artificial
  Synthetic oligonucleotide
ccctatgatgcggtaatacttaactgtcgcgaggtcagttctatggcgtacgcag

SEQ ID NO: 264216 - DNA, 55 bp, Artificial
  Synthetic oligonucleotide
ccctatgccaactactgggcatttcggtgccaaccactgaggccacgtaggtctc

SEQ ID NO: 264217 - DNA, 55 bp, Artificial
  Synthetic oligonucleotide
tgcattcgcgaccactcaattaactatgcgcactcaagacgccacaacctagaca

SEQ ID NO: 264218 - DNA, 54 bp, Artificial
  Synthetic oligonucleotide
ccctcaaagcggtattgggactacgttatcgagcaaaggaagatcgttggggta

SEQ ID NO: 264219 - DNA, 55 bp, Artificial
  Synthetic oligonucleotide
ccctcagatcgaactaacgccagcaccgatcaacctgcgcagtcgggtgcatgac

SEQ ID NO: 264220 - DNA, 60 bp, Artificial
  Synthetic oligonucleotide
agacgtctccgtcagtaggttgcagctccgatggaagcacatcgtcaaatcgtgcaagtg

SEQ ID NO: 264221 - DNA, 55 bp, Artificial
  Synthetic oligonucleotide
ccctcgattcttatctttgactgcgagtttacggctcctgcacctttgcccgccg

SEQ ID NO: 264222 - DNA, 55 bp, Artificial
  Synthetic oligonucleotide
ccctgaaagtgcttaaccatccaagctaggctggcaccagctttcaattcgtagc

SEQ ID NO: 264223 - DNA, 55 bp, Artificial
  Synthetic oligonucleotide
cccttcgctatgatgtcgataactattcgcgctcgataatctcatggacggtctg

SEQ ID NO: 264224 - DNA, 54 bp, Artificial
  Synthetic oligonucleotide
cccttgtgggtcgattacgaaacattttatatcccgcattaacgatttcggcga

SEQ ID NO: 264225 - DNA, 55 bp, Artificial
  Synthetic oligonucleotide
ccgactgatcgatcggggtggtcttcgctaacacccgaatgtcagccagatgaca

SEQ ID NO: 264226 - DNA, 55 bp, Artificial
  Synthetic oligonucleotide
ccgatctggtcacatccccgtggaacccgtaacccgcccgtacatggttcagaca

SEQ ID NO: 264227 - DNA, 55 bp, Artificial
  Synthetic oligonucleotide
ccgatgtcctggtcgtcaggagtggggcagccatcggatcctctatggccatgtg

SEQ ID NO: 264228 - DNA, 55 bp, Artificial
  Synthetic oligonucleotide
ccgcacgacaccatctggtctctggtctgcggcgtataggtcacaaacgagaagc

SEQ ID NO: 264229 - DNA, 55 bp, Artificial
  Synthetic oligonucleotide
tgatcgtgtgccatgcagcggctccattgaccagaacagcactggggccttctca

SEQ ID NO: 264230 - DNA, 55 bp, Artificial
  Synthetic oligonucleotide
tgagcgtgctttgcacttgaacgagaaccagttcaaccgttgcgtctgccacgca

SEQ ID NO: 264231 - DNA, 56 bp, Artificial
  Synthetic oligonucleotide
ctacccaattcaaatcgtgttttacgacattgcttggtatctgggatttgaaatcc

SEQ ID NO: 264232 - DNA, 55 bp, Artificial
  Synthetic oligonucleotide
ccgctacaagcaccgcaagcccttagcagtctgggagatggataatctcaccgat

SEQ ID NO: 264233 - DNA, 55 bp, Artificial
  Synthetic oligonucleotide
ccgctgaaaatcaggggatagctgctttaaggtaatttccatagccaaggacttg

SEQ ID NO: 264234 - DNA, 55 bp, Artificial
  Synthetic oligonucleotide
tctttgccagcgtgtcagaagcagccgctctgtgatgcatctctctccccaggag

SEQ ID NO: 264235 - DNA, 53 bp, Artificial
  Synthetic oligonucleotide
ccggaaattggaatacaaggggcgctttggatcgcgggataaccgtcagcggg

SEQ ID NO: 264236 - DNA, 55 bp, Artificial
  Synthetic oligonucleotide
ccggctttggcgatgacactgcctgaggcttctaaatcgtgcaaccagtcccatt

SEQ ID NO: 264237 - DNA, 55 bp, Artificial
  Synthetic oligonucleotide
ccgtcacaacacgagagagaggggcgacccataagatccccaggttaagcgtccg

SEQ ID NO: 264238 - DNA, 55 bp, Artificial
  Synthetic oligonucleotide
tgggctaggtcagaagactgatgggcgcccctgagcaccatcgacgggaatgtgg

SEQ ID NO: 264239 - DNA, 55 bp, Artificial
  Synthetic oligonucleotide
tgggatcgagctccataccgatgcggcctccgcgtttcgggctctgcagcaagcc

SEQ ID NO: 264240 - DNA, 55 bp, Artificial
  Synthetic oligonucleotide
ccaacaaaaggcctcaagccatcaaacggaactcacccaaagcttcaaggcatgc

SEQ ID NO: 264241 - DNA, 55 bp, Artificial
  Synthetic oligonucleotide
ccaagggcttaaatcacaagttccgcccagctcgattttggctgttgcgactgga

SEQ ID NO: 264242 - DNA, 60 bp, Artificial
  Synthetic oligonucleotide
ctacgctgtcatgttgggcaagacttccgaggatctcactgaccatttgagcttgatagg

SEQ ID NO: 264243 - DNA, 55 bp, Artificial
  Synthetic oligonucleotide
tggcctaatgatgggacctagaatgtctagagagacagtgttctgtggtaaggcc

SEQ ID NO: 264244 - DNA, 55 bp, Artificial
  Synthetic oligonucleotide
tggagtttctgcccgatgctgaccttacgaactgtggctgacctgctgcaaactc

SEQ ID NO: 264245 - DNA, 55 bp, Artificial
  Synthetic oligonucleotide
ccaccacgcgcatgtgcgtgttcgagatgatttatttcgctaggccggacagtcg

SEQ ID NO: 264246 - DNA, 55 bp, Artificial
  Synthetic oligonucleotide
ccacgcagttaggcctgcatcacattgagaccgcgcgtcactacggcagctccga

SEQ ID NO: 264247 - DNA, 55 bp, Artificial
  Synthetic oligonucleotide
ccacggcgacatcgccttaagccatccgattccatgactcgaagcctgttccgac

SEQ ID NO: 264248 - DNA, 55 bp, Artificial
  Synthetic oligonucleotide
ccagagcgccaccggtagcatcagtaacacggctagcaatcattggaatcagctc

SEQ ID NO: 264249 - DNA, 55 bp, Artificial
  Synthetic oligonucleotide
ccagcagtggttcggtggggaccgccacaacgcgccaaatcccttggctgagatc

SEQ ID NO: 264250 - DNA, 55 bp, Artificial
  Synthetic oligonucleotide
ccagtacaggggagctgataatagcaaggggactggaggacaaccatgtcggtgc

SEQ ID NO: 264251 - DNA, 55 bp, Artificial
  Synthetic oligonucleotide
ccagttctgtcttgctgcagtcagtttagaaggccacttgcaccccgcagagaca

SEQ ID NO: 264252 - DNA, 55 bp, Artificial
  Synthetic oligonucleotide
tgctgtttgagatgtgctcctaaagccattagctcctcttcgtaggttgtaacca

SEQ ID NO: 264253 - DNA, 60 bp, Artificial
  Synthetic oligonucleotide
ctatggttgtattgactcgctgaatgcaattttgcccctgtacgatattgtgctctgctc

SEQ ID NO: 264254 - DNA, 55 bp, Artificial
  Synthetic oligonucleotide
ccatgctcagtgtgccccgtgccatcaggtgagcttctaaccaggagccggaagc

SEQ ID NO: 264255 - DNA, 55 bp, Artificial
  Synthetic oligonucleotide
tgctgcgtttaaggcgtatcgagattgtctctcgggatggaatggtcctctgtta

SEQ ID NO: 264256 - DNA, 55 bp, Artificial
  Synthetic oligonucleotide
cccaagcacgattccagaaaatgaggagtaccaattagaagtcgcactagtcctg

SEQ ID NO: 264257 - DNA, 55 bp, Artificial
  Synthetic oligonucleotide
cccaagcccaatgcgaagtctgtgccgttagccttagcgatgtagagcaagctgt

SEQ ID NO: 264258 - DNA, 55 bp, Artificial
  Synthetic oligonucleotide
cccaatcgaatggtgagtaccgccttcgaaactgggatcgctcgccgttgggtgc

SEQ ID NO: 264259 - DNA, 55 bp, Artificial
  Synthetic oligonucleotide
cccaccagtaaataggtggagagggtaagcatctccagcaggaaatagctctgga

SEQ ID NO: 264260 - DNA, 55 bp, Artificial
  Synthetic oligonucleotide
tgcgtttggctactcataggtcgccgatctccctatggcttcccatgagcttcgc

SEQ ID NO: 264261 - DNA, 55 bp, Artificial
  Synthetic oligonucleotide
cccagcaaagagtcccgagatctggatcaacttggacagtagcaaagtaagtagg

SEQ ID NO: 264262 - DNA, 55 bp, Artificial
  Synthetic oligonucleotide
ccccatgcggccctgattgaagcaaattccacaactgcagtcctgggtagcctca

SEQ ID NO: 264263 - DNA, 54 bp, Artificial
  Synthetic oligonucleotide
ccccgagtttcggttagaccagtgctacaaagtccaacaatcactgggttcgac

SEQ ID NO: 264264 - DNA, 58 bp, Artificial
  Synthetic oligonucleotide
gcggcaaggtagcgataccgggaaaggtggcccacttcaatgagctgcttaatcgttg

SEQ ID NO: 264265 - DNA, 55 bp, Artificial
  Synthetic oligonucleotide
tgcccgcacagggtgacttttgactattactcaccctccgatagcgcaacgttgc

SEQ ID NO: 264266 - DNA, 55 bp, Artificial
  Synthetic oligonucleotide
gcggtcgcgttttccgtattcataggcctgcgcatgagtcgattagatacagaac

SEQ ID NO: 264267 - DNA, 55 bp, Artificial
  Synthetic oligonucleotide
gcgtacccggtgttactttggccatctgcgtctgcggaatctcgaccgctagctc

SEQ ID NO: 264268 - DNA, 55 bp, Artificial
  Synthetic oligonucleotide
gcgtatcggaagaaacttataaacagtggacaagacgggcaaaacctcagtcagg

SEQ ID NO: 264269 - DNA, 55 bp, Artificial
  Synthetic oligonucleotide
gcgtatgggcaggcaacttcgccatttgcccgaacgtgatcaacaggtgttgcag

SEQ ID NO: 264270 - DNA, 55 bp, Artificial
  Synthetic oligonucleotide
gcgtcaccggtctgatccgaaatcagcggttcttgcgcacgaagctcgaaggcct

SEQ ID NO: 264271 - DNA, 55 bp, Artificial
  Synthetic oligonucleotide
gtaagcgaggaatcatctaccgaggggtcatctatgcagggctaatgctcactgc

SEQ ID NO: 264272 - DNA, 55 bp, Artificial
  Synthetic oligonucleotide
gctaccaattgggcaagacagccggatttggatatctagcagcctcagcctagat

SEQ ID NO: 264273 - DNA, 55 bp, Artificial
  Synthetic oligonucleotide
gctacgaacagatccgggatcaccgctacgagtggtttggccgccgtaacacccc

SEQ ID NO: 264274 - DNA, 55 bp, Artificial
  Synthetic oligonucleotide
gctacggcgttgagaaggccggatccaacgtgaaggtgaaatgcccggttctcga

SEQ ID NO: 264275 - DNA, 59 bp, Artificial
  Synthetic oligonucleotide
gtacgcccgagctttctgctctttcagtgtggtttgccgctaggaacgattcgagcggc

SEQ ID NO: 264276 - DNA, 55 bp, Artificial
  Synthetic oligonucleotide
ggttgggaactacagatagctggactagatgatcccatccaaacgcctcaaacgg

SEQ ID NO: 264277 - DNA, 55 bp, Artificial
  Synthetic oligonucleotide
gctcgatttgatgaggtgtcaaaacgtaattgggttcctgatctagggcctcacg

SEQ ID NO: 264278 - DNA, 55 bp, Artificial
  Synthetic oligonucleotide
ggttgccgaagttgagctgctccatcgagaagactttgttctcggtagggtgaat

SEQ ID NO: 264279 - DNA, 55 bp, Artificial
  Synthetic oligonucleotide
gctcggtcgatgtgaacgtagtggattctagcaaggtaggtgtcggcaacatgat

SEQ ID NO: 264280 - DNA, 55 bp, Artificial
  Synthetic oligonucleotide
gctctacgttaactgtggcagtactcgctagctcttgacggctaccatcgcggcg

SEQ ID NO: 264281 - DNA, 55 bp, Artificial
  Synthetic oligonucleotide
gctgatccagtccgtcaatcctttcgacgttcgcacccaagtgcgacctgaagaa

SEQ ID NO: 264282 - DNA, 53 bp, Artificial
  Synthetic oligonucleotide
ggttccaagaaccatcgcgaaccgggttcgacaggcgccggcacaacaccggg

SEQ ID NO: 264283 - DNA, 55 bp, Artificial
  Synthetic oligonucleotide
gctgcgtgggatgagtaggtgtcctttgcaaacacgctcactccggatgggctta

SEQ ID NO: 264284 - DNA, 55 bp, Artificial
  Synthetic oligonucleotide
gctggcagaatttcaccagtactgcgccaccaacgctgactcaaatcaagagtcc

SEQ ID NO: 264285 - DNA, 55 bp, Artificial
  Synthetic oligonucleotide
gctgtgatgagacttagacgccggacgctgtcgagatccgaacgatcggacggtg

SEQ ID NO: 264286 - DNA, 57 bp, Artificial
  Synthetic oligonucleotide
gcggcacagctgaggtctatcttgctcccgaccaactccaagtttttcgacgggagg

SEQ ID NO: 264287 - DNA, 55 bp, Artificial
  Synthetic oligonucleotide
gcttcgatcgcctcaagcggcagttcagcaatcgcctcattcggcacgacttggt

SEQ ID NO: 264288 - DNA, 55 bp, Artificial
  Synthetic oligonucleotide
gcttggtatgcgaacgattcagcccactggacgagattggtatcgagtttggaag

SEQ ID NO: 264289 - DNA, 55 bp, Artificial
  Synthetic oligonucleotide
ggtgccaggtgttcccaatgcgagataggtctcacgaagaccattcaaacaacga

SEQ ID NO: 264290 - DNA, 55 bp, Artificial
  Synthetic oligonucleotide
ggacagctcccggctcagatctggttggacaacgacgccaaagaacgatggaagg

SEQ ID NO: 264291 - DNA, 55 bp, Artificial
  Synthetic oligonucleotide
ggaccacccaactgataaattggcgaattgacgacaggtcgggcgccgacaatcc

SEQ ID NO: 264292 - DNA, 55 bp, Artificial
  Synthetic oligonucleotide
gcccctattaagcaccaagggttgcgggcgatcaataaaagccgctccgccctta

SEQ ID NO: 264293 - DNA, 55 bp, Artificial
  Synthetic oligonucleotide
gcccgattcagttcggccaagtcactgctgccagaccacaacgcttcagggctgc

SEQ ID NO: 264294 - DNA, 55 bp, Artificial
  Synthetic oligonucleotide
gcccttgctcaggagaagttcaactaagcgatactcaggctgttttcacgaataa

SEQ ID NO: 264295 - DNA, 55 bp, Artificial
  Synthetic oligonucleotide
gccgacgaaaccgcagacctacagcgggaattacggagtgcttcagcccgacagg

SEQ ID NO: 264296 - DNA, 55 bp, Artificial
  Synthetic oligonucleotide
gccgagaggcgagagcgcaggtcacggtctgatgaggcgagagctttgttgtgtc

SEQ ID NO: 264297 - DNA, 60 bp, Artificial
  Synthetic oligonucleotide
gcgtgtcccaccgatcgcaatcttcaaggctggtagatcgggctcttgtttcaatcgaga

SEQ ID NO: 264298 - DNA, 55 bp, Artificial
  Synthetic oligonucleotide
gtccacgcactaacaccgtgtgaaagcgctctgccgggatagcagctggtcgcca

SEQ ID NO: 264299 - DNA, 55 bp, Artificial
  Synthetic oligonucleotide
gccgtgcagtcctgacgcccctcctgaagccccaagacacgggcttggcgggcgt

SEQ ID NO: 264300 - DNA, 55 bp, Artificial
  Synthetic oligonucleotide
gtcagtatctatcacttgatagcgtaaacatcacgtccgccgttgagtgcaaaac

SEQ ID NO: 264301 - DNA, 55 bp, Artificial
  Synthetic oligonucleotide
gcctcggcctagatgcccttagattcgtcgtcaaagtaccagtatgctttcctag

SEQ ID NO: 264302 - DNA, 55 bp, Artificial
  Synthetic oligonucleotide
gccttcagtcgtgctttgggtttgtagacctcgaacgtgagtgaaaacgttgtgt

SEQ ID NO: 264303 - DNA, 55 bp, Artificial
  Synthetic oligonucleotide
gcgaaattgctccttgtgccgtgacggaggtatccgcacagcggattgctcgcag

SEQ ID NO: 264304 - DNA, 55 bp, Artificial
  Synthetic oligonucleotide
gcgaacaacagcacccgaagcacagaggccaaaaccgactgatgcggttctagcg

SEQ ID NO: 264305 - DNA, 55 bp, Artificial
  Synthetic oligonucleotide
gcgaatcacgcctgggcgagcggcattacggaagagtgcggtgcttagccaacgt

SEQ ID NO: 264306 - DNA, 55 bp, Artificial
  Synthetic oligonucleotide
gcgcagggtagcgcgatcgctggattaacacccggtcttctggccaaacatagca

SEQ ID NO: 264307 - DNA, 55 bp, Artificial
  Synthetic oligonucleotide
gcgcgattcaattggtccgcaaagaaggagggcgcaacggtgtctggacccgctg

SEQ ID NO: 264308 - DNA, 60 bp, Artificial
  Synthetic oligonucleotide
gctatgataatattagaaatattcgaatagtcgagcattaagatggctggcggaaacaga

SEQ ID NO: 264309 - DNA, 55 bp, Artificial
  Synthetic oligonucleotide
gcgctacttccatagccctcattagagccacctgcgaaatagcggtcgacaacag

SEQ ID NO: 264310 - DNA, 55 bp, Artificial
  Synthetic oligonucleotide
gtcacgaagtggcaagcgagagcagatactaacccgccctctcaacgacccggct

SEQ ID NO: 264311 - DNA, 55 bp, Artificial
  Synthetic oligonucleotide
gcgcttaaaggcttgctccaagttgcgtaatgcctgctgaggagcgcatttggag

SEQ ID NO: 264312 - DNA, 55 bp, Artificial
  Synthetic oligonucleotide
gcggatatctcacggctcctgcgctctacgcacttgagcaaaatccctcacttgg

SEQ ID NO: 264313 - DNA, 55 bp, Artificial
  Synthetic oligonucleotide
gtatcccgagaagaaatgattgccatatccctaagtcacagaggcaatggcccca

SEQ ID NO: 264314 - DNA, 55 bp, Artificial
  Synthetic oligonucleotide
gtaatcagcggtcttaattgacttaattactctcgtgtcaccctggcttgactgg

SEQ ID NO: 264315 - DNA, 55 bp, Artificial
  Synthetic oligonucleotide
gcggccaagggtcctctccggtgttcaaccgacgggagcactgcatctcggtaat

SEQ ID NO: 264316 - DNA, 55 bp, Artificial
  Synthetic oligonucleotide
gcggcgctcgtgtgctcatgctgctcgctctgagtgactactgatctggatccga

SEQ ID NO: 264317 - DNA, 55 bp, Artificial
  Synthetic oligonucleotide
gcgggtcgggatctgcgacctttgcagatgattggcgataaatgccatacttctg

SEQ ID NO: 264318 - DNA, 55 bp, Artificial
  Synthetic oligonucleotide
gcggtacgggtgtccacttgttcactgactgacattagggagaatttatcagcaa

SEQ ID NO: 264319 - DNA, 58 bp, Artificial
  Synthetic oligonucleotide
aagccactcaggacgcttgtactcgagccaacttacctctcaccagaggtcaacaccg

SEQ ID NO: 264320 - DNA, 60 bp, Artificial
  Synthetic oligonucleotide
gctcgctgcgggttgccgtcccagcgataacaccgcaaccgcgcctagtagccctgctaa

SEQ ID NO: 264321 - DNA, 55 bp, Artificial
  Synthetic oligonucleotide
ggcttccctgtgaatcgtggatgtatggaactcgcatccagtcggtctcagacgc

SEQ ID NO: 264322 - DNA, 55 bp, Artificial
  Synthetic oligonucleotide
ggcttggctcgattttgatcgagacgactttatatcttgccatagtgtaaacctt

SEQ ID NO: 264323 - DNA, 55 bp, Artificial
  Synthetic oligonucleotide
gggaaggccacgacctgacgctcccctttgagcacattggccgctgagatcagac

SEQ ID NO: 264324 - DNA, 55 bp, Artificial
  Synthetic oligonucleotide
ggtcacaagcacggcggtgtcgccacactccaccaagacggatcctcccgcctga

SEQ ID NO: 264325 - DNA, 55 bp, Artificial
  Synthetic oligonucleotide
gggacaattccaccaggattcagcggaaataacgctccgaagtagtcatgtcgcc

SEQ ID NO: 264326 - DNA, 55 bp, Artificial
  Synthetic oligonucleotide
gggattccgagcttactcgataattatcacctttgagcgcccctaggaggaggcg

SEQ ID NO: 264327 - DNA, 55 bp, Artificial
  Synthetic oligonucleotide
gggcatcaagaattaacgcttccttaacttcaccataactaatgcgtctcacggg

SEQ ID NO: 264328 - DNA, 55 bp, Artificial
  Synthetic oligonucleotide
ggtatcgctcgaggcggcatcggatgaaattggtttgcagccaagcggagctcaa

SEQ ID NO: 264329 - DNA, 55 bp, Artificial
  Synthetic oligonucleotide
gggcgactccactggatgctgggatgacgtcgaaacaaccgactgacgctggagt

SEQ ID NO: 264330 - DNA, 55 bp, Artificial
  Synthetic oligonucleotide
ggtagggcagatcgtgagcagtcaggtactgataaacgtcgcgggagtgccaacc

SEQ ID NO: 264331 - DNA, 57 bp, Artificial
  Synthetic oligonucleotide
gctttgggaacagaatacggaggcgatcccagggggatccgcgaagcggcacgccaa

SEQ ID NO: 264332 - DNA, 55 bp, Artificial
  Synthetic oligonucleotide
ggtaccaggttcgtaactcatggcgactcgtgggtgggaaggaacggaatggcga

SEQ ID NO: 264333 - DNA, 55 bp, Artificial
  Synthetic oligonucleotide
gggcgtttgttcgacgacttcgatgtgagtgctattttggggcgcaacggtacgc

SEQ ID NO: 264334 - DNA, 55 bp, Artificial
  Synthetic oligonucleotide
ggggcgctgtatcgaaaacgagttaagaagatcgctgtagatataaagccgaagt

SEQ ID NO: 264335 - DNA, 51 bp, Artificial
  Synthetic oligonucleotide
ggggttgtttacctaggacgagtagaaacgagcgcctaacggttggcactt

SEQ ID NO: 264336 - DNA, 55 bp, Artificial
  Synthetic oligonucleotide
ggggttttgctttgattgccgataactatagctggaatgaatacggcaggtggca

SEQ ID NO: 264337 - DNA, 55 bp, Artificial
  Synthetic oligonucleotide
gggtattgggcatgatcggtgaaggagaatagcgaaactccgaggcatagtgcac

SEQ ID NO: 264338 - DNA, 55 bp, Artificial
  Synthetic oligonucleotide
gggtcagttgtttggcttctggggttacgaactcatccactgggtcgagcccagt

SEQ ID NO: 264339 - DNA, 54 bp, Artificial
  Synthetic oligonucleotide
gggtgactcgcggagtcggttgggcgaccaggtttacaacggtcaacactgacc

SEQ ID NO: 264340 - DNA, 54 bp, Artificial
  Synthetic oligonucleotide
gggttgcgggtattttgcaccttgcgggcggtttccaaactcgcttcatctggg

SEQ ID NO: 264341 - DNA, 55 bp, Artificial
  Synthetic oligonucleotide
gggttgtagtagaacccgaagtcatacgagcgtcgttgccagcgcaactcgatgt

SEQ ID NO: 264342 - DNA, 60 bp, Artificial
  Synthetic oligonucleotide
aatcgattggcgggctgcagtgaacatctactctcagttgagccgccttagcaggcaatc

SEQ ID NO: 264343 - DNA, 55 bp, Artificial
  Synthetic oligonucleotide
gggttgtagtcgttctacttactatcggcaggttgcgtcgcgtcttgactctagc

SEQ ID NO: 264344 - DNA, 54 bp, Artificial
  Synthetic oligonucleotide
ggtaagcagcgttgcgggggttgcttacggcgttcgtgtaggagaaaccaccac

SEQ ID NO: 264345 - DNA, 55 bp, Artificial
  Synthetic oligonucleotide
ggtaatggctacgatatccatcgcttggtggagggccgtcccctcatccttgggg

SEQ ID NO: 264346 - DNA, 55 bp, Artificial
  Synthetic oligonucleotide
ggaccatgatctatgagcaggaacccacacccttactaggcggaatagatgcggc

SEQ ID NO: 264347 - DNA, 55 bp, Artificial
  Synthetic oligonucleotide
ggacccgccgcaattcgagacgtcagcagtggactagagacatactgcccgcaat

SEQ ID NO: 264348 - DNA, 51 bp, Artificial
  Synthetic oligonucleotide
ggactcgtggaactccggactctcgaattcgtttccccgatttaaccgtta

SEQ ID NO: 264349 - DNA, 55 bp, Artificial
  Synthetic oligonucleotide
ggagcccatcagatggggtacttcccgacaatcggtagcaacgggagtctccggc

SEQ ID NO: 264350 - DNA, 55 bp, Artificial
  Synthetic oligonucleotide
ggtgcagtccatccagacagagggtgccgctcagactcagaatttcgtgaggctc

SEQ ID NO: 264351 - DNA, 55 bp, Artificial
  Synthetic oligonucleotide
ggatagtcagagttgagtaggcgatcatgatagggtctcagtcgatggcgaacag

SEQ ID NO: 264352 - DNA, 55 bp, Artificial
  Synthetic oligonucleotide
ggtgactaagatgccagagatggctactactaacattctactcgtggaggacgat

SEQ ID NO: 264353 - DNA, 60 bp, Artificial
  Synthetic oligonucleotide
ggagggggcatgcatttagataccttgctgtacttgaatttcaggagcgtggcgccctac

SEQ ID NO: 264354 - DNA, 55 bp, Artificial
  Synthetic oligonucleotide
ggatctacgtcaaacgcagtggggacatcgacttcggtcgcagtccggaagtgca

SEQ ID NO: 264355 - DNA, 55 bp, Artificial
  Synthetic oligonucleotide
ggattgagcgtggggtgctcgtcctaacaggtgtttgaagttcaactcgattccc

SEQ ID NO: 264356 - DNA, 55 bp, Artificial
  Synthetic oligonucleotide
ggcaaccctctgattctgccgtgactggctccacgaatgagggaatgcgaacctc

SEQ ID NO: 264357 - DNA, 55 bp, Artificial
  Synthetic oligonucleotide
ggcaacgcttcgccaagtgcatttcgccctaagcgatcttcgccttcatagccgc

SEQ ID NO: 264358 - DNA, 55 bp, Artificial
  Synthetic oligonucleotide
ggcaatcggaccctcaacaacgttcttgttactgacccactcacgggcctaagcg

SEQ ID NO: 264359 - DNA, 55 bp, Artificial
  Synthetic oligonucleotide
ggtccaagtggagcaaccacgggtcctcatctctgaggtcacgattgaaggactg

SEQ ID NO: 264360 - DNA, 55 bp, Artificial
  Synthetic oligonucleotide
ggccaaccgggattgcagggacggattcaactaaccgagttagagctggcaggac

SEQ ID NO: 264361 - DNA, 55 bp, Artificial
  Synthetic oligonucleotide
ggccatgactccggaacgaagtgacatacctctggctgattaagcgtagacccgg

SEQ ID NO: 264362 - DNA, 55 bp, Artificial
  Synthetic oligonucleotide
ggccgatcaacggctaagccatgcgatcgcttcacgaatccaatcttcggcgggc

SEQ ID NO: 264363 - DNA, 55 bp, Artificial
  Synthetic oligonucleotide
ggccttacccctcaaccgatcagcccgtctcgcgttgttgcgattggtctgttgc

SEQ ID NO: 264364 - DNA, 60 bp, Artificial
  Synthetic oligonucleotide
ggatccaatgggctgacaccctattccaggagggccataaaatctatctctgccctctat

SEQ ID NO: 264365 - DNA, 55 bp, Artificial
  Synthetic oligonucleotide
ggtcatcgtatggagctgccgacacggcaggatgccccgcagaaatagctcccga

SEQ ID NO: 264366 - DNA, 55 bp, Artificial
  Synthetic oligonucleotide
ggcgtatcagccacgaactcaggtctcacatcatcaattggaggaatcgtctacg

SEQ ID NO: 264367 - DNA, 55 bp, Artificial
  Synthetic oligonucleotide
ggcgtcggaagctacccgatcagctgtgtcaggagtgccgcggaacccagtcccc

SEQ ID NO: 264368 - DNA, 55 bp, Artificial
  Synthetic oligonucleotide
ggctcgagactgcctttcgtggggaactcctggattgctgctgtgatcgcggggt

SEQ ID NO: 264369 - DNA, 55 bp, Artificial
  Synthetic oligonucleotide
ggctgcatcccagcgtcaagcaagctccaagattcgttacaatacggatgtccgc

SEQ ID NO: 264370 - DNA, 55 bp, Artificial
  Synthetic oligonucleotide
ggctgggtgctagctgatatgtctaaaccataccctcaggaagcagaaacattgt

SEQ ID NO: 264371 - DNA, 55 bp, Artificial
  Synthetic oligonucleotide
ggcttagcgtcgtcagctgctttcccatcactaaccccaaacagagacctacggc

SEQ ID NO: 264372 - DNA, 55 bp, Artificial
  Synthetic oligonucleotide
ctgcggaagtgctcgtagagttgctcggatcaggtactcgaatactgaggactgg

SEQ ID NO: 264373 - DNA, 55 bp, Artificial
  Synthetic oligonucleotide
ctgcgtggatccagaagtggcgacaacttgggtggagcgtctgcagaggtgggga

SEQ ID NO: 264374 - DNA, 55 bp, Artificial
  Synthetic oligonucleotide
ctgcgttgggatggatcggaactcacgaatctcaccacgattcgcaatgccttta

SEQ ID NO: 264375 - DNA, 60 bp, Artificial
  Synthetic oligonucleotide
ggcagtgcctcatgagccgttgggccatcgaagtcaactgcgattaacccaccgcttgcg

SEQ ID NO: 264376 - DNA, 55 bp, Artificial
  Synthetic oligonucleotide
ctgcttcgtactcagtctttacaggagccgtcgctgtcatagcaccaaggggcaa

SEQ ID NO: 264377 - DNA, 55 bp, Artificial
  Synthetic oligonucleotide
ctggaatgcaacccaacgcatggctcaggtaccgggtttagcccaggatctcttg

SEQ ID NO: 264378 - DNA, 55 bp, Artificial
  Synthetic oligonucleotide
ctggaggcgaatccgcgggccaaggtcttttacgtgtccaccgagcgctttacca

SEQ ID NO: 264379 - DNA, 55 bp, Artificial
  Synthetic oligonucleotide
ctggatgttgggcgtcgattcattccagtgctcgaggcgtaaccccacccgttcg

SEQ ID NO: 264380 - DNA, 55 bp, Artificial
  Synthetic oligonucleotide
ctggccgggttaggcatcgtccgagtaacgacttctgggcaaagtcttccggtgc

SEQ ID NO: 264381 - DNA, 55 bp, Artificial
  Synthetic oligonucleotide
ctgtcgtggcaagtggtccccatgtcggttcacaaccgtctgtggttcagaccta

SEQ ID NO: 264382 - DNA, 55 bp, Artificial
  Synthetic oligonucleotide
ctgtgctagctgctggtaacgctccttagactcagcaagctgttgtgctgcctgg

SEQ ID NO: 264383 - DNA, 55 bp, Artificial
  Synthetic oligonucleotide
taatccggttgagatgaccctcctcacgttgcagccggagctgttgtttatccct

SEQ ID NO: 264384 - DNA, 55 bp, Artificial
  Synthetic oligonucleotide
cttcccctcgatcgcatgcgtcctatgtccgtcttctgtcccgcgataagcctca

SEQ ID NO: 264385 - DNA, 55 bp, Artificial
  Synthetic oligonucleotide
taatcccctcgatcgcagcagtattggactccgcattcccgcctgtgcgctcgcc

SEQ ID NO: 264386 - DNA, 60 bp, Artificial
  Synthetic oligonucleotide
ggcgcagtaacggctgttgacagcccctcgctgcactattgctctagtaacagtgctccc

SEQ ID NO: 264387 - DNA, 54 bp, Artificial
  Synthetic oligonucleotide
cttgaagcgtacaaccacccgccccaatccaattctgagtacggcgaaactccc

SEQ ID NO: 264388 - DNA, 55 bp, Artificial
  Synthetic oligonucleotide
taacctattagcatcaagtttctggatagcccttgacaaaggttgcatcccacct

SEQ ID NO: 264389 - DNA, 55 bp, Artificial
  Synthetic oligonucleotide
gtttgaggcttgttatcctacgtgccccatcccagtaatttcccatcgcccggag

SEQ ID NO: 264390 - DNA, 55 bp, Artificial
  Synthetic oligonucleotide
gaacccagagcgatatgcacacccatgtccacgatttgccaccccaaatgggcgg

SEQ ID NO: 264391 - DNA, 55 bp, Artificial
  Synthetic oligonucleotide
gaatacgccacaaaatttgatgtaggatcatacgcaaaattcgccaaaggtgcac

SEQ ID NO: 264392 - DNA, 55 bp, Artificial
  Synthetic oligonucleotide
gttgggcgttctaccaactacgtcaatttctggagtacaaggcgagggttgcagg

SEQ ID NO: 264393 - DNA, 55 bp, Artificial
  Synthetic oligonucleotide
gaattagccgggaaagatacatatcgcctccgggagttcatggtattccgtctcc

SEQ ID NO: 264394 - DNA, 54 bp, Artificial
  Synthetic oligonucleotide
gacacgtccaaagctccaggtttagttcgggatcagtgtgaccccaaaatttcc

SEQ ID NO: 264395 - DNA, 55 bp, Artificial
  Synthetic oligonucleotide
gacactagtaaggcagatgaacccgtcgaatggactgctatagacgtgatgaggc

SEQ ID NO: 264396 - DNA, 55 bp, Artificial
  Synthetic oligonucleotide
gacagcaacacggagtctgcagattcgcccgaggtcagagatcggtctccgctgc

SEQ ID NO: 264397 - DNA, 59 bp, Artificial
  Synthetic oligonucleotide
gggaatgaccctagagacctgttaaccaatctcagacaagcgattgagaacggtgagaa

SEQ ID NO: 264398 - DNA, 55 bp, Artificial
  Synthetic oligonucleotide
gacatcgggatgacctgcgaacctagcgactacctgttcagaaacccaacctggg

SEQ ID NO: 264399 - DNA, 53 bp, Artificial
  Synthetic oligonucleotide
cgttgagccttaacagtttacgatcgccggatgttaggggataagggattccc

SEQ ID NO: 264400 - DNA, 55 bp, Artificial
  Synthetic oligonucleotide
cgtttcgcccgcttaggcttggcgactccctctaaagtccattggcgatcgtcgc

SEQ ID NO: 264401 - DNA, 55 bp, Artificial
  Synthetic oligonucleotide
ctaactaccgcgttagcaggctgcgatgccttgctcagtgcaacaggcgcagaac

SEQ ID NO: 264402 - DNA, 55 bp, Artificial
  Synthetic oligonucleotide
ctaagcacagggatataacgcaagaccccttccagccaaggcacagacagcacaa

SEQ ID NO: 264403 - DNA, 55 bp, Artificial
  Synthetic oligonucleotide
tcacttcgcggtttacgaaacgcagctgcccggttcagatgtgccgctctactta

SEQ ID NO: 264404 - DNA, 55 bp, Artificial
  Synthetic oligonucleotide
tcactgcagagcaagcggtgggcgaaggagggattgctctgtggtgcggggctga

SEQ ID NO: 264405 - DNA, 55 bp, Artificial
  Synthetic oligonucleotide
tatccgggagcttgttttacgagatttgctcgaagtctataacaatgatgaggcg

SEQ ID NO: 264406 - DNA, 55 bp, Artificial
  Synthetic oligonucleotide
taggcggaatctcagcgggcctagcggtgagcgcttccattgccctgttcgggtt

SEQ ID NO: 264407 - DNA, 55 bp, Artificial
  Synthetic oligonucleotide
ctacttctatgaccgtgaaaccacgaacaggcatcggttcgtcctgaaggatggg

SEQ ID NO: 264408 - DNA, 58 bp, Artificial
  Synthetic oligonucleotide
gggcctattgtcgctatgcggcgcttgctaaccgtggctttggcagttaccgggaagc

SEQ ID NO: 264409 - DNA, 55 bp, Artificial
  Synthetic oligonucleotide
ctacttggagtggtactttacgccgtcaaatagccaagagttgattctgaatccc

SEQ ID NO: 264410 - DNA, 55 bp, Artificial
  Synthetic oligonucleotide
ctagcgtatcaaattggtctgatcagcgctcagtgatcttgtccgtgaccgctgc

SEQ ID NO: 264411 - DNA, 55 bp, Artificial
  Synthetic oligonucleotide
ctatgactggattgtaggttgggatacgggtaaacgtttgccgaatgatgatccg

SEQ ID NO: 264412 - DNA, 55 bp, Artificial
  Synthetic oligonucleotide
ctatgcaagacgtgaatatgggagacgtatatctacctggagcaatattgcccgg

SEQ ID NO: 264413 - DNA, 55 bp, Artificial
  Synthetic oligonucleotide
taggcctggcatcggcttcaaagcatggccacccagggatcagccaaagatggcc

SEQ ID NO: 264414 - DNA, 55 bp, Artificial
  Synthetic oligonucleotide
ctcaaccaggctcctgccggacgttggatgttgaccgtatggcaccccgactacg

SEQ ID NO: 264415 - DNA, 55 bp, Artificial
  Synthetic oligonucleotide
ctcaacgaactccatccagccctacttagacagagtagctgatgcggtaaccgag

SEQ ID NO: 264416 - DNA, 54 bp, Artificial
  Synthetic oligonucleotide
ctccaagttcctgtggggccacgggccgagttgccaggttcacaccccttctaa

SEQ ID NO: 264417 - DNA, 55 bp, Artificial
  Synthetic oligonucleotide
ctccgactcgaaatccccgtcggacaaccaagcccgcagaatcggcgtgagctga

SEQ ID NO: 264418 - DNA, 55 bp, Artificial
  Synthetic oligonucleotide
ctcctaaactccgctcagccccggaatcattgtgcctcggactgctgcacgtctc

SEQ ID NO: 264419 - DNA, 59 bp, Artificial
  Synthetic oligonucleotide
gggcgatcgcccctatatcgcaaaaaggagttaccccatcagagctatagtcgagaaga

SEQ ID NO: 264420 - DNA, 55 bp, Artificial
  Synthetic oligonucleotide
ctcgctgtcgactcggatgtctatttaccctctacaattgtttctcgctatctgc

SEQ ID NO: 264421 - DNA, 55 bp, Artificial
  Synthetic oligonucleotide
ctcggacctcatgaaattggtctgttcccaggcagaactcaacgcagctctgcag

SEQ ID NO: 264422 - DNA, 55 bp, Artificial
  Synthetic oligonucleotide
ctgaactaggttgagactgttgtggcaccacgacgactgagttctcatccatcgc

SEQ ID NO: 264423 - DNA, 55 bp, Artificial
  Synthetic oligonucleotide
ctgacaacgccatgatcgttagatatggtcatacctgcgaactcactccgctggt

SEQ ID NO: 264424 - DNA, 55 bp, Artificial
  Synthetic oligonucleotide
ctgagtcttaccaggatgacccaccgtcactgcgtagtctctaaagttcggtagc

SEQ ID NO: 264425 - DNA, 55 bp, Artificial
  Synthetic oligonucleotide
taattgatgccaactttagtggtgccaatctcagcggtgctaattttaacggggc

SEQ ID NO: 264426 - DNA, 55 bp, Artificial
  Synthetic oligonucleotide
gatgggtgtttcggggtagtgctgattaagtcgctccaaaacaagctgagcccgc

SEQ ID NO: 264427 - DNA, 55 bp, Artificial
  Synthetic oligonucleotide
gtgatgtgtggctgcattatgtctctgagagcagttattggctcgaattagcctc

SEQ ID NO: 264428 - DNA, 55 bp, Artificial
  Synthetic oligonucleotide
gattggcaccaggtgatgggaacaggccgaacggatactgatcggtcccaccgtg

SEQ ID NO: 264429 - DNA, 55 bp, Artificial
  Synthetic oligonucleotide
gatttccaggtcacagataatgtgacgatcacccctgctgttttctacttaagtc

SEQ ID NO: 264430 - DNA, 60 bp, Artificial
  Synthetic oligonucleotide
taccgcacttggggcgcgatacagctgcccacaagatcgggtccgaacatcgggcgatcg

SEQ ID NO: 264431 - DNA, 60 bp, Artificial
  Synthetic oligonucleotide
aatgaccatggcgagccaatgcgacagctacggcacctcattccagagcttgacctgttg

SEQ ID NO: 264432 - DNA, 54 bp, Artificial
  Synthetic oligonucleotide
gcaacatttagaatcggagtgtttgggtaccctaagtgaaatcttcgacggtaa

SEQ ID NO: 264433 - DNA, 55 bp, Artificial
  Synthetic oligonucleotide
gtcttgcaagcgtgggtcgatatcagagatgattaattcgtagacgccatagccg

SEQ ID NO: 264434 - DNA, 55 bp, Artificial
  Synthetic oligonucleotide
gcacccacacgggttaacaaccctgtgataagcaaccagctaccgatcacttcag

SEQ ID NO: 264435 - DNA, 55 bp, Artificial
  Synthetic oligonucleotide
gtcttagtcgtcctgctggggacaggcttggctgcctattgggcggtcgtcacct

SEQ ID NO: 264436 - DNA, 55 bp, Artificial
  Synthetic oligonucleotide
gcactgcaactagacgaaagtccattcgccatgcttgcaactgactcaatggcct

SEQ ID NO: 264437 - DNA, 55 bp, Artificial
  Synthetic oligonucleotide
gtctcgtttgggttggaagtcttcgcttctatctttggctttattgcgatcgctc

SEQ ID NO: 264438 - DNA, 55 bp, Artificial
  Synthetic oligonucleotide
gtcggcaagcaggattgatcgattgtacgggcgggccttttggctgtgtaatcac

SEQ ID NO: 264439 - DNA, 55 bp, Artificial
  Synthetic oligonucleotide
gcagcgactctgagggcaagcaagggccccggttccgctatggtgggatacggat

SEQ ID NO: 264440 - DNA, 55 bp, Artificial
  Synthetic oligonucleotide
gcaggatcagggctacgctcaaagtgtctcgcgcgttgttagaaaagattcactg

SEQ ID NO: 264441 - DNA, 55 bp, Artificial
  Synthetic oligonucleotide
gtcgcgatcactctgatgctgattagcggtcactggggcaacctgcgaattcctg

SEQ ID NO: 264442 - DNA, 60 bp, Artificial
  Synthetic oligonucleotide
gtgggggagctatcagcactcctgatcgattgcctgtcaataccaattccggctgtaagc

SEQ ID NO: 264443 - DNA, 55 bp, Artificial
  Synthetic oligonucleotide
gcagtcctcgctgcgacctcctttcactgggtttcaccagaagtcgcctgtcaga

SEQ ID NO: 264444 - DNA, 55 bp, Artificial
  Synthetic oligonucleotide
gccaagggagcgtctaagtgccactggggctcaaggatgctcaaacgattagttg

SEQ ID NO: 264445 - DNA, 55 bp, Artificial
  Synthetic oligonucleotide
gccaatgttgccttggccttagccggtgggacgggtttggccacagccgatttgg

SEQ ID NO: 264446 - DNA, 55 bp, Artificial
  Synthetic oligonucleotide
gccacaagattcagtccatcccgtaagggagtgatccagcacacgtcggcatggg

SEQ ID NO: 264447 - DNA, 55 bp, Artificial
  Synthetic oligonucleotide
gccacgcacctactgggttgagctgcagacgcgattcggcaaccagtactacgtc

SEQ ID NO: 264448 - DNA, 55 bp, Artificial
  Synthetic oligonucleotide
gtccgcggcgcacggcactgagctccagcagttcaagagcgttggttggcatgaa

SEQ ID NO: 264449 - DNA, 55 bp, Artificial
  Synthetic oligonucleotide
gccagcgggctggacttcccatgactgtgtcgccaagttacggcgtctgttacgg

SEQ ID NO: 264450 - DNA, 55 bp, Artificial
  Synthetic oligonucleotide
gccagcggtgctcggaccttggtgctgagtttgggcagtgatccgtcgccagata

SEQ ID NO: 264451 - DNA, 55 bp, Artificial
  Synthetic oligonucleotide
gcccatacgtcagacggggacaattggaatggacagcagttgaacagagtccgcg

SEQ ID NO: 264452 - DNA, 55 bp, Artificial
  Synthetic oligonucleotide
gacatggaggagcggcaacccgtgtaaacgcgcattgtgcgctgggctgagtcag

SEQ ID NO: 264453 - DNA, 58 bp, Artificial
  Synthetic oligonucleotide
gagctatccctttattgattggcatcggcctagtcttttttggcgcacaaaattacga

SEQ ID NO: 264454 - DNA, 55 bp, Artificial
  Synthetic oligonucleotide
gaccgatgcagcaatcgattgtcaggcgtccgtttcgaagctctcagtaagacct

SEQ ID NO: 264455 - DNA, 55 bp, Artificial
  Synthetic oligonucleotide
gacgatcgctccaaaatcagccagcacacgggcttgattgcgcaacagtcccaac

SEQ ID NO: 264456 - DNA, 55 bp, Artificial
  Synthetic oligonucleotide
gacgcgcttcttcgtaagcacgatcgcgtaggtagtcgcccaccaaccagccgtc

SEQ ID NO: 264457 - DNA, 55 bp, Artificial
  Synthetic oligonucleotide
gttgctctctagacggggataagttacgaaagtggcaggcgttagattgtctgca

SEQ ID NO: 264458 - DNA, 55 bp, Artificial
  Synthetic oligonucleotide
gacggtcgaagcctcgcgatagtcgttcagcggtcggatgttcgcaatccgcagg

SEQ ID NO: 264459 - DNA, 55 bp, Artificial
  Synthetic oligonucleotide
gtgttggtgcccctagcagagattgcgccccattggtgtgaaccccgcacccaac

SEQ ID NO: 264460 - DNA, 55 bp, Artificial
  Synthetic oligonucleotide
gacttaagtcaactatccgccactgccctaccggcgaggattcaagacgtagagc

SEQ ID NO: 264461 - DNA, 55 bp, Artificial
  Synthetic oligonucleotide
gtggttctggcccatgccctgcaaacttgatcgatgtcattagcgacccgttcgg

SEQ ID NO: 264462 - DNA, 55 bp, Artificial
  Synthetic oligonucleotide
gagcaggggcattctcggacacctgagattccggttcggacgcagattcctgggg

SEQ ID NO: 264463 - DNA, 55 bp, Artificial
  Synthetic oligonucleotide
gtgggccgcttggggtatctcgctgacgcatccaatcaaccatcaggactcacac

SEQ ID NO: 264464 - DNA, 58 bp, Artificial
  Synthetic oligonucleotide
gtggcggttctaccccatgagtcagttgcctttgtagcaagatttcagtatcggtcgg

SEQ ID NO: 264465 - DNA, 55 bp, Artificial
  Synthetic oligonucleotide
gaggatccgtcttggtggagtgtggcgacaccgccgtgcttgtgaccgcaacccg

SEQ ID NO: 264466 - DNA, 55 bp, Artificial
  Synthetic oligonucleotide
gtgggccactcgttctgtaagctgcggcagttgagaggcattccgctgagctgag

SEQ ID NO: 264467 - DNA, 55 bp, Artificial
  Synthetic oligonucleotide
gaggcagaagccaattgcgagagcgtatggatgatcattgcggctagcagctggc

SEQ ID NO: 264468 - DNA, 55 bp, Artificial
  Synthetic oligonucleotide
gaggcctacagagattggctgcccgttagcgccaaaacaccagtcatcacgctgc

SEQ ID NO: 264469 - DNA, 55 bp, Artificial
  Synthetic oligonucleotide
gtggagggttcttgcgtaggctccccgttcgcgtcagcggtgcgtagcactttga

SEQ ID NO: 264470 - DNA, 55 bp, Artificial
  Synthetic oligonucleotide
gagggcaagctaggcccgccctctctcttgcaaccgttactgcaaccagatctag

SEQ ID NO: 264471 - DNA, 55 bp, Artificial
  Synthetic oligonucleotide
gagttctcgcgaaactaggctatgaactcacagaaggtttaacgctaggtgctga

SEQ ID NO: 264472 - DNA, 55 bp, Artificial
  Synthetic oligonucleotide
gtggacacgacaaaagctgctcacgagatagcaaacccaagccaagacctaccag

SEQ ID NO: 264473 - DNA, 55 bp, Artificial
  Synthetic oligonucleotide
gagttgaagagcggagttgtaagaggcgatggcagcggttaagtcaccctgatcc

SEQ ID NO: 264474 - DNA, 55 bp, Artificial
  Synthetic oligonucleotide
gtgcgttttctgacgttaatcgaggtactggcattacaccacagagtcattgagc

SEQ ID NO: 264475 - DNA, 56 bp, Artificial
  Synthetic oligonucleotide
acgcgctgttaaacaaacggggaagaagcgcttgggacaggctccagtaagctcag

SEQ ID NO: 264476 - DNA, 55 bp, Artificial
  Synthetic oligonucleotide
gatcacttccgcgatcgctgccaatctggggaggtctgcagggacagcacgctca

SEQ ID NO: 264477 - DNA, 55 bp, Artificial
  Synthetic oligonucleotide
gatcagtgctgtggaatcagcgaccaacaggtgtttgtacggggcgagcccgcgg

SEQ ID NO: 264478 - DNA, 55 bp, Artificial
  Synthetic oligonucleotide
gtgcgcattggggccgggtcagtggtcttacgccatgtcccttcggattgcacag

SEQ ID NO: 264479 - DNA, 55 bp, Artificial
  Synthetic oligonucleotide
gatcggttgaacctggtagcttgtataccggcccgaacttgaatgtcgccaagtg

SEQ ID NO: 264480 - DNA, 55 bp, Artificial
  Synthetic oligonucleotide
agggttcactaatggaagtattctgcttgaggtaacccattcatcgatcaagctg

SEQ ID NO: 264481 - DNA, 55 bp, Artificial
  Synthetic oligonucleotide
acgctcctcgggcgctatcgagctagcgatcgccgcgttgtgcctttgattcagc

SEQ ID NO: 264482 - DNA, 55 bp, Artificial
  Synthetic oligonucleotide
acaccgctcaggggtcaagggctgcccctgaaataggagagtaccgcgcagggta

SEQ ID NO: 264483 - DNA, 55 bp, Artificial
  Synthetic oligonucleotide
aggtggaaccaagactgcactggtcaacacagatggtagttacaaatatgtgggc

SEQ ID NO: 264484 - DNA, 55 bp, Artificial
  Synthetic oligonucleotide
acgcgacaaacgaagtctcaggacgacaactgtcgcgtacagacgacaaatgaag

SEQ ID NO: 264485 - DNA, 55 bp, Artificial
  Synthetic oligonucleotide
agccccggcgatcctccatagggttggacgtccgtagccgcagccatgcggatcc

SEQ ID NO: 264486 - DNA, 53 bp, Artificial
  Synthetic oligonucleotide
acgcctggctgcgaaggtgtaacccccgtcccaacttcaacctgtaagccagt

SEQ ID NO: 264487 - DNA, 55 bp, Artificial
  Synthetic oligonucleotide
agacgatatgcaagcaggggccagcggtcgtgtcaatgaagatcctgacgcgccg

SEQ ID NO: 264488 - DNA, 55 bp, Artificial
  Synthetic oligonucleotide
agaataccgagactgccaccatccatgtcttgggtagcacggaactcacagctcc

SEQ ID NO: 264489 - DNA, 55 bp, Artificial
  Synthetic oligonucleotide
agaagcgtattgcaagacttctctgtgagcgcggcagggagtgctggattgggcc

SEQ ID NO: 264490 - DNA, 55 bp, Artificial
  Synthetic oligonucleotide
aacgggcatcgtcaatcaggcaacgacaggcacggaatttatcagtcttcagggg

SEQ ID NO: 264491 - DNA, 55 bp, Artificial
  Synthetic oligonucleotide
atcgatgacgacgatcgcccgttgccatccgtgggcgctgaagcgcagcttgctg

SEQ ID NO: 264492 - DNA, 55 bp, Artificial
  Synthetic oligonucleotide
agccgtcacagagaccaggacggattgaagtgtttctggcgggaggctcgtagcc

SEQ ID NO: 264493 - DNA, 55 bp, Artificial
  Synthetic oligonucleotide
atccgcctctcggttatcagttctgtcttggtactacgtccgtcattgaggacga

SEQ ID NO: 264494 - DNA, 55 bp, Artificial
  Synthetic oligonucleotide
aaggcggagcatcaccgatgatagtacctccttgggcattgagaacaagggtgcg

SEQ ID NO: 264495 - DNA, 53 bp, Artificial
  Synthetic oligonucleotide
agcctatacccaagtccaatttgaaaccgccctccgtcctagcctgttgacgg

SEQ ID NO: 264496 - DNA, 55 bp, Artificial
  Synthetic oligonucleotide
accggagcaccgctgaagggttggacggtactgctgaccagatatgcggttgatc

SEQ ID NO: 264497 - DNA, 59 bp, Artificial
  Synthetic oligonucleotide
gatagcacgactttatcccgatagattcctaagcataggatggcggccaagtaggttta

SEQ ID NO: 264498 - DNA, 54 bp, Artificial
  Synthetic oligonucleotide
aggacacggacgtaatagaaggccttttgcgtggggtcaaaagctggatccttc

SEQ ID NO: 264499 - DNA, 55 bp, Artificial
  Synthetic oligonucleotide
acggtctttctccgaacgctgaaaccctcacgctcgtgaaacaggaacagatcgt

SEQ ID NO: 264500 - DNA, 55 bp, Artificial
  Synthetic oligonucleotide
accgtggccaatccaaacgtcatggccaaccacaatgtccccgcgggtcagaggg

SEQ ID NO: 264501 - DNA, 55 bp, Artificial
  Synthetic oligonucleotide
aggtttctgcaacccctggaagggcgtagaaggattgacgccagctccatagcgc

SEQ ID NO: 264502 - DNA, 54 bp, Artificial
  Synthetic oligonucleotide
agtaaatccttcgcctctagctgtctttataaggtcgagccgtaataaatcggg

SEQ ID NO: 264503 - DNA, 55 bp, Artificial
  Synthetic oligonucleotide
agcgatcgcacatgttcaggataatgatgggcgtagagcaaacctaatagtcccc

SEQ ID NO: 264504 - DNA, 52 bp, Artificial
  Synthetic oligonucleotide
atacgtgcgtcgtaggtaacgaacctacgcttgaactctttaatcggacggt

SEQ ID NO: 264505 - DNA, 55 bp, Artificial
  Synthetic oligonucleotide
acgaggcagctatcgtgtccaaaagtgagtcattgacgcctaagactcgcagttg

SEQ ID NO: 264506 - DNA, 53 bp, Artificial
  Synthetic oligonucleotide
agttcactaacaaagcaggacgagtggttagtttagaggcggctttaacgggc

SEQ ID NO: 264507 - DNA, 55 bp, Artificial
  Synthetic oligonucleotide
acgcagcgatcgctttgatagcgggccacggaatgctggcgtttcgggaccccta

SEQ ID NO: 264508 - DNA, 60 bp, Artificial
  Synthetic oligonucleotide
gtgcgggtgctccgttggctgaaccttcgattagggcaaccagtgctgccacttcagccg

SEQ ID NO: 264509 - DNA, 55 bp, Artificial
  Synthetic oligonucleotide
actagctgaaacagacaagcgaaaacttaggcccagactggcctagagctgcttc

SEQ ID NO: 264510 - DNA, 55 bp, Artificial
  Synthetic oligonucleotide
caaagggcgccccgtctcggatatctctccaggcccaacccatgcagaagcgatg

SEQ ID NO: 264511 - DNA, 55 bp, Artificial
  Synthetic oligonucleotide
agatggccgccagcgatctagcgcacatctccagggtctgaagcagcagtcggtc

SEQ ID NO: 264512 - DNA, 55 bp, Artificial
  Synthetic oligonucleotide
attgcctaccactcctaatccttctgggttgattcgtcctacatgggcttgtagg

SEQ ID NO: 264513 - DNA, 54 bp, Artificial
  Synthetic oligonucleotide
acggagtggcctgtcagccgtgtgaccggttccagcggtaacaccgacaaaggg

SEQ ID NO: 264514 - DNA, 55 bp, Artificial
  Synthetic oligonucleotide
aaggtttcgtctccgtacagaacagcatcaaatctccgttgaaatgcctcggagc

SEQ ID NO: 264515 - DNA, 55 bp, Artificial
  Synthetic oligonucleotide
aacatcaggggactagactgttcatcactcgatagcacatgcagtaatagaaggg

SEQ ID NO: 264516 - DNA, 55 bp, Artificial
  Synthetic oligonucleotide
acggacagcctctcgctctgacaggcccgctttggattggccccgtgcataacgt

SEQ ID NO: 264517 - DNA, 55 bp, Artificial
  Synthetic oligonucleotide
agggaatggcttcaggaccaagcagttgctcccactgctgttcgggaatctctcg

SEQ ID NO: 264518 - DNA, 55 bp, Artificial
  Synthetic oligonucleotide
attcgaatagtcgagcattaagatggctggcggaaacagacatttcacctacacc

SEQ ID NO: 264519 - DNA, 59 bp, Artificial
  Synthetic oligonucleotide
gatcgcgaggtgtacgttagctacaacttcgaaacccagcgctggctggttcaaacagc

SEQ ID NO: 264520 - DNA, 55 bp, Artificial
  Synthetic oligonucleotide
agatacgcgatcaatagcaggctagacaaacatgggcaatagcatcgcgaaaagt

SEQ ID NO: 264521 - DNA, 55 bp, Artificial
  Synthetic oligonucleotide
aaaatcagcaaaagatcctagaagtcctgcaagggctcaaacaagagatttctgc

SEQ ID NO: 264522 - DNA, 55 bp, Artificial
  Synthetic oligonucleotide
aacccaggaagcgcgcatgatctgaggtgcgacggacagcccaggggtcgacgtt

SEQ ID NO: 264523 - DNA, 55 bp, Artificial
  Synthetic oligonucleotide
aaacacttatgcgttacgcttataacacgaaaccgtgccaattggttgtgacagc

SEQ ID NO: 264524 - DNA, 55 bp, Artificial
  Synthetic oligonucleotide
agctgtccaaccaccaagtgtggatttgcgattgtaatccgctcattgcgactgc

SEQ ID NO: 264525 - DNA, 55 bp, Artificial
  Synthetic oligonucleotide
actgattgcaaatgcccttattcaccaagactttcaggcaacaggcgcatccgtc

SEQ ID NO: 264526 - DNA, 55 bp, Artificial
  Synthetic oligonucleotide
agaggctcctgttgtggcaacagctcctcatgcatcagttggccgtccggttgat

SEQ ID NO: 264527 - DNA, 54 bp, Artificial
  Synthetic oligonucleotide
gatctggcgccacaaggaatccaggtcaattaccaatccgttggatcaggtgca

SEQ ID NO: 264528 - DNA, 54 bp, Artificial
  Synthetic oligonucleotide
attgcggagttgttccttgccccctgggccatccgccacaaagcttgggacatc

SEQ ID NO: 264529 - DNA, 54 bp, Artificial
  Synthetic oligonucleotide
ggtgatcgggataagttgccagtagttcaagcacgcgacgtactgtaaggcgcg

SEQ ID NO: 264530 - DNA, 57 bp, Artificial
  Synthetic oligonucleotide
gattcgggagcgcgagtagttctcggaatcgctcgggtgttgttccggttgtatcgc

SEQ ID NO: 264531 - DNA, 54 bp, Artificial
  Synthetic oligonucleotide
acttggcactggttaatgatttggtgtggtttgacgggcgtttcgattgtgtct

SEQ ID NO: 264532 - DNA, 54 bp, Artificial
  Synthetic oligonucleotide
gccactgaagcaaacgtgagcaacgcggaagccaagtttcagtcccgtaatcgg

SEQ ID NO: 264533 - DNA, 54 bp, Artificial
  Synthetic oligonucleotide
cgcacgttgtgcatgcgcccctccattaactgggtgtcagtccattccacgaaa

SEQ ID NO: 264534 - DNA, 54 bp, Artificial
  Synthetic oligonucleotide
tcctggatcttatatgtccaaatatttatcgaagggatcaggtggtggtgcgac

SEQ ID NO: 264535 - DNA, 54 bp, Artificial
  Synthetic oligonucleotide
tgaaagatcgttaacagttggatacatcgcggtgggttcgcctcagtggcagaa

SEQ ID NO: 264536 - DNA, 54 bp, Artificial
  Synthetic oligonucleotide
caagagaatcagcccctgctcatacatcggtcggctggggtcaaacttggccaa

SEQ ID NO: 264537 - DNA, 54 bp, Artificial
  Synthetic oligonucleotide
gggtttgcgagcctgaaccgccatagctttggttaaaccgcacctcttggccgg

SEQ ID NO: 264538 - DNA, 54 bp, Artificial
  Synthetic oligonucleotide
ctcccgagagcagcaactgagaggatcgtgcaaaccgcacggacccatggcccc

SEQ ID NO: 264539 - DNA, 54 bp, Artificial
  Synthetic oligonucleotide
ccaaatgccaactgggggccgtcaaattagtcggatttagtggcaatgctcttt

SEQ ID NO: 264540 - DNA, 54 bp, Artificial
  Synthetic oligonucleotide
tgtatcgcctgaggcgcaacgccattagcgcgagcaaactcgggcagggactgg

SEQ ID NO: 264541 - DNA, 50 bp, Artificial
  Synthetic oligonucleotide
tacagttagaaatttaaatactacccttgtcaaaaaagttttagttcctg

SEQ ID NO: 264542 - DNA, 57 bp, Artificial
  Synthetic oligonucleotide
gcacacctaccgataactggtactgggtatctgcagggacccgtacaggggtatcaa

SEQ ID NO: 264543 - DNA, 54 bp, Artificial
  Synthetic oligonucleotide
agttgtccaaagctgatcgagttcggcttgtgtcatgctgcggtctccgtagat

SEQ ID NO: 264544 - DNA, 54 bp, Artificial
  Synthetic oligonucleotide
tagtggcctcgcaggtttgattccaggtgcgggcctgattactagtactgtcgg

SEQ ID NO: 264545 - DNA, 54 bp, Artificial
  Synthetic oligonucleotide
cgcaaaaccgacaggcggcaccaagcaaatcagctacagactagtgagcgttgg

SEQ ID NO: 264546 - DNA, 54 bp, Artificial
  Synthetic oligonucleotide
aatgattggccgtaacaccaacacaattccaggctttacgaatgttctcattat

SEQ ID NO: 264547 - DNA, 54 bp, Artificial
  Synthetic oligonucleotide
acttgcgccaccttgcggacgctgtgaccgctgtcaggggcaactccaccgtga

SEQ ID NO: 264548 - DNA, 54 bp, Artificial
  Synthetic oligonucleotide
cggtctttggggtccgctgttttgccatcgttccagatgacacccatgcccgag

SEQ ID NO: 264549 - DNA, 54 bp, Artificial
  Synthetic oligonucleotide
gcaccacgtgctgcgtagtaatccgggagcgaaggtttaccacttgtggtccaa

SEQ ID NO: 264550 - DNA, 54 bp, Artificial
  Synthetic oligonucleotide
ccataagtgatcgcctcctccgaccctaggcctcctgtaagacatcgatcggta

SEQ ID NO: 264551 - DNA, 54 bp, Artificial
  Synthetic oligonucleotide
attaacgagcctatttacgaaggtaagcctgatctgcaatggatagaatcctat

SEQ ID NO: 264552 - DNA, 54 bp, Artificial
  Synthetic oligonucleotide
aaacggggaagaagcgcttgggacaggctccagtaagctcagtgcttgccgtaa

SEQ ID NO: 264553 - DNA, 60 bp, Artificial
  Synthetic oligonucleotide
gtctgcggtcgagtggtgttgcccaagtacgcctagacgttctgcaaggcgttcagcaaa

SEQ ID NO: 264554 - DNA, 54 bp, Artificial
  Synthetic oligonucleotide
cgttgctattatcgaccccagtgaaattctgcaattctcccaggagaaagcgat

SEQ ID NO: 264555 - DNA, 54 bp, Artificial
  Synthetic oligonucleotide
cggatctaagccctgagcgctccgctcgttgtctcaggcagggtacttagtcca

SEQ ID NO: 264556 - DNA, 54 bp, Artificial
  Synthetic oligonucleotide
cctgcggtgatcaaagggttagccgaagcggtggaactagttagggaggaagac

SEQ ID NO: 264557 - DNA, 54 bp, Artificial
  Synthetic oligonucleotide
cagaattcctagggcatctaaacaatggctcgccgataaagcgcaacaggtacg

SEQ ID NO: 264558 - DNA, 52 bp, Artificial
  Synthetic oligonucleotide
ttggcctaggcttccagtaaggaaaccgcggggtttcgtaattcgccgctcc

SEQ ID NO: 264559 - DNA, 54 bp, Artificial
  Synthetic oligonucleotide
tactgctcgattaattggtcagccgagcgggcagggcctccgttgcaacactgg

SEQ ID NO: 264560 - DNA, 54 bp, Artificial
  Synthetic oligonucleotide
ggccaatgtcatcccgcactcccgtcacaatggccgtgtctgggctcaggcccc

SEQ ID NO: 264561 - DNA, 54 bp, Artificial
  Synthetic oligonucleotide
cgctcggtttctgcagcctggagacgtcgttgcccctgctccaggggttgtccg

SEQ ID NO: 264562 - DNA, 54 bp, Artificial
  Synthetic oligonucleotide
cactgagcgctgatcagaccaatttgatacgctagcctaaataacctttgggaa

SEQ ID NO: 264563 - DNA, 54 bp, Artificial
  Synthetic oligonucleotide
tggacttctctcgactgtgtacgccaggctgagggatcccgggctgactgcaga

SEQ ID NO: 264564 - DNA, 60 bp, Artificial
  Synthetic oligonucleotide
gcagccttccacccagcgatatgcgccggtctcagggtgttgaccaacgatgactgattg

SEQ ID NO: 264565 - DNA, 54 bp, Artificial
  Synthetic oligonucleotide
tttccaccaagactcgcaggttaaccttgcctgaccgcacataggaaaggatca

SEQ ID NO: 264566 - DNA, 54 bp, Artificial
  Synthetic oligonucleotide
ggtgtgatgtacaaattccccttccgggtgccgccttactacgccctgatcatt

SEQ ID NO: 264567 - DNA, 54 bp, Artificial
  Synthetic oligonucleotide
atggtggaagggttagtgcacgtcagctcgttgaatgacgactggtatgaatac

SEQ ID NO: 264568 - DNA, 54 bp, Artificial
  Synthetic oligonucleotide
atgccctctcccatcagccatccatggaggaggccgttcgggatgtgtccacca

SEQ ID NO: 264569 - DNA, 53 bp, Artificial
  Synthetic oligonucleotide
gttcatgggacctgggaacccacccgcgttctgccctggatccacctcagggg

SEQ ID NO: 264570 - DNA, 53 bp, Artificial
  Synthetic oligonucleotide
cgattcgcaaggatagtctgcaaacgttccgggagcattaccgcaccgccgat

SEQ ID NO: 264571 - DNA, 53 bp, Artificial
  Synthetic oligonucleotide
tggcaacgattctcctatatcggggagagttttgactagcttctcacgattgc

SEQ ID NO: 264572 - DNA, 53 bp, Artificial
  Synthetic oligonucleotide
gttcgagctggctggcacgtttgcccaaggaaattccgaacgccgcaatcctt

SEQ ID NO: 264573 - DNA, 53 bp, Artificial
  Synthetic oligonucleotide
gttaaacgcacaaccataagcattcccgccactatccgtcagacgatataaac

SEQ ID NO: 264574 - DNA, 53 bp, Artificial
  Synthetic oligonucleotide
tggaaaatgaacacaatcaacgatcactagaagcctatcgcagcacaacttta

SEQ ID NO: 264575 - DNA, 59 bp, Artificial
  Synthetic oligonucleotide
gcagtaataccggggcagatttagcgagtagcgtcagtgagaaccgttctcattttatc

SEQ ID NO: 264576 - DNA, 53 bp, Artificial
  Synthetic oligonucleotide
cccagggggatccgcgaagcggcacgccaaggggttgacgccacctgtgttta

SEQ ID NO: 264577 - DNA, 53 bp, Artificial
  Synthetic oligonucleotide
actaaatcagagtttagttggctgctcggatccgccttggcttgaaatgaccg

SEQ ID NO: 264578 - DNA, 53 bp, Artificial
  Synthetic oligonucleotide
cccctggagtcatttccctctatcgagggcgtgatgagatccgaaaggtgccg

SEQ ID NO: 264579 - DNA, 53 bp, Artificial
  Synthetic oligonucleotide
tccttagcgatcgatggactttggcggggcttcgatctggcacccccagcttg

SEQ ID NO: 264580 - DNA, 53 bp, Artificial
  Synthetic oligonucleotide
tcgggtagatcgccttggacgcaccatctggaatcgcacccactagctccacc

SEQ ID NO: 264581 - DNA, 53 bp, Artificial
  Synthetic oligonucleotide
acactgcagcatgggtcggtgatcctcaaacagatccaaggcaggggacaaca

SEQ ID NO: 264582 - DNA, 53 bp, Artificial
  Synthetic oligonucleotide
acagagcaacgggcagtttacacggctggaataccaaggggacttgcggggct

SEQ ID NO: 264583 - DNA, 53 bp, Artificial
  Synthetic oligonucleotide
taatctcatacgcccaatcctctaagctccttttggcttcagaaggctgttcg

SEQ ID NO: 264584 - DNA, 53 bp, Artificial
  Synthetic oligonucleotide
agagcgccatccctgagaatccatattcaatggtgcgtaagatcctattcata

SEQ ID NO: 264585 - DNA, 53 bp, Artificial
  Synthetic oligonucleotide
acagctgctggtcagtcccgcgtgtcctcccctgcctacgacgttattgcggc

SEQ ID NO: 264586 - DNA, 59 bp, Artificial
  Synthetic oligonucleotide
gccagccagggtcaaatggtgccttgcgactgttaacgacgcagaagcgccagtttggg

SEQ ID NO: 264587 - DNA, 53 bp, Artificial
  Synthetic oligonucleotide
atggggtcaagctgtcttgacggagggtccgaccaagccctagtgttcacaag

SEQ ID NO: 264588 - DNA, 53 bp, Artificial
  Synthetic oligonucleotide
ggcaacctactggaggccgtggggatcaagatcagcacgcaagggcgtgaact

SEQ ID NO: 264589 - DNA, 53 bp, Artificial
  Synthetic oligonucleotide
tcttctaaattgccaactcgaatcatggtgtgaagcattttcataggggctgt

SEQ ID NO: 264590 - DNA, 53 bp, Artificial
  Synthetic oligonucleotide
acatgagcgcgacagcttcacagatggactatgtcctacccaacgaattagtc

SEQ ID NO: 264591 - DNA, 53 bp, Artificial
  Synthetic oligonucleotide
agccaaccatcgccatgatgactcaccgtaatgttttataacgtcttagacac

SEQ ID NO: 264592 - DNA, 53 bp, Artificial
  Synthetic oligonucleotide
attcccgtggcctagcagagccgccggatccccagtttccctacgtattaacc

SEQ ID NO: 264593 - DNA, 53 bp, Artificial
  Synthetic oligonucleotide
attcttggcggcacggcgacagggaaaagtgttctcgccctcattcccttgca

SEQ ID NO: 264594 - DNA, 53 bp, Artificial
  Synthetic oligonucleotide
cgtcccgaccgtgattcggcagtccacttccgctagcagccgcggagcccaaa

SEQ ID NO: 264595 - DNA, 53 bp, Artificial
  Synthetic oligonucleotide
cttgggtgatcgacaagccagcatcgatcacgctcgtgaagacaaggtggggg

SEQ ID NO: 264596 - DNA, 53 bp, Artificial
  Synthetic oligonucleotide
cggctctagccagatctctagaacgctaccctgagcgacctcaaggctatagg

SEQ ID NO: 264597 - DNA, 56 bp, Artificial
  Synthetic oligonucleotide
acctcgatgatctggagactgatcgcgaaagtaaggcatcgttaacgggggaaaag

SEQ ID NO: 264598 - DNA, 50 bp, Artificial
  Synthetic oligonucleotide
aaccgtcgctaatctaggggcggccctagcaacccaaaaacgaaaagtcc

SEQ ID NO: 264599 - DNA, 53 bp, Artificial
  Synthetic oligonucleotide
gaacgtcttgcgacgggtcaatgcttcccgagccagggattcctcaccctttt

SEQ ID NO: 264600 - DNA, 53 bp, Artificial
  Synthetic oligonucleotide
cggtcgcagtagccccacaattttccgagcggctaactttgtcctgcagtggg

SEQ ID NO: 264601 - DNA, 53 bp, Artificial
  Synthetic oligonucleotide
ccagaacaccccatcactgcttgaatttcgctgggatggctcgaaggattaca

SEQ ID NO: 264602 - DNA, 53 bp, Artificial
  Synthetic oligonucleotide
ctcccggctaagttcgcacccgcagcattaatccccgcgcagtaggcatggtt

SEQ ID NO: 264603 - DNA, 53 bp, Artificial
  Synthetic oligonucleotide
gacagcggggctccgggcaaaactgtaggtcaataggcaggccgtagcactca

SEQ ID NO: 264604 - DNA, 53 bp, Artificial
  Synthetic oligonucleotide
cattcgatttgagcagtctgactaagcgcggttttagtgttctcccaatcggt

SEQ ID NO: 264605 - DNA, 53 bp, Artificial
  Synthetic oligonucleotide
ttactgtaggagcatattcttgggctaagagcgtatacgaaggcagatggcta

SEQ ID NO: 264606 - DNA, 53 bp, Artificial
  Synthetic oligonucleotide
gccacgccccggattcccatagagtgctttgagggcgggatcatggagtagac

SEQ ID NO: 264607 - DNA, 53 bp, Artificial
  Synthetic oligonucleotide
gccatattggtggggatcaaggtttgcggcgatctcccttggctgcggggttg

SEQ ID NO: 264608 - DNA, 60 bp, Artificial
  Synthetic oligonucleotide
gccggagatccagaggcgattcttccaggagatggggaggatctatgcccggagggggca

SEQ ID NO: 264609 - DNA, 53 bp, Artificial
  Synthetic oligonucleotide
cttctacatgcgtgactgggtataccggctggcacgttgtgtgtagccgacta

SEQ ID NO: 264610 - DNA, 53 bp, Artificial
  Synthetic oligonucleotide
gacagccattccgttgttcgcccgccataagccccaaatcgtgcagagcgtta

SEQ ID NO: 264611 - DNA, 52 bp, Artificial
  Synthetic oligonucleotide
gggtagagggttccggggtcgcccctgagattgcccggttaaatgttagatc

SEQ ID NO: 264612 - DNA, 53 bp, Artificial
  Synthetic oligonucleotide
catatgtaacgcttgttgcgagcgtttatcactcttactaagcctgtgatcga

SEQ ID NO: 264613 - DNA, 53 bp, Artificial
  Synthetic oligonucleotide
tcttgctgttgtgattgagccaatctgttggggcgtatggcacgaatggaaca

SEQ ID NO: 264614 - DNA, 53 bp, Artificial
  Synthetic oligonucleotide
ttcatgtcaccatgcggatcactcagctcagtcaatatctcagggggttgaag

SEQ ID NO: 264615 - DNA, 53 bp, Artificial
  Synthetic oligonucleotide
ccgtccacgggcttggttccgcaccaaaacggcggtggcaaataactgcgcgt

SEQ ID NO: 264616 - DNA, 53 bp, Artificial
  Synthetic oligonucleotide
atgagaagacagcggtgtcgcgaccagagccaccatggaggtagtcgttgtga

SEQ ID NO: 264617 - DNA, 52 bp, Artificial
  Synthetic oligonucleotide
ctttccaaagcaagattacaaaaacttcaactggaatccgccgcggagcaaa

SEQ ID NO: 264618 - DNA, 52 bp, Artificial
  Synthetic oligonucleotide
cctagcttgtcctccggctaaccggcaagcctacaccttgagtttcgccggg

SEQ ID NO: 264619 - DNA, 57 bp, Artificial
  Synthetic oligonucleotide
gtcagattttgaggttctgatgtataaaaagtaacccgcctatttgaggtgcttaga

SEQ ID NO: 264620 - DNA, 52 bp, Artificial
  Synthetic oligonucleotide
agcacaacacaaccgcagcccttctgttgcactgccctaagggatcggccct

SEQ ID NO: 264621 - DNA, 52 bp, Artificial
  Synthetic oligonucleotide
taggcaaccagggaactgaccccttgatcaggcctgggccttgtgcgcttgc

SEQ ID NO: 264622 - DNA, 52 bp, Artificial
  Synthetic oligonucleotide
tatgcagcgctgggtctagatgctcgtgaatatgacatcgaagtgattaaaa

SEQ ID NO: 264623 - DNA, 52 bp, Artificial
  Synthetic oligonucleotide
tagccagtggcccctgcgttatcacaacagcgacccttggttttcctgctgc

SEQ ID NO: 264624 - DNA, 52 bp, Artificial
  Synthetic oligonucleotide
tacgacggggttctaccctttcccaagcagcacgacaaggcaatctccagct

SEQ ID NO: 264625 - DNA, 52 bp, Artificial
  Synthetic oligonucleotide
tccaatcatctgcctcgttaggacgcagactcagcaatgattcctcatccct

SEQ ID NO: 264626 - DNA, 52 bp, Artificial
  Synthetic oligonucleotide
cgcatccaatcgaccgaagatcaacccatcacgggcattggcccaactggct

SEQ ID NO: 264627 - DNA, 52 bp, Artificial
  Synthetic oligonucleotide
tcccctgggactgccagagaaacgtggagtgatcatggggcaccgtcgaagt

SEQ ID NO: 264628 - DNA, 52 bp, Artificial
  Synthetic oligonucleotide
agcctgtaacaactagggatcccagcgtaacagacacaaacagttggctgag

SEQ ID NO: 264629 - DNA, 52 bp, Artificial
  Synthetic oligonucleotide
ctcaggagtgcagacacgggtgctcagtcccagcgcagacgataacgggcca

SEQ ID NO: 264630 - DNA, 60 bp, Artificial
  Synthetic oligonucleotide
ccatggtaaagcattggattgaatctccctctcgctggtagaccactttcgtggcgctac

SEQ ID NO: 264631 - DNA, 52 bp, Artificial
  Synthetic oligonucleotide
tcccgctcagctccactaaggtcatgggctgaacctagacaagccgccatcg

SEQ ID NO: 264632 - DNA, 52 bp, Artificial
  Synthetic oligonucleotide
tccctgcttgatccagggtggctggcccttggtcacacctcacctgttcgct

SEQ ID NO: 264633 - DNA, 52 bp, Artificial
  Synthetic oligonucleotide
agcgactgcgagaggagtgctcgcaacggtcacgcaaaactccgaagaggac

SEQ ID NO: 264634 - DNA, 52 bp, Artificial
  Synthetic oligonucleotide
cgagggtggctaattccgcctgaaactcgttggtcaatcgccggagggttgc

SEQ ID NO: 264635 - DNA, 52 bp, Artificial
  Synthetic oligonucleotide
ctcggtttggcttgtccagtaatctggcccagcaggtctgcagacgggtggc

SEQ ID NO: 264636 - DNA, 52 bp, Artificial
  Synthetic oligonucleotide
tcgcccccgtgagctgggcttgatttaagagggcattgcttaggttagcggc

SEQ ID NO: 264637 - DNA, 52 bp, Artificial
  Synthetic oligonucleotide
gtggatcacgattggtgccagtgaacgtcagtgcctcacaggttttgacgtg

SEQ ID NO: 264638 - DNA, 52 bp, Artificial
  Synthetic oligonucleotide
cctttactcgtggaggtagttcctattcgagcccagtgtataagctgaccgg

SEQ ID NO: 264639 - DNA, 52 bp, Artificial
  Synthetic oligonucleotide
ctggcatgaccttgaggatttttcggcgtagaccaaatcgaattagcgcaag

SEQ ID NO: 264640 - DNA, 52 bp, Artificial
  Synthetic oligonucleotide
ctggtcgttattttcattccacggaaaggtacaacccagatgagtgcagttg

SEQ ID NO: 264641 - DNA, 54 bp, Artificial
  Synthetic oligonucleotide
ccatcccaccgaaggactcggacaagccaaagattacgcagaacgactaaaaac

SEQ ID NO: 264642 - DNA, 52 bp, Artificial
  Synthetic oligonucleotide
ccatcaaaagctctggcgacggcgttagcgatgggcgactgccgctcacggg

SEQ ID NO: 264643 - DNA, 52 bp, Artificial
  Synthetic oligonucleotide
ccagattcgcgctcggtttggcttgtccagtaatctggcccagcaggtctgc

SEQ ID NO: 264644 - DNA, 52 bp, Artificial
  Synthetic oligonucleotide
ataggagtctcccccaacaatgcccgccgcctatttccactctccagccgtt

SEQ ID NO: 264645 - DNA, 52 bp, Artificial
  Synthetic oligonucleotide
cattggttacggccccagaaaccaccggcgacgcatccaatcgaccgaagat

SEQ ID NO: 264646 - DNA, 52 bp, Artificial
  Synthetic oligonucleotide
atcaacccatcacgggcattggcccaactggcttcgcgactgagttggacat

SEQ ID NO: 264647 - DNA, 52 bp, Artificial
  Synthetic oligonucleotide
gcccaaacgtttcgtaccattgcgaaggaacgagtaccgcagtggcattttg

SEQ ID NO: 264648 - DNA, 52 bp, Artificial
  Synthetic oligonucleotide
ttatcggggaagatctcgaacggttgttggagtcagcagatcgtgtgcgggg

SEQ ID NO: 264649 - DNA, 52 bp, Artificial
  Synthetic oligonucleotide
catagatgtggatgccaccactatggctgctctgacaaatgattgtccccgc

SEQ ID NO: 264650 - DNA, 52 bp, Artificial
  Synthetic oligonucleotide
aattacattccctcggttgttaggctatcggtacgaaatgactcgccaggag

SEQ ID NO: 264651 - DNA, 52 bp, Artificial
  Synthetic oligonucleotide
atcccactggagcagcccatttacccaccgccccggattcgaaaagggatcc

SEQ ID NO: 264652 - DNA, 60 bp, Artificial
  Synthetic oligonucleotide
tacagtgcatagcactgagataagagagccatgagcacccaaccatgaatgtcatctttc

SEQ ID NO: 264653 - DNA, 55 bp, Artificial
  Synthetic oligonucleotide
atacctataagccctgtttagagcaacaaagagacctgtttttctatgaagggaa

SEQ ID NO: 264654 - DNA, 52 bp, Artificial
  Synthetic oligonucleotide
atcgccaatattcgcttgccggagagtcaacctcgtcattacttcgacccgg

SEQ ID NO: 264655 - DNA, 52 bp, Artificial
  Synthetic oligonucleotide
cagcgggaattacggagtgcttcagcccgacaggaaaggattctccggccca

SEQ ID NO: 264656 - DNA, 52 bp, Artificial
  Synthetic oligonucleotide
gcgataggggagcaggggcattctcggacacctgagattccggttcggacgc

SEQ ID NO: 264657 - DNA, 52 bp, Artificial
  Synthetic oligonucleotide
gggatggacttcgccatcgtctagaaccgtaaagtctggagtgaagacccag

SEQ ID NO: 264658 - DNA, 52 bp, Artificial
  Synthetic oligonucleotide
gcggtgatggggtaaatttggccacaactgggacaataaacccgatctgcca

SEQ ID NO: 264659 - DNA, 52 bp, Artificial
  Synthetic oligonucleotide
cactttcgtcgcgcaactccttagtgccaaacccgtaagaagtccagtgggg

SEQ ID NO: 264660 - DNA, 52 bp, Artificial
  Synthetic oligonucleotide
caccggcgacgcatccaatcgaccgaagatcaacccatcacgggcattggcc

SEQ ID NO: 264661 - DNA, 52 bp, Artificial
  Synthetic oligonucleotide
cacagacctatcaagggtggttgcagcgggaacaatctccggctgttgatct

SEQ ID NO: 264662 - DNA, 52 bp, Artificial
  Synthetic oligonucleotide
attaccgctggagcaacgatgcggttaatacttaccccacaccctctcatcg

SEQ ID NO: 264663 - DNA, 52 bp, Artificial
  Synthetic oligonucleotide
acatgcccagtgagctttgtcagcgaagttttattccccttcgccaaacacg

SEQ ID NO: 264664 - DNA, 60 bp, Artificial
  Synthetic oligonucleotide
ataccttggggtgatcgcccttagctgatgctctgatgccgttaaattcctgtctacagt

SEQ ID NO: 264665 - DNA, 52 bp, Artificial
  Synthetic oligonucleotide
caagtgtctgcgatcgcagcgttaacttcccctaaagcctatgttcgtcgct

SEQ ID NO: 264666 - DNA, 52 bp, Artificial
  Synthetic oligonucleotide
attgatgaatatcgttctcggaatgaacaactagccgacctgatgagacgtt

SEQ ID NO: 264667 - DNA, 52 bp, Artificial
  Synthetic oligonucleotide
attgcgatagttgggtttcgagctcacctgtcgcaattacccccgattcaac

SEQ ID NO: 264668 - DNA, 52 bp, Artificial
  Synthetic oligonucleotide
atttatcgaactcgtagtggatcctgccccgatatcgctccgaggggatcag

SEQ ID NO: 264669 - DNA, 52 bp, Artificial
  Synthetic oligonucleotide
ttttgtagcagcggtcacggacaagatcactgagcgctgatcagaccaattt

SEQ ID NO: 264670 - DNA, 52 bp, Artificial
  Synthetic oligonucleotide
ggaggccagttgcccaagctagggccgtgccaaagatgatcgccagtaatcc

SEQ ID NO: 264671 - DNA, 52 bp, Artificial
  Synthetic oligonucleotide
ggacgttggctccgacaagtcgactaattgcaatctttggcgctgactagcg

SEQ ID NO: 264672 - DNA, 52 bp, Artificial
  Synthetic oligonucleotide
gaaatcgccacgaacaactgaattcaccatgctggtttgaggttcacgcaca

SEQ ID NO: 264673 - DNA, 52 bp, Artificial
  Synthetic oligonucleotide
ccgtggtcatcagcaatttacgggcctgcctcacccgacaatcccgtaggta

SEQ ID NO: 264674 - DNA, 52 bp, Artificial
  Synthetic oligonucleotide
gtctgggccaagcgagggtcgtgacgctgcagcgttttggctgtggcatcaa

SEQ ID NO: 264675 - DNA, 60 bp, Artificial
  Synthetic oligonucleotide
tggcgggctgcagtgaacatctactctcagttgagccgccttagcaggcaatcgtcagcg

SEQ ID NO: 264676 - DNA, 52 bp, Artificial
  Synthetic oligonucleotide
tcttgatccagctgaagggtgccagtctctagaccctctaggtaattcacca

SEQ ID NO: 264677 - DNA, 52 bp, Artificial
  Synthetic oligonucleotide
ccggggtcgtaatatttcggtcttggttgatgggataccccagagcacaaac

SEQ ID NO: 264678 - DNA, 52 bp, Artificial
  Synthetic oligonucleotide
ccgctggattccttccgtcctcgaaccacgttgcagctgaacgctcttgtga

SEQ ID NO: 264679 - DNA, 52 bp, Artificial
  Synthetic oligonucleotide
ccgcgtcaatccctcgtgagtggtgatcgcaaattggtcttgcagcctgggg

SEQ ID NO: 264680 - DNA, 52 bp, Artificial
  Synthetic oligonucleotide
acggccccagaaaccaccggcgacgcatccaatcgaccgaagatcaacccat

SEQ ID NO: 264681 - DNA, 52 bp, Artificial
  Synthetic oligonucleotide
tgatcgatacgaacaagttgccgggctcagcccactccaactgggcatgcag

SEQ ID NO: 264682 - DNA, 52 bp, Artificial
  Synthetic oligonucleotide
aggcgtaggcccactggggatcccgcggcagcaaaacgatgcggctttcccc

SEQ ID NO: 264683 - DNA, 52 bp, Artificial
  Synthetic oligonucleotide
gactgagttggggatagatcgccccgtggaaatctaaaccgaccaacaaatc

SEQ ID NO: 264684 - DNA, 52 bp, Artificial
  Synthetic oligonucleotide
tgcggttaggggagcgtgatctaacagaacaacttcaagatccacacctgta

SEQ ID NO: 264685 - DNA, 52 bp, Artificial
  Synthetic oligonucleotide
gagatagactgataaaggacgtctgatgcacgtatgacggattctgtggggc

SEQ ID NO: 264686 - DNA, 56 bp, Artificial
  Synthetic oligonucleotide
ccaaattggggggttaggggggctatcatgagggaatatccgcgcaacattgacac

SEQ ID NO: 264687 - DNA, 52 bp, Artificial
  Synthetic oligonucleotide
aagtcgttgcgcgagcattaaggtctgcggatagcccataacatacttttgt

SEQ ID NO: 264688 - DNA, 52 bp, Artificial
  Synthetic oligonucleotide
gagcataaaactttgttgtgcctgtgttgtgcagtaaactgcagagcagttt

SEQ ID NO: 264689 - DNA, 52 bp, Artificial
  Synthetic oligonucleotide
gagccttcagggagagagtccggtgcctgagtggttagccgttcttccaatt

SEQ ID NO: 264690 - DNA, 52 bp, Artificial
  Synthetic oligonucleotide
ccatcgtcgaacttactaaatcatggggactcgttaggtgaactgctatatc

SEQ ID NO: 264691 - DNA, 52 bp, Artificial
  Synthetic oligonucleotide
ccccatcgctgagaccatctccctcaagcctgggacccgactcatgtagtag

SEQ ID NO: 264692 - DNA, 52 bp, Artificial
  Synthetic oligonucleotide
ggtgagatgcctgggctgctgagacaagccctctagccccgcgcattattgc

SEQ ID NO: 264693 - DNA, 52 bp, Artificial
  Synthetic oligonucleotide
tggcgcgcaaatttagagttcattgcggaaagtagtggcagcttcgaccttc

SEQ ID NO: 264694 - DNA, 51 bp, Artificial
  Synthetic oligonucleotide
acctagcgaatggatgaacatttcgcgtggacgggtctacgctgagcaagc

SEQ ID NO: 264695 - DNA, 51 bp, Artificial
  Synthetic oligonucleotide
gaccaatcgcaacaacgcgagacgggctgatcggttgaggggtaaggccaa

SEQ ID NO: 264696 - DNA, 51 bp, Artificial
  Synthetic oligonucleotide
gcttggtggagggccgtcccctcatccttgggggcattcaactagaacact

SEQ ID NO: 264697 - DNA, 60 bp, Artificial
  Synthetic oligonucleotide
atatcgatcacattagcgagctcgacagtagcccgaccgggggcgctctagggatggcga

SEQ ID NO: 264698 - DNA, 51 bp, Artificial
  Synthetic oligonucleotide
gacatcatctccgctgtagaaaatccttggatcagtgacgtgataacgcaa

SEQ ID NO: 264699 - DNA, 51 bp, Artificial
  Synthetic oligonucleotide
ctgttttcgggtctagaggatcggggtaatgaatgtataccgcatcgtgcc

SEQ ID NO: 264700 - DNA, 51 bp, Artificial
  Synthetic oligonucleotide
ggaactgctcgattgatcgataacctaactttgcaaggacgacgaccaatc

SEQ ID NO: 264701 - DNA, 51 bp, Artificial
  Synthetic oligonucleotide
gattgcgactcagcaaccactggcgctagggcgattgccaccgcaagagca

SEQ ID NO: 264702 - DNA, 51 bp, Artificial
  Synthetic oligonucleotide
gggttttcgtgcgcgggctctagcggtggttcctgtcctgaaggtaacgag

SEQ ID NO: 264703 - DNA, 51 bp, Artificial
  Synthetic oligonucleotide
gcaaactgcacagcgctagtctctggcggagcgatcaatcccccgaacgtg

SEQ ID NO: 264704 - DNA, 51 bp, Artificial
  Synthetic oligonucleotide
gcagccctcgatgaacccgaaaccaccttagaacccagtcagcggggaatt

SEQ ID NO: 264705 - DNA, 51 bp, Artificial
  Synthetic oligonucleotide
ggaggcaccacacgagaccatgggccaatctcggctgctgccatgactggc

SEQ ID NO: 264706 - DNA, 51 bp, Artificial
  Synthetic oligonucleotide
ggagatcaccggtggattcgcaacagggtcgtgtgcctcccctgcacggga

SEQ ID NO: 264707 - DNA, 51 bp, Artificial
  Synthetic oligonucleotide
tacgcccctcattgtaggcagagttggcgatcgcaacagttcagggacctg

SEQ ID NO: 264708 - DNA, 60 bp, Artificial
  Synthetic oligonucleotide
tttagtgatgcgtttttgattgtggctccaggcattacgatccgcgatcgcctacgggtg

SEQ ID NO: 264709 - DNA, 51 bp, Artificial
  Synthetic oligonucleotide
gtcccgcttgcagcgaaggccgcggttgtacgcgggtgagttcacactccc

SEQ ID NO: 264710 - DNA, 51 bp, Artificial
  Synthetic oligonucleotide
gatgtcggaacaattgtggtcgctcaccgggatcgactctgccggtttgga

SEQ ID NO: 264711 - DNA, 51 bp, Artificial
  Synthetic oligonucleotide
cgttaaccctcggtgctggggcgaccctatggctctatcgtctgcagcgct

SEQ ID NO: 264712 - DNA, 51 bp, Artificial
  Synthetic oligonucleotide
ggcggagcggcttttattgatcgcccgcaacccttggtgcttaataggggc

SEQ ID NO: 264713 - DNA, 51 bp, Artificial
  Synthetic oligonucleotide
gatgggcaggaaggcggaacctcaatccttcacttggcctgaggggagcct

SEQ ID NO: 264714 - DNA, 51 bp, Artificial
  Synthetic oligonucleotide
gcgctagtctctggcggagcgatcaatcccccgaacgtggcaggattccta

SEQ ID NO: 264715 - DNA, 51 bp, Artificial
  Synthetic oligonucleotide
gtggatcaatcgaagccgacacacagagctgcgttgttccaacccaggctc

SEQ ID NO: 264716 - DNA, 51 bp, Artificial
  Synthetic oligonucleotide
ctaaggcttcattcgtccgccgcttaaaaaaagacccccattgcgggggcc

SEQ ID NO: 264717 - DNA, 51 bp, Artificial
  Synthetic oligonucleotide
gcctcgaagcacagaagacggctggttggtgggcgactacctacgcgatcg

SEQ ID NO: 264718 - DNA, 51 bp, Artificial
  Synthetic oligonucleotide
ggggtcgggcaagcaaccgaccctcctccgtttggactagctggaagctaa

SEQ ID NO: 264719 - DNA, 59 bp, Artificial
  Synthetic oligonucleotide
tggtttcagcggcaaccccgatcgctgttggctaatcaccggactggcttcaggttcca

SEQ ID NO: 264720 - DNA, 51 bp, Artificial
  Synthetic oligonucleotide
ctatcaaaggacgattgagtgtattgaactactcactatgtgggcaaccga

SEQ ID NO: 264721 - DNA, 51 bp, Artificial
  Synthetic oligonucleotide
gagggcagcttgggtggcaatttggtcacgtgtaataattgtgacagagcg

SEQ ID NO: 264722 - DNA, 51 bp, Artificial
  Synthetic oligonucleotide
ggggcacctagggcgatgcatcgggactcagcagaaccgtccattcgcagg

SEQ ID NO: 264723 - DNA, 51 bp, Artificial
  Synthetic oligonucleotide
gccgggggagtcgtctgcgctgccagagagttcctcctccgattcttaatg

SEQ ID NO: 264724 - DNA, 51 bp, Artificial
  Synthetic oligonucleotide
tggggccaacggctcattggcctggtcaaaccgtcaccaggcgccaatggt

SEQ ID NO: 264725 - DNA, 51 bp, Artificial
  Synthetic oligonucleotide
agtcgttcatacacggcacttcaaccgagataccgtgccattgggttacac

SEQ ID NO: 264726 - DNA, 51 bp, Artificial
  Synthetic oligonucleotide
aacaatagacctaatagtgttaatccgaaatcaatccctgatgtaacacca

SEQ ID NO: 264727 - DNA, 51 bp, Artificial
  Synthetic oligonucleotide
agtcagcagttaccaaagttagggaatgattgattgcttgggcaatgagaa

SEQ ID NO: 264728 - DNA, 51 bp, Artificial
  Synthetic oligonucleotide
agtatcgctagcctcaaagcctgatattagcgcctcgctgaaaggagcatc

SEQ ID NO: 264729 - DNA, 51 bp, Artificial
  Synthetic oligonucleotide
cccagacggcagtcaagcggaactgtggcagcggcgagccctgaccctctc

SEQ ID NO: 264730 - DNA, 60 bp, Artificial
  Synthetic oligonucleotide
cattcgatgtcgatgtgagtaataatagtgggaccattggtacccgaactgcacacctac

SEQ ID NO: 264731 - DNA, 51 bp, Artificial
  Synthetic oligonucleotide
aggtgtgcgcccattgagggtgccctgcttacagtcggctgtgaactccac

SEQ ID NO: 264732 - DNA, 51 bp, Artificial
  Synthetic oligonucleotide
aggtgctggcgtagtggacgctcggaatgtctggaaggttcagcctgagac

SEQ ID NO: 264733 - DNA, 51 bp, Artificial
  Synthetic oligonucleotide
aacacgctcataaacaaaaccttggcggatgttacgcgatacaggatcagc

SEQ ID NO: 264734 - DNA, 51 bp, Artificial
  Synthetic oligonucleotide
aacagacgccgtaacttggcgacacagtcatgggaagtccagcccgctggc

SEQ ID NO: 264735 - DNA, 51 bp, Artificial
  Synthetic oligonucleotide
tgccgatggagtgagtttgaccctgggcattggtttgggtaagggtggccg

SEQ ID NO: 264736 - DNA, 51 bp, Artificial
  Synthetic oligonucleotide
aggcgttcagcaaactgcacagcgctagtctctggcggagcgatcaatccc

SEQ ID NO: 264737 - DNA, 51 bp, Artificial
  Synthetic oligonucleotide
tgaaggagccgcgtctgctctgctacgcagcgagacacgcaagacacaacc

SEQ ID NO: 264738 - DNA, 51 bp, Artificial
  Synthetic oligonucleotide
tcgagcggtcgctttaaagccgccttctgaccggaattgctggtgaccgtc

SEQ ID NO: 264739 - DNA, 51 bp, Artificial
  Synthetic oligonucleotide
tccgcctgaaactcgttggtcaatcgccggagggttgcaagatcgctggag

SEQ ID NO: 264740 - DNA, 51 bp, Artificial
  Synthetic oligonucleotide
tccccgtccgtgggtcttgtttcagtcccgtaatcgggatttagtggttgg

SEQ ID NO: 264741 - DNA, 60 bp, Artificial
  Synthetic oligonucleotide
catcgctatcgggtcgaaagtcatcccgcaaaatcgagccgaatagcgatagttcactga

SEQ ID NO: 264742 - DNA, 51 bp, Artificial
  Synthetic oligonucleotide
caacgcatattacagtacggagctaatgtacaaattctcactcctccatgg

SEQ ID NO: 264743 - DNA, 51 bp, Artificial
  Synthetic oligonucleotide
ttttgtcctagaccaatacattcgagaaggagtggaggaacttgatcgggg

SEQ ID NO: 264744 - DNA, 51 bp, Artificial
  Synthetic oligonucleotide
ttttcggcggcaaggtagcgataccgggaaaggtggcccacttcaatgagc

SEQ ID NO: 264745 - DNA, 51 bp, Artificial
  Synthetic oligonucleotide
attaatttcgacccctcgctagggcagcagcccgctccctttagctccccg

SEQ ID NO: 264746 - DNA, 51 bp, Artificial
  Synthetic oligonucleotide
ttggccatggctatcggttgcggacggggacagatgggcgatcgatcagct

SEQ ID NO: 264747 - DNA, 51 bp, Artificial
  Synthetic oligonucleotide
cagcagttgaaccgaatccgagaccactactccaagctgagggcggcactc

SEQ ID NO: 264748 - DNA, 51 bp, Artificial
  Synthetic oligonucleotide
ttccgagcggctaactttgtcctgcagtgggtcaatcggcactgggctcat

SEQ ID NO: 264749 - DNA, 51 bp, Artificial
  Synthetic oligonucleotide
caggtcaagttttgacactcccacccaggggattcttacgcagcccaaaat

SEQ ID NO: 264750 - DNA, 51 bp, Artificial
  Synthetic oligonucleotide
atccagcgcctctatatcctgctgagactcgcaccactcccattgatgccg

SEQ ID NO: 264751 - DNA, 51 bp, Artificial
  Synthetic oligonucleotide
cagtcttcacctagctgaattgtgatatcggactctaggtcgcccgtactt

SEQ ID NO: 264752 - DNA, 57 bp, Artificial
  Synthetic oligonucleotide
cataagttagaaactcgctacctactgctaattctttggcacgaccataattaatcg

SEQ ID NO: 264753 - DNA, 51 bp, Artificial
  Synthetic oligonucleotide
aaagcaacagacacgcgcgaactgacagaagaaaccttgaatcttatgatg

SEQ ID NO: 264754 - DNA, 51 bp, Artificial
  Synthetic oligonucleotide
atccaaacgactttatagcaacgccgctaggtccaaagagagcgacaccag

SEQ ID NO: 264755 - DNA, 51 bp, Artificial
  Synthetic oligonucleotide
catcagcagtcgtcacccgctggagagtgcgtaccagactggtttccacgg

SEQ ID NO: 264756 - DNA, 51 bp, Artificial
  Synthetic oligonucleotide
catcagctcacacccacaggccgccacagtccctgcttagggagatttctc

SEQ ID NO: 264757 - DNA, 51 bp, Artificial
  Synthetic oligonucleotide
atatctggggaacaagtagtgaatccacaggaagttgctgaaaccatgact

SEQ ID NO: 264758 - DNA, 51 bp, Artificial
  Synthetic oligonucleotide
tataggtaccgaaagccataatcctgccgggttgattcctcgaactgtacg

SEQ ID NO: 264759 - DNA, 51 bp, Artificial
  Synthetic oligonucleotide
tcagtacatacgtggtcagtcaaggttcaacgaagacacagcttcgattga

SEQ ID NO: 264760 - DNA, 51 bp, Artificial
  Synthetic oligonucleotide
tcagtagactaatcaggtacattaaccgctcaaagtctagtaggcgagaat

SEQ ID NO: 264761 - DNA, 51 bp, Artificial
  Synthetic oligonucleotide
cgctggcttacaactgattaacccctttcaaccgaactagtgatcgagggg

SEQ ID NO: 264762 - DNA, 51 bp, Artificial
  Synthetic oligonucleotide
tcatgccctgcgagaatttgggcaataccaacccgtttcatagcacaaacc

SEQ ID NO: 264763 - DNA, 60 bp, Artificial
  Synthetic oligonucleotide
ctgcgctgccacggctctgctagccaaacccggtaaggcgcaggcgtatagtggagggcg

SEQ ID NO: 264764 - DNA, 60 bp, Artificial
  Synthetic oligonucleotide
tgtacattctagataactgcccaaaggcgattatctccaaagccatatatgacggcggta

SEQ ID NO: 264765 - DNA, 51 bp, Artificial
  Synthetic oligonucleotide
tccaacagtcttatcctggtttctggtagcgtcaccattgattttcctgac

SEQ ID NO: 264766 - DNA, 51 bp, Artificial
  Synthetic oligonucleotide
tccataattccgcccctcaaaaccaatttatcgaagaagtgattagggaag

SEQ ID NO: 264767 - DNA, 50 bp, Artificial
  Synthetic oligonucleotide
aaagcccgcctaaactcaggcacccacttgctcgtgaccggtgccctgtg

SEQ ID NO: 264768 - DNA, 50 bp, Artificial
  Synthetic oligonucleotide
tcagtggttggacccgcaagcaccctcagggaaaaccgcacggaccaaaa

SEQ ID NO: 264769 - DNA, 50 bp, Artificial
  Synthetic oligonucleotide
tcagtatgtggttacccacaaaactccatcgccgccccaaacatacggag

SEQ ID NO: 264770 - DNA, 50 bp, Artificial
  Synthetic oligonucleotide
aacgtctcgcctgtagccctgtgaagtgttattccagggtgcccgtgcgc

SEQ ID NO: 264771 - DNA, 50 bp, Artificial
  Synthetic oligonucleotide
aaagcactctcgacgcagccatcgtaccgtctcggcaacacccagcacgt

SEQ ID NO: 264772 - DNA, 50 bp, Artificial
  Synthetic oligonucleotide
aacgtttggggctcggctttgagcgcagctgtctgtggcctaatcgcgat

SEQ ID NO: 264773 - DNA, 50 bp, Artificial
  Synthetic oligonucleotide
aattccgcggcgggcacagtggggtgttcgatgactctctgccctaatcc

SEQ ID NO: 264774 - DNA, 50 bp, Artificial
  Synthetic oligonucleotide
aagccaaacgaaccgcggacggcccaagatgccttcacatcactgcgatc

SEQ ID NO: 264775 - DNA, 54 bp, Artificial
  Synthetic oligonucleotide
aaagggggatacgtcctgtcacccgttggatgagggcagtatctccgtctaaac

SEQ ID NO: 264776 - DNA, 49 bp, Artificial
  Synthetic oligonucleotide
acaacccgctcacccgtttcttaccgggactcccccgttggatgcccct

SEQ ID NO: 264777 - DNA, 50 bp, Artificial
  Synthetic oligonucleotide
tcagccggatgcagcgcgttccctttaaccgcgatcgccctagattgact

SEQ ID NO: 264778 - DNA, 50 bp, Artificial
  Synthetic oligonucleotide
aaactgtgggcatgggttctggccctacggccgcagtccttggctgacgc

SEQ ID NO: 264779 - DNA, 50 bp, Artificial
  Synthetic oligonucleotide
aagaacacccgggtcatgcgatgtcgaactaagggcgcttgtccaggggc

SEQ ID NO: 264780 - DNA, 50 bp, Artificial
  Synthetic oligonucleotide
acaacccgtggtggcccgagtcaacgccggactgatccgttcctgccatg

SEQ ID NO: 264781 - DNA, 50 bp, Artificial
  Synthetic oligonucleotide
acaaccgcaagcccctgaagaccgaaggccatctcagccgagatccacgg

SEQ ID NO: 264782 - DNA, 50 bp, Artificial
  Synthetic oligonucleotide
aaactctggagtgcttctggctcggcgaaattggtcacggcctgtgggct

SEQ ID NO: 264783 - DNA, 50 bp, Artificial
  Synthetic oligonucleotide
aagaggccaccgcagcggtctcaatcaccgacaggggatgctcgagagca

SEQ ID NO: 264784 - DNA, 50 bp, Artificial
  Synthetic oligonucleotide
aagcagctacgcagggtcgctagcaaacggtcgtagacttctgcgacgcg

SEQ ID NO: 264785 - DNA, 50 bp, Artificial
  Synthetic oligonucleotide
gggcttcgtcaaacagtgcaccatagggttgcagtcgccacagcactaaa

SEQ ID NO: 264786 - DNA, 60 bp, Artificial
  Synthetic oligonucleotide
attacgccgcaatgatggcaggcttcgggatacttggcttaagcgatatgcctttgtcga

SEQ ID NO: 264787 - DNA, 50 bp, Artificial
  Synthetic oligonucleotide
acaacgcaacggactgcaatccccgctgttccttgaggcaatgcgcgaca

SEQ ID NO: 264788 - DNA, 50 bp, Artificial
  Synthetic oligonucleotide
acaacggctaccctcgtcgcgcccgctgctaacgtcgggccaagattatc

SEQ ID NO: 264789 - DNA, 50 bp, Artificial
  Synthetic oligonucleotide
acaatttgattgcccgcttgggcccgttgctgtacccgtttggccaccgc

SEQ ID NO: 264790 - DNA, 50 bp, Artificial
  Synthetic oligonucleotide
acacaagggccagccgatctcacaagcatgcgggatccagtcagtccgta

SEQ ID NO: 264791 - DNA, 50 bp, Artificial
  Synthetic oligonucleotide
acacataggcacgctcctggcagagccctttggcgccgaattcccgatct

SEQ ID NO: 264792 - DNA, 50 bp, Artificial
  Synthetic oligonucleotide
aacaaagctctcgcctcatcagaccgtgacctgcgctctcgcctctcggc

SEQ ID NO: 264793 - DNA, 50 bp, Artificial
  Synthetic oligonucleotide
aaatgttcctgggtgtgggtcgccatcacactggtccggagggcggcttt

SEQ ID NO: 264794 - DNA, 50 bp, Artificial
  Synthetic oligonucleotide
aatcgctattgcccgagctcctgttgcagaccgaccgggtctcacccaat

SEQ ID NO: 264795 - DNA, 48 bp, Artificial
  Synthetic oligonucleotide
aatcgtcccgctcccccttgtcccacccgcaaacggactttaccgggg

SEQ ID NO: 264796 - DNA, 50 bp, Artificial
  Synthetic oligonucleotide
aaatcttgccgcgcatatttcgagcggaccaacccatggggcaggcaccc

SEQ ID NO: 264797 - DNA, 58 bp, Artificial
  Synthetic oligonucleotide
cagtagagcaaatcgcaggccacctcatagtttcagtcccgtaatcgggatttagtgg

SEQ ID NO: 264798 - DNA, 50 bp, Artificial
  Synthetic oligonucleotide
aatctcaagagcctccgcccttcgctcactcggctttcccagtcacgccg

SEQ ID NO: 264799 - DNA, 50 bp, Artificial
  Synthetic oligonucleotide
ggtagcttgctcagaactcagctcacagcctagataaaaactcaagctgg

SEQ ID NO: 264800 - DNA, 50 bp, Artificial
  Synthetic oligonucleotide
aatctggctatacaccacctgactgcggtcacgtcccatccagcccccgc

SEQ ID NO: 264801 - DNA, 50 bp, Artificial
  Synthetic oligonucleotide
aaatctgctggccctctgcggtctgccgagtcgacaggatgcctggagcc

SEQ ID NO: 264802 - DNA, 50 bp, Artificial
  Synthetic oligonucleotide
aaaggtcgactgaacggtgccttggatgctcgtgtggaagcgcgaggact

SEQ ID NO: 264803 - DNA, 50 bp, Artificial
  Synthetic oligonucleotide
aatgctcggcaccgcagcgagtggagagatcaccaagatcggggctcaac

SEQ ID NO: 264804 - DNA, 50 bp, Artificial
  Synthetic oligonucleotide
aaaggggcgactctacccgcagtggtaggaaccgcgtcgtcgtaaggcgc

SEQ ID NO: 264805 - DNA, 50 bp, Artificial
  Synthetic oligonucleotide
aaaggcgttgggctggacgctaccacgtgtgatgagctggtgagtccggc

SEQ ID NO: 264806 - DNA, 50 bp, Artificial
  Synthetic oligonucleotide
aagccagagactcgtgccttccgcgttccgaggtggacgccccaaaggta

SEQ ID NO: 264807 - DNA, 50 bp, Artificial
  Synthetic oligonucleotide
aatggacagcccccagttccgcagtagcagacctcgccgacttgggccca

SEQ ID NO: 264808 - DNA, 58 bp, Artificial
  Synthetic oligonucleotide
ttaatatcctcacgacagttggaacgagtactttaggaaatagtggtcagctgagttg

SEQ ID NO: 264809 - DNA, 50 bp, Artificial
  Synthetic oligonucleotide
aatggacgcttccgggtgtacctctccaccgggacgtaccagggcgtttt

SEQ ID NO: 264810 - DNA, 50 bp, Artificial
  Synthetic oligonucleotide
aatggcccacaggccccgaccactaaaggagagcgcaaggtcatgcctaa

SEQ ID NO: 264811 - DNA, 50 bp, Artificial
  Synthetic oligonucleotide
aaaggacaaccccctgaagccgcgatcgcagccgtacgagcacttcgtcc

SEQ ID NO: 264812 - DNA, 50 bp, Artificial
  Synthetic oligonucleotide
aatggcgtgctggtctggaccttggtcacgggtttgcccctgcaaatagc

SEQ ID NO: 264813 - DNA, 50 bp, Artificial
  Synthetic oligonucleotide
aaagcttcgccgtaaccgatcgtttgcagcagtggtagatccgcgccgta

SEQ ID NO: 264814 - DNA, 50 bp, Artificial
  Synthetic oligonucleotide
aaagccttggatccgatctcaagcactgcccgccagcagccaacccggat

SEQ ID NO: 264815 - DNA, 50 bp, Artificial
  Synthetic oligonucleotide
aatgggagcaggggtgcgggattgacttgtcgggggctgttcgggaatga

SEQ ID NO: 264816 - DNA, 50 bp, Artificial
  Synthetic oligonucleotide
aatggttgcgaccttcatctgggcggcatcccccaaccgcataatcgccc

SEQ ID NO: 264817 - DNA, 50 bp, Artificial
  Synthetic oligonucleotide
aagcaaggccgaatgcgcacgtagccgtggcatgtcccctgggaatctct

SEQ ID NO: 264818 - DNA, 50 bp, Artificial
  Synthetic oligonucleotide
acagcggcagtccccggtgagagcaagcgactgaaaggggcctccatcgt

SEQ ID NO: 264819 - DNA, 59 bp, Artificial
  Synthetic oligonucleotide
atcgacctacagcacgcagaacttagaatcactctttagggagaaatatcccgataaga

SEQ ID NO: 264820 - DNA, 50 bp, Artificial
  Synthetic oligonucleotide
acagcggctgaacggccaccaatgtttctcgaggcgaacccacggcactg

SEQ ID NO: 264821 - DNA, 50 bp, Artificial
  Synthetic oligonucleotide
ttggggcgcaacggtacgcactaattcttgccattcgctgacagccgcta

SEQ ID NO: 264822 - DNA, 50 bp, Artificial
  Synthetic oligonucleotide
aaacccgtgctgaaggccccaaccaaccgatacacctgcggggaagcact

SEQ ID NO: 264823 - DNA, 50 bp, Artificial
  Synthetic oligonucleotide
acaggaggggttccaggcgttgatccgtgatctggagcgttggcttgccg

SEQ ID NO: 264824 - DNA, 50 bp, Artificial
  Synthetic oligonucleotide
acagggtcggtaggatcggcaatgctaatagcctggagctccgtgccccc

SEQ ID NO: 264825 - DNA, 50 bp, Artificial
  Synthetic oligonucleotide
acaggtcgggcgccgacaatccatcatgacgaaacgaaccctgggtggta

SEQ ID NO: 264826 - DNA, 50 bp, Artificial
  Synthetic oligonucleotide
aaacccggatgtcagaagcctgctccttgcgtctgcgaagcgtgtgctcg

SEQ ID NO: 264827 - DNA, 50 bp, Artificial
  Synthetic oligonucleotide
acagtgggatggcaaaggggcgtgatcactggtcagcctcccgaaaccgg

SEQ ID NO: 264828 - DNA, 50 bp, Artificial
  Synthetic oligonucleotide
aaaccactgcgctgtctggggaaacaccgctgccagttggaccacgctca

SEQ ID NO: 264829 - DNA, 50 bp, Artificial
  Synthetic oligonucleotide
acagtgttggcgcgaccgagacgcctgatgtggtagtcgctgagcagtct

SEQ ID NO: 264830 - DNA, 60 bp, Artificial
  Synthetic oligonucleotide
cagcggtctggccaattctactcagcaccagcagcggtactgcggctgttaaccacaagc

SEQ ID NO: 264831 - DNA, 50 bp, Artificial
  Synthetic oligonucleotide
acatcaggccgacaaattggtgccaatcgccgcgctagccaacgttccgt

SEQ ID NO: 264832 - DNA, 50 bp, Artificial
  Synthetic oligonucleotide
aagaggtatttcggcgggccagggagctagctgtggttttgggatgcgcg

SEQ ID NO: 264833 - DNA, 50 bp, Artificial
  Synthetic oligonucleotide
acatgcagcgttggtccctcagcctcgtagcccgaagtcgctggctcccc

SEQ ID NO: 264834 - DNA, 50 bp, Artificial
  Synthetic oligonucleotide
tttcctactgctgatgttttgcgctgggctaacgggccctgacttcgtta

SEQ ID NO: 264835 - DNA, 50 bp, Artificial
  Synthetic oligonucleotide
aagcaaccgcaccctccagtttgcgctggtcactaccttgagggcagtgc

SEQ ID NO: 264836 - DNA, 50 bp, Artificial
  Synthetic oligonucleotide
aaaagcatcgatggtgctatttgcccgtcatttcagtcggcaggtccaag

SEQ ID NO: 264837 - DNA, 50 bp, Artificial
  Synthetic oligonucleotide
acatggcatagccccaccaaattggctcagcgggcacgtcaacttggcta

SEQ ID NO: 264838 - DNA, 50 bp, Artificial
  Synthetic oligonucleotide
aaaagcagcgagccgaggggtggagtggcgcttgccgtacacaagcacct

SEQ ID NO: 264839 - DNA, 50 bp, Artificial
  Synthetic oligonucleotide
aagatccacgctggagaccgtaccgtaacagcccacagttggcgctgcaa

SEQ ID NO: 264840 - DNA, 50 bp, Artificial
  Synthetic oligonucleotide
tagtcgcgagagtgaatctggccccgggcgcaacagcttcgacccgcttt

SEQ ID NO: 264841 - DNA, 56 bp, Artificial
  Synthetic oligonucleotide
ttatcccgacctatccccgatgccctcctaggtacaaaagaccgctctatcactta

SEQ ID NO: 264842 - DNA, 50 bp, Artificial
  Synthetic oligonucleotide
aaaacttcgaacgcaaaaccgttcacgcttgccattgctgattgcactcg

SEQ ID NO: 264843 - DNA, 50 bp, Artificial
  Synthetic oligonucleotide
accaaccccaagcaaatcgacggccaaacgcacggctcaatgctcggcta

SEQ ID NO: 264844 - DNA, 50 bp, Artificial
  Synthetic oligonucleotide
aaacgccttgcaacaaggagttgtggccgaccatgctatggcgcttcgga

SEQ ID NO: 264845 - DNA, 50 bp, Artificial
  Synthetic oligonucleotide
aaacgccctgggttagtcgtcaccctgctaaacctccatagaccgcgcga

SEQ ID NO: 264846 - DNA, 50 bp, Artificial
  Synthetic oligonucleotide
gggcaatggccactcccagacggcagtcaagcggaactgtggcagcggcg

SEQ ID NO: 264847 - DNA, 50 bp, Artificial
  Synthetic oligonucleotide
acaccacggggtttgccggtggcccagcaacgattcctcatccgggaggg

SEQ ID NO: 264848 - DNA, 50 bp, Artificial
  Synthetic oligonucleotide
ttcgagggcagtctcagccgtggccgagggatgtagccggttaatgacga

SEQ ID NO: 264849 - DNA, 50 bp, Artificial
  Synthetic oligonucleotide
aaacgccattggagagtcccgactggctaaaccaaggagccgcagtggct

SEQ ID NO: 264850 - DNA, 50 bp, Artificial
  Synthetic oligonucleotide
aaacgcacatctctccccgtcttggcggagcgactgcgtaggcttcacgc

SEQ ID NO: 264851 - DNA, 50 bp, Artificial
  Synthetic oligonucleotide
acaccttggctggctcgtcgctaccgccaggcccaaaggccacgccaggc

SEQ ID NO: 264852 - DNA, 56 bp, Artificial
  Synthetic oligonucleotide
ttcaaagatggtctatgactggattgtaggttgggatacgggtaaacgtttgccga

SEQ ID NO: 264853 - DNA, 50 bp, Artificial
  Synthetic oligonucleotide
acacggcgagatgttgaaaccgcagtccctcaacgcgggggaggaagtcg

SEQ ID NO: 264854 - DNA, 50 bp, Artificial
  Synthetic oligonucleotide
acacggggtcgtgacagcggcagtccccggtgagagcaagcgactgaaag

SEQ ID NO: 264855 - DNA, 50 bp, Artificial
  Synthetic oligonucleotide
acacggtgtctgcggcccaggcaagcggtagcgtcatggtcgaagcgttg

SEQ ID NO: 264856 - DNA, 50 bp, Artificial
  Synthetic oligonucleotide
aagagggttgggaacgaccgctgagtgattggcgagacgccctcggaata

SEQ ID NO: 264857 - DNA, 50 bp, Artificial
  Synthetic oligonucleotide
ggctggttggtgggcgactacctacgcgatcgtgcttacgaagaagcgcg

SEQ ID NO: 264858 - DNA, 50 bp, Artificial
  Synthetic oligonucleotide
acagacgctgggatcagcgcccgaagatgcaaatcccttgcctggcagcc

SEQ ID NO: 264859 - DNA, 50 bp, Artificial
  Synthetic oligonucleotide
ttgagcggtgcggaggggttgaccctattgattgtggccgtcaatggcct

SEQ ID NO: 264860 - DNA, 50 bp, Artificial
  Synthetic oligonucleotide
ttgatgcacgacttctgcacggtgagcctcagtgatcgactgactccttg

SEQ ID NO: 264861 - DNA, 50 bp, Artificial
  Synthetic oligonucleotide
aaacgagcaatcttccttgcacgcctgcggccctcgtctgtaggcttcct

SEQ ID NO: 264862 - DNA, 50 bp, Artificial
  Synthetic oligonucleotide
acagattgccggctggttgacaaaagcaggtggggtggcgctagcagctc

SEQ ID NO: 264863 - DNA, 52 bp, Artificial
  Synthetic oligonucleotide
ttcagtcccgtaatcgggatttagtggttggaaagtgggacgctccgtaagg

SEQ ID NO: 264864 - DNA, 50 bp, Artificial
  Synthetic oligonucleotide
acagcaaattccagtcccggcaacggtacaggggtgtatacggcggctgc

SEQ ID NO: 264865 - DNA, 50 bp, Artificial
  Synthetic oligonucleotide
acagcaggtaggtttagccgagcacatagctccccgccgactttcgccgc

SEQ ID NO: 264866 - DNA, 50 bp, Artificial
  Synthetic oligonucleotide
aaaccgacctgatccgcgctgcctcacaactgatccccctgtccagaacg

SEQ ID NO: 264867 - DNA, 50 bp, Artificial
  Synthetic oligonucleotide
acagccagctcgtggtctggggcatagccggccagatgtcgcacatagcg

SEQ ID NO: 264868 - DNA, 50 bp, Artificial
  Synthetic oligonucleotide
acagcccatccgagcttcgcctgtatgcagacgggtatctccacgcccta

SEQ ID NO: 264869 - DNA, 50 bp, Artificial
  Synthetic oligonucleotide
ggccgatctgacgaccggagtgagcaagtcccgcataggctcgccttcac

SEQ ID NO: 264870 - DNA, 50 bp, Artificial
  Synthetic oligonucleotide
aacggcacggggagccacggtcgcttagcgggcaagggggtgcgcaaatc

SEQ ID NO: 264871 - DNA, 50 bp, Artificial
  Synthetic oligonucleotide
aaggaactcgccatcggttctctcccgcatcggtccttgcctgcaggatt

SEQ ID NO: 264872 - DNA, 50 bp, Artificial
  Synthetic oligonucleotide
aaggaagccgccgttatggacagcccaagtcgaggcggtttgtggatccc

SEQ ID NO: 264873 - DNA, 50 bp, Artificial
  Synthetic oligonucleotide
aacgctcgtcaggcgctagacagctatctgggctggtgcgtacgcaaagg

SEQ ID NO: 264874 - DNA, 53 bp, Artificial
  Synthetic oligonucleotide
actaactaatcccgatggcgaaacctgtccttccctcgataacccttggaata

SEQ ID NO: 264875 - DNA, 55 bp, Artificial
  Synthetic oligonucleotide
atctaagctgaagacgtacagccgtccacgggcttggttccgcaccaaaacggcg

SEQ ID NO: 264876 - DNA, 50 bp, Artificial
  Synthetic oligonucleotide
gtgctcaccacccgtcgccctgagaggttgtaagacccgcttgctacggc

SEQ ID NO: 264877 - DNA, 50 bp, Artificial
  Synthetic oligonucleotide
tcggctggctctgttgcgcggctaattccccttgcagtcgcaccgtcagc

SEQ ID NO: 264878 - DNA, 50 bp, Artificial
  Synthetic oligonucleotide
aaggcacagtcgctcgggtcttagtgacggatagttcgcaaccgtgcgcg

SEQ ID NO: 264879 - DNA, 50 bp, Artificial
  Synthetic oligonucleotide
aacgcgcaaccatccacgtgtgaacccacaactcacgggatctgagccca

SEQ ID NO: 264880 - DNA, 50 bp, Artificial
  Synthetic oligonucleotide
aacgccctgtccttgtcgagatggctctaccgcaaccgggccaagatgcc

SEQ ID NO: 264881 - DNA, 50 bp, Artificial
  Synthetic oligonucleotide
aacgcccgagctcttcacggcatcgcttgggcagaactgttgccagagtc

SEQ ID NO: 264882 - DNA, 50 bp, Artificial
  Synthetic oligonucleotide
aaggccgggttactcccgccaaacaaggtcgcttgggcaacccctggaat

SEQ ID NO: 264883 - DNA, 50 bp, Artificial
  Synthetic oligonucleotide
aacgatcggtgatcgctggcaagagggcaaccgctgctggcttctgttga

SEQ ID NO: 264884 - DNA, 50 bp, Artificial
  Synthetic oligonucleotide
aaggcggcaacaggcacccttagctgaccgattgagacccacatccctcg

SEQ ID NO: 264885 - DNA, 50 bp, Artificial
  Synthetic oligonucleotide
aacgaagccacatgccgtgatttagatgcccgggaggagcccaggactgc

SEQ ID NO: 264886 - DNA, 60 bp, Artificial
  Synthetic oligonucleotide
cacaatggttcgtctgcagaagctgtgattgcctgaggtaagtcttggttcggggggcca

SEQ ID NO: 264887 - DNA, 50 bp, Artificial
  Synthetic oligonucleotide
aacctgcaggcgggagtctgtacctcgtgggcacaccgatcggacatctg

SEQ ID NO: 264888 - DNA, 50 bp, Artificial
  Synthetic oligonucleotide
aagggcgctaccgaacacgctccaaccacgcccgaacgaacgtcctaaaa

SEQ ID NO: 264889 - DNA, 50 bp, Artificial
  Synthetic oligonucleotide
aacctgagcgctccaagcttagccgcacatgagccaaacgaccagtcggc

SEQ ID NO: 264890 - DNA, 50 bp, Artificial
  Synthetic oligonucleotide
aagggcgtggactgcaagccaccggaccgtgaagatcgggtagttgcgag

SEQ ID NO: 264891 - DNA, 50 bp, Artificial
  Synthetic oligonucleotide
aacctacgcgatgccaagctgactggggccaacctaagcggggtagctct

SEQ ID NO: 264892 - DNA, 50 bp, Artificial
  Synthetic oligonucleotide
aacccgttcttgtggacggacaactgcttccctccgacgatcccagggcc

SEQ ID NO: 264893 - DNA, 50 bp, Artificial
  Synthetic oligonucleotide
aagggctcagggtcagctcgtgactcctgcagtcgcaacccatcccctgc

SEQ ID NO: 264894 - DNA, 50 bp, Artificial
  Synthetic oligonucleotide
aacccctgactctcactggagcattgggccccaaagaggggaccgctggc

SEQ ID NO: 264895 - DNA, 50 bp, Artificial
  Synthetic oligonucleotide
aaggggcactcggtcgccagggggtcaccagcaactactcccgggagcat

SEQ ID NO: 264896 - DNA, 50 bp, Artificial
  Synthetic oligonucleotide
gtcgggctccccggaaggtgcggtcgggataacccacaatgcagccatac

SEQ ID NO: 264897 - DNA, 57 bp, Artificial
  Synthetic oligonucleotide
cactactcgctactgcaacaacagagcggacggaaatccgaacttttcccgacctgc

SEQ ID NO: 264898 - DNA, 50 bp, Artificial
  Synthetic oligonucleotide
aagcgcgattgaggacagcttcggcgttgcccgatggattgccgattggg

SEQ ID NO: 264899 - DNA, 50 bp, Artificial
  Synthetic oligonucleotide
aagcctacagacgagggccgcaggcgtgcaaggaagattgctcgtttgct

SEQ ID NO: 264900 - DNA, 50 bp, Artificial
  Synthetic oligonucleotide
aacgtcgcccctgagaccagtcccgtgagcctcaatcaagacaccccagg

SEQ ID NO: 264901 - DNA, 50 bp, Artificial
  Synthetic oligonucleotide
aagcggctgtgtcccctagctgtgcggatcaactcatcggtacgcgccac

SEQ ID NO: 264902 - DNA, 50 bp, Artificial
  Synthetic oligonucleotide
aacgtccgccgctgtgattcgcttccaacgcctacgccggctttggcaca

SEQ ID NO: 264903 - DNA, 50 bp, Artificial
  Synthetic oligonucleotide
aagccgctacgaccagctgcgaccccgggaactcttcaacgctggagggc

SEQ ID NO: 264904 - DNA, 50 bp, Artificial
  Synthetic oligonucleotide
aacggttgcctctgggattgtgccactctcggaaccgaagataaaggcga

SEQ ID NO: 264905 - DNA, 50 bp, Artificial
  Synthetic oligonucleotide
aacggtggaggatttggtcatggagtgggcctctcgcaagctggcgccat

SEQ ID NO: 264906 - DNA, 50 bp, Artificial
  Synthetic oligonucleotide
aacggtcaacactgacccttgcaagtggtgtgcccgctctggagacgcac

SEQ ID NO: 264907 - DNA, 50 bp, Artificial
  Synthetic oligonucleotide
gttctgcaaggcgttcagcaaactgcacagcgctagtctctggcggagcg

SEQ ID NO: 264908 - DNA, 60 bp, Artificial
  Synthetic oligonucleotide
atgacgataaccccgctctagggccatgatgcgaccgtaacagaatcccattcgagataa

SEQ ID NO: 264909 - DNA, 50 bp, Artificial
  Synthetic oligonucleotide
aacggggttggcttgaggcctcggaaacgaccactctgcagtcggggact

SEQ ID NO: 264910 - DNA, 50 bp, Artificial
  Synthetic oligonucleotide
aacgggattgaatcgccatgcggctgaggctgcgtaaggggagggcctca

SEQ ID NO: 264911 - DNA, 50 bp, Artificial
  Synthetic oligonucleotide
taactgccgccccggtgaagtgatcggggttcgtcagcgcgaagcgtctc

SEQ ID NO: 264912 - DNA, 50 bp, Artificial
  Synthetic oligonucleotide
tcgagttgctcgatccgttctgtctgggtctggggcattggtagatcctt

SEQ ID NO: 264913 - DNA, 50 bp, Artificial
  Synthetic oligonucleotide
aacgggatctgggtttgcatcccccgcaagagtgaagcgcgttcatccct

SEQ ID NO: 264914 - DNA, 50 bp, Artificial
  Synthetic oligonucleotide
aagcggtaatggtgagacgggaacgcatgaactgagccggacagtgggcg

SEQ ID NO: 264915 - DNA, 50 bp, Artificial
  Synthetic oligonucleotide
aagctgctccgccgaaacgggagcatccaacagtcctaccgcccgcgcaa

SEQ ID NO: 264916 - DNA, 50 bp, Artificial
  Synthetic oligonucleotide
aagctggttgtttggcgtgattacccggagctgggatggcagcggatccg

SEQ ID NO: 264917 - DNA, 50 bp, Artificial
  Synthetic oligonucleotide
aagcttacaccgccgcaggccagaccctgcaagccatgggctcagccttc

SEQ ID NO: 264918 - DNA, 50 bp, Artificial
  Synthetic oligonucleotide
aaggaacgcgtcacctccggcttgctcagcgtagacccgtccacgcgaaa

SEQ ID NO: 264919 - DNA, 58 bp, Artificial
  Synthetic oligonucleotide
ttccctgccaaggtggtcgcttggaaccataccaacggctcagcactgacggtaggac

SEQ ID NO: 264920 - DNA, 50 bp, Artificial
  Synthetic oligonucleotide
tcgcgctcggtttggcttgtccagtaacttggctcaacaggtgtgcagac

SEQ ID NO: 264921 - DNA, 50 bp, Artificial
  Synthetic oligonucleotide
tcgcgtgctgtacctcccgttgcttgaatttacgactatcgattcagcca

SEQ ID NO: 264922 - DNA, 50 bp, Artificial
  Synthetic oligonucleotide
aagtgttctgcttggcgtgctcagggctgagttaccgagggggcgccgcg

SEQ ID NO: 264923 - DNA, 50 bp, Artificial
  Synthetic oligonucleotide
aacacctcccccgatgctgtaccgacgctccatctccggtgcgagttcag

SEQ ID NO: 264924 - DNA, 50 bp, Artificial
  Synthetic oligonucleotide
aatccacgcggttgctgggaacagttgcgctcgcctggctagagctggac

SEQ ID NO: 264925 - DNA, 50 bp, Artificial
  Synthetic oligonucleotide
aatccccgagcaggagcaactagcgggctggattcgagacaacagctgcg

SEQ ID NO: 264926 - DNA, 50 bp, Artificial
  Synthetic oligonucleotide
aacacccgtcctaaagcgtctgcagcgacggctggcgtagtcagcctcag

SEQ ID NO: 264927 - DNA, 50 bp, Artificial
  Synthetic oligonucleotide
aagcccgggcgacgtagtacacgaggttctgaatgaaggccgcctcatgg

SEQ ID NO: 264928 - DNA, 50 bp, Artificial
  Synthetic oligonucleotide
aatccccgttcgcacttcagggacttcgagcgttccttcctcgccgtcgt

SEQ ID NO: 264929 - DNA, 50 bp, Artificial
  Synthetic oligonucleotide
aatccctagggagccgccggggcaatcaccgcatcccctaaaccgacttc

SEQ ID NO: 264930 - DNA, 60 bp, Artificial
  Synthetic oligonucleotide
cagcagatatcagcagcaactcccccgtgagctttccggatttcagcgctagcgacgctc

SEQ ID NO: 264931 - DNA, 50 bp, Artificial
  Synthetic oligonucleotide
aagccccttgaggcccgcttcactagcctccgccacaccccgttctgtga

SEQ ID NO: 264932 - DNA, 50 bp, Artificial
  Synthetic oligonucleotide
ggtgtatacggctgtggttgccctgctgttttggggtccgcaaacccgcg

SEQ ID NO: 264933 - DNA, 50 bp, Artificial
  Synthetic oligonucleotide
aatccgactgggtctgcaggaccaaaaaccgacccgcgacccccaaggtc

SEQ ID NO: 264934 - DNA, 50 bp, Artificial
  Synthetic oligonucleotide
aatcgcaaggggtcatgggcgatccccctggcagtaggcagcccggattg

SEQ ID NO: 264935 - DNA, 50 bp, Artificial
  Synthetic oligonucleotide
aacacagtcggtttcgacccagggaccattgatgggctcccagcgcccct

SEQ ID NO: 264936 - DNA, 50 bp, Artificial
  Synthetic oligonucleotide
aagcctggaaacgccttgccagccccgataccatcgggcaccgaccgacg

SEQ ID NO: 264937 - DNA, 50 bp, Artificial
  Synthetic oligonucleotide
aagcccaggcgattacctcatttgcccagtactgcggtggtacgtccgga

SEQ ID NO: 264938 - DNA, 50 bp, Artificial
  Synthetic oligonucleotide
aactgagcgctaaccccgacggctcccggacaatgggacaaccccggaca

SEQ ID NO: 264939 - DNA, 50 bp, Artificial
  Synthetic oligonucleotide
aagcccacgggcctgagccgccgcacattccactgatgcaggtattcatg

SEQ ID NO: 264940 - DNA, 50 bp, Artificial
  Synthetic oligonucleotide
aacaacggcgcccatcaaaagtctcgtctcagcgctacggtccgccaggt

SEQ ID NO: 264941 - DNA, 60 bp, Artificial
  Synthetic oligonucleotide
ttcgagctgtgcgacttggagatctgctacttgagcagcttctagggtttgtaccaagac

SEQ ID NO: 264942 - DNA, 50 bp, Artificial
  Synthetic oligonucleotide
aatcgcatgcggctgagcccgccgatgcagttcctctccggatccgtgga

SEQ ID NO: 264943 - DNA, 50 bp, Artificial
  Synthetic oligonucleotide
aatcgccccctcgatattagttttacgttggacgagttggaacggcgcaa

SEQ ID NO: 264944 - DNA, 50 bp, Artificial
  Synthetic oligonucleotide
aactggtgatgggaaggccctcagcctgccgattcacgaatcctccacgc

SEQ ID NO: 264945 - DNA, 50 bp, Artificial
  Synthetic oligonucleotide
aatcgctaggctgccgccaacgcagtgttgccgtgagttcaggtcaaccg

SEQ ID NO: 264946 - DNA, 50 bp, Artificial
  Synthetic oligonucleotide
aagggggacgacccgggagagcgcacttgtgctgaggctgagcgagcttc

SEQ ID NO: 264947 - DNA, 50 bp, Artificial
  Synthetic oligonucleotide
aaccccgatcctacgcaggggatttgggccgattcctacgctgattggcg

SEQ ID NO: 264948 - DNA, 50 bp, Artificial
  Synthetic oligonucleotide
aaccccctgcatccggtgtgtttgctatgtcccgcgtcggcgttgtacta

SEQ ID NO: 264949 - DNA, 50 bp, Artificial
  Synthetic oligonucleotide
aactcaccggggctccacagcccttgggatctgggcgttggttccaggcg

SEQ ID NO: 264950 - DNA, 50 bp, Artificial
  Synthetic oligonucleotide
aagggggcaactggttcctcatgctgcgtcagaggcggcacgtttttgtt

SEQ ID NO: 264951 - DNA, 50 bp, Artificial
  Synthetic oligonucleotide
aagggtatgttcgcccctgcgacgggcctttagcaaagcttccgcattcc

SEQ ID NO: 264952 - DNA, 59 bp, Artificial
  Synthetic oligonucleotide
atggcaggctatcaaacaacgggttttacaatcgccgctagtgaactcggcgcatccca

SEQ ID NO: 264953 - DNA, 50 bp, Artificial
  Synthetic oligonucleotide
aagggtctgccgtcaggccactcatcgccaggacagtggtcacaccaatc

SEQ ID NO: 264954 - DNA, 50 bp, Artificial
  Synthetic oligonucleotide
tgaatcccgctttccaaaggccggctccgattagcatccaaaacaagggg

SEQ ID NO: 264955 - DNA, 50 bp, Artificial
  Synthetic oligonucleotide
aacccacgaggacgagatacagactgcgcacgggcaaattgcgggtcgtg

SEQ ID NO: 264956 - DNA, 50 bp, Artificial
  Synthetic oligonucleotide
aaccatcgttgccatctccgttgatccctgcctccccgccgccagcaaac

SEQ ID NO: 264957 - DNA, 50 bp, Artificial
  Synthetic oligonucleotide
aaccagtctactgggacttgctctaggtgcgcccgctgctagcatcgcac

SEQ ID NO: 264958 - DNA, 50 bp, Artificial
  Synthetic oligonucleotide
aaggtaacgtgcagcgcccccttgtctcgtccggagcaactgcgacccgt

SEQ ID NO: 264959 - DNA, 50 bp, Artificial
  Synthetic oligonucleotide
aaggtgattcgattgttttgctcgggaggagagggggcgcagtcgcgact

SEQ ID NO: 264960 - DNA, 50 bp, Artificial
  Synthetic oligonucleotide
aaggttgcaacttcctgaccgcagctgtgtccacccccgctgatgcgatg

SEQ ID NO: 264961 - DNA, 50 bp, Artificial
  Synthetic oligonucleotide
aaggttggctgacgttcgtaggtaaacggatcccgccagcggagttgccc

SEQ ID NO: 264962 - DNA, 50 bp, Artificial
  Synthetic oligonucleotide
taatcaaggcagtcagttggttaattgcttgggatagacgccggattgag

SEQ ID NO: 264963 - DNA, 58 bp, Artificial
  Synthetic oligonucleotide
cgcccctgagattgcccggttaaatgttagatcgttgtcagggatgacgccctatgaa

SEQ ID NO: 264964 - DNA, 50 bp, Artificial
  Synthetic oligonucleotide
aaccagcgcggagcaagtgttgaacggtctctccgccagccttgaattgc

SEQ ID NO: 264965 - DNA, 50 bp, Artificial
  Synthetic oligonucleotide
aaccacccaagttgtccccgacagacagacgtctctgcgccaaagcagcc

SEQ ID NO: 264966 - DNA, 50 bp, Artificial
  Synthetic oligonucleotide
aagccgaaacggtgcgacgcccctggtactccgaccactcgcgctccttt

SEQ ID NO: 264967 - DNA, 50 bp, Artificial
  Synthetic oligonucleotide
aacagggtctgatcctgttcccccacgtcgcaacccttggttacggcgtt

SEQ ID NO: 264968 - DNA, 50 bp, Artificial
  Synthetic oligonucleotide
aagtcggttctgcgctgaaaacgtcgcccctgagaccagtcccgtgagcc

SEQ ID NO: 264969 - DNA, 50 bp, Artificial
  Synthetic oligonucleotide
aactcggcgtgttgcagctgaggggccatgggtgaggcgtctactgcagc

SEQ ID NO: 264970 - DNA, 50 bp, Artificial
  Synthetic oligonucleotide
aagcccgtgcggggtcaccagcctgctagaaggcggtcaaagcgacgttc

SEQ ID NO: 264971 - DNA, 50 bp, Artificial
  Synthetic oligonucleotide
gttgtggggacatggaggagcggcaacccgtgtaaacgcgcattgtgcgc

SEQ ID NO: 264972 - DNA, 50 bp, Artificial
  Synthetic oligonucleotide
agctggactcacccagcttggtggattgactggaggcgagggcacagcaa

SEQ ID NO: 264973 - DNA, 50 bp, Artificial
  Synthetic oligonucleotide
agctgcgacccagggtgtgacccgaaggtcgtcgttttagggctaagtga

SEQ ID NO: 264974 - DNA, 56 bp, Artificial
  Synthetic oligonucleotide
agcctacaaatggggtaactacgaccgaggccacctagcacccttggcatcattcc

SEQ ID NO: 264975 - DNA, 50 bp, Artificial
  Synthetic oligonucleotide
agctcggccacaactccgaccctcctccgggatttaccccggtttctgac

SEQ ID NO: 264976 - DNA, 50 bp, Artificial
  Synthetic oligonucleotide
agctcagggagcacctcagaagcccccggctaaacgaccttgcttgggca

SEQ ID NO: 264977 - DNA, 50 bp, Artificial
  Synthetic oligonucleotide
agcgtttagtgagtcctcatctggccataccgtcatggaaatgtcggcga

SEQ ID NO: 264978 - DNA, 50 bp, Artificial
  Synthetic oligonucleotide
agcggtgttgcaaccatgccagggttaatcggcccggtcggtgttgttct

SEQ ID NO: 264979 - DNA, 50 bp, Artificial
  Synthetic oligonucleotide
agcggtgagcggaacgtatcggcgtgagcagtccgcctttggtatccgat

SEQ ID NO: 264980 - DNA, 50 bp, Artificial
  Synthetic oligonucleotide
agcggctcagtatcgactgcggttgtacaccagcgccgggttttcaccgg

SEQ ID NO: 264981 - DNA, 50 bp, Artificial
  Synthetic oligonucleotide
agcgctccgagacgctgaactgccgaggcggtcaactcaccggggctcca

SEQ ID NO: 264982 - DNA, 50 bp, Artificial
  Synthetic oligonucleotide
agcgcgtcagctgttacccggcggtcgactcttgatctacgggccatttc

SEQ ID NO: 264983 - DNA, 50 bp, Artificial
  Synthetic oligonucleotide
agcgcgacaatgcggcccatgaacaaccaccgacccctctcggctctgtt

SEQ ID NO: 264984 - DNA, 50 bp, Artificial
  Synthetic oligonucleotide
agcgcccaaccgcgactttatcctcaactacccgcaaactagcggccgga

SEQ ID NO: 264985 - DNA, 60 bp, Artificial
  Synthetic oligonucleotide
gactatctgatgatgttcctcagcctaatgattttatccgggctttaattaatggtggtg

SEQ ID NO: 264986 - DNA, 59 bp, Artificial
  Synthetic oligonucleotide
atgtcagtgagcaaactagtacagtcaagggttataccagtatgacagcgtatttcggt

SEQ ID NO: 264987 - DNA, 53 bp, Artificial
  Synthetic oligonucleotide
gtctgccaagacctaagtcgtacgtaaattaatataccgacgggagtccctcc

SEQ ID NO: 264988 - DNA, 55 bp, Artificial
  Synthetic oligonucleotide
aggctttctacccgattgatgcggagtaggttagctgttactcgcccgatcgccg

SEQ ID NO: 264989 - DNA, 55 bp, Artificial
  Synthetic oligonucleotide
gtgctttagctccttctggccaacagttctcggctgttagttgggctaccgtcct

SEQ ID NO: 264990 - DNA, 55 bp, Artificial
  Synthetic oligonucleotide
agcgggggaaagagtaataggctcctaccctgccgaggattgaagcaatggcgct

SEQ ID NO: 264991 - DNA, 55 bp, Artificial
  Synthetic oligonucleotide
gtttccgattacgccaatccgtcaattaagatcatttgtctggtgacatgacctg

SEQ ID NO: 264992 - DNA, 55 bp, Artificial
  Synthetic oligonucleotide
tagattgatatcctccgactgcgtattccccgaaagcttatccggaaatttcccc

SEQ ID NO: 264993 - DNA, 54 bp, Artificial
  Synthetic oligonucleotide
agagaattagccggtcataaacttagcgacaacccactagggtggccgtgtaag

SEQ ID NO: 264994 - DNA, 55 bp, Artificial
  Synthetic oligonucleotide
actcttgaatcgccatattggcaacgtcagtcgtaaacagaaccaccgcaggact

SEQ ID NO: 264995 - DNA, 55 bp, Artificial
  Synthetic oligonucleotide
actctgccagtacgttggcagttcaccaagagatagtcacacacagggcaagcag

SEQ ID NO: 264996 - DNA, 54 bp, Artificial
  Synthetic oligonucleotide
tattagcaacggcaggggaaaatcccccaggcttagcctttgagcgggaaacca

SEQ ID NO: 264997 - DNA, 60 bp, Artificial
  Synthetic oligonucleotide
atacggatcatgccgttgccgagtatcagactcaattcgccaccttagcggatctttatc

SEQ ID NO: 264998 - DNA, 55 bp, Artificial
  Synthetic oligonucleotide
accctactgcccttcaacgccgtagcggggttactgccactgctgtttgcgagcc

SEQ ID NO: 264999 - DNA, 55 bp, Artificial
  Synthetic oligonucleotide
tccgcacaaaacgttatggggcgcaggaatctcgtacaggtacgatgaaaaacca

SEQ ID NO: 265000 - DNA, 55 bp, Artificial
  Synthetic oligonucleotide
tcggttcccaggtgaccccaatgggttcgagcacgctgtaaagcattccttcggc

SEQ ID NO: 265001 - DNA, 55 bp, Artificial
  Synthetic oligonucleotide
acaccttcaagcgagtaccatcgggtagggtcgtatattccgggcagttatcagt

SEQ ID NO: 265002 - DNA, 55 bp, Artificial
  Synthetic oligonucleotide
acacagcggcgtgggcagtgtcgcaagtagttcccgctttggcggcgttaaagcg

SEQ ID NO: 265003 - DNA, 55 bp, Artificial
  Synthetic oligonucleotide
tgaatccccagaagcggtcattatgcttaggttctagtagatgggtcatctcgtg

SEQ ID NO: 265004 - DNA, 55 bp, Artificial
  Synthetic oligonucleotide
aagcgactaacagctcctccactaattcggacatatcttgctcagtgcttagggt

SEQ ID NO: 265005 - DNA, 55 bp, Artificial
  Synthetic oligonucleotide
ttagcggctaccctatttattccgaacctgaatcgcattgtgcgttatgtggagc

SEQ ID NO: 265006 - DNA, 55 bp, Artificial
  Synthetic oligonucleotide
ttttaatgtagggtcagaggtctgcgtcaataccgctaggggtaataaccctgga

SEQ ID NO: 265007 - DNA, 55 bp, Artificial
  Synthetic oligonucleotide
aaccataatgactcccctaggggctctatacgggaacgtagtaggtgagcaatcc

SEQ ID NO: 265008 - DNA, 57 bp, Artificial
  Synthetic oligonucleotide
acccctggcccgtattcacgaaatggatgcctattgtctccgtgactatgttcgtcg

SEQ ID NO: 265009 - DNA, 52 bp, Artificial
  Synthetic oligonucleotide
cccggagcaagggatggttcaacaccctcttttccccgtcaggggactgaaa

SEQ ID NO: 265010 - DNA, 55 bp, Artificial
  Synthetic oligonucleotide
ccccgtcaggggactgaaacctagcctttgtggctaaccctcctgcgctttgaca

SEQ ID NO: 265011 - DNA, 55 bp, Artificial
  Synthetic oligonucleotide
ccataggtttcttcaaatgcggtgtttatgcggattacaatgcctaaatgatcag

SEQ ID NO: 265012 - DNA, 55 bp, Artificial
  Synthetic oligonucleotide
cagtccataactaagggcagtggcggcaatttgtttatctagggcgttatgggga

SEQ ID NO: 265013 - DNA, 55 bp, Artificial
  Synthetic oligonucleotide
cagggtaggtaaaactctcgttgagatggcagtaaatggggtcagattcatggcc

SEQ ID NO: 265014 - DNA, 55 bp, Artificial
  Synthetic oligonucleotide
caaccagtaaagctttatggccaatctcacttctacgcaaaaccgctatagatac

SEQ ID NO: 265015 - DNA, 54 bp, Artificial
  Synthetic oligonucleotide
tgcccaaagcttggtcaaggatttggtcgatggatttctagtattagccgaaga

SEQ ID NO: 265016 - DNA, 54 bp, Artificial
  Synthetic oligonucleotide
tgtcagtacaaattaataaagtcgataatttatcaggcggtatgcgacaaaaag

SEQ ID NO: 265017 - DNA, 54 bp, Artificial
  Synthetic oligonucleotide
cccctgtagccggtgcaagaactgggtacgcttggggccttctctgttgatgcc

SEQ ID NO: 265018 - DNA, 54 bp, Artificial
  Synthetic oligonucleotide
acagtttcggcaagttccgggggcttatgacttggaatttgcgtcaatacctga

SEQ ID NO: 265019 - DNA, 60 bp, Artificial
  Synthetic oligonucleotide
gtgaagccagcggcagggatgtcaatctatgacccctgtgtgggttcgggggggatgctc

SEQ ID NO: 265020 - DNA, 52 bp, Artificial
  Synthetic oligonucleotide
aacgtcttggctgacttataccaaactgcggtagacgaaaaagatttttcgg

SEQ ID NO: 265021 - DNA, 54 bp, Artificial
  Synthetic oligonucleotide
tcctcacctcctctgacttctaaccagaccccataagcttgtgggctaacttgt

SEQ ID NO: 265022 - DNA, 54 bp, Artificial
  Synthetic oligonucleotide
cctctcccgtgccctctgagcggcccgtcttagagctttctctgagcctaggat

SEQ ID NO: 265023 - DNA, 54 bp, Artificial
  Synthetic oligonucleotide
ccgattccagcctgtttagccctctcccgtgccctctgagcggcccgtcttaga

SEQ ID NO: 265024 - DNA, 54 bp, Artificial
  Synthetic oligonucleotide
tagccaacgactcaaacgccgttgtttactttgggcctgcacccctcgacacgg

SEQ ID NO: 265025 - DNA, 54 bp, Artificial
  Synthetic oligonucleotide
aggggattcgctttcagagcggtaatgataggactgttgacgtaagctgtcagc

SEQ ID NO: 265026 - DNA, 54 bp, Artificial
  Synthetic oligonucleotide
agttatacggtgcgtaaacaaaacatagacatgagcttaaacagtcctgctcga

SEQ ID NO: 265027 - DNA, 54 bp, Artificial
  Synthetic oligonucleotide
gtaagctggatcgtgggcagtccactggcttcatagccgcgttgcaacaacaaa

SEQ ID NO: 265028 - DNA, 53 bp, Artificial
  Synthetic oligonucleotide
cggcaaaagtcatagttctggcacagcttctagggtaagttcatagcgatata

SEQ ID NO: 265029 - DNA, 53 bp, Artificial
  Synthetic oligonucleotide
aattccggatattgtcttatttgtcaatggtatccctctagtggtgatggagt

SEQ ID NO: 265030 - DNA, 54 bp, Artificial
  Synthetic oligonucleotide
aggtattgtgtagtccaatcggggggcgagtgggagagtgagggttttcagacc

SEQ ID NO: 265031 - DNA, 53 bp, Artificial
  Synthetic oligonucleotide
ccccgtttggcaatctccccctgtagccggtgcaagaactgggtacgcttggg

SEQ ID NO: 265032 - DNA, 53 bp, Artificial
  Synthetic oligonucleotide
caatgccatccatgacctaagttgggtcaagaaatttggggcggactatgttt

SEQ ID NO: 265033 - DNA, 53 bp, Artificial
  Synthetic oligonucleotide
ggaaagtccactaggcgtagatagatactatcctcatggtcaggaatagtcct

SEQ ID NO: 265034 - DNA, 53 bp, Artificial
  Synthetic oligonucleotide
gctatgaccagcaggagcacagtcgcctaaatctccggttatgccatcgcggg

SEQ ID NO: 265035 - DNA, 53 bp, Artificial
  Synthetic oligonucleotide
attatcactccgattccagcctgtttagccctctcccgtgccctctgagcggc

SEQ ID NO: 265036 - DNA, 53 bp, Artificial
  Synthetic oligonucleotide
tcatggtgcggagtgagatcttcatgatgccgaagatattggcccgtcaaaat

SEQ ID NO: 265037 - DNA, 53 bp, Artificial
  Synthetic oligonucleotide
gcactagacgatgcaataagaccgaatcacttcatcaagggatgttccgacag

SEQ ID NO: 265038 - DNA, 53 bp, Artificial
  Synthetic oligonucleotide
cagttattacgctggggtcatgggacttattttgggtctttgtggcctagcgg

SEQ ID NO: 265039 - DNA, 52 bp, Artificial
  Synthetic oligonucleotide
taacgatgaacttaggcgtagtttatctattacgaagcgtgcaaatcagcgg

SEQ ID NO: 265040 - DNA, 52 bp, Artificial
  Synthetic oligonucleotide
tctggtctgtggttaggagaactgtaaatccctcctgattcatcagccgcaa

SEQ ID NO: 265041 - DNA, 60 bp, Artificial
  Synthetic oligonucleotide
tcagcaggcatatcaggaaggaatacagggaaacttatcgagggtgtttgatgtcagtga

SEQ ID NO: 265042 - DNA, 52 bp, Artificial
  Synthetic oligonucleotide
gcagtcctagcggagaccccagttattcccggcgcagtgagtttacttactt

SEQ ID NO: 265043 - DNA, 52 bp, Artificial
  Synthetic oligonucleotide
tagtgatgcgacaacaaaccctggaacaggtgaggggtattgaagggttagc

SEQ ID NO: 265044 - DNA, 52 bp, Artificial
  Synthetic oligonucleotide
agcccaacggggagctagtactacgacccttggtttaggggatgactacaac

SEQ ID NO: 265045 - DNA, 52 bp, Artificial
  Synthetic oligonucleotide
gtgacaattggcggaggtaaacgatcgccgcactgtccaacacacgggtctt

SEQ ID NO: 265046 - DNA, 52 bp, Artificial
  Synthetic oligonucleotide
gcttatacttagataggctcccaatcattcgatattggacttttagggtggg

SEQ ID NO: 265047 - DNA, 52 bp, Artificial
  Synthetic oligonucleotide
gtgccaacagggatgattgccaaaccgtcctcatagtggactagattaagta

SEQ ID NO: 265048 - DNA, 52 bp, Artificial
  Synthetic oligonucleotide
ggggtgattacggaggtagaaagtaggctcgagggtaataagcatagggagc

SEQ ID NO: 265049 - DNA, 52 bp, Artificial
  Synthetic oligonucleotide
ggggcataggcattttgtcgaacctcaatggcagatcgatgtaactgctccc

SEQ ID NO: 265050 - DNA, 52 bp, Artificial
  Synthetic oligonucleotide
cccagaaatccgccactcgattccgatgttcactcatactttgacagactcc

SEQ ID NO: 265051 - DNA, 52 bp, Artificial
  Synthetic oligonucleotide
gcgtccaggagggatctcactggacgagacatttgccgccgaataatcgctg

SEQ ID NO: 265052 - DNA, 60 bp, Artificial
  Synthetic oligonucleotide
gtctccccaagcgaccctagcccatgctggccatggggatgaattccaccaaagtgaatc

SEQ ID NO: 265053 - DNA, 51 bp, Artificial
  Synthetic oligonucleotide
aagcgacgccttcacaggagccgcttgtcttcaaaaccagacatgaaacgt

SEQ ID NO: 265054 - DNA, 51 bp, Artificial
  Synthetic oligonucleotide
tgctctactgcgtccagtacagtctgcttggtgagccgattctttagctcg

SEQ ID NO: 265055 - DNA, 51 bp, Artificial
  Synthetic oligonucleotide
ccggaagtacgtccccggcgatctaggggccagggtagtggttatatccga

SEQ ID NO: 265056 - DNA, 51 bp, Artificial
  Synthetic oligonucleotide
tcgactcaggatggcggttcatcactgtgattatgatccaggtaataactc

SEQ ID NO: 265057 - DNA, 51 bp, Artificial
  Synthetic oligonucleotide
ccccaacccctaagattctcctgatcagtgttagaccactacagccctagc

SEQ ID NO: 265058 - DNA, 51 bp, Artificial
  Synthetic oligonucleotide
ccattactaatgccattgtgaccggtaaagttcaattacccgatggtactc

SEQ ID NO: 265059 - DNA, 51 bp, Artificial
  Synthetic oligonucleotide
tatgggctagcttaaatgtgggcagagctttcggaaagacgaagtaaacgt

SEQ ID NO: 265060 - DNA, 51 bp, Artificial
  Synthetic oligonucleotide
atcttaaccgtcaggctgtggaattggagttattacgcaacacctatgatg

SEQ ID NO: 265061 - DNA, 51 bp, Artificial
  Synthetic oligonucleotide
ataacttgccctgttgcgtatgcaagttgacgaataatcgctgacttgcgt

SEQ ID NO: 265062 - DNA, 50 bp, Artificial
  Synthetic oligonucleotide
tttggggattatcgccgtagtttaactgccctcaccactaaagtgcatga

SEQ ID NO: 265063 - DNA, 60 bp, Artificial
  Synthetic oligonucleotide
ctgccaattagtcgcttgcacggcggcccagtcaatttcgtgtaactgcgctaagctatt

SEQ ID NO: 265064 - DNA, 50 bp, Artificial
  Synthetic oligonucleotide
gtctaaatatcaagttctttacgttactaaatctgagtttcaagatagaa

SEQ ID NO: 265065 - DNA, 50 bp, Artificial
  Synthetic oligonucleotide
actgccggtgtccacatggatacccagggccattaccgacgcttccacca

SEQ ID NO: 265066 - DNA, 50 bp, Artificial
  Synthetic oligonucleotide
actccagtgcaactaaccccagcaaaacgggtggcatagttccccgccgg

SEQ ID NO: 265067 - DNA, 50 bp, Artificial
  Synthetic oligonucleotide
actacctctaactcagcgtcagagagttcgcggtacttgggagcagaaga

SEQ ID NO: 265068 - DNA, 50 bp, Artificial
  Synthetic oligonucleotide
acctttggctagtgggggattccgtgcatccgggggaaggcaccgctggg

SEQ ID NO: 265069 - DNA, 50 bp, Artificial
  Synthetic oligonucleotide
accgctgggatggagagtctttctcccctcaaccgtcgggagcagcgcac

SEQ ID NO: 265070 - DNA, 50 bp, Artificial
  Synthetic oligonucleotide
accccctgactgcggattgtgcctgtttccgtacccatcccttctgccca

SEQ ID NO: 265071 - DNA, 50 bp, Artificial
  Synthetic oligonucleotide
acccccgcacggtaccgtctaaaccggcatctaccaacagacccccgagg

SEQ ID NO: 265072 - DNA, 50 bp, Artificial
  Synthetic oligonucleotide
accccaggcggagagaatcctcttggcccacggtagtaaacgggccggtg

SEQ ID NO: 265073 - DNA, 50 bp, Artificial
  Synthetic oligonucleotide
accaagccgcagacaatttgcttgcgccgccccctggtttagaagctcca

SEQ ID NO: 265074 - DNA, 60 bp, Artificial
  Synthetic oligonucleotide
tattaactgagcaggaattacacgacctgttcactatcgggttgctgactcctagggatc

SEQ ID NO: 265075 - DNA, 50 bp, Artificial
  Synthetic oligonucleotide
acattacccctggagggctgacccaaaatccccgcacgtagggcgcaagg

SEQ ID NO: 265076 - DNA, 50 bp, Artificial
  Synthetic oligonucleotide
aattccgcttgcacccgttctgcggccaccgttttaatgcggggagctaa

SEQ ID NO: 265077 - DNA, 48 bp, Artificial
  Synthetic oligonucleotide
aattatccgggtgggggtaggtacgccccgacaaacccaaattccgcc

SEQ ID NO: 265078 - DNA, 50 bp, Artificial
  Synthetic oligonucleotide
aatggtggtgtctcgacttctggtgatatggactctttatctaaaaagcg

SEQ ID NO: 265079 - DNA, 50 bp, Artificial
  Synthetic oligonucleotide
aatgcgctctagccctttgcccccagtggaagtaccggccgcaattttgc

SEQ ID NO: 265080 - DNA, 50 bp, Artificial
  Synthetic oligonucleotide
aatccgggctccattggctccccctcgatagtcggagctacggaaggtgc

SEQ ID NO: 265081 - DNA, 50 bp, Artificial
  Synthetic oligonucleotide
aaggcagttggcaagattgggaccgtctgcagccgattaaccgcagtgcc

SEQ ID NO: 265082 - DNA, 50 bp, Artificial
  Synthetic oligonucleotide
aagccctgtaaagcggagcaaaatcaccatggccgtcacagcaggggtcg

SEQ ID NO: 265083 - DNA, 50 bp, Artificial
  Synthetic oligonucleotide
aacggagacatgggccacagcgcaaacccctccgctccttgggtaaactc

SEQ ID NO: 265084 - DNA, 50 bp, Artificial
  Synthetic oligonucleotide
aaccggacgataaccgctcgtgtggtagccactgggggtaggctcacaga

SEQ ID NO: 265085 - DNA, 53 bp, Artificial
  Synthetic oligonucleotide
gcctggtctaaatgagggttttgactttttaaaggggcaggcgttctaatgtc

SEQ ID NO: 265086 - DNA, 48 bp, Artificial
  Synthetic oligonucleotide
aaccgacgggggcaaattatccgggtgggggtaggtacgccccgacaa

SEQ ID NO: 265087 - DNA, 50 bp, Artificial
  Synthetic oligonucleotide
aaccctcaaaccgagttgccgtaaccgttgggacagccagcgactcacct

SEQ ID NO: 265088 - DNA, 50 bp, Artificial
  Synthetic oligonucleotide
aaccctagcagggctgtttgtggcggcctacctgcagtataagcggggca

SEQ ID NO: 265089 - DNA, 50 bp, Artificial
  Synthetic oligonucleotide
aaccaacctgcgccggtaactgtggggcggtaaccgtggtcaaattgctc

SEQ ID NO: 265090 - DNA, 50 bp, Artificial
  Synthetic oligonucleotide
gggtaatactttggtaggttttacatcacggaatgaggtttatcagtcga

SEQ ID NO: 265091 - DNA, 50 bp, Artificial
  Synthetic oligonucleotide
gaggacaggatttactgcaaaaggtagcgacggatttagggcttttagac

SEQ ID NO: 265092 - DNA, 50 bp, Artificial
  Synthetic oligonucleotide
ccgttttctccgttgggaaatagcgaaggcatttgtctcttacggcggtt

SEQ ID NO: 265093 - DNA, 50 bp, Artificial
  Synthetic oligonucleotide
ccaggggcaacgattcccccgttggtagtgtccgtagggcttccgctagt

SEQ ID NO: 265094 - DNA, 49 bp, Artificial
  Synthetic oligonucleotide
agggggccaaggccaatcccccggttaagggcaccgtcaaaccgagtaa

SEQ ID NO: 265095 - DNA, 50 bp, Artificial
  Synthetic oligonucleotide
aggggactcccctggagttctccgcaaagatacagcgacggggccagggc

SEQ ID NO: 265096 - DNA, 57 bp, Artificial
  Synthetic oligonucleotide
aatttaataggtatctaatgttcattgcgaattacctatgcttcaaaaaagactatc

SEQ ID NO: 265097 - DNA, 56 bp, Artificial
  Synthetic oligonucleotide
gatggaaagtgctcgattagtcacggggttaaaatgccattttggttttgcggcta

SEQ ID NO: 265098 - DNA, 50 bp, Artificial
  Synthetic oligonucleotide
agggccaggtgggtaccggaagcccggaacatttccaacacatggagaga

SEQ ID NO: 265099 - DNA, 50 bp, Artificial
  Synthetic oligonucleotide
agggcagtgaaagtggccgggcgatccgttttagtctcggagggcttcat

SEQ ID NO: 265100 - DNA, 50 bp, Artificial
  Synthetic oligonucleotide
agggcaacggaaatatagggggccaaggccaatcccccggttaagggcac

SEQ ID NO: 265101 - DNA, 50 bp, Artificial
  Synthetic oligonucleotide
agggatgcttgggccgcaccaaatactccccacacccccgctagcaccac

SEQ ID NO: 265102 - DNA, 50 bp, Artificial
  Synthetic oligonucleotide
agggactgctcacgggtaacgggcaaaactgccgccggctcgtaacgggc

SEQ ID NO: 265103 - DNA, 50 bp, Artificial
  Synthetic oligonucleotide
aggccctgcggctagagccaaggttagggaactgtgccaatctgctgccg

SEQ ID NO: 265104 - DNA, 50 bp, Artificial
  Synthetic oligonucleotide
aggcccaacgcttagaggacaatgccgtgcaacccactgccgatttgctt

SEQ ID NO: 265105 - DNA, 50 bp, Artificial
  Synthetic oligonucleotide
aggcacgaatgacccattgattgaccttgccgtggtccccgaggggatgg

SEQ ID NO: 265106 - DNA, 50 bp, Artificial
  Synthetic oligonucleotide
aggatcgagggtgaattgtagctgggccgcctgacggtaagcccgtagta

SEQ ID NO: 265107 - DNA, 50 bp, Artificial
  Synthetic oligonucleotide
agcggtggtgtgacccccggccatgtagggaatgatggtttggcgatcgg

SEQ ID NO: 265108 - DNA, 56 bp, Artificial
  Synthetic oligonucleotide
ccgtcccccttgtgttcatagtctgattagttcaccttgtcggttgtcaagggcac

SEQ ID NO: 265109 - DNA, 50 bp, Artificial
  Synthetic oligonucleotide
agcggccattgatgccacagggcaacccctaccggaggcaaccctagccc

SEQ ID NO: 265110 - DNA, 50 bp, Artificial
  Synthetic oligonucleotide
agccactggccgtcccggcaccaatgctggtctagcctaagcttgagact

SEQ ID NO: 265111 - DNA, 50 bp, Artificial
  Synthetic oligonucleotide
agcattggcttggtcggtggaacagtttgggggtaatcccctcacggcgg

SEQ ID NO: 265112 - DNA, 50 bp, Artificial
  Synthetic oligonucleotide
agagttgattccggtcatccaccgccactagggggccccggccacaaaac

SEQ ID NO: 265113 - DNA, 50 bp, Artificial
  Synthetic oligonucleotide
agacaatttgcttgcgccgccccctggtttagaagctccaagtccagcgg

SEQ ID NO: 265114 - DNA, 50 bp, Artificial
  Synthetic oligonucleotide
agaattagttgccagggcattgcccggttctgccactgttccgatcgccg

SEQ ID NO: 265115 - DNA, 59 bp, Artificial
  Synthetic oligonucleotide
gggtaccctgctgagcttgggttggaatttactggtgcatccgcctatgcggcaacgga

SEQ ID NO: 265116 - DNA, 55 bp, Artificial
  Synthetic oligonucleotide
ttggtaacacggggttgaaatgccaagagcttaaacctgatggaagctggttacc

SEQ ID NO: 265117 - DNA, 57 bp, Artificial
  Synthetic oligonucleotide
ttcctcagcctaatgattttatccgggctttaattaatggtggtgtctcgacttctg

SEQ ID NO: 265118 - DNA, 57 bp, Artificial
  Synthetic oligonucleotide
gtttaaaggtccaatacgctagtcctgatgcggttaatactgataatgcaaaggggc

SEQ ID NO: 265119 - DNA, 59 bp, Artificial
  Synthetic oligonucleotide
agatagaagtacaggtaagcgggctagtcggtgtgagcgttgctcctggtggcagttgg

SEQ ID NO: 265120 - DNA, 59 bp, Artificial
  Synthetic oligonucleotide
ccagtctgattaacacagcggcgtgggcagtgtcgcaagtagttcccgctttggcggcg

SEQ ID NO: 265121 - DNA, 55 bp, Artificial
  Synthetic oligonucleotide
ttaccggactgcggggcattgccaaaccaacgggccccgtacctagcgacgctga

SEQ ID NO: 265122 - DNA, 58 bp, Artificial
  Synthetic oligonucleotide
gtccgacggaattatccctggaaccaattcgcgctgactccctgattttggagcaatc

SEQ ID NO: 265123 - DNA, 60 bp, Artificial
  Synthetic oligonucleotide
ggcgatcgctgaggctccgcgtttgccgaatcaatgcgcgcagttcctccgggggagaca

SEQ ID NO: 265124 - DNA, 55 bp, Artificial
  Synthetic oligonucleotide
cgagatagggcaaggggtttagactttggctactacgagctatccgttagaccgc

SEQ ID NO: 265125 - DNA, 55 bp, Artificial
  Synthetic oligonucleotide
gggcacgaagtggtgaacgaagtgaacgcacccttgactaacgacaaggtgaacg

SEQ ID NO: 265126 - DNA, 56 bp, Artificial
  Synthetic oligonucleotide
cattatgactttatcactagactcggttgccctggtaggcaaaaccccatttggta

SEQ ID NO: 265127 - DNA, 60 bp, Artificial
  Synthetic oligonucleotide
gcaccaacgagagtagcggtggtttgtagcgtgagatagtcaggattctgcaagacttgg

SEQ ID NO: 265128 - DNA, 60 bp, Artificial
  Synthetic oligonucleotide
ggcttcttggacttctaacagtgctggacaattaattagtcgaggctgttgggctgcagc

SEQ ID NO: 265129 - DNA, 60 bp, Artificial
  Synthetic oligonucleotide
tgattgttgggtcctgctgatgttagtgctttatcgaccttcggcttgcctctgaacgga

SEQ ID NO: 265130 - DNA, 58 bp, Artificial
  Synthetic oligonucleotide
gttagggcttctgtgccttgttcccaaccggtgatgccctgaatccaggtgcgaattc

SEQ ID NO: 265131 - DNA, 57 bp, Artificial
  Synthetic oligonucleotide
caatcccggaaattggggtctagcttgccctcaatgctccaggggccatcggggagc

SEQ ID NO: 265132 - DNA, 59 bp, Artificial
  Synthetic oligonucleotide
gtatggttgggagtatgctggacataactgagcgtatggcaatggaacaaaggctacgg

SEQ ID NO: 265133 - DNA, 57 bp, Artificial
  Synthetic oligonucleotide
ggcttggcactatgaaagcaatgggttttggcgggtctttctctcgattccgggtca

SEQ ID NO: 265134 - DNA, 60 bp, Artificial
  Synthetic oligonucleotide
caagcgggagatcacgcaggttactaccgcgatggttatggggattatggcgaactgatc

SEQ ID NO: 265135 - DNA, 58 bp, Artificial
  Synthetic oligonucleotide
ccgcacgattgctctctctgagactaaacagtgcacacggctgtgcaaatgctggagc

SEQ ID NO: 265136 - DNA, 57 bp, Artificial
  Synthetic oligonucleotide
aacgaatgggatggccagcgttcattgtgccaacagggatgattgccaaaccgtcct

SEQ ID NO: 265137 - DNA, 56 bp, Artificial
  Synthetic oligonucleotide
ctgatgcccgctagggactcactattgtggtaccgtccatcagcatctaagtcaag

SEQ ID NO: 265138 - DNA, 56 bp, Artificial
  Synthetic oligonucleotide
agtcgccattttgatgaccgccctcacttccgcccttggtatgcttcccctggcga

SEQ ID NO: 265139 - DNA, 54 bp, Artificial
  Synthetic oligonucleotide
attttcaccattaacccctattggaccggaagcacctgggcgtttgatgcggcc

SEQ ID NO: 265140 - DNA, 56 bp, Artificial
  Synthetic oligonucleotide
cgaggcgactcagccagcgctgtaaacgaatgggatggccagcgttcattgtgcca

SEQ ID NO: 265141 - DNA, 56 bp, Artificial
  Synthetic oligonucleotide
ccccaatgggttcgagcacgctgtaaagcattccttcggcagctccccctgtccac

SEQ ID NO: 265142 - DNA, 56 bp, Artificial
  Synthetic oligonucleotide
ccggtaaattgccctggaactgactacgggccacaacggtagcctgttggatcgca

SEQ ID NO: 265143 - DNA, 56 bp, Artificial
  Synthetic oligonucleotide
ttttgttgaggaggatgatcgtcggattcgagggacagatcataagccgagatatg

SEQ ID NO: 265144 - DNA, 56 bp, Artificial
  Synthetic oligonucleotide
tcattgtttgcttagtgggggcttcagtcctgccttccaaggaggaggccagccca

SEQ ID NO: 265145 - DNA, 58 bp, Artificial
  Synthetic oligonucleotide
acagccttgtggtgaactatagcgatgggtaacttcgggcttagcccgtatcacttgc

SEQ ID NO: 265146 - DNA, 55 bp, Artificial
  Synthetic oligonucleotide
aagccgtgggttggcgatcatttgccgaggactatttacccactttgccccagcg

SEQ ID NO: 265147 - DNA, 56 bp, Artificial
  Synthetic oligonucleotide
acgtccccggcgatctaggggccagggtagtggttatatccgactgcactattgcg

SEQ ID NO: 265148 - DNA, 53 bp, Artificial
  Synthetic oligonucleotide
cggtagattggggaggcgaaaatagacgggcgttgtaccagttccagagtagg

SEQ ID NO: 265149 - DNA, 52 bp, Artificial
  Synthetic oligonucleotide
ggccccagggtgctttaccccgacggcaagagtttactttcactagccctac

SEQ ID NO: 265150 - DNA, 55 bp, Artificial
  Synthetic oligonucleotide
ggcggactttggtaaatcggcggcgattacctcatggatagtttcggttgttagc

SEQ ID NO: 265151 - DNA, 55 bp, Artificial
  Synthetic oligonucleotide
ggcggcctccatgcccaaaccaacactactaatacccctagcaataattcttccc

SEQ ID NO: 265152 - DNA, 49 bp, Artificial
  Synthetic oligonucleotide
cggggcaaacacaacgcacccccaacgggtaaaacatttccaccccgga

SEQ ID NO: 265153 - DNA, 55 bp, Artificial
  Synthetic oligonucleotide
cggagcggatgatacgttactggacgacttttgcgagcagtgcttgtccggatcc

SEQ ID NO: 265154 - DNA, 55 bp, Artificial
  Synthetic oligonucleotide
cgccgctacgcagtctggtccctttccttctactaatcccggcgatcgggactga

SEQ ID NO: 265155 - DNA, 55 bp, Artificial
  Synthetic oligonucleotide
cgcactcccgctgttgatatggtcggatccaatggattgcaacctgatggagtat

SEQ ID NO: 265156 - DNA, 55 bp, Artificial
  Synthetic oligonucleotide
tagttctaaaccgaaaggagactcaaatccttccactaaatcggtcactttctca

SEQ ID NO: 265157 - DNA, 55 bp, Artificial
  Synthetic oligonucleotide
gtcacccagaaccgaactcctgataaaacttggcgggttaagcctgggtctgtgc

SEQ ID NO: 265158 - DNA, 55 bp, Artificial
  Synthetic oligonucleotide
ggctgctagaattgcaaccagatgtagaagaccactcgcctcacgtgcagaagaa

SEQ ID NO: 265159 - DNA, 53 bp, Artificial
  Synthetic oligonucleotide
ggctttgaagtcctaccccgccgttgggtagtcgagcgcacttttgcttggtt

SEQ ID NO: 265160 - DNA, 55 bp, Artificial
  Synthetic oligonucleotide
gggcccgagcctgggaaaataatgttacacttcgcccaaattaccattgaccagc

SEQ ID NO: 265161 - DNA, 55 bp, Artificial
  Synthetic oligonucleotide
gggctagtcggtgtgagcgttgctcctggtggcagttggttcttgatactgtggg

SEQ ID NO: 265162 - DNA, 55 bp, Artificial
  Synthetic oligonucleotide
cgaatccgtcccaattggaagtcaccatcaccgatacagggcgaggtattgagcc

SEQ ID NO: 265163 - DNA, 55 bp, Artificial
  Synthetic oligonucleotide
cctggaaccaattcgcgctgactccctgattttggagcaatcggaagacttggtg

SEQ ID NO: 265164 - DNA, 55 bp, Artificial
  Synthetic oligonucleotide
cctacgattggtgcgggtgcaaatacaggttactggtcgctctccccaacagggc

SEQ ID NO: 265165 - DNA, 55 bp, Artificial
  Synthetic oligonucleotide
cctaacagggttgcaggtagcatgggataacggggcaatcctttagcaaagtcgg

SEQ ID NO: 265166 - DNA, 55 bp, Artificial
  Synthetic oligonucleotide
gtagcgcaattcgtaagattgaggcatccacatagtcaccaccgacataattagc

SEQ ID NO: 265167 - DNA, 50 bp, Artificial
  Synthetic oligonucleotide
ggccaacttaataagtacctacaaactcaaatggacccggggttgaaccg

SEQ ID NO: 265168 - DNA, 54 bp, Artificial
  Synthetic oligonucleotide
gtcacggggttaaaatgccattttggttttgcggctaccagggttgatgccaag

SEQ ID NO: 265169 - DNA, 55 bp, Artificial
  Synthetic oligonucleotide
gtaaataactaacccgatccgctagtgtttgcaaactgtgggcctgggaccattc

SEQ ID NO: 265170 - DNA, 55 bp, Artificial
  Synthetic oligonucleotide
gtacacctcagaatacggaggttcacagagttgccgttacgattgcagaacgatt

SEQ ID NO: 265171 - DNA, 53 bp, Artificial
  Synthetic oligonucleotide
gagggttcgccatttatgccacgaagatccccggtaaaagggtcggggaagca

SEQ ID NO: 265172 - DNA, 55 bp, Artificial
  Synthetic oligonucleotide
gatagactttgcgtcctcgcaagccttgttctgaatcactatagccgtcgtcacg

SEQ ID NO: 265173 - DNA, 55 bp, Artificial
  Synthetic oligonucleotide
gattagtgtcgataacaacccgtggagaagccttcatgactgacgtgcccagtcc

SEQ ID NO: 265174 - DNA, 53 bp, Artificial
  Synthetic oligonucleotide
gcacctgctttccaagacaccgaactaatttctttagttccccaccaagggcc

SEQ ID NO: 265175 - DNA, 55 bp, Artificial
  Synthetic oligonucleotide
gagccgcactgaggttattagtttactagaggctttgatgtcagtttgtgagtgg

SEQ ID NO: 265176 - DNA, 51 bp, Artificial
  Synthetic oligonucleotide
gactcggttgccctggtaggcaaaaccccatttggtaacacggggttgaaa

SEQ ID NO: 265177 - DNA, 55 bp, Artificial
  Synthetic oligonucleotide
gcccactactatgaaggccataagaggtcatgccctgagaatgcagaacagtatg

SEQ ID NO: 265178 - DNA, 60 bp, Artificial
  Synthetic oligonucleotide
gctggataagtgatgggggcaaaatggccgattatcccaaaccagggcaattgaccatga

SEQ ID NO: 265179 - DNA, 55 bp, Artificial
  Synthetic oligonucleotide
gacgatacagacctagccaaccgaggggtttggatgaggaaccgatggggatcag

SEQ ID NO: 265180 - DNA, 55 bp, Artificial
  Synthetic oligonucleotide
gccccggataggagatgggaaagttcgagccctttgccgtcatagtctatgggcg

SEQ ID NO: 265181 - DNA, 55 bp, Artificial
  Synthetic oligonucleotide
gaccgcactgccaacgaaaccttagccggaggcacttacaccctcacggccagca

SEQ ID NO: 265182 - DNA, 55 bp, Artificial
  Synthetic oligonucleotide
gacaattggtgacggaacggctacaatctgcccggagtaaattacccagcggggc

SEQ ID NO: 265183 - DNA, 55 bp, Artificial
  Synthetic oligonucleotide
gccgccagtcatttacttgctctcggagctgcttagcttcttccgagttataatc

SEQ ID NO: 265184 - DNA, 55 bp, Artificial
  Synthetic oligonucleotide
cttacattccgtaggctccactaatagttgtagcgatccgcaatcatcgagattt

SEQ ID NO: 265185 - DNA, 55 bp, Artificial
  Synthetic oligonucleotide
gcctgtttagccctctcccgtgccctctgagcggcccgtcttagagctttctctg

SEQ ID NO: 265186 - DNA, 51 bp, Artificial
  Synthetic oligonucleotide
ctcttttccccgtcaggggactgaaacggttacgtatcggcgtaaccgcca

SEQ ID NO: 265187 - DNA, 55 bp, Artificial
  Synthetic oligonucleotide
gcgcaatcagcaaaatagtcagggtaatcgcaccattgactaaagctgtggccag

SEQ ID NO: 265188 - DNA, 55 bp, Artificial
  Synthetic oligonucleotide
gctagtcctgatgcggttaatactgataatgcaaaggggcttcctgctttgactg

SEQ ID NO: 265189 - DNA, 52 bp, Artificial
  Synthetic oligonucleotide
cgtaactcagcccggggtaagtctatttgttgggaaattacgggaaacatga

SEQ ID NO: 265190 - DNA, 55 bp, Artificial
  Synthetic oligonucleotide
ctagtacagtcaagggttataccagtatgacagcgtatttcggttctaagggtag

SEQ ID NO: 265191 - DNA, 55 bp, Artificial
  Synthetic oligonucleotide
ctacggaataaatgctgtgagcacaatgtcaagccatcacagatcatcctggagg

SEQ ID NO: 265192 - DNA, 55 bp, Artificial
  Synthetic oligonucleotide
ctacactaacaacataagattttagtctgtgtagctacctgtggcgtgcctgaga

SEQ ID NO: 265193 - DNA, 55 bp, Artificial
  Synthetic oligonucleotide
gctctagttgtcctaagaaaggatgcgtatctagaaataatcggttcttgtgctc

SEQ ID NO: 265194 - DNA, 53 bp, Artificial
  Synthetic oligonucleotide
cgtgcttcggtagcccgtgggggacgatttccctgaaccaacttgaccgcagg

SEQ ID NO: 265195 - DNA, 55 bp, Artificial
  Synthetic oligonucleotide
gctctgaccgcatcagcccgttggatcctaaccggggtaagaataatctgcccac

SEQ ID NO: 265196 - DNA, 55 bp, Artificial
  Synthetic oligonucleotide
ggccacagcccgatccgtcgccatggagataaaggaaccttgattgtgggttagt

SEQ ID NO: 265197 - DNA, 55 bp, Artificial
  Synthetic oligonucleotide
attccaagcctatggccccatgccggtgctcacctacaaggctcaactggaaacc

SEQ ID NO: 265198 - DNA, 50 bp, Artificial
  Synthetic oligonucleotide
gtcggtaacagcggtggttaaattaggcgtacccaagggtcgggcgtgtt

SEQ ID NO: 265199 - DNA, 55 bp, Artificial
  Synthetic oligonucleotide
gtctgattagttcaccttgtcggttgtcaagggcacgaagtggtgaacgaagtga

SEQ ID NO: 265200 - DNA, 55 bp, Artificial
  Synthetic oligonucleotide
atgccgagttttgctgaaaatgtgcggtcgccatagaaacctgagcgcctcgtgc

SEQ ID NO: 265201 - DNA, 53 bp, Artificial
  Synthetic oligonucleotide
cgccaaaacgtggagaaccgtggtggatgttaggggaagtacacgccgctact

SEQ ID NO: 265202 - DNA, 55 bp, Artificial
  Synthetic oligonucleotide
cggaggctctaactacgcactgagtcgtctttcagctgtatgtgcccactcgaac

SEQ ID NO: 265203 - DNA, 55 bp, Artificial
  Synthetic oligonucleotide
cggccaattgggattccagatcactgaccggcatcgctgcaatatccagccaccg

SEQ ID NO: 265204 - DNA, 54 bp, Artificial
  Synthetic oligonucleotide
cggggttggcacggggtaatgtgtttgtcctctgcgacccagggctacgcgaaa

SEQ ID NO: 265205 - DNA, 55 bp, Artificial
  Synthetic oligonucleotide
cggtgaaccaggctaggcgctcagcacaccgcatttatcaggaatacgctaccga

SEQ ID NO: 265206 - DNA, 55 bp, Artificial
  Synthetic oligonucleotide
gatgcgaggggtaaaccacgcgcacacatggtatgaagcccgtacccagcaagcg

SEQ ID NO: 265207 - DNA, 55 bp, Artificial
  Synthetic oligonucleotide
gcacatgacggtgaacaacccgcctgcatcttccattacgcagacagtcgcggcc

SEQ ID NO: 265208 - DNA, 55 bp, Artificial
  Synthetic oligonucleotide
ggtgaaccctttagtgtgcaaataccctggctttatgactccagcccgagcgacc

SEQ ID NO: 265209 - DNA, 55 bp, Artificial
  Synthetic oligonucleotide
gttggctcggaccttcactgcgtggttcgcttatgtgctttaatagcacaacgca

SEQ ID NO: 265210 - DNA, 55 bp, Artificial
  Synthetic oligonucleotide
tagtaatggccttcccctccggcctagcgggcctgtaccaaactcacgccaagcc

SEQ ID NO: 265211 - DNA, 54 bp, Artificial
  Synthetic oligonucleotide
atgttgtgggcaaactatcccggttgtaccggcggtcaattacgtctcgctttg

SEQ ID NO: 265212 - DNA, 55 bp, Artificial
  Synthetic oligonucleotide
tcgagcgttgcctgtaaacgcaatagcgcagcaagtgactcttccgagaatacgt

SEQ ID NO: 265213 - DNA, 55 bp, Artificial
  Synthetic oligonucleotide
ttcccaaccaatactattctttaggcgataatcatcctggcggatacaaaagtat

SEQ ID NO: 265214 - DNA, 55 bp, Artificial
  Synthetic oligonucleotide
aaaacagtaacgacttcgtcgagcctcgctccacagatccgctgttagaaattga

SEQ ID NO: 265215 - DNA, 54 bp, Artificial
  Synthetic oligonucleotide
ctctaggtgggcatagtagtgctccaatgcgccattgtccgctggaggcatatc

SEQ ID NO: 265216 - DNA, 54 bp, Artificial
  Synthetic oligonucleotide
ggatacgaaggttgagcgagaaaaccagatgagtaactattgtgcgggtaacag

SEQ ID NO: 265217 - DNA, 54 bp, Artificial
  Synthetic oligonucleotide
ggtgacaggcctgctgtatccaataggccgccgcgtgagttacatacccctgtt

SEQ ID NO: 265218 - DNA, 53 bp, Artificial
  Synthetic oligonucleotide
aatccaagttccaaagtgcaccgagctgtattggtaatttagcgccgagacat

SEQ ID NO: 265219 - DNA, 52 bp, Artificial
  Synthetic oligonucleotide
atggccgcttttgtaggcccggtattcaccgattaagctggtaccaagcaga

SEQ ID NO: 265220 - DNA, 52 bp, Artificial
  Synthetic oligonucleotide
cgtaatagcggtaagcgagctcgatgaggacatacgcatcgccagagacaaa

SEQ ID NO: 265221 - DNA, 52 bp, Artificial
  Synthetic oligonucleotide
tctaatgatcgatacctcgtctacagccacagagacagattacgagccagtg

SEQ ID NO: 265222 - DNA, 55 bp, Artificial
  Synthetic oligonucleotide
ccacggaaaagctcgatatcaaccctgtagaaaaggtcgcatacaccgacgagcc

SEQ ID NO: 265223 - DNA, 50 bp, Artificial
  Synthetic oligonucleotide
aacgcgagcgagctttaccgcagacccatggcgcacaggcaaccgtgttt

SEQ ID NO: 265224 - DNA, 50 bp, Artificial
  Synthetic oligonucleotide
aacgccggtcctgcccgattgagttaccgcacatgggtgacttacccgca

SEQ ID NO: 265225 - DNA, 50 bp, Artificial
  Synthetic oligonucleotide
aacgccaggccaaacccgtcatttcggtcctgcgctttatcgcacacaga

SEQ ID NO: 265226 - DNA, 50 bp, Artificial
  Synthetic oligonucleotide
aacgccacctccaacggcgcctacattgcgtgtaccccggatgaagccac

SEQ ID NO: 265227 - DNA, 50 bp, Artificial
  Synthetic oligonucleotide
aacgcagcagccacgctagataatggcagtgcgcattccacctgggacgt

SEQ ID NO: 265228 - DNA, 50 bp, Artificial
  Synthetic oligonucleotide
aacctgagcccctatagccacctgacattcagtgtgcagtgctcccggga

SEQ ID NO: 265229 - DNA, 50 bp, Artificial
  Synthetic oligonucleotide
aacccctccacaacgggcgtagcctgatgaaatctgagctgccagcgccc

SEQ ID NO: 265230 - DNA, 50 bp, Artificial
  Synthetic oligonucleotide
aacccccaaatccgccacttcactgcgcggggcatagccgataccagttg

SEQ ID NO: 265231 - DNA, 50 bp, Artificial
  Synthetic oligonucleotide
aacccacacaggcccttcgtacagtccgctgcgatttccgttggctccag

SEQ ID NO: 265232 - DNA, 50 bp, Artificial
  Synthetic oligonucleotide
aaccagagccgccaccatagagcggggtcagtgtgcaggatgccgggtaa

SEQ ID NO: 265233 - DNA, 55 bp, Artificial
  Synthetic oligonucleotide
ccagcgggtatctggtaaaagtcggtatacagttcaccccgcattttgcaggtta

SEQ ID NO: 265234 - DNA, 50 bp, Artificial
  Synthetic oligonucleotide
aaagtggcctggctgctctcacccatgtctactagcacgcggagcacggc

SEQ ID NO: 265235 - DNA, 50 bp, Artificial
  Synthetic oligonucleotide
aaaagccttagcagcgacactacgaccccgctagacgtggtcgcgcctta

SEQ ID NO: 265236 - DNA, 50 bp, Artificial
  Synthetic oligonucleotide
aaaccacgctgactccagtgcgaccagcccgcttgtggatagctgctggc

SEQ ID NO: 265237 - DNA, 50 bp, Artificial
  Synthetic oligonucleotide
aaaggtgaggcctaacccgggaataacaagggggctggcgcaaggcgtta

SEQ ID NO: 265238 - DNA, 50 bp, Artificial
  Synthetic oligonucleotide
aaagcgtaggatcgagcgagcatcagttaaccggcggctccgtcaccaga

SEQ ID NO: 265239 - DNA, 50 bp, Artificial
  Synthetic oligonucleotide
aaacggtgtcgctcaggggcgtctaatgcaggtggccagtgcccaatttg

SEQ ID NO: 265240 - DNA, 50 bp, Artificial
  Synthetic oligonucleotide
aaagcactataccgcccgcttgcacgacagccgtaccaaatgccggtgga

SEQ ID NO: 265241 - DNA, 50 bp, Artificial
  Synthetic oligonucleotide
aactccgcaccgctccaatcgcaggagtcgtagtctgggtgccagtccgg

SEQ ID NO: 265242 - DNA, 50 bp, Artificial
  Synthetic oligonucleotide
aagcacttcagagcaagcccaacgggtgggagccagtccggtttcgcgtt

SEQ ID NO: 265243 - DNA, 50 bp, Artificial
  Synthetic oligonucleotide
aagcattccactcttgcgccagtggctgactaaacgcttccggccagcgg

SEQ ID NO: 265244 - DNA, 55 bp, Artificial
  Synthetic oligonucleotide
cccgtagtgatggtgctgcgtattcaagctcaaccaccgtagactgaattatcgc

SEQ ID NO: 265245 - DNA, 50 bp, Artificial
  Synthetic oligonucleotide
aaggactaatgtgtggtgcgtgtggtggaattggccgggcggaaccctta

SEQ ID NO: 265246 - DNA, 50 bp, Artificial
  Synthetic oligonucleotide
aaggctaccggggttggcacggggtaatgtgtttgtcctctgcgacccag

SEQ ID NO: 265247 - DNA, 50 bp, Artificial
  Synthetic oligonucleotide
aagggccgttgcttaccaggtgtgggggctgggtccattcactcaccggg

SEQ ID NO: 265248 - DNA, 50 bp, Artificial
  Synthetic oligonucleotide
aatccgcacgatgttcgaattagggtggtgctcactgtcggccgtgggga

SEQ ID NO: 265249 - DNA, 50 bp, Artificial
  Synthetic oligonucleotide
aatgagaggaggttgcccgcacgcagcttatcgcacagccgagggtacat

SEQ ID NO: 265250 - DNA, 50 bp, Artificial
  Synthetic oligonucleotide
aatgcccgccaaaccacgctgactccagtgcgaccagcccgcttgtggat

SEQ ID NO: 265251 - DNA, 50 bp, Artificial
  Synthetic oligonucleotide
aatgcgacctgtacccatcggagtgatgggcgagctactcattgcggggg

SEQ ID NO: 265252 - DNA, 50 bp, Artificial
  Synthetic oligonucleotide
aatggacagggtgttccatcgctggagcagcgctaacagtacgcgcgtgc

SEQ ID NO: 265253 - DNA, 50 bp, Artificial
  Synthetic oligonucleotide
aatggcgctgtccttaggggtgattggccgtcgcacggtgcaatctgaga

SEQ ID NO: 265254 - DNA, 50 bp, Artificial
  Synthetic oligonucleotide
acacagacttgagcgggaatcgccgggccagcgcacaaggcaaaggtctt

SEQ ID NO: 265255 - DNA, 55 bp, Artificial
  Synthetic oligonucleotide
ccgtgaccactacaccttgataacgccattcctcccgcaacaggtcgttcaataa

SEQ ID NO: 265256 - DNA, 50 bp, Artificial
  Synthetic oligonucleotide
acagcgcatcacataagcgatcccctcacccggcaagccaaggcgtctta

SEQ ID NO: 265257 - DNA, 50 bp, Artificial
  Synthetic oligonucleotide
acaggcgtgccgatccttcaacccgtgatagccaatatccaccgggcgca

SEQ ID NO: 265258 - DNA, 50 bp, Artificial
  Synthetic oligonucleotide
accacgacttaccgatccatcgcgctagattggcaacccatgcaccgccg

SEQ ID NO: 265259 - DNA, 50 bp, Artificial
  Synthetic oligonucleotide
accaggtgtgggggctgggtccattcactcaccgggtcgtcaaatgcggt

SEQ ID NO: 265260 - DNA, 50 bp, Artificial
  Synthetic oligonucleotide
accatgcatattgggcctgtctggcccgttagcggcgactacgaagcgga

SEQ ID NO: 265261 - DNA, 50 bp, Artificial
  Synthetic oligonucleotide
accattagcgggctgcaggcacactaccgcaacggcgattttaccccggc

SEQ ID NO: 265262 - DNA, 50 bp, Artificial
  Synthetic oligonucleotide
aactatcaaggcctgggcattcgtattgacggggcacctcccctggccga

SEQ ID NO: 265263 - DNA, 50 bp, Artificial
  Synthetic oligonucleotide
aacggtgcattcgggcgggcccctggctaccgagttaccctggatattgt

SEQ ID NO: 265264 - DNA, 50 bp, Artificial
  Synthetic oligonucleotide
caggttggtccaacgctgtagggcccaaaataggctaggcggttatttgt

SEQ ID NO: 265265 - DNA, 50 bp, Artificial
  Synthetic oligonucleotide
aacggccggccatttttagcccgttccgcagtggcgtaccgtatgattcc

SEQ ID NO: 265266 - DNA, 55 bp, Artificial
  Synthetic oligonucleotide
ccttcgctgatcgctaccccgaaggctatccctatcggacccatgcttccggcca

SEQ ID NO: 265267 - DNA, 55 bp, Artificial
  Synthetic oligonucleotide
cgaagctgcgcgctactcccgcaggcagatttctacgaatgttaccgaacctggc

SEQ ID NO: 265268 - DNA, 55 bp, Artificial
  Synthetic oligonucleotide
cgacccctcgttgcttattgttatgttgtcgatacttgaggtagcgggtagctac

SEQ ID NO: 265269 - DNA, 55 bp, Artificial
  Synthetic oligonucleotide
atcgggacctctgcctccggatcgcccgtgccctacggcctggaggttatctagt

SEQ ID NO: 265270 - DNA, 55 bp, Artificial
  Synthetic oligonucleotide
ctcccggagcggacctaaagctgctcgaatctatcaccaagggagcacccaggac

SEQ ID NO: 265271 - DNA, 50 bp, Artificial
  Synthetic oligonucleotide
atggcaactgtaggggttccagaggcgactgctagctgcatggggtctga

SEQ ID NO: 265272 - DNA, 50 bp, Artificial
  Synthetic oligonucleotide
atggagtggagcctgggcatgttgggggtatcttgacagcctgggcggag

SEQ ID NO: 265273 - DNA, 50 bp, Artificial
  Synthetic oligonucleotide
atggagggaattcgtgcgccgggcaagaggctactaccacaggtgcctcg

SEQ ID NO: 265274 - DNA, 50 bp, Artificial
  Synthetic oligonucleotide
atggacgccagcttccacacgcgttccaggcctcagatgcgagaacgggc

SEQ ID NO: 265275 - DNA, 50 bp, Artificial
  Synthetic oligonucleotide
atgagggtggcccggagtactcgaacttagcgaacgcagcgtacttgccc

SEQ ID NO: 265276 - DNA, 50 bp, Artificial
  Synthetic oligonucleotide
atctccccaagtgggaaacgccttattgggccgggaccagctagggtcta

SEQ ID NO: 265277 - DNA, 50 bp, Artificial
  Synthetic oligonucleotide
agccccctggagccctcgctcgtcgcaccccagaccataattccagctcc

SEQ ID NO: 265278 - DNA, 50 bp, Artificial
  Synthetic oligonucleotide
atcgctcgccgggtgtagaccttgactagctgggcgcgatactcctccga

SEQ ID NO: 265279 - DNA, 50 bp, Artificial
  Synthetic oligonucleotide
agtgggcgtccacacagagcaacagccgacatggggtatcacgtcctgga

SEQ ID NO: 265280 - DNA, 50 bp, Artificial
  Synthetic oligonucleotide
agtcatgacggggatcaagggctgagctgcggcatgcaggtcgcgagggg

SEQ ID NO: 265281 - DNA, 55 bp, Artificial
  Synthetic oligonucleotide
cttccacatagctaggtgttccatcgcagagctctatcgtgaaatccgccatcga

SEQ ID NO: 265282 - DNA, 55 bp, Artificial
  Synthetic oligonucleotide
gactaagagctcagtggatcgaacatcttggaggtcaaccagtgaacgaggcacc

SEQ ID NO: 265283 - DNA, 55 bp, Artificial
  Synthetic oligonucleotide
gactaccttagcgaaggcactatagtcttcaccgatctgcctgacaggcttgcgc

SEQ ID NO: 265284 - DNA, 55 bp, Artificial
  Synthetic oligonucleotide
gcatctaaaacacactggcttaccgcagcgagagcatgtaagactagtcacctga

SEQ ID NO: 265285 - DNA, 55 bp, Artificial
  Synthetic oligonucleotide
ggagagtagtggtgtgtaccgctatcccgagcctaagatcctgactggtagcaac

SEQ ID NO: 265286 - DNA, 55 bp, Artificial
  Synthetic oligonucleotide
tgccgggtgagctcccagtcacggaagtctccctctgggactcttagcgccaaca

SEQ ID NO: 265287 - DNA, 55 bp, Artificial
  Synthetic oligonucleotide
tccctggagcctaacacgctatacgatatacttgagaccatcctacttgtaggca

SEQ ID NO: 265288 - DNA, 55 bp, Artificial
  Synthetic oligonucleotide
tattgtgccagacagggaggcatgtatagaagatcgttagaggctctatttgcta

SEQ ID NO: 265289 - DNA, 55 bp, Artificial
  Synthetic oligonucleotide
aaccgggaggtacttatattcgcgtatcggacgcatcttcaacttctctcgagcg

SEQ ID NO: 265290 - DNA, 55 bp, Artificial
  Synthetic oligonucleotide
cacacaggacaatctataggcaaagctagtcacgcgattgcctggccttaagccg

SEQ ID NO: 265291 - DNA, 55 bp, Artificial
  Synthetic oligonucleotide
taggcttccttgttggtcctcaaccaatgagtgtggtaggtagcggcctctacgc

SEQ ID NO: 265292 - DNA, 55 bp, Artificial
  Synthetic oligonucleotide
tagcagggatagccctctccgccggtcccatctcccaaacacgaccggtacaacc

SEQ ID NO: 265293 - DNA, 55 bp, Artificial
  Synthetic oligonucleotide
gttatccgatcgttagacaggacttagcagtcttagtaagtgcgagtataccggc

SEQ ID NO: 265294 - DNA, 55 bp, Artificial
  Synthetic oligonucleotide
gggtgggtcctgcctgtacagcctaccagcgcctccgtagtactctagagcagca

SEQ ID NO: 265295 - DNA, 55 bp, Artificial
  Synthetic oligonucleotide
gggtacagtataccgttgagcttctctctcatgctgtactcctggtcataacgtc

SEQ ID NO: 265296 - DNA, 55 bp, Artificial
  Synthetic oligonucleotide
gggacagtacgaggtttcgcggtcccagaagcagcctcttttactaggagacagc

SEQ ID NO: 265297 - DNA, 55 bp, Artificial
  Synthetic oligonucleotide
acaacctacgttatattccctagtgatcataggctagcaaggaggctaatcgagg

SEQ ID NO: 265298 - DNA, 55 bp, Artificial
  Synthetic oligonucleotide
ggccaagcgtgtacctccgtcattcaagtataagcccctggcaccaaggtgtgtt

SEQ ID NO: 265299 - DNA, 55 bp, Artificial
  Synthetic oligonucleotide
ggcagagggtaggctcactatgggtacacggtggggccccagattttccacagga

SEQ ID NO: 265300 - DNA, 54 bp, Artificial
  Synthetic oligonucleotide
ccgaagctcagatgaaatacctaccggtctacaatactgatcgccctgaggtac

SEQ ID NO: 265301 - DNA, 55 bp, Artificial
  Synthetic oligonucleotide
ccaactaactgaaccaatgcgtattcggtggtgtaactcggtttactagtagtgc

SEQ ID NO: 265302 - DNA, 53 bp, Artificial
  Synthetic oligonucleotide
ctagtggtatcgtagagcatagtgttcgaaacctgtatatacccctcggctac

SEQ ID NO: 265303 - DNA, 53 bp, Artificial
  Synthetic oligonucleotide
ccggccactaccgagatcacgctatgggccagggacagtcagaagacgttcat

SEQ ID NO: 265304 - DNA, 53 bp, Artificial
  Synthetic oligonucleotide
tggagagcccttagggtgaacaacacacgctggaggatagagatcatgcatag

SEQ ID NO: 265305 - DNA, 53 bp, Artificial
  Synthetic oligonucleotide
tttcttgtgaggagtgagggtcttgccggtagtcactacaagggcaaggatcc

SEQ ID NO: 265306 - DNA, 52 bp, Artificial
  Synthetic oligonucleotide
tactgcccatataggaatccccagtgcgaagttacgggtcccgtcgattgga

SEQ ID NO: 265307 - DNA, 51 bp, Artificial
  Synthetic oligonucleotide
gactctccctgcggggaacttgtggggtgggagttcagtccaattggcgga

SEQ ID NO: 265308 - DNA, 51 bp, Artificial
  Synthetic oligonucleotide
acccttcatagcgttaactacgtcccctccaggagggttacgagcgcaacg

SEQ ID NO: 265309 - DNA, 51 bp, Artificial
  Synthetic oligonucleotide
accctgagataggcgctcttgtcagccggatggaaaacgaggaaatagcag

SEQ ID NO: 265310 - DNA, 50 bp, Artificial
  Synthetic oligonucleotide
acggcatgtcaactctggcgcgtaaggggctttccgaggactggtggtcc

SEQ ID NO: 265311 - DNA, 50 bp, Artificial
  Synthetic oligonucleotide
acgggcaggatgactctgggttcgtcttcgtgcaaggggaaagcccgacg

SEQ ID NO: 265312 - DNA, 55 bp, Artificial
  Synthetic oligonucleotide
cctcgaggcaggatctatcttatgaaagccgctctaaacggtgatccactcacag

SEQ ID NO: 265313 - DNA, 50 bp, Artificial
  Synthetic oligonucleotide
acgggttctaccggcgtcttgggaggtgccatggcccatgggttagctag

SEQ ID NO: 265314 - DNA, 50 bp, Artificial
  Synthetic oligonucleotide
actggggcgctgctccagtcccctcgccggggtctacagataacgttcta

SEQ ID NO: 265315 - DNA, 50 bp, Artificial
  Synthetic oligonucleotide
cgagtatcctaagtctgtaaacgcaacctgcatagcagaccacgccacta

SEQ ID NO: 265316 - DNA, 50 bp, Artificial
  Synthetic oligonucleotide
actgggtaatcaggacgtccacgggccctctgccactccacggcttcgga

SEQ ID NO: 265317 - DNA, 50 bp, Artificial
  Synthetic oligonucleotide
acttctgggtgttccccacaggtaggacccaagaggtgggcgcaggagtg

SEQ ID NO: 265318 - DNA, 50 bp, Artificial
  Synthetic oligonucleotide
agacgcatcgggttcgtccgtggcccatccaagtactggacgctgggaga

SEQ ID NO: 265319 - DNA, 50 bp, Artificial
  Synthetic oligonucleotide
agagggttggcctgagggggtgatcgtcaggtacgaactgtgctcgccag

SEQ ID NO: 265320 - DNA, 50 bp, Artificial
  Synthetic oligonucleotide
agcagcaccaagtgggcccataaccgctgatcccgtgtccacgccttccg

SEQ ID NO: 265321 - DNA, 50 bp, Artificial
  Synthetic oligonucleotide
agccagagggtgcccaagtatcatgacaggcccgagtcctacgggaccct

SEQ ID NO: 265322 - DNA, 50 bp, Artificial
  Synthetic oligonucleotide
cagcttggcatggagggaattcgtgcgccgggcaagaggctactaccaca

SEQ ID NO: 265323 - DNA, 55 bp, Artificial
  Synthetic oligonucleotide
cctgacgatagttctagttcctagaagctgattcatggagcgggccctgctttaa

SEQ ID NO: 265324 - DNA, 50 bp, Artificial
  Synthetic oligonucleotide
cagcatggtgaacctgcattgctccacgacgccgctaaggatacccgcac

SEQ ID NO: 265325 - DNA, 50 bp, Artificial
  Synthetic oligonucleotide
cagacgggctttgatccgtggccagtcctggtccgtgatggcgtacacga

SEQ ID NO: 265326 - DNA, 50 bp, Artificial
  Synthetic oligonucleotide
cactctggggactgcgtgcttgcgcctatcttgtacgcggcctgtcctat

SEQ ID NO: 265327 - DNA, 50 bp, Artificial
  Synthetic oligonucleotide
cactctccaatttggtccaggctgcggtggcagtagccatctggcgtgct

SEQ ID NO: 265328 - DNA, 50 bp, Artificial
  Synthetic oligonucleotide
aaaagggtcaccagggatggctctgtggcccgcaggaaaggtgttgccca

SEQ ID NO: 265329 - DNA, 50 bp, Artificial
  Synthetic oligonucleotide
aaagcataccagcggaggtctgtgctacggggatgtgcgggagatggtgc

SEQ ID NO: 265330 - DNA, 50 bp, Artificial
  Synthetic oligonucleotide
aaagcgcgctctgctcagggggaccagcatgttccagtcgtgcaggctca

SEQ ID NO: 265331 - DNA, 50 bp, Artificial
  Synthetic oligonucleotide
aacaacgcgagcagcgtcccaaggcatccgggtcttgtggagtctctcaa

SEQ ID NO: 265332 - DNA, 50 bp, Artificial
  Synthetic oligonucleotide
aacacgcgggccgtcagaggggccatttccgtaacgacgatctccttacc

SEQ ID NO: 265333 - DNA, 50 bp, Artificial
  Synthetic oligonucleotide
aactgggcagttgacggggctagagatgctcttatgggcgccaactggga

SEQ ID NO: 265334 - DNA, 55 bp, Artificial
  Synthetic oligonucleotide
cctgctatctctgtctcttcacctatctgtatctcagagttactggcaggaaccc

SEQ ID NO: 265335 - DNA, 50 bp, Artificial
  Synthetic oligonucleotide
aagaagcctgcgtggcctatgctggtgactctcaacggtgccctccgatc

SEQ ID NO: 265336 - DNA, 50 bp, Artificial
  Synthetic oligonucleotide
aagaggtagcagtcggccatctggtagaggctctcgacccgaggcacgta

SEQ ID NO: 265337 - DNA, 50 bp, Artificial
  Synthetic oligonucleotide
gtcctgcggatataagaaacgcaagtattaccctaatagtccgaatgaac

SEQ ID NO: 265338 - DNA, 50 bp, Artificial
  Synthetic oligonucleotide
aagtgggcccataaccgctgatcccgtgtccacgccttccggggatactg

SEQ ID NO: 265339 - DNA, 50 bp, Artificial
  Synthetic oligonucleotide
aatactgcacagggcactgtaaccaggggtgtgtcaatgcgcctccccga

SEQ ID NO: 265340 - DNA, 50 bp, Artificial
  Synthetic oligonucleotide
aatcctcgtcggtccatcctatggcccgtagcatggatctggcacctgcc

SEQ ID NO: 265341 - DNA, 50 bp, Artificial
  Synthetic oligonucleotide
accaacatctatcctcagcgtggagacgctagggagctgccgtacgcgga

SEQ ID NO: 265342 - DNA, 50 bp, Artificial
  Synthetic oligonucleotide
acccgccaacggcgtacagctcatgtcctgcctcggtaaactgcttgtga

SEQ ID NO: 265343 - DNA, 50 bp, Artificial
  Synthetic oligonucleotide
ggaggcacttacagccctcaaccccttttccacaaatatggagtgctgtt

SEQ ID NO: 265344 - DNA, 50 bp, Artificial
  Synthetic oligonucleotide
accgctaggtacctggccgtttgatgtcgggcttcgggctaggaggctct

SEQ ID NO: 265345 - DNA, 55 bp, Artificial
  Synthetic oligonucleotide
cgaatagctttggccactctctacttagccagcacgcctatagggaacctagggg

SEQ ID NO: 265346 - DNA, 50 bp, Artificial
  Synthetic oligonucleotide
accgctgatcccgtgtccacgccttccggggatactgacgcccgcgtatt

SEQ ID NO: 265347 - DNA, 50 bp, Artificial
  Synthetic oligonucleotide
accggttgggtagcacagcatggtgaacctgcattgctccacgacgccgc

SEQ ID NO: 265348 - DNA, 50 bp, Artificial
  Synthetic oligonucleotide
agtatcgtccgggagccctttacctccgtgcctgcgtgtgagctcgctcc

SEQ ID NO: 265349 - DNA, 50 bp, Artificial
  Synthetic oligonucleotide
aggtggctaaaggcgtgcgtgcaatggttgtacccggctccatgcaagtc

SEQ ID NO: 265350 - DNA, 50 bp, Artificial
  Synthetic oligonucleotide
aggtgagcgtctcagctccacggactgtgcagggtggcagcactttcaag

SEQ ID NO: 265351 - DNA, 50 bp, Artificial
  Synthetic oligonucleotide
aggtctctcccgtaatcaccgttacggttgccaggaccgctcccacagca

SEQ ID NO: 265352 - DNA, 50 bp, Artificial
  Synthetic oligonucleotide
aggtctcagcggcacccgggaacctctcagaaggagtcttgcgaccaggg

SEQ ID NO: 265353 - DNA, 50 bp, Artificial
  Synthetic oligonucleotide
agggtctcccgggggtggagtgcccaatgggtctaattgtgcagccatgt

SEQ ID NO: 265354 - DNA, 50 bp, Artificial
  Synthetic oligonucleotide
agggtagcggtacctgcactctatgccaacccgagtcatcgtggcctgga

SEQ ID NO: 265355 - DNA, 50 bp, Artificial
  Synthetic oligonucleotide
agggtagcatacgggctcctcaatggaggggaggcggtgtggttttcggg

SEQ ID NO: 265356 - DNA, 55 bp, Artificial
  Synthetic oligonucleotide
cgcatcaggtagccattaaggcagggtgctatcctgagagaaaggctaagccagc

SEQ ID NO: 265357 - DNA, 50 bp, Artificial
  Synthetic oligonucleotide
agggctcgccagggtagcatacgggctcctcaatggaggggaggcggtgt

SEQ ID NO: 265358 - DNA, 50 bp, Artificial
  Synthetic oligonucleotide
agggagtcccctcaggtaacgcacaggcttcccaccgagttcgtagcagg

SEQ ID NO: 265359 - DNA, 50 bp, Artificial
  Synthetic oligonucleotide
aggcgtgagcataccagggtggccatcggatctagttagggggcggaagc

SEQ ID NO: 265360 - DNA, 50 bp, Artificial
  Synthetic oligonucleotide
agctccacggactgtgcagggtggcagcactttcaaggtaaccgccacaa

SEQ ID NO: 265361 - DNA, 50 bp, Artificial
  Synthetic oligonucleotide
agcgtaggggcatggtcccgtatcgtctaccccctcatcagtccttcccg

SEQ ID NO: 265362 - DNA, 50 bp, Artificial
  Synthetic oligonucleotide
agcgtagctgctgacgaactccagggaccagcgatcgtcctgcctgcgtc

SEQ ID NO: 265363 - DNA, 50 bp, Artificial
  Synthetic oligonucleotide
agcggcgctaacttggccatgggtcgtagaccccctgatgcggcttgtgt

SEQ ID NO: 265364 - DNA, 50 bp, Artificial
  Synthetic oligonucleotide
agcggaggtctgtgctacggggatgtgcgggagatggtgcacgtagctga

SEQ ID NO: 265365 - DNA, 50 bp, Artificial
  Synthetic oligonucleotide
agcgcacaggccacaggcagtacacttctcctcgcctgtctcggggtcag

SEQ ID NO: 265366 - DNA, 50 bp, Artificial
  Synthetic oligonucleotide
agccgctgtaagggcagccaccgcctcataagttagtgtgccagagcggg

SEQ ID NO: 265367 - DNA, 55 bp, Artificial
  Synthetic oligonucleotide
ctccagatgtgctcgcgtgcggacctcaccatgtgctcccagtaggtgcctccgg

SEQ ID NO: 265368 - DNA, 50 bp, Artificial
  Synthetic oligonucleotide
agccctttacctccgtgcctgcgtgtgagctcgctccctagcatagtgcc

SEQ ID NO: 265369 - DNA, 50 bp, Artificial
  Synthetic oligonucleotide
cactctagcctgtctagccgtcgtctttggtctgggtcccggcaggtcct

SEQ ID NO: 265370 - DNA, 50 bp, Artificial
  Synthetic oligonucleotide
cacggtagcgatgggcacagacgccctagctgctctattcctaggtgcgc

SEQ ID NO: 265371 - DNA, 50 bp, Artificial
  Synthetic oligonucleotide
caccgtactccccaaggtacatcccggtaagcaccccaaggggcacggac

SEQ ID NO: 265372 - DNA, 50 bp, Artificial
  Synthetic oligonucleotide
caccctaactgagggagctgatcgctcgagaacgtgcgtaggcgcgagga

SEQ ID NO: 265373 - DNA, 50 bp, Artificial
  Synthetic oligonucleotide
cacataggctcacgccaagctaggtacgaccgccggaggagcccccaact

SEQ ID NO: 265374 - DNA, 50 bp, Artificial
  Synthetic oligonucleotide
cacacccaacttgctcctcaccccacacgtggctgccaatggcccttacc

SEQ ID NO: 265375 - DNA, 50 bp, Artificial
  Synthetic oligonucleotide
agccaggcgtgtttggccccagcatttagggcagcatccctgaccgcacg

SEQ ID NO: 265376 - DNA, 50 bp, Artificial
  Synthetic oligonucleotide
attgcagcgtatgggcggcgtgtgagctacagcagccctcccaaggtcag

SEQ ID NO: 265377 - DNA, 50 bp, Artificial
  Synthetic oligonucleotide
atggcataccgggcgatagagaatcgcgcactgcacgcacagtgggtcga

SEQ ID NO: 265378 - DNA, 54 bp, Artificial
  Synthetic oligonucleotide
agtgggcaggggatagttgggttgtcctgttctcccacccagcggattacaccc

SEQ ID NO: 265379 - DNA, 55 bp, Artificial
  Synthetic oligonucleotide
cggttggaaggcgtgagcatatgtcggataccgtgagcgcaccgcgtgatccaag

SEQ ID NO: 265380 - DNA, 55 bp, Artificial
  Synthetic oligonucleotide
ctaggctatacaaatgtgcaatcggtgcgcattggtaaactagtggaactcaccc

SEQ ID NO: 265381 - DNA, 54 bp, Artificial
  Synthetic oligonucleotide
ctgacggcccaactgttccccttgagttaccgtgcctgttaaggtataggcgcg

SEQ ID NO: 265382 - DNA, 55 bp, Artificial
  Synthetic oligonucleotide
ctgctgtagatctgttgctctttctatagcagcacgcttaggaatccacgtgttc

SEQ ID NO: 265383 - DNA, 55 bp, Artificial
  Synthetic oligonucleotide
ctggagtgctcgtgcagcccaagacttcaaccttcaggtgtttaacgccggggac

SEQ ID NO: 265384 - DNA, 55 bp, Artificial
  Synthetic oligonucleotide
taagtactcgcgggtttcattgttaatggtgagcgtttctaggcggagaaactga

SEQ ID NO: 265385 - DNA, 55 bp, Artificial
  Synthetic oligonucleotide
gattgccataaatccgtaggcgatccggtgtgcctatctgactgggaagacccat

SEQ ID NO: 265386 - DNA, 55 bp, Artificial
  Synthetic oligonucleotide
gctagttgcatttgcagccctaccccatagccaaagcgagggcctagatcatcgg

SEQ ID NO: 265387 - DNA, 55 bp, Artificial
  Synthetic oligonucleotide
gctcagtttcccgatcaagattagggacttttagctgtcgtcattttggttacct

SEQ ID NO: 265388 - DNA, 55 bp, Artificial
  Synthetic oligonucleotide
gctgcgcacttggccgtgggcatcataactcacttgccaaccgctctctgcctcg

SEQ ID NO: 265389 - DNA, 55 bp, Artificial
  Synthetic oligonucleotide
cagcgtccgctgctgtcttctaggcccaaccattggtagagataggccacagacc

SEQ ID NO: 265390 - DNA, 53 bp, Artificial
  Synthetic oligonucleotide
aacggtaaccctattgtcgagactaaagcacatccttacgcttttgaaagacc

SEQ ID NO: 265391 - DNA, 55 bp, Artificial
  Synthetic oligonucleotide
ggccaaggtgccaacacatcaggacgggtcacattactcacctcaatggctcgcg

SEQ ID NO: 265392 - DNA, 55 bp, Artificial
  Synthetic oligonucleotide
ggctaaccccgtcagccagtcatggaggccatcatggagtaactgtgcctcccca

SEQ ID NO: 265393 - DNA, 55 bp, Artificial
  Synthetic oligonucleotide
ggggatatacttaagtcagtgcattctaccattgtgcctgtggagagtgccgctc

SEQ ID NO: 265394 - DNA, 54 bp, Artificial
  Synthetic oligonucleotide
ggggcaaccctcgccattaactacacaacaaccgactgggtgcaagcggtttta

SEQ ID NO: 265395 - DNA, 53 bp, Artificial
  Synthetic oligonucleotide
ggggcgtttgattgcagattaagtaggcaacgggtaaacgggtacgccattcc

SEQ ID NO: 265396 - DNA, 53 bp, Artificial
  Synthetic oligonucleotide
cactaccgttttgttgggctactggggttgagcaatccccaccgtggtcttga

SEQ ID NO: 265397 - DNA, 53 bp, Artificial
  Synthetic oligonucleotide
ccattggggttgcccaagcacggggtgtgattcttttagtcctgagccaacgg

SEQ ID NO: 265398 - DNA, 53 bp, Artificial
  Synthetic oligonucleotide
cctatctacaacggcgcaaaggctagtacggtgctttcatcaccacgcagtaa

SEQ ID NO: 265399 - DNA, 52 bp, Artificial
  Synthetic oligonucleotide
ccatgttttacttcgataaccccaaaattgtccaagagggcaatctggaggt

SEQ ID NO: 265400 - DNA, 55 bp, Artificial
  Synthetic oligonucleotide
ccgcggggtgtgtgaaaccctgcatgggatgggctatgaggtacttggcagtgat

SEQ ID NO: 265401 - DNA, 52 bp, Artificial
  Synthetic oligonucleotide
gataactctcctgatctgcagtacgaaatgtctatcaccacgtttgagctag

SEQ ID NO: 265402 - DNA, 50 bp, Artificial
  Synthetic oligonucleotide
acgccatttcgctactgtgtgccggtggattccgtaacgcctggcaagct

SEQ ID NO: 265403 - DNA, 50 bp, Artificial
  Synthetic oligonucleotide
acgccacagggctgccccggtacaaactctagacgatagggcacctgctc

SEQ ID NO: 265404 - DNA, 50 bp, Artificial
  Synthetic oligonucleotide
accggaagcaacaatggcccgttctgtggggctagcggctctaccccgta

SEQ ID NO: 265405 - DNA, 50 bp, Artificial
  Synthetic oligonucleotide
aaacccctttcgctggcaggactatgaacgggtcaaggggctagggcctc

SEQ ID NO: 265406 - DNA, 50 bp, Artificial
  Synthetic oligonucleotide
aaagaaccggtgcttctccggtgggtccgattcccctacctacgcgccgt

SEQ ID NO: 265407 - DNA, 50 bp, Artificial
  Synthetic oligonucleotide
aacaagctagaacgggaccggttgtgcccccaaccgtagcctagggaggc

SEQ ID NO: 265408 - DNA, 50 bp, Artificial
  Synthetic oligonucleotide
aacaatccctgtggaaccggctaccccgtgcgtaccctggtggagtggct

SEQ ID NO: 265409 - DNA, 50 bp, Artificial
  Synthetic oligonucleotide
aacacggctgggaacaaggtaatcccgagccccctctggggttgagcggg

SEQ ID NO: 265410 - DNA, 50 bp, Artificial
  Synthetic oligonucleotide
aacactcgtaccattgcgacgagccatcggggtgcgttgggaagggcgag

SEQ ID NO: 265411 - DNA, 55 bp, Artificial
  Synthetic oligonucleotide
cgaattgccaccgcatccaaatagcgatccaatacccgtgctgtatcggtcaacg

SEQ ID NO: 265412 - DNA, 50 bp, Artificial
  Synthetic oligonucleotide
aactcagctaccgcctcggtatgcggccttggatctgcgtggcctactct

SEQ ID NO: 265413 - DNA, 50 bp, Artificial
  Synthetic oligonucleotide
aactcgaccggcgttcccacccgaatgcgggggatctgctcaatgggcac

SEQ ID NO: 265414 - DNA, 50 bp, Artificial
  Synthetic oligonucleotide
aactgcgggcggcacatgtttgacagaggcgcgatcgctggcccaatcta

SEQ ID NO: 265415 - DNA, 50 bp, Artificial
  Synthetic oligonucleotide
aagacttgggagcggattcagtactacggtgctccccaacgccgctgggg

SEQ ID NO: 265416 - DNA, 50 bp, Artificial
  Synthetic oligonucleotide
aagggtggcaccgggggattgaaaagcggcgatcatgcctagagcgggtt

SEQ ID NO: 265417 - DNA, 50 bp, Artificial
  Synthetic oligonucleotide
aagggtgggcgctcagttgtcccccttagctggtgatggatagtggcgcg

SEQ ID NO: 265418 - DNA, 50 bp, Artificial
  Synthetic oligonucleotide
aaggtcgccactgtcagcacttggggtggggttgcatcgggcggatagag

SEQ ID NO: 265419 - DNA, 50 bp, Artificial
  Synthetic oligonucleotide
aatcgtcgtcgagagcagccaagtgcaggtgagcccccaacagttcggag

SEQ ID NO: 265420 - DNA, 50 bp, Artificial
  Synthetic oligonucleotide
aatgctcgccatgtccagtgaggctcttgttgtgccctcggcacctgaga

SEQ ID NO: 265421 - DNA, 50 bp, Artificial
  Synthetic oligonucleotide
aatgctgtaatcaccacgaggggcaagggctgattcagccaagggcgcaa

SEQ ID NO: 265422 - DNA, 55 bp, Artificial
  Synthetic oligonucleotide
cgacaatacaccactcatggagttcgtagtgaacgcactggtgttggacgagggg

SEQ ID NO: 265423 - DNA, 50 bp, Artificial
  Synthetic oligonucleotide
accgccatgacccacgttgatcactatcccctaccccggacagcagtgga

SEQ ID NO: 265424 - DNA, 50 bp, Artificial
  Synthetic oligonucleotide
acccgtagaagtgccccaggtctctgcccgcgttgagggactggaccaca

SEQ ID NO: 265425 - DNA, 50 bp, Artificial
  Synthetic oligonucleotide
acccctgaacagttggcacaggtgaacggggttggcccccgcctagcggc

SEQ ID NO: 265426 - DNA, 50 bp, Artificial
  Synthetic oligonucleotide
accccggttcattggcgggtaacctcaattcccccagaccacaacgcggt

SEQ ID NO: 265427 - DNA, 50 bp, Artificial
  Synthetic oligonucleotide
accccctagatcagccccctgccagctgactcgaccgcgcaccaagtcct

SEQ ID NO: 265428 - DNA, 50 bp, Artificial
  Synthetic oligonucleotide
acccagggactgcaccagagtctcgggtctcacggggaaaaaccaaggcc

SEQ ID NO: 265429 - DNA, 50 bp, Artificial
  Synthetic oligonucleotide
acccagcaggcagcaaccgtggcgcctgaacccacccctgtagatgccgc

SEQ ID NO: 265430 - DNA, 50 bp, Artificial
  Synthetic oligonucleotide
acccacctgcaaggttaaacaggcggcacgaaactgctctggtggcggca

SEQ ID NO: 265431 - DNA, 50 bp, Artificial
  Synthetic oligonucleotide
acccaatagaggccccgtcccaaccagtggggaatcactgccggcaacca

SEQ ID NO: 265432 - DNA, 50 bp, Artificial
  Synthetic oligonucleotide
acagtggatcgggggatgagccgccgctaaatggtcagcgatccctaggg

SEQ ID NO: 265433 - DNA, 55 bp, Artificial
  Synthetic oligonucleotide
cgaccattttgcctggattctcagggttaaagacccaatcttgacccgtgacgtc

SEQ ID NO: 265434 - DNA, 50 bp, Artificial
  Synthetic oligonucleotide
acagtacgccccaaggggcacgccgcctttggatcacgctgctagagcgc

SEQ ID NO: 265435 - DNA, 50 bp, Artificial
  Synthetic oligonucleotide
acaggtgccgggggtctatgtgccccaattttacgatcgccagggggatg

SEQ ID NO: 265436 - DNA, 50 bp, Artificial
  Synthetic oligonucleotide
acagggcgatccagagcttccgtgaggggtgttgtccccagtcctgccgc

SEQ ID NO: 265437 - DNA, 50 bp, Artificial
  Synthetic oligonucleotide
acaggcgtataccctaggagccacctttggcatcgttgctgccccctgta

SEQ ID NO: 265438 - DNA, 50 bp, Artificial
  Synthetic oligonucleotide
acagacggccatgccctctgcgaagtcccctcgccgtaaagcacccgaac

SEQ ID NO: 265439 - DNA, 50 bp, Artificial
  Synthetic oligonucleotide
aattgctccctgcaaatgcggccccagaaacgggcttgctcacccgcaat

SEQ ID NO: 265440 - DNA, 50 bp, Artificial
  Synthetic oligonucleotide
aatgctttaccgacggggcaccccggaaattgtagcggctttgcctaccc

SEQ ID NO: 265441 - DNA, 55 bp, Artificial
  Synthetic oligonucleotide
cgctcctggatgccccatgcgctcaacgccgttagcggcaattcgagccagtaac

SEQ ID NO: 265442 - DNA, 55 bp, Artificial
  Synthetic oligonucleotide
cgctttcgtccatgtacatccccatgcgatcgctctcaaggagtcgcagttgcgt

SEQ ID NO: 265443 - DNA, 55 bp, Artificial
  Synthetic oligonucleotide
cggaaacggactcatgtggcctatgggcccgagatgtttagtgtccatcgtgcct

SEQ ID NO: 265444 - DNA, 55 bp, Artificial
  Synthetic oligonucleotide
cgtttcgtttgagagaaccactcccgcgaatcctcgcctttgaatgtcctttaga

SEQ ID NO: 265445 - DNA, 55 bp, Artificial
  Synthetic oligonucleotide
gagtgcagctattattgcgaagacaccgagaggaatagagaccccgcttatttca

SEQ ID NO: 265446 - DNA, 55 bp, Artificial
  Synthetic oligonucleotide
gattgccccgactcctccaattacgccgtcaacgacaagtgacctgagccagtct

SEQ ID NO: 265447 - DNA, 55 bp, Artificial
  Synthetic oligonucleotide
gccgatagaggaatgataagcaacggactcattgaggagatagataaggccgggc

SEQ ID NO: 265448 - DNA, 55 bp, Artificial
  Synthetic oligonucleotide
gcgaaaatagggactgagcgagcgaaaatagggactgaccggatcctatggtctg

SEQ ID NO: 265449 - DNA, 55 bp, Artificial
  Synthetic oligonucleotide
gcgcaattgaatcgttcatatactgcaagagtgcaaatgtctctacacgagcaag

SEQ ID NO: 265450 - DNA, 55 bp, Artificial
  Synthetic oligonucleotide
ggaccttgtgtctttcgataactgtgttcgaataacaggccgtatcgagtcaagc

SEQ ID NO: 265451 - DNA, 55 bp, Artificial
  Synthetic oligonucleotide
gggtcattcgtggtatggttctcggtctaaaggagacggaattcgtccaggctgc

SEQ ID NO: 265452 - DNA, 55 bp, Artificial
  Synthetic oligonucleotide
tttccggtgttataggtttcacggcttctacgacgctttctgcaaacacgacgct

SEQ ID NO: 265453 - DNA, 55 bp, Artificial
  Synthetic oligonucleotide
agagtcgacatggcttcttatcaggccgtcatgagtattgctctgggaacattcg

SEQ ID NO: 265454 - DNA, 55 bp, Artificial
  Synthetic oligonucleotide
tcaacctttcagaggtatatgaaggtcataattcccatgcagagaccggcaacgc

SEQ ID NO: 265455 - DNA, 55 bp, Artificial
  Synthetic oligonucleotide
cgccacagccgctatacagctgctatcgagcccaccgctaagaaatacgataggg

SEQ ID NO: 265456 - DNA, 55 bp, Artificial
  Synthetic oligonucleotide
gtgggcgatacttacctttatctagggtcctcggcctggatttccacaattacag

SEQ ID NO: 265457 - DNA, 55 bp, Artificial
  Synthetic oligonucleotide
gtttggcaactcgaatgttacctttccgataggctcaaatgctctatctacagct

SEQ ID NO: 265458 - DNA, 55 bp, Artificial
  Synthetic oligonucleotide
tactcgacaggtttaaggacgagtttctctctcatctaaactctccgggatgtcc

SEQ ID NO: 265459 - DNA, 55 bp, Artificial
  Synthetic oligonucleotide
tagctcacgtaataatcagaaatgccttttcgagagacaacattacaccgggagt

SEQ ID NO: 265460 - DNA, 54 bp, Artificial
  Synthetic oligonucleotide
ccgggtcccctatcgacatgaagtttctgtactccgcataacccgaaataaatg

SEQ ID NO: 265461 - DNA, 54 bp, Artificial
  Synthetic oligonucleotide
ctgtacaccggatcgattatcaaaccctttaccccggaagcaatccattctgag

SEQ ID NO: 265462 - DNA, 54 bp, Artificial
  Synthetic oligonucleotide
cgcagaagaccccgagagtctcactccttgaaggtgatactcctctaatacatc

SEQ ID NO: 265463 - DNA, 51 bp, Artificial
  Synthetic oligonucleotide
cggtaaacgggacgaaggaggttttcaggacacgaaacgatctctttatcc

SEQ ID NO: 265464 - DNA, 52 bp, Artificial
  Synthetic oligonucleotide
gtatcagttctcgagtacatattccccgtcaatcttatggagtcttggtggt

SEQ ID NO: 265465 - DNA, 52 bp, Artificial
  Synthetic oligonucleotide
atggtacaagtatacaaagtgatcggactcatgcttcaaccagtcgagatcc

SEQ ID NO: 265466 - DNA, 55 bp, Artificial
  Synthetic oligonucleotide
cgatgctggaccggcatgatagagacatgattttacggactcttgaagaggttat

SEQ ID NO: 265467 - DNA, 51 bp, Artificial
  Synthetic oligonucleotide
gtccccaatcataggctgtcgatataagcaccggatctgcgttaagctcaa

SEQ ID NO: 265468 - DNA, 50 bp, Artificial
  Synthetic oligonucleotide
gaactgcccaggtcgcaatgctcgcttcgcggggaaagagcggatgaaca

SEQ ID NO: 265469 - DNA, 50 bp, Artificial
  Synthetic oligonucleotide
ctgctagcggtgccgggctcattgctttgtggcgttttcggaatcgagcc

SEQ ID NO: 265470 - DNA, 50 bp, Artificial
  Synthetic oligonucleotide
ctcgtggtcgccagtcgcgctaagtgcagccagtccttgcttcgcaaagg

SEQ ID NO: 265471 - DNA, 50 bp, Artificial
  Synthetic oligonucleotide
ctatggccccggttattgccgcaatggtgtcgctgtctccgcccagagat

SEQ ID NO: 265472 - DNA, 50 bp, Artificial
  Synthetic oligonucleotide
cgtaccctagctcgctaaatgccagcgcaagggcgccagttccgcaacca

SEQ ID NO: 265473 - DNA, 50 bp, Artificial
  Synthetic oligonucleotide
aaccgattgggaaggcgcaaaggacgtctgattggagggaccgcccgtcc

SEQ ID NO: 265474 - DNA, 48 bp, Artificial
  Synthetic oligonucleotide
aacggccgcgaaagacggtacgaagtccacggggaactccgtaagggg

SEQ ID NO: 265475 - DNA, 50 bp, Artificial
  Synthetic oligonucleotide
aagaacctgcacccggccttgattgctccaagcgcacatgcctcgtcacc

SEQ ID NO: 265476 - DNA, 50 bp, Artificial
  Synthetic oligonucleotide
aagcctgggctatggccccggttattgccgcaatggtgtcgctgtctccg

SEQ ID NO: 265477 - DNA, 55 bp, Artificial
  Synthetic oligonucleotide
gacttgcgcagaaaccctgaacaggagaccccaaacaggagccctgaacaagagc

SEQ ID NO: 265478 - DNA, 50 bp, Artificial
  Synthetic oligonucleotide
aagcgagaggatctccccaaccgttcccccttcataggaaaccgcaccga

SEQ ID NO: 265479 - DNA, 50 bp, Artificial
  Synthetic oligonucleotide
aatacggaacccaaggctgcggtccgtgccagtagcggaggagcctgtgc

SEQ ID NO: 265480 - DNA, 50 bp, Artificial
  Synthetic oligonucleotide
aatcagttcgcccttatgacccggagcggtagacaacgggaagccgggga

SEQ ID NO: 265481 - DNA, 50 bp, Artificial
  Synthetic oligonucleotide
agcggcacgcgcatacatgctacggttccagttgcgcccttggagagatg

SEQ ID NO: 265482 - DNA, 50 bp, Artificial
  Synthetic oligonucleotide
agggcagagacagggggcgttcggtggataagtgcagaatcgacccgaga

SEQ ID NO: 265483 - DNA, 50 bp, Artificial
  Synthetic oligonucleotide
agggtccccggagcagactggttgtacggaatggcctgtgtttggagcat

SEQ ID NO: 265484 - DNA, 50 bp, Artificial
  Synthetic oligonucleotide
atctccgctcccccactcgaagagaaacgctgcatcaggaatcccgtgcc

SEQ ID NO: 265485 - DNA, 50 bp, Artificial
  Synthetic oligonucleotide
attctggcgcaagagtcgggcctttttccaggttaagacccggggctgta

SEQ ID NO: 265486 - DNA, 50 bp, Artificial
  Synthetic oligonucleotide
attgcgctcgcggcaccctgggcgaaagcaattacaaacgtacccgtcat

SEQ ID NO: 265487 - DNA, 50 bp, Artificial
  Synthetic oligonucleotide
catcccgtagtgctcctgcatgggccgagatcggagcggagactcaggaa

SEQ ID NO: 265488 - DNA, 55 bp, Artificial
  Synthetic oligonucleotide
ccgtgtcctggcataaaggcagtcccgactcctccgaaatcactgcgttctcccg

SEQ ID NO: 265489 - DNA, 50 bp, Artificial
  Synthetic oligonucleotide
ccaaccaccaacctccgaccccggcctttttggtgagtagcccaggggga

SEQ ID NO: 265490 - DNA, 50 bp, Artificial
  Synthetic oligonucleotide
ccagtcgcgctaagtgcagccagtccttgcttcgcaaaggccaattccga

SEQ ID NO: 265491 - DNA, 50 bp, Artificial
  Synthetic oligonucleotide
ccggtttgatgctgggaacgagaatggccgcaggggtcccgacaggggga

SEQ ID NO: 265492 - DNA, 50 bp, Artificial
  Synthetic oligonucleotide
cctcccgccatcccgtagtgctcctgcatgggccgagatcggagcggaga

SEQ ID NO: 265493 - DNA, 50 bp, Artificial
  Synthetic oligonucleotide
cgatgctttcgctacggctagggcgacccttctcgcaatgccaggctcaa

SEQ ID NO: 265494 - DNA, 50 bp, Artificial
  Synthetic oligonucleotide
cgcatactaagacctacaccctccgccactacgtggccctcctccctcga

SEQ ID NO: 265495 - DNA, 50 bp, Artificial
  Synthetic oligonucleotide
cgccagtcttgcgtccactgatgctcctcagtgcattgcgaccgccgatg

SEQ ID NO: 265496 - DNA, 50 bp, Artificial
  Synthetic oligonucleotide
cgccggactgagaacaacattgtcgccctttgcggcaagtcccctgcata

SEQ ID NO: 265497 - DNA, 50 bp, Artificial
  Synthetic oligonucleotide
cggaatgtatgcggccacgagagcgaatgcaagggtagcagccggggcag

SEQ ID NO: 265498 - DNA, 50 bp, Artificial
  Synthetic oligonucleotide
cggcagtcacttcgtaccctagctcgctaaatgccagcgcaagggcgcca

SEQ ID NO: 265499 - DNA, 55 bp, Artificial
  Synthetic oligonucleotide
gagtagtctcgctggttctctcgagagcagtttcaggttaccaatttcagagcgg

SEQ ID NO: 265500 - DNA, 50 bp, Artificial
  Synthetic oligonucleotide
cggctagggcgacccttctcgcaatgccaggctcaaagggtttcggtaga

SEQ ID NO: 265501 - DNA, 55 bp, Artificial
  Synthetic oligonucleotide
ccgagtatgatggctcgtaagtgaacactccttccgtaatctctcccgggccttc

SEQ ID NO: 265502 - DNA, 55 bp, Artificial
  Synthetic oligonucleotide
gagtcggtcccgagaccgttgcatctatgacctatgttgcttcggaagtagtcgc

SEQ ID NO: 265503 - DNA, 55 bp, Artificial
  Synthetic oligonucleotide
ccaggttgctgcctggtggaactacctctggccttctaggataagtattcatgag

SEQ ID NO: 265504 - DNA, 55 bp, Artificial
  Synthetic oligonucleotide
ttgccccacacgtcgcgggggaatgtgggcgggctttgcccttgacatccccctc

SEQ ID NO: 265505 - DNA, 60 bp, Artificial
  Synthetic oligonucleotide
ccgatattgtacgtcatacatacgtactgcaacaagtcgatccgtaagcgcgagctgtgt

SEQ ID NO: 265506 - DNA, 51 bp, Artificial
  Synthetic oligonucleotide
gctccttcgtccttgtcgctttgcgtataaggtagcgtgccaacaaagaac

SEQ ID NO: 265507 - DNA, 51 bp, Artificial
  Synthetic oligonucleotide
gatctcgccaaccttgaacgcgcactcgaacaggctggcgacttgacccgc

SEQ ID NO: 265508 - DNA, 51 bp, Artificial
  Synthetic oligonucleotide
tattcgtgcatggatcgaataccgtctttgcgtctaggttcagtcgtttga

SEQ ID NO: 265509 - DNA, 51 bp, Artificial
  Synthetic oligonucleotide
cctcgaacagtctctgtccaacttgaaaggactcagaggcggcgtgctgac

SEQ ID NO: 265510 - DNA, 51 bp, Artificial
  Synthetic oligonucleotide
caatgtgggcctatgactaatctcaatcatttcttatgcatccaggcacga

SEQ ID NO: 265511 - DNA, 50 bp, Artificial
  Synthetic oligonucleotide
tggcgtcacgccaccgatacgttgccaccgagtcgataccccatcgcctt

SEQ ID NO: 265512 - DNA, 50 bp, Artificial
  Synthetic oligonucleotide
tttccgctcaagcgccagtggtttctggtgcaacgcgacggcaaacgact

SEQ ID NO: 265513 - DNA, 50 bp, Artificial
  Synthetic oligonucleotide
aaagggatagggacgctccaactcaggaaccggcatatagagttgcttgc

SEQ ID NO: 265514 - DNA, 50 bp, Artificial
  Synthetic oligonucleotide
atgcgtgtcaaccccttgttcgcccagattgccttggcctgttgcctgtt

SEQ ID NO: 265515 - DNA, 50 bp, Artificial
  Synthetic oligonucleotide
cacccttccgccgtcttgataggcgatgtacaggtcggtcccggttgcta

SEQ ID NO: 265516 - DNA, 60 bp, Artificial
  Synthetic oligonucleotide
agtgatgtcgataacacggaggctgccgaacgtattatcgctattgcggtgcgctatgcg

SEQ ID NO: 265517 - DNA, 50 bp, Artificial
  Synthetic oligonucleotide
cagaggtggtatgcacgccatgttcgcatatcggtgcgcgggcaggctcc

SEQ ID NO: 265518 - DNA, 50 bp, Artificial
  Synthetic oligonucleotide
catgttcgcatatcggtgcgcgggcaggctcctacaatgcctgcttcccg

SEQ ID NO: 265519 - DNA, 50 bp, Artificial
  Synthetic oligonucleotide
cgtccgggtttgtccgtcgagctccagaaggggttccagctggacgcggt

SEQ ID NO: 265520 - DNA, 50 bp, Artificial
  Synthetic oligonucleotide
ctacgacctcgcctcgaaaccgcactacgagtggggcgcagtggtctggt

SEQ ID NO: 265521 - DNA, 50 bp, Artificial
  Synthetic oligonucleotide
ctgacctgcatttacgctctccacaacacttgcagggcccagcccgcgca

SEQ ID NO: 265522 - DNA, 50 bp, Artificial
  Synthetic oligonucleotide
gcatgttcacatcggcaggtcgggcctgggtacgcagcgtgggtacgcgg

SEQ ID NO: 265523 - DNA, 50 bp, Artificial
  Synthetic oligonucleotide
gtacaacggccatgtgcgctgaaggaagtcggagtctgatccggcggtcg

SEQ ID NO: 265524 - DNA, 50 bp, Artificial
  Synthetic oligonucleotide
gtgggggctatacacctgagggtgtaggtgcttcaggggcggttacacgc

SEQ ID NO: 265525 - DNA, 50 bp, Artificial
  Synthetic oligonucleotide
gttcccttcaaacggcgttgctccagcctcgtctgggcctcgcgtggtcc

SEQ ID NO: 265526 - DNA, 50 bp, Artificial
  Synthetic oligonucleotide
tacagaaggcagccgtactgttctgagcttgcggcagggggctgattgct

SEQ ID NO: 265527 - DNA, 57 bp, Artificial
  Synthetic oligonucleotide
agtcgtcttggaagcgggccgtcaggtagtaggcagctggaaactggtgatggaccc

SEQ ID NO: 265528 - DNA, 50 bp, Artificial
  Synthetic oligonucleotide
tcctgtggccctccaagttgcccggtagtctgctctacagactctccccc

SEQ ID NO: 265529 - DNA, 50 bp, Artificial
  Synthetic oligonucleotide
tcgcgcatgtgcagtgtcatccttgaaaggggtgcgtgggcaaccaagtt

SEQ ID NO: 265530 - DNA, 50 bp, Artificial
  Synthetic oligonucleotide
tctcatagtgacgcatgcagattccttcaaatgcggcagggcgcagcccc

SEQ ID NO: 265531 - DNA, 60 bp, Artificial
  Synthetic oligonucleotide
ttatggctgccagtggtatgacgcagcaagtaatcgctcaggccttgggcgtaaccgatc

SEQ ID NO: 265532 - DNA, 60 bp, Artificial
  Synthetic oligonucleotide
gtattatcgctattgcggtgcgctatgcgctcaatccggccaaactggcatgggcagtga

SEQ ID NO: 265533 - DNA, 60 bp, Artificial
  Synthetic oligonucleotide
agcgctgtattggcagtcactgcccatgccagtttggccggattgagcgcatagcgcacc

SEQ ID NO: 265534 - DNA, 57 bp, Artificial
  Synthetic oligonucleotide
agcctccgtgttatcgacatcactaccgaagctcccccaagccagcccttcttggac

SEQ ID NO: 265535 - DNA, 60 bp, Artificial
  Synthetic oligonucleotide
cctcatcacgctaccgattagccagctacgctggccaacggcgtcggtcgctttctccgc

SEQ ID NO: 265536 - DNA, 60 bp, Artificial
  Synthetic oligonucleotide
cttggactcggttgcgccaggcatcccgaatcgattggctggtgtagccaccagggccat

SEQ ID NO: 265537 - DNA, 57 bp, Artificial
  Synthetic oligonucleotide
acgccgattccgctgggcgaccttggcaacttcttcaccctgtcaggcaagggcggc

SEQ ID NO: 265538 - DNA, 59 bp, Artificial
  Synthetic oligonucleotide
tagcacgctaaagtgggttgcatcattgctgcgggttatcggtcttgcgaaaatacccc

SEQ ID NO: 265539 - DNA, 59 bp, Artificial
  Synthetic oligonucleotide
tactacctgacggcccgcttccaagacgacttcgaatctgccgtgctgcacgccctaaa

SEQ ID NO: 265540 - DNA, 58 bp, Artificial
  Synthetic oligonucleotide
gttcgtgcccgagaacctctgtctggcgagctaccgaccattctccaaatcgtgggtg

SEQ ID NO: 265541 - DNA, 57 bp, Artificial
  Synthetic oligonucleotide
cggttcacgcccgtctcggtgttgtagcccaaccattccgacatatcgcgcaggatt

SEQ ID NO: 265542 - DNA, 57 bp, Artificial
  Synthetic oligonucleotide
gtttgctctacggccttccttgcggggtccatcaccagtttccagctgcctactacc

SEQ ID NO: 265543 - DNA, 60 bp, Artificial
  Synthetic oligonucleotide
aaatggactagagggttgcggcaatccattctgaggcagcgggccgcagagttcgtgccc

SEQ ID NO: 265544 - DNA, 56 bp, Artificial
  Synthetic oligonucleotide
tgcttacaagctaggtcggaaaattggcgaggggacgaacaaactaatctattaca

SEQ ID NO: 265545 - DNA, 56 bp, Artificial
  Synthetic oligonucleotide
gtcacggcacagccgaaaacggagggctggtgcggggttgcccccttgaaagcgca

SEQ ID NO: 265546 - DNA, 56 bp, Artificial
  Synthetic oligonucleotide
agaaaagttccgttgtgtgcattagttcacagaaagctgtaacaaaacgtcattcg

SEQ ID NO: 265547 - DNA, 58 bp, Artificial
  Synthetic oligonucleotide
ttctccgatccgacggatcgcctgtcaaggcctgtcaagcgcgacagggcaccgcctc

SEQ ID NO: 265548 - DNA, 58 bp, Artificial
  Synthetic oligonucleotide
ttgcatcattgctgcgggttatcggtcttgcgaaaataccccttcgcggccaatcccc

SEQ ID NO: 265549 - DNA, 60 bp, Artificial
  Synthetic oligonucleotide
gcggggcatgctgttcaacgtcgcctggcggcggggatagcctggtatggcagaaatgcg

SEQ ID NO: 265550 - DNA, 57 bp, Artificial
  Synthetic oligonucleotide
tcggtgttgtagcccaaccattccgacatatcgcgcaggatttgggtttcggttcgc

SEQ ID NO: 265551 - DNA, 57 bp, Artificial
  Synthetic oligonucleotide
ttcccatacagccccatagcgccgcccgtattcctgcgaatagggtaggcgcagccc

SEQ ID NO: 265552 - DNA, 57 bp, Artificial
  Synthetic oligonucleotide
acaaagcggcgatgcgcagattttggtagagcggctattaatagggcagtttcagcg

SEQ ID NO: 265553 - DNA, 55 bp, Artificial
  Synthetic oligonucleotide
tgcttgacgctgacgtcacaggtccccagaacatccatacgagggttttgaccga

SEQ ID NO: 265554 - DNA, 55 bp, Artificial
  Synthetic oligonucleotide
ctacgcagcttacctatttgtgctcgatccggtagggcgcctcagtcgcggcgtg

SEQ ID NO: 265555 - DNA, 55 bp, Artificial
  Synthetic oligonucleotide
gctttgttgtgcccagtgaatgagtcgatgcgcctgaaacgtattgactaggacc

SEQ ID NO: 265556 - DNA, 55 bp, Artificial
  Synthetic oligonucleotide
ggaggctgccgaacgtattatcgctattgcggtgcgctatgcgctcaatccggcc

SEQ ID NO: 265557 - DNA, 55 bp, Artificial
  Synthetic oligonucleotide
gtgcgcaaggcatgtattaccgctctcacgacggacgtcaaattctggacggcac

SEQ ID NO: 265558 - DNA, 55 bp, Artificial
  Synthetic oligonucleotide
ctgcatgaccgcaagactgggcttgtccgcgtaaaacgtcatcaatgccagggtt

SEQ ID NO: 265559 - DNA, 55 bp, Artificial
  Synthetic oligonucleotide
ctgtggagttaaactgagcgctttccaaagttgacgatcggtggcattttcgacg

SEQ ID NO: 265560 - DNA, 54 bp, Artificial
  Synthetic oligonucleotide
catggtttcccagtacgctgaattccactacggtgaaacgacccttggcgtccc

SEQ ID NO: 265561 - DNA, 55 bp, Artificial
  Synthetic oligonucleotide
cttgaaaactgtcacactggcggcatatcctggttatcggggcttcgatccccta

SEQ ID NO: 265562 - DNA, 55 bp, Artificial
  Synthetic oligonucleotide
ggattcgttttgcgctcggtcatgattgaaagcctataggcaccacaaggtgcgt

SEQ ID NO: 265563 - DNA, 55 bp, Artificial
  Synthetic oligonucleotide
taggagttgccgcagcgcaattccacactgtccctcatgcacacccattcaggac

SEQ ID NO: 265564 - DNA, 54 bp, Artificial
  Synthetic oligonucleotide
gagggtgagccttacctgcctcacctggtgaagaagtttggtggccccgaacgg

SEQ ID NO: 265565 - DNA, 55 bp, Artificial
  Synthetic oligonucleotide
tagccgctctaccaaaatctgcgcatcgccgctttgttgtgcccagtgaatgagt

SEQ ID NO: 265566 - DNA, 55 bp, Artificial
  Synthetic oligonucleotide
gatggcaatttctgaagaatagcatagacataattcggagcgcacccttatttgg

SEQ ID NO: 265567 - DNA, 55 bp, Artificial
  Synthetic oligonucleotide
gcaatccattctgaggcagcgggccgcagagttcgtgcccgagaacctctgtctg

SEQ ID NO: 265568 - DNA, 55 bp, Artificial
  Synthetic oligonucleotide
gcgctcgctcgtgtcaacgcgaaacgccgagtttcgagaagctggactatgggcg

SEQ ID NO: 265569 - DNA, 55 bp, Artificial
  Synthetic oligonucleotide
ggtatgcacgccatgttcgcatatcggtgcgcgggcaggctcctacaatgcctgc

SEQ ID NO: 265570 - DNA, 55 bp, Artificial
  Synthetic oligonucleotide
ttcaatctgttcagtcagcgagatggctgcagcctcgttgcgcagcgcgataaac

SEQ ID NO: 265571 - DNA, 56 bp, Artificial
  Synthetic oligonucleotide
catgttggaatgccgcttgaacccgttcggggccaccaaacttcttcaccaggtga

SEQ ID NO: 265572 - DNA, 55 bp, Artificial
  Synthetic oligonucleotide
gccaggcatcccgaatcgattggctggtgtagccaccagggccattcatcggggt

SEQ ID NO: 265573 - DNA, 55 bp, Artificial
  Synthetic oligonucleotide
gccgagcgaccaatgcataccctgcataaaagcccgctgtccggtattgcgtacc

SEQ ID NO: 265574 - DNA, 55 bp, Artificial
  Synthetic oligonucleotide
gggcgaattccgttttgacgtaaccgctcacgcttctaggatttgtcacgtctcc

SEQ ID NO: 265575 - DNA, 55 bp, Artificial
  Synthetic oligonucleotide
ggctcacatggcttactgggtggaacggctgcagggcttaactgatcttcttttg

SEQ ID NO: 265576 - DNA, 55 bp, Artificial
  Synthetic oligonucleotide
ggcgttcggccctcaatacaatcgtgacattctaagaagcctcgatccgcccacg

SEQ ID NO: 265577 - DNA, 55 bp, Artificial
  Synthetic oligonucleotide
ggcggcacgacagcgcaaccacccagtagtgacaacaacactgcgccgctcatca

SEQ ID NO: 265578 - DNA, 55 bp, Artificial
  Synthetic oligonucleotide
ggcaaaacgccctgtagtcaggtgtgcggttgtcaccgacattactgcgcaagag

SEQ ID NO: 265579 - DNA, 55 bp, Artificial
  Synthetic oligonucleotide
agcggctattttaggttggccattcagagcagagcgcaaaccagcgtctgcaagg

SEQ ID NO: 265580 - DNA, 55 bp, Artificial
  Synthetic oligonucleotide
agattccggggccgatagatgacttggctggggtggaaagtgacttctaccgtag

SEQ ID NO: 265581 - DNA, 55 bp, Artificial
  Synthetic oligonucleotide
atgtggaaggattggcccgagcgcgaggcctatggctacaaggcaccggacacag

SEQ ID NO: 265582 - DNA, 60 bp, Artificial
  Synthetic oligonucleotide
attctgatgctgcggtctgaatggcctgcgctgaactcataacatcagaccatttagcgc

SEQ ID NO: 265583 - DNA, 55 bp, Artificial
  Synthetic oligonucleotide
attgctgcgaacagcccagacagccgcgtctttatcaagaacccataaccaaaac

SEQ ID NO: 265584 - DNA, 55 bp, Artificial
  Synthetic oligonucleotide
attggcgacaaatgggcgctactggtaatgcatgcccttgcaaatggtccgcggc

SEQ ID NO: 265585 - DNA, 55 bp, Artificial
  Synthetic oligonucleotide
caaatcgtttcatcgcataccacgcttgcttgccgctggtgtcagcgtagtttcc

SEQ ID NO: 265586 - DNA, 55 bp, Artificial
  Synthetic oligonucleotide
caatacgtttcaggcgcatcgactcattcactgggcacaacaaagcggcgatgcg

SEQ ID NO: 265587 - DNA, 55 bp, Artificial
  Synthetic oligonucleotide
tcgcctggcggcggggatagcctggtatggcagaaatgcgcccaactgcgaattg

SEQ ID NO: 265588 - DNA, 55 bp, Artificial
  Synthetic oligonucleotide
accaccgtttagggcgtgcagcacggcagattcgaagtcgtcttggaagcgggcc

SEQ ID NO: 265589 - DNA, 55 bp, Artificial
  Synthetic oligonucleotide
tcgacccgcgcattactgcacgtgcctcgccatagtctcccacgcttccctttcc

SEQ ID NO: 265590 - DNA, 55 bp, Artificial
  Synthetic oligonucleotide
catgtgcaaaattcggtggcatagtgaatgcgacacggtgaagtaggtggcctat

SEQ ID NO: 265591 - DNA, 54 bp, Artificial
  Synthetic oligonucleotide
cccgagcataacggcgccaacccaaaccttcttcgtcccacaggctgtcgtcgg

SEQ ID NO: 265592 - DNA, 55 bp, Artificial
  Synthetic oligonucleotide
cccgggttgctgatatcacccgatacgagtgcatgcgaaaccggcgaatctgccg

SEQ ID NO: 265593 - DNA, 60 bp, Artificial
  Synthetic oligonucleotide
ccacagatgtcggatagcgcacaggctagtggggatagcgttcgcgctgaacccaataaa

SEQ ID NO: 265594 - DNA, 55 bp, Artificial
  Synthetic oligonucleotide
ccgacttcaagtgctcttcgtcttgcttgacgcgccactctttccattcgtcctg

SEQ ID NO: 265595 - DNA, 55 bp, Artificial
  Synthetic oligonucleotide
cgttttcaggtcggcatattctggccgcaatgaaccgataagatgcggccatgcg

SEQ ID NO: 265596 - DNA, 55 bp, Artificial
  Synthetic oligonucleotide
cgttcaggctgaggagtgtcttcggtcggggttgtcgtggtgttcatccgtgcgg

SEQ ID NO: 265597 - DNA, 54 bp, Artificial
  Synthetic oligonucleotide
cggtggctataccgacgacagcctgtgggacgaagaaggtttgggttggcgccg

SEQ ID NO: 265598 - DNA, 55 bp, Artificial
  Synthetic oligonucleotide
aagtaacgaccccgcctacatcctgaacctgctcaagcgtgtcatccgcgtgagc

SEQ ID NO: 265599 - DNA, 54 bp, Artificial
  Synthetic oligonucleotide
cggcgccgacaaagaacgacaccgactgggttccattcgaaatagcctacgccg

SEQ ID NO: 265600 - DNA, 55 bp, Artificial
  Synthetic oligonucleotide
cggcctaggatcaccacagcggaaaaggacaccgggatcgtttgtcgcttaacgc

SEQ ID NO: 265601 - DNA, 55 bp, Artificial
  Synthetic oligonucleotide
acatacgtactgcaacaagtcgatccgtaagcgcgagctgtgtccaggaaacggt

SEQ ID NO: 265602 - DNA, 55 bp, Artificial
  Synthetic oligonucleotide
tgctagggcgggtgtagaccctaaactgtagcgaacgcattcgacaacaagggag

SEQ ID NO: 265603 - DNA, 55 bp, Artificial
  Synthetic oligonucleotide
cgagtgacgcttagaacagatacgctagagcgggtcgcatcggacgcagaagtgg

SEQ ID NO: 265604 - DNA, 60 bp, Artificial
  Synthetic oligonucleotide
ccaggaaattcattgagttgattggcgacaaatgggcgctactggtaatgcatgcccttg

SEQ ID NO: 265605 - DNA, 55 bp, Artificial
  Synthetic oligonucleotide
cgactgttattcgatggcaatttctgaagaatagcatagacataattcggagcgc

SEQ ID NO: 265606 - DNA, 55 bp, Artificial
  Synthetic oligonucleotide
tgcgtttgtctttcgagggttcaaagttgtctcgaagctctagcaaccacgcggg

SEQ ID NO: 265607 - DNA, 54 bp, Artificial
  Synthetic oligonucleotide
gaaagcgttatgttgcttcgctactgaccagtcatgcgagctgcgagccgatct

SEQ ID NO: 265608 - DNA, 54 bp, Artificial
  Synthetic oligonucleotide
tgtcgccgtaagcagtgtgcacgccaaaacaccccacgggctgtcgaagcgaaa

SEQ ID NO: 265609 - DNA, 54 bp, Artificial
  Synthetic oligonucleotide
cgcgctctagccggttcaggaattgggcacttgcgggttggggttgtccgacgg

SEQ ID NO: 265610 - DNA, 54 bp, Artificial
  Synthetic oligonucleotide
gagcgctgaaagcaccacactacaggagacccgtatgagcccgttattcgcatg

SEQ ID NO: 265611 - DNA, 54 bp, Artificial
  Synthetic oligonucleotide
cgggccgcagagttcgtgcccgagaacctctgtctggcgagctaccgaccattc

SEQ ID NO: 265612 - DNA, 54 bp, Artificial
  Synthetic oligonucleotide
atcatgcacagcgtcggaacggttcatgtcagtcctcttccaggtaaagggagc

SEQ ID NO: 265613 - DNA, 54 bp, Artificial
  Synthetic oligonucleotide
agccctcgagccgtttcaggctgtagggttgaccgtccagcgttttaaggccga

SEQ ID NO: 265614 - DNA, 53 bp, Artificial
  Synthetic oligonucleotide
agataaatcgggaataaacgttgcgctccaaccagtcgtcaggagtgccgtga

SEQ ID NO: 265615 - DNA, 60 bp, Artificial
  Synthetic oligonucleotide
ccatttgacgcgatgaccgcaaattgattgtaaaggccaccacaacgatgaataacacag

SEQ ID NO: 265616 - DNA, 53 bp, Artificial
  Synthetic oligonucleotide
agtcactgcccatgccagtttggccggattgagcgcatagcgcaccgcaatag

SEQ ID NO: 265617 - DNA, 53 bp, Artificial
  Synthetic oligonucleotide
tctggcgtgctaagccctcatctgcggcactcgtcacgctcttgcgatacatg

SEQ ID NO: 265618 - DNA, 53 bp, Artificial
  Synthetic oligonucleotide
ttgcgttcaatcacggtgaagcctgcagtattgatcgccaggctgaccttacg

SEQ ID NO: 265619 - DNA, 52 bp, Artificial
  Synthetic oligonucleotide
gcgggttatcggtcttgcgaaaataccccttcgcggccaatccccaacccac

SEQ ID NO: 265620 - DNA, 53 bp, Artificial
  Synthetic oligonucleotide
ctggctcgcgcggaaaccaagtctgcgcacgcgtcgattgggtctgagcactc

SEQ ID NO: 265621 - DNA, 52 bp, Artificial
  Synthetic oligonucleotide
gactccctcgtgataacgcccaggtttggggcgcgtataggagtcaacccat

SEQ ID NO: 265622 - DNA, 52 bp, Artificial
  Synthetic oligonucleotide
ttcggccctacagttcggctggggtgtgtcgttaaaactctcaagcggtaac

SEQ ID NO: 265623 - DNA, 52 bp, Artificial
  Synthetic oligonucleotide
cgattccatcgctaacaggtgtccgacagggtgcgttttcttccttaacggg

SEQ ID NO: 265624 - DNA, 52 bp, Artificial
  Synthetic oligonucleotide
catggcacccgtcgaggggtgcggttagatggttaagctatacatcgacccc

SEQ ID NO: 265625 - DNA, 52 bp, Artificial
  Synthetic oligonucleotide
atcagctgcgtattccctatggttcgcaacaagccgtggaatttgccgatcg

SEQ ID NO: 265626 - DNA, 60 bp, Artificial
  Synthetic oligonucleotide
cccattgagcattacccattgagccattacccattgagcattacccattgagcattaccc

SEQ ID NO: 265627 - DNA, 55 bp, Artificial
  Synthetic oligonucleotide
tgagcattacccattgagcattacccattgagccattacccattgagcattaccc

SEQ ID NO: 265628 - DNA, 55 bp, Artificial
  Synthetic oligonucleotide
ttagtgttgttcttgcacgtatgcgtcaaaagtttggtgtagagacgaatcatgg

SEQ ID NO: 265629 - DNA, 53 bp, Artificial
  Synthetic oligonucleotide
gggccaaaattcccacttcggtacaaaacgcagtcaattggttatttaagcaa

SEQ ID NO: 265630 - DNA, 60 bp, Artificial
  Synthetic oligonucleotide
gatacaattcagctaacattagtgttgttcttgcacgtatgcgtcaaaagtttggtgtag

SEQ ID NO: 265631 - DNA, 60 bp, Artificial
  Synthetic oligonucleotide
gcgaacatttaatgcattactgtgcagataagattacttatccatatgcgcgttttgtcc

SEQ ID NO: 265632 - DNA, 55 bp, Artificial
  Synthetic oligonucleotide
gtgttttgaagatatggtgtggtgacctatttcctcctcgccaactttaacccag

SEQ ID NO: 265633 - DNA, 54 bp, Artificial
  Synthetic oligonucleotide
ccttcacgttcccaaccccagttgcaacctctcgcgtaggatgataaccgttac

SEQ ID NO: 265634 - DNA, 54 bp, Artificial
  Synthetic oligonucleotide
atggtgtggtgacctatttcctcctcgccaactttaacccaggataagtgacct

SEQ ID NO: 265635 - DNA, 55 bp, Artificial
  Synthetic oligonucleotide
cccattgagccattacccattgagcattacccattgagcattacccattgagcat

SEQ ID NO: 265636 - DNA, 55 bp, Artificial
  Synthetic oligonucleotide
ctgtgcagataagattacttatccatatgcgcgttttgtccgattatgaggttct

SEQ ID NO: 265637 - DNA, 55 bp, Artificial
  Synthetic oligonucleotide
gtgatattaacggatgcgctatttgataccgcacaaagttgtgctgaggcgatta

SEQ ID NO: 265638 - DNA, 55 bp, Artificial
  Synthetic oligonucleotide
ttaagtgcacaagtgctgtcaattttaccagaggtagattctatgactcggactc

SEQ ID NO: 265639 - DNA, 55 bp, Artificial
  Synthetic oligonucleotide
cgcgcagaactagccaaggtactaggtcgccatgagtcaacgattacacgctggc

SEQ ID NO: 265640 - DNA, 55 bp, Artificial
  Synthetic oligonucleotide
cgactaggtatggtaatcacataagataccacggcaaacaacagtgcgctctgac

SEQ ID NO: 265641 - DNA, 54 bp, Artificial
  Synthetic oligonucleotide
cctcgccaagcaagacccggtttaacccaaatggtatccggtggcacaggtcca

SEQ ID NO: 265642 - DNA, 55 bp, Artificial
  Synthetic oligonucleotide
aacctactcctgacatattcatacctacacccgaagcagttaaacctactcctga

SEQ ID NO: 265643 - DNA, 55 bp, Artificial
  Synthetic oligonucleotide
ccgacctctacttaaccgaactcaccgacaaagacagagaagcagttgccaaccc

SEQ ID NO: 265644 - DNA, 55 bp, Artificial
  Synthetic oligonucleotide
caccctataacggagattggacatattggggcaaccgactaggcaaatatcccgg

SEQ ID NO: 265645 - DNA, 55 bp, Artificial
  Synthetic oligonucleotide
catcctccccttttgttagatggggagttcttgcgagccatagctctgatgcagg

SEQ ID NO: 265646 - DNA, 55 bp, Artificial
  Synthetic oligonucleotide
ccaagaccgaatcgctttaagagcagtttcggaggttaaaagactactgtcaaca

SEQ ID NO: 265647 - DNA, 54 bp, Artificial
  Synthetic oligonucleotide
tagccactggtaggacttgcttagaggtctctgaagtaacaggttacagtcgaa

SEQ ID NO: 265648 - DNA, 53 bp, Artificial
  Synthetic oligonucleotide
aaattgtaggaagcgactgggaactacagagtaggtgagtttaccatcttccc

SEQ ID NO: 265649 - DNA, 55 bp, Artificial
  Synthetic oligonucleotide
tggcacactgagcatagcagcgcttgccgttatggaggaaattccgggcacaact

SEQ ID NO: 265650 - DNA, 53 bp, Artificial
  Synthetic oligonucleotide
tcttaccaagctaaatctactgccgatgagtggtatagacgagcgcatttggc

SEQ ID NO: 265651 - DNA, 53 bp, Artificial
  Synthetic oligonucleotide
gtcactcttaagggtttaactcaggaggagtctttgggactatttgagagctg

SEQ ID NO: 265652 - DNA, 53 bp, Artificial
  Synthetic oligonucleotide
ctttcgtcctacatcccatagctacctttggaatggttgcaagttacgagagt

SEQ ID NO: 265653 - DNA, 52 bp, Artificial
  Synthetic oligonucleotide
cgatgttcggaccccgtggggcttgcctcatctccgaaaacggccccctgtg

SEQ ID NO: 265654 - DNA, 52 bp, Artificial
  Synthetic oligonucleotide
aaccgaggcgtgcagtagcgagagcagcttcacacccagagtggcctgcgcc

SEQ ID NO: 265655 - DNA, 52 bp, Artificial
  Synthetic oligonucleotide
cgctctgggagtcattaggcccggcgctcctatacactccatgcgatcgctg

SEQ ID NO: 265656 - DNA, 52 bp, Artificial
  Synthetic oligonucleotide
tacgtcgcggtttaactttagctccagcgggtggagtgaaaatggttatgac

SEQ ID NO: 265657 - DNA, 52 bp, Artificial
  Synthetic oligonucleotide
taactccacggtttgtttccttcctctagatgtttcatatttagcgacaggt

SEQ ID NO: 265658 - DNA, 52 bp, Artificial
  Synthetic oligonucleotide
ccatcggttacctcgctcccgttgtccccacgatgagccgacaatttgtgga

SEQ ID NO: 265659 - DNA, 51 bp, Artificial
  Synthetic oligonucleotide
gcagggtgcaacagttgttggcataagtgagcgcccactccgtggagaggg

SEQ ID NO: 265660 - DNA, 55 bp, Artificial
  Synthetic oligonucleotide
tctatggtacgaaatttgttgcgtcattatcgtcactcttggacaaattgaggcc

SEQ ID NO: 265661 - DNA, 51 bp, Artificial
  Synthetic oligonucleotide
gctccgaaaggggcaagtctaggatgactcgcacttggggtccgtcgctgc

SEQ ID NO: 265662 - DNA, 51 bp, Artificial
  Synthetic oligonucleotide
cggcagtgagaaaggttgctggagctactccccatgacttgggtgcaccga

SEQ ID NO: 265663 - DNA, 51 bp, Artificial
  Synthetic oligonucleotide
tcgttcaccactacagtcacggtccgagcactggtgtctgggttgtccgag

SEQ ID NO: 265664 - DNA, 51 bp, Artificial
  Synthetic oligonucleotide
tcccccgcttctgatagcagttgtccggcacggtagaccactgtagggagg

SEQ ID NO: 265665 - DNA, 49 bp, Artificial
  Synthetic oligonucleotide
tccaaagaccagggaccggggaagtttctaaagcccaaaccgggtcagg

SEQ ID NO: 265666 - DNA, 51 bp, Artificial
  Synthetic oligonucleotide
tcagttttagccgcacccctgggaaacactcgcacacaatagtcgcccgca

SEQ ID NO: 265667 - DNA, 51 bp, Artificial
  Synthetic oligonucleotide
cgggggtatcctccgagacatcttcacaatgggtgcccgacccatcgctgt

SEQ ID NO: 265668 - DNA, 51 bp, Artificial
  Synthetic oligonucleotide
tagcataggactgagccaataatacccaattgtcttgacaactcccgttgc

SEQ ID NO: 265669 - DNA, 51 bp, Artificial
  Synthetic oligonucleotide
ctaccgggctcagagtttggccagcgatcgcctgacgattgaccataaagt

SEQ ID NO: 265670 - DNA, 51 bp, Artificial
  Synthetic oligonucleotide
ggctatcaaccccagatttctttggccgaaggtttgaagcgagagtgggag

SEQ ID NO: 265671 - DNA, 55 bp, Artificial
  Synthetic oligonucleotide
gggcactaatatctggccgagtccaagaaatggccatagcaattaaaccacaaag

SEQ ID NO: 265672 - DNA, 51 bp, Artificial
  Synthetic oligonucleotide
taaccccgccgttgccgcaatatttgcccccgtcagtccgtgcaacctctc

SEQ ID NO: 265673 - DNA, 49 bp, Artificial
  Synthetic oligonucleotide
ctacacctaaacctgaccgtgtaaggaaaattaccccgaccgggccctg

SEQ ID NO: 265674 - DNA, 51 bp, Artificial
  Synthetic oligonucleotide
ggtagggctcttgacgagtgagttgctgggacctccggtctctccacagcg

SEQ ID NO: 265675 - DNA, 51 bp, Artificial
  Synthetic oligonucleotide
acccagtaaaaccacgatgttcggaccccgtggggcttgcctcatctccga

SEQ ID NO: 265676 - DNA, 50 bp, Artificial
  Synthetic oligonucleotide
tcaccgacaaagacagagaagcagttgccaacccctcccgcttccgcaac

SEQ ID NO: 265677 - DNA, 50 bp, Artificial
  Synthetic oligonucleotide
tctgcaccgacccgagtccccagggatgaccttccagagctcctctgagt

SEQ ID NO: 265678 - DNA, 50 bp, Artificial
  Synthetic oligonucleotide
ggtgtggcaaccgaggcgtgcagtagcgagagcagcttcacacccagagt

SEQ ID NO: 265679 - DNA, 55 bp, Artificial
  Synthetic oligonucleotide
ggaatagtataagtaaactatactctgcctagagctcatcctttacgaagagtct

SEQ ID NO: 265680 - DNA, 55 bp, Artificial
  Synthetic oligonucleotide
gcgagagacctcaataataaatttcggggtcagacgcatttcgccttttgtgtaa

SEQ ID NO: 265681 - DNA, 55 bp, Artificial
  Synthetic oligonucleotide
gaccgaattctcatagccggtgagagtctgcaataatttcccctcacggttccac

SEQ ID NO: 265682 - DNA, 55 bp, Artificial
  Synthetic oligonucleotide
gaatcttaggctagagttccatttctagttgggctggtcgctcatttaaactcgg

SEQ ID NO: 265683 - DNA, 55 bp, Artificial
  Synthetic oligonucleotide
cgttcgaagggtgcatatcaagtctgtaagtcagtgcgagatgttctaacctacg

SEQ ID NO: 265684 - DNA, 55 bp, Artificial
  Synthetic oligonucleotide
cccggcaacactcccctttgtaacatgcaggtagttcctcggcatacggccggac

SEQ ID NO: 265685 - DNA, 55 bp, Artificial
  Synthetic oligonucleotide
gagcattattggatacataaggccctattgagcgttgatctgaaacacggaagtg

SEQ ID NO: 265686 - DNA, 55 bp, Artificial
  Synthetic oligonucleotide
gagggcgtccaaggtggaaccctgactcatgcacagaagtgccatgcaaatcatt

SEQ ID NO: 265687 - DNA, 55 bp, Artificial
  Synthetic oligonucleotide
gcaacgcatgaccccaccgacaggtatctcgcgcctaagagttacagggcgtgca

SEQ ID NO: 265688 - DNA, 55 bp, Artificial
  Synthetic oligonucleotide
gcattaaccagtgttgttactgcggtaggacggtgctgggtaggacggtgctggg

SEQ ID NO: 265689 - DNA, 55 bp, Artificial
  Synthetic oligonucleotide
gcccaagacctgtgtctcgcccctctgaaatacagccgatccatgaacgcgaggg

SEQ ID NO: 265690 - DNA, 55 bp, Artificial
  Synthetic oligonucleotide
tcatccggaggcctctttgacggcctactcagtggcataggctccctctttggta

SEQ ID NO: 265691 - DNA, 55 bp, Artificial
  Synthetic oligonucleotide
gcgcatgcaagttatatggggttagtgcgtcatacatattttgcggacctgattc

SEQ ID NO: 265692 - DNA, 55 bp, Artificial
  Synthetic oligonucleotide
gcgtgatggtccggttgggcttgttttatcacgacaaaatcttcctgtgctcgac

SEQ ID NO: 265693 - DNA, 55 bp, Artificial
  Synthetic oligonucleotide
ggcaggcagaaagctgtactggtgcgtcgtctgtcaagcgtagtttactcaaccg

SEQ ID NO: 265694 - DNA, 55 bp, Artificial
  Synthetic oligonucleotide
ggcttggttgtgtagggattcacggctctttagtgatgccctgactgtatctcct

SEQ ID NO: 265695 - DNA, 55 bp, Artificial
  Synthetic oligonucleotide
ccgtctgtccgggtgataattccgtgctctctgcctttaggatgtatcgcgctgc

SEQ ID NO: 265696 - DNA, 55 bp, Artificial
  Synthetic oligonucleotide
gttaccagtaaccctgtaatggtacggattgtgattattggtgtctgacagcggg

SEQ ID NO: 265697 - DNA, 55 bp, Artificial
  Synthetic oligonucleotide
gttggacaagggctcagatacgtcgcctgttatgctcttatccgatatcccattt

SEQ ID NO: 265698 - DNA, 55 bp, Artificial
  Synthetic oligonucleotide
taagtgactctcgcaccctctcggttgtagggcgtattccacgggttggcgcctc

SEQ ID NO: 265699 - DNA, 54 bp, Artificial
  Synthetic oligonucleotide
ccccaacttcaagatacgggccatatctccctacccgaagagtcgccccgacca

SEQ ID NO: 265700 - DNA, 55 bp, Artificial
  Synthetic oligonucleotide
ccaagggcctgaattcgcgcattgtattatgtttacgccacattgcctacatgtc

SEQ ID NO: 265701 - DNA, 55 bp, Artificial
  Synthetic oligonucleotide
cagtccggcgaaacaaattaccgtgtacataacccagatatgacaatgtctgcga

SEQ ID NO: 265702 - DNA, 55 bp, Artificial
  Synthetic oligonucleotide
caggatagctgttgttccgggtacgtttgaccccgttacaagaggacacatggat

SEQ ID NO: 265703 - DNA, 55 bp, Artificial
  Synthetic oligonucleotide
ttcgcgttgctaacaatgccgtagagattgctggactaacaaggggtgatgaggc

SEQ ID NO: 265704 - DNA, 55 bp, Artificial
  Synthetic oligonucleotide
cagacaataacctagccatctcaccaacacgattttctcccgacagggaacacac

SEQ ID NO: 265705 - DNA, 55 bp, Artificial
  Synthetic oligonucleotide
actgagtgggtctctgggtgatcgtattaccagtcgcgctggtatgagttacacg

SEQ ID NO: 265706 - DNA, 55 bp, Artificial
  Synthetic oligonucleotide
cctataggagttagaccataccccaaggtaaagataacacgatcgcgagtgtacg

SEQ ID NO: 265707 - DNA, 55 bp, Artificial
  Synthetic oligonucleotide
caatggaccgaatcttgctatgcttggcagtcgtcagcctgaaatatacggcacg

SEQ ID NO: 265708 - DNA, 55 bp, Artificial
  Synthetic oligonucleotide
atcccgcaatgtacgggcgccaacgggacgtcgctagcagcgcagaagaaggtac

SEQ ID NO: 265709 - DNA, 54 bp, Artificial
  Synthetic oligonucleotide
acaccttacgagcctcataaatgtgtatgctgccccaagaaagacaccgttatt

SEQ ID NO: 265710 - DNA, 54 bp, Artificial
  Synthetic oligonucleotide
cgcctttataattgccgttgcggacataaggccaggattaaatgtcctcgaagc

SEQ ID NO: 265711 - DNA, 54 bp, Artificial
  Synthetic oligonucleotide
ttcccggataggttacaaatcaattgacgagaaactcaggcggtcaaagtctcg

SEQ ID NO: 265712 - DNA, 54 bp, Artificial
  Synthetic oligonucleotide
agtgagtgcaggcagataattgcccgcgctaaggttattgcaggatcagttggc

SEQ ID NO: 265713 - DNA, 54 bp, Artificial
  Synthetic oligonucleotide
atacgccccgccaaatacaattgtcacgaccccggttggtaattgcgacggtgc

SEQ ID NO: 265714 - DNA, 53 bp, Artificial
  Synthetic oligonucleotide
gttaaggtcctttaggagttctgcttgcatggttgacacacccgagcccgcat

SEQ ID NO: 265715 - DNA, 53 bp, Artificial
  Synthetic oligonucleotide
gagtgtggggtaaccagtcacgcaacacagtgcaacaagtcgtgcagagattg

SEQ ID NO: 265716 - DNA, 53 bp, Artificial
  Synthetic oligonucleotide
cctatcacagaaatacccacacactttgcaaaatgcgcagcaagaagatttgc

SEQ ID NO: 265717 - DNA, 55 bp, Artificial
  Synthetic oligonucleotide
cgaatctcagggcaagactttcagtacaaaaccgccgagtcacacaggcgctcgg

SEQ ID NO: 265718 - DNA, 51 bp, Artificial
  Synthetic oligonucleotide
atgcccacaacccatcgggacacgacgaggttcaccgggacgagtatcctt

SEQ ID NO: 265719 - DNA, 51 bp, Artificial
  Synthetic oligonucleotide
atcccctcgacagcaacaatccgcctagcggttaggggctccagtcgcccg

SEQ ID NO: 265720 - DNA, 51 bp, Artificial
  Synthetic oligonucleotide
attcggtccgaaatcccctcgacagcaacaatccgcctagcggttaggggc

SEQ ID NO: 265721 - DNA, 50 bp, Artificial
  Synthetic oligonucleotide
aggttactccacacccgtaagcggtaacccccggtgtgttactgccggtc

SEQ ID NO: 265722 - DNA, 51 bp, Artificial
  Synthetic oligonucleotide
caccggtgttacatctttgcccgggggcgtcatgactcggctgcccatctt

SEQ ID NO: 265723 - DNA, 51 bp, Artificial
  Synthetic oligonucleotide
cagcaggtaccgtcccgacgccataatacatgcaccgggcggactggagat

SEQ ID NO: 265724 - DNA, 51 bp, Artificial
  Synthetic oligonucleotide
acccggtggggtgtatcccgactcggggtcgtgacagattagcgtgcccat

SEQ ID NO: 265725 - DNA, 51 bp, Artificial
  Synthetic oligonucleotide
acagctgcgccccacgatagatgcttgcgattgtgttgcgcccccgcgtga

SEQ ID NO: 265726 - DNA, 51 bp, Artificial
  Synthetic oligonucleotide
cccacggtgctagggcaaacggcttacccgcgatactggtctcgtgggggt

SEQ ID NO: 265727 - DNA, 50 bp, Artificial
  Synthetic oligonucleotide
tccacggaacatgcccacaacccatcgggacacgacgaggttcaccggga

SEQ ID NO: 265728 - DNA, 55 bp, Artificial
  Synthetic oligonucleotide
cgactgttacaatgccggtttatgctgtcgatacgtattcggttgcttctaatcc

SEQ ID NO: 265729 - DNA, 50 bp, Artificial
  Synthetic oligonucleotide
tctgcccgcctgggtcataggagttttctcttggccgacgaacccggttt

SEQ ID NO: 265730 - DNA, 50 bp, Artificial
  Synthetic oligonucleotide
taggttgacccaccaacacgacgactccgaacctcaaggctcgggcgaac

SEQ ID NO: 265731 - DNA, 50 bp, Artificial
  Synthetic oligonucleotide
tactcggacgggtgtcctcggtatgtcaggtaacaggggcttcgcctggt

SEQ ID NO: 265732 - DNA, 50 bp, Artificial
  Synthetic oligonucleotide
taccgaggggtcgacgcgcctacatagggcaaactgcctctttgcaggag

SEQ ID NO: 265733 - DNA, 50 bp, Artificial
  Synthetic oligonucleotide
ttcggtcataactgcacatatgcggcatgtgaaccgcccacacccccgct

SEQ ID NO: 265734 - DNA, 50 bp, Artificial
  Synthetic oligonucleotide
ggtccggatccgagcagctttcgagccggcctcgattgatctaaccaccc

SEQ ID NO: 265735 - DNA, 50 bp, Artificial
  Synthetic oligonucleotide
gggcgcctctgccgatttattctcagggtggccgtggattgtgtgccatt

SEQ ID NO: 265736 - DNA, 50 bp, Artificial
  Synthetic oligonucleotide
gctggggcggggttcgataagcaaaccaccgctgtggccatatcattcgc

SEQ ID NO: 265737 - DNA, 50 bp, Artificial
  Synthetic oligonucleotide
gcgacagatgctatgactcccacggtgctagggcaaacggcttacccgcg

SEQ ID NO: 265738 - DNA, 50 bp, Artificial
  Synthetic oligonucleotide
cgggacagcgaaaaccagcctcgcgaagtcgtttcgttgcagcaaacccg

SEQ ID NO: 265739 - DNA, 55 bp, Artificial
  Synthetic oligonucleotide
cgccgtgttgcgtaaccgtgcgcgcaacagagtgacatgtaacccctgcccgtgt

SEQ ID NO: 265740 - DNA, 50 bp, Artificial
  Synthetic oligonucleotide
cgggaaccggcacttggtaggttgacccaccaacacgacgactccgaacc

SEQ ID NO: 265741 - DNA, 50 bp, Artificial
  Synthetic oligonucleotide
cggcatgtgaaccgcccacacccccgctttaatcttggcaatacccgcca

SEQ ID NO: 265742 - DNA, 50 bp, Artificial
  Synthetic oligonucleotide
agcaagcctaccggtacttggaacaaccgtcacagactgctcagccttag

SEQ ID NO: 265743 - DNA, 50 bp, Artificial
  Synthetic oligonucleotide
acgcgcgaagtgctacgtgaggccgaacgcaatagtgaatgcaggcccgt

SEQ ID NO: 265744 - DNA, 50 bp, Artificial
  Synthetic oligonucleotide
acaagccgagggtatcggtgacctcctctgctggctcaactagcgcggtt

SEQ ID NO: 265745 - DNA, 55 bp, Artificial
  Synthetic oligonucleotide
tggcagctaagcgcgccagagaggcctcgagaaaacggggtttattcgagtctgt

SEQ ID NO: 265746 - DNA, 55 bp, Artificial
  Synthetic oligonucleotide
ctgacacaccgagatcgtaatgggtatttcagaggcacatacaccgcacaaggat

SEQ ID NO: 265747 - DNA, 55 bp, Artificial
  Synthetic oligonucleotide
gacttgacagagagacaattggcaatgtttctatacgggtcattccaacccgggg

SEQ ID NO: 265748 - DNA, 55 bp, Artificial
  Synthetic oligonucleotide
cccgctcctatggaagtggcacctccttttaagactaactcgattccaatgcgat

SEQ ID NO: 265749 - DNA, 55 bp, Artificial
  Synthetic oligonucleotide
cgtggtccggacgtgtcctttgcaaattgtgggctcccgtattatgtaggaggtg

SEQ ID NO: 265750 - DNA, 55 bp, Artificial
  Synthetic oligonucleotide
ctacgcagaccgcgaaaacactatcctgactggaaacctcacctggcgtcaccag

SEQ ID NO: 265751 - DNA, 55 bp, Artificial
  Synthetic oligonucleotide
ctccagaaagcgattacccggaatcccaagctccacgagtcgccttttcaaatac

SEQ ID NO: 265752 - DNA, 55 bp, Artificial
  Synthetic oligonucleotide
gaactcaccctccaatggcgcaaagactgctcgcgaaccaaactgaatcggtggg

SEQ ID NO: 265753 - DNA, 55 bp, Artificial
  Synthetic oligonucleotide
gattcgctacctcgcccataacgcgtaaggcttctcattatccttaactacgggg

SEQ ID NO: 265754 - DNA, 55 bp, Artificial
  Synthetic oligonucleotide
gcactcgaaactgatccgagcccttgcatcctagtacaagatatacgagcggctt

SEQ ID NO: 265755 - DNA, 55 bp, Artificial
  Synthetic oligonucleotide
gccaggcttccgcttttctccgaacatcacagtcgcgcgaaccttcttgagcgta

SEQ ID NO: 265756 - DNA, 55 bp, Artificial
  Synthetic oligonucleotide
gcctaaatccgtatcctacaaccacctacaaaattcccgagtcacgttctatgac

SEQ ID NO: 265757 - DNA, 55 bp, Artificial
  Synthetic oligonucleotide
gcgccgaagcagcagttccttaaaaccgcggcatctggcaactgttcccaactcg

SEQ ID NO: 265758 - DNA, 55 bp, Artificial
  Synthetic oligonucleotide
gcggtggagtacgttaatcagttctaccaagaaggattctcgcaatcggtagtgg

SEQ ID NO: 265759 - DNA, 55 bp, Artificial
  Synthetic oligonucleotide
cccgatctcatatcctcaatgcctgtaatctcgctctccccagatttagacatct

SEQ ID NO: 265760 - DNA, 55 bp, Artificial
  Synthetic oligonucleotide
gctatacctagtaggacatcgcctttgttgagattgatgcagcgaacgcccttag

SEQ ID NO: 265761 - DNA, 55 bp, Artificial
  Synthetic oligonucleotide
gctcggacccagtcgccaccaacagctgacgccgataacgaccttctccgatctg

SEQ ID NO: 265762 - DNA, 55 bp, Artificial
  Synthetic oligonucleotide
gtggagcttccagagctcttcgtgactggctccctctggcagtccgaattgctgg

SEQ ID NO: 265763 - DNA, 55 bp, Artificial
  Synthetic oligonucleotide
tcgtaaatgcagcgggccaattgcgtcggcgtttcaggctccaactctccgcggt

SEQ ID NO: 265764 - DNA, 55 bp, Artificial
  Synthetic oligonucleotide
tgggacgactgtttcgagccattggaatctgccctcgaggagaattgggatgcgg

SEQ ID NO: 265765 - DNA, 54 bp, Artificial
  Synthetic oligonucleotide
atgagactccctcgctacggcgttccacaaagactggaaatccttacagttttc

SEQ ID NO: 265766 - DNA, 54 bp, Artificial
  Synthetic oligonucleotide
ccgtctattgaactgttgtccagaaattcaatgacttcggggttcgtgcgaaac

SEQ ID NO: 265767 - DNA, 54 bp, Artificial
  Synthetic oligonucleotide
atctttcagtattaggcgttcgccgtcgttggagagcttaccctcgaaaggccc

SEQ ID NO: 265768 - DNA, 54 bp, Artificial
  Synthetic oligonucleotide
agttgcccttcgcgccacccacttccgtgccagtggtatactgcaaaaggctcg

SEQ ID NO: 265769 - DNA, 53 bp, Artificial
  Synthetic oligonucleotide
cgacccttgctgtgttcgactgatagggagcgcggagtctcgcacgcttcatt

SEQ ID NO: 265770 - DNA, 55 bp, Artificial
  Synthetic oligonucleotide
cctcaggacactcctcgtacaccgaaacaaagggcgagtgggcatgagctcgcaa

SEQ ID NO: 265771 - DNA, 53 bp, Artificial
  Synthetic oligonucleotide
ttcttcgcgagacggctgctcagtttgagcgtccagtactcctcttttcgggg

SEQ ID NO: 265772 - DNA, 50 bp, Artificial
  Synthetic oligonucleotide
aatcgctgtcgtcgcccaataggccacccgagcctcctcttttcccgttc

SEQ ID NO: 265773 - DNA, 50 bp, Artificial
  Synthetic oligonucleotide
aatcgcccgtcgagcgtcacatgccagctcgggtctgccaacagcgaatc

SEQ ID NO: 265774 - DNA, 50 bp, Artificial
  Synthetic oligonucleotide
aatcgatcggactcacgaccggagccggcagcagattcgccaaagcgtcg

SEQ ID NO: 265775 - DNA, 50 bp, Artificial
  Synthetic oligonucleotide
aatccagactccaaaatcgcggacgcgcaagcgtctccaaggcctccgtt

SEQ ID NO: 265776 - DNA, 50 bp, Artificial
  Synthetic oligonucleotide
aactgcgtaggcttgacccacgcaaattccgccgtcgttgggaggaacgc

SEQ ID NO: 265777 - DNA, 50 bp, Artificial
  Synthetic oligonucleotide
aacgcctcaccacgagcaacccaagccccgcgtacatctaccgcgtcgca

SEQ ID NO: 265778 - DNA, 50 bp, Artificial
  Synthetic oligonucleotide
aacgcaggagtcgttctacggcaaagcccaatcagtcgcagacggctcgc

SEQ ID NO: 265779 - DNA, 50 bp, Artificial
  Synthetic oligonucleotide
aacgaccagctagacgctctcgttagcctgcacgccaccctcggatcaga

SEQ ID NO: 265780 - DNA, 50 bp, Artificial
  Synthetic oligonucleotide
aacctcaggtaggtcatccccgaagttgccatgaggcggaggcgacggag

SEQ ID NO: 265781 - DNA, 55 bp, Artificial
  Synthetic oligonucleotide
cactacatgggacgaatccaagactaccgaccccactcagacgatcgccgtgctt

SEQ ID NO: 265782 - DNA, 50 bp, Artificial
  Synthetic oligonucleotide
aaccgcaagctggctctgagtcgtttggcgtcacagcggctacgtccaat

SEQ ID NO: 265783 - DNA, 50 bp, Artificial
  Synthetic oligonucleotide
aacccagcgcgaacccatcgctaacctcattcgcccgagagccgaggata

SEQ ID NO: 265784 - DNA, 50 bp, Artificial
  Synthetic oligonucleotide
aaccacggtgcagcggacaccctaaccccgcaaactgcgacaaggacgtc

SEQ ID NO: 265785 - DNA, 50 bp, Artificial
  Synthetic oligonucleotide
aaccaaacgcccgctccttgccagcgcagccacccctattccgcagcgtc

SEQ ID NO: 265786 - DNA, 50 bp, Artificial
  Synthetic oligonucleotide
aaagcgggaggcgattcggctaggcgtggggagggatcatgcttgggcga

SEQ ID NO: 265787 - DNA, 50 bp, Artificial
  Synthetic oligonucleotide
aaactatgcgctaggctgttccgtccgagcgatgcgacctcttgccagga

SEQ ID NO: 265788 - DNA, 50 bp, Artificial
  Synthetic oligonucleotide
aaactacattcgggcctcctggggcaacaacgccgaaccttaccagccca

SEQ ID NO: 265789 - DNA, 50 bp, Artificial
  Synthetic oligonucleotide
aaacggtccgcggtcggttggaagctatcgggctctcgatggaagcgagg

SEQ ID NO: 265790 - DNA, 50 bp, Artificial
  Synthetic oligonucleotide
aaacggcagctcaggcgactcagcctactcaaacatcgccgcagtctcgc

SEQ ID NO: 265791 - DNA, 50 bp, Artificial
  Synthetic oligonucleotide
aaacatagcaagaaccgccaaggctgagagcgtaccggctcccaacggga

SEQ ID NO: 265792 - DNA, 55 bp, Artificial
  Synthetic oligonucleotide
cgatacgcgattcctttgccataagatcgaagctcagacgattcgagcgacgcgg

SEQ ID NO: 265793 - DNA, 50 bp, Artificial
  Synthetic oligonucleotide
aaacactccaccaccaatcttgtggcacgctccctaacgcccccagtcgc

SEQ ID NO: 265794 - DNA, 50 bp, Artificial
  Synthetic oligonucleotide
aaaatggctcgtctggaggcaatgcggagtccggttggcgccactatgcg

SEQ ID NO: 265795 - DNA, 50 bp, Artificial
  Synthetic oligonucleotide
aatcaccctggctagcgcttcccgtaggagcagccctcgcaatcgcgctt

SEQ ID NO: 265796 - DNA, 50 bp, Artificial
  Synthetic oligonucleotide
aatagtccccgtggggcccgagcgaagcaacactcgagcatagcgaagac

SEQ ID NO: 265797 - DNA, 50 bp, Artificial
  Synthetic oligonucleotide
aagtttctacccgacgcggcgctaggctgggctccgtctgaatccgtttg

SEQ ID NO: 265798 - DNA, 50 bp, Artificial
  Synthetic oligonucleotide
aagtgctctgcgactccgccgtgggaattcgctacctctccgcaaacgac

SEQ ID NO: 265799 - DNA, 50 bp, Artificial
  Synthetic oligonucleotide
aaggtcgcggaattgagcgggttcgggagtcttgcttccttgcatcgcca

SEQ ID NO: 265800 - DNA, 50 bp, Artificial
  Synthetic oligonucleotide
aagggtcggcgctgagtatcgggcaggagtccaacacggtttacatgcgc

SEQ ID NO: 265801 - DNA, 50 bp, Artificial
  Synthetic oligonucleotide
aagggctcaatcacccagcgagcacttcccgccacctcgcaacaagccga

SEQ ID NO: 265802 - DNA, 50 bp, Artificial
  Synthetic oligonucleotide
aagggatacgaagcctagaggcacgctgctatccccgcctacgcacgcac

SEQ ID NO: 265803 - DNA, 55 bp, Artificial
  Synthetic oligonucleotide
cgcggatactatgatgacggagattcgaagccaagccaatctatcttgacctcgg

SEQ ID NO: 265804 - DNA, 50 bp, Artificial
  Synthetic oligonucleotide
aaggccacgcctggcacaccgttcactgttttcggatgggcccctagctt

SEQ ID NO: 265805 - DNA, 50 bp, Artificial
  Synthetic oligonucleotide
aaggaatacggatcgccgcatccactgttccgatgctctcgcagcgccaa

SEQ ID NO: 265806 - DNA, 50 bp, Artificial
  Synthetic oligonucleotide
aagcttccctatggatggggaggcgtatgggtcgccgggggctttgtgta

SEQ ID NO: 265807 - DNA, 50 bp, Artificial
  Synthetic oligonucleotide
aagcgtttgccgggtaacgggagttgggagctggatgcggggacggtgct

SEQ ID NO: 265808 - DNA, 50 bp, Artificial
  Synthetic oligonucleotide
aagcggtctcctagccggcctcggtatgtggttaggcactgcagggacat

SEQ ID NO: 265809 - DNA, 50 bp, Artificial
  Synthetic oligonucleotide
aagcggaacgaagtcgcggtcgtttgccctttcgtgagggacgcgaaacg

SEQ ID NO: 265810 - DNA, 50 bp, Artificial
  Synthetic oligonucleotide
aagcgagggctctcaacgccttccgagcaagacgaacgcccggtacaaga

SEQ ID NO: 265811 - DNA, 50 bp, Artificial
  Synthetic oligonucleotide
aactttcggcgaaactgagggtgccgcgtttcgggcgagcgagatagagc

SEQ ID NO: 265812 - DNA, 50 bp, Artificial
  Synthetic oligonucleotide
aactggagcgggtctatcagccgaactgtcgcggaatgcgctctcttgct

SEQ ID NO: 265813 - DNA, 55 bp, Artificial
  Synthetic oligonucleotide
cgggctctcccattcagcaaagttgggatgtgtattcaatttctgaggaccatgc

SEQ ID NO: 265814 - DNA, 55 bp, Artificial
  Synthetic oligonucleotide
cgggtcaagaactgcggttggtagtcgtcggcccgtgaatcagttgtatagcgac

SEQ ID NO: 265815 - DNA, 55 bp, Artificial
  Synthetic oligonucleotide
cgtatgcatcgaaggaagcttttggaacgcgcccaatcaggaccactacgttgaa

SEQ ID NO: 265816 - DNA, 55 bp, Artificial
  Synthetic oligonucleotide
gttcgccaaacgacctgttcgtgtgcgtaattcgcccggggtctgtgcaccacgc

SEQ ID NO: 265817 - DNA, 55 bp, Artificial
  Synthetic oligonucleotide
ctacactcctgtgccggtgcgttctggtatctccaactttctagccaacttagac

SEQ ID NO: 265818 - DNA, 55 bp, Artificial
  Synthetic oligonucleotide
cggtcatgtccactctggcgctctcggatgggtagcaatgtcgggtatcgccgta

SEQ ID NO: 265819 - DNA, 55 bp, Artificial
  Synthetic oligonucleotide
cgcccattctgcgtttacacgttcacccaacggcccttcaacctgcgttactcgc

SEQ ID NO: 265820 - DNA, 55 bp, Artificial
  Synthetic oligonucleotide
ccgtgatctggtcgcgagtagtgtcgagttttacaagactcacttccccgatcgc

SEQ ID NO: 265821 - DNA, 55 bp, Artificial
  Synthetic oligonucleotide
cagtaacctagagatgcaagggcaacgtattgttactgcgaaatgaggctacttt

SEQ ID NO: 265822 - DNA, 55 bp, Artificial
  Synthetic oligonucleotide
cacctgaacatgcttatccagcagcacacgatgatgtataccaagctgtactcgg

SEQ ID NO: 265823 - DNA, 55 bp, Artificial
  Synthetic oligonucleotide
cacaatgcactcatgtgggacgtgcaaggcttgtctgaagacgttttcttcgccg

SEQ ID NO: 265824 - DNA, 55 bp, Artificial
  Synthetic oligonucleotide
caatcaagtcgaacaaagcaattctcgacattttgttgctatccagcgttctccg

SEQ ID NO: 265825 - DNA, 55 bp, Artificial
  Synthetic oligonucleotide
caaaagttacgcacggtgtttaacgatgacctgttagtgagagcggcttacggct

SEQ ID NO: 265826 - DNA, 55 bp, Artificial
  Synthetic oligonucleotide
ttgggatgtgttagtgggtgcgccagagggtatttctactcatttcgtggcatct

SEQ ID NO: 265827 - DNA, 55 bp, Artificial
  Synthetic oligonucleotide
ggggcgcttttgactatgttgatgcttcgtggactggagtgggagcacttagcga

SEQ ID NO: 265828 - DNA, 55 bp, Artificial
  Synthetic oligonucleotide
aagacctaggtaacgatgatcagtgtagcgttgcttcgcgtgaccaattgccgcc

SEQ ID NO: 265829 - DNA, 55 bp, Artificial
  Synthetic oligonucleotide
agatcacaacacaatcgatgggatggacttcgggccactagcaaaattagttggc

SEQ ID NO: 265830 - DNA, 54 bp, Artificial
  Synthetic oligonucleotide
ttcgcttaggaacctctggttttggtttagccaacctatgcgttcccttagatc

SEQ ID NO: 265831 - DNA, 53 bp, Artificial
  Synthetic oligonucleotide
gcgtcagtcgatttacttgacgagcttggcgcatggcagaacattgctgcaat

SEQ ID NO: 265832 - DNA, 53 bp, Artificial
  Synthetic oligonucleotide
cgctggcgagtgaatcgtcttcatagaggttgtaatctccgtacaggtaaacc

SEQ ID NO: 265833 - DNA, 53 bp, Artificial
  Synthetic oligonucleotide
cgcttagtttcgattgattggactcataccgaaacgcttttggcattgggtgt

SEQ ID NO: 265834 - DNA, 53 bp, Artificial
  Synthetic oligonucleotide
ggtcgctgagcgagtgctgttcgttgaaagtcagctagcaatcaaagctacgc

SEQ ID NO: 265835 - DNA, 53 bp, Artificial
  Synthetic oligonucleotide
atgagggctactctgcagatccattagaggagcaagacaacgcgatcccgggg

SEQ ID NO: 265836 - DNA, 53 bp, Artificial
  Synthetic oligonucleotide
taaagtcagcgacagctagctgagtaggaagggcaacgccgtagcttgcagaa

SEQ ID NO: 265837 - DNA, 53 bp, Artificial
  Synthetic oligonucleotide
gccgtgctctcccgtattggtgtacgtaaattcaattgcgcggcacaggtgat

SEQ ID NO: 265838 - DNA, 55 bp, Artificial
  Synthetic oligonucleotide
taaaccatcttgagctgacctgagttcatgcgattaaacacactcagtagctggt

SEQ ID NO: 265839 - DNA, 52 bp, Artificial
  Synthetic oligonucleotide
atccctgacgttccgacgatgtaaaatggcgccgaccaatcataccaactgg

SEQ ID NO: 265840 - DNA, 50 bp, Artificial
  Synthetic oligonucleotide
gtgcattgggcttgccaaatttcgccagcaacaagcactctacccgcgcc

SEQ ID NO: 265841 - DNA, 50 bp, Artificial
  Synthetic oligonucleotide
gtagctctgggcttgctgcagaccatttcgccgcaaagtcagcacccgga

SEQ ID NO: 265842 - DNA, 50 bp, Artificial
  Synthetic oligonucleotide
tggctggtattcagttgggtaccgccaggccgtctctggttaggtgcggc

SEQ ID NO: 265843 - DNA, 50 bp, Artificial
  Synthetic oligonucleotide
taccgcgaggctcgagacaccacaatcccatacctgctctgccgtcgatt

SEQ ID NO: 265844 - DNA, 50 bp, Artificial
  Synthetic oligonucleotide
tagcccgaaggccattggggcaaccgatcctcccccatgggcacctcatg

SEQ ID NO: 265845 - DNA, 50 bp, Artificial
  Synthetic oligonucleotide
tatccaacggtcacccaacaatgtcctgcccccgtttccaaacgtgccga

SEQ ID NO: 265846 - DNA, 50 bp, Artificial
  Synthetic oligonucleotide
tccccgactcggcgccagctttattttatcgcgcccctcgccaatttaga

SEQ ID NO: 265847 - DNA, 50 bp, Artificial
  Synthetic oligonucleotide
tcgcggcgggccctgtcttcacgcctttcggcagagtaagatgcaatgga

SEQ ID NO: 265848 - DNA, 50 bp, Artificial
  Synthetic oligonucleotide
tctggcgaagtcacggtcgcggcacattgattacccttgcaaccgtcagc

SEQ ID NO: 265849 - DNA, 55 bp, Artificial
  Synthetic oligonucleotide
ggactcacaagagttttcttcaatgctcgcgaccttaaatgcatcagcgccgact

SEQ ID NO: 265850 - DNA, 50 bp, Artificial
  Synthetic oligonucleotide
gtactggcggcgcactccaaaaacgacactgccgcgcgcaaatccacttt

SEQ ID NO: 265851 - DNA, 50 bp, Artificial
  Synthetic oligonucleotide
ggtaacggcactcccctccccgccttcggttaataccgtcagggagtcca

SEQ ID NO: 265852 - DNA, 50 bp, Artificial
  Synthetic oligonucleotide
ggggcgtgctctcttcatgtgcctcgtgatgtagcacctcagtggctcgg

SEQ ID NO: 265853 - DNA, 50 bp, Artificial
  Synthetic oligonucleotide
ggcggagccggtacgatagaaggtgcggcgatagctgctgtgctaaccat

SEQ ID NO: 265854 - DNA, 50 bp, Artificial
  Synthetic oligonucleotide
gcctggagaatcacatgcgcagttgaccacacggtggtttctgtgggccc

SEQ ID NO: 265855 - DNA, 50 bp, Artificial
  Synthetic oligonucleotide
gccggctcgactcgactcgccaattgtaccgccgcattggtcggagtgat

SEQ ID NO: 265856 - DNA, 50 bp, Artificial
  Synthetic oligonucleotide
gcatcttcgaccctgcgatgttgacggcagaggacgcaaacggcgtaagc

SEQ ID NO: 265857 - DNA, 50 bp, Artificial
  Synthetic oligonucleotide
gcagcgccacgtcaccacagcaagacataggcgtgaatgacattcgccgc

SEQ ID NO: 265858 - DNA, 50 bp, Artificial
  Synthetic oligonucleotide
gcacgcactaccgcgaggctcgagacaccacaatcccatacctgctctgc

SEQ ID NO: 265859 - DNA, 50 bp, Artificial
  Synthetic oligonucleotide
gaccctgcgatgttgacggcagaggacgcaaacggcgtaagcatgcgaga

SEQ ID NO: 265860 - DNA, 55 bp, Artificial
  Synthetic oligonucleotide
gcggcagcacctacaggttgagcttggctcacaccccataggtaaccgctgaccc

SEQ ID NO: 265861 - DNA, 50 bp, Artificial
  Synthetic oligonucleotide
cggcattgcgtgctcaagagggggtgctttctgtcgtgagtgcatccggg

SEQ ID NO: 265862 - DNA, 50 bp, Artificial
  Synthetic oligonucleotide
ccaccaacgcccattgaaaaggcgccaatcgctagcgggctgagatccgg

SEQ ID NO: 265863 - DNA, 50 bp, Artificial
  Synthetic oligonucleotide
acggaattacggcttgaagcgggggcgtgctctcttcatgtgcctcgtga

SEQ ID NO: 265864 - DNA, 50 bp, Artificial
  Synthetic oligonucleotide
aagatggcaatggcatgtacgtggttgcccagcctatcgttggccagggg

SEQ ID NO: 265865 - DNA, 50 bp, Artificial
  Synthetic oligonucleotide
aacgttgggttggataccgcgccatagtactggctctttcgcggcagcga

SEQ ID NO: 265866 - DNA, 55 bp, Artificial
  Synthetic oligonucleotide
gcccactgtcaatcagggacgacttgtcagtcagggctctacttcactgacgctc

SEQ ID NO: 265867 - DNA, 55 bp, Artificial
  Synthetic oligonucleotide
tccgaaacgcctagtgaactatggcgcgattgacccaacgattagtcgtgagttg

SEQ ID NO: 265868 - DNA, 55 bp, Artificial
  Synthetic oligonucleotide
gaatcacaacaccagagacttcgagtaccgctccaatgctgtatgccttgtcatc

SEQ ID NO: 265869 - DNA, 55 bp, Artificial
  Synthetic oligonucleotide
ctcgaacataaaccaatatccgtatgcgcagattaatgcgggtacacttgagtac

SEQ ID NO: 265870 - DNA, 56 bp, Artificial
  Synthetic oligonucleotide
gctaattatttaaggcaactcaacactggggttattcataggggcgtctaataaga

SEQ ID NO: 265871 - DNA, 60 bp, Artificial
  Synthetic oligonucleotide
ataagatgagcagtatagttaacggtactccttacgtctgtatagtcgcgcttaagatca

SEQ ID NO: 265872 - DNA, 50 bp, Artificial
  Synthetic oligonucleotide
agccggcgtaatggtaatgggggcgcggacgttcgaaacaatcggtcggg

SEQ ID NO: 265873 - DNA, 50 bp, Artificial
  Synthetic oligonucleotide
agccactgaccggtgtaagggcaccatcgatacgaagcatgggtgggaga

SEQ ID NO: 265874 - DNA, 50 bp, Artificial
  Synthetic oligonucleotide
tccagcaaattgcgccgcgaactaggctggcaacctgagtacactgacaa

SEQ ID NO: 265875 - DNA, 50 bp, Artificial
  Synthetic oligonucleotide
gacagcgcgggctaccgaatggccgagatttactggctcctgagcagcga

SEQ ID NO: 265876 - DNA, 50 bp, Artificial
  Synthetic oligonucleotide
gacagatactagagccataacagtagcactatgagcgcttggcattcccc

SEQ ID NO: 265877 - DNA, 50 bp, Artificial
  Synthetic oligonucleotide
agagcgcaacgctgacgattcggcgttagccttggctaccccatcagtga

SEQ ID NO: 265878 - DNA, 50 bp, Artificial
  Synthetic oligonucleotide
cgcttcgcaaacttggctcgcgcttgcaggggcatcctgagagaacccgc

SEQ ID NO: 265879 - DNA, 50 bp, Artificial
  Synthetic oligonucleotide
gaacaagcggctccgttggttgcgccactgaacgcgagggtagtactggc

SEQ ID NO: 265880 - DNA, 50 bp, Artificial
  Synthetic oligonucleotide
cttaacgccagtactaccctcgcgttcagtggcgcaaccaacggagccgc

SEQ ID NO: 265881 - DNA, 50 bp, Artificial
  Synthetic oligonucleotide
cggcttccgcaggggtggaagattacctacagggccgaaggagtcctcga

SEQ ID NO: 265882 - DNA, 59 bp, Artificial
  Synthetic oligonucleotide
ataacgggctactgttgatggccactgattagcgttacccgcaccaccgaagtgtggca

SEQ ID NO: 265883 - DNA, 50 bp, Artificial
  Synthetic oligonucleotide
tgagtgacataacccaaacagtggaaatctttaacggaccaagctatacc

SEQ ID NO: 265884 - DNA, 50 bp, Artificial
  Synthetic oligonucleotide
aacttggctcgcgcttgcaggggcatcctgagagaacccgcttgccgggg

SEQ ID NO: 265885 - DNA, 50 bp, Artificial
  Synthetic oligonucleotide
aaacagcggcgggcttggttctgtggcttcatcccgtagcgcccttagct

SEQ ID NO: 265886 - DNA, 50 bp, Artificial
  Synthetic oligonucleotide
cgcggacgttcgaaacaatcggtcgggcattaccaggccgacggacgata

SEQ ID NO: 265887 - DNA, 50 bp, Artificial
  Synthetic oligonucleotide
gatactcgggctgacggttcaactatcgtgagcgcccgggggaaaaccga

SEQ ID NO: 265888 - DNA, 50 bp, Artificial
  Synthetic oligonucleotide
cgcacgtcgtttggcttgacaccgcagcgttactgtacgctacctcggca

SEQ ID NO: 265889 - DNA, 50 bp, Artificial
  Synthetic oligonucleotide
gcaggggaacagggcacattcgactttacagtgaccgccccgtcgcaagt

SEQ ID NO: 265890 - DNA, 50 bp, Artificial
  Synthetic oligonucleotide
atcctcgttaccttggcgtcttcgtgcgccacaagcaacgtcggcttgcc

SEQ ID NO: 265891 - DNA, 50 bp, Artificial
  Synthetic oligonucleotide
gcagtgttactggggagcgatatcggggtctcggctggtgcgaaagtgcg

SEQ ID NO: 265892 - DNA, 50 bp, Artificial
  Synthetic oligonucleotide
gccatagcgtcctatgaacccccggcgagagcggttatggcacggatctt

SEQ ID NO: 265893 - DNA, 59 bp, Artificial
  Synthetic oligonucleotide
cgctgaaataccataacgggctactgttgatggccactgattagcgttacccgcaccac

SEQ ID NO: 265894 - DNA, 50 bp, Artificial
  Synthetic oligonucleotide
gggcatggtcgcgactaggggaattagcgcgatacaatctatgggcaaaa

SEQ ID NO: 265895 - DNA, 50 bp, Artificial
  Synthetic oligonucleotide
atgggggttcagcgggcagcttacgccgcgttcctatccgtccgattgga

SEQ ID NO: 265896 - DNA, 50 bp, Artificial
  Synthetic oligonucleotide
cgacttgctggccgacgcacgtcgtttggcttgacaccgcagcgttactg

SEQ ID NO: 265897 - DNA, 50 bp, Artificial
  Synthetic oligonucleotide
attgtgtggggcccgccacgcgtgaccattgataagtagcgatggagccg

SEQ ID NO: 265898 - DNA, 50 bp, Artificial
  Synthetic oligonucleotide
caactgacggtccggccttttatgcggatgctcaggcacaagccgcggcg

SEQ ID NO: 265899 - DNA, 50 bp, Artificial
  Synthetic oligonucleotide
cgactcaccaaagaagccggcgtaatggtaatgggggcgcggacgttcga

SEQ ID NO: 265900 - DNA, 50 bp, Artificial
  Synthetic oligonucleotide
cccgactaccgatctacgccaagcgtggtctttaccgaaccaccgctcgc

SEQ ID NO: 265901 - DNA, 50 bp, Artificial
  Synthetic oligonucleotide
ggcaacggattctaaatctgactgatgacggactatttgcacaccgccaa

SEQ ID NO: 265902 - DNA, 50 bp, Artificial
  Synthetic oligonucleotide
ccccggcgagagcggttatggcacggatctttattcgactggtggtcggg

SEQ ID NO: 265903 - DNA, 60 bp, Artificial
  Synthetic oligonucleotide
tcccatagctattacagctgctatgaatccatacacaatagcctccactatgaacggacc

SEQ ID NO: 265904 - DNA, 60 bp, Artificial
  Synthetic oligonucleotide
tttcaaaccgcttgctgtgactgcatcgaccgttgtcatagcgagtccagcgccgttggc

SEQ ID NO: 265905 - DNA, 60 bp, Artificial
  Synthetic oligonucleotide
tgagcttctatctagtggcacctgtacgctaaagctctctaagcctggtttgagtgacat

SEQ ID NO: 265906 - DNA, 56 bp, Artificial
  Synthetic oligonucleotide
agaagaggcgattgactatcccgtccgagttacgccaggaattttctagcggtata

SEQ ID NO: 265907 - DNA, 58 bp, Artificial
  Synthetic oligonucleotide
acgttgtctaactgctagtttctggtattcctcgctttttagataactctgctcatac

SEQ ID NO: 265908 - DNA, 60 bp, Artificial
  Synthetic oligonucleotide
acgcgcgcaatatgtgtggacctcgagggccaaaaaataacactactagcaatatgccta

SEQ ID NO: 265909 - DNA, 59 bp, Artificial
  Synthetic oligonucleotide
gacccactagaagttgtctcctggccacgcatttccgcccgcctggcaccaagctcctg

SEQ ID NO: 265910 - DNA, 60 bp, Artificial
  Synthetic oligonucleotide
gcgatgtttgacaacttcgcgcgccataatagcctttggaaaggtcagtacttgagcggc

SEQ ID NO: 265911 - DNA, 59 bp, Artificial
  Synthetic oligonucleotide
gcgagcaatatcgtacctacgaaactgatatggtacagctaattaaggctgattgtgac

SEQ ID NO: 265912 - DNA, 54 bp, Artificial
  Synthetic oligonucleotide
tcgcccgttaggataacggtctgtttcgttgagcggactaaccaaactgacgcc

SEQ ID NO: 265913 - DNA, 57 bp, Artificial
  Synthetic oligonucleotide
cggatatccaactcccggtgtggtattgccgagtaatccttgcacggtcacaaacga

SEQ ID NO: 265914 - DNA, 56 bp, Artificial
  Synthetic oligonucleotide
caaatgtcgcacatcgcaaatatatgattcttctaggaacccatcgtacgattgtt

SEQ ID NO: 265915 - DNA, 56 bp, Artificial
  Synthetic oligonucleotide
ggattaatctcgtaagatgtaatctctttatctatcacaggtttcttcacagtcgg

SEQ ID NO: 265916 - DNA, 56 bp, Artificial
  Synthetic oligonucleotide
gcgttgactttaccagataggcaagtgggagagactaactattcgcatccaactaa

SEQ ID NO: 265917 - DNA, 54 bp, Artificial
  Synthetic oligonucleotide
cggtaaatcacccgtaacatcgtccgcaactcgccgagctaaaccagggttggc

SEQ ID NO: 265918 - DNA, 55 bp, Artificial
  Synthetic oligonucleotide
cgtatgctccgcctattccgcaagtcgcagtatcaatgccgactggcactactac

SEQ ID NO: 265919 - DNA, 55 bp, Artificial
  Synthetic oligonucleotide
gccgttttcggtgtgccgaattcagttcatcgagcctagccttgaccgccttggc

SEQ ID NO: 265920 - DNA, 55 bp, Artificial
  Synthetic oligonucleotide
gctgccgaatcagatgggcactaggaatccagctaaagtcggtgagttagcagac

SEQ ID NO: 265921 - DNA, 58 bp, Artificial
  Synthetic oligonucleotide
cacattgctatcgatgcccgtgttataaactctggcactggtacttacgtcgttaagt

SEQ ID NO: 265922 - DNA, 55 bp, Artificial
  Synthetic oligonucleotide
gccgtagacttttctcgacagattggactctcagctatagtaatcgcatggtcaa

SEQ ID NO: 265923 - DNA, 55 bp, Artificial
  Synthetic oligonucleotide
gcagattgccgatactagcacgtaccgcattagatatctggctgaatagagactg

SEQ ID NO: 265924 - DNA, 55 bp, Artificial
  Synthetic oligonucleotide
ctctgatgcgatatagcgtatatttaggtcgtgtagcatttcatcgcaaggggat

SEQ ID NO: 265925 - DNA, 55 bp, Artificial
  Synthetic oligonucleotide
ctggataatggtgtatttgggcgtggtgacaaatttgtacgatcattaactggtg

SEQ ID NO: 265926 - DNA, 55 bp, Artificial
  Synthetic oligonucleotide
gatgtggtggcagcaaacaaagagctgagcgcgaagggtctagaggtgaacgaag

SEQ ID NO: 265927 - DNA, 55 bp, Artificial
  Synthetic oligonucleotide
gatatcgtttgtccgagcgcaagattggcgctatgaaggaagaccttaaggcgat

SEQ ID NO: 265928 - DNA, 55 bp, Artificial
  Synthetic oligonucleotide
gaggcaatgcagatcgatagtagtgccacacgaaatcaaaattcggtgcgaactt

SEQ ID NO: 265929 - DNA, 55 bp, Artificial
  Synthetic oligonucleotide
gacaaagagcagaactggataataattagttggcactcgggcgtaaaatcgccgc

SEQ ID NO: 265930 - DNA, 55 bp, Artificial
  Synthetic oligonucleotide
gaactatacgcaagcttggcagaacagcttttatcagacagcgagtagccaaacg

SEQ ID NO: 265931 - DNA, 55 bp, Artificial
  Synthetic oligonucleotide
ttcagacgccaaaatagattgccgttaactgtcaacataacgaccgccaacgaag

SEQ ID NO: 265932 - DNA, 60 bp, Artificial
  Synthetic oligonucleotide
ggcaggatagtcgttatgacgagcacccgtaacacctagctataattctacggatatcca

SEQ ID NO: 265933 - DNA, 55 bp, Artificial
  Synthetic oligonucleotide
tgctatgaatccatacacaatagcctccactatgaacggaccacgaataaagccc

SEQ ID NO: 265934 - DNA, 55 bp, Artificial
  Synthetic oligonucleotide
tgacgctgatttcttaactagccgtgaaataccaaactactgtccacctattcgt

SEQ ID NO: 265935 - DNA, 55 bp, Artificial
  Synthetic oligonucleotide
tcgtctattactacgccgctcggaccagaagataggcgagctttggcatatgtca

SEQ ID NO: 265936 - DNA, 55 bp, Artificial
  Synthetic oligonucleotide
tcgtcctgaagagcaatcgtatcagccgagttaagcacgatgtcattccccgcgc

SEQ ID NO: 265937 - DNA, 55 bp, Artificial
  Synthetic oligonucleotide
tatttcgcccgtagtgctgtctgtagtcaatgtagccgcagtcgctttatagtgg

SEQ ID NO: 265938 - DNA, 55 bp, Artificial
  Synthetic oligonucleotide
tatctcgcttattactagagacttcttcgtttagaatcgctgccttaagattacg

SEQ ID NO: 265939 - DNA, 55 bp, Artificial
  Synthetic oligonucleotide
taattatcgagcatcctcgggaggaatatgggactcgggatgaccagacggaaag

SEQ ID NO: 265940 - DNA, 55 bp, Artificial
  Synthetic oligonucleotide
gttggcacgcggtctcgaggactcgtctgtcgtatcgtgggatgatctcgctagc

SEQ ID NO: 265941 - DNA, 55 bp, Artificial
  Synthetic oligonucleotide
gtgctggcgcgtatttactgttgtacagaggagattcgcatccgctgtttcccgg

SEQ ID NO: 265942 - DNA, 55 bp, Artificial
  Synthetic oligonucleotide
ggttcagctcggctgaggtggttgttatgcctatcggtagtggtcagattactgc

SEQ ID NO: 265943 - DNA, 55 bp, Artificial
  Synthetic oligonucleotide
gcaatttctattcgcccgttaggataacggtctgtttcgttgagcggactaacca

SEQ ID NO: 265944 - DNA, 55 bp, Artificial
  Synthetic oligonucleotide
ggttagattgcgcagactctgccagttaatgtcagtcgggatatgggtaccacgg

SEQ ID NO: 265945 - DNA, 55 bp, Artificial
  Synthetic oligonucleotide
ggggtggtcgcctctattaagcgtctccaactcagaatctcgctacagatatggt

SEQ ID NO: 265946 - DNA, 55 bp, Artificial
  Synthetic oligonucleotide
gggattgtgagtcggtactggtgttagcttcaatcgtgtccatagtgcgggctcc

SEQ ID NO: 265947 - DNA, 55 bp, Artificial
  Synthetic oligonucleotide
ggcgccaaggcatagccgtaatttggcacatcaccccgagcgttggtctctgacg

SEQ ID NO: 265948 - DNA, 55 bp, Artificial
  Synthetic oligonucleotide
ggcacctgtacgctaaagctctctaagcctggtttgagtgacataacccaaacag

SEQ ID NO: 265949 - DNA, 55 bp, Artificial
  Synthetic oligonucleotide
ggcaactcaacactggggttattcataggggcgtctaataagatgagcagtatag

SEQ ID NO: 265950 - DNA, 55 bp, Artificial
  Synthetic oligonucleotide
ggatctggcgttcgtgatggtttacagctaaaacccgtgcgctatgaatgggctt

SEQ ID NO: 265951 - DNA, 55 bp, Artificial
  Synthetic oligonucleotide
ggagactttgtcgtgacaccgtttgtgggattaactcacgatacagtcacgtaag

SEQ ID NO: 265952 - DNA, 55 bp, Artificial
  Synthetic oligonucleotide
ggaatcaacgccgccagcctatcggaaacgaagtcgtatgcgacgttctagcaag

SEQ ID NO: 265953 - DNA, 55 bp, Artificial
  Synthetic oligonucleotide
gctgtcgattatttaggcggaatagctccagaccaaccaattgacaggtgtaact

SEQ ID NO: 265954 - DNA, 60 bp, Artificial
  Synthetic oligonucleotide
gattaagtatgatgaaattgtgttcggtagagttgtcttcgaatcgccagtccaagtgac

SEQ ID NO: 265955 - DNA, 55 bp, Artificial
  Synthetic oligonucleotide
gctgtccgtcaatccacccatagcaaagtgcccggtctagcgcctcgtcatatgt

SEQ ID NO: 265956 - DNA, 55 bp, Artificial
  Synthetic oligonucleotide
catcggcgcagtttccgtctgtgtcggcgcatctaaggactctagtgtcggtttc

SEQ ID NO: 265957 - DNA, 55 bp, Artificial
  Synthetic oligonucleotide
ccaccattatgccatatagcagcgttccggatccttatgtcgacaccgagacagg

SEQ ID NO: 265958 - DNA, 54 bp, Artificial
  Synthetic oligonucleotide
cagggtggtcctggcgttcactggttttatatcgacggtcttagtttgccctaa

SEQ ID NO: 265959 - DNA, 55 bp, Artificial
  Synthetic oligonucleotide
ccatccctcttaagctttcattatacggcaaagtcctggctacatccaaccggag

SEQ ID NO: 265960 - DNA, 55 bp, Artificial
  Synthetic oligonucleotide
caccgacagtactcgtgaaccaactgctaaaggcgcttcgcatccaagagccacc

SEQ ID NO: 265961 - DNA, 53 bp, Artificial
  Synthetic oligonucleotide
caccccaccgaaagctcgaagagttcacgccggtagaaccaggcaaagtttcg

SEQ ID NO: 265962 - DNA, 55 bp, Artificial
  Synthetic oligonucleotide
ccctaatccaaaacgaagttagcctacgataggaagttgacctacgatagatgga

SEQ ID NO: 265963 - DNA, 55 bp, Artificial
  Synthetic oligonucleotide
cctgttcactgaaggtggggataaggacaagttaggccgaggtactatttggcat

SEQ ID NO: 265964 - DNA, 55 bp, Artificial
  Synthetic oligonucleotide
ccttcccatgtgcgtctatgacgtcaccatctggactacagactaatgtatccaa

SEQ ID NO: 265965 - DNA, 57 bp, Artificial
  Synthetic oligonucleotide
atgcacccgctaccttacctatccctgtttccataactcgagtagacagatccccac

SEQ ID NO: 265966 - DNA, 55 bp, Artificial
  Synthetic oligonucleotide
caagtcactgatattggtacatctgtatggaacaattacgcttgtgctatagcgg

SEQ ID NO: 265967 - DNA, 52 bp, Artificial
  Synthetic oligonucleotide
attctttaaggtggttaaggagctgtttaccgcccttagttttaggcgatgc

SEQ ID NO: 265968 - DNA, 55 bp, Artificial
  Synthetic oligonucleotide
cgagcacccgtaacacctagctataattctacggatatccaactcccggtgtggt

SEQ ID NO: 265969 - DNA, 55 bp, Artificial
  Synthetic oligonucleotide
atggcaataccctcggaaatagtcttcgccgtgtattgatgtcaagtattcatgg

SEQ ID NO: 265970 - DNA, 55 bp, Artificial
  Synthetic oligonucleotide
cgatgatagattgctcgtaagatttgtagtatccggaggcagtcgtaatggcgga

SEQ ID NO: 265971 - DNA, 55 bp, Artificial
  Synthetic oligonucleotide
cgccattacgctagctgtattaccgcgccatatctttaagggctgggtccactcc

SEQ ID NO: 265972 - DNA, 55 bp, Artificial
  Synthetic oligonucleotide
cgcgctatccctagctttgttatggcggctagcgatcctgcaaacttgacgattg

SEQ ID NO: 265973 - DNA, 55 bp, Artificial
  Synthetic oligonucleotide
cgggcgagtttaaacttatgaagacgatcgcgatctagtggaagatctttcgatt

SEQ ID NO: 265974 - DNA, 55 bp, Artificial
  Synthetic oligonucleotide
agggctcgagcatcacatctcgtggttactcgggccctgtctcgattgattcagc

SEQ ID NO: 265975 - DNA, 55 bp, Artificial
  Synthetic oligonucleotide
cggattgacggctaattaatacgttacggttcctatactggtccatgacgtagtg

SEQ ID NO: 265976 - DNA, 57 bp, Artificial
  Synthetic oligonucleotide
gtaccagtacatgatatgctcgagattaagcaaaaactacaccgtagccgttcggtt

SEQ ID NO: 265977 - DNA, 54 bp, Artificial
  Synthetic oligonucleotide
aattcggcggttcactggttagtcaaacgaacaaactaaacggtgcaattgagc

SEQ ID NO: 265978 - DNA, 55 bp, Artificial
  Synthetic oligonucleotide
acaagacatctatcgttgctggtacttcgcctaatcaagctatttccgaggttca

SEQ ID NO: 265979 - DNA, 55 bp, Artificial
  Synthetic oligonucleotide
agatttccactgtttgggttatgtcactcaaaccaggcttagagagctttagcgt

SEQ ID NO: 265980 - DNA, 55 bp, Artificial
  Synthetic oligonucleotide
cgctaatgcactagtgagtcgagttaagatcttagctaacctaaagattgacgaa

SEQ ID NO: 265981 - DNA, 54 bp, Artificial
  Synthetic oligonucleotide
ataccatgaatccgctcgaattacttcgccgtgaacagtgtacaaagttatact

SEQ ID NO: 265982 - DNA, 54 bp, Artificial
  Synthetic oligonucleotide
aattaccgaggagacagagttaacacaagaccattacagtacgcctatttacct

SEQ ID NO: 265983 - DNA, 53 bp, Artificial
  Synthetic oligonucleotide
ctacgagaccgacctagctcaatctgtgattactcgacagactggcatattta

SEQ ID NO: 265984 - DNA, 53 bp, Artificial
  Synthetic oligonucleotide
tccgtattagctaaagttgcgcaaattcgccaaggtcttctgatataacttcc

SEQ ID NO: 265985 - DNA, 53 bp, Artificial
  Synthetic oligonucleotide
agtaatgagttcgctagccagtttagtagagccgtagtacgaaccgccagcga

SEQ ID NO: 265986 - DNA, 52 bp, Artificial
  Synthetic oligonucleotide
taactgttcgcaaccactaccagattatcgttccaccagtagtcggtagtag

SEQ ID NO: 265987 - DNA, 60 bp, Artificial
  Synthetic oligonucleotide
gtgaagttggtccgcatccagctagtgcgataggtaatcctgatgacatccattgtgcgt

SEQ ID NO: 265988 - DNA, 52 bp, Artificial
  Synthetic oligonucleotide
atcgttaccgatccgcgcccagtctcataggcttgtcgcattggcgcaccgc

SEQ ID NO: 265989 - DNA, 52 bp, Artificial
  Synthetic oligonucleotide
cgccgtaggctgacggcaagagcgacgcctgtccgattggccaagctagact

SEQ ID NO: 265990 - DNA, 51 bp, Artificial
  Synthetic oligonucleotide
accacttttcggccctatgtacccccacgtgcgcaccgcccctactatacc

SEQ ID NO: 265991 - DNA, 51 bp, Artificial
  Synthetic oligonucleotide
agcgtttggtgccggctattgggggtggtcgtgtagttgcggcagaagttt

SEQ ID NO: 265992 - DNA, 51 bp, Artificial
  Synthetic oligonucleotide
atagcgatgctgtcaaagcctcactaaacactatctacccagggcatcgca

SEQ ID NO: 265993 - DNA, 51 bp, Artificial
  Synthetic oligonucleotide
aacggcgctggactcgctatgacaacggtcgatgcagtcacagcaagcggt

SEQ ID NO: 265994 - DNA, 51 bp, Artificial
  Synthetic oligonucleotide
ggaacaatccgttttgaaagcctcgtccgggacagcctgaagaaccgcatg

SEQ ID NO: 265995 - DNA, 51 bp, Artificial
  Synthetic oligonucleotide
cgggtacaaggacgtcgcagaaaacgaatgtaaggcgaaaagacaaggata

SEQ ID NO: 265996 - DNA, 50 bp, Artificial
  Synthetic oligonucleotide
cgcgttcagtggcgcaaccaacggagccgcttgttcgctcagtctttacc

SEQ ID NO: 265997 - DNA, 50 bp, Artificial
  Synthetic oligonucleotide
gacccaccctggggagtccgagaacgtcttgccttgcgaatcaggatcga

SEQ ID NO: 265998 - DNA, 55 bp, Artificial
  Synthetic oligonucleotide
gacggtgttagcaagaccgaggtcgacttctcaaccaagcttgccgtcgtaacgt

SEQ ID NO: 265999 - DNA, 60 bp, Artificial
  Synthetic oligonucleotide
gcagatagcaaggaaagggccgatggagcagagcgtccatcggcccttaatcaagtctgg

SEQ ID NO: 266000 - DNA, 60 bp, Artificial
  Synthetic oligonucleotide
gtacacatggtgtgcgctggacaccttgatgtttcccgccttgaccggcaagattgcccg

SEQ ID NO: 266001 - DNA, 60 bp, Artificial
  Synthetic oligonucleotide
gtaccattggccttatcgttaatctcctggattgctctcgcgccctgcaaatgtactggc

SEQ ID NO: 266002 - DNA, 60 bp, Artificial
  Synthetic oligonucleotide
gtcaagctgtcacaaatctgcttcccaatcgtttatattagtgagagggtctttgtctca

SEQ ID NO: 266003 - DNA, 60 bp, Artificial
  Synthetic oligonucleotide
gtcaagttgccgatctgaaagatagcctcgtgaaatagcttctcctgcttgctctgccgg

SEQ ID NO: 266004 - DNA, 60 bp, Artificial
  Synthetic oligonucleotide
gtccgaggtcactatgaagttgcaaaccacaacagcgtcctttctgatagctcgactgct

SEQ ID NO: 266005 - DNA, 57 bp, Artificial
  Synthetic oligonucleotide
gtcgttgacgttctctggaacacccttgaggctgtccagtagaagtagcggtattcc

SEQ ID NO: 266006 - DNA, 57 bp, Artificial
  Synthetic oligonucleotide
gtctacgtccctacttactgacgcaattcgcaaggagaaacttcgtgtcttataaga

SEQ ID NO: 266007 - DNA, 60 bp, Artificial
  Synthetic oligonucleotide
gtctctctgatgcagtcggctttcctgccgtctgggtgtgcctttcgccattcttcgaca

SEQ ID NO: 266008 - DNA, 60 bp, Artificial
  Synthetic oligonucleotide
gtcttgcccagagaagatatagccccgattatgtacagcccagcatacaagcccccgtct

SEQ ID NO: 266009 - DNA, 60 bp, Artificial
  Synthetic oligonucleotide
gtgagctcatccacagcgtgattggagctggattgcgcgatggaactttggctgtcctga

SEQ ID NO: 266010 - DNA, 60 bp, Artificial
  Synthetic oligonucleotide
gcccacatagtcaatgtcgattgccatggcaaagagctgatgagcgttcccctttgtatg

SEQ ID NO: 266011 - DNA, 59 bp, Artificial
  Synthetic oligonucleotide
gtggaaattgtatcatcttttagaaaaacgtaatattctatatcagagtattgatctcc

SEQ ID NO: 266012 - DNA, 60 bp, Artificial
  Synthetic oligonucleotide
gtgggataagcccgaagctgtctcctatgaccttatcgagcatatccagactgtcatcaa

SEQ ID NO: 266013 - DNA, 60 bp, Artificial
  Synthetic oligonucleotide
tcctgagcaatcccatcccctcgcggcggctcgtgcatacgactactgaacaggtcgtgt

SEQ ID NO: 266014 - DNA, 55 bp, Artificial
  Synthetic oligonucleotide
tccccacgcacctaaagccttgatatacccccgtaatgtctgggttgtctggtcg

SEQ ID NO: 266015 - DNA, 60 bp, Artificial
  Synthetic oligonucleotide
tcattaaatgccgaactgtccaccattcgacataaatcgtcactgtcacaggtggcaagg

SEQ ID NO: 266016 - DNA, 52 bp, Artificial
  Synthetic oligonucleotide
tcatcgggaaccgccgtgaaacttcccgatgtttcccgggaaacattcccga

SEQ ID NO: 266017 - DNA, 60 bp, Artificial
  Synthetic oligonucleotide
tcagtcagctttgcaatctgccggtcttttacttcaagctgcccttgcagcgtgtcgata

SEQ ID NO: 266018 - DNA, 58 bp, Artificial
  Synthetic oligonucleotide
tcaggatgacgttactctgcggaacttcttttacaactgtcgcagcgattaccccgct

SEQ ID NO: 266019 - DNA, 60 bp, Artificial
  Synthetic oligonucleotide
tcagcttggcagaactcaaccaggtcatattggagttgctaccggcgttcaatcaacgtc

SEQ ID NO: 266020 - DNA, 60 bp, Artificial
  Synthetic oligonucleotide
tattcatatatggcaagagcagggctgtaagtttgcagatgagggacaagcctgctacgt

SEQ ID NO: 266021 - DNA, 59 bp, Artificial
  Synthetic oligonucleotide
gccctcctgtgtcgcttcgtgtcgctatttgtcgaattttatacttgactgtcctctaa

SEQ ID NO: 266022 - DNA, 55 bp, Artificial
  Synthetic oligonucleotide
tataacaggtggaaaatggacaagactatttattccaaaaagattgccgaaagcc

SEQ ID NO: 266023 - DNA, 57 bp, Artificial
  Synthetic oligonucleotide
tagcgtcctgtgggttactcctaagatcggctccagctccgtaagggtgtatagccg

SEQ ID NO: 266024 - DNA, 60 bp, Artificial
  Synthetic oligonucleotide
tagcaggttcagtccagatgctcggtagaactggctctcgaaagtccggtcgcgcaattc

SEQ ID NO: 266025 - DNA, 59 bp, Artificial
  Synthetic oligonucleotide
tacggatagtccgtattatgctcccgttgactgtcagttggacttgtttgataataata

SEQ ID NO: 266026 - DNA, 60 bp, Artificial
  Synthetic oligonucleotide
tacccgtgcatatggtaggccatttcgcggcggcgcggaatggctataatatctttagcc

SEQ ID NO: 266027 - DNA, 60 bp, Artificial
  Synthetic oligonucleotide
gttttgccgatctctgatggagtggtgacaatcagagcgatgtcggatgaggacgcagaa

SEQ ID NO: 266028 - DNA, 60 bp, Artificial
  Synthetic oligonucleotide
gttatcctctgaacggctcatatctacatctgggttcgtcttaggttcatgctcacggtt

SEQ ID NO: 266029 - DNA, 51 bp, Artificial
  Synthetic oligonucleotide
aaacctttcaggtttaccacattcccacaccccgccgctcacccccataac

SEQ ID NO: 266030 - DNA, 58 bp, Artificial
  Synthetic oligonucleotide
cacccgaatgccaaccactcggacatagcaaaggcgctgggcgtgtcgcgtcctaccg

SEQ ID NO: 266031 - DNA, 54 bp, Artificial
  Synthetic oligonucleotide
aaacgaagtttaacggcaagccatattttgaaaatcctgcggagtttgtctcaa

SEQ ID NO: 266032 - DNA, 59 bp, Artificial
  Synthetic oligonucleotide
gccgggtttgctcacgctgccgataccaccgttcagcaagtcgagatttactttggcac

SEQ ID NO: 266033 - DNA, 53 bp, Artificial
  Synthetic oligonucleotide
accgccgttggtacactcgcccatttcaaccttaaaagccctttgattgttca

SEQ ID NO: 266034 - DNA, 54 bp, Artificial
  Synthetic oligonucleotide
acgccggcaaggcacaaagtaattcgtctttgttaagcgcaggacgtaaccgcc

SEQ ID NO: 266035 - DNA, 57 bp, Artificial
  Synthetic oligonucleotide
acggatacgaacttaacgatagttatagcctgcacgtggaattaatcaaagagaaca

SEQ ID NO: 266036 - DNA, 55 bp, Artificial
  Synthetic oligonucleotide
acggtagaactctttcggttgaagctccctgtaccctctatcgttcatcaactta

SEQ ID NO: 266037 - DNA, 55 bp, Artificial
  Synthetic oligonucleotide
acggtttcagcgttcggtacatcaccgctgatttcaaagggtattctatactccc

SEQ ID NO: 266038 - DNA, 55 bp, Artificial
  Synthetic oligonucleotide
aactctaataagacctaataagactaagtctgcctaaaagctggcagacattttt

SEQ ID NO: 266039 - DNA, 54 bp, Artificial
  Synthetic oligonucleotide
acttagccttatcacggtatgcctttttccattccgaaaccgtcttgtaatctc

SEQ ID NO: 266040 - DNA, 55 bp, Artificial
  Synthetic oligonucleotide
acttcaagggtaatctcgtgccagccatcaggaaacaaggcggtaaaaccctgcc

SEQ ID NO: 266041 - DNA, 60 bp, Artificial
  Synthetic oligonucleotide
caagcttgccagaggcaattgcctctgggcgttgacgagaatggcgtgcgcggccgtgta

SEQ ID NO: 266042 - DNA, 60 bp, Artificial
  Synthetic oligonucleotide
agaagagttctgcggccatgttcttttaaggccgattctgggcatctggcgagtgccgct

SEQ ID NO: 266043 - DNA, 60 bp, Artificial
  Synthetic oligonucleotide
gcgagcagcaagccaacgagaacatttggttctcttttgatatctcagcgtgttttactg

SEQ ID NO: 266044 - DNA, 60 bp, Artificial
  Synthetic oligonucleotide
agacgtatccgagctgacaagaaagagcaggcaggggcgcaatccgaagcaggagacgca

SEQ ID NO: 266045 - DNA, 55 bp, Artificial
  Synthetic oligonucleotide
agataccgggcatttttgccgcaccgccgccgtccaaaataggagatcggggaca

SEQ ID NO: 266046 - DNA, 60 bp, Artificial
  Synthetic oligonucleotide
agatcaacgccgtctgttggggtccagatgtaatcgccggtgagactgatgtgctgccag

SEQ ID NO: 266047 - DNA, 60 bp, Artificial
  Synthetic oligonucleotide
aaagaggcagcctcacaactgtctccaagaacttctgttgtcactctacttcttctggtg

SEQ ID NO: 266048 - DNA, 60 bp, Artificial
  Synthetic oligonucleotide
agatcggctaaagcggttactatgccctttgcgtctacgctgtccagctccagagcgggc

SEQ ID NO: 266049 - DNA, 59 bp, Artificial
  Synthetic oligonucleotide
agcccaactacaactaggctaaacccatctaccaattcagtataattgacatagaatgc

SEQ ID NO: 266050 - DNA, 54 bp, Artificial
  Synthetic oligonucleotide
aacgccctttagccgcccgtcctttatatagctctgtagcgtcctgtgggttac

SEQ ID NO: 266051 - DNA, 57 bp, Artificial
  Synthetic oligonucleotide
aggcaaaaaatgccaattgtatatacttgatatacaattgggaggttgtgtctttaa

SEQ ID NO: 266052 - DNA, 58 bp, Artificial
  Synthetic oligonucleotide
aggcattataactcttacttgactatataatgcccatccgtaccacctttgaggcaaa

SEQ ID NO: 266053 - DNA, 60 bp, Artificial
  Synthetic oligonucleotide
atgtactggctgtttgcgccagttccgcttattgacaggcatagtcaggccggagagctt

SEQ ID NO: 266054 - DNA, 60 bp, Artificial
  Synthetic oligonucleotide
gcggtcatgccgacggctcatgggatgccaaggaagacctatacaactggtggcttcgga

SEQ ID NO: 266055 - DNA, 58 bp, Artificial
  Synthetic oligonucleotide
aacaagagctaagggaatttaatgaactagctattcaactgcaagaacaccagcgacg

SEQ ID NO: 266056 - DNA, 59 bp, Artificial
  Synthetic oligonucleotide
agttatcgaacagagtgtgctaggagctcgccccgattcccaacaacgccaacaagagc

SEQ ID NO: 266057 - DNA, 52 bp, Artificial
  Synthetic oligonucleotide
ataaggcgaactcctcggcttaaacgctccccctcggagtatcgtccctccc

SEQ ID NO: 266058 - DNA, 60 bp, Artificial
  Synthetic oligonucleotide
atacacagggtgatacacaccgagatacacaggagatacacgtgccgcagaagatgttca

SEQ ID NO: 266059 - DNA, 60 bp, Artificial
  Synthetic oligonucleotide
atcgaccgagcagaagctgagccgatggcaaaggctcaagagggcttggaggggctagcc

SEQ ID NO: 266060 - DNA, 59 bp, Artificial
  Synthetic oligonucleotide
atcgatccagcgtataatgtttggcgatctccctttcgttatccgggatgatcgtcgcc

SEQ ID NO: 266061 - DNA, 52 bp, Artificial
  Synthetic oligonucleotide
acacctaaccgcccgaaacctacctgatgtttatggaccccctccacgatgg

SEQ ID NO: 266062 - DNA, 60 bp, Artificial
  Synthetic oligonucleotide
cagggtttgtgcggcaggtgtcagccagcctgtgagtgcccgcacgtccgaaggcacaaa

SEQ ID NO: 266063 - DNA, 56 bp, Artificial
  Synthetic oligonucleotide
acaaacgaacgtttcgcggcatccacagttcttgtccgcaaaccttgtcatgaaac

SEQ ID NO: 266064 - DNA, 56 bp, Artificial
  Synthetic oligonucleotide
aagtgccgaccacagttcgactttcaggccgtcaggggagacgcccaagtattcca

SEQ ID NO: 266065 - DNA, 60 bp, Artificial
  Synthetic oligonucleotide
gcgtcaacaaacagattttgatcttgatgaggcaaacgcactactcataaaaatcgcaga

SEQ ID NO: 266066 - DNA, 58 bp, Artificial
  Synthetic oligonucleotide
acccaggcgtagatatgtaccagcagccggggcctgttggctcccaggctacttcaag

SEQ ID NO: 266067 - DNA, 58 bp, Artificial
  Synthetic oligonucleotide
cagatagtacaggtggacaccctttccggaacttacgaggaatgtcgggcagagctga

SEQ ID NO: 266068 - DNA, 58 bp, Artificial
  Synthetic oligonucleotide
aaaccttaaaacgccatggctctgtacgcctgtgagtgggtgcccaatttgcagcctc

SEQ ID NO: 266069 - DNA, 55 bp, Artificial
  Synthetic oligonucleotide
aaaatgccctttctcgctctggagtatagtccccttttgggagtgtcaccaccca

SEQ ID NO: 266070 - DNA, 58 bp, Artificial
  Synthetic oligonucleotide
aaaagtggacgaccaaagcgataatcttagcggatcggcatatcgaaatttcctcgca

SEQ ID NO: 266071 - DNA, 56 bp, Artificial
  Synthetic oligonucleotide
aatgacccttcctctcgaaagatccttccgggaagatctcacgataaaactcatac

SEQ ID NO: 266072 - DNA, 60 bp, Artificial
  Synthetic oligonucleotide
aaaacatcacgcccaaagcagctatcaagccgctgctggtactcggtatggaattgctca

SEQ ID NO: 266073 - DNA, 59 bp, Artificial
  Synthetic oligonucleotide
tgcctgttaaatacagcataaaagacgtcgtatctttcagcctgctaaatagcaaaatg

SEQ ID NO: 266074 - DNA, 59 bp, Artificial
  Synthetic oligonucleotide
aacgcgtctggctccgtgcgcatggttcacacttgggttgaagctggtacccagcggta

SEQ ID NO: 266075 - DNA, 59 bp, Artificial
  Synthetic oligonucleotide
caaatgccagttggccgaatcatgccttgtcctctcgagtggtgcgaaactggcccatt

SEQ ID NO: 266076 - DNA, 54 bp, Artificial
  Synthetic oligonucleotide
ggtaaagagattatgtgttttcggtaaagagattatgtgttttcggtaaagaga

SEQ ID NO: 266077 - DNA, 59 bp, Artificial
  Synthetic oligonucleotide
gaagtttgcgacccatctaacttgatatacatatatgctacgtcgtgacaaaaagagcc

SEQ ID NO: 266078 - DNA, 59 bp, Artificial
  Synthetic oligonucleotide
gtcccccagccgccttatacgggcttcctttgtcatgctgtagctctcgcatagctccg

SEQ ID NO: 266079 - DNA, 59 bp, Artificial
  Synthetic oligonucleotide
tccggcttggtgctgtagttcgctccgcatgggattctgccggtgcaagccagtcaccc

SEQ ID NO: 266080 - DNA, 59 bp, Artificial
  Synthetic oligonucleotide
cgcctgtaatggtgtcggatttgagagccggagctgctcttgttttagccggacttgcc

SEQ ID NO: 266081 - DNA, 59 bp, Artificial
  Synthetic oligonucleotide
tattaaaggatttgtaatttccatcgtctactcctgctcctacttcaccatagagacta

SEQ ID NO: 266082 - DNA, 59 bp, Artificial
  Synthetic oligonucleotide
ggtgccgcctgctgattctggggtgaacccctatctggctcatgcccgctctcctctcg

SEQ ID NO: 266083 - DNA, 58 bp, Artificial
  Synthetic oligonucleotide
gcggtagtgagcgatggaacaagagttctggggcttggtgatataggaccggaagccg

SEQ ID NO: 266084 - DNA, 53 bp, Artificial
  Synthetic oligonucleotide
tataaaaggggtggagcgggagcataaaagcccccgcccctgtcttactcatt

SEQ ID NO: 266085 - DNA, 57 bp, Artificial
  Synthetic oligonucleotide
gtgggataggaacctttgtctgtttctcaatccattccctacttgccatggtcgaaa

SEQ ID NO: 266086 - DNA, 58 bp, Artificial
  Synthetic oligonucleotide
tcacattgttagcgaaggagtgcaggggtatcgacagttggggaatgccgtagtgccg

SEQ ID NO: 266087 - DNA, 60 bp, Artificial
  Synthetic oligonucleotide
ggtaaaatgggctctatcgcacgttgatgatgatggtaactgggttaatggtaagcattc

SEQ ID NO: 266088 - DNA, 58 bp, Artificial
  Synthetic oligonucleotide
gtgcttgacgatcgtactggcaagtaccgcaacgttaggcatgccaaaccaagcgttg

SEQ ID NO: 266089 - DNA, 56 bp, Artificial
  Synthetic oligonucleotide
gtgcctatgagggcttccgggatgggttccagagggagccttttccttggctctag

SEQ ID NO: 266090 - DNA, 58 bp, Artificial
  Synthetic oligonucleotide
tcctgcggacggctctccgcccactccatcgcgcccgttcgccttgggcggctcacgt

SEQ ID NO: 266091 - DNA, 58 bp, Artificial
  Synthetic oligonucleotide
tacgcacattaagccctccagggagtgtaccttctgtgtggcaacccacgtacatcga

SEQ ID NO: 266092 - DNA, 58 bp, Artificial
  Synthetic oligonucleotide
gcggttaagcgtctccagcgttagccccctgtggtagctggtctttgctatgtccctg

SEQ ID NO: 266093 - DNA, 57 bp, Artificial
  Synthetic oligonucleotide
ccaagccatttgcagcttgaacggcaattttccttgaaagcgtagcttttcagcttc

SEQ ID NO: 266094 - DNA, 57 bp, Artificial
  Synthetic oligonucleotide
tgcgtccctccgggtgctgctgccgccattcataaacccgcgcctgggccgttccgc

SEQ ID NO: 266095 - DNA, 57 bp, Artificial
  Synthetic oligonucleotide
gcctttatggattgtttccctaaatatgaagccccattgtctactcctgctccattg

SEQ ID NO: 266096 - DNA, 57 bp, Artificial
  Synthetic oligonucleotide
ggtcggatagagcttgtgtcgttccaatgcctacggataaaatcctctttcagtgct

SEQ ID NO: 266097 - DNA, 57 bp, Artificial
  Synthetic oligonucleotide
tcgagggcaattcgctattaacgataatggttatggtcagttgacaactacgcacgc

SEQ ID NO: 266098 - DNA, 58 bp, Artificial
  Synthetic oligonucleotide
gggagtatgaccgaaagggcgggtacgtctactgctcgttcagctgatttggcacaaa

SEQ ID NO: 266099 - DNA, 57 bp, Artificial
  Synthetic oligonucleotide
tgactctggcctcggaactcattccggccctgcgggagcaaattgcctacgtccagc

SEQ ID NO: 266100 - DNA, 56 bp, Artificial
  Synthetic oligonucleotide
ccgctaaggcagaggggcaggttgtagacctgccccttgcaggggttagcgtaatc

SEQ ID NO: 266101 - DNA, 56 bp, Artificial
  Synthetic oligonucleotide
tataggaggcctgttgaattaggcaatagaattgttcctcaacgtgggaataatat

SEQ ID NO: 266102 - DNA, 56 bp, Artificial
  Synthetic oligonucleotide
gcaagctaaaaaaggtttccgagctgcgaggatgttcccaaactgatttgattcgc

SEQ ID NO: 266103 - DNA, 56 bp, Artificial
  Synthetic oligonucleotide
gttccacactctacattccacgcttcagtttgtcgtttaacagttatataattgtc

SEQ ID NO: 266104 - DNA, 56 bp, Artificial
  Synthetic oligonucleotide
actatgccctttgcgtctacgctgtccagctccagagcgggcttagtcccgatata

SEQ ID NO: 266105 - DNA, 52 bp, Artificial
  Synthetic oligonucleotide
gtcctgtaaaggcggggccttagccctcgggggcggccctgatctcgggttc

SEQ ID NO: 266106 - DNA, 56 bp, Artificial
  Synthetic oligonucleotide
gattgacgataggttgaacaatgggcataacgaagcgtgaaatagcgtctgaactg

SEQ ID NO: 266107 - DNA, 56 bp, Artificial
  Synthetic oligonucleotide
ccttcgtcattttagcgcccgcgaaaataaccgagtcagtgacgctgtatctccaa

SEQ ID NO: 266108 - DNA, 55 bp, Artificial
  Synthetic oligonucleotide
cgcgtccaggagccaatcgctcaactcctgggaaggggacacccgcaccgttata

SEQ ID NO: 266109 - DNA, 60 bp, Artificial
  Synthetic oligonucleotide
gactgttgaataatgcaggcttcttaggctctggcggataggctctaaagattggtcaac

SEQ ID NO: 266110 - DNA, 60 bp, Artificial
  Synthetic oligonucleotide
ggctatggtcaatcgaccctgtctaatgtacttgattggagtttgctgttgaaatatacg

SEQ ID NO: 266111 - DNA, 55 bp, Artificial
  Synthetic oligonucleotide
ggcggaatcaagtccgaaactcgccagtagcgtctcgaagctgaccttggtgccc

SEQ ID NO: 266112 - DNA, 55 bp, Artificial
  Synthetic oligonucleotide
ggcggcttctgaaagctcctgtttgcagtcctctgcaagcacatgaagctcctgt

SEQ ID NO: 266113 - DNA, 55 bp, Artificial
  Synthetic oligonucleotide
cgcggcatccacagttcttgtccgcaaaccttgtcatgaaacggcaaatcggaca

SEQ ID NO: 266114 - DNA, 55 bp, Artificial
  Synthetic oligonucleotide
ggctgactggtctcacttacctcaaaatagtagcgatagtttatgaaagcgtaaa

SEQ ID NO: 266115 - DNA, 54 bp, Artificial
  Synthetic oligonucleotide
ggctggcccgtcaaggtgatatgggaaaccttgcgggacgaaggaaagatttcc

SEQ ID NO: 266116 - DNA, 55 bp, Artificial
  Synthetic oligonucleotide
gggaatttaatgaactagctattcaactgcaagaacaccagcgacgtatagaagc

SEQ ID NO: 266117 - DNA, 53 bp, Artificial
  Synthetic oligonucleotide
gggacaaccgataaatttgcaacactttatgacgctaaactaaaagaaggccg

SEQ ID NO: 266118 - DNA, 55 bp, Artificial
  Synthetic oligonucleotide
caccgcctgctacattgacccgcctgcggcaaccgtttaagcctgtgcggcaaga

SEQ ID NO: 266119 - DNA, 55 bp, Artificial
  Synthetic oligonucleotide
ggggaagtgccggactatcgtcgggtacaggggcagttgatggctgaaaacccga

SEQ ID NO: 266120 - DNA, 55 bp, Artificial
  Synthetic oligonucleotide
tccggcgtttcaacaggaacgagtgctttgactcgctctgataccagcgattcag

SEQ ID NO: 266121 - DNA, 54 bp, Artificial
  Synthetic oligonucleotide
ggcgggaacgggtataatcgaaatcgaaagaagcggaccccgcgcaggtggcta

SEQ ID NO: 266122 - DNA, 55 bp, Artificial
  Synthetic oligonucleotide
tcagccagcctgtgagtgcccgcacgtccgaaggcacaaacggacgcatctgcat

SEQ ID NO: 266123 - DNA, 55 bp, Artificial
  Synthetic oligonucleotide
cgcaccctcatccgagtcccaatgagaaagacaggagtcgttctaagatgactat

SEQ ID NO: 266124 - DNA, 55 bp, Artificial
  Synthetic oligonucleotide
cgatggagcagagcgtccatcggcccttaatcaagtctggtctattcggttgacc

SEQ ID NO: 266125 - DNA, 55 bp, Artificial
  Synthetic oligonucleotide
ggtcaatcagcgcaggattaatgccatcagaatttcgtcgcgatactcggagccg

SEQ ID NO: 266126 - DNA, 55 bp, Artificial
  Synthetic oligonucleotide
cgatcacgattaaatcaagctcgataattgtaaaacaacctgtaccgccgttagc

SEQ ID NO: 266127 - DNA, 55 bp, Artificial
  Synthetic oligonucleotide
gctcctagaggctgacatccgtttcaggtggtggcttgttacccgggccattttc

SEQ ID NO: 266128 - DNA, 55 bp, Artificial
  Synthetic oligonucleotide
tctggcgacctgacgagggttcgcgacatcgcggttggccgattgacgtgtgcct

SEQ ID NO: 266129 - DNA, 55 bp, Artificial
  Synthetic oligonucleotide
cggacggtgtgccgataatctaagagggttatgcagtccctacgctgaccatact

SEQ ID NO: 266130 - DNA, 55 bp, Artificial
  Synthetic oligonucleotide
gctgcttgagtcgcttcggtcgatggttgtgacaaaagctcttgatgccctcggg

SEQ ID NO: 266131 - DNA, 55 bp, Artificial
  Synthetic oligonucleotide
ggaccaactccggcaccggaacatacgccaccggctataggattagacgatgtca

SEQ ID NO: 266132 - DNA, 60 bp, Artificial
  Synthetic oligonucleotide
ggcgcaatgtggttcgcactattcgcttataggagcgaagtatcgaccctgtctaatgta

SEQ ID NO: 266133 - DNA, 52 bp, Artificial
  Synthetic oligonucleotide
ggacgcaaaagcttaaactcgctttcccaataccgtaaggtatgttttggga

SEQ ID NO: 266134 - DNA, 55 bp, Artificial
  Synthetic oligonucleotide
cggaatgctcactccgccattcggatatttgtcgcgcagaggactccaagttccg

SEQ ID NO: 266135 - DNA, 54 bp, Artificial
  Synthetic oligonucleotide
ggaggtatttactacagccgttctttagacggtggcctcacttttggctcaccc

SEQ ID NO: 266136 - DNA, 55 bp, Artificial
  Synthetic oligonucleotide
aagatcatccctgagatcagagagcggcattgcaacgcggaggaccccagcgatt

SEQ ID NO: 266137 - DNA, 55 bp, Artificial
  Synthetic oligonucleotide
ggcaaactattataccaatcgagccattcaagcgtttcttccgaaagaccatccg

SEQ ID NO: 266138 - DNA, 55 bp, Artificial
  Synthetic oligonucleotide
ggcaacgatcctccgcttgaggagcgagaaatcttagcgggcagtcaagatgtgc

SEQ ID NO: 266139 - DNA, 55 bp, Artificial
  Synthetic oligonucleotide
ggcacgctggtgcctcaaataacgcaaaacagacgttcgctggcataaaaggtca

SEQ ID NO: 266140 - DNA, 55 bp, Artificial
  Synthetic oligonucleotide
tctaaatgcgtctctatcggcgtttagagcttcgtttgcgtctttatatggctgg

SEQ ID NO: 266141 - DNA, 55 bp, Artificial
  Synthetic oligonucleotide
tcggctccatttgccatagctctcgcgatatctggaccgccacgtaaacctgagt

SEQ ID NO: 266142 - DNA, 55 bp, Artificial
  Synthetic oligonucleotide
cgctctggagtatagtccccttttgggagtgtcaccacccagtcgcagagggtct

SEQ ID NO: 266143 - DNA, 58 bp, Artificial
  Synthetic oligonucleotide
ggcctttctgggccttattcctggcccccatcgtgtagcgcgtccaggagccaatcgc

SEQ ID NO: 266144 - DNA, 55 bp, Artificial
  Synthetic oligonucleotide
ggcgagttgggtctccgtaaagtttaaagggaacatctgtgtctgtgacatggct

SEQ ID NO: 266145 - DNA, 55 bp, Artificial
  Synthetic oligonucleotide
taccctgggtaggtgggtcagaatcatcagcgcggtggatcacaatcactggaat

SEQ ID NO: 266146 - DNA, 55 bp, Artificial
  Synthetic oligonucleotide
ccgtggtcccctcattgtgatatacttgggtcactttcacatgagcgatggttcc

SEQ ID NO: 266147 - DNA, 55 bp, Artificial
  Synthetic oligonucleotide
gtcgctgaatcatctgattcgacagaatacggagcgtgaggacagggttcgtcat

SEQ ID NO: 266148 - DNA, 55 bp, Artificial
  Synthetic oligonucleotide
gtcgtccaggatcaaatacttttgccccggctgcacactgccttcaaaggtcgga

SEQ ID NO: 266149 - DNA, 55 bp, Artificial
  Synthetic oligonucleotide
aataagagcaattttcttcattgtatcacaccgcctttcctacttgtagtgacga

SEQ ID NO: 266150 - DNA, 55 bp, Artificial
  Synthetic oligonucleotide
gttgtgaaaggctgttcgaggataaggcatccggcatgaagactgaccgactcgg

SEQ ID NO: 266151 - DNA, 55 bp, Artificial
  Synthetic oligonucleotide
ccgggtatatgcaagccgctactctatctttcataaaagcccgtccgctcctctc

SEQ ID NO: 266152 - DNA, 55 bp, Artificial
  Synthetic oligonucleotide
ccgcccgtactctgttcagtagatcggctaaagcggttactatgccctttgcgtc

SEQ ID NO: 266153 - DNA, 55 bp, Artificial
  Synthetic oligonucleotide
gttggggtccagatgtaatcgccggtgagactgatgtgctgccagccgagtgggg

SEQ ID NO: 266154 - DNA, 60 bp, Artificial
  Synthetic oligonucleotide
ggccgatcactctcaccgttgcaccagaagcagtgcttcatgtcgaaccggcagaagcaa

SEQ ID NO: 266155 - DNA, 55 bp, Artificial
  Synthetic oligonucleotide
aattgcctctgggcgttgacgagaatggcgtgcgcggccgtgtaaccttcctcgc

SEQ ID NO: 266156 - DNA, 55 bp, Artificial
  Synthetic oligonucleotide
catgaagtaccgcctgaccgaccagatgtggaacaagtacacatcgagggaatgg

SEQ ID NO: 266157 - DNA, 55 bp, Artificial
  Synthetic oligonucleotide
gtgctcgaacggttcaggacaatcctgcttccgagagggttcttctaaatgcagg

SEQ ID NO: 266158 - DNA, 55 bp, Artificial
  Synthetic oligonucleotide
ccatcgtctacgcctgctcctgcttcaccagagcctgcgtctcaaaacaaactca

SEQ ID NO: 266159 - DNA, 55 bp, Artificial
  Synthetic oligonucleotide
ccatcccctcgcggcggctcgtgcatacgactactgaacaggtcgtgtcagcagt

SEQ ID NO: 266160 - DNA, 55 bp, Artificial
  Synthetic oligonucleotide
catgccatattcgctatgtatgttgcttgtgccaaaaccctctttaagtaatgcg

SEQ ID NO: 266161 - DNA, 55 bp, Artificial
  Synthetic oligonucleotide
aatctcctggattgctctcgcgccctgcaaatgtactggctgtttgcgccagttc

SEQ ID NO: 266162 - DNA, 55 bp, Artificial
  Synthetic oligonucleotide
gttataaggcgagtgtcaacctaagtcggagactgttgaataatgcaggcttctt

SEQ ID NO: 266163 - DNA, 55 bp, Artificial
  Synthetic oligonucleotide
ggtgatcaacgatggctattgccaaggctttcaactgccgttcgtccgcagcagg

SEQ ID NO: 266164 - DNA, 55 bp, Artificial
  Synthetic oligonucleotide
ttgcagaactgacatagaatgcgaagcataagaggagcgaagctccgtgcctgtc

SEQ ID NO: 266165 - DNA, 60 bp, Artificial
  Synthetic oligonucleotide
ggcagagatgccgctcaggcgattctgccggtcgtcatcgcgtgagcagcctgtaaacga

SEQ ID NO: 266166 - DNA, 55 bp, Artificial
  Synthetic oligonucleotide
ggtgctccgacgataagaccgctacgcgcatccgtcctcgtgagtacgcgattcg

SEQ ID NO: 266167 - DNA, 55 bp, Artificial
  Synthetic oligonucleotide
ggtgtgacgccgaatggatcgtgtgaccggactcttcccgctctgggcagtgctt

SEQ ID NO: 266168 - DNA, 55 bp, Artificial
  Synthetic oligonucleotide
tatctcttggaaggcaatattacggtgattgatcacggtctggggatcttttctt

SEQ ID NO: 266169 - DNA, 55 bp, Artificial
  Synthetic oligonucleotide
gtaaccccattgccccgatatttcgcagcgttcgttcgcagttgagtacttaccc

SEQ ID NO: 266170 - DNA, 55 bp, Artificial
  Synthetic oligonucleotide
cagatgctcggtagaactggctctcgaaagtccggtcgcgcaattctccgaggcg

SEQ ID NO: 266171 - DNA, 55 bp, Artificial
  Synthetic oligonucleotide
cctttgggcggtacgcgcataagcagcgcgattatgcttgcttctaaggcggcaa

SEQ ID NO: 266172 - DNA, 55 bp, Artificial
  Synthetic oligonucleotide
cagcgcatatcgctcatctgcgacgcgaaagtccttttgacgtgggactgtcggc

SEQ ID NO: 266173 - DNA, 55 bp, Artificial
  Synthetic oligonucleotide
accagcagccggggcctgttggctcccaggctacttcaagggtaatctcgtgcca

SEQ ID NO: 266174 - DNA, 55 bp, Artificial
  Synthetic oligonucleotide
accacgcagaacaattgctcttggatatgggactcagacaggtaagggtgcgcca

SEQ ID NO: 266175 - DNA, 55 bp, Artificial
  Synthetic oligonucleotide
gtacatcaccgctgatttcaaagggtattctatactccctcacagccttacgcgc

SEQ ID NO: 266176 - DNA, 60 bp, Artificial
  Synthetic oligonucleotide
ggcacatcgtaaaagcttgctatgatctccagagcgtagttatagcctttaaggtggtaa

SEQ ID NO: 266177 - DNA, 55 bp, Artificial
  Synthetic oligonucleotide
taggataggaacaagcccattaaaagcccgtattttgtcctctattccgcttgtg

SEQ ID NO: 266178 - DNA, 55 bp, Artificial
  Synthetic oligonucleotide
aagtgctttggccagtaaagctaccggatatcctattgcgtatatagctgcaaaa

SEQ ID NO: 266179 - DNA, 55 bp, Artificial
  Synthetic oligonucleotide
aagtgggtatcgctggtaaaccaaatcattctcttgtctcctttgtcgctaaaaa

SEQ ID NO: 266180 - DNA, 55 bp, Artificial
  Synthetic oligonucleotide
ttggcgatctccctttcgttatccgggatgatcgtcgcctgttgccaccatgcct

SEQ ID NO: 266181 - DNA, 54 bp, Artificial
  Synthetic oligonucleotide
ccgttgagccccacaaaaccatagggagtcaggttatcgattaacccatgcggg

SEQ ID NO: 266182 - DNA, 55 bp, Artificial
  Synthetic oligonucleotide
ccgttcatgaccaataggcgttgtttcattgaggactcctgtaattatccgccgt

SEQ ID NO: 266183 - DNA, 55 bp, Artificial
  Synthetic oligonucleotide
gacgacaagtattatcatactaaatcgtcacagcgggcttaacctcaatctggcg

SEQ ID NO: 266184 - DNA, 55 bp, Artificial
  Synthetic oligonucleotide
tgtagatgcccggcttgagttcgccagctttgtccaccttctgatttgtccatgc

SEQ ID NO: 266185 - DNA, 55 bp, Artificial
  Synthetic oligonucleotide
ctatgaatcggatgatagggaacaggcttggcgtgtaaaagtcgcagcccaagcc

SEQ ID NO: 266186 - DNA, 55 bp, Artificial
  Synthetic oligonucleotide
attgcgtagcgccctccccgcctctcgggcacgtgaaaatgtcgcgatcagccag

SEQ ID NO: 266187 - DNA, 58 bp, Artificial
  Synthetic oligonucleotide
ggcacaaatgaacgtctgagagccgttttaaggctccgaaacatggccgcagaagagt

SEQ ID NO: 266188 - DNA, 55 bp, Artificial
  Synthetic oligonucleotide
ctacctctacacttttcccagcatagtgtcttgtcatgaaccacataccgcaagc

SEQ ID NO: 266189 - DNA, 55 bp, Artificial
  Synthetic oligonucleotide
gagcggctgtcgattatccatcgaacaaggcgcaagtcacaggcaataggcttga

SEQ ID NO: 266190 - DNA, 55 bp, Artificial
  Synthetic oligonucleotide
tgcaccctgctcggcgaaccgaaagtggctagaacattttcgatgacaaaacact

SEQ ID NO: 266191 - DNA, 55 bp, Artificial
  Synthetic oligonucleotide
gataagtatcgctttatgggttaaggatggcaccacttgcaaactagcgctagcg

SEQ ID NO: 266192 - DNA, 55 bp, Artificial
  Synthetic oligonucleotide
ctaagtcggagactgttgaataatgcaggcttcttaggctctggcggataggctc

SEQ ID NO: 266193 - DNA, 55 bp, Artificial
  Synthetic oligonucleotide
tgatgaactacagcaactctcagatgaaatccgccgtgctggtgcgatgctcgtt

SEQ ID NO: 266194 - DNA, 55 bp, Artificial
  Synthetic oligonucleotide
cgttgctccctgtccggacgaatctgactttgcaccgggatcttcagttggccac

SEQ ID NO: 266195 - DNA, 55 bp, Artificial
  Synthetic oligonucleotide
tgtcaggcttcaccggggcgaaccgtgtatcatgtcggcgattttctctgtgtgc

SEQ ID NO: 266196 - DNA, 55 bp, Artificial
  Synthetic oligonucleotide
agattctgagcgaggatgccggtcatgcgttgcaaggtcggccgaagggaagcgg

SEQ ID NO: 266197 - DNA, 55 bp, Artificial
  Synthetic oligonucleotide
tgtcgccagagaccgtcagtgattgggaaaagaaggccagggctggcgatgccat

SEQ ID NO: 266198 - DNA, 55 bp, Artificial
  Synthetic oligonucleotide
ggacgtccaccgaagccctggttagcgaagccattcctaaacggctggcagtaat

SEQ ID NO: 266199 - DNA, 55 bp, Artificial
  Synthetic oligonucleotide
tgtcgtccacggcttggactcgaaccagtcgagccagtagcggtcggtgttcgag

SEQ ID NO: 266200 - DNA, 55 bp, Artificial
  Synthetic oligonucleotide
cgtccactactgacggccctgttgcccggatcaaggactaaacgctatgcaaccg

SEQ ID NO: 266201 - DNA, 55 bp, Artificial
  Synthetic oligonucleotide
cgtcacctgtgagaagttcgtcacggaatttatagagttaatacggtttgataaa

SEQ ID NO: 266202 - DNA, 51 bp, Artificial
  Synthetic oligonucleotide
atcgccggggttgcttcctaacgttaaaacgcgttcaataagccgttctgg

SEQ ID NO: 266203 - DNA, 55 bp, Artificial
  Synthetic oligonucleotide
tggaggatcggttatgcgccctgctgagttttccccggaagagatcgtcgcggct

SEQ ID NO: 266204 - DNA, 55 bp, Artificial
  Synthetic oligonucleotide
ctggcaagagatcggctatgacggcgagtcgagctttgacataaccgccgaaccc

SEQ ID NO: 266205 - DNA, 55 bp, Artificial
  Synthetic oligonucleotide
cttcccaatcgtttatattagtgagagggtctttgtctcacattttgggacagcc

SEQ ID NO: 266206 - DNA, 55 bp, Artificial
  Synthetic oligonucleotide
ctgcgaactccggatacttcgcccgacattcgttgttcgttttgctgtcatgtgc

SEQ ID NO: 266207 - DNA, 55 bp, Artificial
  Synthetic oligonucleotide
atatgccagcttgggttgtcccgcacagcgcatacccagatggctatcattgtga

SEQ ID NO: 266208 - DNA, 55 bp, Artificial
  Synthetic oligonucleotide
ctttagggactccccaacgctccgctcttcataacggcagatataagtctcggtt

SEQ ID NO: 266209 - DNA, 60 bp, Artificial
  Synthetic oligonucleotide
gctgccgaaaaacaagaggaatgggcgatctcaggcgaagcaccttgagggcgcacgggc

SEQ ID NO: 266210 - DNA, 55 bp, Artificial
  Synthetic oligonucleotide
tgcggtgaccagatagacaaggacgggtggtgctgggaacactcaaaatacgaag

SEQ ID NO: 266211 - DNA, 55 bp, Artificial
  Synthetic oligonucleotide
atatacaggaccgaagcatgtagactttacggatgcctaacccctcgttctaggg

SEQ ID NO: 266212 - DNA, 55 bp, Artificial
  Synthetic oligonucleotide
ctgccgaattgttaggattggaaacgatagaaacgttacagctgataagcacgct

SEQ ID NO: 266213 - DNA, 55 bp, Artificial
  Synthetic oligonucleotide
gaagctccctgtaccctctatcgttcatcaacttagccttatcacggtatgcctt

SEQ ID NO: 266214 - DNA, 55 bp, Artificial
  Synthetic oligonucleotide
ctgcagtggctgactaacagtttcgtacattgatacaagtcctttgctcctaatg

SEQ ID NO: 266215 - DNA, 55 bp, Artificial
  Synthetic oligonucleotide
aacagtacgcatatatacagggcctgcaatgattgctaatgggctaaaagcacgc

SEQ ID NO: 266216 - DNA, 55 bp, Artificial
  Synthetic oligonucleotide
gacaggtgggtacgctccgacccctctacaccacgctccaagccgtatttctcgc

SEQ ID NO: 266217 - DNA, 55 bp, Artificial
  Synthetic oligonucleotide
ctctggaacacccttgaggctgtccagtagaagtagcggtattcccgcttattta

SEQ ID NO: 266218 - DNA, 55 bp, Artificial
  Synthetic oligonucleotide
gacccggtggctacaatggcaccctctgtacacccggatcgaccgagtatgttcg

SEQ ID NO: 266219 - DNA, 55 bp, Artificial
  Synthetic oligonucleotide
tgcgattcagccaggcgttaccgttgtgccacgccaggaaggtgcacaagcgcct

SEQ ID NO: 266220 - DNA, 60 bp, Artificial
  Synthetic oligonucleotide
gagcgattggcggcgtctgaacaagcggccaaggtttcagcggaaactcacgctcgcgat

SEQ ID NO: 266221 - DNA, 56 bp, Artificial
  Synthetic oligonucleotide
gctccttacggcgaagccacatcagctttttggagcggcggggggtgcagggggga

SEQ ID NO: 266222 - DNA, 55 bp, Artificial
  Synthetic oligonucleotide
gcgaatgtccattcggtcacgaaagatctggctattgcgctagccaagacgggcc

SEQ ID NO: 266223 - DNA, 55 bp, Artificial
  Synthetic oligonucleotide
tcttccggtggggaacctgcggatcgcgagctttgcgagcgactgtccataggtg

SEQ ID NO: 266224 - DNA, 55 bp, Artificial
  Synthetic oligonucleotide
gcgcggaaaacctgacctcacaggcattgccaccccactgaaagacccgactgct

SEQ ID NO: 266225 - DNA, 53 bp, Artificial
  Synthetic oligonucleotide
gcggaattcgcccctgaagcaattatagggataaaactctctgttacccggtt

SEQ ID NO: 266226 - DNA, 55 bp, Artificial
  Synthetic oligonucleotide
gcggatatgaccgtgctggatgtgatgttatctgaactacgaagccaaataaccc

SEQ ID NO: 266227 - DNA, 55 bp, Artificial
  Synthetic oligonucleotide
gcggctcacttcgtccttggcgtaagtcgctgaaggtcactcgcgttcctacgcc

SEQ ID NO: 266228 - DNA, 55 bp, Artificial
  Synthetic oligonucleotide
caatccccattggttcagatccgcttggggttccttcccagcgaattctaatagt

SEQ ID NO: 266229 - DNA, 55 bp, Artificial
  Synthetic oligonucleotide
cgggcctacaatagccgccagctctttgacgatccttggtttctccatgcttgcc

SEQ ID NO: 266230 - DNA, 53 bp, Artificial
  Synthetic oligonucleotide
ttcagttgtaggtctaacaacccgctcctactaaaacgttttcgatttctatc

SEQ ID NO: 266231 - DNA, 55 bp, Artificial
  Synthetic oligonucleotide
cggctcatatctacatctgggttcgtcttaggttcatgctcacggttgttgtggc

SEQ ID NO: 266232 - DNA, 60 bp, Artificial
  Synthetic oligonucleotide
gctcattggatctatagttgatgacccactttatccgcaactaaacttacaattccagca

SEQ ID NO: 266233 - DNA, 55 bp, Artificial
  Synthetic oligonucleotide
caatctgccggtcttttacttcaagctgcccttgcagcgtgtcgatagttgcctg

SEQ ID NO: 266234 - DNA, 55 bp, Artificial
  Synthetic oligonucleotide
gcgtgattggagctggattgcgcgatggaactttggctgtcctgacgatcgccga

SEQ ID NO: 266235 - DNA, 55 bp, Artificial
  Synthetic oligonucleotide
tcttaacgactcgcgggcccttttcgctcggtcactcctcgcctgccggccagta

SEQ ID NO: 266236 - DNA, 55 bp, Artificial
  Synthetic oligonucleotide
ttcgccctctaggcggtaacgcgccagataaccactgtccccaaaggggatgacc

SEQ ID NO: 266237 - DNA, 55 bp, Artificial
  Synthetic oligonucleotide
tctggcgtctggatcggttaggccgttcgctccccgatctggtacgtatcgtggg

SEQ ID NO: 266238 - DNA, 55 bp, Artificial
  Synthetic oligonucleotide
cggcaagccatattttgaaaatcctgcggagtttgtctcaattgcaaaagccgca

SEQ ID NO: 266239 - DNA, 55 bp, Artificial
  Synthetic oligonucleotide
gctccgcaatcaagaggtcttcgcctactggaaacgactcgggcttcggtatatg

SEQ ID NO: 266240 - DNA, 55 bp, Artificial
  Synthetic oligonucleotide
agagcggcttatccgcacaagggatgcacgtcaagtataattcaaataagaacag

SEQ ID NO: 266241 - DNA, 55 bp, Artificial
  Synthetic oligonucleotide
gcagagttgatccggcttggtgctgtagttcgctccgcatgggattctgccggtg

SEQ ID NO: 266242 - DNA, 55 bp, Artificial
  Synthetic oligonucleotide
aaacggactacccgcacaaccgccatcgcaaccacccgcacaaccgccatcgcaa

SEQ ID NO: 266243 - DNA, 55 bp, Artificial
  Synthetic oligonucleotide
gcgtttaaggcaccaacgtgccttaaataacacaaaacagacgttcgctggcaaa

SEQ ID NO: 266244 - DNA, 55 bp, Artificial
  Synthetic oligonucleotide
gcaggcttcttgggctctggcggataggctctaaagattggtcaacgttcgtaag

SEQ ID NO: 266245 - DNA, 55 bp, Artificial
  Synthetic oligonucleotide
gcattaccacttcggagacgtaagcggctcccaaattcagatcggatcgaatagc

SEQ ID NO: 266246 - DNA, 55 bp, Artificial
  Synthetic oligonucleotide
cgtatggctactacggcatcatagacaaaataggcgctaacgttcctgtaacgag

SEQ ID NO: 266247 - DNA, 55 bp, Artificial
  Synthetic oligonucleotide
agaattggccgacaaggcgaactctttgctagatcaaatacttggtgacgcctac

SEQ ID NO: 266248 - DNA, 55 bp, Artificial
  Synthetic oligonucleotide
gccccaactgtctgcgaggagcccatgcacccacataccggtgcatagaggatgc

SEQ ID NO: 266249 - DNA, 55 bp, Artificial
  Synthetic oligonucleotide
cgtacgcactgaaaggataaaataggatgtactatgcgataaagggactagttct

SEQ ID NO: 266250 - DNA, 55 bp, Artificial
  Synthetic oligonucleotide
gccctggttagcgaagccattcctaaacggctggcagtaattggcgcctcggtcg

SEQ ID NO: 266251 - DNA, 55 bp, Artificial
  Synthetic oligonucleotide
gccgcaccgccgccgtccaaaataggagatcggggacataatcgtgaaatcggtg

SEQ ID NO: 266252 - DNA, 55 bp, Artificial
  Synthetic oligonucleotide
agaacgtccaggttccggccggtgcctttggcagcacgccgggcactagcgaaca

SEQ ID NO: 266253 - DNA, 55 bp, Artificial
  Synthetic oligonucleotide
gccggtcattataaggccattatgaagttggaagaggtcgggccagggattgccc

SEQ ID NO: 266254 - DNA, 60 bp, Artificial
  Synthetic oligonucleotide
gcgtcgggagaaccgacagcagcaaaagtcgttgcagactatgcagctcaaatgaagccc

SEQ ID NO: 266255 - DNA, 55 bp, Artificial
  Synthetic oligonucleotide
tgacattctgtagaggcggacctatagtccatgcgctactcgaattcagagttgc

SEQ ID NO: 266256 - DNA, 55 bp, Artificial
  Synthetic oligonucleotide
gcctgctaattggtatcggtatcggtaatttccatcgtctacgcctgctcctgct

SEQ ID NO: 266257 - DNA, 55 bp, Artificial
  Synthetic oligonucleotide
cgtacgattaccggaagaataagatatattcccgaattgcgttcgacaaacgctc

SEQ ID NO: 266258 - DNA, 54 bp, Artificial
  Synthetic oligonucleotide
tcgactttctatccggatgccaaggatattatggatccaatgtcccgccaaagg

SEQ ID NO: 266259 - DNA, 54 bp, Artificial
  Synthetic oligonucleotide
aaaaccggagtgtcaataacacagcacaaactcttccgcgccttgctctgagtt

SEQ ID NO: 266260 - DNA, 54 bp, Artificial
  Synthetic oligonucleotide
tgcatatgcggctgctcttcgtccttatggacgaaagccgacaccacatttttt

SEQ ID NO: 266261 - DNA, 54 bp, Artificial
  Synthetic oligonucleotide
tacctcgattaaatcaatggatgcgtgaaagaggactgattaccagagaccgtc

SEQ ID NO: 266262 - DNA, 54 bp, Artificial
  Synthetic oligonucleotide
cattatgatgaaaggctcggaacacaaaaaaagcctattgctgaattacttcaa

SEQ ID NO: 266263 - DNA, 54 bp, Artificial
  Synthetic oligonucleotide
ccgagagggttcttctaaatgcaggatttaaacaggagggcgaagcgcggccgg

SEQ ID NO: 266264 - DNA, 54 bp, Artificial
  Synthetic oligonucleotide
cggtacaatttctggccctacaaaagacagctacggctctatgctagaactcac

SEQ ID NO: 266265 - DNA, 56 bp, Artificial
  Synthetic oligonucleotide
ccaatcgctcaactcctgggaaggggacacccgcaccgttatatgcccattttcaa

SEQ ID NO: 266266 - DNA, 54 bp, Artificial
  Synthetic oligonucleotide
atttcgcggcggcgcggaatggctataatatctttagcccgtagggataaagcg

SEQ ID NO: 266267 - DNA, 54 bp, Artificial
  Synthetic oligonucleotide
ctttgtctcacattttgggacagccaccagaagtaattacatacctatcgttgc

SEQ ID NO: 266268 - DNA, 54 bp, Artificial
  Synthetic oligonucleotide
gccaaggttcgtccacgggaggtctggcggtggccatctttcactgcaacatat

SEQ ID NO: 266269 - DNA, 54 bp, Artificial
  Synthetic oligonucleotide
gcgttctcgctttatctgccctcctgtgtcgcttcgtgtcgcttgctgtcgcta

SEQ ID NO: 266270 - DNA, 54 bp, Artificial
  Synthetic oligonucleotide
accgaaatgagcgtgagctatctcattgaagtgtgaggcatgcggcaatgctta

SEQ ID NO: 266271 - DNA, 51 bp, Artificial
  Synthetic oligonucleotide
acaaagtaattcgtctttgttaagcgcaggacgtaaccgccgagtaaggtt

SEQ ID NO: 266272 - DNA, 53 bp, Artificial
  Synthetic oligonucleotide
tcaagctgtctgcgaataaactcggcgtttagtcaacgtatctaatatcccgc

SEQ ID NO: 266273 - DNA, 53 bp, Artificial
  Synthetic oligonucleotide
cgaccaccttgtttcgactgtcctcgtcaatgtccgcactctggacagccatt

SEQ ID NO: 266274 - DNA, 51 bp, Artificial
  Synthetic oligonucleotide
atcggttgtaaagccccgtccgactaaatctgtaacgtacataaaacaaac

SEQ ID NO: 266275 - DNA, 52 bp, Artificial
  Synthetic oligonucleotide
aagagctacttgggcgcgggtgggtggtgcccggaaagccccactgggtggg

SEQ ID NO: 266276 - DNA, 59 bp, Artificial
  Synthetic oligonucleotide
cccatcgtgtagcgcgtccaggagccaatcgctcaactcctgggaaggggacacccgca

SEQ ID NO: 266277 - DNA, 53 bp, Artificial
  Synthetic oligonucleotide
gtacttctctttcgcctcggccagcgacagtcggctctttctcataagcccct

SEQ ID NO: 266278 - DNA, 53 bp, Artificial
  Synthetic oligonucleotide
caacggataaaagagagagcggaatgcaagagttaaacgaagttggtttgagc

SEQ ID NO: 266279 - DNA, 53 bp, Artificial
  Synthetic oligonucleotide
aaaacatcgcgatgcacttttccttccagtatctttatagccacacgtctgga

SEQ ID NO: 266280 - DNA, 53 bp, Artificial
  Synthetic oligonucleotide
gtcatcatgtgatggaggatcggttatgcgccctgctgagttttccccggaag

SEQ ID NO: 266281 - DNA, 53 bp, Artificial
  Synthetic oligonucleotide
taccgcaagcctgaatctcgagcgcgcaggtgtgacgtttgactcgcaacatc

SEQ ID NO: 266282 - DNA, 52 bp, Artificial
  Synthetic oligonucleotide
caaaagcagcgacaggacatatgctcggagtttccggaatgataggagcggt

SEQ ID NO: 266283 - DNA, 52 bp, Artificial
  Synthetic oligonucleotide
tctctagaaattcggagcgttgaaattcttccgaaagttgctgtcttatggt

SEQ ID NO: 266284 - DNA, 52 bp, Artificial
  Synthetic oligonucleotide
cacaagcctatgcagaaggttttgacaatactgggctgctagtgggcgacgc

SEQ ID NO: 266285 - DNA, 52 bp, Artificial
  Synthetic oligonucleotide
tcgacataaatcgtcactgtcacaggtggcaaggaagtcatagacacggatt

SEQ ID NO: 266286 - DNA, 52 bp, Artificial
  Synthetic oligonucleotide
gctaatcaagataaatcggaactgaacgcataatgaatagcaaatgggtgct

SEQ ID NO: 266287 - DNA, 54 bp, Artificial
  Synthetic oligonucleotide
cccgccctttctgttttggcttgatagcctgttccacagttatttcctttgtct

SEQ ID NO: 266288 - DNA, 52 bp, Artificial
  Synthetic oligonucleotide
aactgatctccagaccagtcagggaactcggctgctcgatcggatcagtcac

SEQ ID NO: 266289 - DNA, 52 bp, Artificial
  Synthetic oligonucleotide
atctttagcccgtagggataaagcgcacttatatgtcacgcctgcggcatga

SEQ ID NO: 266290 - DNA, 52 bp, Artificial
  Synthetic oligonucleotide
gtaatacctcgatactacacggaagccattatcataaccgacagcatccctg

SEQ ID NO: 266291 - DNA, 52 bp, Artificial
  Synthetic oligonucleotide
gccgtcctaagaattgttttctttgcttctcggaattatctctcatggtctt

SEQ ID NO: 266292 - DNA, 52 bp, Artificial
  Synthetic oligonucleotide
gaggcaaaaaatgcacccacgtttagaccctgcaaaaatatatttagtccag

SEQ ID NO: 266293 - DNA, 52 bp, Artificial
  Synthetic oligonucleotide
gtagacgagctcgaccagcctgctgcgggagtccgtgccgacggcaatccac

SEQ ID NO: 266294 - DNA, 51 bp, Artificial
  Synthetic oligonucleotide
tggtgaaaggaggattgagccgcaaagcaaccgtccgagcatctcctcagc

SEQ ID NO: 266295 - DNA, 51 bp, Artificial
  Synthetic oligonucleotide
tgacaggctgtgaaaatcttaaaagtcggataagaggcaatcagaatactg

SEQ ID NO: 266296 - DNA, 51 bp, Artificial
  Synthetic oligonucleotide
acggtcattggcggacgacgacctttgtggccggcctgcactgttgatcgg

SEQ ID NO: 266297 - DNA, 51 bp, Artificial
  Synthetic oligonucleotide
gatagtttatgaaagcgtaaaaagctaagacgttatgataatgcttagtcg

SEQ ID NO: 266298 - DNA, 59 bp, Artificial
  Synthetic oligonucleotide
cctacagcttgtactatccgggtatatgcaagccgctactctatctttcataaaagccc

SEQ ID NO: 266299 - DNA, 51 bp, Artificial
  Synthetic oligonucleotide
gactctgcatctcacgtgttctaccgttgtcagtatcatatcgtttggacc

SEQ ID NO: 266300 - DNA, 51 bp, Artificial
  Synthetic oligonucleotide
cgtggccagaacacaggcgaggcccagtctgttcgcggccttgttctgtcg

SEQ ID NO: 266301 - DNA, 51 bp, Artificial
  Synthetic oligonucleotide
gacgcggctgaacgagagcaggcgcgtcttgacatgcaccccgacgagcct

SEQ ID NO: 266302 - DNA, 51 bp, Artificial
  Synthetic oligonucleotide
tactactcaggggaagtgccggactatcgtcgggtacaggggcagttgatg

SEQ ID NO: 266303 - DNA, 51 bp, Artificial
  Synthetic oligonucleotide
gtacatccttggccggagcaacttgacactgcagagactctttgcggtcct

SEQ ID NO: 266304 - DNA, 51 bp, Artificial
  Synthetic oligonucleotide
gtaaacgtcctcggctaatgttgcgtccgtgatatagcctacaagcgttct

SEQ ID NO: 266305 - DNA, 51 bp, Artificial
  Synthetic oligonucleotide
ggtggcaaggaagtcatagacacggatttccctgtctgctgtctccttgtc

SEQ ID NO: 266306 - DNA, 51 bp, Artificial
  Synthetic oligonucleotide
aattacgcacgttttcgtaagcccatacattataggttacgtgtacatcgc

SEQ ID NO: 266307 - DNA, 51 bp, Artificial
  Synthetic oligonucleotide
cggcttctattgactatgaggcagtgtcgtaattaagttagttggctataa

SEQ ID NO: 266308 - DNA, 51 bp, Artificial
  Synthetic oligonucleotide
cgtcctgtaaaggcggggccttagccctcgggggcggctggtatggagggt

SEQ ID NO: 266309 - DNA, 57 bp, Artificial
  Synthetic oligonucleotide
cctgggtctgaaaaggcttcgtgctcgaacggttcaggacaatcctgcttccgagag

SEQ ID NO: 266310 - DNA, 50 bp, Artificial
  Synthetic oligonucleotide
aatatgccgcctgagtccatcgggtggagggtgagggatcggcacatcac

SEQ ID NO: 266311 - DNA, 50 bp, Artificial
  Synthetic oligonucleotide
cttccgtaccgtactcattttgatagagtaaagtgtaggaagcgacttca

SEQ ID NO: 266312 - DNA, 50 bp, Artificial
  Synthetic oligonucleotide
aatccgaacgtggcgagaggggctggagccttcgttggatttgagctgcg

SEQ ID NO: 266313 - DNA, 50 bp, Artificial
  Synthetic oligonucleotide
aaccggcgctcagtggtgtgcaacgcaatcggctccgattcggcagccaa

SEQ ID NO: 266314 - DNA, 50 bp, Artificial
  Synthetic oligonucleotide
ccatgcgatatgctcaatagcaccgctcaaaccgccctgcaaatgattct

SEQ ID NO: 266315 - DNA, 50 bp, Artificial
  Synthetic oligonucleotide
aaactgccaactgttttgacgcaaagtgaagtccgagccttgttgctggc

SEQ ID NO: 266316 - DNA, 50 bp, Artificial
  Synthetic oligonucleotide
aaccggatcctgcacgcatacctatcccaggatgagacagcacccgcacg

SEQ ID NO: 266317 - DNA, 50 bp, Artificial
  Synthetic oligonucleotide
ctggtagtcatgcgctccccgttgttacggtttgctatagagctaaaaag

SEQ ID NO: 266318 - DNA, 50 bp, Artificial
  Synthetic oligonucleotide
ccgactattatgaaaacgatatgcgtcatactgctgacgcaccaaaactt

SEQ ID NO: 266319 - DNA, 50 bp, Artificial
  Synthetic oligonucleotide
aaactcgcgctcctcaggcatcagccggtggtctgcaaccgctttccgat

SEQ ID NO: 266320 - DNA, 54 bp, Artificial
  Synthetic oligonucleotide
cctttaactcggctatcttctcccgtagcccttcgagaatgccccgcaaaccgc

SEQ ID NO: 266321 - DNA, 50 bp, Artificial
  Synthetic oligonucleotide
aaccgcgcttcagattctgtgggcaactcgcgaaagtcaaacccgcgcta

SEQ ID NO: 266322 - DNA, 50 bp, Artificial
  Synthetic oligonucleotide
aacatagcgatcagcgttcagcactcggccctcagctacgggtgtggcca

SEQ ID NO: 266323 - DNA, 50 bp, Artificial
  Synthetic oligonucleotide
aaagctagccacggcgcatttacacgtcccggctccaatccggcagtcgg

SEQ ID NO: 266324 - DNA, 50 bp, Artificial
  Synthetic oligonucleotide
aattgtgtcttgcgccacgcacggactctaccaagggcagcagatcgcgt

SEQ ID NO: 266325 - DNA, 50 bp, Artificial
  Synthetic oligonucleotide
aaacccgtcagcctcatgaacgatccagacgcccgcctcctgtttccacc

SEQ ID NO: 266326 - DNA, 50 bp, Artificial
  Synthetic oligonucleotide
ccgagttcccctacagcgctggataaacctccggcaccgcagtcggtaac

SEQ ID NO: 266327 - DNA, 50 bp, Artificial
  Synthetic oligonucleotide
aaagtacagagtagcctttaagggaaagcccagcggctacggcaagggct

SEQ ID NO: 266328 - DNA, 50 bp, Artificial
  Synthetic oligonucleotide
tgtaatataaactaataggactgatatagaatgcgaagcataaaaggagc

SEQ ID NO: 266329 - DNA, 50 bp, Artificial
  Synthetic oligonucleotide
cggccacgcatcagtagtcgtaaagtataactcagatgattcagacggag

SEQ ID NO: 266330 - DNA, 50 bp, Artificial
  Synthetic oligonucleotide
ctcatatatggtcgggcgaagaacttggtgcaaaatttgacataacggac

SEQ ID NO: 266331 - DNA, 60 bp, Artificial
  Synthetic oligonucleotide
gatgcctggtgggcagcccagcgtcatgcctacatagagaagaacgacatccttctgtcc

SEQ ID NO: 266332 - DNA, 56 bp, Artificial
  Synthetic oligonucleotide
cgaaaacgggcacgttcacgtcgatatgacggaaccgaaagccgattgattcttgc

SEQ ID NO: 266333 - DNA, 50 bp, Artificial
  Synthetic oligonucleotide
aagcagtccaacggtactggacccaccggagcacccttgtgctggcgttg

SEQ ID NO: 266334 - DNA, 50 bp, Artificial
  Synthetic oligonucleotide
acaccccgcaagcgcagcttccatactcgcaatgccagcgcattcccacc

SEQ ID NO: 266335 - DNA, 50 bp, Artificial
  Synthetic oligonucleotide
aagcatgaaccctcttctggcgccgttcgatgatcacaccatcccgccgg

SEQ ID NO: 266336 - DNA, 50 bp, Artificial
  Synthetic oligonucleotide
aagcgcagcttccatactcgcaatgccagcgcattcccaccaacttggca

SEQ ID NO: 266337 - DNA, 50 bp, Artificial
  Synthetic oligonucleotide
aagcgcccgctacctctcacgccgcacgatcactcggggattcgtccaat

SEQ ID NO: 266338 - DNA, 50 bp, Artificial
  Synthetic oligonucleotide
aagcggatgggatatcgggagccaggccgctgagttggcgaacgggatcc

SEQ ID NO: 266339 - DNA, 50 bp, Artificial
  Synthetic oligonucleotide
aagcgggccctacgacagagctggcgattaccgcaatgggaccttccacg

SEQ ID NO: 266340 - DNA, 50 bp, Artificial
  Synthetic oligonucleotide
aagctccgggcgaatcccttcgaggcactgagggtaccatgagtagcggg

SEQ ID NO: 266341 - DNA, 50 bp, Artificial
  Synthetic oligonucleotide
aaggcgccctctggcattgtgctcccctgtctgtcgcccgctccccactt

SEQ ID NO: 266342 - DNA, 50 bp, Artificial
  Synthetic oligonucleotide
acccggcgccaacacgcatcccgctactggttgtactaccggacaggacg

SEQ ID NO: 266343 - DNA, 58 bp, Artificial
  Synthetic oligonucleotide
cgaatgcctcgacctgcggtacaagaagttccccatcacggacttggagaggatatcg

SEQ ID NO: 266344 - DNA, 50 bp, Artificial
  Synthetic oligonucleotide
acccgaacagcgccgtgaatctcccacgtcagactctattccagcgcccg

SEQ ID NO: 266345 - DNA, 50 bp, Artificial
  Synthetic oligonucleotide
aagggggtccatacgctcctggaagctgctcgcgtgctggctggggaatc

SEQ ID NO: 266346 - DNA, 50 bp, Artificial
  Synthetic oligonucleotide
acccatccaagaaccgggtgtgcggtgcgtgggggcagcggtcattccac

SEQ ID NO: 266347 - DNA, 50 bp, Artificial
  Synthetic oligonucleotide
accatctggcagccctctatgccgggaatcagaccccaccagccgaagag

SEQ ID NO: 266348 - DNA, 50 bp, Artificial
  Synthetic oligonucleotide
acagcgtctttgctcctcacggtcatggtgcgaccgggtacggcggtgat

SEQ ID NO: 266349 - DNA, 50 bp, Artificial
  Synthetic oligonucleotide
aagtggtcacgctcatgttgaagtacccgcgcgtggaacccggtcgcaac

SEQ ID NO: 266350 - DNA, 50 bp, Artificial
  Synthetic oligonucleotide
acaccgttgggacgtggaggtcccgcatgaggcgaacggcaagtggggct

SEQ ID NO: 266351 - DNA, 50 bp, Artificial
  Synthetic oligonucleotide
aaccgtgagcggaatctccggggcgtcaggatagcgcgtgtttcccttcg

SEQ ID NO: 266352 - DNA, 50 bp, Artificial
  Synthetic oligonucleotide
gacctgccactgtaggcttagaattacatgatcctaaagatctagataca

SEQ ID NO: 266353 - DNA, 50 bp, Artificial
  Synthetic oligonucleotide
gatccttccgggaagatctcacgataaaactcatacggctccaccggctc

SEQ ID NO: 266354 - DNA, 60 bp, Artificial
  Synthetic oligonucleotide
cgacgctttgcgcaaagcaggttgtgaaaggctgttcgaggataaggcatccggcatgaa

SEQ ID NO: 266355 - DNA, 50 bp, Artificial
  Synthetic oligonucleotide
aacgcgtggtcgacggatgatggcctgtaacgcaataccaagccgccgcc

SEQ ID NO: 266356 - DNA, 50 bp, Artificial
  Synthetic oligonucleotide
aacgctttcgaggctccgaaaaggccggtgagatatagcgcgtccgctcc

SEQ ID NO: 266357 - DNA, 50 bp, Artificial
  Synthetic oligonucleotide
agaaagcgttgatatgtgcgcttatctagctgaacgaactaaaaccgata

SEQ ID NO: 266358 - DNA, 50 bp, Artificial
  Synthetic oligonucleotide
actgattgtttaatactagtacttgaaaaacgcaataaaatgcgttccag

SEQ ID NO: 266359 - DNA, 50 bp, Artificial
  Synthetic oligonucleotide
acaattcgtcccgcgacctctggcccgaatcccggcagcttttggagctc

SEQ ID NO: 266360 - DNA, 50 bp, Artificial
  Synthetic oligonucleotide
aagacatggcgcctcgcatggaagtgctcggacgggaaatcgtagagcct

SEQ ID NO: 266361 - DNA, 50 bp, Artificial
  Synthetic oligonucleotide
ggattaaatagaccgaggccatatgaaaactcagctgacttgcagtatag

SEQ ID NO: 266362 - DNA, 50 bp, Artificial
  Synthetic oligonucleotide
accggtcggtcaggatgggcggtcgatacctctacacggtgacggctgtt

SEQ ID NO: 266363 - DNA, 50 bp, Artificial
  Synthetic oligonucleotide
aagcagacgggagggggcgatccagatcgattgtcagctcggtcgaggct

SEQ ID NO: 266364 - DNA, 50 bp, Artificial
  Synthetic oligonucleotide
accggggcgtatctgacaaacgatcacttcgtcctgccctccggtcgcca

SEQ ID NO: 266365 - DNA, 59 bp, Artificial
  Synthetic oligonucleotide
cgcccgacaccggaaatcgccgacgatgctgacgtaaagcaggcaatctcgtccgcttg

SEQ ID NO: 266366 - DNA, 50 bp, Artificial
  Synthetic oligonucleotide
accgcggcacgattaccttggcctgccgaccaacttgccacatctcccat

SEQ ID NO: 266367 - DNA, 50 bp, Artificial
  Synthetic oligonucleotide
accgcatctccacgaaatggctcccctgtccgccggctgaggacacactt

SEQ ID NO: 266368 - DNA, 50 bp, Artificial
  Synthetic oligonucleotide
accgcagccgagaagctccgcatcttgagactcgccgatgcctgcacggt

SEQ ID NO: 266369 - DNA, 56 bp, Artificial
  Synthetic oligonucleotide
cgccgcggagagtgcagcgaaacggaaaatgcgtgtccgacaaacgaacgtttcgc

SEQ ID NO: 266370 - DNA, 60 bp, Artificial
  Synthetic oligonucleotide
cgcgcaattctccgaggcgattgaagaacagtgcgcgggccaaggtgttctgggattcgc

SEQ ID NO: 266371 - DNA, 59 bp, Artificial
  Synthetic oligonucleotide
cggcgccgcgattgaaacattgtcgccagagaccgtcagtgattgggaaaagaaggcca

SEQ ID NO: 266372 - DNA, 52 bp, Artificial
  Synthetic oligonucleotide
cggggcccgcgagtttcttaacgactcgcgggcccttttcgctcggtcactc

SEQ ID NO: 266373 - DNA, 57 bp, Artificial
  Synthetic oligonucleotide
cggtatatttggcgaaatgagccatcgaaaacaccccctttcttggatgcgattata

SEQ ID NO: 266374 - DNA, 60 bp, Artificial
  Synthetic oligonucleotide
cgtatgtggatgccattctgcaaaagagtttagagatgggtatatcacagggctagcgga

SEQ ID NO: 266375 - DNA, 60 bp, Artificial
  Synthetic oligonucleotide
gattgccgtcgacgaagcatgtcgtccacggcttggactcgaaccagtcgagccagtagc

SEQ ID NO: 266376 - DNA, 60 bp, Artificial
  Synthetic oligonucleotide
gaccaaagcttacacgaccagccccatagagatttacgccgtgctagagccgctgcacaa

SEQ ID NO: 266377 - DNA, 58 bp, Artificial
  Synthetic oligonucleotide
gacaaccacttcaccgaggatgacgcactctccgcgattggggcgtactacgacccca

SEQ ID NO: 266378 - DNA, 55 bp, Artificial
  Synthetic oligonucleotide
gaaatgcctgtaaggtttagtaatggtgttgttaaggtatataatttgtatcgag

SEQ ID NO: 266379 - DNA, 55 bp, Artificial
  Synthetic oligonucleotide
gaaaaccgtttcctatgcctgaaactgcgtttcaggaacgcaggagcctagtaag

SEQ ID NO: 266380 - DNA, 56 bp, Artificial
  Synthetic oligonucleotide
cttcgtccttggcgtaagtcgctgaaggtcactcgcgttcctacgccttattcaac

SEQ ID NO: 266381 - DNA, 53 bp, Artificial
  Synthetic oligonucleotide
cttacggacggttttcggatcaaggccagtttcccggtgacagtcggccttgc

SEQ ID NO: 266382 - DNA, 54 bp, Artificial
  Synthetic oligonucleotide
ctgttgttacacccacttaatacaaaagacgccactaataccaaacataaaata

SEQ ID NO: 266383 - DNA, 60 bp, Artificial
  Synthetic oligonucleotide
ctgtcatcaatgacccactgcttcgtcctgcctttcccagacggtcttatctgggtggca

SEQ ID NO: 266384 - DNA, 55 bp, Artificial
  Synthetic oligonucleotide
ctgtactacgtcctcgaggaaccagccgacctttacccgaacaccaagagcctgc

SEQ ID NO: 266385 - DNA, 59 bp, Artificial
  Synthetic oligonucleotide
ctgacactacgtgaaacctctcacgtttttgaggtggatggccgtcatttgtacacatg

SEQ ID NO: 266386 - DNA, 60 bp, Artificial
  Synthetic oligonucleotide
gcaacccatcacgcgcatatattggtgtccgcgctcgatccttgaagcagacggtttcgt

SEQ ID NO: 266387 - DNA, 55 bp, Artificial
  Synthetic oligonucleotide
ctctaaaaggcgataactgattgtctaatactagtacttgaaaaacgcaataaaa

SEQ ID NO: 266388 - DNA, 60 bp, Artificial
  Synthetic oligonucleotide
ctccgtcagaacggtcaggccgtccgactgcgcgaccgctccgcagtcttgccattcgcc

SEQ ID NO: 266389 - DNA, 60 bp, Artificial
  Synthetic oligonucleotide
ctagagctcgcgcagaaggccatcggctgggataccggtgtcgaggagtactggaaacgc

SEQ ID NO: 266390 - DNA, 60 bp, Artificial
  Synthetic oligonucleotide
cgttattagcttaattgcagaactgacatagaatgcgaagcataagaggagcgaagctcc

SEQ ID NO: 266391 - DNA, 60 bp, Artificial
  Synthetic oligonucleotide
cgtgtctggctgatcaaacgcgtctggctccgtgcgcatggttcacacttgggttgaagc

SEQ ID NO: 266392 - DNA, 54 bp, Artificial
  Synthetic oligonucleotide
cgtgtcgatagttgcctgtaaaacgcaaactaaatcgccaacttcgtggttttc

SEQ ID NO: 266393 - DNA, 59 bp, Artificial
  Synthetic oligonucleotide
tctagtttattttgacatccacagcggcagatatattccaatagttcggggaaatccaa

SEQ ID NO: 266394 - DNA, 60 bp, Artificial
  Synthetic oligonucleotide
tctataactgctctaaatgcgtctctatcggcgtttagagcttcgtttgcgtctttatat

SEQ ID NO: 266395 - DNA, 60 bp, Artificial
  Synthetic oligonucleotide
tctctctagccttgatgatcgcatggcagacttttgaaacgtccttcaacggcgtctgca

SEQ ID NO: 266396 - DNA, 60 bp, Artificial
  Synthetic oligonucleotide
tctgttccggctcctgctgatccgctccactctccccggaaagaagctgttgcttcattg

SEQ ID NO: 266397 - DNA, 55 bp, Artificial
  Synthetic oligonucleotide
gcacgagcttgaaccgctgcgccccgtcggcgaaaacgggttcctcgcaaaatcg

SEQ ID NO: 266398 - DNA, 56 bp, Artificial
  Synthetic oligonucleotide
tcttcccgtttcgccgcggagagtgcagcgaaacggaaaatgcgtgtccgacaaac

SEQ ID NO: 266399 - DNA, 58 bp, Artificial
  Synthetic oligonucleotide
tctttaatatccaattggctagctgtactcaaaataataacgatagtttatgaaagcg

SEQ ID NO: 266400 - DNA, 60 bp, Artificial
  Synthetic oligonucleotide
tgaaggtctcaaactggtggcacagactttttcgaaggatgtgacacagctatcgtgctg

SEQ ID NO: 266401 - DNA, 56 bp, Artificial
  Synthetic oligonucleotide
tgatgtagaaagcgccgtactggtcagaggtgaaccggtagaatttggcgccgggg

SEQ ID NO: 266402 - DNA, 60 bp, Artificial
  Synthetic oligonucleotide
tgcacgacatttagataacgtctgtgatgtataaatagtcaaaagccgtcttaaagtaga

SEQ ID NO: 266403 - DNA, 60 bp, Artificial
  Synthetic oligonucleotide
tgcgcaggtcgggtgaatgcgagcgcaccgaggtggctgactttgaactttcggagttct

SEQ ID NO: 266404 - DNA, 60 bp, Artificial
  Synthetic oligonucleotide
tgcgtttaaagtgagttgtgtctggtgctaccagcagattgcccttcgagtgggggcact

SEQ ID NO: 266405 - DNA, 60 bp, Artificial
  Synthetic oligonucleotide
tggaagaactctctctggcggtcagctcccagagcgtccattgtctcattgtccgaggtc

SEQ ID NO: 266406 - DNA, 60 bp, Artificial
  Synthetic oligonucleotide
tggatcacccatgtgtgcttgaatgcgtggagtgccgggggtataaggaaagaggtgccg

SEQ ID NO: 266407 - DNA, 60 bp, Artificial
  Synthetic oligonucleotide
tggcgcgttcgaaccttgagattctgagcgaggatgccggtcatgcgttgcaaggtcggc

SEQ ID NO: 266408 - DNA, 60 bp, Artificial
  Synthetic oligonucleotide
gcactcggagcgtgtgtcactccgttcactctgtccgcttttgccttagcccaagccatt

SEQ ID NO: 266409 - DNA, 57 bp, Artificial
  Synthetic oligonucleotide
tggctgactgacaacaaaataataacgatagtttatgaaagcgtaaaaagctaagac

SEQ ID NO: 266410 - DNA, 60 bp, Artificial
  Synthetic oligonucleotide
tttggctcccgccgtgtatgtcatattgctttgagcgtctaagtctatggaaagtacaga

SEQ ID NO: 266411 - DNA, 60 bp, Artificial
  Synthetic oligonucleotide
tttgatgggcttctgaaaggctctgacgggcattttcaagctgcccctcgatagaaagcc

SEQ ID NO: 266412 - DNA, 58 bp, Artificial
  Synthetic oligonucleotide
tttgacatccacagcggcagatatattccaatagttcggggaaatccaaacccaattc

SEQ ID NO: 266413 - DNA, 57 bp, Artificial
  Synthetic oligonucleotide
tttcgccctgtaaggtgtctttcctgtcctgcatggtagaaagctcctgtttgaccg

SEQ ID NO: 266414 - DNA, 60 bp, Artificial
  Synthetic oligonucleotide
ttgttgctgaggcagggtccggacgcattctcggagtccaggctgtgacaccggaagcag

SEQ ID NO: 266415 - DNA, 60 bp, Artificial
  Synthetic oligonucleotide
ttgttctcatcggacagaacttccgctctattctgagaggctttcagatccgttttggtg

SEQ ID NO: 266416 - DNA, 60 bp, Artificial
  Synthetic oligonucleotide
ttgttcgttttgctgtcatgtgcatttctttgcgtctccgtctattgcaaattcgtgggc

SEQ ID NO: 266417 - DNA, 60 bp, Artificial
  Synthetic oligonucleotide
ttgaccgtttcaaggcttctggcggcttctgaaagctcctgtttgcagtcctctgcaagc

SEQ ID NO: 266418 - DNA, 60 bp, Artificial
  Synthetic oligonucleotide
ttctaagatcatgattcgggcagcgcatatcgctcatctgcgacgcgaaagtccttttga

SEQ ID NO: 266419 - DNA, 58 bp, Artificial
  Synthetic oligonucleotide
gcagaagcaatggtttcactgcgaactccggatacttcgcccgacattcgttgttcgt

SEQ ID NO: 266420 - DNA, 60 bp, Artificial
  Synthetic oligonucleotide
ttcgtcctttgccctctcatagtgcttgctcaaatgccccgcagcagcggcggtatattt

SEQ ID NO: 266421 - DNA, 55 bp, Artificial
  Synthetic oligonucleotide
ttaaacagtttgcctaaaaaatcatcgctaatggttaattgatactgtttttcaa

SEQ ID NO: 266422 - DNA, 60 bp, Artificial
  Synthetic oligonucleotide
tgtgttatcggcatgaccccgatatgcaggtgtggtgtagtctcgtccatgtggacggtg

SEQ ID NO: 266423 - DNA, 57 bp, Artificial
  Synthetic oligonucleotide
tgtgagactatgtaccggaagcttgaaaatcccggataaagcccgctttggcaatgt

SEQ ID NO: 266424 - DNA, 60 bp, Artificial
  Synthetic oligonucleotide
tgtagatttcgtgatgcgcaacgtgcagttggaggtgttgcgcattcatcaacgcagtac

SEQ ID NO: 266425 - DNA, 58 bp, Artificial
  Synthetic oligonucleotide
tggtaatgtctcccgcccgtactctgttcagtagatcggctaaagcggttactatgcc

SEQ ID NO: 266426 - DNA, 58 bp, Artificial
  Synthetic oligonucleotide
ggtacccagtattcgattgcgaattggaaccaggaccagactctagacagtgcgttta

SEQ ID NO: 266427 - DNA, 60 bp, Artificial
  Synthetic oligonucleotide
gtaagctgtgggaagagaagcgctatgctgcaggatgttgcgtctgtaaagattgaagag

SEQ ID NO: 266428 - DNA, 56 bp, Artificial
  Synthetic oligonucleotide
gtaatgccgaaaagtagttattaaggcgagtgtcaacctaagtcggagactgttga

SEQ ID NO: 266429 - DNA, 59 bp, Artificial
  Synthetic oligonucleotide
gtacaatttcactagtgggactcgtcactaccagaggtagtgcgcacttcgcagtactt

SEQ ID NO: 266430 - DNA, 50 bp, Artificial
  Synthetic oligonucleotide
aaagggccccaattagaaccaccattgaaagggccccagttgttaccacc

SEQ ID NO: 266431 - DNA, 55 bp, Artificial
  Synthetic oligonucleotide
cttgtatgcgtatgactcagtaccaacaatggtgcgtcgcattaacaataccttt

SEQ ID NO: 266432 - DNA, 50 bp, Artificial
  Synthetic oligonucleotide
gagttacaacgcgtgatgtaacgccagaagcaacacatatcgtatgtgaa

SEQ ID NO: 266433 - DNA, 50 bp, Artificial
  Synthetic oligonucleotide
atcgatagcggttgcccccgggtcactgtaggtcgcacccactgagacgg

SEQ ID NO: 266434 - DNA, 50 bp, Artificial
  Synthetic oligonucleotide
atcaagcctgtcgcagcctggcactctaccagaccaacagctgcccctat

SEQ ID NO: 266435 - DNA, 50 bp, Artificial
  Synthetic oligonucleotide
atagggccccggtcattccgtggtatttccccttgccaggccgatagcca

SEQ ID NO: 266436 - DNA, 50 bp, Artificial
  Synthetic oligonucleotide
atagagcgcacgcaccgtcactgcgtcgttgagcggggtaaagaggcgat

SEQ ID NO: 266437 - DNA, 55 bp, Artificial
  Synthetic oligonucleotide
ctcgtttaaaagtagttggttctgcaggtggtgatgctaaggtgactgctgtcgt

SEQ ID NO: 266438 - DNA, 52 bp, Artificial
  Synthetic oligonucleotide
ctcgttaaccgaacctagtacgattttagcctgagtaaagtaccgctttaga

SEQ ID NO: 266439 - DNA, 55 bp, Artificial
  Synthetic oligonucleotide
ctcagactcggctagcttttgcgtaacatgtaaggctttcctatcagcgttaagt

SEQ ID NO: 266440 - DNA, 55 bp, Artificial
  Synthetic oligonucleotide
cgggtcgggcgtgtcatgatcagggagacgttgcatgaatctgagtcttgcccac

SEQ ID NO: 266441 - DNA, 55 bp, Artificial
  Synthetic oligonucleotide
cgatagggcatcaattatgctcccggttgtagtcggtgtatgcgcccttcatcca

SEQ ID NO: 266442 - DNA, 55 bp, Artificial
  Synthetic oligonucleotide
cgacaattcaccctgtagcacggcccctaaacctgcgaacacctcatcagggcgc

SEQ ID NO: 266443 - DNA, 55 bp, Artificial
  Synthetic oligonucleotide
cgaaccatcgataggtgatcaatggatctccgagacacgacaaatcacggctatg

SEQ ID NO: 266444 - DNA, 55 bp, Artificial
  Synthetic oligonucleotide
cctttgagacgacaaaaggtaacgcgggaatgggcattggtgtctatgaaagccg

SEQ ID NO: 266445 - DNA, 55 bp, Artificial
  Synthetic oligonucleotide
ccttacccacagtactcggagaagctgtctgtccatgcgtgcgagacaacatcgg

SEQ ID NO: 266446 - DNA, 56 bp, Artificial
  Synthetic oligonucleotide
ccgaattatggattgcgccacccacccgaatggacgaaacgcaacttagggcagaa

SEQ ID NO: 266447 - DNA, 55 bp, Artificial
  Synthetic oligonucleotide
cctgcctctgatctaaaactaggtgtatgcgccacaaacttaagcggtaaatcgc

SEQ ID NO: 266448 - DNA, 55 bp, Artificial
  Synthetic oligonucleotide
cctgatgcgggaattgccctactattacgatacaaactcacaattcgtacccatg

SEQ ID NO: 266449 - DNA, 55 bp, Artificial
  Synthetic oligonucleotide
ccgaatctaattcacgtaaaactcgatattcgcgcgctttgtccagtacagtact

SEQ ID NO: 266450 - DNA, 55 bp, Artificial
  Synthetic oligonucleotide
tggctacctttagatcaggaaaagtacaagtggctaacaacggggttgttatgcg

SEQ ID NO: 266451 - DNA, 55 bp, Artificial
  Synthetic oligonucleotide
tgagtttacatataagcccttgccttggtaacttgataattcggcaccatctgag

SEQ ID NO: 266452 - DNA, 55 bp, Artificial
  Synthetic oligonucleotide
tctgtaacctcatccgtgagtgtcggcagccccgcggcatttaggcgggtctcgt

SEQ ID NO: 266453 - DNA, 55 bp, Artificial
  Synthetic oligonucleotide
tattctgcgccggagtgggtgtggagcatccggatatcaccaatgcctcccgccg

SEQ ID NO: 266454 - DNA, 55 bp, Artificial
  Synthetic oligonucleotide
tatcgtcgtgcttataatattgaaccaaacatgtgttgggagtgttattcgtgtg

SEQ ID NO: 266455 - DNA, 55 bp, Artificial
  Synthetic oligonucleotide
taatgcacctagttcggctcggaaatccacattggttgctccttacatcgaccac

SEQ ID NO: 266456 - DNA, 55 bp, Artificial
  Synthetic oligonucleotide
gtggcgagctacatattgatcaagagtgtcgtgttcggttgatgcaataccgacg

SEQ ID NO: 266457 - DNA, 56 bp, Artificial
  Synthetic oligonucleotide
gcgtaaagtaacactaggacctatttatccatatgcaaaacatcaaccaacaaaat

SEQ ID NO: 266458 - DNA, 55 bp, Artificial
  Synthetic oligonucleotide
gtatttatagcagagagcgggagggagcgcaagctgtctgggtccgtggcggctg

SEQ ID NO: 266459 - DNA, 55 bp, Artificial
  Synthetic oligonucleotide
ggtcgtccaattgaaggcgacccaagtgatggatttagtctgcagcctgttgcag

SEQ ID NO: 266460 - DNA, 55 bp, Artificial
  Synthetic oligonucleotide
ggtcgccacacttgtgaatcattaggggattattgtgcagggccaaatcacgtac

SEQ ID NO: 266461 - DNA, 55 bp, Artificial
  Synthetic oligonucleotide
gggtaagctaatctaatgctatccgttgttacatagccttcgtgagtttgtaact

SEQ ID NO: 266462 - DNA, 55 bp, Artificial
  Synthetic oligonucleotide
ggggcacgaacctccaattattagctggttgcactgcaggattgtaggcggcaga

SEQ ID NO: 266463 - DNA, 55 bp, Artificial
  Synthetic oligonucleotide
gggcaataattttgcgtgttattttaaagtcaggggcgctattgtttgtattcac

SEQ ID NO: 266464 - DNA, 55 bp, Artificial
  Synthetic oligonucleotide
ggcgcacagtatgattctatggccgatatgatttcattcggcgtagctcctgcac

SEQ ID NO: 266465 - DNA, 55 bp, Artificial
  Synthetic oligonucleotide
ggaggatagggcggcacaattaaccttgaccattggcccctgggctcggagactg

SEQ ID NO: 266466 - DNA, 55 bp, Artificial
  Synthetic oligonucleotide
ggagccaaatgaaggctcattgtcggttaattcatcccgtaaagcctttgctagt

SEQ ID NO: 266467 - DNA, 55 bp, Artificial
  Synthetic oligonucleotide
gctaaggcattggtattgtaaggcaagttaaatgaagtattcgttatcagcgagc

SEQ ID NO: 266468 - DNA, 54 bp, Artificial
  Synthetic oligonucleotide
cattagataacccaataaagaaagattcacaccttagaattttgcgtggtaacc

SEQ ID NO: 266469 - DNA, 55 bp, Artificial
  Synthetic oligonucleotide
gcggtaagcataaataggtagtcatatgattaagcttttggctaggacaaatgtg

SEQ ID NO: 266470 - DNA, 55 bp, Artificial
  Synthetic oligonucleotide
gcctcgaatgatcaggcgcgcgttatgttggccgactcttatctcgcagtcgggg

SEQ ID NO: 266471 - DNA, 55 bp, Artificial
  Synthetic oligonucleotide
gattctggcactaaagcaattgtctcgatgggtacgacaggtgagagtgcaacgc

SEQ ID NO: 266472 - DNA, 55 bp, Artificial
  Synthetic oligonucleotide
ataggcttggcaagagtagcaggttcaagcatattatgtccgccagtgttgctta

SEQ ID NO: 266473 - DNA, 55 bp, Artificial
  Synthetic oligonucleotide
atcaacagtatccagtctggagacgactcggagacctccttttcgtcagtgggtg

SEQ ID NO: 266474 - DNA, 55 bp, Artificial
  Synthetic oligonucleotide
atgttaacgcctttaagttggttggagcgtgtaccctcatataaggatcaacagc

SEQ ID NO: 266475 - DNA, 55 bp, Artificial
  Synthetic oligonucleotide
ccacttcagccaatcgtagtagacatgcagtcttggatacgggttgatcgctctc

SEQ ID NO: 266476 - DNA, 54 bp, Artificial
  Synthetic oligonucleotide
aggcagattaaacaaacttttagtcattcagtcggaatctttattctcccgcct

SEQ ID NO: 266477 - DNA, 55 bp, Artificial
  Synthetic oligonucleotide
caacgaacctatctcattgatatgcttaatcggtctaggtcgatggttgatactt

SEQ ID NO: 266478 - DNA, 55 bp, Artificial
  Synthetic oligonucleotide
caaggttcgccattgggttggtaatggcgtgccaaaattggtagaaaggtcactg

SEQ ID NO: 266479 - DNA, 55 bp, Artificial
  Synthetic oligonucleotide
gattaccagatgggtttaaactaatcgcttctacagatagctgtaatatagcagg

SEQ ID NO: 266480 - DNA, 55 bp, Artificial
  Synthetic oligonucleotide
accgccggaagaatccggagcactatccgccgatgtatcgttgtgtggcaggcga

SEQ ID NO: 266481 - DNA, 54 bp, Artificial
  Synthetic oligonucleotide
ccaatgaaacctattactaaatacggtggtatgccacaaccaacaggttgtgtt

SEQ ID NO: 266482 - DNA, 55 bp, Artificial
  Synthetic oligonucleotide
cacactcgttggagatggacttaagggtatgattccagtattaattgcccattac

SEQ ID NO: 266483 - DNA, 55 bp, Artificial
  Synthetic oligonucleotide
catctcatggaggcgttccccaaactggtgaacagtcaggttgaggaggcggtaa

SEQ ID NO: 266484 - DNA, 55 bp, Artificial
  Synthetic oligonucleotide
agatttagcgactagcgaataattctgtcggtcgaagcataagcaagccggcact

SEQ ID NO: 266485 - DNA, 55 bp, Artificial
  Synthetic oligonucleotide
cacggtggattggtgggcctcccatataaccagggaccatttcaaacaactaggc

SEQ ID NO: 266486 - DNA, 55 bp, Artificial
  Synthetic oligonucleotide
agatgtatgccaaccttcctctgcatcaataggcccattagacaatctaaacgct

SEQ ID NO: 266487 - DNA, 54 bp, Artificial
  Synthetic oligonucleotide
cgtcattgtgccgattaattataacaagtccactcgtgtgaaagcattgtctga

SEQ ID NO: 266488 - DNA, 54 bp, Artificial
  Synthetic oligonucleotide
ttcacgactaagttcgctaaatttagtgcggtcaaattctggaaagtacgtatc

SEQ ID NO: 266489 - DNA, 54 bp, Artificial
  Synthetic oligonucleotide
acgctatgaagtaaaacgtaatatccactctatgatgtggtctttacccgctac

SEQ ID NO: 266490 - DNA, 55 bp, Artificial
  Synthetic oligonucleotide
gagtggtttgatgtacggcttcgtaagtgagtgtacctgagcgtgatatgacgcc

SEQ ID NO: 266491 - DNA, 53 bp, Artificial
  Synthetic oligonucleotide
aacaactgacactccagcggatagggttctggcccaccattatgtacccagcg

SEQ ID NO: 266492 - DNA, 53 bp, Artificial
  Synthetic oligonucleotide
gtccgttggaatgctatggtaatggtagtaaaggctaatcagttgccgtatga

SEQ ID NO: 266493 - DNA, 52 bp, Artificial
  Synthetic oligonucleotide
ggggcgaattagcagctatggttcttattgatacggttagtcggcaaatccc

SEQ ID NO: 266494 - DNA, 52 bp, Artificial
  Synthetic oligonucleotide
tcggtgggttcttcgtatcccaacggatgctgcagatgttccgcaaataaag

SEQ ID NO: 266495 - DNA, 52 bp, Artificial
  Synthetic oligonucleotide
cttatccagttacgacaaacttgatagcgtacacatttcagtagatcctgac

SEQ ID NO: 266496 - DNA, 52 bp, Artificial
  Synthetic oligonucleotide
tagggtatgagtattgatagcgccaacgacttggttgttgtcatcaacgacg

SEQ ID NO: 266497 - DNA, 52 bp, Artificial
  Synthetic oligonucleotide
gtgtctgccaatgggcgtgtttgcacaagatattaacggcgctgatacggct

SEQ ID NO: 266498 - DNA, 52 bp, Artificial
  Synthetic oligonucleotide
gttgggccgcagggatgcgttcagaacttcgacatacttttcacggtcggct

SEQ ID NO: 266499 - DNA, 51 bp, Artificial
  Synthetic oligonucleotide
tatcactcacattatcaccgatcacaaaaggagggtaacgtctaagtaccg

SEQ ID NO: 266500 - DNA, 51 bp, Artificial
  Synthetic oligonucleotide
acgcaacctgttcgactccggcatcatctgggccgatccaagcctacgcat

SEQ ID NO: 266501 - DNA, 55 bp, Artificial
  Synthetic oligonucleotide
gagtgcgtaataatcggtgtgccaaactatgaaatgttccagtccacatacttgt

SEQ ID NO: 266502 - DNA, 51 bp, Artificial
  Synthetic oligonucleotide
tcagatcacctatggggtggatcaggacaatgatggttctgccgatcgata

SEQ ID NO: 266503 - DNA, 51 bp, Artificial
  Synthetic oligonucleotide
ggggttgagtgtgacggggatcaagttaacggcacaatttggggtagaaaa

SEQ ID NO: 266504 - DNA, 51 bp, Artificial
  Synthetic oligonucleotide
aactgcccattaagtctgtcgattgggtcccgctgcatctcaacagaaacc

SEQ ID NO: 266505 - DNA, 51 bp, Artificial
  Synthetic oligonucleotide
tacccgcttatccacacccactgcactggaacagagcgcgccaacagactg

SEQ ID NO: 266506 - DNA, 51 bp, Artificial
  Synthetic oligonucleotide
ggcactaataccgtatcgccactacccacaactgcctgtgctagattagac

SEQ ID NO: 266507 - DNA, 50 bp, Artificial
  Synthetic oligonucleotide
aagtcgggatcttgctgctctcccagtgcggagattcgccaaccctccgg

SEQ ID NO: 266508 - DNA, 50 bp, Artificial
  Synthetic oligonucleotide
aggctggggagttaggacgctgccctgtggggtattgcagacccaccccg

SEQ ID NO: 266509 - DNA, 50 bp, Artificial
  Synthetic oligonucleotide
agtggcgtggccacaaccagcggccatccgaccagaatacatcagtggca

SEQ ID NO: 266510 - DNA, 55 bp, Artificial
  Synthetic oligonucleotide
gactaatatgtgaggggttagcttagcatcctccgtccatgcgtgataagccctg

SEQ ID NO: 266511 - DNA, 50 bp, Artificial
  Synthetic oligonucleotide
atacgggagggccagagcgccatccccctaggaaccgcgcccggcagaag

SEQ ID NO: 266512 - DNA, 50 bp, Artificial
  Synthetic oligonucleotide
ccccgctctcaacctgttacaggagtggctgacttcggtggctgatgccc

SEQ ID NO: 266513 - DNA, 50 bp, Artificial
  Synthetic oligonucleotide
cccctggcacgtctgaaaaagcagcgaccaatcgctcgaccaaaccggcg

SEQ ID NO: 266514 - DNA, 50 bp, Artificial
  Synthetic oligonucleotide
cccggcctcctacggcggtaatgcacggatcaagccactgctggcgaatc

SEQ ID NO: 266515 - DNA, 50 bp, Artificial
  Synthetic oligonucleotide
ccacctgtgcccatcggttccgatgtgccgccatactgattgtgccgacc

SEQ ID NO: 266516 - DNA, 50 bp, Artificial
  Synthetic oligonucleotide
ccgcgcattctccaacatgcaccgcgacaggtcaaggctggacgcaggta

SEQ ID NO: 266517 - DNA, 50 bp, Artificial
  Synthetic oligonucleotide
ccgctgccttctaacgcccgagcgactccggttggacgaacctcgcgcct

SEQ ID NO: 266518 - DNA, 50 bp, Artificial
  Synthetic oligonucleotide
ccgtcatactcaactcccagtgcgattttcatcttgtctatgccgcaaca

SEQ ID NO: 266519 - DNA, 50 bp, Artificial
  Synthetic oligonucleotide
catttgaccctggtgcgtaacagtcggctctggccgccgggtcggtacag

SEQ ID NO: 266520 - DNA, 50 bp, Artificial
  Synthetic oligonucleotide
cagtcagaccctccacattaccgtttgccggggcgtagacatggcgcagg

SEQ ID NO: 266521 - DNA, 55 bp, Artificial
  Synthetic oligonucleotide
gaaacccctcccaaaatcgttgaacccaaggcgatatgcaggctatctgatagga

SEQ ID NO: 266522 - DNA, 50 bp, Artificial
  Synthetic oligonucleotide
cgaatcagcggcgactcctgcgagctcttgtcttcgaccattggcgaggc

SEQ ID NO: 266523 - DNA, 50 bp, Artificial
  Synthetic oligonucleotide
cagcggccatccgaccagaatacatcagtggcaccctacaggcgtggact

SEQ ID NO: 266524 - DNA, 50 bp, Artificial
  Synthetic oligonucleotide
cgaccggcagagcctggtgttccgccccttctaccgctgggactcagccg

SEQ ID NO: 266525 - DNA, 50 bp, Artificial
  Synthetic oligonucleotide
cgagagtcgatgctgggatgggagtgatcggctctgcaacttcggggcag

SEQ ID NO: 266526 - DNA, 50 bp, Artificial
  Synthetic oligonucleotide
cagccctcgcgagtcccctgttgcaggaccaccccgtcaggaatatgcag

SEQ ID NO: 266527 - DNA, 50 bp, Artificial
  Synthetic oligonucleotide
cagagcgccatccccctaggaaccgcgcccggcagaagtggctagcgtca

SEQ ID NO: 266528 - DNA, 50 bp, Artificial
  Synthetic oligonucleotide
cactttcgtgccagttaccaccgcgccgtccttaggctgcaccgtggtct

SEQ ID NO: 266529 - DNA, 50 bp, Artificial
  Synthetic oligonucleotide
cacccttggcgagggggcgatgcttgctctgttgattgtgccagctgatc

SEQ ID NO: 266530 - DNA, 50 bp, Artificial
  Synthetic oligonucleotide
caatcgcatgatccgcactggcgaaccatttgccgtaccaccctcggtgc

SEQ ID NO: 266531 - DNA, 50 bp, Artificial
  Synthetic oligonucleotide
caacacaaggggcgttacatacctcataaaccttaacgggttcctagtac

SEQ ID NO: 266532 - DNA, 55 bp, Artificial
  Synthetic oligonucleotide
acgacgcctgcgttaatggagagcaacgctccgagccccaactcttgccggttgc

SEQ ID NO: 266533 - DNA, 52 bp, Artificial
  Synthetic oligonucleotide
cggcattcgaaacctacgagtcggacttccctggtcgttcggttaaccagcc

SEQ ID NO: 266534 - DNA, 55 bp, Artificial
  Synthetic oligonucleotide
cgtagacagtgttgcccacaatgacctgatcccagacgaccccatcaatttgggg

SEQ ID NO: 266535 - DNA, 55 bp, Artificial
  Synthetic oligonucleotide
cgtgtccgcgcgtgggagcacagagagtgacggatgcgcgtcgtaaacttttggc

SEQ ID NO: 266536 - DNA, 55 bp, Artificial
  Synthetic oligonucleotide
gacacctccggaccagagattgcgttcgccgcaaagactcctacaagcggccggt

SEQ ID NO: 266537 - DNA, 55 bp, Artificial
  Synthetic oligonucleotide
ttgacttgccctgcgagcgtgtagacctctcgaggggacccacccgatccgtaga

SEQ ID NO: 266538 - DNA, 55 bp, Artificial
  Synthetic oligonucleotide
tggcgccgagagcaatcacatagagtgcgatccagtagatgcgttgcgcggttcc

SEQ ID NO: 266539 - DNA, 55 bp, Artificial
  Synthetic oligonucleotide
tcgcttgttgggtagagtcacctcttcgagtgggcccttcgcattgctggtgact

SEQ ID NO: 266540 - DNA, 55 bp, Artificial
  Synthetic oligonucleotide
taacccgctccacagcactcttcgctccgggcggcacccacggatagctcgagtg

SEQ ID NO: 266541 - DNA, 55 bp, Artificial
  Synthetic oligonucleotide
gtcaaactcgcgggtccacgtttcgaagagtgcgctttcgggttcgcgctgggtc

SEQ ID NO: 266542 - DNA, 55 bp, Artificial
  Synthetic oligonucleotide
gcgcgatcgagtcgagggagtcgaagactgcttgacggttggctggagtgtcctt

SEQ ID NO: 266543 - DNA, 55 bp, Artificial
  Synthetic oligonucleotide
atgactgatcgcgattgccgctacagcgaacaccagcgggccacgaccccgcact

SEQ ID NO: 266544 - DNA, 55 bp, Artificial
  Synthetic oligonucleotide
gcacgcgcggtcatctcttgcacgttgagcactgaacgcagctggcccggaatct

SEQ ID NO: 266545 - DNA, 55 bp, Artificial
  Synthetic oligonucleotide
gcaccccagacgggtcgagcgccttcctctacacgtcgtcactcgactacaacga

SEQ ID NO: 266546 - DNA, 55 bp, Artificial
  Synthetic oligonucleotide
gagcaatctcagcgatttccctcaacggatcaaaagatccgctatttacgttgcc

SEQ ID NO: 266547 - DNA, 54 bp, Artificial
  Synthetic oligonucleotide
taaacccgagaactgaaacttctaccatgggcatgtcgaatggcacgagcccaa

SEQ ID NO: 266548 - DNA, 54 bp, Artificial
  Synthetic oligonucleotide
caactctcgaaagcacctcccctcgcgattggcacggttgcgcgaattagacgg

SEQ ID NO: 266549 - DNA, 54 bp, Artificial
  Synthetic oligonucleotide
gagtcacggatgtacacaagtcttatggccgaggccccaaccgattcgatgcac

SEQ ID NO: 266550 - DNA, 53 bp, Artificial
  Synthetic oligonucleotide
cccagcagagcgcagacttctcactcgtcgaagggttacgagcaccgctatta

SEQ ID NO: 266551 - DNA, 53 bp, Artificial
  Synthetic oligonucleotide
tggcgagggcattcgcttcggggcgtgggttagggctgatgacgaggaacgac

SEQ ID NO: 266552 - DNA, 52 bp, Artificial
  Synthetic oligonucleotide
gtgactatttcactggccggggcatccgtggttggctttcacgtgcattctt

SEQ ID NO: 266553 - DNA, 52 bp, Artificial
  Synthetic oligonucleotide
ccgtgacggttagttctcgcgaattggaggtctctggccaacgcacccgtgt

SEQ ID NO: 266554 - DNA, 55 bp, Artificial
  Synthetic oligonucleotide
caccgggaatccggtcgacgcggctagtccgacaaatcgagtcactctcgacgga

SEQ ID NO: 266555 - DNA, 51 bp, Artificial
  Synthetic oligonucleotide
tgagtgatgctcgataggatgagggcactcacttggaggctcagatgttcg

SEQ ID NO: 266556 - DNA, 50 bp, Artificial
  Synthetic oligonucleotide
acacgcggctacaactagattcccgtgagcgagtggccccactagtgccg

SEQ ID NO: 266557 - DNA, 50 bp, Artificial
  Synthetic oligonucleotide
acaaaggtaaggtctgcggcgttggagagagtcccgtaggcggctcgcgc

SEQ ID NO: 266558 - DNA, 50 bp, Artificial
  Synthetic oligonucleotide
aatttgagagacgcaccgggtcgacttggcccctcaacgttgggcaggtc

SEQ ID NO: 266559 - DNA, 50 bp, Artificial
  Synthetic oligonucleotide
aattgaccaccactgcggagccgatcccgtctgggtaacccggatgtacc

SEQ ID NO: 266560 - DNA, 50 bp, Artificial
  Synthetic oligonucleotide
aagacgtttcggacggcggagcgtaggcccacgtggctttttgcgacggg

SEQ ID NO: 266561 - DNA, 50 bp, Artificial
  Synthetic oligonucleotide
aagaccggcgaatgtctcatcacgtgtttccgcgctaacccctccccaga

SEQ ID NO: 266562 - DNA, 50 bp, Artificial
  Synthetic oligonucleotide
aagacagcccgaacctgtctccggggtgtacctaccttgggagtgcagcg

SEQ ID NO: 266563 - DNA, 50 bp, Artificial
  Synthetic oligonucleotide
aacttgcgggcacccacagtgtcgcttatccctgtatgccaccccgccgc

SEQ ID NO: 266564 - DNA, 50 bp, Artificial
  Synthetic oligonucleotide
aacgcgctcgataccaagccccagtcatctgggtagtcctaggcaccgcg

SEQ ID NO: 266565 - DNA, 55 bp, Artificial
  Synthetic oligonucleotide
cccgatccgcaatgagtatttcggagcgagtctgagagccttttgagtcggggcc

SEQ ID NO: 266566 - DNA, 50 bp, Artificial
  Synthetic oligonucleotide
aacgccggaccgcactggcagtccaagctgggcagcgtaaccctctaagt

SEQ ID NO: 266567 - DNA, 50 bp, Artificial
  Synthetic oligonucleotide
aacgccctgcgtgctggctacgggttggtgtgtcggatttcggatgtcgc

SEQ ID NO: 266568 - DNA, 50 bp, Artificial
  Synthetic oligonucleotide
aacgatcgcggtgcaagaggctctacaggacgggctatcgtcgtcgctcg

SEQ ID NO: 266569 - DNA, 50 bp, Artificial
  Synthetic oligonucleotide
aacaatgagagtgatccactcagcggcaccccaccgtgattccctcgccc

SEQ ID NO: 266570 - DNA, 50 bp, Artificial
  Synthetic oligonucleotide
aaattggtcggctccaagagacgcgcgccaaggggaaagcttaccgtgcc

SEQ ID NO: 266571 - DNA, 50 bp, Artificial
  Synthetic oligonucleotide
aaatctggtggccgaaccgaggtgccacgtcagcatcgggctgcgccgca

SEQ ID NO: 266572 - DNA, 50 bp, Artificial
  Synthetic oligonucleotide
aaatcgcccacgatggttggccaaggatctagccgattgcccgcaagcat

SEQ ID NO: 266573 - DNA, 50 bp, Artificial
  Synthetic oligonucleotide
aaagggttcaagccgcgccccaaactttgaggcagtacgacgcacccctt

SEQ ID NO: 266574 - DNA, 50 bp, Artificial
  Synthetic oligonucleotide
aaaggccgcgagggaacttagctggcgaaacgcgctcgataccaagcccc

SEQ ID NO: 266575 - DNA, 50 bp, Artificial
  Synthetic oligonucleotide
aaagcgactgggttgggtcgaggcggtctctgtgggtcgccctctagtcg

SEQ ID NO: 266576 - DNA, 55 bp, Artificial
  Synthetic oligonucleotide
aaggccagtaggagagtaaagattcggccacgaggtcagaattagccaccaattg

SEQ ID NO: 266577 - DNA, 50 bp, Artificial
  Synthetic oligonucleotide
aaacgctgatcatttacttcgagcaggggtgccaccctggtgcgaccgcg

SEQ ID NO: 266578 - DNA, 50 bp, Artificial
  Synthetic oligonucleotide
aaacactcaatcggcaaatgggtcctgcccgcctatagcgcgcttgccct

SEQ ID NO: 266579 - DNA, 50 bp, Artificial
  Synthetic oligonucleotide
aattcgctaggtcgccgtggatcggactaacccgccagtccgtttccggt

SEQ ID NO: 266580 - DNA, 50 bp, Artificial
  Synthetic oligonucleotide
aatgcgccgctctccctccgagctatcaagcaggcagtctctcgtgggcg

SEQ ID NO: 266581 - DNA, 50 bp, Artificial
  Synthetic oligonucleotide
aatgatctgccaggcggagccgagtgcacagtcacggagacaggggctag

SEQ ID NO: 266582 - DNA, 50 bp, Artificial
  Synthetic oligonucleotide
aatcttttgcgacagcacagacaccggccacggagtgtcaacggtgggcg

SEQ ID NO: 266583 - DNA, 50 bp, Artificial
  Synthetic oligonucleotide
aatctgggtcactgcgccgcggttgatgttccttgggatggtgcctgccg

SEQ ID NO: 266584 - DNA, 50 bp, Artificial
  Synthetic oligonucleotide
aatcgcgtcagagcggccgagagtcgaccgcagccagtattgccccggtt

SEQ ID NO: 266585 - DNA, 50 bp, Artificial
  Synthetic oligonucleotide
aatcgacctagccgttgccatagcgactgccggagtggtcacaccccgag

SEQ ID NO: 266586 - DNA, 50 bp, Artificial
  Synthetic oligonucleotide
aatccgtgccgtgtcgcgaaattgcgaccccgattgtgcccttcttaggc

SEQ ID NO: 266587 - DNA, 55 bp, Artificial
  Synthetic oligonucleotide
ccgcgtgcagcactgtcacttcacgctttgatttgcccaacacaagcgatcgcag

SEQ ID NO: 266588 - DNA, 50 bp, Artificial
  Synthetic oligonucleotide
aatatgagcccgagaccgccccacgctgtcggggtaagtagctcccccac

SEQ ID NO: 266589 - DNA, 50 bp, Artificial
  Synthetic oligonucleotide
aatacggcgctgcttgaacttctctacgctacgggggcgcgcgtctcaga

SEQ ID NO: 266590 - DNA, 50 bp, Artificial
  Synthetic oligonucleotide
aagtggtcactcgtccagaccgactccatgccgtgcttttccgctgcgac

SEQ ID NO: 266591 - DNA, 50 bp, Artificial
  Synthetic oligonucleotide
aaggatcgggggctcgcaaacaggggagagctaagcggggccaagacttt

SEQ ID NO: 266592 - DNA, 50 bp, Artificial
  Synthetic oligonucleotide
aaggacagtcctggatcgggcatccggacaccgcactgggaacgctgatt

SEQ ID NO: 266593 - DNA, 50 bp, Artificial
  Synthetic oligonucleotide
aagctgagtagcggagggcccgcccacgtgcggtatctcaagcggatgcc

SEQ ID NO: 266594 - DNA, 50 bp, Artificial
  Synthetic oligonucleotide
aagcggtcagtgccgacgatggtcttaggctcgcccgcagtgtttgtgta

SEQ ID NO: 266595 - DNA, 50 bp, Artificial
  Synthetic oligonucleotide
aagcggggacgtttcggtgaggtctgcccgcgagcttcccacggcaagaa

SEQ ID NO: 266596 - DNA, 50 bp, Artificial
  Synthetic oligonucleotide
aagcgggaacaatcctcgcgccagctgtgacccagacgtggcgagtaagt

SEQ ID NO: 266597 - DNA, 55 bp, Artificial
  Synthetic oligonucleotide
ccgttccgcgctcattccacgttcgctcacctcacagggtggggttctgatgttg

SEQ ID NO: 266598 - DNA, 55 bp, Artificial
  Synthetic oligonucleotide
cgcgagggaacttagctggcgaaacgcgctcgataccaagccccagtcatctggg

SEQ ID NO: 266599 - DNA, 55 bp, Artificial
  Synthetic oligonucleotide
cgcttggatcaatgcggatcgactcaaaccaaacccgcccgattccgtaccagat

SEQ ID NO: 266600 - DNA, 55 bp, Artificial
  Synthetic oligonucleotide
acgcgcagttggtagaaatgcgtatcgaattgtcctgctcttgattggcgttccg

SEQ ID NO: 266601 - DNA, 55 bp, Artificial
  Synthetic oligonucleotide
gccagaccgcagtttcccatcttcggctccgcacgcatagcgaacgcgcatcatc

SEQ ID NO: 266602 - DNA, 55 bp, Artificial
  Synthetic oligonucleotide
gcgaggccgcgcatttgggctgggaccgttacttccacaggatcgttggggccaa

SEQ ID NO: 266603 - DNA, 55 bp, Artificial
  Synthetic oligonucleotide
gctacctggtcgatgctttgggtctcgtaacccgcattccccgagtagccggctg

SEQ ID NO: 266604 - DNA, 55 bp, Artificial
  Synthetic oligonucleotide
gcttctgtcggcatgcgtctagtggtgaaaatcaaacgggtgagtccgtctggat

SEQ ID NO: 266605 - DNA, 55 bp, Artificial
  Synthetic oligonucleotide
tgcaccttgagcgcgatttcgttgcacatggtaccagtcggcagtaggactgcag

SEQ ID NO: 266606 - DNA, 53 bp, Artificial
  Synthetic oligonucleotide
tcggaatttcttggttaagggcattagacaccggggagggagcgtggggcaac

SEQ ID NO: 266607 - DNA, 55 bp, Artificial
  Synthetic oligonucleotide
tcccctgaagatctcgaccgtatacggcaggttgcgtcggacctcgagccgctcc

SEQ ID NO: 266608 - DNA, 55 bp, Artificial
  Synthetic oligonucleotide
gttgatatggacgccgtgcgctgtgtaaacgctatcccaaaccagagcaatcagc

SEQ ID NO: 266609 - DNA, 54 bp, Artificial
  Synthetic oligonucleotide
gtgggtttggccggagacttcggaagaaacagccgaccttcggattctcgacaa

SEQ ID NO: 266610 - DNA, 55 bp, Artificial
  Synthetic oligonucleotide
gggtggaacgccaacgccaagagcccggttgtcggcctaaccagtactcaatgcg

SEQ ID NO: 266611 - DNA, 55 bp, Artificial
  Synthetic oligonucleotide
acttctatcaaggcgcttggagcaacgaaccgcctcgtgtggccgggccgaccga

SEQ ID NO: 266612 - DNA, 55 bp, Artificial
  Synthetic oligonucleotide
ggaggcgttaagcaagcccacggcgaccgttagctgaatgacactcgcccagggg

SEQ ID NO: 266613 - DNA, 54 bp, Artificial
  Synthetic oligonucleotide
gttccgcagcccagggcagttgaacacccaggtggtgcgtttacccgacgacac

SEQ ID NO: 266614 - DNA, 54 bp, Artificial
  Synthetic oligonucleotide
tcccctgaccgcttcctgaagtccaacctcccgcctctagaggatcgtttcatg

SEQ ID NO: 266615 - DNA, 54 bp, Artificial
  Synthetic oligonucleotide
acgcccaaaccggccgaggggagcctcattgcgagtctacctgccctggacaga

SEQ ID NO: 266616 - DNA, 54 bp, Artificial
  Synthetic oligonucleotide
ttgtgacacgatataattgttggatcggatcagctctgcgagtcgaggaacgtt

SEQ ID NO: 266617 - DNA, 53 bp, Artificial
  Synthetic oligonucleotide
gatggcaactcgaaacgcccgaccttgcgaccgtaggcccgcactccttcgta

SEQ ID NO: 266618 - DNA, 53 bp, Artificial
  Synthetic oligonucleotide
ggatcaaggtgcaacctccgcgagttggcggggatactctcacctgctaacgg

SEQ ID NO: 266619 - DNA, 51 bp, Artificial
  Synthetic oligonucleotide
gtcgatcgtgagtgtgccgccatgcaggctcgtgaggtcgcgacagatcga

SEQ ID NO: 266620 - DNA, 51 bp, Artificial
  Synthetic oligonucleotide
tgaccagcgaccttgaaggattgatcccgctggcacggcagaacgcgccta

SEQ ID NO: 266621 - DNA, 50 bp, Artificial
  Synthetic oligonucleotide
tgaacgatagtccggatgggcattaggcgtggtctcaagataggtcatcg

SEQ ID NO: 266622 - DNA, 55 bp, Artificial
  Synthetic oligonucleotide
ccagacggtcacagtagcgaccgaattccggtttagcggcgacagcatggcaatg

SEQ ID NO: 266623 - DNA, 50 bp, Artificial
  Synthetic oligonucleotide
atccagacggactcacccgtttgattttcaccactagcgcctaaactgat

SEQ ID NO: 266624 - DNA, 50 bp, Artificial
  Synthetic oligonucleotide
acgtgcatttccggtctccatgcctcgcgaagggacgtcgcgtgcggtgc

SEQ ID NO: 266625 - DNA, 50 bp, Artificial
  Synthetic oligonucleotide
acgtcccgcgcgtaaatggccagtccaccggcaaacgccgttaccttgat

SEQ ID NO: 266626 - DNA, 50 bp, Artificial
  Synthetic oligonucleotide
acggctgctcgccgtgcaatcccgttttggatgtcgtgagatggaccacg

SEQ ID NO: 266627 - DNA, 50 bp, Artificial
  Synthetic oligonucleotide
aaaggcgcgtcgcgttatcatgccgggaaaggtagtggcggcctccgctc

SEQ ID NO: 266628 - DNA, 50 bp, Artificial
  Synthetic oligonucleotide
aaagttcgccgaaggtcggtgccccgacgttgcccgagataccaaggagc

SEQ ID NO: 266629 - DNA, 50 bp, Artificial
  Synthetic oligonucleotide
aacagccgaatctggcgcgagacgggcttttcccgagtcttcgtcccacc

SEQ ID NO: 266630 - DNA, 50 bp, Artificial
  Synthetic oligonucleotide
aaccagaagtcgccctcggtgagaccaaacgtgtaagcctcgttgcgccc

SEQ ID NO: 266631 - DNA, 50 bp, Artificial
  Synthetic oligonucleotide
aacccagctcctgtgcaatcagatccgcctgagtctgcagggccgacaac

SEQ ID NO: 266632 - DNA, 50 bp, Artificial
  Synthetic oligonucleotide
aaccgatcggtccgacggtcccaatagaacgacaccccgcgcgaaccttt

SEQ ID NO: 266633 - DNA, 55 bp, Artificial
  Synthetic oligonucleotide
ccgctgagccgtcgtgataccctcgttggagagctccgtcagcttaacgcgaacg

SEQ ID NO: 266634 - DNA, 50 bp, Artificial
  Synthetic oligonucleotide
aaccgttcgcgtgagcggcgactcgttgccacccacatcttgtgttcgga

SEQ ID NO: 266635 - DNA, 50 bp, Artificial
  Synthetic oligonucleotide
aacgccttccgcttgctccttggtatctcgggcaacgtcggggcaccgac

SEQ ID NO: 266636 - DNA, 50 bp, Artificial
  Synthetic oligonucleotide
aagcgggacgtaacaggagaccgctaacctgcctgacctcgaacgaggtt

SEQ ID NO: 266637 - DNA, 50 bp, Artificial
  Synthetic oligonucleotide
aagctcacacggtcaggggtgctatcgccggggctctgaagaagcggctc

SEQ ID NO: 266638 - DNA, 50 bp, Artificial
  Synthetic oligonucleotide
aaggaacttctggcccgctacgtgtctgaggtcacgccccgcaagaaagg

SEQ ID NO: 266639 - DNA, 50 bp, Artificial
  Synthetic oligonucleotide
aaggactacgcgttctgggacgccaccgtgcagaacatagtggtcgcacc

SEQ ID NO: 266640 - DNA, 50 bp, Artificial
  Synthetic oligonucleotide
aaggccagtcgatcgccctggagcccgctaactcggcgtatgaaacgcga

SEQ ID NO: 266641 - DNA, 50 bp, Artificial
  Synthetic oligonucleotide
aatgctgttcgggggtagcgggtggcacggctgtcactctctgggatgat

SEQ ID NO: 266642 - DNA, 50 bp, Artificial
  Synthetic oligonucleotide
acactcggtatgtcgtgatcgaggcacccacacgacccagcgcccgcctc

SEQ ID NO: 266643 - DNA, 50 bp, Artificial
  Synthetic oligonucleotide
acgcccggtacccgcaaaaacccggagcgcacgatgtcgactgaagcgag

SEQ ID NO: 266644 - DNA, 53 bp, Artificial
  Synthetic oligonucleotide
ccggccaagtcggtcgatttggtaatcacgcgggtcccggccacgttgactgt

SEQ ID NO: 266645 - DNA, 50 bp, Artificial
  Synthetic oligonucleotide
acgccagaacgtcctctggtagtgtcaagatccgcgctcctcggtcccgt

SEQ ID NO: 266646 - DNA, 50 bp, Artificial
  Synthetic oligonucleotide
acgatgggcgttcgagaaaggggctctgtgcggccttgggaccaacgacg

SEQ ID NO: 266647 - DNA, 50 bp, Artificial
  Synthetic oligonucleotide
acgacgcccgcgttactgcgctggatttgacaccggcgttgtgtgaggcc

SEQ ID NO: 266648 - DNA, 50 bp, Artificial
  Synthetic oligonucleotide
acctgccatctcgcctaaccacccgaaacccccaggaatcgcctgacgac

SEQ ID NO: 266649 - DNA, 50 bp, Artificial
  Synthetic oligonucleotide
accgttcgctacacttgccgcgcaaacagagcggtactgcggctccaact

SEQ ID NO: 266650 - DNA, 50 bp, Artificial
  Synthetic oligonucleotide
accgtgacgtcgccttgggccagtaaccgccgtcgtagagcgatagtcca

SEQ ID NO: 266651 - DNA, 50 bp, Artificial
  Synthetic oligonucleotide
accggtctccctatccctgcttgttgggtcgggcggaaatcgcctgcacg

SEQ ID NO: 266652 - DNA, 50 bp, Artificial
  Synthetic oligonucleotide
accggtcgctgcttgcggacccccgccgaaccgagaactgggctcgggtc

SEQ ID NO: 266653 - DNA, 50 bp, Artificial
  Synthetic oligonucleotide
accgggctccgtcgtcggatctggagaggtcgcggcagatggttttaggg

SEQ ID NO: 266654 - DNA, 50 bp, Artificial
  Synthetic oligonucleotide
accgggaccgcgtactcggagcggccatcgtacagataccatcgcaggct

SEQ ID NO: 266655 - DNA, 55 bp, Artificial
  Synthetic oligonucleotide
cgcagagagcgttggattccgggccctctccctccgccaatcttctgttgcgaac

SEQ ID NO: 266656 - DNA, 50 bp, Artificial
  Synthetic oligonucleotide
accgattttgggccgcaggcaactgtggaaccctggtctggggatgcaag

SEQ ID NO: 266657 - DNA, 50 bp, Artificial
  Synthetic oligonucleotide
acagtcggcacgcattaaagcgtagggcggaacccctcgggagacggaac

SEQ ID NO: 266658 - DNA, 50 bp, Artificial
  Synthetic oligonucleotide
acagtccagcaaacttatcgcgtggcgctaggggctgcaacggcagatgg

SEQ ID NO: 266659 - DNA, 50 bp, Artificial
  Synthetic oligonucleotide
acaggcctttgttcatcggaacgcttccgtgatggcggagggcgcttgct

SEQ ID NO: 266660 - DNA, 50 bp, Artificial
  Synthetic oligonucleotide
acacttgccgcgcaaacagagcggtactgcggctccaactcacaggaggt

SEQ ID NO: 266661 - DNA, 55 bp, Artificial
  Synthetic oligonucleotide
cgcgctgtgaagtggggtatttccgacatcgcccgacacgaaatttagccgcggg

SEQ ID NO: 266662 - DNA, 55 bp, Artificial
  Synthetic oligonucleotide
cttcgacgctcaaactcgaatgaaacgcataaccggagcggccgtgtgccgcaaa

SEQ ID NO: 266663 - DNA, 55 bp, Artificial
  Synthetic oligonucleotide
gaccgtagctgagggttgagtccatgtggaaatgcgaatccacgaaggatggggt

SEQ ID NO: 266664 - DNA, 55 bp, Artificial
  Synthetic oligonucleotide
cccaaaaggtgagatacaccccataggcaatgcctacgacgccggacactaacgc

SEQ ID NO: 266665 - DNA, 53 bp, Artificial
  Synthetic oligonucleotide
gccccgtcgcgtaaatacgaccccaattcttgccgaacgaatgcttcaacccg

SEQ ID NO: 266666 - DNA, 55 bp, Artificial
  Synthetic oligonucleotide
gcgatggcattcgcacaagaaaactcactacccgtcttaccacagaacgcagtag

SEQ ID NO: 266667 - DNA, 55 bp, Artificial
  Synthetic oligonucleotide
gctcgcaaacccctttaggcggtcaacttcgtagtcagcgggccccatttggcac

SEQ ID NO: 266668 - DNA, 55 bp, Artificial
  Synthetic oligonucleotide
gcttttgtcataagtgagccatccgccaacaatgaatttgtgttacgtcgcttga

SEQ ID NO: 266669 - DNA, 55 bp, Artificial
  Synthetic oligonucleotide
ggacgctatcgcttcccaaccgcaatagtaacgtggacatcggcgcttttaggtc

SEQ ID NO: 266670 - DNA, 55 bp, Artificial
  Synthetic oligonucleotide
ggcagcgttgaactctggcccggttcacacctcgatgtcagcggacgacggatag

SEQ ID NO: 266671 - DNA, 55 bp, Artificial
  Synthetic oligonucleotide
ggggcaaagcccgtaaatgccttgtgctgccgacagaaagtgttgggacggccgg

SEQ ID NO: 266672 - DNA, 55 bp, Artificial
  Synthetic oligonucleotide
ggtggagatctctcaattaccggagttggaccggtgggccctgctgcgattcaac

SEQ ID NO: 266673 - DNA, 53 bp, Artificial
  Synthetic oligonucleotide
aagggaaaaccggctgttggacgcatccggggaaacgaacgaagtgagcgcta

SEQ ID NO: 266674 - DNA, 55 bp, Artificial
  Synthetic oligonucleotide
aagatgccgtttagttcacgcgtgagtgcggttcgtatgacctgcaactcagtgg

SEQ ID NO: 266675 - DNA, 55 bp, Artificial
  Synthetic oligonucleotide
cccgttcaaaccgtgcaaatgatggtgcgaattattgagaaggccgaagcgagtg

SEQ ID NO: 266676 - DNA, 55 bp, Artificial
  Synthetic oligonucleotide
gtcgtctctgttgggcggacgggtgtcgagtttatggctacaggggacaatgcgc

SEQ ID NO: 266677 - DNA, 55 bp, Artificial
  Synthetic oligonucleotide
gtgtgggaaaacgcagaactgtagacgagcattactccaatctcggtatcgcgag

SEQ ID NO: 266678 - DNA, 55 bp, Artificial
  Synthetic oligonucleotide
atgtctcgccacgcccgcacccatcgtgcgtcacggtatgaggctgcatggaccg

SEQ ID NO: 266679 - DNA, 55 bp, Artificial
  Synthetic oligonucleotide
tggaatccagacctcaatgtagatatcccgcaataaggaaagacgatcgatcccc

SEQ ID NO: 266680 - DNA, 55 bp, Artificial
  Synthetic oligonucleotide
ttcgtacgtcttaacaagtgcgtcagtgaatcgtatcatgttagcatctctcctc

SEQ ID NO: 266681 - DNA, 53 bp, Artificial
  Synthetic oligonucleotide
caccttaaacagagttggacccaagcactcgcagcgaatggacaagccctcct

SEQ ID NO: 266682 - DNA, 53 bp, Artificial
  Synthetic oligonucleotide
tatcccgttccaagatgagaacccggttgcgttacatacacttgtcgcaggaa

SEQ ID NO: 266683 - DNA, 53 bp, Artificial
  Synthetic oligonucleotide
tccgcgttgctgcgtaaatagagcgtcttgtgtgcgcgagtgtgggaggaaaa

SEQ ID NO: 266684 - DNA, 52 bp, Artificial
  Synthetic oligonucleotide
gataccactttcgcagcaacgcttccgtcaccagtccaacagtatgattcat

SEQ ID NO: 266685 - DNA, 52 bp, Artificial
  Synthetic oligonucleotide
gccatcagcctgaaaccgcgtcactatgaattgacgctcacctgctccttta

SEQ ID NO: 266686 - DNA, 54 bp, Artificial
  Synthetic oligonucleotide
cgagtctttatatacgccgacagtcttcacccgaaccagttgaaaagacgggcc

SEQ ID NO: 266687 - DNA, 50 bp, Artificial
  Synthetic oligonucleotide
taggagaagctctgattgacgatctttgccaccttctgatcatgcggcga

SEQ ID NO: 266688 - DNA, 50 bp, Artificial
  Synthetic oligonucleotide
agcgcactcttaaaagcctcccgttgcgttctcatggcgcacggtccggt

SEQ ID NO: 266689 - DNA, 50 bp, Artificial
  Synthetic oligonucleotide
agcgaggagcgggacgctttgtgcccggtgttgctatcgcccaagcacgc

SEQ ID NO: 266690 - DNA, 50 bp, Artificial
  Synthetic oligonucleotide
agcgacgggacagggcttaaacgaattacaagcgatgctgccccgaggga

SEQ ID NO: 266691 - DNA, 50 bp, Artificial
  Synthetic oligonucleotide
agcaaacaggcccgctaatggatggccgaaacggagaacgcagggacgag

SEQ ID NO: 266692 - DNA, 50 bp, Artificial
  Synthetic oligonucleotide
agagaacggcagcgttgaactctggcccggttcacacctcgatgtcagcg

SEQ ID NO: 266693 - DNA, 50 bp, Artificial
  Synthetic oligonucleotide
acccatccgacggagcagacgttacatcaggccatggacacggccacacg

SEQ ID NO: 266694 - DNA, 50 bp, Artificial
  Synthetic oligonucleotide
accactccgaatccgtgcgtgcgatgcaatgagtgggtgaagttcggggg

SEQ ID NO: 266695 - DNA, 50 bp, Artificial
  Synthetic oligonucleotide
acagccatcgcactccagaacaatacggacctgacacagcacggcgccgg

SEQ ID NO: 266696 - DNA, 50 bp, Artificial
  Synthetic oligonucleotide
acaaatgcgtcggcacgtcccatcggctaccggacccgttgactttgggc

SEQ ID NO: 266697 - DNA, 55 bp, Artificial
  Synthetic oligonucleotide
cgcagtggcgaattaatacttgaggtgccgaatggagattacggtgaggcactct

SEQ ID NO: 266698 - DNA, 50 bp, Artificial
  Synthetic oligonucleotide
aatgcgaagaggcaagcgagtcacctacgacctggcagtcccctggcgct

SEQ ID NO: 266699 - DNA, 50 bp, Artificial
  Synthetic oligonucleotide
aatgaggcgtcgctcgattccattaggggcacggtggcatttgcgcgaaa

SEQ ID NO: 266700 - DNA, 50 bp, Artificial
  Synthetic oligonucleotide
aatagcggaagggtcaaaacggacggtcgcctgataccccgccacgtcac

SEQ ID NO: 266701 - DNA, 50 bp, Artificial
  Synthetic oligonucleotide
aatagagccggccatcaatgcccccgtcggcagagcgtcgaaccgtcaca

SEQ ID NO: 266702 - DNA, 50 bp, Artificial
  Synthetic oligonucleotide
aatacgcggtgagcgtcgaaaggaggccgctgaacgccaacaaagccagc

SEQ ID NO: 266703 - DNA, 50 bp, Artificial
  Synthetic oligonucleotide
aaggggaggttttgacacgggacaagcgccgaaacgctacagcctgcggc

SEQ ID NO: 266704 - DNA, 50 bp, Artificial
  Synthetic oligonucleotide
aacgttgcgtgcaggttgcgtttcatctgacgggagcgcaggctctctgg

SEQ ID NO: 266705 - DNA, 50 bp, Artificial
  Synthetic oligonucleotide
aacggccggggaaacgctagtggacattgggaatgcgtggggcttgaata

SEQ ID NO: 266706 - DNA, 50 bp, Artificial
  Synthetic oligonucleotide
aaccggtgcctgacaacaatcacaattccccggggcaaccgctcggatgt

SEQ ID NO: 266707 - DNA, 50 bp, Artificial
  Synthetic oligonucleotide
aaccgggagggtaaccgggagccgcttgaggatagtaccgtgtccaaggc

SEQ ID NO: 266708 - DNA, 55 bp, Artificial
  Synthetic oligonucleotide
cgcatgcgtcttcgccatctatcgaagctctttggtagtcgagcggcgttggatt

SEQ ID NO: 266709 - DNA, 50 bp, Artificial
  Synthetic oligonucleotide
aaccgcgtcacgagcaacccgccgttgtagtgtggcaacggaccgccgca

SEQ ID NO: 266710 - DNA, 50 bp, Artificial
  Synthetic oligonucleotide
aaccgaaccgcatttccgtgtcctcggaatacgcaagcgaggtgctgccc

SEQ ID NO: 266711 - DNA, 50 bp, Artificial
  Synthetic oligonucleotide
aaaggcaagcgttcggacacgttcgaactggaggcctcgccgggacgaaa

SEQ ID NO: 266712 - DNA, 50 bp, Artificial
  Synthetic oligonucleotide
agactccctgggacggcggaggaatggttagatccggggcagtatcggct

SEQ ID NO: 266713 - DNA, 50 bp, Artificial
  Synthetic oligonucleotide
agaaatgggcgcgtgtgcaccaggggattgagcggatacgggaattcgta

SEQ ID NO: 266714 - DNA, 50 bp, Artificial
  Synthetic oligonucleotide
actgtccagtgaggctggcccttcaggcgtcaaacctagtggctccggtc

SEQ ID NO: 266715 - DNA, 50 bp, Artificial
  Synthetic oligonucleotide
actcggcggctcaaaatgaccggatgggcgattctgccaggggaccgtcg

SEQ ID NO: 266716 - DNA, 50 bp, Artificial
  Synthetic oligonucleotide
acgttgtccggaggggcaaaggcttccgatgagccggggagtgaattccc

SEQ ID NO: 266717 - DNA, 50 bp, Artificial
  Synthetic oligonucleotide
acggtcacccccgccagttgcaaggtcagccataacgggccccaatccat

SEQ ID NO: 266718 - DNA, 50 bp, Artificial
  Synthetic oligonucleotide
acgggctgcctcaatatggatcgcgcggttggggacgaggagtgggaaag

SEQ ID NO: 266719 - DNA, 53 bp, Artificial
  Synthetic oligonucleotide
cgcgtctattccggtcgcctggaaacggggtcgtacgtgtctaacgtcaccca

SEQ ID NO: 266720 - DNA, 50 bp, Artificial
  Synthetic oligonucleotide
acgggaagcaggcacgctccgtttgacgatggcaaaccccgtcagccgtc

SEQ ID NO: 266721 - DNA, 46 bp, Artificial
  Synthetic oligonucleotide
acggccccctttccctgtgggtcgttacccgtcgaacgggtttcct

SEQ ID NO: 266722 - DNA, 50 bp, Artificial
  Synthetic oligonucleotide
acggcatgtcaatggaaggggtacgccacgtgactggcagggacgagcct

SEQ ID NO: 266723 - DNA, 50 bp, Artificial
  Synthetic oligonucleotide
acggaccgccgcaggtcagttgcacgagtccttcacacgtgatcgggtta

SEQ ID NO: 266724 - DNA, 50 bp, Artificial
  Synthetic oligonucleotide
acgcctcggcgtaaggagtcacgtcaaaggtttccgtaggcgaagccccg

SEQ ID NO: 266725 - DNA, 50 bp, Artificial
  Synthetic oligonucleotide
acgaagcgcggctgtaggcccggtccctgtcgtggatctcctccctccgg

SEQ ID NO: 266726 - DNA, 50 bp, Artificial
  Synthetic oligonucleotide
accttcgagagactccctgggacggcggaggaatggttagatccggggca

SEQ ID NO: 266727 - DNA, 50 bp, Artificial
  Synthetic oligonucleotide
acctctcgtcgcctctgtgcatccatcgtgcggcaatttgggcctccggt

SEQ ID NO: 266728 - DNA, 50 bp, Artificial
  Synthetic oligonucleotide
acctcgggctctcggtgcattcggccaaaatcgggacgcgtctggatcaa

SEQ ID NO: 266729 - DNA, 55 bp, Artificial
  Synthetic oligonucleotide
ctcagcactggggaccgatttccgagtggcgaacttaacgaaaggtatattctgt

SEQ ID NO: 266730 - DNA, 55 bp, Artificial
  Synthetic oligonucleotide
cttcacgtgcccgaatttgtaccgtcagggccgaaaacagcgtccctatggcgga

SEQ ID NO: 266731 - DNA, 55 bp, Artificial
  Synthetic oligonucleotide
caagatacggtgggacaatctcaataagcgtcagtcgtgagaggcgttcagatgt

SEQ ID NO: 266732 - DNA, 55 bp, Artificial
  Synthetic oligonucleotide
ccgctctatgacccacgtcgggtcttcggagtgcatacggttgagtatttcgccg

SEQ ID NO: 266733 - DNA, 53 bp, Artificial
  Synthetic oligonucleotide
caaccgataaaagaggctaagccgtcggaacccgttttggtgctcggtatcaa

SEQ ID NO: 266734 - DNA, 55 bp, Artificial
  Synthetic oligonucleotide
atgtgaggtagacccctttcgaaagagcttcttcgtctgagaagtctgtccagac

SEQ ID NO: 266735 - DNA, 55 bp, Artificial
  Synthetic oligonucleotide
gagcgactgtttgtacgactccgataggcggaatgctccgagataatcgtatata

SEQ ID NO: 266736 - DNA, 55 bp, Artificial
  Synthetic oligonucleotide
gagttgttggcaaggaggtcgtatctgctcttcctttggtccgtagaaaagttcc

SEQ ID NO: 266737 - DNA, 54 bp, Artificial
  Synthetic oligonucleotide
gccgtctctgacgggcataatgtcgggtgccgttactaatacgcccggtttagg

SEQ ID NO: 266738 - DNA, 55 bp, Artificial
  Synthetic oligonucleotide
gcgaacgtgccattatcgatttgccgcctataccgtaaagtatgagattctccgc

SEQ ID NO: 266739 - DNA, 55 bp, Artificial
  Synthetic oligonucleotide
gggtgtacaacaaccttggacttgtgtatctcatacgaggcgattacgtggcggc

SEQ ID NO: 266740 - DNA, 54 bp, Artificial
  Synthetic oligonucleotide
ggtcccttagggtcggttgcttcggcacttatgtcgtagtaacttctgtcgtac

SEQ ID NO: 266741 - DNA, 55 bp, Artificial
  Synthetic oligonucleotide
gtagacaactatctgttgtccgaacgcctgcgtaaaactacacaattcgacttcg

SEQ ID NO: 266742 - DNA, 55 bp, Artificial
  Synthetic oligonucleotide
aatgctatggtaaaagagttgcagttcggttacgaagtactttacaataccgatg

SEQ ID NO: 266743 - DNA, 55 bp, Artificial
  Synthetic oligonucleotide
ccgtaatctttaccgatttgcattcgttgtagcaaatatccccgttacattccgc

SEQ ID NO: 266744 - DNA, 55 bp, Artificial
  Synthetic oligonucleotide
ttactctcgtaggagccactacccgcagcggtctgcttacgtcgcctctccgtgc

SEQ ID NO: 266745 - DNA, 54 bp, Artificial
  Synthetic oligonucleotide
caagccatcagatggttcgaataccgcaggatattcccacccgttatgtcaata

SEQ ID NO: 266746 - DNA, 54 bp, Artificial
  Synthetic oligonucleotide
taatttatccgcccacggcaaccgtttggcaaactcattgtattgctccaagtc

SEQ ID NO: 266747 - DNA, 53 bp, Artificial
  Synthetic oligonucleotide
gttacggactacataaacacgctctgtaggtatcacaacctgcgaaacatact

SEQ ID NO: 266748 - DNA, 53 bp, Artificial
  Synthetic oligonucleotide
tagaagttgccaggtccgagcattcgtgcgttccagcctcgcatagagttgga

SEQ ID NO: 266749 - DNA, 53 bp, Artificial
  Synthetic oligonucleotide
tgctccgctccgagccactctacgtcggtcagttcgtattggttctgtacggt

SEQ ID NO: 266750 - DNA, 53 bp, Artificial
  Synthetic oligonucleotide
aaaactcggcgactataggcaagccctcggaggactcgataagccgactacca

SEQ ID NO: 266751 - DNA, 52 bp, Artificial
  Synthetic oligonucleotide
ccccacgcatctatgtctgtcaatgcagggtaatctattttgtcgcaaacat

SEQ ID NO: 266752 - DNA, 52 bp, Artificial
  Synthetic oligonucleotide
acataggtgaaatatcgacgtttccgcatatacgcacagatttgtcgcgaat

SEQ ID NO: 266753 - DNA, 51 bp, Artificial
  Synthetic oligonucleotide
ccctgtactgtcgtaagtggcagataggtagccgattgtgttgttctgcgg

SEQ ID NO: 266754 - DNA, 55 bp, Artificial
  Synthetic oligonucleotide
cgaccctgctaatgccgaattaatagaggctgagcacaaagacagtattggtcgt

SEQ ID NO: 266755 - DNA, 50 bp, Artificial
  Synthetic oligonucleotide
gagtatgggcgtcgggctccgtagcctatccgcagcagaatggtggggta

SEQ ID NO: 266756 - DNA, 50 bp, Artificial
  Synthetic oligonucleotide
atctgcgtctgggagcgggtccgatgttcaattggctcgccgacttccgt

SEQ ID NO: 266757 - DNA, 50 bp, Artificial
  Synthetic oligonucleotide
gcacgactctgtctgccttcggttcgacgacctcagcagacgcaatcgcc

SEQ ID NO: 266758 - DNA, 50 bp, Artificial
  Synthetic oligonucleotide
gcattacaccgcacagaacgactcgcttgccacacgcaagggactgccca

SEQ ID NO: 266759 - DNA, 50 bp, Artificial
  Synthetic oligonucleotide
gcccacgcctctgtcgtcgtatcgcagagtacctatcccgttgcgagcca

SEQ ID NO: 266760 - DNA, 50 bp, Artificial
  Synthetic oligonucleotide
gccgccgtacaaacgcatcggtgcatttgccgaaactcagacgcaggact

SEQ ID NO: 266761 - DNA, 50 bp, Artificial
  Synthetic oligonucleotide
atcgcttggtagccgagtatgcgggagctactcctatgcccctcgtgccg

SEQ ID NO: 266762 - DNA, 50 bp, Artificial
  Synthetic oligonucleotide
atacggcatcttcggggtgttccatatcgaacgacggggtggtggctccg

SEQ ID NO: 266763 - DNA, 50 bp, Artificial
  Synthetic oligonucleotide
gcgagtcgggcgaaccgttggtgggggtatcgatatctgttgtcggagcc

SEQ ID NO: 266764 - DNA, 50 bp, Artificial
  Synthetic oligonucleotide
agatagcttcgatgtcgcccgcacgtctgccgacaatgtcgtacggcacc

SEQ ID NO: 266765 - DNA, 55 bp, Artificial
  Synthetic oligonucleotide
cgatacagctcgctccatatcgttgcgtaaatgggtatattcggctgtttgtgcg

SEQ ID NO: 266766 - DNA, 50 bp, Artificial
  Synthetic oligonucleotide
actgcggcgaaagctccgtagaggcttccgacggctgctacaaatgcacc

SEQ ID NO: 266767 - DNA, 50 bp, Artificial
  Synthetic oligonucleotide
actctgccgaagtgggtgagtgcctacaacaagtcgggagcagcccgcaa

SEQ ID NO: 266768 - DNA, 50 bp, Artificial
  Synthetic oligonucleotide
accggtacgcatccttgcggaggaggcagcggggtaaacacagaccgcta

SEQ ID NO: 266769 - DNA, 50 bp, Artificial
  Synthetic oligonucleotide
acagagccccgcgtgcagaggcacagggtacgacactggcaaactactcg

SEQ ID NO: 266770 - DNA, 50 bp, Artificial
  Synthetic oligonucleotide
tcggagcgtgttaccgacagtatttcgtcgtctgctgttaccgacgggaa

SEQ ID NO: 266771 - DNA, 50 bp, Artificial
  Synthetic oligonucleotide
aagtgggtgagtgcctacaacaagtcgggagcagcccgcaactacctcga

SEQ ID NO: 266772 - DNA, 50 bp, Artificial
  Synthetic oligonucleotide
ccgagctgccgatacgaacagcgtcgacgtctctcatctgcccgcaggcg

SEQ ID NO: 266773 - DNA, 50 bp, Artificial
  Synthetic oligonucleotide
ccgactgctcatcacccaaagcaccgggcagtagtctgacgacggcgtcc

SEQ ID NO: 266774 - DNA, 50 bp, Artificial
  Synthetic oligonucleotide
cgcagtggacaactgcttggcacggcatagaggctgtgtggggcggtacg

SEQ ID NO: 266775 - DNA, 50 bp, Artificial
  Synthetic oligonucleotide
ccaccgtgggaattgccgccacccacgaaaatgtctcttatccccacgcc

SEQ ID NO: 266776 - DNA, 55 bp, Artificial
  Synthetic oligonucleotide
cgcctctgtcgtcgtatcgcagagtacctatcccgttgcgagccagatagtcggc

SEQ ID NO: 266777 - DNA, 50 bp, Artificial
  Synthetic oligonucleotide
cggagcagcacgattcgacttttcgcgtttcggctgggaggttacgcgta

SEQ ID NO: 266778 - DNA, 50 bp, Artificial
  Synthetic oligonucleotide
cagcgtagagccgtcgggtacttcgtctcctgcacgcagagatgtgccgt

SEQ ID NO: 266779 - DNA, 50 bp, Artificial
  Synthetic oligonucleotide
ctcgcaggcttggcagtcgaactcaaggcggaggcgggtagaggagtgag

SEQ ID NO: 266780 - DNA, 50 bp, Artificial
  Synthetic oligonucleotide
ctcgcggtcgtcgtatggagtagtgcgggggcttcatctgcagaaaggcg

SEQ ID NO: 266781 - DNA, 50 bp, Artificial
  Synthetic oligonucleotide
ctctacgccccgaaccgacccgctgagtgtgctagttcgctgaacggcga

SEQ ID NO: 266782 - DNA, 50 bp, Artificial
  Synthetic oligonucleotide
ctctgctgcctgccgcgagcgactgttgtctgacggtgcctctccccgat

SEQ ID NO: 266783 - DNA, 50 bp, Artificial
  Synthetic oligonucleotide
cttcactactctgctgcctgccgcgagcgactgttgtctgacggtgcctc

SEQ ID NO: 266784 - DNA, 50 bp, Artificial
  Synthetic oligonucleotide
cacaggcgatgcaggttcgtagccgccaactatcggtcgcagacgcggca

SEQ ID NO: 266785 - DNA, 50 bp, Artificial
  Synthetic oligonucleotide
ctttccgtacggggcagatgaagcccattgcatggcagcgtattgcccga

SEQ ID NO: 266786 - DNA, 50 bp, Artificial
  Synthetic oligonucleotide
gacttggcagacggcggagccaaccattgggcagaatgtatcggagccgt

SEQ ID NO: 266787 - DNA, 55 bp, Artificial
  Synthetic oligonucleotide
cgtgcgaatcgctatcctctgagttgagatacactacaacactttcgtcggcagc

SEQ ID NO: 266788 - DNA, 50 bp, Artificial
  Synthetic oligonucleotide
gagcgacacgccacgtcgaagattagcaaggcaggcgacctctttgggct

SEQ ID NO: 266789 - DNA, 50 bp, Artificial
  Synthetic oligonucleotide
atggcggggttccagtacgagtggctaagctcgtgtgccacaagccaccc

SEQ ID NO: 266790 - DNA, 50 bp, Artificial
  Synthetic oligonucleotide
gaggcacgaaagacctgcggcgtctgtacggtgcgtagcttgcttcggtc

SEQ ID NO: 266791 - DNA, 55 bp, Artificial
  Synthetic oligonucleotide
cttcgtccataagagtttccatcacctcagactgcggtgtaatagggtatccgaa

SEQ ID NO: 266792 - DNA, 55 bp, Artificial
  Synthetic oligonucleotide
caatcgaggtttatgctactggcttgggctgtggcaaacaccatattcgtattgt

SEQ ID NO: 266793 - DNA, 52 bp, Artificial
  Synthetic oligonucleotide
caacctaccttcaattggggaataacctggagaaatttggactaatacccca

SEQ ID NO: 266794 - DNA, 60 bp, Artificial
  Synthetic oligonucleotide
actccattgggggcagcgtcaacccatatcagaccggatgcaatccgcactcgaaagcta

SEQ ID NO: 266795 - DNA, 55 bp, Artificial
  Synthetic oligonucleotide
ggaaaccatagtagagtcgtagtcacccatgaaagagtaatgccaagggcccaat

SEQ ID NO: 266796 - DNA, 55 bp, Artificial
  Synthetic oligonucleotide
gcctattgtcgaacaggcacccgttcatgcacactatgggctctagcgaatcgag

SEQ ID NO: 266797 - DNA, 55 bp, Artificial
  Synthetic oligonucleotide
gccctcatctagcatcacgcgcacgcgtccataacttgatccagccaaaagcatg

SEQ ID NO: 266798 - DNA, 55 bp, Artificial
  Synthetic oligonucleotide
gcaacaatgtattcaggaccatcacccatttctcttttacccacaaccaatggtc

SEQ ID NO: 266799 - DNA, 55 bp, Artificial
  Synthetic oligonucleotide
gagctcctttcgttaagcttgtataccctagtggcttttgacagaaatagaccag

SEQ ID NO: 266800 - DNA, 55 bp, Artificial
  Synthetic oligonucleotide
cttctatcgcaggatccaccaagccggttggtcgagcaacctgttccacgatgat

SEQ ID NO: 266801 - DNA, 55 bp, Artificial
  Synthetic oligonucleotide
acgctaataaggaatactcgtctcttaacctatctcaggcagttcaagtcactgc

SEQ ID NO: 266802 - DNA, 55 bp, Artificial
  Synthetic oligonucleotide
agcagtacggttcaactccaggtttgactttcgctcttcgctacggtgaccatcc

SEQ ID NO: 266803 - DNA, 55 bp, Artificial
  Synthetic oligonucleotide
agccagagatggtgctccacccgttctagcaaataaggtgctttccccaacatcg

SEQ ID NO: 266804 - DNA, 55 bp, Artificial
  Synthetic oligonucleotide
ccctcttgacgatataccaagatcgactccagacgttagaaagcatgtagaggaa

SEQ ID NO: 266805 - DNA, 60 bp, Artificial
  Synthetic oligonucleotide
tccccggttagggtgattgagttgactgtcgctgtcagacccgtgccgacatcagattga

SEQ ID NO: 266806 - DNA, 55 bp, Artificial
  Synthetic oligonucleotide
ccgctaaatcatatgatgagcgaattactaactcagaaggtgccaccattaacta

SEQ ID NO: 266807 - DNA, 55 bp, Artificial
  Synthetic oligonucleotide
cgaggttacttatatgaccgttccatccagccaaatatagttattcaatcgtatg

SEQ ID NO: 266808 - DNA, 55 bp, Artificial
  Synthetic oligonucleotide
cgcccttaatgtggccgttccaagtgcattactagccgcaatgatcgcggtatgc

SEQ ID NO: 266809 - DNA, 55 bp, Artificial
  Synthetic oligonucleotide
cggaatttgcgacactaattcataggctaaatctctttgtctggctaaccttccc

SEQ ID NO: 266810 - DNA, 55 bp, Artificial
  Synthetic oligonucleotide
cggatgcaggtagagtacatgagaagggtaagccagctatgacattacaagctgc

SEQ ID NO: 266811 - DNA, 55 bp, Artificial
  Synthetic oligonucleotide
cgggatgtcttatgtggatgaacttcaagtgaatagcctacaaagcttgcataag

SEQ ID NO: 266812 - DNA, 54 bp, Artificial
  Synthetic oligonucleotide
cccaccgtggagcgactgggtacgatccaaaacttggtgacggtgcagggttat

SEQ ID NO: 266813 - DNA, 54 bp, Artificial
  Synthetic oligonucleotide
tggcgtaatgactatcggggcgtcgttcacttctcagtgagcttaacctgtttg

SEQ ID NO: 266814 - DNA, 53 bp, Artificial
  Synthetic oligonucleotide
ggcacacacccgaggtttggttagggcataaaagctcttaagggcatcgaggc

SEQ ID NO: 266815 - DNA, 53 bp, Artificial
  Synthetic oligonucleotide
ggcatttgtccccatacatttgatggaacggtcccaagatagccgagcagtaa

SEQ ID NO: 266816 - DNA, 60 bp, Artificial
  Synthetic oligonucleotide
tacccgcatcatccccggttagggtgattgagttgactgtcgctgtcagacccgtgccga

SEQ ID NO: 266817 - DNA, 52 bp, Artificial
  Synthetic oligonucleotide
atgagcactcaagaaatcgcctcagacgtaaaccagtttgcgatcgattgtg

SEQ ID NO: 266818 - DNA, 52 bp, Artificial
  Synthetic oligonucleotide
tatcgactaggtgctttggggagccctgctaatagggccatttctgcggtat

SEQ ID NO: 266819 - DNA, 51 bp, Artificial
  Synthetic oligonucleotide
ggcaaccacgtcaagagctcatacagcggtcaagatttcacctaattatga

SEQ ID NO: 266820 - DNA, 51 bp, Artificial
  Synthetic oligonucleotide
agtgttggctatcgttcatcaagttatggttggaggattgatccaatgctt

SEQ ID NO: 266821 - DNA, 50 bp, Artificial
  Synthetic oligonucleotide
atccccgactgggtaaaccactctttggaccattggaggtctaactctgt

SEQ ID NO: 266822 - DNA, 50 bp, Artificial
  Synthetic oligonucleotide
atacccgattggtcagaccattcacaccgcggtcccttcccgaattaaac

SEQ ID NO: 266823 - DNA, 57 bp, Artificial
  Synthetic oligonucleotide
ggtcgcaccagacgatacgttcactgtcgagcctgaacctaatccaccgttggtccc

SEQ ID NO: 266824 - DNA, 56 bp, Artificial
  Synthetic oligonucleotide
gggcgccactctccgaatgctatagagcccactgatgacaagcgaacccacagtct

SEQ ID NO: 266825 - DNA, 55 bp, Artificial
  Synthetic oligonucleotide
tgtaatcactggattaacagttcaagacactaagggtgtttatcatgtgagcccg

SEQ ID NO: 266826 - DNA, 55 bp, Artificial
  Synthetic oligonucleotide
ggcgcaggagaaggttggtctaaagtgatcctcaacaaccctatgctgcgggatc

SEQ ID NO: 266827 - DNA, 55 bp, Artificial
  Synthetic oligonucleotide
ggcaacgatacaaaacgttgtaattggccatacaaacatgacactgcttgtcacg

SEQ ID NO: 266828 - DNA, 55 bp, Artificial
  Synthetic oligonucleotide
ggagtgacaggatttgacagacttctgctgatggcgtccttaaatatcattcacg

SEQ ID NO: 266829 - DNA, 55 bp, Artificial
  Synthetic oligonucleotide
ctggatcttgggatgatcatacttttcggttaagggttttgccatgtccgaagcg

SEQ ID NO: 266830 - DNA, 55 bp, Artificial
  Synthetic oligonucleotide
ccgttgcaggtccgcgaatagtaccagaccattggagctacgacggcttagccag

SEQ ID NO: 266831 - DNA, 50 bp, Artificial
  Synthetic oligonucleotide
aattgaccctgcacatcaattccctcggatgccccgattgccagccggag

SEQ ID NO: 266832 - DNA, 50 bp, Artificial
  Synthetic oligonucleotide
aattcagcgcggtcccatgaacaagaaccccacgcacccttcggaaaggc

SEQ ID NO: 266833 - DNA, 50 bp, Artificial
  Synthetic oligonucleotide
aatgtggcactggacaaagcttcctgccaaggggaaatgcggccgggtcc

SEQ ID NO: 266834 - DNA, 55 bp, Artificial
  Synthetic oligonucleotide
ccctgatacggatagctaacctcgccctttactcggactggtactccgctaccgc

SEQ ID NO: 266835 - DNA, 55 bp, Artificial
  Synthetic oligonucleotide
attgtgatgtcttgcgcggatttacaggaagattacaacgcatcggggtggcagt

SEQ ID NO: 266836 - DNA, 54 bp, Artificial
  Synthetic oligonucleotide
cccggctatccaggctatcctacaatgacgggaataggacctttaattaagccg

SEQ ID NO: 266837 - DNA, 55 bp, Artificial
  Synthetic oligonucleotide
cccaagcactgcaggccatttggcactggtaacggttgccaatgataccgctacc

SEQ ID NO: 266838 - DNA, 55 bp, Artificial
  Synthetic oligonucleotide
ccagaagcgaaacgattcagattgtgtaggacggtgccaagttcaaactatcggc

SEQ ID NO: 266839 - DNA, 55 bp, Artificial
  Synthetic oligonucleotide
caatcttgtcggattcgccgtaactgctaaccgccagtactacggcgctggtccg

SEQ ID NO: 266840 - DNA, 55 bp, Artificial
  Synthetic oligonucleotide
caataaggttctctatatctgctctctgttcgttggggattggactgacgagccc

SEQ ID NO: 266841 - DNA, 55 bp, Artificial
  Synthetic oligonucleotide
tgaatcaatggtcgcttgtgtcccgataacgccaattctcccgtaacgcgtggat

SEQ ID NO: 266842 - DNA, 55 bp, Artificial
  Synthetic oligonucleotide
gacatgttcaatctcatggacgtgcttggccacgatcgctttgcgatggcgggac

SEQ ID NO: 266843 - DNA, 55 bp, Artificial
  Synthetic oligonucleotide
ctctaatccgtctttgccattcaatcggatccacacctctggttgccagaatgcc

SEQ ID NO: 266844 - DNA, 55 bp, Artificial
  Synthetic oligonucleotide
gacgttcgcgtcagttttcccctggtgaggcgcttgtcacgggatctcagggagc

SEQ ID NO: 266845 - DNA, 55 bp, Artificial
  Synthetic oligonucleotide
gagcccggaggcccttatttgtcagccggtacttctgagtcggactcttgggcga

SEQ ID NO: 266846 - DNA, 55 bp, Artificial
  Synthetic oligonucleotide
gcaacgattgtcagccgcttaccgtcatcctacgaaaacatggtgatacgttgca

SEQ ID NO: 266847 - DNA, 55 bp, Artificial
  Synthetic oligonucleotide
gcaggcaaaagcacttaccgatcatgaacgctacgagagaaacgggaaggcgacg

SEQ ID NO: 266848 - DNA, 55 bp, Artificial
  Synthetic oligonucleotide
gcagggtcgatcctactccgcatacgccccatggaatacgctattgcttaaccct

SEQ ID NO: 266849 - DNA, 53 bp, Artificial
  Synthetic oligonucleotide
aaccatttctcttccgggttatcattcttgcccgccgtaaccgcctgaaccga

SEQ ID NO: 266850 - DNA, 55 bp, Artificial
  Synthetic oligonucleotide
gcccggctatcccgcgaattgttggcataaatcatccctattctccaaaaccccg

SEQ ID NO: 266851 - DNA, 55 bp, Artificial
  Synthetic oligonucleotide
ggaatattcgagcacttccacaccgttctctctaagcctacccgctacctgattg

SEQ ID NO: 266852 - DNA, 54 bp, Artificial
  Synthetic oligonucleotide
agatttccccttttcttgagccgtttacttcaaaacagctcgtgcacttggtac

SEQ ID NO: 266853 - DNA, 55 bp, Artificial
  Synthetic oligonucleotide
ggggcacacgctgggacgggtgatctgggaaggttcggccattaccaacaccagt

SEQ ID NO: 266854 - DNA, 55 bp, Artificial
  Synthetic oligonucleotide
ctaagcgcaacccactaagcgcaacccagtgcggcgttaaggggctgaagcctac

SEQ ID NO: 266855 - DNA, 55 bp, Artificial
  Synthetic oligonucleotide
gtattcctctccgagcgccaatttactgttgcggtcacagccaatccccaatgtc

SEQ ID NO: 266856 - DNA, 55 bp, Artificial
  Synthetic oligonucleotide
gtcggcgttattggcgatgtggtcgttaatggtcagaggcgcctgagcgataaac

SEQ ID NO: 266857 - DNA, 55 bp, Artificial
  Synthetic oligonucleotide
gtccccaaacccgatcataggcccaaaagcgacaccgtctcaatgacctgggcag

SEQ ID NO: 266858 - DNA, 54 bp, Artificial
  Synthetic oligonucleotide
ccccgttagaccggttacaagccagcctgtcaagtaaagtgcgtcggtgtcttc

SEQ ID NO: 266859 - DNA, 54 bp, Artificial
  Synthetic oligonucleotide
atattagctttgccactcccgagctgctttggaaggtgcttaccgaaaagcggt

SEQ ID NO: 266860 - DNA, 53 bp, Artificial
  Synthetic oligonucleotide
acgaaagggcctcgttacctgaccggggatcaagaggttttgccgcgcaagat

SEQ ID NO: 266861 - DNA, 52 bp, Artificial
  Synthetic oligonucleotide
cccgtcaggcgtgcacggtttcgcagaaggataggggtatgcgagactgatg

SEQ ID NO: 266862 - DNA, 52 bp, Artificial
  Synthetic oligonucleotide
gggagggcgttaggatcagggctctggcgatacagaccctttggagagcccc

SEQ ID NO: 266863 - DNA, 50 bp, Artificial
  Synthetic oligonucleotide
agaatgtcggggttcgcgggctcacaccccaaccttggctatccaagtcg

SEQ ID NO: 266864 - DNA, 50 bp, Artificial
  Synthetic oligonucleotide
agaaccgggaaaatcctgagcggcggtcggacgatgcgggggactgcacc

SEQ ID NO: 266865 - DNA, 55 bp, Artificial
  Synthetic oligonucleotide
atcgaggtaaaccatcagtagttcgcctcttgccgcatggtctcaaccacaggtg

SEQ ID NO: 266866 - DNA, 50 bp, Artificial
  Synthetic oligonucleotide
agacagcgatgcagcttttcccggggagtgcgccagtagggggtgaccac

SEQ ID NO: 266867 - DNA, 50 bp, Artificial
  Synthetic oligonucleotide
agaggggttttgttggcggctgggtcattctggggaccgtcgccggatgc

SEQ ID NO: 266868 - DNA, 50 bp, Artificial
  Synthetic oligonucleotide
agatctcgaacatgcacacttggcggccaggctgtttggcagtcagcagc

SEQ ID NO: 266869 - DNA, 50 bp, Artificial
  Synthetic oligonucleotide
agaaccggcgcaggaaacacggtcgtgccgacaattctgccgacgattga

SEQ ID NO: 266870 - DNA, 50 bp, Artificial
  Synthetic oligonucleotide
agcacaagcatgccagcctaccccttgtggccacaccgctttgcggttgt

SEQ ID NO: 266871 - DNA, 50 bp, Artificial
  Synthetic oligonucleotide
agccgacctacaccatcgcggacagtgcagcggctattgcgggtaatgcc

SEQ ID NO: 266872 - DNA, 50 bp, Artificial
  Synthetic oligonucleotide
agccgcggaattagaacttcccctggttgtcttggggcaaagcctcggcg

SEQ ID NO: 266873 - DNA, 50 bp, Artificial
  Synthetic oligonucleotide
agcctgggctaccgagctgtttttggccggaccaccacttggtggcaacg

SEQ ID NO: 266874 - DNA, 50 bp, Artificial
  Synthetic oligonucleotide
agcggtacagtcctgatcggtccgcaagaggttatgtcggccttgcgcta

SEQ ID NO: 266875 - DNA, 50 bp, Artificial
  Synthetic oligonucleotide
aggacaacccccacccgccggatattcatctcaaccccggcccaactcga

SEQ ID NO: 266876 - DNA, 54 bp, Artificial
  Synthetic oligonucleotide
cgggttccgtctcatccgggagggcgggaaccactccatattcaccaacggtca

SEQ ID NO: 266877 - DNA, 50 bp, Artificial
  Synthetic oligonucleotide
cgtgtcggtactgctgaacggtcactttgtcaccaccttaaggaggaacc

SEQ ID NO: 266878 - DNA, 50 bp, Artificial
  Synthetic oligonucleotide
gaacgaacgtcccaggtatctctcgtacaacaaaacggcatagggtacat

SEQ ID NO: 266879 - DNA, 50 bp, Artificial
  Synthetic oligonucleotide
tgggttgcttcgtcatgactcagcggccaagtagtaccaaatgcttgcgt

SEQ ID NO: 266880 - DNA, 50 bp, Artificial
  Synthetic oligonucleotide
aatggcacgggaagctctaccccaacaagcccgaccgacatctcggcaca

SEQ ID NO: 266881 - DNA, 50 bp, Artificial
  Synthetic oligonucleotide
aatgcccaggaaaccggcagggtccccggtgttcgctgattaggccatcc

SEQ ID NO: 266882 - DNA, 50 bp, Artificial
  Synthetic oligonucleotide
aatcgggagacggcgcgtggacattgggccccacctcaacggattcgggg

SEQ ID NO: 266883 - DNA, 50 bp, Artificial
  Synthetic oligonucleotide
aatccgcggaccgtagcagaaatgcccggccgtcagtacattggggcttc

SEQ ID NO: 266884 - DNA, 50 bp, Artificial
  Synthetic oligonucleotide
aaggccgcgggagagactgagcccaccaacggctatggcggtcaaaccgt

SEQ ID NO: 266885 - DNA, 50 bp, Artificial
  Synthetic oligonucleotide
aaggaccgacaggtggaaagatgctcccctggcttgcggaatccccgccg

SEQ ID NO: 266886 - DNA, 50 bp, Artificial
  Synthetic oligonucleotide
aagcggcttcctacgactgcaagtcctgtcacggccagaccccaataccc

SEQ ID NO: 266887 - DNA, 55 bp, Artificial
  Synthetic oligonucleotide
cggcatatttatgacgattgtttccagaattagctacccctcttgctcgccattg

SEQ ID NO: 266888 - DNA, 50 bp, Artificial
  Synthetic oligonucleotide
aagcggctccccaacccagacacggcccggattttccgccaccagcagtc

SEQ ID NO: 266889 - DNA, 50 bp, Artificial
  Synthetic oligonucleotide
aagatgttacagcgcacaaccccgctccggaacccacccctcagccgggg

SEQ ID NO: 266890 - DNA, 50 bp, Artificial
  Synthetic oligonucleotide
aagaccggcagtgccgcaccttacggcgatcggcctagcttgcgtacctg

SEQ ID NO: 266891 - DNA, 50 bp, Artificial
  Synthetic oligonucleotide
aactgccgtgcaacggactcgggattcaggaagacacgtaacaggccgct

SEQ ID NO: 266892 - DNA, 49 bp, Artificial
  Synthetic oligonucleotide
aactcgtccccggccatgggaacaccggaaatcccgtaaagaaccacgg

SEQ ID NO: 266893 - DNA, 50 bp, Artificial
  Synthetic oligonucleotide
aacggacgggccacatcggtgatgacacaccccggtttcacccgcatgat

SEQ ID NO: 266894 - DNA, 50 bp, Artificial
  Synthetic oligonucleotide
aacgcgtccatgggctgaatggaaacggccttcccagggggctgcacatg

SEQ ID NO: 266895 - DNA, 50 bp, Artificial
  Synthetic oligonucleotide
aacgccccttgatgccttactccctccgtgccacctgtccgggccattta

SEQ ID NO: 266896 - DNA, 50 bp, Artificial
  Synthetic oligonucleotide
aacccggcggcccggtctctccaattcttcgaatgcagacacaggagtgc

SEQ ID NO: 266897 - DNA, 50 bp, Artificial
  Synthetic oligonucleotide
aaccaaggcctatcccctggaaagagacgacctgggcacggtacggcggg

SEQ ID NO: 266898 - DNA, 55 bp, Artificial
  Synthetic oligonucleotide
cggatagctattaataaacggcctgattaattcactgaccaattctatgccatag

SEQ ID NO: 266899 - DNA, 50 bp, Artificial
  Synthetic oligonucleotide
aacaccgataaccgggcatgaaaccagccctccgacaacgctggccaacg

SEQ ID NO: 266900 - DNA, 50 bp, Artificial
  Synthetic oligonucleotide
aaatgctcatgacggcggatctctacagcgcccgggaggcagaggcgttt

SEQ ID NO: 266901 - DNA, 50 bp, Artificial
  Synthetic oligonucleotide
aaatccagagtgcgtcgcatgacccgggaccttgaaacctcgggacgtcg

SEQ ID NO: 266902 - DNA, 50 bp, Artificial
  Synthetic oligonucleotide
aaagtgggggacagggtggaatttgacgcactttccgcggtgttcggcaa

SEQ ID NO: 266903 - DNA, 50 bp, Artificial
  Synthetic oligonucleotide
aaacggtgggcacactggttctggcagatagcgaaaaccgaccggacgca

SEQ ID NO: 266904 - DNA, 50 bp, Artificial
  Synthetic oligonucleotide
aaaatcctgagcggcggtcggacgatgcgggggactgcaccttgcttaat

SEQ ID NO: 266905 - DNA, 50 bp, Artificial
  Synthetic oligonucleotide
aaaacggcgttactcaccacaatgcctccttcgtagccggcggcgtgtgt

SEQ ID NO: 266906 - DNA, 50 bp, Artificial
  Synthetic oligonucleotide
aaaacggcatctcggacccacgccggaccacctggagggcaccttatcac

SEQ ID NO: 266907 - DNA, 50 bp, Artificial
  Synthetic oligonucleotide
agaaaccccaatgccgccttgtaaccccgttcgcggaaacccagcgtaag

SEQ ID NO: 266908 - DNA, 50 bp, Artificial
  Synthetic oligonucleotide
actgagtgctgtggcccggtccgagggagtgaaccggcgactgagcatag

SEQ ID NO: 266909 - DNA, 55 bp, Artificial
  Synthetic oligonucleotide
cgccgaccggacaccgaagagcccatggcataggtttcgtaggagcggggcaatt

SEQ ID NO: 266910 - DNA, 50 bp, Artificial
  Synthetic oligonucleotide
acggtcatgagtcccgcccgccttgagctattccgggccgccaaaaggga

SEQ ID NO: 266911 - DNA, 50 bp, Artificial
  Synthetic oligonucleotide
acgccgcaactctccatgggggcgctcaaccgaatgggggatatggcctt

SEQ ID NO: 266912 - DNA, 50 bp, Artificial
  Synthetic oligonucleotide
acgccctgggcagtggttccccaggcatgcaagtgcccgtaacgctgttg

SEQ ID NO: 266913 - DNA, 50 bp, Artificial
  Synthetic oligonucleotide
acgcccggcgaattgaggggcgccgagcccatagaggaagtactgccccg

SEQ ID NO: 266914 - DNA, 50 bp, Artificial
  Synthetic oligonucleotide
acgatccgccagcgggtagtgagcgccgaccaagcgtcattgcagttgtg

SEQ ID NO: 266915 - DNA, 50 bp, Artificial
  Synthetic oligonucleotide
accttgcgccgaccggacaccgaagagcccatggcataggtttcgtagga

SEQ ID NO: 266916 - DNA, 50 bp, Artificial
  Synthetic oligonucleotide
accggaaacagaggatgggttgcgccgggccattggggaggcccatcggc

SEQ ID NO: 266917 - DNA, 50 bp, Artificial
  Synthetic oligonucleotide
accgcgacaccgtacccagacagtatgacccttgaggtggcggtagcgta

SEQ ID NO: 266918 - DNA, 50 bp, Artificial
  Synthetic oligonucleotide
accccggcctccttgaaagcccgccagattgccaggttgaccgcggaacg

SEQ ID NO: 266919 - DNA, 50 bp, Artificial
  Synthetic oligonucleotide
accccatgagccgcaaaacggcatctcggacccacgccggaccacctgga

SEQ ID NO: 266920 - DNA, 55 bp, Artificial
  Synthetic oligonucleotide
cgagccaagcccgacagatccctaccacctgttcttgatgcttaaggacctcaaa

SEQ ID NO: 266921 - DNA, 50 bp, Artificial
  Synthetic oligonucleotide
acccattcggctggatgtggcggttcccctcagaaaacgggaaggcgttg

SEQ ID NO: 266922 - DNA, 50 bp, Artificial
  Synthetic oligonucleotide
acccacacgatggaccggaaggttccgtcgctgtgacatgacggcagctc

SEQ ID NO: 266923 - DNA, 50 bp, Artificial
  Synthetic oligonucleotide
accagtgatcggcgctcggaaggaggcggtgggttgtatcgcaccgtcga

SEQ ID NO: 266924 - DNA, 50 bp, Artificial
  Synthetic oligonucleotide
accaggtggcgggggatagcttcatcccaggttttggcgaaaacgcgcac

SEQ ID NO: 266925 - DNA, 50 bp, Artificial
  Synthetic oligonucleotide
accagagccgataccccgtatcccccaccatgggtttgtgcccgcgtttc

SEQ ID NO: 266926 - DNA, 50 bp, Artificial
  Synthetic oligonucleotide
accacctacccgcatgcctccgggatgataccctgaatggcccaccggtg

SEQ ID NO: 266927 - DNA, 50 bp, Artificial
  Synthetic oligonucleotide
acatatcgggcttgaccgtccgccgggcctatgccccatttcccgcctat

SEQ ID NO: 266928 - DNA, 50 bp, Artificial
  Synthetic oligonucleotide
acagcaggccatacggggtttccgtttcccgaagtccggatggttgggcc

SEQ ID NO: 266929 - DNA, 50 bp, Artificial
  Synthetic oligonucleotide
acacgccgctgagtatccgcacacacgcctccttgccggtaccctttgcc

SEQ ID NO: 266930 - DNA, 50 bp, Artificial
  Synthetic oligonucleotide
acaaaccacatgcctgagatcctcctgtcgcgctgccagggcttcactga

SEQ ID NO: 266931 - DNA, 56 bp, Artificial
  Synthetic oligonucleotide
taacgcctgccccatgataacgtaatccaccggcgtgaatcggtgcgggtacaaaa

SEQ ID NO: 266932 - DNA, 55 bp, Artificial
  Synthetic oligonucleotide
ctcttgggcgagtacgtggagtagggttactactattctggcacctgagcatcct

SEQ ID NO: 266933 - DNA, 55 bp, Artificial
  Synthetic oligonucleotide
cttctacagacgctggtttattgataccgagagtagagttaacggactccacaga

SEQ ID NO: 266934 - DNA, 54 bp, Artificial
  Synthetic oligonucleotide
cttttaggggcggacgttctgctgccgtaacaggggtgccaggacaacccaatc

SEQ ID NO: 266935 - DNA, 55 bp, Artificial
  Synthetic oligonucleotide
gaaatagttcgtaccactgaatgcacctaaaggaccggtaccagtactaggagta

SEQ ID NO: 266936 - DNA, 55 bp, Artificial
  Synthetic oligonucleotide
gacagagcattctcgttattgacgccacttctagcgagcctatagaaggggctgc

SEQ ID NO: 266937 - DNA, 55 bp, Artificial
  Synthetic oligonucleotide
gtgccttttagactgtcgtctgttaggtctaaacctagggtgtttaatatggcag

SEQ ID NO: 266938 - DNA, 55 bp, Artificial
  Synthetic oligonucleotide
gagcgcgagaatgatctggtgataggtacatttggtcgtgcggcttgggttttag

SEQ ID NO: 266939 - DNA, 55 bp, Artificial
  Synthetic oligonucleotide
gagtctgcaggaaatgttttggccggtattacttctctagttggagaacctacta

SEQ ID NO: 266940 - DNA, 55 bp, Artificial
  Synthetic oligonucleotide
gagtggcggaaatgacagtcctgaaggagacatacaattggtagacagactttac

SEQ ID NO: 266941 - DNA, 53 bp, Artificial
  Synthetic oligonucleotide
gatcgaccggcgtgaggggtctaaagggataggttttccattctccggtcaag

SEQ ID NO: 266942 - DNA, 60 bp, Artificial
  Synthetic oligonucleotide
gctagactggctagatgtgtcacgctatgccgattcgcatggcctgcatgcagatggact

SEQ ID NO: 266943 - DNA, 55 bp, Artificial
  Synthetic oligonucleotide
ggtgtagccttctaaagtgtggtatgcgtctcctagctttggccaagtaatatag

SEQ ID NO: 266944 - DNA, 55 bp, Artificial
  Synthetic oligonucleotide
gcgaagtgcggtatacgtccggcgactatgatggatactggagtttgggacaggc

SEQ ID NO: 266945 - DNA, 55 bp, Artificial
  Synthetic oligonucleotide
gcgctgcactatgtctagcgatgacatgacctatctcatgtcccataacacctgc

SEQ ID NO: 266946 - DNA, 55 bp, Artificial
  Synthetic oligonucleotide
gctcccattatcttggtgggaggtgcaactggtatgatcggggatccctcaggaa

SEQ ID NO: 266947 - DNA, 55 bp, Artificial
  Synthetic oligonucleotide
ggcatctacagcaacataatgaggggtaactccattaaacgcaaccaattcatcc

SEQ ID NO: 266948 - DNA, 55 bp, Artificial
  Synthetic oligonucleotide
gctgtctggaagtggatctcccaaggcaactaggacacttgttccacggtgtatg

SEQ ID NO: 266949 - DNA, 54 bp, Artificial
  Synthetic oligonucleotide
ggcataggccttaaatatgttactaccagactctgggtaccgcttaaaattaaa

SEQ ID NO: 266950 - DNA, 55 bp, Artificial
  Synthetic oligonucleotide
ggacgcttttgtacagactgcctgtcatatcgcacgtggtggtacgctagaggta

SEQ ID NO: 266951 - DNA, 55 bp, Artificial
  Synthetic oligonucleotide
tttcgttttctggtatcaaattaggatctgaatcatcgggttcatcctcaaactg

SEQ ID NO: 266952 - DNA, 51 bp, Artificial
  Synthetic oligonucleotide
acccgctggccaaaacctattacaccattgttttatacggggtgcctttct

SEQ ID NO: 266953 - DNA, 60 bp, Artificial
  Synthetic oligonucleotide
cttgccactgtgccgtacacaaacacaacctggtcacctagcagtgcagcagactggcga

SEQ ID NO: 266954 - DNA, 55 bp, Artificial
  Synthetic oligonucleotide
acgtagctgctggtaaaacagtactgggctatcccgctacggactctcgagagat

SEQ ID NO: 266955 - DNA, 55 bp, Artificial
  Synthetic oligonucleotide
agacgtaacagtgtaggctaccgcagtaatgtaacacgagtagcagaagctctta

SEQ ID NO: 266956 - DNA, 55 bp, Artificial
  Synthetic oligonucleotide
tttagcgcagtgtctgccgtaaccgtggttggtattactgccggaactattactg

SEQ ID NO: 266957 - DNA, 55 bp, Artificial
  Synthetic oligonucleotide
ttgtggggtttccaactgcttcccgtcatgtgtagtaatgaccacattacccctc

SEQ ID NO: 266958 - DNA, 54 bp, Artificial
  Synthetic oligonucleotide
agttgctttggcaggggctaaaaggcagggggcgttgttggtagagcctttcac

SEQ ID NO: 266959 - DNA, 55 bp, Artificial
  Synthetic oligonucleotide
atctattaatgcaggaggtaattggacgactgtatctggtcagacgagcactacg

SEQ ID NO: 266960 - DNA, 55 bp, Artificial
  Synthetic oligonucleotide
attcctagcgccgtctgaatcacctcgtgaccacgacttgtggcgtgcacgtact

SEQ ID NO: 266961 - DNA, 55 bp, Artificial
  Synthetic oligonucleotide
tgggttgtcaattttccttcataccattggaatgatccagaggtggaattaacga

SEQ ID NO: 266962 - DNA, 55 bp, Artificial
  Synthetic oligonucleotide
caccgttatgagattgcgttacagcagtatccctacaattgtagcaccacatcag

SEQ ID NO: 266963 - DNA, 55 bp, Artificial
  Synthetic oligonucleotide
tctcaggtcagacagatcactcactacggttcggtatagaatagctcgctgccag

SEQ ID NO: 266964 - DNA, 60 bp, Artificial
  Synthetic oligonucleotide
gccatgactggcgttcatcgcataccctactgtcctactactgcgtggcgcacctatgta

SEQ ID NO: 266965 - DNA, 55 bp, Artificial
  Synthetic oligonucleotide
ccattacgcaaactacccagtttaggcgtttggcgagcagtcccacctgtactgt

SEQ ID NO: 266966 - DNA, 55 bp, Artificial
  Synthetic oligonucleotide
tatgaagcacgtggcgttttaatggccaccatactggcagctctagcagtaatgt

SEQ ID NO: 266967 - DNA, 55 bp, Artificial
  Synthetic oligonucleotide
cccgagtacggaagcccgtgctgcaacacttaccactgatcatggtactatcgag

SEQ ID NO: 266968 - DNA, 55 bp, Artificial
  Synthetic oligonucleotide
ccgctactgacgatgttgacggaaatattacctcttcaataacagcagctggttc

SEQ ID NO: 266969 - DNA, 55 bp, Artificial
  Synthetic oligonucleotide
ccggtaatgttagcattgcgtctagtggagtttcattattctccatgtaagcctt

SEQ ID NO: 266970 - DNA, 55 bp, Artificial
  Synthetic oligonucleotide
cctagaggttgtaagactcgttatagactgtctatgcacccatttcacccatcct

SEQ ID NO: 266971 - DNA, 55 bp, Artificial
  Synthetic oligonucleotide
cctcgctataagcctttaaaacgtctcaatcgccattatacgacgttcttgtttg

SEQ ID NO: 266972 - DNA, 55 bp, Artificial
  Synthetic oligonucleotide
cgctatggactaaccatcgttcgattttccatgcgctagtagacttatcagacag

SEQ ID NO: 266973 - DNA, 55 bp, Artificial
  Synthetic oligonucleotide
cgggtcctggtcatgcgtctgtttatacagggaccacgccagcctctcatgggat

SEQ ID NO: 266974 - DNA, 55 bp, Artificial
  Synthetic oligonucleotide
cggtacgaaccaactctgtatgacattctggacagtgcgtggcataaaccgtagg

SEQ ID NO: 266975 - DNA, 60 bp, Artificial
  Synthetic oligonucleotide
gcaaacagcacatgcctcagccgatccatggaatggtcgaagtgcgtccgatgcattgga

SEQ ID NO: 266976 - DNA, 55 bp, Artificial
  Synthetic oligonucleotide
ctatcggacacatcgcttactggtccgtttggactcgttgcatctgttgtcgctg

SEQ ID NO: 266977 - DNA, 54 bp, Artificial
  Synthetic oligonucleotide
tggtatgggtcgcttctcaaggacccttatggaacagtggcggagaccgtgggg

SEQ ID NO: 266978 - DNA, 54 bp, Artificial
  Synthetic oligonucleotide
taaatcaactggctagtgatcgtgtgggaattatagcatatgccgctcaggcag

SEQ ID NO: 266979 - DNA, 54 bp, Artificial
  Synthetic oligonucleotide
ggacacccgctcttacaggagctgctgctattgacgctgtgggcgatccctacc

SEQ ID NO: 266980 - DNA, 54 bp, Artificial
  Synthetic oligonucleotide
aagaattgctccatattacgaggactcatcaacaatactgacttgggacgcttt

SEQ ID NO: 266981 - DNA, 54 bp, Artificial
  Synthetic oligonucleotide
gacgtttgagggcggcaagttcgagtcagagggtaggcggttcgagccttggag

SEQ ID NO: 266982 - DNA, 54 bp, Artificial
  Synthetic oligonucleotide
catttgtaatgcgctcgctacatcttgcccactactcatcgctccagacagtaa

SEQ ID NO: 266983 - DNA, 54 bp, Artificial
  Synthetic oligonucleotide
cccaatttaccttagtgggcatgtgcggccttatggcggggtgtcctacacgcc

SEQ ID NO: 266984 - DNA, 53 bp, Artificial
  Synthetic oligonucleotide
ggggttatttaaacggtctagccacggagatgggcgaatctacaaacgccatc

SEQ ID NO: 266985 - DNA, 53 bp, Artificial
  Synthetic oligonucleotide
caaagtgcactaaacatcggagaatttggatctgcaggtttgatggtagttgc

SEQ ID NO: 266986 - DNA, 55 bp, Artificial
  Synthetic oligonucleotide
gcaatcgttaatacggtattattaggtgtataccaacgacgataaaattctttca

SEQ ID NO: 266987 - DNA, 53 bp, Artificial
  Synthetic oligonucleotide
ctatgattttggggccccattgggcaaagtgctctccctgacttacgcggccc

SEQ ID NO: 266988 - DNA, 53 bp, Artificial
  Synthetic oligonucleotide
cacccggcgagtaatgcttgtgatccagaaatgttagcggaaatggctggcag

SEQ ID NO: 266989 - DNA, 53 bp, Artificial
  Synthetic oligonucleotide
tctatgaccccattggagcgaagccaacccactaggttagacgctagtagaaa

SEQ ID NO: 266990 - DNA, 53 bp, Artificial
  Synthetic oligonucleotide
taactagcgttcagccttaaacgccatttatcgctattgttcctaagaccaat

SEQ ID NO: 266991 - DNA, 53 bp, Artificial
  Synthetic oligonucleotide
tacacacccaccgggcgctctattcagcgaccctatgacagcacctctcgaga

SEQ ID NO: 266992 - DNA, 52 bp, Artificial
  Synthetic oligonucleotide
tttggagcagggggcgcgggctatgttcgtttctccctctgtgtagacgcat

SEQ ID NO: 266993 - DNA, 52 bp, Artificial
  Synthetic oligonucleotide
tatcgcagtatgagtggcgccttcggagcattaggcggtgaccttaccgcta

SEQ ID NO: 266994 - DNA, 52 bp, Artificial
  Synthetic oligonucleotide
gcaggccaagacggtacaaagtcaattggccgcccacggaatagccagcgaa

SEQ ID NO: 266995 - DNA, 51 bp, Artificial
  Synthetic oligonucleotide
caggcaacgccaagtcagacggtatgctcaggatcgcccgtagcggactta

SEQ ID NO: 266996 - DNA, 51 bp, Artificial
  Synthetic oligonucleotide
agtacctcttagattaatgtttcctgatcctgttagcgttgcattgagatg

SEQ ID NO: 266997 - DNA, 56 bp, Artificial
  Synthetic oligonucleotide
tccaccggcgtgaatcggtgcgggtacaaaatcatgccctagggtatacatgggta

SEQ ID NO: 266998 - DNA, 51 bp, Artificial
  Synthetic oligonucleotide
gctggagtgatccctataatattctcgttttgctgtgcaagctctacaatc

SEQ ID NO: 266999 - DNA, 50 bp, Artificial
  Synthetic oligonucleotide
cgtaggctggacttcccattcaaaccggtactctcatatagtaattcgcc

SEQ ID NO: 267000 - DNA, 50 bp, Artificial
  Synthetic oligonucleotide
cgtttctaccagtagtgatcaaaagcttaacgaccgctcgaacagaaagt

SEQ ID NO: 267001 - DNA, 50 bp, Artificial
  Synthetic oligonucleotide
ctcgatcacccctgtaagggtctgaccacgaataccctattgcattccag

SEQ ID NO: 267002 - DNA, 50 bp, Artificial
  Synthetic oligonucleotide
tggtcaaggtgggagcaaccaacttattgccaagtcaaaaggtcgggaaa

SEQ ID NO: 267003 - DNA, 50 bp, Artificial
  Synthetic oligonucleotide
agcggcagctgcaactccttgcaatctagaagtggcctttaatattctcg

SEQ ID NO: 267004 - DNA, 55 bp, Artificial
  Synthetic oligonucleotide
taaaacgtctcaatcgccattatacaacgttcttgtttgtttcctagcggctggc

SEQ ID NO: 267005 - DNA, 55 bp, Artificial
  Synthetic oligonucleotide
gtggttctccagtggtttgttttgatgtaggtataggcccagatctagtaaataa

SEQ ID NO: 267006 - DNA, 55 bp, Artificial
  Synthetic oligonucleotide
cgagccccgtgatcgatatccccgtattcagtggcagtattggtattccactgcc

SEQ ID NO: 267007 - DNA, 55 bp, Artificial
  Synthetic oligonucleotide
cggtagtgtgccggaagaggtcgtcataaaatccatcgcgcgagataatattcag

SEQ ID NO: 267008 - DNA, 55 bp, Artificial
  Synthetic oligonucleotide
aaaaccatctacctgtctttggaccctaccaaccgtatctggatgagtgacgcgg

SEQ ID NO: 267009 - DNA, 55 bp, Artificial
  Synthetic oligonucleotide
aacggacgaatcatttgccgtcgcaacatatggaaaacctgtttcggtgtggtcg

SEQ ID NO: 267010 - DNA, 54 bp, Artificial
  Synthetic oligonucleotide
ctggaggccaaggtagacacttggatccagtcggttcgtgatgctgtttagtcc

SEQ ID NO: 267011 - DNA, 54 bp, Artificial
  Synthetic oligonucleotide
acgcatcgggagcgaaggatcgacacgtaaaattgattcggcgccatctagaga

SEQ ID NO: 267012 - DNA, 54 bp, Artificial
  Synthetic oligonucleotide
ggggctttgcgtgcctgatgagatgcgtttctcaagattacatttcgtaacgga

SEQ ID NO: 267013 - DNA, 54 bp, Artificial
  Synthetic oligonucleotide
agggacgggtccaagccaatttcagtcacccaccggtcaacaatccgggcatat

SEQ ID NO: 267014 - DNA, 54 bp, Artificial
  Synthetic oligonucleotide
gcggcaaaggatgcgccaacaattgcgaattttcgtacactgccttgcattctc

SEQ ID NO: 267015 - DNA, 54 bp, Artificial
  Synthetic oligonucleotide
gtcgaccaagagtgcctcaacgccctacacccagcacgtttcttggtccgcgcc

SEQ ID NO: 267016 - DNA, 54 bp, Artificial
  Synthetic oligonucleotide
gcaccgaacttaccctgggctcgaatggttgtgtaacctaaaggtgcgtagggc

SEQ ID NO: 267017 - DNA, 54 bp, Artificial
  Synthetic oligonucleotide
tgccaacttaactcgccgaaatgagacaatccggcgatgaatacatacaagcgc

SEQ ID NO: 267018 - DNA, 55 bp, Artificial
  Synthetic oligonucleotide
cggtccaggtacctgagcaaatgcagcagttcgtggcatgggcaacgcagcaggc

SEQ ID NO: 267019 - DNA, 54 bp, Artificial
  Synthetic oligonucleotide
atcgacgacgcatcagaagcggcattgagctgtcatcgtaaagctggcctgggc

SEQ ID NO: 267020 - DNA, 54 bp, Artificial
  Synthetic oligonucleotide
tagtccgcaacgtatccagtcgtttgatcaaagagtcgtgccgcactcggtcca

SEQ ID NO: 267021 - DNA, 53 bp, Artificial
  Synthetic oligonucleotide
caatcgtcgctctggagagtgtcccgggagatattcgtactggcagaggtgct

SEQ ID NO: 267022 - DNA, 53 bp, Artificial
  Synthetic oligonucleotide
gttgtaccgccccgggtatcacgatcacaaaggtcgagccgcgatgccggttg

SEQ ID NO: 267023 - DNA, 53 bp, Artificial
  Synthetic oligonucleotide
tgattgcgtgtaacgcgctacacaaaacattttccgaagggccgaaccaagtc

SEQ ID NO: 267024 - DNA, 53 bp, Artificial
  Synthetic oligonucleotide
gaaatctgaacgcaagatgcgtatctttcagcctgatgcttacctatcaattg

SEQ ID NO: 267025 - DNA, 52 bp, Artificial
  Synthetic oligonucleotide
tacgctgctggaggtagatttaaacgcacgcaaagggcagacgttattagta

SEQ ID NO: 267026 - DNA, 52 bp, Artificial
  Synthetic oligonucleotide
gtttggcaaagtttgactcgatattacaaggggccactccatgacaattaag

SEQ ID NO: 267027 - DNA, 52 bp, Artificial
  Synthetic oligonucleotide
ctgctacaaacgaggaagtatcagcggcccagttcaatatgctggtctatgt

SEQ ID NO: 267028 - DNA, 52 bp, Artificial
  Synthetic oligonucleotide
aaggcagggaacaccgatggcgtaagcgcataaaagatagatcagtacgaaa

SEQ ID NO: 267029 - DNA, 55 bp, Artificial
  Synthetic oligonucleotide
cgtagtgtcaacgacaaccctgatgcgagctacggccgtatcattgcccacagca

SEQ ID NO: 267030 - DNA, 52 bp, Artificial
  Synthetic oligonucleotide
aatcgctgcgtaggtctccgtcagtgtggagtaggcccattgataacgggtc

SEQ ID NO: 267031 - DNA, 52 bp, Artificial
  Synthetic oligonucleotide
atcattttaccggttgaatttaacagtgagcggggtgtcgtagagtatccac

SEQ ID NO: 267032 - DNA, 52 bp, Artificial
  Synthetic oligonucleotide
aaaataacgcgtacattgaagctcttgtttcacacaggagtttgccgtgaaa

SEQ ID NO: 267033 - DNA, 51 bp, Artificial
  Synthetic oligonucleotide
ccgactttacaatccgatgaggttaaacttcgccccgacgcacataacaat

SEQ ID NO: 267034 - DNA, 51 bp, Artificial
  Synthetic oligonucleotide
agcgtagtataggcgttaccgcgaccatcgaacgccgtatgtaggggccca

SEQ ID NO: 267035 - DNA, 51 bp, Artificial
  Synthetic oligonucleotide
tagacgttgcggtagacggcatgaaagtgcgtgcgagcaccgtcccgaatc

SEQ ID NO: 267036 - DNA, 51 bp, Artificial
  Synthetic oligonucleotide
tcgatgggtacgcaggcctctcccggaggaatggcgggaccccaactgacg

SEQ ID NO: 267037 - DNA, 51 bp, Artificial
  Synthetic oligonucleotide
tagtgcggggaggccgagtttgggagcgagccaagtgtctcggccaaaatt

SEQ ID NO: 267038 - DNA, 51 bp, Artificial
  Synthetic oligonucleotide
gattcaggctaaccgtctgcatgccaccatcaacttcccggataaccgtga

SEQ ID NO: 267039 - DNA, 51 bp, Artificial
  Synthetic oligonucleotide
taatgtcgatgagaatgctctgattgcggtctgccccgctgtactcatgag

SEQ ID NO: 267040 - DNA, 53 bp, Artificial
  Synthetic oligonucleotide
cgtataaacaggacaacccggtcgtaattgagaaatcgcacctggcgtttaaa

SEQ ID NO: 267041 - DNA, 50 bp, Artificial
  Synthetic oligonucleotide
aagccaccagtcacggattcgcgtgggcgtccaaccggccaaaataggcg

SEQ ID NO: 267042 - DNA, 50 bp, Artificial
  Synthetic oligonucleotide
aagccacccccgtgcggaaccttatagcccgtctcaccctctttacgcag

SEQ ID NO: 267043 - DNA, 50 bp, Artificial
  Synthetic oligonucleotide
aagcacaaccgaccgaccgcaaacccgtgccagcaaagggagtggcctca

SEQ ID NO: 267044 - DNA, 50 bp, Artificial
  Synthetic oligonucleotide
aagatcaatgtcgtagcccaggggtgcaagatctcgcgccacggtcagcg

SEQ ID NO: 267045 - DNA, 50 bp, Artificial
  Synthetic oligonucleotide
aagagttccctacgccacctgccatcgcggttcaggctgcaagcgtcaac

SEQ ID NO: 267046 - DNA, 50 bp, Artificial
  Synthetic oligonucleotide
aagaaagggcctccccgcagcggtgacctgtaatcgcccattttcgaggg

SEQ ID NO: 267047 - DNA, 50 bp, Artificial
  Synthetic oligonucleotide
aacttggtggcgtaccgtggtaggtgggttggtgaaatctgcggggccga

SEQ ID NO: 267048 - DNA, 50 bp, Artificial
  Synthetic oligonucleotide
aactccggtgagggtgactgctggcttaggcctgtagcggtgagccgatc

SEQ ID NO: 267049 - DNA, 50 bp, Artificial
  Synthetic oligonucleotide
gagacccctttgttttggttggtgtcgccagagatgcgatagaactttgc

SEQ ID NO: 267050 - DNA, 50 bp, Artificial
  Synthetic oligonucleotide
aactcagattacgcgcccaaaagattgcgcccgtagcgtcacggcaccct

SEQ ID NO: 267051 - DNA, 55 bp, Artificial
  Synthetic oligonucleotide
cgtgtggtctcggggccgatgggacaatagtaccaaggcggtagtcagtaccaaa

SEQ ID NO: 267052 - DNA, 50 bp, Artificial
  Synthetic oligonucleotide
aactaggcgctacacgtcggccaagtgccacctgtctacaaggcggcaac

SEQ ID NO: 267053 - DNA, 50 bp, Artificial
  Synthetic oligonucleotide
aagggcggtcgacacattgcctggtcggcgatgttcggacacatgtcaga

SEQ ID NO: 267054 - DNA, 50 bp, Artificial
  Synthetic oligonucleotide
ccgcgacaggagttgcctcttgaggggtggaagggctggactcactttgc

SEQ ID NO: 267055 - DNA, 50 bp, Artificial
  Synthetic oligonucleotide
ccgctgcctatttggccgccattgcgggtacttgcgccaaaaccaatggg

SEQ ID NO: 267056 - DNA, 50 bp, Artificial
  Synthetic oligonucleotide
ccggatccgtttttgcgcggcatccacagaaactccgttacgcccaaccg

SEQ ID NO: 267057 - DNA, 50 bp, Artificial
  Synthetic oligonucleotide
ccggatggccgcgccacacagacatcccgtcgaagctccagcctgacaaa

SEQ ID NO: 267058 - DNA, 50 bp, Artificial
  Synthetic oligonucleotide
ccggccggcattcgagcccaagcggtactcagcgatggcacactcgtcca

SEQ ID NO: 267059 - DNA, 50 bp, Artificial
  Synthetic oligonucleotide
ccgggctggcttcgttgccggactcaagtgccagtgttcgagcggtttca

SEQ ID NO: 267060 - DNA, 50 bp, Artificial
  Synthetic oligonucleotide
aagggcgcatgaggcgcttaaggggtgacgtccgttggcgacgataggcg

SEQ ID NO: 267061 - DNA, 50 bp, Artificial
  Synthetic oligonucleotide
aagggccttgcgtttcgtggtgcagccacggttccgactcgtgacctgca

SEQ ID NO: 267062 - DNA, 55 bp, Artificial
  Synthetic oligonucleotide
cgtttcgtacgaggggacgctcaagtgtgagctgattgccctgtgttgggtcggg

SEQ ID NO: 267063 - DNA, 50 bp, Artificial
  Synthetic oligonucleotide
aagggacgctttggcgactacggtggccgctttgtggcggagacattggt

SEQ ID NO: 267064 - DNA, 50 bp, Artificial
  Synthetic oligonucleotide
aaggcccacatgcacgctacgcccaactactctttatcgccacgcgcctg

SEQ ID NO: 267065 - DNA, 50 bp, Artificial
  Synthetic oligonucleotide
aaggacggagtcagcgctagcatggcagggccataggctgaaagatcgcc

SEQ ID NO: 267066 - DNA, 50 bp, Artificial
  Synthetic oligonucleotide
aagctgctaccaaaccacagctcggacgatcggtcttcccagcgtgtcgg

SEQ ID NO: 267067 - DNA, 50 bp, Artificial
  Synthetic oligonucleotide
aagctcacaggggaaatgccgggcgtgcagctcagacacttttgcgtgcc

SEQ ID NO: 267068 - DNA, 50 bp, Artificial
  Synthetic oligonucleotide
aagctaccgacacagggaagccgccatttgaactgtcccgtcgggctgac

SEQ ID NO: 267069 - DNA, 50 bp, Artificial
  Synthetic oligonucleotide
aagcggggcgtaaggacggagtcagcgctagcatggcagggccataggct

SEQ ID NO: 267070 - DNA, 50 bp, Artificial
  Synthetic oligonucleotide
aagcgggatttgtccagagcctctgcgatgtttcgggcagagcggatgga

SEQ ID NO: 267071 - DNA, 50 bp, Artificial
  Synthetic oligonucleotide
aagcgccaagtgcgctggaggtagaccatgtcggcagtgtccgttcctgt

SEQ ID NO: 267072 - DNA, 50 bp, Artificial
  Synthetic oligonucleotide
aagcgagatggctgttgatctcggagcgacccggtgaggggtgggcaaac

SEQ ID NO: 267073 - DNA, 55 bp, Artificial
  Synthetic oligonucleotide
ctactgtgatagcgacgaggggcaaatagtcgtagtcatcgttaagcagtcgagc

SEQ ID NO: 267074 - DNA, 50 bp, Artificial
  Synthetic oligonucleotide
aagcgacgccgcgactggtatgcgcctgcgggtcaaagaaaggctccaca

SEQ ID NO: 267075 - DNA, 50 bp, Artificial
  Synthetic oligonucleotide
aagcccgctttgatgcatggggccatcacaaaacaggagcacgtcagcgc

SEQ ID NO: 267076 - DNA, 50 bp, Artificial
  Synthetic oligonucleotide
aagcccaatgcggcaggctcggcaaagctttcactaggcccgatcacgtg

SEQ ID NO: 267077 - DNA, 50 bp, Artificial
  Synthetic oligonucleotide
aagccactttgggggtggaaggctttagcccgtctggtagtgcggtgacc

SEQ ID NO: 267078 - DNA, 50 bp, Artificial
  Synthetic oligonucleotide
aacccacgctagcagcgagcttctcttgcaagcgggcaatcgcgaccaag

SEQ ID NO: 267079 - DNA, 50 bp, Artificial
  Synthetic oligonucleotide
aaccactgagcctcccaccgctaaacgcgctcgaggggccttcagccaaa

SEQ ID NO: 267080 - DNA, 50 bp, Artificial
  Synthetic oligonucleotide
aaccaccttctgtgaagagccgcgagctgcctatgaccgagtgcacctga

SEQ ID NO: 267081 - DNA, 50 bp, Artificial
  Synthetic oligonucleotide
aacagaatgtgggcacaccaaaaccgcccgcttggtggagggctttacgg

SEQ ID NO: 267082 - DNA, 50 bp, Artificial
  Synthetic oligonucleotide
aacaatgtcgtgctacccgaaggcccatttcgcatcctgcctgcggaacc

SEQ ID NO: 267083 - DNA, 50 bp, Artificial
  Synthetic oligonucleotide
aaatcgagtgcccctagggccagaacgggctttccacgcactctgctcac

SEQ ID NO: 267084 - DNA, 55 bp, Artificial
  Synthetic oligonucleotide
ctattgatggacgctattgtcgcgatgactgcaagccttgccagccctgaaccag

SEQ ID NO: 267085 - DNA, 50 bp, Artificial
  Synthetic oligonucleotide
aaagttggtggagacccttgattcctacatcccggagcctgtgcgcgcga

SEQ ID NO: 267086 - DNA, 50 bp, Artificial
  Synthetic oligonucleotide
aaagtgtaccgaaccggcgacttgtgccgccaacttccctccggtgagat

SEQ ID NO: 267087 - DNA, 50 bp, Artificial
  Synthetic oligonucleotide
aaagggtgccctagttttgtcgggcgctatggggacggggcgtagagagt

SEQ ID NO: 267088 - DNA, 50 bp, Artificial
  Synthetic oligonucleotide
aaagcgtaggtcgttacgcctgattccggggtcacttcgggaccggggaa

SEQ ID NO: 267089 - DNA, 50 bp, Artificial
  Synthetic oligonucleotide
aaagcgtacccgaggaaccgagcctacacgcttaaggtcccctctgcgta

SEQ ID NO: 267090 - DNA, 50 bp, Artificial
  Synthetic oligonucleotide
aaagcgcggcccgtagaggaaaccacagcgggtgccggatgcctggggta

SEQ ID NO: 267091 - DNA, 50 bp, Artificial
  Synthetic oligonucleotide
aaagcgccggcccgtcctgactatcacccgggcgtatctgcacttccacg

SEQ ID NO: 267092 - DNA, 50 bp, Artificial
  Synthetic oligonucleotide
aaagcgagcccctcgccattcctccgccaaacgtgcgcctacgctgtgag

SEQ ID NO: 267093 - DNA, 50 bp, Artificial
  Synthetic oligonucleotide
aaagcctgtgctccggtggcagcctgagtagtcgctgctttcccacgctt

SEQ ID NO: 267094 - DNA, 50 bp, Artificial
  Synthetic oligonucleotide
aaactgactggtcgagtaagccccgagagccgcccccttgtgacccgcgg

SEQ ID NO: 267095 - DNA, 55 bp, Artificial
  Synthetic oligonucleotide
ctgaatccgaaagcgtagggttcccattgtatcgacgtaaagttgggcaagacgc

SEQ ID NO: 267096 - DNA, 50 bp, Artificial
  Synthetic oligonucleotide
aaacggccggctgacaatttaaccggagcgtaggggccgcgaaccacctt

SEQ ID NO: 267097 - DNA, 50 bp, Artificial
  Synthetic oligonucleotide
aaacgcgcgcccattacgcggtcaaggtttcccactccctggaagatgct

SEQ ID NO: 267098 - DNA, 50 bp, Artificial
  Synthetic oligonucleotide
aaaccgcgcatcttcgcacttgaaccgccaatgccagtgtgtgaccctgg

SEQ ID NO: 267099 - DNA, 50 bp, Artificial
  Synthetic oligonucleotide
aaacacggactctggggtacctgcaagccatcccaatggcgtatccgggg

SEQ ID NO: 267100 - DNA, 50 bp, Artificial
  Synthetic oligonucleotide
aaaagtaacgcccccggcctcccactgcggtaaatcggcagcgggatagt

SEQ ID NO: 267101 - DNA, 50 bp, Artificial
  Synthetic oligonucleotide
aaaacgagccctctgcggtcataagaaacctaccgtcatcgtactgcaag

SEQ ID NO: 267102 - DNA, 50 bp, Artificial
  Synthetic oligonucleotide
aactacgttgcgctcctgaaaagcctgggagccgactcatcccgcgtgaa

SEQ ID NO: 267103 - DNA, 50 bp, Artificial
  Synthetic oligonucleotide
aacgtcagcgatgcatgaccctggctgcccaccgagcggatttcctccag

SEQ ID NO: 267104 - DNA, 50 bp, Artificial
  Synthetic oligonucleotide
aacgtcaatcgcccatcccaacactgacgcccggtgcacaccggtttctg

SEQ ID NO: 267105 - DNA, 50 bp, Artificial
  Synthetic oligonucleotide
aacgggttcccccacattggtggcagggcgcagagctcacgaactttgac

SEQ ID NO: 267106 - DNA, 55 bp, Artificial
  Synthetic oligonucleotide
ctgcttcatagcgacttcgaagacctttaacgattgagacactacccgtcagcgg

SEQ ID NO: 267107 - DNA, 50 bp, Artificial
  Synthetic oligonucleotide
aacgggggcgcggcactgttctgagcaccgggggtatcaactggcatgaa

SEQ ID NO: 267108 - DNA, 50 bp, Artificial
  Synthetic oligonucleotide
aacggatgtatgggcggtgctgagccggattcgcagcggtgtaatcgcta

SEQ ID NO: 267109 - DNA, 50 bp, Artificial
  Synthetic oligonucleotide
aacgctgagctgccgccgctacgcgtgcacccagaatttctgccgtatca

SEQ ID NO: 267110 - DNA, 50 bp, Artificial
  Synthetic oligonucleotide
aacgctcgacaggcagcgctcccagtgccggagccacacccagatcggcc

SEQ ID NO: 267111 - DNA, 50 bp, Artificial
  Synthetic oligonucleotide
aacgcggtcccctaaagcgccacctctgtttcgtcatcaggcatgcgcag

SEQ ID NO: 267112 - DNA, 50 bp, Artificial
  Synthetic oligonucleotide
aacgcctgacacggggctgtctgaagtcagtcgcgcccaggtctctgaag

SEQ ID NO: 267113 - DNA, 50 bp, Artificial
  Synthetic oligonucleotide
aacgccaggatcaatcggcgcaatttcccgggacacgagggtttgcaggt

SEQ ID NO: 267114 - DNA, 50 bp, Artificial
  Synthetic oligonucleotide
aacgagattgtcggtgggacggtgccccgggagtacatccccgcagtgca

SEQ ID NO: 267115 - DNA, 50 bp, Artificial
  Synthetic oligonucleotide
aacctgcatttaggcatgcgaacagcgttgccaccccaccgaacacaccg

SEQ ID NO: 267116 - DNA, 50 bp, Artificial
  Synthetic oligonucleotide
aaccgtctcaggatcagtcacgtctgtcggcccgtcgctgcacatgctcg

SEQ ID NO: 267117 - DNA, 55 bp, Artificial
  Synthetic oligonucleotide
cgccattctttcccggttgcaggttcgctaatctagagcgttttggaggcagcaa

SEQ ID NO: 267118 - DNA, 55 bp, Artificial
  Synthetic oligonucleotide
cttaattgcgctatttgctgtcgcgaataccgcgctcctaaactacatcatggcc

SEQ ID NO: 267119 - DNA, 50 bp, Artificial
  Synthetic oligonucleotide
aaccggggtttaaccgcgcttttctcgcgaagtgcctggtatcggctggc

SEQ ID NO: 267120 - DNA, 50 bp, Artificial
  Synthetic oligonucleotide
aaccggggcacgcccacgtaatgcagccttctccgacctcgcataccgta

SEQ ID NO: 267121 - DNA, 50 bp, Artificial
  Synthetic oligonucleotide
aaccggccccgtagagtgtgtaggaacccggcctacccatgttcgcggtc

SEQ ID NO: 267122 - DNA, 50 bp, Artificial
  Synthetic oligonucleotide
gcgtctgaccaagtttaaatgcgccccatggtttagccatttcgtgaggc

SEQ ID NO: 267123 - DNA, 50 bp, Artificial
  Synthetic oligonucleotide
aaccgcagccagacttacggcgacctccatgcgtaccccggtgacgggat

SEQ ID NO: 267124 - DNA, 50 bp, Artificial
  Synthetic oligonucleotide
aaccgcagccaatagcaccccgcttaccgacggcgcatcttgcgtattgc

SEQ ID NO: 267125 - DNA, 50 bp, Artificial
  Synthetic oligonucleotide
aaccctgcccgtaacgcgcaatttgatacttcctgcggctgtcgttggcg

SEQ ID NO: 267126 - DNA, 50 bp, Artificial
  Synthetic oligonucleotide
aaccctccgcgcaaccctcaaagtagcccccgcacactacttgatggcgg

SEQ ID NO: 267127 - DNA, 50 bp, Artificial
  Synthetic oligonucleotide
aaccccgtgccgacaattacccccatgtcgttagcggcgaattcgtgggg

SEQ ID NO: 267128 - DNA, 50 bp, Artificial
  Synthetic oligonucleotide
acaggccctagagcggcgaacgctccaaaacgcgcttcatacgagcggta

SEQ ID NO: 267129 - DNA, 55 bp, Artificial
  Synthetic oligonucleotide
cttggcatagaacacttgcaggaggtatctcaatgcaggccgtaaatgatgagtc

SEQ ID NO: 267130 - DNA, 50 bp, Artificial
  Synthetic oligonucleotide
acaggggcaggccctccatcggtttacactccttccacggcatcgggagt

SEQ ID NO: 267131 - DNA, 50 bp, Artificial
  Synthetic oligonucleotide
acaggtgcaatcgtgctagacgtgccgctcctgactggcgaatccctgct

SEQ ID NO: 267132 - DNA, 50 bp, Artificial
  Synthetic oligonucleotide
acagtcgcaaagataggggccgggtaatcgagcgccccattcactggggg

SEQ ID NO: 267133 - DNA, 50 bp, Artificial
  Synthetic oligonucleotide
acatccccggaagggtgtgcaaagctcgattgggccttaattgcggccgg

SEQ ID NO: 267134 - DNA, 50 bp, Artificial
  Synthetic oligonucleotide
accacagaatcccatccgcgtccgtttcccggagaggccttgagccctcg

SEQ ID NO: 267135 - DNA, 50 bp, Artificial
  Synthetic oligonucleotide
accacccttggcagcgcactggtcaaatgggaaggccatacggatgctga

SEQ ID NO: 267136 - DNA, 50 bp, Artificial
  Synthetic oligonucleotide
accacgcccgtagcgcagacccccgcgtaaaagatgccaaggtagacgcg

SEQ ID NO: 267137 - DNA, 50 bp, Artificial
  Synthetic oligonucleotide
accacttgaacgatatcggggttcaagcccgccgtctctaggccgcgctg

SEQ ID NO: 267138 - DNA, 50 bp, Artificial
  Synthetic oligonucleotide
accagatgggtcgggcggtgatagcccacgccgaggtgtgctttggcaac

SEQ ID NO: 267139 - DNA, 50 bp, Artificial
  Synthetic oligonucleotide
accaggcgggagcaagctcgcaattccccgagcggactaggcttcgtacc

SEQ ID NO: 267140 - DNA, 55 bp, Artificial
  Synthetic oligonucleotide
ctttgtcggctcctgcattcaacatgcgccgaacgtcttcgaactgacgaattcc

SEQ ID NO: 267141 - DNA, 50 bp, Artificial
  Synthetic oligonucleotide
acccaagcgcgaaaaccccctagggcagagtctgcgtcgtgaggcgtcag

SEQ ID NO: 267142 - DNA, 50 bp, Artificial
  Synthetic oligonucleotide
acccagccgcggcgcaccaaaaccgcttgaccactgcgatggcgaaaagg

SEQ ID NO: 267143 - DNA, 50 bp, Artificial
  Synthetic oligonucleotide
acccgcagtgtgaggcaggttacaatggcgtaggcccagtgtgctggccg

SEQ ID NO: 267144 - DNA, 50 bp, Artificial
  Synthetic oligonucleotide
acccgcgaaccagtcggatattcgttcgctgatgaccgaaggtggcgcct

SEQ ID NO: 267145 - DNA, 50 bp, Artificial
  Synthetic oligonucleotide
acccttgtgacgggccctgtcagtttagaaacgcctgagggggtcgagcg

SEQ ID NO: 267146 - DNA, 50 bp, Artificial
  Synthetic oligonucleotide
acctatgcaccaggtgtgcaagcggctccctttgggtttgactcgcgctt

SEQ ID NO: 267147 - DNA, 50 bp, Artificial
  Synthetic oligonucleotide
acgacccaaacgcccgctgagtttttccgcgtgatcagagcttgtggcgc

SEQ ID NO: 267148 - DNA, 50 bp, Artificial
  Synthetic oligonucleotide
acgaccgccaccaacaatcccgtctgctcaactggcgcacatcaccccac

SEQ ID NO: 267149 - DNA, 50 bp, Artificial
  Synthetic oligonucleotide
acgatttactggcggagcaagaggccagtgcagcgtcggagggatcagcg

SEQ ID NO: 267150 - DNA, 50 bp, Artificial
  Synthetic oligonucleotide
acgccccactgggtactgccccgccccgaccgaaagttcagcgcgctaca

SEQ ID NO: 267151 - DNA, 55 bp, Artificial
  Synthetic oligonucleotide
gaagacaggagtaggcgtaacgactcagaccttgttcgttctgaatccgatgaat

SEQ ID NO: 267152 - DNA, 50 bp, Artificial
  Synthetic oligonucleotide
acgccggttcgcacttaaggccgcccgaaaaaggctgcggcttgaggttt

SEQ ID NO: 267153 - DNA, 50 bp, Artificial
  Synthetic oligonucleotide
acgcctttatacccttgggtgcccgggccgacagtgcgtctccttgcaac

SEQ ID NO: 267154 - DNA, 50 bp, Artificial
  Synthetic oligonucleotide
acgggcaaactctctcggcgcgcttctaccaatctcacggcgcctctccc

SEQ ID NO: 267155 - DNA, 50 bp, Artificial
  Synthetic oligonucleotide
acgtggcgcaagctcctacgttcgcccccgttccacccacattaccgagc

SEQ ID NO: 267156 - DNA, 50 bp, Artificial
  Synthetic oligonucleotide
aatcggcgatccttgatcactggcatggacggatcaacgcgtgcgcagta

SEQ ID NO: 267157 - DNA, 50 bp, Artificial
  Synthetic oligonucleotide
aatcgtgcgcccgcgattggccatcttcgcctagatcccgtattgggtgg

SEQ ID NO: 267158 - DNA, 50 bp, Artificial
  Synthetic oligonucleotide
aatcgtgcttctgtcgggttggggtgtgcgctcttgcgtatgggatgcgg

SEQ ID NO: 267159 - DNA, 50 bp, Artificial
  Synthetic oligonucleotide
aatgcggccaatcaaatcgtgcggaggaaatggtgcgttgaaagcgggcg

SEQ ID NO: 267160 - DNA, 50 bp, Artificial
  Synthetic oligonucleotide
aatggagaccaaaccccgtgagaggccatcccaccgtccaacgacgtacc

SEQ ID NO: 267161 - DNA, 50 bp, Artificial
  Synthetic oligonucleotide
aatggctacagaggcggggcagctgttgttcgtgggtcatgatctgcgct

SEQ ID NO: 267162 - DNA, 55 bp, Artificial
  Synthetic oligonucleotide
gaccctctgaagcgtagcacagagttactacgcaaggtgttcggctcctaagcgt

SEQ ID NO: 267163 - DNA, 50 bp, Artificial
  Synthetic oligonucleotide
aatgttgagtgccgctctggccaactgaccccgcgcgcttatttgcagct

SEQ ID NO: 267164 - DNA, 50 bp, Artificial
  Synthetic oligonucleotide
aattcgggccccttgtgggcagcctatgttcgctacccgatgtatcgccc

SEQ ID NO: 267165 - DNA, 50 bp, Artificial
  Synthetic oligonucleotide
aattctcgggggactgcgtgcctccgctcgcagcaaaggttcgggtgaag

SEQ ID NO: 267166 - DNA, 50 bp, Artificial
  Synthetic oligonucleotide
aattgcaatgacggtggtcacagcgaaggcaagccagtgggcgccccaaa

SEQ ID NO: 267167 - DNA, 50 bp, Artificial
  Synthetic oligonucleotide
acaaaggcccacgaggccgagttgcgaagcgagcgtcccccaactcagcg

SEQ ID NO: 267168 - DNA, 50 bp, Artificial
  Synthetic oligonucleotide
acaagctgtccgccacaatctgggcagtcgcgcccctctatcacatcggg

SEQ ID NO: 267169 - DNA, 50 bp, Artificial
  Synthetic oligonucleotide
acaatgaacccgcgcggtcaggagtcgggggtttgcgaagtaaggggctc

SEQ ID NO: 267170 - DNA, 50 bp, Artificial
  Synthetic oligonucleotide
acacccagcaggggtgaacgctcggcgctttcctcataaacggcgctttc

SEQ ID NO: 267171 - DNA, 50 bp, Artificial
  Synthetic oligonucleotide
acaccccgttgcggtaacgactgagccgcttgggatacgttcgccaaccg

SEQ ID NO: 267172 - DNA, 50 bp, Artificial
  Synthetic oligonucleotide
acaccgaacccacactgcccgcgcaagattttcccgaaccgcgcgaatca

SEQ ID NO: 267173 - DNA, 55 bp, Artificial
  Synthetic oligonucleotide
acgaagccctcacccactttaccgacagcaatcctcaggggcgcctgataacccc

SEQ ID NO: 267174 - DNA, 50 bp, Artificial
  Synthetic oligonucleotide
acaccgcgggcgatagccccagaactgctccacacaatcggcgtctaaca

SEQ ID NO: 267175 - DNA, 50 bp, Artificial
  Synthetic oligonucleotide
acaccggcaatggcgcagcttcactcgccttacgcggctgattcttggcg

SEQ ID NO: 267176 - DNA, 50 bp, Artificial
  Synthetic oligonucleotide
acacctcgctgcgcttgtatctaaaacctgcccacggcacactcgcccga

SEQ ID NO: 267177 - DNA, 50 bp, Artificial
  Synthetic oligonucleotide
acacggtctgcccgtaaatacatccacgctcgcacgcaccgtggcttgga

SEQ ID NO: 267178 - DNA, 50 bp, Artificial
  Synthetic oligonucleotide
acacggttaaccctccgtttcgtgggcgcgcattatagccgcagcgctac

SEQ ID NO: 267179 - DNA, 50 bp, Artificial
  Synthetic oligonucleotide
acacgtcggccaagtgccacctgtctacaaggcggcaaccaagcgcccgc

SEQ ID NO: 267180 - DNA, 50 bp, Artificial
  Synthetic oligonucleotide
acactcgccctcgattgtcggcggccactgaatgaacgcattggcgtgct

SEQ ID NO: 267181 - DNA, 50 bp, Artificial
  Synthetic oligonucleotide
acactggcggatttgtcggggagcgatgccattcgcagtagcgatgtcgc

SEQ ID NO: 267182 - DNA, 50 bp, Artificial
  Synthetic oligonucleotide
acagcctagaagcggtgacagcaacgattgcacacggccgtagcggccac

SEQ ID NO: 267183 - DNA, 50 bp, Artificial
  Synthetic oligonucleotide
acagcgctcacaaagcagcccgccagaccctgtatcccgtaactgcccgc

SEQ ID NO: 267184 - DNA, 55 bp, Artificial
  Synthetic oligonucleotide
actggtggcacgccttttatgcgttatctggacaaacacaaacgtgagagcaaac

SEQ ID NO: 267185 - DNA, 50 bp, Artificial
  Synthetic oligonucleotide
acagctcggacgatcggtcttcccagcgtgtcgggtcgcaaaatagcccc

SEQ ID NO: 267186 - DNA, 50 bp, Artificial
  Synthetic oligonucleotide
aatagtcagcgacgggcacccctgccctgtgagcgccctcagccttgcat

SEQ ID NO: 267187 - DNA, 50 bp, Artificial
  Synthetic oligonucleotide
aatagggcagggctgccagccgtcaacgtcacatacgcttcaagagcgga

SEQ ID NO: 267188 - DNA, 50 bp, Artificial
  Synthetic oligonucleotide
aataggctgcccggggcgcacatcgagcaccctggagtctcgaacaacca

SEQ ID NO: 267189 - DNA, 50 bp, Artificial
  Synthetic oligonucleotide
attgacgacgccgacttgatcttccccggccaagtgtttgaaatcgacac

SEQ ID NO: 267190 - DNA, 50 bp, Artificial
  Synthetic oligonucleotide
aatagccgcgttgcggtgagatcgtctgaatcggtggtgttaggcgggct

SEQ ID NO: 267191 - DNA, 50 bp, Artificial
  Synthetic oligonucleotide
atttctcaggtgcagtacaccctcgatgttgttactgtcttcgcgccata

SEQ ID NO: 267192 - DNA, 50 bp, Artificial
  Synthetic oligonucleotide
aataacaacaggtgcccagaattcgccaccgctacgatgacgcagccgcg

SEQ ID NO: 267193 - DNA, 50 bp, Artificial
  Synthetic oligonucleotide
aagtgataccgagcgtcccgggttgatccccgtgccggcaaccaatcttg

SEQ ID NO: 267194 - DNA, 50 bp, Artificial
  Synthetic oligonucleotide
aagtcggctcccctgacaccggcgaatggtcgctagggcgcactatctcg

SEQ ID NO: 267195 - DNA, 55 bp, Artificial
  Synthetic oligonucleotide
ataaacgtctgaattccacggagaacgggctatcgtaatagcggcgatagcggtg

SEQ ID NO: 267196 - DNA, 50 bp, Artificial
  Synthetic oligonucleotide
cacagtccccacggtagcaacgggatagccatacggaaagcgtccgccca

SEQ ID NO: 267197 - DNA, 50 bp, Artificial
  Synthetic oligonucleotide
caccgttagcattgagcaccagcctgtcgacctgtggttgtgcgcgctca

SEQ ID NO: 267198 - DNA, 50 bp, Artificial
  Synthetic oligonucleotide
cacggctcagcagagcgtctggcgacagtactcaccatttcctcaggcgg

SEQ ID NO: 267199 - DNA, 50 bp, Artificial
  Synthetic oligonucleotide
cagccaagtaacagggcaccggtcaaagcggagaccaggccgctaatgca

SEQ ID NO: 267200 - DNA, 50 bp, Artificial
  Synthetic oligonucleotide
cagtcgccgggtgcaacaccggtttctttcagcgttagggtaaccgcagc

SEQ ID NO: 267201 - DNA, 50 bp, Artificial
  Synthetic oligonucleotide
cagtcgcgctttaatggtgaggcgggtcgcaatgccgagagtgcggacga

SEQ ID NO: 267202 - DNA, 50 bp, Artificial
  Synthetic oligonucleotide
aagtcgcgcaggcgggctaaacgcagtggtgacgagctctggccccgtac

SEQ ID NO: 267203 - DNA, 50 bp, Artificial
  Synthetic oligonucleotide
aagtcgcacgcaacgccaccgaaacctcgcaagcctcccaagactcagaa

SEQ ID NO: 267204 - DNA, 50 bp, Artificial
  Synthetic oligonucleotide
aagtccgtgagcgaacgcgcgatacgtgggggttatggcgcaaacgcgta

SEQ ID NO: 267205 - DNA, 50 bp, Artificial
  Synthetic oligonucleotide
aaggttggccgttgaaacaaagcgagcccctcgccattcctccgccaaac

SEQ ID NO: 267206 - DNA, 55 bp, Artificial
  Synthetic oligonucleotide
atactcgtcctcagttgcggcagtgggtacaggctagaggtaaagcattcgtccg

SEQ ID NO: 267207 - DNA, 50 bp, Artificial
  Synthetic oligonucleotide
aaggtggcgtacacgaccaccattgcgggtgcgctagcgatttgcatggc

SEQ ID NO: 267208 - DNA, 50 bp, Artificial
  Synthetic oligonucleotide
ccagcgagtcacctttcagcattggccctaaaaagcgcccggtgtgcgat

SEQ ID NO: 267209 - DNA, 50 bp, Artificial
  Synthetic oligonucleotide
aaggtcggctcgagcatccaagggcataaaggcacccctcccacagccaa

SEQ ID NO: 267210 - DNA, 50 bp, Artificial
  Synthetic oligonucleotide
cccaaccgaagaggcgttgagggagcaagcggtattgaatgcacggccta

SEQ ID NO: 267211 - DNA, 50 bp, Artificial
  Synthetic oligonucleotide
ccccaccttaacggtcgggattgtatccgtttgagcccagcccctcacgg

SEQ ID NO: 267212 - DNA, 50 bp, Artificial
  Synthetic oligonucleotide
aaggtaagcccctgcactagcgcgcacattggccaagagttcagccgctg

SEQ ID NO: 267213 - DNA, 50 bp, Artificial
  Synthetic oligonucleotide
aaggggccgttacaagtgccggcgtggttggtctatgcgactggcgatat

SEQ ID NO: 267214 - DNA, 50 bp, Artificial
  Synthetic oligonucleotide
actcgtccgctggccccaagtcgctccctacgtcacatcgctgtgcgaac

SEQ ID NO: 267215 - DNA, 50 bp, Artificial
  Synthetic oligonucleotide
actctctcggcgcgcttctaccaatctcacggcgcctctcccagcaggtg

SEQ ID NO: 267216 - DNA, 50 bp, Artificial
  Synthetic oligonucleotide
actgatttcgccggtttgtctcccgccctgtttggcgctggaggcgtcac

SEQ ID NO: 267217 - DNA, 55 bp, Artificial
  Synthetic oligonucleotide
atagcaaatcgtcttgggaggtatgaaagtccacatatcgtccgtcttgatcgac

SEQ ID NO: 267218 - DNA, 50 bp, Artificial
  Synthetic oligonucleotide
aatcgcagggtcacccttccagccgacagaggacaagcggtgccgaatgt

SEQ ID NO: 267219 - DNA, 50 bp, Artificial
  Synthetic oligonucleotide
actgtaaggggcgctacgggggaagtctagtggggctttgagtgcctccc

SEQ ID NO: 267220 - DNA, 50 bp, Artificial
  Synthetic oligonucleotide
acttgcaagcgcttcaccaaggcaacgacccacactaccgtgggctcgcc

SEQ ID NO: 267221 - DNA, 50 bp, Artificial
  Synthetic oligonucleotide
agaacgggctttccacgcactctgctcacaacagagcttgcccgcagcta

SEQ ID NO: 267222 - DNA, 50 bp, Artificial
  Synthetic oligonucleotide
agaggttgtgcgtggcgcaccactcgcggtgggctttattggcatcacta

SEQ ID NO: 267223 - DNA, 50 bp, Artificial
  Synthetic oligonucleotide
agatcggcgtctgccgtaaaccagtgcacgatgcctttggggtcgaccgc

SEQ ID NO: 267224 - DNA, 50 bp, Artificial
  Synthetic oligonucleotide
agatctggttaacggtggggcgctgttgagcatccacccttggcgtgaga

SEQ ID NO: 267225 - DNA, 50 bp, Artificial
  Synthetic oligonucleotide
agattgccacgactttcgccttggctggggatacgtgccagtgcgtaggg

SEQ ID NO: 267226 - DNA, 50 bp, Artificial
  Synthetic oligonucleotide
agcactccatgccgacgtaggccccgttgagctttgtgtcacgccacctc

SEQ ID NO: 267227 - DNA, 50 bp, Artificial
  Synthetic oligonucleotide
agcactcgccttcattgcgcgggtcgtagaaagaacccgaggggcaaccc

SEQ ID NO: 267228 - DNA, 55 bp, Artificial
  Synthetic oligonucleotide
cgcctctagggtcttttgaatctttggaccaacatacaggcttgcttgatagtct

SEQ ID NO: 267229 - DNA, 55 bp, Artificial
  Synthetic oligonucleotide
atccgggtagcgagggccggattggttctggagtagggttggatacgcctgctac

SEQ ID NO: 267230 - DNA, 50 bp, Artificial
  Synthetic oligonucleotide
agcattcgaaggcttgcgtctcgcgaaccgtcaaccgtggcgtttgaacg

SEQ ID NO: 267231 - DNA, 50 bp, Artificial
  Synthetic oligonucleotide
agccgggtaccgcgacaggagttgcctcttgaggggtggaagggctggac

SEQ ID NO: 267232 - DNA, 50 bp, Artificial
  Synthetic oligonucleotide
agcctaccggaggggcgtgctaaatgtgacaacctgggtgaggctgctcg

SEQ ID NO: 267233 - DNA, 50 bp, Artificial
  Synthetic oligonucleotide
agcgtattttggtggcgacgggtggttggccctttgtgccggagtttccg

SEQ ID NO: 267234 - DNA, 50 bp, Artificial
  Synthetic oligonucleotide
agcgtgatcacccagtccgcctgagcaagcaagcgagccgttaacaggtc

SEQ ID NO: 267235 - DNA, 50 bp, Artificial
  Synthetic oligonucleotide
aatcgacgggggcgaccttggcctaattcgcaatagggagctacgtgccg

SEQ ID NO: 267236 - DNA, 50 bp, Artificial
  Synthetic oligonucleotide
aatcgaacccttcgccaatattcaatggggctcccctttctgcgcgggcc

SEQ ID NO: 267237 - DNA, 50 bp, Artificial
  Synthetic oligonucleotide
aatcatgtcagacagaaaggtcgcgctgggtggctcccccatgcgtttgc

SEQ ID NO: 267238 - DNA, 50 bp, Artificial
  Synthetic oligonucleotide
atagctggtccgaggtgcctcttgctgagttgtcacgctgcggctctgct

SEQ ID NO: 267239 - DNA, 50 bp, Artificial
  Synthetic oligonucleotide
atagtgggcagctcgcggtgaatactctccctccagtcgcaaccccaagc

SEQ ID NO: 267240 - DNA, 55 bp, Artificial
  Synthetic oligonucleotide
atgctccgaggcgctacatcggttcgcgcttgaggctggttcgttgcgcgcacaa

SEQ ID NO: 267241 - DNA, 50 bp, Artificial
  Synthetic oligonucleotide
aatcacgaccgacgagccctgggacatccaaccgcttgcccagcgcattc

SEQ ID NO: 267242 - DNA, 50 bp, Artificial
  Synthetic oligonucleotide
atgagcagtcagggtagggcagtgattccgccgcacactcctgccattcg

SEQ ID NO: 267243 - DNA, 50 bp, Artificial
  Synthetic oligonucleotide
atgatcaacttgccggatggccgcgccacacagacatcccgtcgaagctc

SEQ ID NO: 267244 - DNA, 50 bp, Artificial
  Synthetic oligonucleotide
atgcctcagcgatcccacctccggtacaggactcagctgtcgccagtcgc

SEQ ID NO: 267245 - DNA, 55 bp, Artificial
  Synthetic oligonucleotide
attcctaggtcggaggctctctattcagagggcggagcattcttatctagagggg

SEQ ID NO: 267246 - DNA, 55 bp, Artificial
  Synthetic oligonucleotide
attcgcttgcccgatcaccgcgtattgaactacgaatacgatgccgcgcagcgta

SEQ ID NO: 267247 - DNA, 55 bp, Artificial
  Synthetic oligonucleotide
attggcacagagcacaagtacaaacatggcgattaaagaggccgtcagcgaccac

SEQ ID NO: 267248 - DNA, 55 bp, Artificial
  Synthetic oligonucleotide
caaaatacagcgatcagcttcaccgaccagtctgtcaaaccgcttcagactcttc

SEQ ID NO: 267249 - DNA, 55 bp, Artificial
  Synthetic oligonucleotide
caagcgtttgctctcggggatgatcaccacttggcgcaagatgtcgtctagggca

SEQ ID NO: 267250 - DNA, 55 bp, Artificial
  Synthetic oligonucleotide
caagtagtgtgtgtgcgatagggccctgaagagcgataatgtgcgtatcatcgtc

SEQ ID NO: 267251 - DNA, 55 bp, Artificial
  Synthetic oligonucleotide
catgagtgaacagcgcaaactcctaggccctattcaggcgattaacggggtactt

SEQ ID NO: 267252 - DNA, 55 bp, Artificial
  Synthetic oligonucleotide
cattgtcccgccgcccttaataaattcacccatgccctgcatagcgtatgagagc

SEQ ID NO: 267253 - DNA, 55 bp, Artificial
  Synthetic oligonucleotide
cgcgcaacactacgacgtcgccattgcttaaatccagtgtgcccgagttataacc

SEQ ID NO: 267254 - DNA, 55 bp, Artificial
  Synthetic oligonucleotide
catttaagccttaacgctaatgcaggcaagacatcatcagtacctcagcgcaatg

SEQ ID NO: 267255 - DNA, 55 bp, Artificial
  Synthetic oligonucleotide
cattttccagcatgatggggctgacaatagagacatcgatatgcgactccaggtc

SEQ ID NO: 267256 - DNA, 55 bp, Artificial
  Synthetic oligonucleotide
ccaatggcccagacgaagcgacggctggtagtaaccgggaacccaagaggcatgg

SEQ ID NO: 267257 - DNA, 55 bp, Artificial
  Synthetic oligonucleotide
ccagcgcctctggaaggtagcaactgatccacaaccgagttagcctgcgtagcgg

SEQ ID NO: 267258 - DNA, 55 bp, Artificial
  Synthetic oligonucleotide
cccctcaaccgacatcgtcaaatacccatgagtaatcccatgcaactgaacagta

SEQ ID NO: 267259 - DNA, 55 bp, Artificial
  Synthetic oligonucleotide
cccttctccggcgcagctaaggcagttatctcagaggcgttgctaaacagccccg

SEQ ID NO: 267260 - DNA, 55 bp, Artificial
  Synthetic oligonucleotide
ccgaacgaggagttgattatcagccaatacccaggcctcggggatattgacacta

SEQ ID NO: 267261 - DNA, 55 bp, Artificial
  Synthetic oligonucleotide
ccgtgtgctctcgccggtagtctcaatcgtattgtggattgctttgctgctaggg

SEQ ID NO: 267262 - DNA, 55 bp, Artificial
  Synthetic oligonucleotide
cctgcgggatcactccctgaacaggaataaaggctcggcgatcaaacgcggactc

SEQ ID NO: 267263 - DNA, 55 bp, Artificial
  Synthetic oligonucleotide
cgacgccgcaactctattatcattgcctgctattacttggcctcgtcaggctaag

SEQ ID NO: 267264 - DNA, 55 bp, Artificial
  Synthetic oligonucleotide
cgcttgatacgatgcacggtgttggacgccggttcgcacttaaggccgcccgaaa

SEQ ID NO: 267265 - DNA, 55 bp, Artificial
  Synthetic oligonucleotide
ggacggtaaaacagtgcgcgtgacaataggggacgttaaagcatggcggctgggg

SEQ ID NO: 267266 - DNA, 55 bp, Artificial
  Synthetic oligonucleotide
ggcacctttgagcatgcgtcaacgtaactggtgggaattacccgaagtcatgagt

SEQ ID NO: 267267 - DNA, 55 bp, Artificial
  Synthetic oligonucleotide
ggccagccaccaagccaatggagtgcaggtgagtagcaacgctgctgtcgtgaca

SEQ ID NO: 267268 - DNA, 55 bp, Artificial
  Synthetic oligonucleotide
ggcgaggcctctactgagatcgtcaggtaagctggtaattgataagggcgtctca

SEQ ID NO: 267269 - DNA, 55 bp, Artificial
  Synthetic oligonucleotide
ggcgcgagggtatcaggttgactagacaggccatactggcattagccgacggtag

SEQ ID NO: 267270 - DNA, 55 bp, Artificial
  Synthetic oligonucleotide
ggcggattataagaccaggcgggagcaagctcgcaattccccgagcggactaggc

SEQ ID NO: 267271 - DNA, 55 bp, Artificial
  Synthetic oligonucleotide
ggctctcctggcaaccgtaagcgggctatcgtcgttttctctagcgattgtccta

SEQ ID NO: 267272 - DNA, 55 bp, Artificial
  Synthetic oligonucleotide
ggcttagggttaaatattggtagtggcattgctcaacagggcgtacctgaactag

SEQ ID NO: 267273 - DNA, 55 bp, Artificial
  Synthetic oligonucleotide
gggcgcacccatgacaaaagcgatttcactggcgtgagcagcaccgaggaccttc

SEQ ID NO: 267274 - DNA, 55 bp, Artificial
  Synthetic oligonucleotide
ggggtctcaatagacttggaatcgcgtacagatgtcccgtgagtgtcccgtgggg

SEQ ID NO: 267275 - DNA, 55 bp, Artificial
  Synthetic oligonucleotide
cgcttgggaatcggtggatgaacgatttaatgccacacctcagcgcaaccgagat

SEQ ID NO: 267276 - DNA, 55 bp, Artificial
  Synthetic oligonucleotide
ggtaatttgagcgaaataacgagaagtcgctgaagtatccgattcctgggcacgc

SEQ ID NO: 267277 - DNA, 55 bp, Artificial
  Synthetic oligonucleotide
ggtacagaactaaggtattgattgattaccgcggaggttaaacgcggcctcaaca

SEQ ID NO: 267278 - DNA, 55 bp, Artificial
  Synthetic oligonucleotide
ggtcagcttgcaacgctcacataccccagcggacgagagctcagctatagctacg

SEQ ID NO: 267279 - DNA, 55 bp, Artificial
  Synthetic oligonucleotide
ggtcgcaggtagccgtctgggttgtcgaatcgtacccgcacccgagctgttctag

SEQ ID NO: 267280 - DNA, 55 bp, Artificial
  Synthetic oligonucleotide
ggtcttctaatgggacgtcactataggctctggcagcgacccaaccgccacccgg

SEQ ID NO: 267281 - DNA, 55 bp, Artificial
  Synthetic oligonucleotide
ggtgcgcttgttccaggcattcgccccggagagcaaactgcgcggtatattgaca

SEQ ID NO: 267282 - DNA, 55 bp, Artificial
  Synthetic oligonucleotide
gtaactggctttcggataaagtgcgagcaagtcttttaaactgcgttcgaggccg

SEQ ID NO: 267283 - DNA, 55 bp, Artificial
  Synthetic oligonucleotide
gtcgcacatagttagaatctgtatacagcgccacgcgacaggatcgcttaagggc

SEQ ID NO: 267284 - DNA, 55 bp, Artificial
  Synthetic oligonucleotide
gtgcaaaggctctggcgttagttgttgctcacctacgtttacccctttagactgg

SEQ ID NO: 267285 - DNA, 55 bp, Artificial
  Synthetic oligonucleotide
gtttaacaatggtgccatagggaaccgctttatcaccgcgcactaagactggggt

SEQ ID NO: 267286 - DNA, 55 bp, Artificial
  Synthetic oligonucleotide
cggcactggcattcaccgcgcacaatccgtagcgttgcagcgggaggacaatctg

SEQ ID NO: 267287 - DNA, 55 bp, Artificial
  Synthetic oligonucleotide
tcgtcagactatcgccgctattgccaacagtgattaccaggttgttgcccgagac

SEQ ID NO: 267288 - DNA, 55 bp, Artificial
  Synthetic oligonucleotide
tcttcaaaatcgcgcctcaacctgccgtgacactcggggtcgaggctacagttgt

SEQ ID NO: 267289 - DNA, 55 bp, Artificial
  Synthetic oligonucleotide
tgtgtattccgggttttgcgcgaccttataaagtagagaagggctggtggttgca

SEQ ID NO: 267290 - DNA, 55 bp, Artificial
  Synthetic oligonucleotide
ttaccctgaccaggaggctcggcaactgattggtgtgatttcttccgacattgag

SEQ ID NO: 267291 - DNA, 55 bp, Artificial
  Synthetic oligonucleotide
tttggcgtaccgccactgtagctttcagggaacataaagcccatcagcttacgag

SEQ ID NO: 267292 - DNA, 55 bp, Artificial
  Synthetic oligonucleotide
gagagagtcataattcgctggaaattcgaaactaatccccgtatcacttaccggg

SEQ ID NO: 267293 - DNA, 55 bp, Artificial
  Synthetic oligonucleotide
gagcgctccctttgaaaacacggcgcagcggacatcggagggtaattgcagtgcc

SEQ ID NO: 267294 - DNA, 55 bp, Artificial
  Synthetic oligonucleotide
gaggtcttggctcccggtgttgtgccgccaatacccgagttctacaccatcggga

SEQ ID NO: 267295 - DNA, 55 bp, Artificial
  Synthetic oligonucleotide
gatgtggcgttgctcggtagagctttgaaagaccacgcatatcaaacggcggttc

SEQ ID NO: 267296 - DNA, 55 bp, Artificial
  Synthetic oligonucleotide
gcacccgcctttatgacttgctagactggtgtgatacacagcgaagtgtctgcac

SEQ ID NO: 267297 - DNA, 55 bp, Artificial
  Synthetic oligonucleotide
cggcggggcttgcgcgcttggatggacgaatgtcacaagtgaaactcttaggcgc

SEQ ID NO: 267298 - DNA, 55 bp, Artificial
  Synthetic oligonucleotide
gcacgtcggcagtagattaggcgcaacaaatgagcattgcattacgtctgacccc

SEQ ID NO: 267299 - DNA, 55 bp, Artificial
  Synthetic oligonucleotide
gcagcgtgttaacctttatagtttcacggctcagcagagcgtctggcgacagtac

SEQ ID NO: 267300 - DNA, 55 bp, Artificial
  Synthetic oligonucleotide
gcagttagccatattaccgtgcttgattcccgtgcacccgcaagtgttcaatccg

SEQ ID NO: 267301 - DNA, 54 bp, Artificial
  Synthetic oligonucleotide
gccagatttaggtggaaccgttaaacaccgtacaaacctcaatggtgcttcgac

SEQ ID NO: 267302 - DNA, 55 bp, Artificial
  Synthetic oligonucleotide
gcccatccagtttcgcagacgatctccacttgcgtcatcaaagggtatgccggtc

SEQ ID NO: 267303 - DNA, 55 bp, Artificial
  Synthetic oligonucleotide
gccgaggcaatggggactttcgcgaatcgaaaactggacggcatgttaggactcc

SEQ ID NO: 267304 - DNA, 55 bp, Artificial
  Synthetic oligonucleotide
gccgcagcttcgcttttggtaatgtaaggcccagttggcagggaaacctgtcttc

SEQ ID NO: 267305 - DNA, 52 bp, Artificial
  Synthetic oligonucleotide
gccgcttagaaaacgtcgggtgttttccaaatcccgcgcgtagtcctcttcg

SEQ ID NO: 267306 - DNA, 53 bp, Artificial
  Synthetic oligonucleotide
gccgtaaacagggtagttgggagtcactggtcggttttcgccgttgttagtga

SEQ ID NO: 267307 - DNA, 55 bp, Artificial
  Synthetic oligonucleotide
gccgtttagcgatctttctatcaaatgacggcctttgcgctatcaaacgactgcc

SEQ ID NO: 267308 - DNA, 55 bp, Artificial
  Synthetic oligonucleotide
cgggatactggttgatcacggttccatatctacactagcgacctcagtgagctct

SEQ ID NO: 267309 - DNA, 55 bp, Artificial
  Synthetic oligonucleotide
gcctatgcgcggaaagccccggaatacggtcgcaagtaagctgcgcagtatgagc

SEQ ID NO: 267310 - DNA, 55 bp, Artificial
  Synthetic oligonucleotide
gcctgatcgcgccctactccagcaatggttggaacaagcccgcgttgagtacagc

SEQ ID NO: 267311 - DNA, 55 bp, Artificial
  Synthetic oligonucleotide
gcgaaggcaactccacgaacgtagcgctcttctggcaaaccagattctctcgggg

SEQ ID NO: 267312 - DNA, 55 bp, Artificial
  Synthetic oligonucleotide
gcggctgtccagagcgacatttataatgcagggttcatggggtaagttagtgctc

SEQ ID NO: 267313 - DNA, 55 bp, Artificial
  Synthetic oligonucleotide
gcgtattggatgtagtgacttaccagccgccgtttatccccaagcgtttgttggg

SEQ ID NO: 267314 - DNA, 55 bp, Artificial
  Synthetic oligonucleotide
gcgtgtttagcagacacagttccgaaaagtaggcgccgtgggtgctggctgatgg

SEQ ID NO: 267315 - DNA, 55 bp, Artificial
  Synthetic oligonucleotide
gctaccgccgaaaaggtagtcaaactgattcgccaaagcattggcccgcgaactc

SEQ ID NO: 267316 - DNA, 55 bp, Artificial
  Synthetic oligonucleotide
gctacgcagcgcctttacgataaaggattgattactcaacctgatggtggctact

SEQ ID NO: 267317 - DNA, 55 bp, Artificial
  Synthetic oligonucleotide
gctactgaggacgaaatcggcgtagtagtgagccaagggctcgataaattcgccc

SEQ ID NO: 267318 - DNA, 55 bp, Artificial
  Synthetic oligonucleotide
ggacgggctgcttgagcgtattcttgagccagagcgcatcgtacagtttcgcgtg

SEQ ID NO: 267319 - DNA, 58 bp, Artificial
  Synthetic oligonucleotide
accagcttctgtctttcgcccatgactgatcgggccacggctagaaaacgagtactgg

SEQ ID NO: 267320 - DNA, 56 bp, Artificial
  Synthetic oligonucleotide
tgttttcctcgtactttacccagcgaaattcatcggcgaggcacagggattgaccg

SEQ ID NO: 267321 - DNA, 57 bp, Artificial
  Synthetic oligonucleotide
agtcattgcccgcgcttaaatggatgacctgccaggaattcggtctctgtcgatgaa

SEQ ID NO: 267322 - DNA, 55 bp, Artificial
  Synthetic oligonucleotide
atctgattcacctatggatacgtcatcgcttataaaagtggcgcagtctgggccg

SEQ ID NO: 267323 - DNA, 55 bp, Artificial
  Synthetic oligonucleotide
gatttgacgattgaaccagcttctgtctttcgcccatgactgatcgggccacggc

SEQ ID NO: 267324 - DNA, 58 bp, Artificial
  Synthetic oligonucleotide
ccatgactgatcgggccacggctagaaaacgagtactgggcggctagctttgcggaat

SEQ ID NO: 267325 - DNA, 60 bp, Artificial
  Synthetic oligonucleotide
ctttgcggaatttaatctgattcacctatggatacgtcatcgcttataaaagtggcgcag

SEQ ID NO: 267326 - DNA, 59 bp, Artificial
  Synthetic oligonucleotide
gccatgtacaatgcggccaaactcggtagtgaagcggtccacggtcttacgaggcttca

SEQ ID NO: 267327 - DNA, 57 bp, Artificial
  Synthetic oligonucleotide
gcgtttgtgatgtcaggtgggacggaaggcgtgctgtccccccaccacacggtattc

SEQ ID NO: 267328 - DNA, 58 bp, Artificial
  Synthetic oligonucleotide
ggtgtgaccgccatgtacaatgcggccaaactcggtagtgaagcggtccacggtctta

SEQ ID NO: 267329 - DNA, 60 bp, Artificial
  Synthetic oligonucleotide
gtgtcgcgtgccatcgacttgatttgacgattgaaccagcttctgtctttcgcccatgac

SEQ ID NO: 267330 - DNA, 60 bp, Artificial
  Synthetic oligonucleotide
tcacatcgacgttttccgaatcccttgccacagccctggtgatacatcgggtctcgagga

SEQ ID NO: 267331 - DNA, 58 bp, Artificial
  Synthetic oligonucleotide
tcgatggactttttctttcgtgcctacgcctctccgcttctcgggctcgtcacactcg

SEQ ID NO: 267332 - DNA, 60 bp, Artificial
  Synthetic oligonucleotide
tatcactcgtcagcagtccaagagctgccaccgtcattccgaaactgctcagagccagta

SEQ ID NO: 267333 - DNA, 60 bp, Artificial
  Synthetic oligonucleotide
tatcactcgacagcagtccaagagctgccaccgtcattccgaaactgctcagagccagta

SEQ ID NO: 267334 - DNA, 60 bp, Artificial
  Synthetic oligonucleotide
tatcactcgacagctgtccaagagctgccaccgtcattccgaaactgctcagagccagta

SEQ ID NO: 267335 - DNA, 60 bp, Artificial
  Synthetic oligonucleotide
tatcactcgacagctgtcctagagctgccaccgtcattccgaaactgctcagagccagta

SEQ ID NO: 267336 - DNA, 60 bp, Artificial
  Synthetic oligonucleotide
tatcactcgacagctgtcctagaggtgccaccgtcattccgaaactgctcagagccagta

SEQ ID NO: 267337 - DNA, 60 bp, Artificial
  Synthetic oligonucleotide
tatcactcgacagctgtcctagaggtgcctccgtcattccgaaactgctcagagccagta

SEQ ID NO: 267338 - DNA, 60 bp, Artificial
  Synthetic oligonucleotide
tatcactcgacagctgtcctagaggtgcctccgtgattccgaaactgctcagagccagta

SEQ ID NO: 267339 - DNA, 60 bp, Artificial
  Synthetic oligonucleotide
tatcactcgacagctgtcctagaggtgcctccgtgattcggaaactgctcagagccagta

SEQ ID NO: 267340 - DNA, 60 bp, Artificial
  Synthetic oligonucleotide
tatcactcgacagctgtcctagaggtgcctccgtgattcggaaagtgctcagagccagta

SEQ ID NO: 267341 - DNA, 55 bp, Artificial
  Synthetic oligonucleotide
gctcgtctgagaacggaaggatcgtacaccctcgtgagggccagcactcccgtgt

SEQ ID NO: 267342 - DNA, 55 bp, Artificial
  Synthetic oligonucleotide
gctcgtctgtgaacggaaggatcgtacaccctcgtgagggccagcactcccgtgt

SEQ ID NO: 267343 - DNA, 55 bp, Artificial
  Synthetic oligonucleotide
gctcgtctgtgaaccgaaggatcgtacaccctcgtgagggccagcactcccgtgt

SEQ ID NO: 267344 - DNA, 55 bp, Artificial
  Synthetic oligonucleotide
gctcgtctgtgaaccgaagcatcgtacaccctcgtgagggccagcactcccgtgt

SEQ ID NO: 267345 - DNA, 55 bp, Artificial
  Synthetic oligonucleotide
gctcgtctgtgaaccgaagcatcgaacaccctcgtgagggccagcactcccgtgt

SEQ ID NO: 267346 - DNA, 55 bp, Artificial
  Synthetic oligonucleotide
gctcgtctgtgaaccgaagcatcgaacacgctcgtgagggccagcactcccgtgt

SEQ ID NO: 267347 - DNA, 55 bp, Artificial
  Synthetic oligonucleotide
gctcgtctgtgaaccgaagcatcgaacacgctcgagagggccagcactcccgtgt

SEQ ID NO: 267348 - DNA, 55 bp, Artificial
  Synthetic oligonucleotide
gctcgtctgtgaaccgaagcatcgaacacgctcgagaggcccagcactcccgtgt

SEQ ID NO: 267349 - DNA, 55 bp, Artificial
  Synthetic oligonucleotide
gctcgtctgtgaaccgaagcatcgaacacgctcgagaggcccaggactcccgtgt

SEQ ID NO: 267350 - DNA, 55 bp, Artificial
  Synthetic oligonucleotide
ggatgcagaaggcgaccacagaatggctatgctcttttccatagcagggctcgtg

SEQ ID NO: 267351 - DNA, 55 bp, Artificial
  Synthetic oligonucleotide
ggatgcagatggcgaccacagaatggctatgctcttttccatagcagggctcgtg

SEQ ID NO: 267352 - DNA, 55 bp, Artificial
  Synthetic oligonucleotide
ggatgcagatggcgtccacagaatggctatgctcttttccatagcagggctcgtg

SEQ ID NO: 267353 - DNA, 55 bp, Artificial
  Synthetic oligonucleotide
ggatgcagatggcgtccactgaatggctatgctcttttccatagcagggctcgtg

SEQ ID NO: 267354 - DNA, 55 bp, Artificial
  Synthetic oligonucleotide
ggatgcagatggcgtccactgaatcgctatgctcttttccatagcagggctcgtg

SEQ ID NO: 267355 - DNA, 55 bp, Artificial
  Synthetic oligonucleotide
ggatgcagatggcgtccactgaatcgctaagctcttttccatagcagggctcgtg

SEQ ID NO: 267356 - DNA, 55 bp, Artificial
  Synthetic oligonucleotide
ggatgcagatggcgtccactgaatcgctaagctcatttccatagcagggctcgtg

SEQ ID NO: 267357 - DNA, 55 bp, Artificial
  Synthetic oligonucleotide
ggatgcagatggcgtccactgaatcgctaagctcatttcgatagcagggctcgtg

SEQ ID NO: 267358 - DNA, 55 bp, Artificial
  Synthetic oligonucleotide
ggatgcagatggcgtccactgaatcgctaagctcatttcgataggagggctcgtg

SEQ ID NO: 267359 - DNA, 55 bp, Artificial
  Synthetic oligonucleotide
gggagtgagctggtagaacacgaaaacgagcagtcctactttgaacgatgttgcc

SEQ ID NO: 267360 - DNA, 55 bp, Artificial
  Synthetic oligonucleotide
gggagtgaggtggtagaacacgaaaacgagcagtcctactttgaacgatgttgcc

SEQ ID NO: 267361 - DNA, 55 bp, Artificial
  Synthetic oligonucleotide
gggagtgaggtggttgaacacgaaaacgagcagtcctactttgaacgatgttgcc

SEQ ID NO: 267362 - DNA, 55 bp, Artificial
  Synthetic oligonucleotide
gggagtgaggtggttgaactcgaaaacgagcagtcctactttgaacgatgttgcc

SEQ ID NO: 267363 - DNA, 55 bp, Artificial
  Synthetic oligonucleotide
gggagtgaggtggttgaactcgaatacgagcagtcctactttgaacgatgttgcc

SEQ ID NO: 267364 - DNA, 55 bp, Artificial
  Synthetic oligonucleotide
gggagtgaggtggttgaactcgaatacgaccagtcctactttgaacgatgttgcc

SEQ ID NO: 267365 - DNA, 55 bp, Artificial
  Synthetic oligonucleotide
gggagtgaggtggttgaactcgaatacgaccagtgctactttgaacgatgttgcc

SEQ ID NO: 267366 - DNA, 55 bp, Artificial
  Synthetic oligonucleotide
gggagtgaggtggttgaactcgaatacgaccagtgctacattgaacgatgttgcc

SEQ ID NO: 267367 - DNA, 55 bp, Artificial
  Synthetic oligonucleotide
gggagtgaggtggttgaactcgaatacgaccagtgctacattgatcgatgttgcc

SEQ ID NO: 267368 - DNA, 55 bp, Artificial
  Synthetic oligonucleotide
gggcgttcaagatcctatccgcctcgagcgccaaaacaggaacgaacctcatcgc

SEQ ID NO: 267369 - DNA, 55 bp, Artificial
  Synthetic oligonucleotide
gggcgttcatgatcctatccgcctcgagcgccaaaacaggaacgaacctcatcgc

SEQ ID NO: 267370 - DNA, 55 bp, Artificial
  Synthetic oligonucleotide
gggcgttcatgatcgtatccgcctcgagcgccaaaacaggaacgaacctcatcgc

SEQ ID NO: 267371 - DNA, 55 bp, Artificial
  Synthetic oligonucleotide
gggcgttcatgatcgtatcggcctcgagcgccaaaacaggaacgaacctcatcgc

SEQ ID NO: 267372 - DNA, 55 bp, Artificial
  Synthetic oligonucleotide
gggcgttcatgatcgtatcggcctggagcgccaaaacaggaacgaacctcatcgc

SEQ ID NO: 267373 - DNA, 55 bp, Artificial
  Synthetic oligonucleotide
gggcgttcatgatcgtatcggcctggagccccaaaacaggaacgaacctcatcgc

SEQ ID NO: 267374 - DNA, 55 bp, Artificial
  Synthetic oligonucleotide
gggcgttcatgatcgtatcggcctggagccccaatacaggaacgaacctcatcgc

SEQ ID NO: 267375 - DNA, 55 bp, Artificial
  Synthetic oligonucleotide
gggcgttcatgatcgtatcggcctggagccccaatacagcaacgaacctcatcgc

SEQ ID NO: 267376 - DNA, 55 bp, Artificial
  Synthetic oligonucleotide
gggcgttcatgatcgtatcggcctggagccccaatacagcaacgtacctcatcgc

SEQ ID NO: 267377 - DNA, 55 bp, Artificial
  Synthetic oligonucleotide
ggtcaacgcttacacaccggagctgtatcccacgtcgctcagggggactggaaac

SEQ ID NO: 267378 - DNA, 55 bp, Artificial
  Synthetic oligonucleotide
ggtcaacgcatacacaccggagctgtatcccacgtcgctcagggggactggaaac

SEQ ID NO: 267379 - DNA, 55 bp, Artificial
  Synthetic oligonucleotide
ggtcaacgcatacagaccggagctgtatcccacgtcgctcagggggactggaaac

SEQ ID NO: 267380 - DNA, 55 bp, Artificial
  Synthetic oligonucleotide
ggtcaacgcatacagaccgcagctgtatcccacgtcgctcagggggactggaaac

SEQ ID NO: 267381 - DNA, 55 bp, Artificial
  Synthetic oligonucleotide
ggtcaacgcatacagaccgcagctctatcccacgtcgctcagggggactggaaac

SEQ ID NO: 267382 - DNA, 55 bp, Artificial
  Synthetic oligonucleotide
ggtcaacgcatacagaccgcagctctatcgcacgtcgctcagggggactggaaac

SEQ ID NO: 267383 - DNA, 55 bp, Artificial
  Synthetic oligonucleotide
ggtcaacgcatacagaccgcagctctatcgcacgacgctcagggggactggaaac

SEQ ID NO: 267384 - DNA, 55 bp, Artificial
  Synthetic oligonucleotide
ggtcaacgcatacagaccgcagctctatcgcacgacgctgagggggactggaaac

SEQ ID NO: 267385 - DNA, 55 bp, Artificial
  Synthetic oligonucleotide
ggtcaacgcatacagaccgcagctctatcgcacgacgctgagggcgactggaaac

SEQ ID NO: 267386 - DNA, 54 bp, Artificial
  Synthetic oligonucleotide
ggtgtggagaaaacccgttggagttaggcgactcgggagagacctggtgttctg

SEQ ID NO: 267387 - DNA, 54 bp, Artificial
  Synthetic oligonucleotide
ggtgtggagtaaacccgttggagttaggcgactcgggagagacctggtgttctg

SEQ ID NO: 267388 - DNA, 54 bp, Artificial
  Synthetic oligonucleotide
ggtgtggagtaaacgcgttggagttaggcgactcgggagagacctggtgttctg

SEQ ID NO: 267389 - DNA, 54 bp, Artificial
  Synthetic oligonucleotide
ggtgtggagtaaacgcgttcgagttaggcgactcgggagagacctggtgttctg

SEQ ID NO: 267390 - DNA, 54 bp, Artificial
  Synthetic oligonucleotide
ggtgtggagtaaacgcgttcgagtaaggcgactcgggagagacctggtgttctg

SEQ ID NO: 267391 - DNA, 54 bp, Artificial
  Synthetic oligonucleotide
ggtgtggagtaaacgcgttcgagtaaggccactcgggagagacctggtgttctg

SEQ ID NO: 267392 - DNA, 54 bp, Artificial
  Synthetic oligonucleotide
ggtgtggagtaaacgcgttcgagtaaggccactccggagagacctggtgttctg

SEQ ID NO: 267393 - DNA, 54 bp, Artificial
  Synthetic oligonucleotide
ggtgtggagtaaacgcgttcgagtaaggccactccggagtgacctggtgttctg

SEQ ID NO: 267394 - DNA, 54 bp, Artificial
  Synthetic oligonucleotide
ggtgtggagtaaacgcgttcgagtaaggccactccggagtgaccaggtgttctg

SEQ ID NO: 267395 - DNA, 55 bp, Artificial
  Synthetic oligonucleotide
gacgatgttgacagcggacatgaaactggccaggaaatcgaaaataatggttaac

SEQ ID NO: 267396 - DNA, 55 bp, Artificial
  Synthetic oligonucleotide
gacgatgttcacagcggacatgaaactggccaggaaatcgaaaataatggttaac

SEQ ID NO: 267397 - DNA, 55 bp, Artificial
  Synthetic oligonucleotide
gacgatgttcacaggggacatgaaactggccaggaaatcgaaaataatggttaac

SEQ ID NO: 267398 - DNA, 55 bp, Artificial
  Synthetic oligonucleotide
gacgatgttcacaggggacttgaaactggccaggaaatcgaaaataatggttaac

SEQ ID NO: 267399 - DNA, 55 bp, Artificial
  Synthetic oligonucleotide
gacgatgttcacaggggacttgaatctggccaggaaatcgaaaataatggttaac

SEQ ID NO: 267400 - DNA, 55 bp, Artificial
  Synthetic oligonucleotide
gacgatgttcacaggggacttgaatctgggcaggaaatcgaaaataatggttaac

SEQ ID NO: 267401 - DNA, 55 bp, Artificial
  Synthetic oligonucleotide
gacgatgttcacaggggacttgaatctgggcaggtaatcgaaaataatggttaac

SEQ ID NO: 267402 - DNA, 55 bp, Artificial
  Synthetic oligonucleotide
gacgatgttcacaggggacttgaatctgggcaggtaatccaaaataatggttaac

SEQ ID NO: 267403 - DNA, 55 bp, Artificial
  Synthetic oligonucleotide
gacgatgttcacaggggacttgaatctgggcaggtaatccaaaaaaatggttaac

SEQ ID NO: 267404 - DNA, 55 bp, Artificial
  Synthetic oligonucleotide
ggttgagaggcttcgctttctttcgcagttggcaggggcgaccgtcgtgtatccc

SEQ ID NO: 267405 - DNA, 55 bp, Artificial
  Synthetic oligonucleotide
ggttgagagccttcgctttctttcgcagttggcaggggcgaccgtcgtgtatccc

SEQ ID NO: 267406 - DNA, 55 bp, Artificial
  Synthetic oligonucleotide
ggttgagagccttccctttctttcgcagttggcaggggcgaccgtcgtgtatccc

SEQ ID NO: 267407 - DNA, 55 bp, Artificial
  Synthetic oligonucleotide
ggttgagagccttccctttgtttcgcagttggcaggggcgaccgtcgtgtatccc

SEQ ID NO: 267408 - DNA, 55 bp, Artificial
  Synthetic oligonucleotide
ggttgagagccttccctttgtttcccagttggcaggggcgaccgtcgtgtatccc

SEQ ID NO: 267409 - DNA, 55 bp, Artificial
  Synthetic oligonucleotide
ggttgagagccttccctttgtttcccagtaggcaggggcgaccgtcgtgtatccc

SEQ ID NO: 267410 - DNA, 55 bp, Artificial
  Synthetic oligonucleotide
ggttgagagccttccctttgtttcccagtaggcacgggcgaccgtcgtgtatccc

SEQ ID NO: 267411 - DNA, 55 bp, Artificial
  Synthetic oligonucleotide
ggttgagagccttccctttgtttcccagtaggcacgggccaccgtcgtgtatccc

SEQ ID NO: 267412 - DNA, 55 bp, Artificial
  Synthetic oligonucleotide
ggttgagagccttccctttgtttcccagtaggcacgggccaccgacgtgtatccc

SEQ ID NO: 267413 - DNA, 55 bp, Artificial
  Synthetic oligonucleotide
catagctcgagcatgtgagcccctaaaacgagttcatttccgggagtgaggtggt

SEQ ID NO: 267414 - DNA, 55 bp, Artificial
  Synthetic oligonucleotide
catagctcgtgcatgtgagcccctaaaacgagttcatttccgggagtgaggtggt

SEQ ID NO: 267415 - DNA, 55 bp, Artificial
  Synthetic oligonucleotide
catagctcgtgcatctgagcccctaaaacgagttcatttccgggagtgaggtggt

SEQ ID NO: 267416 - DNA, 55 bp, Artificial
  Synthetic oligonucleotide
catagctcgtgcatctgaggccctaaaacgagttcatttccgggagtgaggtggt

SEQ ID NO: 267417 - DNA, 55 bp, Artificial
  Synthetic oligonucleotide
catagctcgtgcatctgaggcccttaaacgagttcatttccgggagtgaggtggt

SEQ ID NO: 267418 - DNA, 55 bp, Artificial
  Synthetic oligonucleotide
catagctcgtgcatctgaggcccttaaaccagttcatttccgggagtgaggtggt

SEQ ID NO: 267419 - DNA, 55 bp, Artificial
  Synthetic oligonucleotide
catagctcgtgcatctgaggcccttaaaccagttgatttccgggagtgaggtggt

SEQ ID NO: 267420 - DNA, 55 bp, Artificial
  Synthetic oligonucleotide
catagctcgtgcatctgaggcccttaaaccagttgatttgcgggagtgaggtggt

SEQ ID NO: 267421 - DNA, 55 bp, Artificial
  Synthetic oligonucleotide
catagctcgtgcatctgaggcccttaaaccagttgatttgcgggtgtgaggtggt

SEQ ID NO: 267422 - DNA, 55 bp, Artificial
  Synthetic oligonucleotide
cccatttggctcgacgaaaacacgatggtgtacgttcaggaagatgccacctcga

SEQ ID NO: 267423 - DNA, 55 bp, Artificial
  Synthetic oligonucleotide
cccatttgggtcgacgaaaacacgatggtgtacgttcaggaagatgccacctcga

SEQ ID NO: 267424 - DNA, 55 bp, Artificial
  Synthetic oligonucleotide
cccatttgggtcgaggaaaacacgatggtgtacgttcaggaagatgccacctcga

SEQ ID NO: 267425 - DNA, 55 bp, Artificial
  Synthetic oligonucleotide
cccatttgggtcgaggaaatcacgatggtgtacgttcaggaagatgccacctcga

SEQ ID NO: 267426 - DNA, 55 bp, Artificial
  Synthetic oligonucleotide
cccatttgggtcgaggaaatcacgttggtgtacgttcaggaagatgccacctcga

SEQ ID NO: 267427 - DNA, 55 bp, Artificial
  Synthetic oligonucleotide
cccatttgggtcgaggaaatcacgttggtctacgttcaggaagatgccacctcga

SEQ ID NO: 267428 - DNA, 55 bp, Artificial
  Synthetic oligonucleotide
cccatttgggtcgaggaaatcacgttggtctacgatcaggaagatgccacctcga

SEQ ID NO: 267429 - DNA, 55 bp, Artificial
  Synthetic oligonucleotide
cccatttgggtcgaggaaatcacgttggtctacgatcagcaagatgccacctcga

SEQ ID NO: 267430 - DNA, 55 bp, Artificial
  Synthetic oligonucleotide
cccatttgggtcgaggaaatcacgttggtctacgatcagcaagaagccacctcga

SEQ ID NO: 267431 - DNA, 55 bp, Artificial
  Synthetic oligonucleotide
ccggcttggagtgtaaagcatgagttgctctattccgatctttcccacatcgtgt

SEQ ID NO: 267432 - DNA, 55 bp, Artificial
  Synthetic oligonucleotide
ccggcttggtgtgtaaagcatgagttgctctattccgatctttcccacatcgtgt

SEQ ID NO: 267433 - DNA, 55 bp, Artificial
  Synthetic oligonucleotide
ccggcttggtgtgttaagcatgagttgctctattccgatctttcccacatcgtgt

SEQ ID NO: 267434 - DNA, 55 bp, Artificial
  Synthetic oligonucleotide
ccggcttggtgtgttaagcttgagttgctctattccgatctttcccacatcgtgt

SEQ ID NO: 267435 - DNA, 55 bp, Artificial
  Synthetic oligonucleotide
ccggcttggtgtgttaagcttgagatgctctattccgatctttcccacatcgtgt

SEQ ID NO: 267436 - DNA, 55 bp, Artificial
  Synthetic oligonucleotide
ccggcttggtgtgttaagcttgagatgctgtattccgatctttcccacatcgtgt

SEQ ID NO: 267437 - DNA, 55 bp, Artificial
  Synthetic oligonucleotide
ccggcttggtgtgttaagcttgagatgctgtattgcgatctttcccacatcgtgt

SEQ ID NO: 267438 - DNA, 55 bp, Artificial
  Synthetic oligonucleotide
ccggcttggtgtgttaagcttgagatgctgtattgcgatgtttcccacatcgtgt

SEQ ID NO: 267439 - DNA, 55 bp, Artificial
  Synthetic oligonucleotide
ccggcttggtgtgttaagcttgagatgctgtattgcgatgtttcgcacatcgtgt

SEQ ID NO: 267440 - DNA, 55 bp, Artificial
  Synthetic oligonucleotide
aggcagtctcacctgaccgcttatacactgaaccggacagaccctcgcacacgcg

SEQ ID NO: 267441 - DNA, 55 bp, Artificial
  Synthetic oligonucleotide
aggcagtctgacctgaccgcttatacactgaaccggacagaccctcgcacacgcg

SEQ ID NO: 267442 - DNA, 55 bp, Artificial
  Synthetic oligonucleotide
aggcagtctgacctcaccgcttatacactgaaccggacagaccctcgcacacgcg

SEQ ID NO: 267443 - DNA, 55 bp, Artificial
  Synthetic oligonucleotide
aggcagtctgacctcaccggttatacactgaaccggacagaccctcgcacacgcg

SEQ ID NO: 267444 - DNA, 55 bp, Artificial
  Synthetic oligonucleotide
aggcagtctgacctcaccggttattcactgaaccggacagaccctcgcacacgcg

SEQ ID NO: 267445 - DNA, 55 bp, Artificial
  Synthetic oligonucleotide
aggcagtctgacctcaccggttattcactcaaccggacagaccctcgcacacgcg

SEQ ID NO: 267446 - DNA, 55 bp, Artificial
  Synthetic oligonucleotide
aggcagtctgacctcaccggttattcactcaacccgacagaccctcgcacacgcg

SEQ ID NO: 267447 - DNA, 55 bp, Artificial
  Synthetic oligonucleotide
aggcagtctgacctcaccggttattcactcaacccgacacaccctcgcacacgcg

SEQ ID NO: 267448 - DNA, 55 bp, Artificial
  Synthetic oligonucleotide
aggcagtctgacctcaccggttattcactcaacccgacacacccacgcacacgcg

SEQ ID NO: 267449 - DNA, 55 bp, Artificial
  Synthetic oligonucleotide
caaagaggtagagccagagtatctgttcggtcgaagcattcaccggagcccacaa

SEQ ID NO: 267450 - DNA, 55 bp, Artificial
  Synthetic oligonucleotide
caaagaggttgagccagagtatctgttcggtcgaagcattcaccggagcccacaa

SEQ ID NO: 267451 - DNA, 55 bp, Artificial
  Synthetic oligonucleotide
caaagaggttgagcgagagtatctgttcggtcgaagcattcaccggagcccacaa

SEQ ID NO: 267452 - DNA, 55 bp, Artificial
  Synthetic oligonucleotide
caaagaggttgagcgagagaatctgttcggtcgaagcattcaccggagcccacaa

SEQ ID NO: 267453 - DNA, 55 bp, Artificial
  Synthetic oligonucleotide
caaagaggttgagcgagagaatctcttcggtcgaagcattcaccggagcccacaa

SEQ ID NO: 267454 - DNA, 55 bp, Artificial
  Synthetic oligonucleotide
caaagaggttgagcgagagaatctcttcgctcgaagcattcaccggagcccacaa

SEQ ID NO: 267455 - DNA, 55 bp, Artificial
  Synthetic oligonucleotide
caaagaggttgagcgagagaatctcttcgctcgatgcattcaccggagcccacaa

SEQ ID NO: 267456 - DNA, 55 bp, Artificial
  Synthetic oligonucleotide
caaagaggttgagcgagagaatctcttcgctcgatgcatacaccggagcccacaa

SEQ ID NO: 267457 - DNA, 55 bp, Artificial
  Synthetic oligonucleotide
caaagaggttgagcgagagaatctcttcgctcgatgcatacacccgagcccacaa

SEQ ID NO: 267458 - DNA, 55 bp, Artificial
  Synthetic oligonucleotide
acgccgtcatgagtgctgtgggaacgtacgctttcctctacggaacgtttctcgc

SEQ ID NO: 267459 - DNA, 55 bp, Artificial
  Synthetic oligonucleotide
acgccgtcaagagtgctgtgggaacgtacgctttcctctacggaacgtttctcgc

SEQ ID NO: 267460 - DNA, 55 bp, Artificial
  Synthetic oligonucleotide
acgccgtcaagagtcctgtgggaacgtacgctttcctctacggaacgtttctcgc

SEQ ID NO: 267461 - DNA, 55 bp, Artificial
  Synthetic oligonucleotide
acgccgtcaagagtcctgtcggaacgtacgctttcctctacggaacgtttctcgc

SEQ ID NO: 267462 - DNA, 55 bp, Artificial
  Synthetic oligonucleotide
acgccgtcaagagtcctgtcggaaggtacgctttcctctacggaacgtttctcgc

SEQ ID NO: 267463 - DNA, 55 bp, Artificial
  Synthetic oligonucleotide
acgccgtcaagagtcctgtcggaaggtaccctttcctctacggaacgtttctcgc

SEQ ID NO: 267464 - DNA, 55 bp, Artificial
  Synthetic oligonucleotide
acgccgtcaagagtcctgtcggaaggtaccctttgctctacggaacgtttctcgc

SEQ ID NO: 267465 - DNA, 55 bp, Artificial
  Synthetic oligonucleotide
acgccgtcaagagtcctgtcggaaggtaccctttgctcttcggaacgtttctcgc

SEQ ID NO: 267466 - DNA, 55 bp, Artificial
  Synthetic oligonucleotide
acgccgtcaagagtcctgtcggaaggtaccctttgctcttcggatcgtttctcgc

SEQ ID NO: 267467 - DNA, 55 bp, Artificial
  Synthetic oligonucleotide
cactgcgtagaactctcccaaaatgccattgttttgaagaggcgacagtattctt

SEQ ID NO: 267468 - DNA, 55 bp, Artificial
  Synthetic oligonucleotide
cactgcgtacaactctcccaaaatgccattgttttgaagaggcgacagtattctt

SEQ ID NO: 267469 - DNA, 55 bp, Artificial
  Synthetic oligonucleotide
cactgcgtacaactgtcccaaaatgccattgttttgaagaggcgacagtattctt

SEQ ID NO: 267470 - DNA, 55 bp, Artificial
  Synthetic oligonucleotide
cactgcgtacaactgtccctaaatgccattgttttgaagaggcgacagtattctt

SEQ ID NO: 267471 - DNA, 55 bp, Artificial
  Synthetic oligonucleotide
cactgcgtacaactgtccctaaatcccattgttttgaagaggcgacagtattctt

SEQ ID NO: 267472 - DNA, 55 bp, Artificial
  Synthetic oligonucleotide
cactgcgtacaactgtccctaaatcccatagttttgaagaggcgacagtattctt

SEQ ID NO: 267473 - DNA, 55 bp, Artificial
  Synthetic oligonucleotide
cactgcgtacaactgtccctaaatcccatagtttagaagaggcgacagtattctt

SEQ ID NO: 267474 - DNA, 55 bp, Artificial
  Synthetic oligonucleotide
cactgcgtacaactgtccctaaatcccatagtttagaagtggcgacagtattctt

SEQ ID NO: 267475 - DNA, 55 bp, Artificial
  Synthetic oligonucleotide
cactgcgtacaactgtccctaaatcccatagtttagaagtggcgtcagtattctt

SEQ ID NO: 267476 - DNA, 54 bp, Artificial
  Synthetic oligonucleotide
aaggttctacacatttggagggtccgctacaacgggggctctcgccaggtggtt

SEQ ID NO: 267477 - DNA, 54 bp, Artificial
  Synthetic oligonucleotide
aaggttctagacatttggagggtccgctacaacgggggctctcgccaggtggtt

SEQ ID NO: 267478 - DNA, 54 bp, Artificial
  Synthetic oligonucleotide
aaggttctagacatatggagggtccgctacaacgggggctctcgccaggtggtt

SEQ ID NO: 267479 - DNA, 54 bp, Artificial
  Synthetic oligonucleotide
aaggttctagacatatggacggtccgctacaacgggggctctcgccaggtggtt

SEQ ID NO: 267480 - DNA, 54 bp, Artificial
  Synthetic oligonucleotide
aaggttctagacatatggacggtcggctacaacgggggctctcgccaggtggtt

SEQ ID NO: 267481 - DNA, 54 bp, Artificial
  Synthetic oligonucleotide
aaggttctagacatatggacggtcggctagaacgggggctctcgccaggtggtt

SEQ ID NO: 267482 - DNA, 54 bp, Artificial
  Synthetic oligonucleotide
aaggttctagacatatggacggtcggctagaacgcgggctctcgccaggtggtt

SEQ ID NO: 267483 - DNA, 54 bp, Artificial
  Synthetic oligonucleotide
aaggttctagacatatggacggtcggctagaacgcgggcactcgccaggtggtt

SEQ ID NO: 267484 - DNA, 54 bp, Artificial
  Synthetic oligonucleotide
aaggttctagacatatggacggtcggctagaacgcgggcactcggcaggtggtt

SEQ ID NO: 267485 - DNA, 55 bp, Artificial
  Synthetic oligonucleotide
gatactgaggattccaagaaattccctcgacaggataacgagttcctccaatctc

SEQ ID NO: 267486 - DNA, 55 bp, Artificial
  Synthetic oligonucleotide
gatactgagcattccaagaaattccctcgacaggataacgagttcctccaatctc

SEQ ID NO: 267487 - DNA, 55 bp, Artificial
  Synthetic oligonucleotide
gatactgagcattcgaagaaattccctcgacaggataacgagttcctccaatctc

SEQ ID NO: 267488 - DNA, 55 bp, Artificial
  Synthetic oligonucleotide
gatactgagcattcgaagatattccctcgacaggataacgagttcctccaatctc

SEQ ID NO: 267489 - DNA, 55 bp, Artificial
  Synthetic oligonucleotide
gatactgagcattcgaagatattcgctcgacaggataacgagttcctccaatctc

SEQ ID NO: 267490 - DNA, 55 bp, Artificial
  Synthetic oligonucleotide
gatactgagcattcgaagatattcgctcgtcaggataacgagttcctccaatctc

SEQ ID NO: 267491 - DNA, 55 bp, Artificial
  Synthetic oligonucleotide
gatactgagcattcgaagatattcgctcgtcaggttaacgagttcctccaatctc

SEQ ID NO: 267492 - DNA, 55 bp, Artificial
  Synthetic oligonucleotide
gatactgagcattcgaagatattcgctcgtcaggttaaccagttcctccaatctc

SEQ ID NO: 267493 - DNA, 55 bp, Artificial
  Synthetic oligonucleotide
gatactgagcattcgaagatattcgctcgtcaggttaaccagttgctccaatctc

SEQ ID NO: 267494 - DNA, 55 bp, Artificial
  Synthetic oligonucleotide
cgaatcgaaatttgtgagaacgtcgtagtaatcacacacgcttattattcgcgct

SEQ ID NO: 267495 - DNA, 55 bp, Artificial
  Synthetic oligonucleotide
cgaatcgaattttgtgagaacgtcgtagtaatcacacacgcttattattcgcgct

SEQ ID NO: 267496 - DNA, 55 bp, Artificial
  Synthetic oligonucleotide
cgaatcgaattttgagagaacgtcgtagtaatcacacacgcttattattcgcgct

SEQ ID NO: 267497 - DNA, 55 bp, Artificial
  Synthetic oligonucleotide
cgaatcgaattttgagagatcgtcgtagtaatcacacacgcttattattcgcgct

SEQ ID NO: 267498 - DNA, 55 bp, Artificial
  Synthetic oligonucleotide
cgaatcgaattttgagagatcgtcctagtaatcacacacgcttattattcgcgct

SEQ ID NO: 267499 - DNA, 55 bp, Artificial
  Synthetic oligonucleotide
cgaatcgaattttgagagatcgtcctagttatcacacacgcttattattcgcgct

SEQ ID NO: 267500 - DNA, 55 bp, Artificial
  Synthetic oligonucleotide
cgaatcgaattttgagagatcgtcctagttatcagacacgcttattattcgcgct

SEQ ID NO: 267501 - DNA, 55 bp, Artificial
  Synthetic oligonucleotide
cgaatcgaattttgagagatcgtcctagttatcagacacccttattattcgcgct

SEQ ID NO: 267502 - DNA, 55 bp, Artificial
  Synthetic oligonucleotide
cgaatcgaattttgagagatcgtcctagttatcagacacccttaatattcgcgct

SEQ ID NO: 267503 - DNA, 55 bp, Artificial
  Synthetic oligonucleotide
aacctctgcttcacatggtttcccataagtgcgaaccgtttcatagtatagtacc

SEQ ID NO: 267504 - DNA, 55 bp, Artificial
  Synthetic oligonucleotide
aacctctgcatcacatggtttcccataagtgcgaaccgtttcatagtatagtacc

SEQ ID NO: 267505 - DNA, 55 bp, Artificial
  Synthetic oligonucleotide
aacctctgcatcacttggtttcccataagtgcgaaccgtttcatagtatagtacc

SEQ ID NO: 267506 - DNA, 55 bp, Artificial
  Synthetic oligonucleotide
aacctctgcatcacttggtatcccataagtgcgaaccgtttcatagtatagtacc

SEQ ID NO: 267507 - DNA, 55 bp, Artificial
  Synthetic oligonucleotide
aacctctgcatcacttggtatcccttaagtgcgaaccgtttcatagtatagtacc

SEQ ID NO: 267508 - DNA, 55 bp, Artificial
  Synthetic oligonucleotide
aacctctgcatcacttggtatcccttaagagcgaaccgtttcatagtatagtacc

SEQ ID NO: 267509 - DNA, 55 bp, Artificial
  Synthetic oligonucleotide
aacctctgcatcacttggtatcccttaagagcgatccgtttcatagtatagtacc

SEQ ID NO: 267510 - DNA, 55 bp, Artificial
  Synthetic oligonucleotide
aacctctgcatcacttggtatcccttaagagcgatccgtatcatagtatagtacc

SEQ ID NO: 267511 - DNA, 55 bp, Artificial
  Synthetic oligonucleotide
aacctctgcatcacttggtatcccttaagagcgatccgtatcattgtatagtacc

SEQ ID NO: 267512 - DNA, 55 bp, Artificial
  Synthetic oligonucleotide
cgcgctttcctgaaatgtgtaccttttccgcccagtccgcttcttcgagtcttgc

SEQ ID NO: 267513 - DNA, 55 bp, Artificial
  Synthetic oligonucleotide
cgcgctttcgtgaaatgtgtaccttttccgcccagtccgcttcttcgagtcttgc

SEQ ID NO: 267514 - DNA, 55 bp, Artificial
  Synthetic oligonucleotide
cgcgctttcgtgaattgtgtaccttttccgcccagtccgcttcttcgagtcttgc

SEQ ID NO: 267515 - DNA, 55 bp, Artificial
  Synthetic oligonucleotide
cgcgctttcgtgaattgtgaaccttttccgcccagtccgcttcttcgagtcttgc

SEQ ID NO: 267516 - DNA, 55 bp, Artificial
  Synthetic oligonucleotide
cgcgctttcgtgaattgtgaacctattccgcccagtccgcttcttcgagtcttgc

SEQ ID NO: 267517 - DNA, 55 bp, Artificial
  Synthetic oligonucleotide
cgcgctttcgtgaattgtgaacctattccccccagtccgcttcttcgagtcttgc

SEQ ID NO: 267518 - DNA, 55 bp, Artificial
  Synthetic oligonucleotide
cgcgctttcgtgaattgtgaacctattccccccactccgcttcttcgagtcttgc

SEQ ID NO: 267519 - DNA, 55 bp, Artificial
  Synthetic oligonucleotide
cgcgctttcgtgaattgtgaacctattccccccactccggttcttcgagtcttgc

SEQ ID NO: 267520 - DNA, 55 bp, Artificial
  Synthetic oligonucleotide
cgcgctttcgtgaattgtgaacctattccccccactccggttctacgagtcttgc

SEQ ID NO: 267521 - DNA, 55 bp, Artificial
  Synthetic oligonucleotide
cgctacacaccagtctcctattcccgcgttgttgactcctatgtcgagtttcccc

SEQ ID NO: 267522 - DNA, 55 bp, Artificial
  Synthetic oligonucleotide
cgctacacagcagtctcctattcccgcgttgttgactcctatgtcgagtttcccc

SEQ ID NO: 267523 - DNA, 55 bp, Artificial
  Synthetic oligonucleotide
cgctacacagcagtgtcctattcccgcgttgttgactcctatgtcgagtttcccc

SEQ ID NO: 267524 - DNA, 55 bp, Artificial
  Synthetic oligonucleotide
cgctacacagcagtgtccttttcccgcgttgttgactcctatgtcgagtttcccc

SEQ ID NO: 267525 - DNA, 55 bp, Artificial
  Synthetic oligonucleotide
cgctacacagcagtgtccttttccggcgttgttgactcctatgtcgagtttcccc

SEQ ID NO: 267526 - DNA, 55 bp, Artificial
  Synthetic oligonucleotide
cgctacacagcagtgtccttttccggcgtagttgactcctatgtcgagtttcccc

SEQ ID NO: 267527 - DNA, 55 bp, Artificial
  Synthetic oligonucleotide
cgctacacagcagtgtccttttccggcgtagttgtctcctatgtcgagtttcccc

SEQ ID NO: 267528 - DNA, 55 bp, Artificial
  Synthetic oligonucleotide
cgctacacagcagtgtccttttccggcgtagttgtctccaatgtcgagtttcccc

SEQ ID NO: 267529 - DNA, 55 bp, Artificial
  Synthetic oligonucleotide
cgctacacagcagtgtccttttccggcgtagttgtctccaatgtggagtttcccc

SEQ ID NO: 267530 - DNA, 55 bp, Artificial
  Synthetic oligonucleotide
cctcatctgcgagttttatgaggcgctctcttgctcttctgagttgctcgtggaa

SEQ ID NO: 267531 - DNA, 55 bp, Artificial
  Synthetic oligonucleotide
cctcatctgggagttttatgaggcgctctcttgctcttctgagttgctcgtggaa

SEQ ID NO: 267532 - DNA, 55 bp, Artificial
  Synthetic oligonucleotide
cctcatctgggagtattatgaggcgctctcttgctcttctgagttgctcgtggaa

SEQ ID NO: 267533 - DNA, 55 bp, Artificial
  Synthetic oligonucleotide
cctcatctgggagtattatcaggcgctctcttgctcttctgagttgctcgtggaa

SEQ ID NO: 267534 - DNA, 55 bp, Artificial
  Synthetic oligonucleotide
cctcatctgggagtattatcaggccctctcttgctcttctgagttgctcgtggaa

SEQ ID NO: 267535 - DNA, 55 bp, Artificial
  Synthetic oligonucleotide
cctcatctgggagtattatcaggccctctgttgctcttctgagttgctcgtggaa

SEQ ID NO: 267536 - DNA, 55 bp, Artificial
  Synthetic oligonucleotide
cctcatctgggagtattatcaggccctctgttgcacttctgagttgctcgtggaa

SEQ ID NO: 267537 - DNA, 55 bp, Artificial
  Synthetic oligonucleotide
cctcatctgggagtattatcaggccctctgttgcacttcagagttgctcgtggaa

SEQ ID NO: 267538 - DNA, 55 bp, Artificial
  Synthetic oligonucleotide
cctcatctgggagtattatcaggccctctgttgcacttcagagtagctcgtggaa

SEQ ID NO: 267539 - DNA, 55 bp, Artificial
  Synthetic oligonucleotide
cctgccaatctgggccttcaagatcctatccgcctcgagcgccaaaacaggaacg

SEQ ID NO: 267540 - DNA, 55 bp, Artificial
  Synthetic oligonucleotide
cctgccaatgtgggccttcaagatcctatccgcctcgagcgccaaaacaggaacg

SEQ ID NO: 267541 - DNA, 55 bp, Artificial
  Synthetic oligonucleotide
cctgccaatgtggggcttcaagatcctatccgcctcgagcgccaaaacaggaacg

SEQ ID NO: 267542 - DNA, 55 bp, Artificial
  Synthetic oligonucleotide
cctgccaatgtggggcttctagatcctatccgcctcgagcgccaaaacaggaacg

SEQ ID NO: 267543 - DNA, 55 bp, Artificial
  Synthetic oligonucleotide
cctgccaatgtggggcttctagatgctatccgcctcgagcgccaaaacaggaacg

SEQ ID NO: 267544 - DNA, 55 bp, Artificial
  Synthetic oligonucleotide
cctgccaatgtggggcttctagatgctatgcgcctcgagcgccaaaacaggaacg

SEQ ID NO: 267545 - DNA, 55 bp, Artificial
  Synthetic oligonucleotide
cctgccaatgtggggcttctagatgctatgcgccacgagcgccaaaacaggaacg

SEQ ID NO: 267546 - DNA, 55 bp, Artificial
  Synthetic oligonucleotide
cctgccaatgtggggcttctagatgctatgcgccacgagggccaaaacaggaacg

SEQ ID NO: 267547 - DNA, 55 bp, Artificial
  Synthetic oligonucleotide
cctgccaatgtggggcttctagatgctatgcgccacgagggccataacaggaacg

SEQ ID NO: 267548 - DNA, 58 bp, Artificial
  Synthetic oligonucleotide
agaggcagagtatctgttcggtcgaagcattcaccggagcccacaaaagtgccgtaag

SEQ ID NO: 267549 - DNA, 58 bp, Artificial
  Synthetic oligonucleotide
agaggcagactatctgttcggtcgaagcattcaccggagcccacaaaagtgccgtaag

SEQ ID NO: 267550 - DNA, 58 bp, Artificial
  Synthetic oligonucleotide
agaggcagactatcagttcggtcgaagcattcaccggagcccacaaaagtgccgtaag

SEQ ID NO: 267551 - DNA, 58 bp, Artificial
  Synthetic oligonucleotide
agaggcagactatcagttccgtcgaagcattcaccggagcccacaaaagtgccgtaag

SEQ ID NO: 267552 - DNA, 58 bp, Artificial
  Synthetic oligonucleotide
agaggcagactatcagttccgtcgtagcattcaccggagcccacaaaagtgccgtaag

SEQ ID NO: 267553 - DNA, 58 bp, Artificial
  Synthetic oligonucleotide
agaggcagactatcagttccgtcgtagcaatcaccggagcccacaaaagtgccgtaag

SEQ ID NO: 267554 - DNA, 58 bp, Artificial
  Synthetic oligonucleotide
agaggcagactatcagttccgtcgtagcaatcacgggagcccacaaaagtgccgtaag

SEQ ID NO: 267555 - DNA, 58 bp, Artificial
  Synthetic oligonucleotide
agaggcagactatcagttccgtcgtagcaatcacgggaggccacaaaagtgccgtaag

SEQ ID NO: 267556 - DNA, 58 bp, Artificial
  Synthetic oligonucleotide
agaggcagactatcagttccgtcgtagcaatcacgggaggccactaaagtgccgtaag

SEQ ID NO: 267557 - DNA, 54 bp, Artificial
  Synthetic oligonucleotide
ccgccattatcctgccgtctttcacaacgaccgcaccaactggtgggttgggat

SEQ ID NO: 267558 - DNA, 54 bp, Artificial
  Synthetic oligonucleotide
ccgccattaacctgccgtctttcacaacgaccgcaccaactggtgggttgggat

SEQ ID NO: 267559 - DNA, 54 bp, Artificial
  Synthetic oligonucleotide
ccgccattaacctggcgtctttcacaacgaccgcaccaactggtgggttgggat

SEQ ID NO: 267560 - DNA, 54 bp, Artificial
  Synthetic oligonucleotide
ccgccattaacctggcgtcattcacaacgaccgcaccaactggtgggttgggat

SEQ ID NO: 267561 - DNA, 54 bp, Artificial
  Synthetic oligonucleotide
ccgccattaacctggcgtcattcagaacgaccgcaccaactggtgggttgggat

SEQ ID NO: 267562 - DNA, 54 bp, Artificial
  Synthetic oligonucleotide
ccgccattaacctggcgtcattcagaacgtccgcaccaactggtgggttgggat

SEQ ID NO: 267563 - DNA, 54 bp, Artificial
  Synthetic oligonucleotide
ccgccattaacctggcgtcattcagaacgtccgctccaactggtgggttgggat

SEQ ID NO: 267564 - DNA, 54 bp, Artificial
  Synthetic oligonucleotide
ccgccattaacctggcgtcattcagaacgtccgctccaagtggtgggttgggat

SEQ ID NO: 267565 - DNA, 54 bp, Artificial
  Synthetic oligonucleotide
ccgccattaacctggcgtcattcagaacgtccgctccaagtggtcggttgggat

SEQ ID NO: 267566 - DNA, 54 bp, Artificial
  Synthetic oligonucleotide
tacgtaagtggttcagaggcttcgctttctttcgcagttggcaggggcgaccgt

SEQ ID NO: 267567 - DNA, 54 bp, Artificial
  Synthetic oligonucleotide
tacgtaagtcgttcagaggcttcgctttctttcgcagttggcaggggcgaccgt

SEQ ID NO: 267568 - DNA, 54 bp, Artificial
  Synthetic oligonucleotide
tacgtaagtcgttctgaggcttcgctttctttcgcagttggcaggggcgaccgt

SEQ ID NO: 267569 - DNA, 54 bp, Artificial
  Synthetic oligonucleotide
tacgtaagtcgttctgagggttcgctttctttcgcagttggcaggggcgaccgt

SEQ ID NO: 267570 - DNA, 54 bp, Artificial
  Synthetic oligonucleotide
tacgtaagtcgttctgagggttcggtttctttcgcagttggcaggggcgaccgt

SEQ ID NO: 267571 - DNA, 54 bp, Artificial
  Synthetic oligonucleotide
tacgtaagtcgttctgagggttcggtttcattcgcagttggcaggggcgaccgt

SEQ ID NO: 267572 - DNA, 54 bp, Artificial
  Synthetic oligonucleotide
tacgtaagtcgttctgagggttcggtttcattcggagttggcaggggcgaccgt

SEQ ID NO: 267573 - DNA, 54 bp, Artificial
  Synthetic oligonucleotide
tacgtaagtcgttctgagggttcggtttcattcggagttcgcaggggcgaccgt

SEQ ID NO: 267574 - DNA, 54 bp, Artificial
  Synthetic oligonucleotide
tacgtaagtcgttctgagggttcggtttcattcggagttcgcagcggcgaccgt

SEQ ID NO: 267575 - DNA, 54 bp, Artificial
  Synthetic oligonucleotide
tatcaccgctccgttgatcaaatcggagagagttacttctatttcgtaccttat

SEQ ID NO: 267576 - DNA, 54 bp, Artificial
  Synthetic oligonucleotide
tatcaccgcaccgttgatcaaatcggagagagttacttctatttcgtaccttat

SEQ ID NO: 267577 - DNA, 54 bp, Artificial
  Synthetic oligonucleotide
tatcaccgcaccgtagatcaaatcggagagagttacttctatttcgtaccttat

SEQ ID NO: 267578 - DNA, 54 bp, Artificial
  Synthetic oligonucleotide
tatcaccgcaccgtagatctaatcggagagagttacttctatttcgtaccttat

SEQ ID NO: 267579 - DNA, 54 bp, Artificial
  Synthetic oligonucleotide
tatcaccgcaccgtagatctaatccgagagagttacttctatttcgtaccttat

SEQ ID NO: 267580 - DNA, 54 bp, Artificial
  Synthetic oligonucleotide
tatcaccgcaccgtagatctaatccgagacagttacttctatttcgtaccttat

SEQ ID NO: 267581 - DNA, 54 bp, Artificial
  Synthetic oligonucleotide
tatcaccgcaccgtagatctaatccgagacagtttcttctatttcgtaccttat

SEQ ID NO: 267582 - DNA, 54 bp, Artificial
  Synthetic oligonucleotide
tatcaccgcaccgtagatctaatccgagacagtttcttcaatttcgtaccttat

SEQ ID NO: 267583 - DNA, 54 bp, Artificial
  Synthetic oligonucleotide
tatcaccgcaccgtagatctaatccgagacagtttcttcaatttggtaccttat

SEQ ID NO: 267584 - DNA, 53 bp, Artificial
  Synthetic oligonucleotide
gggtgcgctacaacgggggctctcgccaggtggtttaaagaacagttcggtga

SEQ ID NO: 267585 - DNA, 53 bp, Artificial
  Synthetic oligonucleotide
gggtgcgcttcaacgggggctctcgccaggtggtttaaagaacagttcggtga

SEQ ID NO: 267586 - DNA, 53 bp, Artificial
  Synthetic oligonucleotide
gggtgcgcttcaaccggggctctcgccaggtggtttaaagaacagttcggtga

SEQ ID NO: 267587 - DNA, 53 bp, Artificial
  Synthetic oligonucleotide
gggtgcgcttcaaccgggggtctcgccaggtggtttaaagaacagttcggtga

SEQ ID NO: 267588 - DNA, 53 bp, Artificial
  Synthetic oligonucleotide
gggtgcgcttcaaccgggggtctccccaggtggtttaaagaacagttcggtga

SEQ ID NO: 267589 - DNA, 53 bp, Artificial
  Synthetic oligonucleotide
gggtgcgcttcaaccgggggtctccccagctggtttaaagaacagttcggtga

SEQ ID NO: 267590 - DNA, 53 bp, Artificial
  Synthetic oligonucleotide
gggtgcgcttcaaccgggggtctccccagctggtataaagaacagttcggtga

SEQ ID NO: 267591 - DNA, 53 bp, Artificial
  Synthetic oligonucleotide
gggtgcgcttcaaccgggggtctccccagctggtataaacaacagttcggtga

SEQ ID NO: 267592 - DNA, 53 bp, Artificial
  Synthetic oligonucleotide
gggtgcgcttcaaccgggggtctccccagctggtataaacaacacttcggtga

SEQ ID NO: 267593 - DNA, 53 bp, Artificial
  Synthetic oligonucleotide
tccggctcgagcgccaaaacaggaacgaacctcatcgcaatggtcatcaccat

SEQ ID NO: 267594 - DNA, 53 bp, Artificial
  Synthetic oligonucleotide
tccggctcgtgcgccaaaacaggaacgaacctcatcgcaatggtcatcaccat

SEQ ID NO: 267595 - DNA, 53 bp, Artificial
  Synthetic oligonucleotide
tccggctcgtgcgcgaaaacaggaacgaacctcatcgcaatggtcatcaccat

SEQ ID NO: 267596 - DNA, 53 bp, Artificial
  Synthetic oligonucleotide
tccggctcgtgcgcgaaaagaggaacgaacctcatcgcaatggtcatcaccat

SEQ ID NO: 267597 - DNA, 53 bp, Artificial
  Synthetic oligonucleotide
tccggctcgtgcgcgaaaagaggatcgaacctcatcgcaatggtcatcaccat

SEQ ID NO: 267598 - DNA, 53 bp, Artificial
  Synthetic oligonucleotide
tccggctcgtgcgcgaaaagaggatcgaagctcatcgcaatggtcatcaccat

SEQ ID NO: 267599 - DNA, 53 bp, Artificial
  Synthetic oligonucleotide
tccggctcgtgcgcgaaaagaggatcgaagctcaacgcaatggtcatcaccat

SEQ ID NO: 267600 - DNA, 53 bp, Artificial
  Synthetic oligonucleotide
tccggctcgtgcgcgaaaagaggatcgaagctcaacgcattggtcatcaccat

SEQ ID NO: 267601 - DNA, 53 bp, Artificial
  Synthetic oligonucleotide
tccggctcgtgcgcgaaaagaggatcgaagctcaacgcattggtgatcaccat

SEQ ID NO: 267602 - DNA, 53 bp, Artificial
  Synthetic oligonucleotide
tgcacgctgtctctcaaatagaagggatttacgtgccttgtattcacggtttt

SEQ ID NO: 267603 - DNA, 53 bp, Artificial
  Synthetic oligonucleotide
tgcacgctgactctcaaatagaagggatttacgtgccttgtattcacggtttt

SEQ ID NO: 267604 - DNA, 53 bp, Artificial
  Synthetic oligonucleotide
tgcacgctgactctgaaatagaagggatttacgtgccttgtattcacggtttt

SEQ ID NO: 267605 - DNA, 53 bp, Artificial
  Synthetic oligonucleotide
tgcacgctgactctgaaattgaagggatttacgtgccttgtattcacggtttt

SEQ ID NO: 267606 - DNA, 53 bp, Artificial
  Synthetic oligonucleotide
tgcacgctgactctgaaattgaagcgatttacgtgccttgtattcacggtttt

SEQ ID NO: 267607 - DNA, 53 bp, Artificial
  Synthetic oligonucleotide
tgcacgctgactctgaaattgaagcgattaacgtgccttgtattcacggtttt

SEQ ID NO: 267608 - DNA, 53 bp, Artificial
  Synthetic oligonucleotide
tgcacgctgactctgaaattgaagcgattaacgtcccttgtattcacggtttt

SEQ ID NO: 267609 - DNA, 53 bp, Artificial
  Synthetic oligonucleotide
tgcacgctgactctgaaattgaagcgattaacgtcccttctattcacggtttt

SEQ ID NO: 267610 - DNA, 53 bp, Artificial
  Synthetic oligonucleotide
tgcacgctgactctgaaattgaagcgattaacgtcccttctattgacggtttt

SEQ ID NO: 267611 - DNA, 52 bp, Artificial
  Synthetic oligonucleotide
accacgatacccaacggctgcactccagacctgttcgctcgactccggatct

SEQ ID NO: 267612 - DNA, 52 bp, Artificial
  Synthetic oligonucleotide
accacgatagccaacggctgcactccagacctgttcgctcgactccggatct

SEQ ID NO: 267613 - DNA, 52 bp, Artificial
  Synthetic oligonucleotide
accacgatagccaagggctgcactccagacctgttcgctcgactccggatct

SEQ ID NO: 267614 - DNA, 52 bp, Artificial
  Synthetic oligonucleotide
accacgatagccaagggctccactccagacctgttcgctcgactccggatct

SEQ ID NO: 267615 - DNA, 52 bp, Artificial
  Synthetic oligonucleotide
accacgatagccaagggctccactgcagacctgttcgctcgactccggatct

SEQ ID NO: 267616 - DNA, 52 bp, Artificial
  Synthetic oligonucleotide
accacgatagccaagggctccactgcagagctgttcgctcgactccggatct

SEQ ID NO: 267617 - DNA, 52 bp, Artificial
  Synthetic oligonucleotide
accacgatagccaagggctccactgcagagctgtacgctcgactccggatct

SEQ ID NO: 267618 - DNA, 52 bp, Artificial
  Synthetic oligonucleotide
accacgatagccaagggctccactgcagagctgtacgctggactccggatct

SEQ ID NO: 267619 - DNA, 52 bp, Artificial
  Synthetic oligonucleotide
accacgatagccaagggctccactgcagagctgtacgctggactgcggatct

SEQ ID NO: 267620 - DNA, 51 bp, Artificial
  Synthetic oligonucleotide
aaggattctgcagaaagcgattttggagagtacggtggaaaggtggaggtc

SEQ ID NO: 267621 - DNA, 51 bp, Artificial
  Synthetic oligonucleotide
aaggattctccagaaagcgattttggagagtacggtggaaaggtggaggtc

SEQ ID NO: 267622 - DNA, 51 bp, Artificial
  Synthetic oligonucleotide
aaggattctccagatagcgattttggagagtacggtggaaaggtggaggtc

SEQ ID NO: 267623 - DNA, 51 bp, Artificial
  Synthetic oligonucleotide
aaggattctccagatagcgtttttggagagtacggtggaaaggtggaggtc

SEQ ID NO: 267624 - DNA, 51 bp, Artificial
  Synthetic oligonucleotide
aaggattctccagatagcgtttttcgagagtacggtggaaaggtggaggtc

SEQ ID NO: 267625 - DNA, 51 bp, Artificial
  Synthetic oligonucleotide
aaggattctccagatagcgtttttcgagactacggtggaaaggtggaggtc

SEQ ID NO: 267626 - DNA, 51 bp, Artificial
  Synthetic oligonucleotide
aaggattctccagatagcgtttttcgagactacgctggaaaggtggaggtc

SEQ ID NO: 267627 - DNA, 51 bp, Artificial
  Synthetic oligonucleotide
aaggattctccagatagcgtttttcgagactacgctggataggtggaggtc

SEQ ID NO: 267628 - DNA, 51 bp, Artificial
  Synthetic oligonucleotide
aaggattctccagatagcgtttttcgagactacgctggataggtcgaggtc

SEQ ID NO: 267629 - DNA, 51 bp, Artificial
  Synthetic oligonucleotide
acaatgacgacgtgccctacgaagaaaaggtgagacgtatgcagtttctca

SEQ ID NO: 267630 - DNA, 51 bp, Artificial
  Synthetic oligonucleotide
acaatgacgtcgtgccctacgaagaaaaggtgagacgtatgcagtttctca

SEQ ID NO: 267631 - DNA, 51 bp, Artificial
  Synthetic oligonucleotide
acaatgacgtcgtggcctacgaagaaaaggtgagacgtatgcagtttctca

SEQ ID NO: 267632 - DNA, 51 bp, Artificial
  Synthetic oligonucleotide
acaatgacgtcgtggcctaggaagaaaaggtgagacgtatgcagtttctca

SEQ ID NO: 267633 - DNA, 51 bp, Artificial
  Synthetic oligonucleotide
acaatgacgtcgtggcctaggaagtaaaggtgagacgtatgcagtttctca

SEQ ID NO: 267634 - DNA, 51 bp, Artificial
  Synthetic oligonucleotide
acaatgacgtcgtggcctaggaagtaaagctgagacgtatgcagtttctca

SEQ ID NO: 267635 - DNA, 51 bp, Artificial
  Synthetic oligonucleotide
acaatgacgtcgtggcctaggaagtaaagctgagtcgtatgcagtttctca

SEQ ID NO: 267636 - DNA, 51 bp, Artificial
  Synthetic oligonucleotide
acaatgacgtcgtggcctaggaagtaaagctgagtcgtaagcagtttctca

SEQ ID NO: 267637 - DNA, 51 bp, Artificial
  Synthetic oligonucleotide
acaatgacgtcgtggcctaggaagtaaagctgagtcgtaagcagattctca

SEQ ID NO: 267638 - DNA, 51 bp, Artificial
  Synthetic oligonucleotide
gagctactgaatccagcgcggttattccgcagtcaaccgttacaagacagg

SEQ ID NO: 267639 - DNA, 51 bp, Artificial
  Synthetic oligonucleotide
gagctactgtatccagcgcggttattccgcagtcaaccgttacaagacagg

SEQ ID NO: 267640 - DNA, 51 bp, Artificial
  Synthetic oligonucleotide
gagctactgtatcctgcgcggttattccgcagtcaaccgttacaagacagg

SEQ ID NO: 267641 - DNA, 51 bp, Artificial
  Synthetic oligonucleotide
gagctactgtatcctgcgccgttattccgcagtcaaccgttacaagacagg

SEQ ID NO: 267642 - DNA, 51 bp, Artificial
  Synthetic oligonucleotide
gagctactgtatcctgcgccgttaatccgcagtcaaccgttacaagacagg

SEQ ID NO: 267643 - DNA, 51 bp, Artificial
  Synthetic oligonucleotide
gagctactgtatcctgcgccgttaatccggagtcaaccgttacaagacagg

SEQ ID NO: 267644 - DNA, 51 bp, Artificial
  Synthetic oligonucleotide
gagctactgtatcctgcgccgttaatccggagtctaccgttacaagacagg

SEQ ID NO: 267645 - DNA, 51 bp, Artificial
  Synthetic oligonucleotide
gagctactgtatcctgcgccgttaatccggagtctaccgatacaagacagg

SEQ ID NO: 267646 - DNA, 51 bp, Artificial
  Synthetic oligonucleotide
gagctactgtatcctgcgccgttaatccggagtctaccgatacatgacagg

SEQ ID NO: 267647 - DNA, 55 bp, Artificial
  Synthetic oligonucleotide
gcacatttgtgggctccggtgaatgcttcgaccgaacagatactctggctctacc

SEQ ID NO: 267648 - DNA, 55 bp, Artificial
  Synthetic oligonucleotide
gcacatttgagggctccggtgaatgcttcgaccgaacagatactctggctctacc

SEQ ID NO: 267649 - DNA, 55 bp, Artificial
  Synthetic oligonucleotide
gcacatttgagggcaccggtgaatgcttcgaccgaacagatactctggctctacc

SEQ ID NO: 267650 - DNA, 55 bp, Artificial
  Synthetic oligonucleotide
gcacatttgagggcaccggagaatgcttcgaccgaacagatactctggctctacc

SEQ ID NO: 267651 - DNA, 55 bp, Artificial
  Synthetic oligonucleotide
gcacatttgagggcaccggagaatccttcgaccgaacagatactctggctctacc

SEQ ID NO: 267652 - DNA, 55 bp, Artificial
  Synthetic oligonucleotide
gcacatttgagggcaccggagaatccttccaccgaacagatactctggctctacc

SEQ ID NO: 267653 - DNA, 55 bp, Artificial
  Synthetic oligonucleotide
gcacatttgagggcaccggagaatccttccaccgtacagatactctggctctacc

SEQ ID NO: 267654 - DNA, 55 bp, Artificial
  Synthetic oligonucleotide
gcacatttgagggcaccggagaatccttccaccgtacagttactctggctctacc

SEQ ID NO: 267655 - DNA, 55 bp, Artificial
  Synthetic oligonucleotide
gcacatttgagggcaccggagaatccttccaccgtacagttactgtggctctacc

SEQ ID NO: 267656 - DNA, 51 bp, Artificial
  Synthetic oligonucleotide
atccggaatatcgtgatgagagcaacagctatgagaaagatccattccagg

SEQ ID NO: 267657 - DNA, 51 bp, Artificial
  Synthetic oligonucleotide
atccggaatttcgtgatgagagcaacagctatgagaaagatccattccagg

SEQ ID NO: 267658 - DNA, 51 bp, Artificial
  Synthetic oligonucleotide
atccggaatttcgtcatgagagcaacagctatgagaaagatccattccagg

SEQ ID NO: 267659 - DNA, 51 bp, Artificial
  Synthetic oligonucleotide
atccggaatttcgtcatgacagcaacagctatgagaaagatccattccagg

SEQ ID NO: 267660 - DNA, 51 bp, Artificial
  Synthetic oligonucleotide
atccggaatttcgtcatgacagcatcagctatgagaaagatccattccagg

SEQ ID NO: 267661 - DNA, 51 bp, Artificial
  Synthetic oligonucleotide
atccggaatttcgtcatgacagcatcagcaatgagaaagatccattccagg

SEQ ID NO: 267662 - DNA, 51 bp, Artificial
  Synthetic oligonucleotide
atccggaatttcgtcatgacagcatcagcaatgacaaagatccattccagg

SEQ ID NO: 267663 - DNA, 51 bp, Artificial
  Synthetic oligonucleotide
atccggaatttcgtcatgacagcatcagcaatgacaaagttccattccagg

SEQ ID NO: 267664 - DNA, 51 bp, Artificial
  Synthetic oligonucleotide
atccggaatttcgtcatgacagcatcagcaatgacaaagttccaatccagg

SEQ ID NO: 267665 - DNA, 55 bp, Artificial
  Synthetic oligonucleotide
gccctaagtgcaacgcccacacgattcataccgaaacgaaagcgtaatcgcaggg

SEQ ID NO: 267666 - DNA, 55 bp, Artificial
  Synthetic oligonucleotide
gccctaagtccaacgcccacacgattcataccgaaacgaaagcgtaatcgcaggg

SEQ ID NO: 267667 - DNA, 55 bp, Artificial
  Synthetic oligonucleotide
gccctaagtccaacccccacacgattcataccgaaacgaaagcgtaatcgcaggg

SEQ ID NO: 267668 - DNA, 55 bp, Artificial
  Synthetic oligonucleotide
gccctaagtccaacccccagacgattcataccgaaacgaaagcgtaatcgcaggg

SEQ ID NO: 267669 - DNA, 55 bp, Artificial
  Synthetic oligonucleotide
gccctaagtccaacccccagacgaatcataccgaaacgaaagcgtaatcgcaggg

SEQ ID NO: 267670 - DNA, 55 bp, Artificial
  Synthetic oligonucleotide
gccctaagtccaacccccagacgaatcattccgaaacgaaagcgtaatcgcaggg

SEQ ID NO: 267671 - DNA, 55 bp, Artificial
  Synthetic oligonucleotide
gccctaagtccaacccccagacgaatcattccgatacgaaagcgtaatcgcaggg

SEQ ID NO: 267672 - DNA, 55 bp, Artificial
  Synthetic oligonucleotide
gccctaagtccaacccccagacgaatcattccgatacgatagcgtaatcgcaggg

SEQ ID NO: 267673 - DNA, 55 bp, Artificial
  Synthetic oligonucleotide
gccctaagtccaacccccagacgaatcattccgatacgatagcgaaatcgcaggg

SEQ ID NO: 267674 - DNA, 51 bp, Artificial
  Synthetic oligonucleotide
gtgcaggactcccccggaccctccaccatctttctcaggtactccgcaact

SEQ ID NO: 267675 - DNA, 51 bp, Artificial
  Synthetic oligonucleotide
gtgcaggacacccccggaccctccaccatctttctcaggtactccgcaact

SEQ ID NO: 267676 - DNA, 51 bp, Artificial
  Synthetic oligonucleotide
gtgcaggacaccccgggaccctccaccatctttctcaggtactccgcaact

SEQ ID NO: 267677 - DNA, 51 bp, Artificial
  Synthetic oligonucleotide
gtgcaggacaccccgggacgctccaccatctttctcaggtactccgcaact

SEQ ID NO: 267678 - DNA, 51 bp, Artificial
  Synthetic oligonucleotide
gtgcaggacaccccgggacgctcctccatctttctcaggtactccgcaact

SEQ ID NO: 267679 - DNA, 51 bp, Artificial
  Synthetic oligonucleotide
gtgcaggacaccccgggacgctcctccatgtttctcaggtactccgcaact

SEQ ID NO: 267680 - DNA, 51 bp, Artificial
  Synthetic oligonucleotide
gtgcaggacaccccgggacgctcctccatgtttcacaggtactccgcaact

SEQ ID NO: 267681 - DNA, 51 bp, Artificial
  Synthetic oligonucleotide
gtgcaggacaccccgggacgctcctccatgtttcacaggaactccgcaact

SEQ ID NO: 267682 - DNA, 51 bp, Artificial
  Synthetic oligonucleotide
gtgcaggacaccccgggacgctcctccatgtttcacaggaactcggcaact

SEQ ID NO: 267683 - DNA, 55 bp, Artificial
  Synthetic oligonucleotide
gccgcgatacacgacggtcgcccctgccaactgcgaaagaaagcgaagcctctga

SEQ ID NO: 267684 - DNA, 55 bp, Artificial
  Synthetic oligonucleotide
gccgcgatagacgacggtcgcccctgccaactgcgaaagaaagcgaagcctctga

SEQ ID NO: 267685 - DNA, 55 bp, Artificial
  Synthetic oligonucleotide
gccgcgatagacgagggtcgcccctgccaactgcgaaagaaagcgaagcctctga

SEQ ID NO: 267686 - DNA, 55 bp, Artificial
  Synthetic oligonucleotide
gccgcgatagacgagggtcccccctgccaactgcgaaagaaagcgaagcctctga

SEQ ID NO: 267687 - DNA, 55 bp, Artificial
  Synthetic oligonucleotide
gccgcgatagacgagggtccccccagccaactgcgaaagaaagcgaagcctctga

SEQ ID NO: 267688 - DNA, 55 bp, Artificial
  Synthetic oligonucleotide
gccgcgatagacgagggtccccccagccatctgcgaaagaaagcgaagcctctga

SEQ ID NO: 267689 - DNA, 55 bp, Artificial
  Synthetic oligonucleotide
gccgcgatagacgagggtccccccagccatctgccaaagaaagcgaagcctctga

SEQ ID NO: 267690 - DNA, 55 bp, Artificial
  Synthetic oligonucleotide
gccgcgatagacgagggtccccccagccatctgccaaagtaagcgaagcctctga

SEQ ID NO: 267691 - DNA, 55 bp, Artificial
  Synthetic oligonucleotide
gccgcgatagacgagggtccccccagccatctgccaaagtaagccaagcctctga

SEQ ID NO: 267692 - DNA, 50 bp, Artificial
  Synthetic oligonucleotide
atgataggagtcaccgtctacagaggtatcatgggtttcggtcacaagag

SEQ ID NO: 267693 - DNA, 50 bp, Artificial
  Synthetic oligonucleotide
atgataggactcaccgtctacagaggtatcatgggtttcggtcacaagag

SEQ ID NO: 267694 - DNA, 50 bp, Artificial
  Synthetic oligonucleotide
atgataggactcacggtctacagaggtatcatgggtttcggtcacaagag

SEQ ID NO: 267695 - DNA, 50 bp, Artificial
  Synthetic oligonucleotide
atgataggactcacggtcttcagaggtatcatgggtttcggtcacaagag

SEQ ID NO: 267696 - DNA, 50 bp, Artificial
  Synthetic oligonucleotide
atgataggactcacggtcttcagacgtatcatgggtttcggtcacaagag

SEQ ID NO: 267697 - DNA, 50 bp, Artificial
  Synthetic oligonucleotide
atgataggactcacggtcttcagacgtatgatgggtttcggtcacaagag

SEQ ID NO: 267698 - DNA, 50 bp, Artificial
  Synthetic oligonucleotide
atgataggactcacggtcttcagacgtatgatggctttcggtcacaagag

SEQ ID NO: 267699 - DNA, 50 bp, Artificial
  Synthetic oligonucleotide
atgataggactcacggtcttcagacgtatgatggctttccgtcacaagag

SEQ ID NO: 267700 - DNA, 50 bp, Artificial
  Synthetic oligonucleotide
atgataggactcacggtcttcagacgtatgatggctttccgtcagaagag

SEQ ID NO: 267701 - DNA, 50 bp, Artificial
  Synthetic oligonucleotide
ccatgctggcgcgtactatctccgggttgtcgtcacgaacagcgggggtt

SEQ ID NO: 267702 - DNA, 50 bp, Artificial
  Synthetic oligonucleotide
ccatgctggggcgtactatctccgggttgtcgtcacgaacagcgggggtt

SEQ ID NO: 267703 - DNA, 50 bp, Artificial
  Synthetic oligonucleotide
ccatgctggggcgttctatctccgggttgtcgtcacgaacagcgggggtt

SEQ ID NO: 267704 - DNA, 50 bp, Artificial
  Synthetic oligonucleotide
ccatgctggggcgttctatgtccgggttgtcgtcacgaacagcgggggtt

SEQ ID NO: 267705 - DNA, 50 bp, Artificial
  Synthetic oligonucleotide
ccatgctggggcgttctatgtccgcgttgtcgtcacgaacagcgggggtt

SEQ ID NO: 267706 - DNA, 50 bp, Artificial
  Synthetic oligonucleotide
ccatgctggggcgttctatgtccgcgttgacgtcacgaacagcgggggtt

SEQ ID NO: 267707 - DNA, 50 bp, Artificial
  Synthetic oligonucleotide
ccatgctggggcgttctatgtccgcgttgacgtctcgaacagcgggggtt

SEQ ID NO: 267708 - DNA, 50 bp, Artificial
  Synthetic oligonucleotide
ccatgctggggcgttctatgtccgcgttgacgtctcgaagagcgggggtt

SEQ ID NO: 267709 - DNA, 50 bp, Artificial
  Synthetic oligonucleotide
ccatgctggggcgttctatgtccgcgttgacgtctcgaagagcgcgggtt

SEQ ID NO: 267710 - DNA, 54 bp, Artificial
  Synthetic oligonucleotide
cggtatcctactacgttcttggggccctcattggtatcaagcttcagccgttaa

SEQ ID NO: 267711 - DNA, 54 bp, Artificial
  Synthetic oligonucleotide
cggtatccttctacgttcttggggccctcattggtatcaagcttcagccgttaa

SEQ ID NO: 267712 - DNA, 54 bp, Artificial
  Synthetic oligonucleotide
cggtatccttctaccttcttggggccctcattggtatcaagcttcagccgttaa

SEQ ID NO: 267713 - DNA, 54 bp, Artificial
  Synthetic oligonucleotide
cggtatccttctaccttctaggggccctcattggtatcaagcttcagccgttaa

SEQ ID NO: 267714 - DNA, 54 bp, Artificial
  Synthetic oligonucleotide
cggtatccttctaccttctagggggcctcattggtatcaagcttcagccgttaa

SEQ ID NO: 267715 - DNA, 54 bp, Artificial
  Synthetic oligonucleotide
cggtatccttctaccttctagggggcctctttggtatcaagcttcagccgttaa

SEQ ID NO: 267716 - DNA, 54 bp, Artificial
  Synthetic oligonucleotide
cggtatccttctaccttctagggggcctctttggaatcaagcttcagccgttaa

SEQ ID NO: 267717 - DNA, 54 bp, Artificial
  Synthetic oligonucleotide
cggtatccttctaccttctagggggcctctttggaatcatgcttcagccgttaa

SEQ ID NO: 267718 - DNA, 54 bp, Artificial
  Synthetic oligonucleotide
cggtatccttctaccttctagggggcctctttggaatcatgcttgagccgttaa

SEQ ID NO: 267719 - DNA, 55 bp, Artificial
  Synthetic oligonucleotide
ctattgtctttggaacgtggaccacctttatttcgcccttcgatctttcacacac

SEQ ID NO: 267720 - DNA, 55 bp, Artificial
  Synthetic oligonucleotide
ctattgtctatggaacgtggaccacctttatttcgcccttcgatctttcacacac

SEQ ID NO: 267721 - DNA, 55 bp, Artificial
  Synthetic oligonucleotide
ctattgtctatggatcgtggaccacctttatttcgcccttcgatctttcacacac

SEQ ID NO: 267722 - DNA, 55 bp, Artificial
  Synthetic oligonucleotide
ctattgtctatggatcgtgcaccacctttatttcgcccttcgatctttcacacac

SEQ ID NO: 267723 - DNA, 55 bp, Artificial
  Synthetic oligonucleotide
ctattgtctatggatcgtgcaccagctttatttcgcccttcgatctttcacacac

SEQ ID NO: 267724 - DNA, 55 bp, Artificial
  Synthetic oligonucleotide
ctattgtctatggatcgtgcaccagctttttttcgcccttcgatctttcacacac

SEQ ID NO: 267725 - DNA, 55 bp, Artificial
  Synthetic oligonucleotide
ctattgtctatggatcgtgcaccagctttttttcccccttcgatctttcacacac

SEQ ID NO: 267726 - DNA, 55 bp, Artificial
  Synthetic oligonucleotide
ctattgtctatggatcgtgcaccagctttttttccccctacgatctttcacacac

SEQ ID NO: 267727 - DNA, 55 bp, Artificial
  Synthetic oligonucleotide
ctattgtctatggatcgtgcaccagctttttttccccctacgatgtttcacacac

SEQ ID NO: 267728 - DNA, 56 bp, Artificial
  Synthetic oligonucleotide
aaggcctgctcctctgagaacggaaggatcgtacaccctcgtgagggccagcactc

SEQ ID NO: 267729 - DNA, 56 bp, Artificial
  Synthetic oligonucleotide
aaggcctgcacctctgagaacggaaggatcgtacaccctcgtgagggccagcactc

SEQ ID NO: 267730 - DNA, 56 bp, Artificial
  Synthetic oligonucleotide
aaggcctgcacctcagagaacggaaggatcgtacaccctcgtgagggccagcactc

SEQ ID NO: 267731 - DNA, 56 bp, Artificial
  Synthetic oligonucleotide
aaggcctgcacctcagagatcggaaggatcgtacaccctcgtgagggccagcactc

SEQ ID NO: 267732 - DNA, 56 bp, Artificial
  Synthetic oligonucleotide
aaggcctgcacctcagagatcggatggatcgtacaccctcgtgagggccagcactc

SEQ ID NO: 267733 - DNA, 56 bp, Artificial
  Synthetic oligonucleotide
aaggcctgcacctcagagatcggatggatggtacaccctcgtgagggccagcactc

SEQ ID NO: 267734 - DNA, 56 bp, Artificial
  Synthetic oligonucleotide
aaggcctgcacctcagagatcggatggatggtactccctcgtgagggccagcactc

SEQ ID NO: 267735 - DNA, 56 bp, Artificial
  Synthetic oligonucleotide
aaggcctgcacctcagagatcggatggatggtactccctggtgagggccagcactc

SEQ ID NO: 267736 - DNA, 56 bp, Artificial
  Synthetic oligonucleotide
aaggcctgcacctcagagatcggatggatggtactccctggtgacggccagcactc

SEQ ID NO: 267737 - DNA, 55 bp, Artificial
  Synthetic oligonucleotide
ctgcgttcgttgctctgtagagaagtcccgaagcgaaatgcacggaatccaccac

SEQ ID NO: 267738 - DNA, 55 bp, Artificial
  Synthetic oligonucleotide
ctgcgttcgatgctctgtagagaagtcccgaagcgaaatgcacggaatccaccac

SEQ ID NO: 267739 - DNA, 55 bp, Artificial
  Synthetic oligonucleotide
ctgcgttcgatgctgtgtagagaagtcccgaagcgaaatgcacggaatccaccac

SEQ ID NO: 267740 - DNA, 55 bp, Artificial
  Synthetic oligonucleotide
ctgcgttcgatgctgtgtacagaagtcccgaagcgaaatgcacggaatccaccac

SEQ ID NO: 267741 - DNA, 55 bp, Artificial
  Synthetic oligonucleotide
ctgcgttcgatgctgtgtacagaactcccgaagcgaaatgcacggaatccaccac

SEQ ID NO: 267742 - DNA, 55 bp, Artificial
  Synthetic oligonucleotide
ctgcgttcgatgctgtgtacagaactccccaagcgaaatgcacggaatccaccac

SEQ ID NO: 267743 - DNA, 55 bp, Artificial
  Synthetic oligonucleotide
ctgcgttcgatgctgtgtacagaactccccaagccaaatgcacggaatccaccac

SEQ ID NO: 267744 - DNA, 55 bp, Artificial
  Synthetic oligonucleotide
ctgcgttcgatgctgtgtacagaactccccaagccaaatccacggaatccaccac

SEQ ID NO: 267745 - DNA, 55 bp, Artificial
  Synthetic oligonucleotide
ctgcgttcgatgctgtgtacagaactccccaagccaaatccacgcaatccaccac

SEQ ID NO: 267746 - DNA, 55 bp, Artificial
  Synthetic oligonucleotide
ctggtttactatagatcggatgacaactcatatttgtggaaaggaatctccacac

SEQ ID NO: 267747 - DNA, 55 bp, Artificial
  Synthetic oligonucleotide
ctggtttacaatagatcggatgacaactcatatttgtggaaaggaatctccacac

SEQ ID NO: 267748 - DNA, 55 bp, Artificial
  Synthetic oligonucleotide
ctggtttacaatagttcggatgacaactcatatttgtggaaaggaatctccacac

SEQ ID NO: 267749 - DNA, 55 bp, Artificial
  Synthetic oligonucleotide
ctggtttacaatagttcggttgacaactcatatttgtggaaaggaatctccacac

SEQ ID NO: 267750 - DNA, 55 bp, Artificial
  Synthetic oligonucleotide
ctggtttacaatagttcggttgactactcatatttgtggaaaggaatctccacac

SEQ ID NO: 267751 - DNA, 55 bp, Artificial
  Synthetic oligonucleotide
ctggtttacaatagttcggttgactactcttatttgtggaaaggaatctccacac

SEQ ID NO: 267752 - DNA, 55 bp, Artificial
  Synthetic oligonucleotide
ctggtttacaatagttcggttgactactcttattagtggaaaggaatctccacac

SEQ ID NO: 267753 - DNA, 55 bp, Artificial
  Synthetic oligonucleotide
ctggtttacaatagttcggttgactactcttattagtggtaaggaatctccacac

SEQ ID NO: 267754 - DNA, 55 bp, Artificial
  Synthetic oligonucleotide
ctggtttacaatagttcggttgactactcttattagtggtaaggtatctccacac

SEQ ID NO: 267755 - DNA, 55 bp, Artificial
  Synthetic oligonucleotide
ctgggtctgagcagtttcggaatgacggtggcagctcttggactgctgacgagag

SEQ ID NO: 267756 - DNA, 55 bp, Artificial
  Synthetic oligonucleotide
ctgggtctgtgcagtttcggaatgacggtggcagctcttggactgctgacgagag

SEQ ID NO: 267757 - DNA, 55 bp, Artificial
  Synthetic oligonucleotide
ctgggtctgtgcagattcggaatgacggtggcagctcttggactgctgacgagag

SEQ ID NO: 267758 - DNA, 55 bp, Artificial
  Synthetic oligonucleotide
ctgggtctgtgcagattcgcaatgacggtggcagctcttggactgctgacgagag

SEQ ID NO: 267759 - DNA, 55 bp, Artificial
  Synthetic oligonucleotide
ctgggtctgtgcagattcgcaatgtcggtggcagctcttggactgctgacgagag

SEQ ID NO: 267760 - DNA, 55 bp, Artificial
  Synthetic oligonucleotide
ctgggtctgtgcagattcgcaatgtcggtcgcagctcttggactgctgacgagag

SEQ ID NO: 267761 - DNA, 55 bp, Artificial
  Synthetic oligonucleotide
ctgggtctgtgcagattcgcaatgtcggtcgcaggtcttggactgctgacgagag

SEQ ID NO: 267762 - DNA, 55 bp, Artificial
  Synthetic oligonucleotide
ctgggtctgtgcagattcgcaatgtcggtcgcaggtcttcgactgctgacgagag

SEQ ID NO: 267763 - DNA, 55 bp, Artificial
  Synthetic oligonucleotide
ctgggtctgtgcagattcgcaatgtcggtcgcaggtcttcgactcctgacgagag

SEQ ID NO: 267764 - DNA, 55 bp, Artificial
  Synthetic oligonucleotide
ctggaccatcttcgatagagaagacctcaggggaagaatgactctcctcgacgac

SEQ ID NO: 267765 - DNA, 55 bp, Artificial
  Synthetic oligonucleotide
ctggaccatgttcgatagagaagacctcaggggaagaatgactctcctcgacgac

SEQ ID NO: 267766 - DNA, 55 bp, Artificial
  Synthetic oligonucleotide
ctggaccatgttcgttagagaagacctcaggggaagaatgactctcctcgacgac

SEQ ID NO: 267767 - DNA, 55 bp, Artificial
  Synthetic oligonucleotide
ctggaccatgttcgttagacaagacctcaggggaagaatgactctcctcgacgac

SEQ ID NO: 267768 - DNA, 55 bp, Artificial
  Synthetic oligonucleotide
ctggaccatgttcgttagacaagagctcaggggaagaatgactctcctcgacgac

SEQ ID NO: 267769 - DNA, 55 bp, Artificial
  Synthetic oligonucleotide
ctggaccatgttcgttagacaagagctcacgggaagaatgactctcctcgacgac

SEQ ID NO: 267770 - DNA, 55 bp, Artificial
  Synthetic oligonucleotide
ctggaccatgttcgttagacaagagctcacgggatgaatgactctcctcgacgac

SEQ ID NO: 267771 - DNA, 55 bp, Artificial
  Synthetic oligonucleotide
ctggaccatgttcgttagacaagagctcacgggatgaatcactctcctcgacgac

SEQ ID NO: 267772 - DNA, 55 bp, Artificial
  Synthetic oligonucleotide
ctggaccatgttcgttagacaagagctcacgggatgaatcactcacctcgacgac

SEQ ID NO: 267773 - DNA, 54 bp, Artificial
  Synthetic oligonucleotide
gtccacccggttcttgtcgtccagaatacctattaccaggctcaagggttcgcc

SEQ ID NO: 267774 - DNA, 54 bp, Artificial
  Synthetic oligonucleotide
gtccacccgcttcttgtcgtccagaatacctattaccaggctcaagggttcgcc

SEQ ID NO: 267775 - DNA, 54 bp, Artificial
  Synthetic oligonucleotide
gtccacccgcttctagtcgtccagaatacctattaccaggctcaagggttcgcc

SEQ ID NO: 267776 - DNA, 54 bp, Artificial
  Synthetic oligonucleotide
gtccacccgcttctagtcgaccagaatacctattaccaggctcaagggttcgcc

SEQ ID NO: 267777 - DNA, 54 bp, Artificial
  Synthetic oligonucleotide
gtccacccgcttctagtcgaccagtatacctattaccaggctcaagggttcgcc

SEQ ID NO: 267778 - DNA, 54 bp, Artificial
  Synthetic oligonucleotide
gtccacccgcttctagtcgaccagtatacgtattaccaggctcaagggttcgcc

SEQ ID NO: 267779 - DNA, 54 bp, Artificial
  Synthetic oligonucleotide
gtccacccgcttctagtcgaccagtatacgtatttccaggctcaagggttcgcc

SEQ ID NO: 267780 - DNA, 54 bp, Artificial
  Synthetic oligonucleotide
gtccacccgcttctagtcgaccagtatacgtatttccagcctcaagggttcgcc

SEQ ID NO: 267781 - DNA, 54 bp, Artificial
  Synthetic oligonucleotide
gtccacccgcttctagtcgaccagtatacgtatttccagcctcatgggttcgcc

SEQ ID NO: 267782 - DNA, 55 bp, Artificial
  Synthetic oligonucleotide
taacgcgtccctggaattttggaccctcgaggagtatgagccttgttgaggctac

SEQ ID NO: 267783 - DNA, 55 bp, Artificial
  Synthetic oligonucleotide
taacgcgtcgctggaattttggaccctcgaggagtatgagccttgttgaggctac

SEQ ID NO: 267784 - DNA, 55 bp, Artificial
  Synthetic oligonucleotide
taacgcgtcgctggtattttggaccctcgaggagtatgagccttgttgaggctac

SEQ ID NO: 267785 - DNA, 55 bp, Artificial
  Synthetic oligonucleotide
taacgcgtcgctggtatttaggaccctcgaggagtatgagccttgttgaggctac

SEQ ID NO: 267786 - DNA, 55 bp, Artificial
  Synthetic oligonucleotide
taacgcgtcgctggtatttaggacgctcgaggagtatgagccttgttgaggctac

SEQ ID NO: 267787 - DNA, 55 bp, Artificial
  Synthetic oligonucleotide
taacgcgtcgctggtatttaggacgctcgtggagtatgagccttgttgaggctac

SEQ ID NO: 267788 - DNA, 55 bp, Artificial
  Synthetic oligonucleotide
taacgcgtcgctggtatttaggacgctcgtggagaatgagccttgttgaggctac

SEQ ID NO: 267789 - DNA, 55 bp, Artificial
  Synthetic oligonucleotide
taacgcgtcgctggtatttaggacgctcgtggagaatgacccttgttgaggctac

SEQ ID NO: 267790 - DNA, 55 bp, Artificial
  Synthetic oligonucleotide
taacgcgtcgctggtatttaggacgctcgtggagaatgacccttcttgaggctac

SEQ ID NO: 267791 - DNA, 55 bp, Artificial
  Synthetic oligonucleotide
tccagggccccctccgatgtaaacggaggagacacgaacgtgacggactctatga

SEQ ID NO: 267792 - DNA, 55 bp, Artificial
  Synthetic oligonucleotide
tccagggccgcctccgatgtaaacggaggagacacgaacgtgacggactctatga

SEQ ID NO: 267793 - DNA, 55 bp, Artificial
  Synthetic oligonucleotide
tccagggccgcctcggatgtaaacggaggagacacgaacgtgacggactctatga

SEQ ID NO: 267794 - DNA, 55 bp, Artificial
  Synthetic oligonucleotide
tccagggccgcctcggatgaaaacggaggagacacgaacgtgacggactctatga

SEQ ID NO: 267795 - DNA, 55 bp, Artificial
  Synthetic oligonucleotide
tccagggccgcctcggatgaaaaccgaggagacacgaacgtgacggactctatga

SEQ ID NO: 267796 - DNA, 55 bp, Artificial
  Synthetic oligonucleotide
tccagggccgcctcggatgaaaaccgaggtgacacgaacgtgacggactctatga

SEQ ID NO: 267797 - DNA, 55 bp, Artificial
  Synthetic oligonucleotide
tccagggccgcctcggatgaaaaccgaggtgacaggaacgtgacggactctatga

SEQ ID NO: 267798 - DNA, 55 bp, Artificial
  Synthetic oligonucleotide
tccagggccgcctcggatgaaaaccgaggtgacaggaacctgacggactctatga

SEQ ID NO: 267799 - DNA, 55 bp, Artificial
  Synthetic oligonucleotide
tccagggccgcctcggatgaaaaccgaggtgacaggaacctgaccgactctatga

SEQ ID NO: 267800 - DNA, 55 bp, Artificial
  Synthetic oligonucleotide
tgctgttggtgttcggagtgaatcaaaaggaatccggagacatatacgttaacgg

SEQ ID NO: 267801 - DNA, 55 bp, Artificial
  Synthetic oligonucleotide
tgctgttggagttcggagtgaatcaaaaggaatccggagacatatacgttaacgg

SEQ ID NO: 267802 - DNA, 55 bp, Artificial
  Synthetic oligonucleotide
tgctgttggagttccgagtgaatcaaaaggaatccggagacatatacgttaacgg

SEQ ID NO: 267803 - DNA, 55 bp, Artificial
  Synthetic oligonucleotide
tgctgttggagttccgagtcaatcaaaaggaatccggagacatatacgttaacgg

SEQ ID NO: 267804 - DNA, 55 bp, Artificial
  Synthetic oligonucleotide
tgctgttggagttccgagtcaatctaaaggaatccggagacatatacgttaacgg

SEQ ID NO: 267805 - DNA, 55 bp, Artificial
  Synthetic oligonucleotide
tgctgttggagttccgagtcaatctaaagcaatccggagacatatacgttaacgg

SEQ ID NO: 267806 - DNA, 55 bp, Artificial
  Synthetic oligonucleotide
tgctgttggagttccgagtcaatctaaagcaatcgggagacatatacgttaacgg

SEQ ID NO: 267807 - DNA, 55 bp, Artificial
  Synthetic oligonucleotide
tgctgttggagttccgagtcaatctaaagcaatcgggagtcatatacgttaacgg

SEQ ID NO: 267808 - DNA, 55 bp, Artificial
  Synthetic oligonucleotide
tgctgttggagttccgagtcaatctaaagcaatcgggagtcataaacgttaacgg

SEQ ID NO: 267809 - DNA, 57 bp, Artificial
  Synthetic oligonucleotide
ccgaattgcttagatgggtatttgacataggaatttcaaccttgtttcatgttgaaa

SEQ ID NO: 267810 - DNA, 55 bp, Artificial
  Synthetic oligonucleotide
agtccatatattagcacaatttacgtaagacttaggaaagtagctttactccgaa

SEQ ID NO: 267811 - DNA, 53 bp, Artificial
  Synthetic oligonucleotide
taaaattcttttcaaacatagttttcgcaacctggcgagtagacgaagggaaa

SEQ ID NO: 267812 - DNA, 54 bp, Artificial
  Synthetic oligonucleotide
tacagcaattcccccaaggttacggagaatccgtcaacccgtccatcgagggag

SEQ ID NO: 267813 - DNA, 55 bp, Artificial
  Synthetic oligonucleotide
aacctataccatcctttattaaacgtagtgttacgaagcatctttgctactttga

SEQ ID NO: 267814 - DNA, 52 bp, Artificial
  Synthetic oligonucleotide
tttacttttactggggctttgacaagagctcaatcttgttttttacccgttc

SEQ ID NO: 267815 - DNA, 60 bp, Artificial
  Synthetic oligonucleotide
tgtcttgcgcctggggcataaagatttgtccgaatgctgtcggtagtgtcacgcgagcgt

SEQ ID NO: 267816 - DNA, 58 bp, Artificial
  Synthetic oligonucleotide
tgcttgattaagcggttttatagattcagaaggtagcttttctgtacaacacactaaa

SEQ ID NO: 267817 - DNA, 60 bp, Artificial
  Synthetic oligonucleotide
acagatcttgaggtttaagctgcttatactgaggattctcctatatttgagctccacgat

SEQ ID NO: 267818 - DNA, 59 bp, Artificial
  Synthetic oligonucleotide
acagatgtcttcgaaattatatctagcagccatcgccgcaaacaaaaaggaagtgttta

SEQ ID NO: 267819 - DNA, 60 bp, Artificial
  Synthetic oligonucleotide
acgccagcttctgacgcaagtactttgcccagcgaacaggcactaggttgcttgaggaaa

SEQ ID NO: 267820 - DNA, 54 bp, Artificial
  Synthetic oligonucleotide
cccgctggcccgtggacacaaaggtcgttggatttaggatccggctgaaggatt

SEQ ID NO: 267821 - DNA, 55 bp, Artificial
  Synthetic oligonucleotide
tagtaatatagctcacctacctaataggtaggtataattgaatatttaacgggct

SEQ ID NO: 267822 - DNA, 56 bp, Artificial
  Synthetic oligonucleotide
cattaataggtaactaataatgggccaatactaatcatattgggtatagtaataag

SEQ ID NO: 267823 - DNA, 56 bp, Artificial
  Synthetic oligonucleotide
gagagaaattaactatgcctagatatttacacgatgtacttataggtttattatta

SEQ ID NO: 267824 - DNA, 55 bp, Artificial
  Synthetic oligonucleotide
gatcacactcatatgaccatgatgtacactctagcttcatgcagattagcacatc

SEQ ID NO: 267825 - DNA, 55 bp, Artificial
  Synthetic oligonucleotide
gatgcgtcatgcggtcgtaacgaagggacaaagtagagcacagtggaggatagga

SEQ ID NO: 267826 - DNA, 55 bp, Artificial
  Synthetic oligonucleotide
gatcacaacaagggcttgatgaacaccgcgctacagacatctcagaaatagtgca

SEQ ID NO: 267827 - DNA, 55 bp, Artificial
  Synthetic oligonucleotide
gcgcgtcgtctcagccgcccttgagaatacttcaactctaccatcttgtcccaca

SEQ ID NO: 267828 - DNA, 55 bp, Artificial
  Synthetic oligonucleotide
gcggctaccaaatgtagaccgacagacccgaagtggccgaattgccaggaggaca

SEQ ID NO: 267829 - DNA, 55 bp, Artificial
  Synthetic oligonucleotide
gatattatcataatcgagcccggccccgctacgaaaatgttcaggaccaggatgt

SEQ ID NO: 267830 - DNA, 55 bp, Artificial
  Synthetic oligonucleotide
gacggcatctgaaacagcgcgtaagcctatggcacgacgaactctaggagcaacg

SEQ ID NO: 267831 - DNA, 60 bp, Artificial
  Synthetic oligonucleotide
ggctacattgtctctacagcttcaaacaaactattactattttgcttgtgtagatagtgt

SEQ ID NO: 267832 - DNA, 55 bp, Artificial
  Synthetic oligonucleotide
gcgttagagaagcgagtcgcgcagagaatctcggaacacgacgagaaacttgagc

SEQ ID NO: 267833 - DNA, 55 bp, Artificial
  Synthetic oligonucleotide
ctcagaaccgattggcctttcattatagacgtcggcaaggaatccagtcttaaac

SEQ ID NO: 267834 - DNA, 54 bp, Artificial
  Synthetic oligonucleotide
gcgttcctttcggaattttggcagccccatctaggtcgcccgacttcactaact

SEQ ID NO: 267835 - DNA, 55 bp, Artificial
  Synthetic oligonucleotide
gcttaatatagtggtgggtcacgtgatctagggagatcgctaaccgcaacagccg

SEQ ID NO: 267836 - DNA, 55 bp, Artificial
  Synthetic oligonucleotide
ggcggtggtgattagagagtgcgtgggtttaagtttggaccaggatagactttcg

SEQ ID NO: 267837 - DNA, 55 bp, Artificial
  Synthetic oligonucleotide
ggtacgaacgagcgggagtattggttcgctgccccgaggagtgtgcagtacgctt

SEQ ID NO: 267838 - DNA, 55 bp, Artificial
  Synthetic oligonucleotide
ggtgcgttaggaaagatcgcgacacagggagtgattcccgaacggcgagttatga

SEQ ID NO: 267839 - DNA, 55 bp, Artificial
  Synthetic oligonucleotide
ggttgcggacatattatgcactaccactgcttcgaggattattatgccgccgcgc

SEQ ID NO: 267840 - DNA, 55 bp, Artificial
  Synthetic oligonucleotide
gtaccaaccatcgtcttacaatccgtactttggtctaatccacttactggcatgt

SEQ ID NO: 267841 - DNA, 54 bp, Artificial
  Synthetic oligonucleotide
gtaggatggttcagcggtcacgtgtactttaccccaaacgtggttccaattctc

SEQ ID NO: 267842 - DNA, 60 bp, Artificial
  Synthetic oligonucleotide
ggcttctccggagtttgatagttctatccgcggatgagatatcctacacctcaaagcaga

SEQ ID NO: 267843 - DNA, 55 bp, Artificial
  Synthetic oligonucleotide
gtcgtcgtaccaatttctcataggatccttttgtaagtgcgcagataggcactcc

SEQ ID NO: 267844 - DNA, 55 bp, Artificial
  Synthetic oligonucleotide
gttctatccgcggatgagatatcctacacctcaaagcagataaggccgccattga

SEQ ID NO: 267845 - DNA, 55 bp, Artificial
  Synthetic oligonucleotide
gttgtcaatcggattctgaaactaatccgccatgaggggttttgtcgtacgagtc

SEQ ID NO: 267846 - DNA, 55 bp, Artificial
  Synthetic oligonucleotide
tccctatacctcccgctttctgcgcgtaaatcggatgtcggtagcccgagatagg

SEQ ID NO: 267847 - DNA, 55 bp, Artificial
  Synthetic oligonucleotide
tcctattctcccgccccgaagcttcatctcatacatgtgtaaatattcactctga

SEQ ID NO: 267848 - DNA, 55 bp, Artificial
  Synthetic oligonucleotide
tttcggcgccaagtgatggtgcctccaattacttgcaggatgattcaaaaccgcc

SEQ ID NO: 267849 - DNA, 54 bp, Artificial
  Synthetic oligonucleotide
acgggttgggtccagcgtgttcgacttccaccggtttatgcgctcatccacggg

SEQ ID NO: 267850 - DNA, 55 bp, Artificial
  Synthetic oligonucleotide
acttcttatgcatgccgtttgagctcagataatggattatcaggtgggttcacac

SEQ ID NO: 267851 - DNA, 55 bp, Artificial
  Synthetic oligonucleotide
agtaaggtaatgctgggatacctccagcgattgaacatggctgataggaaagatg

SEQ ID NO: 267852 - DNA, 55 bp, Artificial
  Synthetic oligonucleotide
attgttgcaagagttgacatcttttccatccccttggcgcctgtaggtcgatctc

SEQ ID NO: 267853 - DNA, 58 bp, Artificial
  Synthetic oligonucleotide
ccccagcggtagatgcaaccgtttcagccattgcttattctacctcagtccaaccgcc

SEQ ID NO: 267854 - DNA, 52 bp, Artificial
  Synthetic oligonucleotide
atttcccacgccaaggcgctaccgggtgaccgtattaaccattcggccaccg

SEQ ID NO: 267855 - DNA, 55 bp, Artificial
  Synthetic oligonucleotide
caaatgtcccttgtgcctgatttgcagaactctcactcatgaaattgagtctgca

SEQ ID NO: 267856 - DNA, 55 bp, Artificial
  Synthetic oligonucleotide
catgattgaagatcctaggcctctccgaaaggcagcaatgcgtgagtcggaactg

SEQ ID NO: 267857 - DNA, 55 bp, Artificial
  Synthetic oligonucleotide
ccaactcgctgtactagacagtcgttgaagctgtgtgttatatctccgtctattg

SEQ ID NO: 267858 - DNA, 55 bp, Artificial
  Synthetic oligonucleotide
ccactagtgggccctgaatagagcacctatcagggtgtcctgcttggcttgctac

SEQ ID NO: 267859 - DNA, 55 bp, Artificial
  Synthetic oligonucleotide
ccagaagttagcaggacttggcagaagtctaaaggagtttagttggtcgcgctaa

SEQ ID NO: 267860 - DNA, 55 bp, Artificial
  Synthetic oligonucleotide
cccactacgacgcaagaacgacactccgctataaatcaacaacggcagagacagg

SEQ ID NO: 267861 - DNA, 55 bp, Artificial
  Synthetic oligonucleotide
cccctgtggtgcctctcacccgtcatatcacttgacccctgtaccctctgactcg

SEQ ID NO: 267862 - DNA, 55 bp, Artificial
  Synthetic oligonucleotide
cccgattcgagccgcatgccccgctgtcattttcagcagacatttggagcctggc

SEQ ID NO: 267863 - DNA, 55 bp, Artificial
  Synthetic oligonucleotide
ccgaaaattatacgcgaggggcctactatagtcctgtcgatggctatcaacgacc

SEQ ID NO: 267864 - DNA, 60 bp, Artificial
  Synthetic oligonucleotide
gggcttcaaacaaaagaattacttcttatgcatgccgtttgagctcagataatggattat

SEQ ID NO: 267865 - DNA, 55 bp, Artificial
  Synthetic oligonucleotide
ccgctgactagccaccgcttcagtactacatattacagtcaattcataagcactc

SEQ ID NO: 267866 - DNA, 55 bp, Artificial
  Synthetic oligonucleotide
ccgtgtagaggatcattatctcaattgcgatagtcggaaggccccgcttttacct

SEQ ID NO: 267867 - DNA, 55 bp, Artificial
  Synthetic oligonucleotide
ccgttgaggtttcacgaaaggtcgtcatgcgtgacatgcaacgcaagaatagcgt

SEQ ID NO: 267868 - DNA, 55 bp, Artificial
  Synthetic oligonucleotide
cctcaatgttcttccactttgtacttcactctgtgctccactgtgggatggcttc

SEQ ID NO: 267869 - DNA, 54 bp, Artificial
  Synthetic oligonucleotide
cctttattaaacgtagtgttacgaagcatctttgctactttgactttcgctttc

SEQ ID NO: 267870 - DNA, 55 bp, Artificial
  Synthetic oligonucleotide
ctcaaatctttgacgaagctcgccgtttgtgctaccgttctatgttgcggccctg

SEQ ID NO: 267871 - DNA, 55 bp, Artificial
  Synthetic oligonucleotide
cgcagctgtcagttcgaagtcgcttgttcgataggtgcgtcagagggtaattggt

SEQ ID NO: 267872 - DNA, 55 bp, Artificial
  Synthetic oligonucleotide
cgctatgctcattggaaactcgcagaaccaaaacgcgcgctacattcgcaagttc

SEQ ID NO: 267873 - DNA, 55 bp, Artificial
  Synthetic oligonucleotide
cggagaataccacgacagttagagtggtcccgaaggatgatggatcgacgactat

SEQ ID NO: 267874 - DNA, 53 bp, Artificial
  Synthetic oligonucleotide
cggtacgttctggtcgtggtagaagtggtctgtccccgggctgttggacggga

SEQ ID NO: 267875 - DNA, 54 bp, Artificial
  Synthetic oligonucleotide
gcccagcgaacaggcactaggttgcttggggaaatagtccctttttcggggctc

SEQ ID NO: 267876 - DNA, 55 bp, Artificial
  Synthetic oligonucleotide
cgtattatgtgcatgcggaggaagcaaaatgtcgccacacgtatgtacagtaaat

SEQ ID NO: 267877 - DNA, 54 bp, Artificial
  Synthetic oligonucleotide
tctcggggtccgtgatggcttgatcgcacggtacggatgcttggatagctgggg

SEQ ID NO: 267878 - DNA, 54 bp, Artificial
  Synthetic oligonucleotide
accctcttaacagtatattattatcgtaattcctcaattccttccattgaggag

SEQ ID NO: 267879 - DNA, 54 bp, Artificial
  Synthetic oligonucleotide
atatacggatgatggcttaaataaaacagatgctgcgagatccaatatgaatag

SEQ ID NO: 267880 - DNA, 54 bp, Artificial
  Synthetic oligonucleotide
gctccaaatgtctgctgaaaatgacagcggggcatgcggctcgaatcgggcttc

SEQ ID NO: 267881 - DNA, 53 bp, Artificial
  Synthetic oligonucleotide
gagtaattattagaatctaaatatgtatctgattcagtattcgctactccata

SEQ ID NO: 267882 - DNA, 53 bp, Artificial
  Synthetic oligonucleotide
cccctccaacaaatggaaccccgaaacagctagagggacactcaagccggata

SEQ ID NO: 267883 - DNA, 52 bp, Artificial
  Synthetic oligonucleotide
gaatcgagtgcgaacgaatcgaaacgcaggctccgccagcaggcgtccttgc

SEQ ID NO: 267884 - DNA, 52 bp, Artificial
  Synthetic oligonucleotide
ttctaaacctacatgatgatgatcagtaaaatgataagcaagcagacgtcat

SEQ ID NO: 267885 - DNA, 52 bp, Artificial
  Synthetic oligonucleotide
aatccatacagtcaattaggatctggtattaaggatcctttaaaattaggtt

SEQ ID NO: 267886 - DNA, 59 bp, Artificial
  Synthetic oligonucleotide
caccaaattcccccgtcttggtgcagagggctacaatcacgcgcatcgcccagttagaa

SEQ ID NO: 267887 - DNA, 51 bp, Artificial
  Synthetic oligonucleotide
ctagactgtcgccaaaacggagctaaacgatcaactgcatcctgggtccgt

SEQ ID NO: 267888 - DNA, 51 bp, Artificial
  Synthetic oligonucleotide
actcagcggttgaagagagtatatcggtcaacctgtcatacctcaaatccg

SEQ ID NO: 267889 - DNA, 51 bp, Artificial
  Synthetic oligonucleotide
gattgtactttaagaagatccttaagaatattagtttcgtaatttacttct

SEQ ID NO: 267890 - DNA, 51 bp, Artificial
  Synthetic oligonucleotide
aatgtatttcctgcgggtttcgaaccccacgcgtcttggtttcccacgcca

SEQ ID NO: 267891 - DNA, 50 bp, Artificial
  Synthetic oligonucleotide
ctaagtctagaatcatttctaggtaaacgtgctagagaaatatctctatt

SEQ ID NO: 267892 - DNA, 50 bp, Artificial
  Synthetic oligonucleotide
tagtcacccatgcgtcggccagcctcctattactgaccgttcattgatag

SEQ ID NO: 267893 - DNA, 50 bp, Artificial
  Synthetic oligonucleotide
aatgtatcccctgcgggtttcgaacccacacgccttggtttcccacgcca

SEQ ID NO: 267894 - DNA, 44 bp, Artificial
  Synthetic oligonucleotide
tcccctgtgggtttcaaacccacgcaccctgggtccccacgcca

SEQ ID NO: 267895 - DNA, 58 bp, Artificial
  Synthetic oligonucleotide
cgtaagaatctcctaataaagaaccgactaatactgatactatctcttcattgtgcgg

SEQ ID NO: 267896 - DNA, 60 bp, Artificial
  Synthetic oligonucleotide
gctcacgcaggccctctgcaccttgatcggtcaataatgatggcccacagctagtacgac

SEQ ID NO: 267897 - DNA, 60 bp, Artificial
  Synthetic oligonucleotide
tagatattcatacatctcgaatggaaaattgagattctgcgaaaaatagacctcttctta

SEQ ID NO: 267898 - DNA, 55 bp, Artificial
  Synthetic oligonucleotide
cctagctatgccaccgtcatgtgcagtgttgccgagcatcttccggtacaaccag

SEQ ID NO: 267899 - DNA, 55 bp, Artificial
  Synthetic oligonucleotide
ctgcaggctatcgattagtccagggtaaagctcggccggattttatggtaatgtt

SEQ ID NO: 267900 - DNA, 54 bp, Artificial
  Synthetic oligonucleotide
caaatactttggctatgcgactgaatggtggtatagtcggaagattacctgcaa

SEQ ID NO: 267901 - DNA, 54 bp, Artificial
  Synthetic oligonucleotide
tgtttagatcatggtggcggaagctttataagttcaagtcttattatccatagg

SEQ ID NO: 267902 - DNA, 54 bp, Artificial
  Synthetic oligonucleotide
ggctgaatgggtggggtattaccgaaacctatggctaacgaggaatataggacc

SEQ ID NO: 267903 - DNA, 53 bp, Artificial
  Synthetic oligonucleotide
ggaagtcttgcgtctagaatggcgcacgaaccgtgcagatcgctctgcagccg

SEQ ID NO: 267904 - DNA, 53 bp, Artificial
  Synthetic oligonucleotide
tgccggaatggcgagggcagtcccatactggacggaggacttggtagtctggc

SEQ ID NO: 267905 - DNA, 53 bp, Artificial
  Synthetic oligonucleotide
tctctttgccctatttcgcgagcttctagatacccctaggcttatctcctagc

SEQ ID NO: 267906 - DNA, 53 bp, Artificial
  Synthetic oligonucleotide
cccatcgaacgtttcacagcctcggtgtgttaacgagctgactcgaggggtaa

SEQ ID NO: 267907 - DNA, 53 bp, Artificial
  Synthetic oligonucleotide
tcacttcaagctaagggattttatcacaatccttttattgtatatccgtatac

SEQ ID NO: 267908 - DNA, 52 bp, Artificial
  Synthetic oligonucleotide
agggcccgtggctcgactaaggtagcgccgaaaaagaacggttaagctctcg

SEQ ID NO: 267909 - DNA, 53 bp, Artificial
  Synthetic oligonucleotide
taggggtaagatttagcttataggattggcgtccccaggcctctactacctta

SEQ ID NO: 267910 - DNA, 52 bp, Artificial
  Synthetic oligonucleotide
cctggttagctccgccgtttccggtcaagaaaggatacgcaggatgcgttcc

SEQ ID NO: 267911 - DNA, 52 bp, Artificial
  Synthetic oligonucleotide
gatgctctatcaaattcggatggatcgcactcgacgtgtgtgccagattatc

SEQ ID NO: 267912 - DNA, 52 bp, Artificial
  Synthetic oligonucleotide
ctaacagtctgacgcgctaaccagttgtgccacggagacttgtctatgtata

SEQ ID NO: 267913 - DNA, 52 bp, Artificial
  Synthetic oligonucleotide
acttttcaattgaagtatgctacgcggacgaaaagtaccccagaggctcagc

SEQ ID NO: 267914 - DNA, 51 bp, Artificial
  Synthetic oligonucleotide
gctccggccactcaacgcgcaagcgagctggggaacagaccaggcaaagcg

SEQ ID NO: 267915 - DNA, 51 bp, Artificial
  Synthetic oligonucleotide
cccacgcttcctcgtcctatcagcgttcctcaaccccgaaagcctcccggg

SEQ ID NO: 267916 - DNA, 51 bp, Artificial
  Synthetic oligonucleotide
agcgcccaccccacgacgtgccagaagtcctctgcacgcgaccatagtgag

SEQ ID NO: 267917 - DNA, 51 bp, Artificial
  Synthetic oligonucleotide
agtcgaggtcgcggtctgactcccggtcaacggttgcaacgcagtctggcc

SEQ ID NO: 267918 - DNA, 51 bp, Artificial
  Synthetic oligonucleotide
gcatcataaggccccatcgtgtacggcgctcgtttactatcccggccaggg

SEQ ID NO: 267919 - DNA, 60 bp, Artificial
  Synthetic oligonucleotide
gagcaactatttttatggatatgctgaaattggtaaccaggccatgcttagaacatggta

SEQ ID NO: 267920 - DNA, 51 bp, Artificial
  Synthetic oligonucleotide
cctgtgctgcccgacagatgcctgaggagcctttggatccggggtctaaga

SEQ ID NO: 267921 - DNA, 51 bp, Artificial
  Synthetic oligonucleotide
gaggctgctggaaggcgtccctaatgcgcttggataccagcggatactgga

SEQ ID NO: 267922 - DNA, 51 bp, Artificial
  Synthetic oligonucleotide
gccggactgattcgtccaaggcggaggatatgtttccaacgggggacctga

SEQ ID NO: 267923 - DNA, 51 bp, Artificial
  Synthetic oligonucleotide
atgcctgcgtacggcaacatcccgagcattgtgggagagaatccgcggtaa

SEQ ID NO: 267924 - DNA, 50 bp, Artificial
  Synthetic oligonucleotide
agcagttaagcgcccaccccacgacgtgccagaagtcctctgcacgcgac

SEQ ID NO: 267925 - DNA, 50 bp, Artificial
  Synthetic oligonucleotide
tacattctataacacgtataggttcttatggtattaaaggttgagtaggt

SEQ ID NO: 267926 - DNA, 50 bp, Artificial
  Synthetic oligonucleotide
atgtttaggccatagtagcgaaagctttataagttcaagtcttattatcc

SEQ ID NO: 267927 - DNA, 50 bp, Artificial
  Synthetic oligonucleotide
tcgcacttaatccacccagccagtctcgagcggagtgaaccgctgcctcg

SEQ ID NO: 267928 - DNA, 50 bp, Artificial
  Synthetic oligonucleotide
tacgcggagtcgtgtttcctccagctagcgacggctggcctgcatgacta

SEQ ID NO: 267929 - DNA, 50 bp, Artificial
  Synthetic oligonucleotide
ccagtagagttgcgctcaatgctgccgagccagccagcaacgcggttttc

SEQ ID NO: 267930 - DNA, 56 bp, Artificial
  Synthetic oligonucleotide
ctgtagtataaagattcggcttctttaaagattgctaattgctaaaaatatctaat

SEQ ID NO: 267931 - DNA, 50 bp, Artificial
  Synthetic oligonucleotide
tcacgccaccgtggtcaggggtgtccgctctgaggacagcaccgtagttt

SEQ ID NO: 267932 - DNA, 50 bp, Artificial
  Synthetic oligonucleotide
acaagggcgcccggatattagtttgcggttgaccagcctcgagcttccgc

SEQ ID NO: 267933 - DNA, 50 bp, Artificial
  Synthetic oligonucleotide
aaggtgctaggggtcctatgggccagagtcaaagggctaagggagcgcct

SEQ ID NO: 267934 - DNA, 50 bp, Artificial
  Synthetic oligonucleotide
aggtaagggacaatccgcaagaaactttatgggacaaatcaaaggagatt

SEQ ID NO: 267935 - DNA, 50 bp, Artificial
  Synthetic oligonucleotide
gtctcacggacaggcggtggtgggaacttgcgagagaagaaccccggagc

SEQ ID NO: 267936 - DNA, 50 bp, Artificial
  Synthetic oligonucleotide
cctctagctcccatgctcgtgcaatgtgcagtatcccagccgggtcgggc

SEQ ID NO: 267937 - DNA, 50 bp, Artificial
  Synthetic oligonucleotide
ggggttcagtgcaaggtgctaggggtcctatgggccagagtcaaagggct

SEQ ID NO: 267938 - DNA, 59 bp, Artificial
  Synthetic oligonucleotide
aaccatataatccatttgatcaagaatatataccagatttaaataatcagggtcttgta

SEQ ID NO: 267939 - DNA, 60 bp, Artificial
  Synthetic oligonucleotide
ttcacctttagatgccttatctagtttattagcacatacaacagctctgactgtagcatc

SEQ ID NO: 267940 - DNA, 57 bp, Artificial
  Synthetic oligonucleotide
tccttagcgaagagaagattactatattgtaaaccgaccatagattgtttatacttg

SEQ ID NO: 267941 - DNA, 56 bp, Artificial
  Synthetic oligonucleotide
tctaattattaggttaattagcaggaaactagttattagttcttcagagactatac

SEQ ID NO: 267942 - DNA, 60 bp, Artificial
  Synthetic oligonucleotide
gaatactagttattctaatcaagatgcatcttcatcatctggaggtccttttacttcagg

SEQ ID NO: 267943 - DNA, 56 bp, Artificial
  Synthetic oligonucleotide
agacgccatggctacctccgcccgccctaacgtgtccgacgacttggtctggggca

SEQ ID NO: 267944 - DNA, 55 bp, Artificial
  Synthetic oligonucleotide
gcggatgatagacagggcccgtggctcgactaaggtagcgccgaaaaagaacggt

SEQ ID NO: 267945 - DNA, 51 bp, Artificial
  Synthetic oligonucleotide
cggatatttggggttatggtttaattggtaaaacgaggactttgcaagtcc

SEQ ID NO: 267946 - DNA, 55 bp, Artificial
  Synthetic oligonucleotide
gcagcgaagattagtttaatacaaattaaagactaataacgttcaacgactatta

SEQ ID NO: 267947 - DNA, 57 bp, Artificial
  Synthetic oligonucleotide
gtcttaatccgagtgctgaaactggtagacaggataatcttaagttttattgatata

SEQ ID NO: 267948 - DNA, 57 bp, Artificial
  Synthetic oligonucleotide
tgctaaagcttatcgtctaattccaggaaatgtatttataatcgaagaaacatcacc

SEQ ID NO: 267949 - DNA, 52 bp, Artificial
  Synthetic oligonucleotide
taaacattttaagcaacatgttagtttaagggttagaataccgtgttacggc

SEQ ID NO: 267950 - DNA, 56 bp, Artificial
  Synthetic oligonucleotide
tctgtattaggactgcaaatctataatcagggattcgatttcccatgactcctata

SEQ ID NO: 267951 - DNA, 56 bp, Artificial
  Synthetic oligonucleotide
cgttctgtaaactggactcaaattcgttctgtatcaaattggactcaaattcgttc

SEQ ID NO: 267952 - DNA, 53 bp, Artificial
  Synthetic oligonucleotide
gccttttgtcagaataaaaacgggatttatattgggtctaaaaaaatcagcat

SEQ ID NO: 267953 - DNA, 55 bp, Artificial
  Synthetic oligonucleotide
ggacaaagacacgctaggctcaatcgaacgagctggtaacatacgggtcgttccg

SEQ ID NO: 267954 - DNA, 55 bp, Artificial
  Synthetic oligonucleotide
gctttccaatcgacgtgagagttgatggcaaatcaagggattaagcgcggcctcg

SEQ ID NO: 267955 - DNA, 58 bp, Artificial
  Synthetic oligonucleotide
ggtatgagtaatgtaccctcattgttagctaattatactaaagaattcgagaatatat

SEQ ID NO: 267956 - DNA, 55 bp, Artificial
  Synthetic oligonucleotide
gctccgtgcagtcgttatagaaggtgactgtacacagtacaggaccaggaattcg

SEQ ID NO: 267957 - DNA, 55 bp, Artificial
  Synthetic oligonucleotide
gagccactactattccacagccagcccattgttgtatcctgcgtccgtacctgcg

SEQ ID NO: 267958 - DNA, 55 bp, Artificial
  Synthetic oligonucleotide
gcgtctcgctcctatctactattctaccgacgaccgcagctctcctaacggtcct

SEQ ID NO: 267959 - DNA, 55 bp, Artificial
  Synthetic oligonucleotide
gccgagccacgtctctcgcctcggggtctctccttgctcgtctatctggcagcct

SEQ ID NO: 267960 - DNA, 55 bp, Artificial
  Synthetic oligonucleotide
gcccacgtgtatgcgattgcagacgttgctagcgttaaactacggttaaaggact

SEQ ID NO: 267961 - DNA, 55 bp, Artificial
  Synthetic oligonucleotide
gaggcaacgagaccaatgcagctgacaatgattcgccacaagctccattcgccag

SEQ ID NO: 267962 - DNA, 55 bp, Artificial
  Synthetic oligonucleotide
gccagtctcgaaatacgcccagggaacgatacagtttaaggaagacggaccgcca

SEQ ID NO: 267963 - DNA, 55 bp, Artificial
  Synthetic oligonucleotide
gatggaggccttctcttggcttcatccctttgcgtgattggggtacgtggttttg

SEQ ID NO: 267964 - DNA, 55 bp, Artificial
  Synthetic oligonucleotide
gcagacgcaggggaaactgcctgggcaacggtgtaactccttaacaccgcagatt

SEQ ID NO: 267965 - DNA, 55 bp, Artificial
  Synthetic oligonucleotide
gactcttcccgaaaatgttccctggtctgtcggtggagcgatgtccactatctgg

SEQ ID NO: 267966 - DNA, 59 bp, Artificial
  Synthetic oligonucleotide
gttaacggtagactattcgcgtaccatgtgaaatgagttgattcaacttcaactagcca

SEQ ID NO: 267967 - DNA, 55 bp, Artificial
  Synthetic oligonucleotide
gatgggagattagactgcgaagattcaatgatctccgtatacctcgcggattcgg

SEQ ID NO: 267968 - DNA, 55 bp, Artificial
  Synthetic oligonucleotide
ttgttgtcaaaggacggctcgggaggcgggtacttggactcgggctggtgagcgg

SEQ ID NO: 267969 - DNA, 54 bp, Artificial
  Synthetic oligonucleotide
tgactccgtcctatctatttatacggccggtgaacaaactccgtaagagaaaac

SEQ ID NO: 267970 - DNA, 55 bp, Artificial
  Synthetic oligonucleotide
tgaccctcctgacttgtttgaaccgttgaaggatagcccatcacaaccaccaccg

SEQ ID NO: 267971 - DNA, 55 bp, Artificial
  Synthetic oligonucleotide
tccgtcaaccgtgcctgattcagagggtggttcgcccatacgttactcggaagcc

SEQ ID NO: 267972 - DNA, 55 bp, Artificial
  Synthetic oligonucleotide
tcatcggtgttctgaaaaggggcgacaccgagtataccgacctccccatgcggac

SEQ ID NO: 267973 - DNA, 55 bp, Artificial
  Synthetic oligonucleotide
tcacgtatacccatctcagtggaagcgtcccgttcgtgggtaagctacatagcgg

SEQ ID NO: 267974 - DNA, 55 bp, Artificial
  Synthetic oligonucleotide
tatcaccgctcaagccactcgtcccaggcggatggaaccgaatcatagctggccc

SEQ ID NO: 267975 - DNA, 55 bp, Artificial
  Synthetic oligonucleotide
tatacatatcaaatccgctcgacgagagtgcatttcggtcgcagtcgtgaacccc

SEQ ID NO: 267976 - DNA, 55 bp, Artificial
  Synthetic oligonucleotide
taaaccgaatgcctcgatgtgaccatatagtgagcatctgactcgcgggatctac

SEQ ID NO: 267977 - DNA, 59 bp, Artificial
  Synthetic oligonucleotide
gattaatgtaatggtaacatattgactcatgatcaatttatttaggttcgaatcctaaa

SEQ ID NO: 267978 - DNA, 55 bp, Artificial
  Synthetic oligonucleotide
gtttacacctttggtccctgaatattgatattacaagcatagcgttcccctttac

SEQ ID NO: 267979 - DNA, 55 bp, Artificial
  Synthetic oligonucleotide
gttggaatctgtacttactgtatagctatgggtcttactgtagatgtaattctgg

SEQ ID NO: 267980 - DNA, 55 bp, Artificial
  Synthetic oligonucleotide
gtccgtcttttctcagatacagcagaggcctggcagtcgagtctactccgtgctg

SEQ ID NO: 267981 - DNA, 55 bp, Artificial
  Synthetic oligonucleotide
gtatgactgaatggtgtaaacggagacggaataagtttacggcactaattcccac

SEQ ID NO: 267982 - DNA, 55 bp, Artificial
  Synthetic oligonucleotide
ggtgtagacggcgaaagatgtactcgccaacagggatcgtagacatggtcacttc

SEQ ID NO: 267983 - DNA, 55 bp, Artificial
  Synthetic oligonucleotide
gggtactgctttcagcgttggttgccaggtcgatggacgcagtcctaaggatgtt

SEQ ID NO: 267984 - DNA, 55 bp, Artificial
  Synthetic oligonucleotide
ggggaggcgaagcgtgtggtaccgaatagacacaacctgatggtagattgaccgg

SEQ ID NO: 267985 - DNA, 55 bp, Artificial
  Synthetic oligonucleotide
gggaagcgttatccgaaccaaacagccaggagcgttaaccgcgtctctctccacc

SEQ ID NO: 267986 - DNA, 55 bp, Artificial
  Synthetic oligonucleotide
ggcgcctctactccgtactgcaacaaacatccgattctcacggctggatcaagat

SEQ ID NO: 267987 - DNA, 55 bp, Artificial
  Synthetic oligonucleotide
ggcgacggttgaggaatcggtacatgcggatgggagtgttgaggaagccaagtat

SEQ ID NO: 267988 - DNA, 56 bp, Artificial
  Synthetic oligonucleotide
taaattgaattccaaatcgttctgtaaactggactcaaattcgttctgtatcaaat

SEQ ID NO: 267989 - DNA, 55 bp, Artificial
  Synthetic oligonucleotide
ggcatcgcagcgccgacattcgttcatttctgatggcgtctctcctgctacatcc

SEQ ID NO: 267990 - DNA, 55 bp, Artificial
  Synthetic oligonucleotide
ggatgaaacgaaaaggacgatggttagccagagactgcgattttataggaacggg

SEQ ID NO: 267991 - DNA, 55 bp, Artificial
  Synthetic oligonucleotide
ggatatgctgaaattggtaaccaggccatgcttagaacatggtagcggaagcttt

SEQ ID NO: 267992 - DNA, 55 bp, Artificial
  Synthetic oligonucleotide
ggagtacttatacgatggtagaggaagacgtgagtggatataaccgtggggacgg

SEQ ID NO: 267993 - DNA, 55 bp, Artificial
  Synthetic oligonucleotide
ccgcccttgtagaatgcacggccagcaccgttgacgcctcctctgtatctgcgca

SEQ ID NO: 267994 - DNA, 55 bp, Artificial
  Synthetic oligonucleotide
ccgaggggctagcctagaatgaccgctgtcatcctcccacgttagaccgtcctgt

SEQ ID NO: 267995 - DNA, 55 bp, Artificial
  Synthetic oligonucleotide
ccgagggagtgatattgaccggacacggggaataatgggagtaagattctccagc

SEQ ID NO: 267996 - DNA, 55 bp, Artificial
  Synthetic oligonucleotide
cccgaagtgtgaaggtagtctcaagtcctgaaggacggaaaacatatgcgtatag

SEQ ID NO: 267997 - DNA, 55 bp, Artificial
  Synthetic oligonucleotide
cccctacccagctgcgcaaggttagctgtccgggtgtatcgtccagctaatacta

SEQ ID NO: 267998 - DNA, 55 bp, Artificial
  Synthetic oligonucleotide
cccaccatccttagagcctatccgttggttgatacgatagccaagtccaacacgt

SEQ ID NO: 267999 - DNA, 60 bp, Artificial
  Synthetic oligonucleotide
taacacaaggttatgttggaatctgtacttactgtatagctatgggtcttactgtagatg

SEQ ID NO: 268000 - DNA, 55 bp, Artificial
  Synthetic oligonucleotide
ccacttccgatctttcgaccaatacgatacttgtttccaacacggagatcctatc

SEQ ID NO: 268001 - DNA, 55 bp, Artificial
  Synthetic oligonucleotide
ccacgttccatcgggtaccaaagctcctggacgccgaattcaacaggtctggagc

SEQ ID NO: 268002 - DNA, 55 bp, Artificial
  Synthetic oligonucleotide
ccaagattgagaataccgtcaagccattgactgaatgtggcgatgagagagtcga

SEQ ID NO: 268003 - DNA, 55 bp, Artificial
  Synthetic oligonucleotide
cattgttactcaccgtcgaaccgcaaaaccgcagacttagtaatctccaactagc

SEQ ID NO: 268004 - DNA, 55 bp, Artificial
  Synthetic oligonucleotide
cattagggagtgagcgtccactattccagtcgtgggactttctaggatccccgcc

SEQ ID NO: 268005 - DNA, 55 bp, Artificial
  Synthetic oligonucleotide
catataggacgcttcagcggcaagaaagatcttcgctttctgcgggaacggcggg

SEQ ID NO: 268006 - DNA, 55 bp, Artificial
  Synthetic oligonucleotide
cagtatacgtccacatatagacgcctatagccaaccgacagaaggttggacacgc

SEQ ID NO: 268007 - DNA, 54 bp, Artificial
  Synthetic oligonucleotide
cactgtcccctgcacggagtagtccgccctttgtggttatcggtttgttcacgg

SEQ ID NO: 268008 - DNA, 55 bp, Artificial
  Synthetic oligonucleotide
cactcgtcgatagtcacgccaacacccgaatgtatgggcacataccgattcatag

SEQ ID NO: 268009 - DNA, 55 bp, Artificial
  Synthetic oligonucleotide
cacgccactatgccacacctgtcaaaattgactacgaatggggaaatgcgagtcg

SEQ ID NO: 268010 - DNA, 51 bp, Artificial
  Synthetic oligonucleotide
atacttgggttgtaaaccgactatagtttgtttatacttagattgtaaacc

SEQ ID NO: 268011 - DNA, 55 bp, Artificial
  Synthetic oligonucleotide
cacagcatttagtggattgtttgctccatattggatcgatgatgcgagaggcacg

SEQ ID NO: 268012 - DNA, 55 bp, Artificial
  Synthetic oligonucleotide
caatatctctggcttcgttctggaatgctccgtagaatgtgacgatctgggccga

SEQ ID NO: 268013 - DNA, 55 bp, Artificial
  Synthetic oligonucleotide
agcaaatcgggcagaagtggtagttagtttcgtagttatcggcatataggccgca

SEQ ID NO: 268014 - DNA, 55 bp, Artificial
  Synthetic oligonucleotide
agacagcctacgcatagacaagtctccgtggcacaactggttagcgcgtcagact

SEQ ID NO: 268015 - DNA, 55 bp, Artificial
  Synthetic oligonucleotide
acttgcgtatgggcgctgatgtcactgtgggttggcatggagacggctttaacgg

SEQ ID NO: 268016 - DNA, 55 bp, Artificial
  Synthetic oligonucleotide
aagcgtctagaaggcattgcattggacgtgtggcgtctgtggagtcgcatcgatc

SEQ ID NO: 268017 - DNA, 55 bp, Artificial
  Synthetic oligonucleotide
aagcatctgttggcggtttctggacctatagacctcttaatgatagaatgaccat

SEQ ID NO: 268018 - DNA, 54 bp, Artificial
  Synthetic oligonucleotide
aaaattgagatatagaacgtagaaaacctgtggttacacaattaaggttgaatg

SEQ ID NO: 268019 - DNA, 54 bp, Artificial
  Synthetic oligonucleotide
ccttattacctggtcgagacgggtatagggtgagaagtagccctatcttccgaa

SEQ ID NO: 268020 - DNA, 55 bp, Artificial
  Synthetic oligonucleotide
cgaagttgacagcccgttgtacacctcggatatgttggtctggagatgtttccct

SEQ ID NO: 268021 - DNA, 53 bp, Artificial
  Synthetic oligonucleotide
agtgcccgttgtccgtcaactttagggggaagaagccgcgtgaaccagggaga

SEQ ID NO: 268022 - DNA, 55 bp, Artificial
  Synthetic oligonucleotide
ccttaaggcctccaataactgtgtcctggttagtattgcagcacgaaacctcgta

SEQ ID NO: 268023 - DNA, 55 bp, Artificial
  Synthetic oligonucleotide
cgacacagtgccggatgttgttagatatggccaacctgctctggttctgtggatc

SEQ ID NO: 268024 - DNA, 53 bp, Artificial
  Synthetic oligonucleotide
ccttaacggggtctagtgacggcgaggtatataccaattaactcgaaatcgtc

SEQ ID NO: 268025 - DNA, 55 bp, Artificial
  Synthetic oligonucleotide
cgctgactccgtgtacattcgcaggcctaataactcggatattatatcgtcttcg

SEQ ID NO: 268026 - DNA, 55 bp, Artificial
  Synthetic oligonucleotide
cggcagtatcacccttacaacagccactcaaacgatgaagtgcaccagtggctcc

SEQ ID NO: 268027 - DNA, 55 bp, Artificial
  Synthetic oligonucleotide
cggctgcgtttgccaatccgtctgaagttcgcttcgatcttacatggcagcttta

SEQ ID NO: 268028 - DNA, 55 bp, Artificial
  Synthetic oligonucleotide
cggggataacactgcatagtgtagcaaaacacttagcagcagcataccgaatgac

SEQ ID NO: 268029 - DNA, 55 bp, Artificial
  Synthetic oligonucleotide
cgtaaacggacttgaccttgatccacatgcgagagtaagtgcaccagtaggactc

SEQ ID NO: 268030 - DNA, 55 bp, Artificial
  Synthetic oligonucleotide
cctccttcgtcgatagtctcgccaacacccgaatgtatgggcacataccgattca

SEQ ID NO: 268031 - DNA, 55 bp, Artificial
  Synthetic oligonucleotide
ctgaagccgggaataaaagtcgagtcttaaacttcaagcgtccacggatcttgcc

SEQ ID NO: 268032 - DNA, 55 bp, Artificial
  Synthetic oligonucleotide
cacaccttgcaccaggaagatacctccatttcacctgtacggctggttggagagc

SEQ ID NO: 268033 - DNA, 55 bp, Artificial
  Synthetic oligonucleotide
cgtgcccactaaaccccttgcttgtcatcgttcataagcccgagaatcacgcttc

SEQ ID NO: 268034 - DNA, 55 bp, Artificial
  Synthetic oligonucleotide
ctcaccactactgtacttactaacctcttgcagctgggctgaacgtgatgtcagg

SEQ ID NO: 268035 - DNA, 55 bp, Artificial
  Synthetic oligonucleotide
ctcgtgttcggtgtatgatttggggcccttcatgtgtttctcaaagtcgtcgggg

SEQ ID NO: 268036 - DNA, 55 bp, Artificial
  Synthetic oligonucleotide
ctgaaatcagaacattagatcaggtcagggtagtggctagagcgcaggagatccc

SEQ ID NO: 268037 - DNA, 55 bp, Artificial
  Synthetic oligonucleotide
gacatctcttcgtccttttcattcccactgcacaccgctgctagttaagccgtcc

SEQ ID NO: 268038 - DNA, 55 bp, Artificial
  Synthetic oligonucleotide
gatttccagtcgtgttgttcttgaatagccactgtcgagatcagtttgtaggagt

SEQ ID NO: 268039 - DNA, 55 bp, Artificial
  Synthetic oligonucleotide
gccacaacggtaagctcattctccgcaacgagtgtgcttcctccacatacacaac

SEQ ID NO: 268040 - DNA, 55 bp, Artificial
  Synthetic oligonucleotide
gcgctcggaggggcagcttggttcggtaacgtgggaaattagtcgatggaatggc

SEQ ID NO: 268041 - DNA, 55 bp, Artificial
  Synthetic oligonucleotide
gctgcgtggtcgtgacttgaccttgctttgtgggatcctatgccggtctgaattc

SEQ ID NO: 268042 - DNA, 55 bp, Artificial
  Synthetic oligonucleotide
ggatctctcttcgaatggagctgctcccgttcaagtagctgctcacgatgcgcct

SEQ ID NO: 268043 - DNA, 55 bp, Artificial
  Synthetic oligonucleotide
ccgttccgtacaagcacgtgttgtcgaggatcatggatccatagtgcgtcctcat

SEQ ID NO: 268044 - DNA, 55 bp, Artificial
  Synthetic oligonucleotide
gtcgaggtgtatccatcgtaatgctcctggaatctcgtattgagggctacaggat

SEQ ID NO: 268045 - DNA, 55 bp, Artificial
  Synthetic oligonucleotide
acgcgccgttaagcctctgtcactgttgtataaggtgaagtacatacacccggga

SEQ ID NO: 268046 - DNA, 55 bp, Artificial
  Synthetic oligonucleotide
gtgttgaaatcctgcgcatatcacggcatatacatatacctgcgatcgctcatag

SEQ ID NO: 268047 - DNA, 55 bp, Artificial
  Synthetic oligonucleotide
tgagtcaagacaattcatggcgctctacactggcgtcattatgtgtttcaaaccc

SEQ ID NO: 268048 - DNA, 55 bp, Artificial
  Synthetic oligonucleotide
tgtttgtgctcttccacgtcgaaatgggtgcattggctaatcagtcgtgatctgt

SEQ ID NO: 268049 - DNA, 55 bp, Artificial
  Synthetic oligonucleotide
ttggaacatcgcaaggcggagtctcattgaaagacgtgctgttgagtgagccgac

SEQ ID NO: 268050 - DNA, 55 bp, Artificial
  Synthetic oligonucleotide
ttggttacgcatgtttgaacacgtacctgaggactgcaaatccgccagtattctg

SEQ ID NO: 268051 - DNA, 55 bp, Artificial
  Synthetic oligonucleotide
acgattggagtcggttgacgtatatgccgacggtaagaacgtcttgaggcatcgc

SEQ ID NO: 268052 - DNA, 54 bp, Artificial
  Synthetic oligonucleotide
ttgtccctacagcacgcatccttgcccacactcaacgtgatgcagcgcgggaaa

SEQ ID NO: 268053 - DNA, 52 bp, Artificial
  Synthetic oligonucleotide
caatgggacgggctagttcctataacaaagactgttagccgcaaaattcttt

SEQ ID NO: 268054 - DNA, 55 bp, Artificial
  Synthetic oligonucleotide
cctaccgatatcacaataccccatccattttacagcacagtcggtacctcacaac

SEQ ID NO: 268055 - DNA, 50 bp, Artificial
  Synthetic oligonucleotide
gtgaactgagcaacgaagtcccaatatcggatgtggcagccaagtataac

SEQ ID NO: 268056 - DNA, 50 bp, Artificial
  Synthetic oligonucleotide
aagtcgggcaagctacgcccagcttcgggtctgcgatgctgttccaaggg

SEQ ID NO: 268057 - DNA, 50 bp, Artificial
  Synthetic oligonucleotide
aagtcctgcactgcgcgcgatgacttctgggggttgccggcgtacacgtg

SEQ ID NO: 268058 - DNA, 50 bp, Artificial
  Synthetic oligonucleotide
aaggttcacggttctgcaaagaccagacacgcgtcacaggggcgacgact

SEQ ID NO: 268059 - DNA, 50 bp, Artificial
  Synthetic oligonucleotide
aaggtgtcctcggccggtgtagcaacttcgtctgccgtggcgtggaaact

SEQ ID NO: 268060 - DNA, 50 bp, Artificial
  Synthetic oligonucleotide
aaccgccgttggccttgcctgggttgagatggagcgaagaatgggatgca

SEQ ID NO: 268061 - DNA, 50 bp, Artificial
  Synthetic oligonucleotide
aaccgacggaacaaggcttgcaggatgggcgacaaaggtctgccagaccg

SEQ ID NO: 268062 - DNA, 50 bp, Artificial
  Synthetic oligonucleotide
aacccctgtacagagccagtgcaaagatgtgcctggcattcctccgcccc

SEQ ID NO: 268063 - DNA, 50 bp, Artificial
  Synthetic oligonucleotide
aacccccactcgcaccttcgcgaaaacacaggacaatgcccgcgcacatg

SEQ ID NO: 268064 - DNA, 50 bp, Artificial
  Synthetic oligonucleotide
aaccccacgcgaagacgtacaagatgccataggcaggagtgcacggtgcg

SEQ ID NO: 268065 - DNA, 55 bp, Artificial
  Synthetic oligonucleotide
cgagagattatgttgagtatcaggaggcaagctgtcgtgaaggacgatacacagg

SEQ ID NO: 268066 - DNA, 50 bp, Artificial
  Synthetic oligonucleotide
aaccacggcccgtcacccttgagctaccccagtatgcagatcgctgctcg

SEQ ID NO: 268067 - DNA, 50 bp, Artificial
  Synthetic oligonucleotide
aacagacgatgcgcgggactgcggacgtgactcatcgccagtcaccactg

SEQ ID NO: 268068 - DNA, 50 bp, Artificial
  Synthetic oligonucleotide
aaatttgggccccggtacctgcaccgtttgcgtccagctacgacgggtca

SEQ ID NO: 268069 - DNA, 50 bp, Artificial
  Synthetic oligonucleotide
aaagctgtgcagaggagcgttgctgctggcttaccgagggagagtcgacc

SEQ ID NO: 268070 - DNA, 50 bp, Artificial
  Synthetic oligonucleotide
aaagcgtcttgaggtaaaccgggacggtggcccgcgtctggagagtccct

SEQ ID NO: 268071 - DNA, 50 bp, Artificial
  Synthetic oligonucleotide
aaagcggggagggatcgctgaagcaaggcctcggtcacggatgcttgctc

SEQ ID NO: 268072 - DNA, 50 bp, Artificial
  Synthetic oligonucleotide
aaagccgcaaccgtttagcttaccccaaggagccagcggagcgccaccgt

SEQ ID NO: 268073 - DNA, 50 bp, Artificial
  Synthetic oligonucleotide
aaagaccctccgtagcgcccgacgcagggagatgcacgcgaaggaaacaa

SEQ ID NO: 268074 - DNA, 50 bp, Artificial
  Synthetic oligonucleotide
aaacccgcccgcctttggggcttgtcgtgatgaagtgacgacgggacgtc

SEQ ID NO: 268075 - DNA, 50 bp, Artificial
  Synthetic oligonucleotide
aaacagctccctcgacggcgggactgactgaacgactccggctagacggc

SEQ ID NO: 268076 - DNA, 55 bp, Artificial
  Synthetic oligonucleotide
cgcgaaccagccgtgtgtcactgatccgtacactcttgctagctaccatgagcag

SEQ ID NO: 268077 - DNA, 50 bp, Artificial
  Synthetic oligonucleotide
aaacaacatcccgcccaaaccatacccgcgagcgaaaacaccagtccggg

SEQ ID NO: 268078 - DNA, 50 bp, Artificial
  Synthetic oligonucleotide
aaaacgggagccctggcaatatcgagcccagcgggtgtagccgtagttct

SEQ ID NO: 268079 - DNA, 50 bp, Artificial
  Synthetic oligonucleotide
aaggcttgactcacggcgggcaccactcactacccgactgacctggcgtt

SEQ ID NO: 268080 - DNA, 50 bp, Artificial
  Synthetic oligonucleotide
aaggcacacaaccgcatctcttggccccgcttccggaacctaggccaccg

SEQ ID NO: 268081 - DNA, 50 bp, Artificial
  Synthetic oligonucleotide
aaggacgcgtcaggtctcccttcttggctgtaggctgtgacgacgccaca

SEQ ID NO: 268082 - DNA, 50 bp, Artificial
  Synthetic oligonucleotide
aagcgggatgcctgtcgcggcgtgacgagaccagaccacatagtccagaa

SEQ ID NO: 268083 - DNA, 50 bp, Artificial
  Synthetic oligonucleotide
aagccgcaccgttaggccccctgtctcctcgtgaagctcgttgctgactg

SEQ ID NO: 268084 - DNA, 50 bp, Artificial
  Synthetic oligonucleotide
aagcaagcctacaagggaccgacccgtgcaactgcgaggaatgcgcgcga

SEQ ID NO: 268085 - DNA, 50 bp, Artificial
  Synthetic oligonucleotide
aagcaacgccatatgcctcgcctcttcgccgtgagtcgctttcgcgagtc

SEQ ID NO: 268086 - DNA, 50 bp, Artificial
  Synthetic oligonucleotide
aagatggcccctgcaaagcgcaaagcagctctcgagggagacgcacagcg

SEQ ID NO: 268087 - DNA, 55 bp, Artificial
  Synthetic oligonucleotide
cggaagcggtttagaggtgtgagagctgcgccgcagtcttagagccaagtcaaca

SEQ ID NO: 268088 - DNA, 50 bp, Artificial
  Synthetic oligonucleotide
aactgtgcaggtgcattctcggagcctgccaaagtgggagatcgcccgag

SEQ ID NO: 268089 - DNA, 50 bp, Artificial
  Synthetic oligonucleotide
aactcgtcgacggaagctcgatgcgcgtgggacgttggagatcgatcggg

SEQ ID NO: 268090 - DNA, 50 bp, Artificial
  Synthetic oligonucleotide
aactcagtagcgatggcagaggcctgacacatgcgctgaatgggggagga

SEQ ID NO: 268091 - DNA, 50 bp, Artificial
  Synthetic oligonucleotide
aactcaggtctcgggggtagggatggtggaacgttagggttggcgggagg

SEQ ID NO: 268092 - DNA, 50 bp, Artificial
  Synthetic oligonucleotide
aacgtggatggtactgtcttatccccacggtcgcaaccacccacggtcgc

SEQ ID NO: 268093 - DNA, 50 bp, Artificial
  Synthetic oligonucleotide
aacgtccggtggggcctgcattggggtcattggagttatgggtgcgctgc

SEQ ID NO: 268094 - DNA, 50 bp, Artificial
  Synthetic oligonucleotide
aacgcattgcgccaaccttcggggactcccaagctgtcgacgacaaatgc

SEQ ID NO: 268095 - DNA, 50 bp, Artificial
  Synthetic oligonucleotide
aacctcgatatgcttgagctcacgagctccggccgccattcaagacccgc

SEQ ID NO: 268096 - DNA, 50 bp, Artificial
  Synthetic oligonucleotide
aacctccgtgggcacgattaccggcgcaacgcagagacctccaatcgccc

SEQ ID NO: 268097 - DNA, 50 bp, Artificial
  Synthetic oligonucleotide
aaccgggctgcactttccgctacttacacgaaggggcatgcggtgatgcc

SEQ ID NO: 268098 - DNA, 55 bp, Artificial
  Synthetic oligonucleotide
cggaatgctggctgtttaggatggtcattattacctcaaggccggccatcaatcc

SEQ ID NO: 268099 - DNA, 55 bp, Artificial
  Synthetic oligonucleotide
cggtaacgtagtggccatactcctagacatttgtgagcgtcacatcaacggttga

SEQ ID NO: 268100 - DNA, 55 bp, Artificial
  Synthetic oligonucleotide
cgtccattgccacagagcgacaagccagataccagaggtgatgacatggaaactc

SEQ ID NO: 268101 - DNA, 60 bp, Artificial
  Synthetic oligonucleotide
ttcgatgattgtcggagaagggccacctctcgtatagatgtaggggtgtctagagactta

SEQ ID NO: 268102 - DNA, 60 bp, Artificial
  Synthetic oligonucleotide
caagaatcaaagtcactccgacttatatcccatcgtctgactttgcgcgtcgagttatat

SEQ ID NO: 268103 - DNA, 60 bp, Artificial
  Synthetic oligonucleotide
attggagtgaaaaagtctgagacttcttgcacgagtattgtgtcaagcgacactcccgga

SEQ ID NO: 268104 - DNA, 56 bp, Artificial
  Synthetic oligonucleotide
ataatgggataatgaactctattcccgggggacctcactctttgagataatgtggg

SEQ ID NO: 268105 - DNA, 56 bp, Artificial
  Synthetic oligonucleotide
aaaggacatcgtccgggtctgtttaaatcttgtcatccagtctttattgagactgt

SEQ ID NO: 268106 - DNA, 59 bp, Artificial
  Synthetic oligonucleotide
aatctgcgcaattaggtttgcatacttggttacctagcgctatggagggtaagcgaata

SEQ ID NO: 268107 - DNA, 51 bp, Artificial
  Synthetic oligonucleotide
acatcaaagccgaaccgaccacccgaccccccaacgggggttcgcttctca

SEQ ID NO: 268108 - DNA, 55 bp, Artificial
  Synthetic oligonucleotide
acgaacgaagcatgttccgggagtgtcgctttacacgaccctcgatacgcccaag

SEQ ID NO: 268109 - DNA, 59 bp, Artificial
  Synthetic oligonucleotide
agtactttctcatagaatatcacaactcaaggtatggtatgatagacttcttactaggg

SEQ ID NO: 268110 - DNA, 55 bp, Artificial
  Synthetic oligonucleotide
gatggtggggatttctatcaatttacctgtttaaggattggtaacataatggtaa

SEQ ID NO: 268111 - DNA, 55 bp, Artificial
  Synthetic oligonucleotide
cgtaaaattcaaagggacaatagcttaataggttaaagcatttcgctcataacga

SEQ ID NO: 268112 - DNA, 54 bp, Artificial
  Synthetic oligonucleotide
tgaccacttcgtggtttgccaacgggcttataagcccgtttagctgtccctcct

SEQ ID NO: 268113 - DNA, 58 bp, Artificial
  Synthetic oligonucleotide
ggactggatcccgggcaatattatagacttgtgtgatccccccgcacgcgacttgcgt

SEQ ID NO: 268114 - DNA, 57 bp, Artificial
  Synthetic oligonucleotide
aatcatcatgagtctcactaagtgagactgacgtctctcagagagacgtgacggggg

SEQ ID NO: 268115 - DNA, 52 bp, Artificial
  Synthetic oligonucleotide
tagcctttagccctcggaaagagggccgacccccgatcggggtcgaatataa

SEQ ID NO: 268116 - DNA, 55 bp, Artificial
  Synthetic oligonucleotide
cttcaatgtgttcgacataataaaatacaaggggttgtaactcagtaggttagag

SEQ ID NO: 268117 - DNA, 57 bp, Artificial
  Synthetic oligonucleotide
gtccaatcgagcgtgagagcgttcgtagacataattacggcaagtatagtataagcc

SEQ ID NO: 268118 - DNA, 54 bp, Artificial
  Synthetic oligonucleotide
gtagcgaagattttttacccggaccccccacattcagctcgttaccgagctcaa

SEQ ID NO: 268119 - DNA, 56 bp, Artificial
  Synthetic oligonucleotide
ggctctgaatgaacgctagctattgacttaacacatgctagtcagaatttaaatac

SEQ ID NO: 268120 - DNA, 55 bp, Artificial
  Synthetic oligonucleotide
gacaacacgagtgtgtgacactgaagatagtggtgaacttcgttcccaaacatcc

SEQ ID NO: 268121 - DNA, 55 bp, Artificial
  Synthetic oligonucleotide
gccagttcgaatctggcctgggataattgtggagaaattagaaagggaacgaagt

SEQ ID NO: 268122 - DNA, 55 bp, Artificial
  Synthetic oligonucleotide
gctgatcactacttttccctccgctcgtattcctaacagtgaatgtatatggaag

SEQ ID NO: 268123 - DNA, 58 bp, Artificial
  Synthetic oligonucleotide
tcctacagagttcttctgtatcatttctccgagggggtctccgggcatctgaagggcc

SEQ ID NO: 268124 - DNA, 55 bp, Artificial
  Synthetic oligonucleotide
ggggtaaagaaagacctcaagaagtgaaagacaaaatctctgagacaatgagagg

SEQ ID NO: 268125 - DNA, 55 bp, Artificial
  Synthetic oligonucleotide
atagatttacacgaacgaagttcgggatgatatttagggatggattggccgaggg

SEQ ID NO: 268126 - DNA, 55 bp, Artificial
  Synthetic oligonucleotide
ggtcggaggcagcaatcggcttaacaattcttactctgttccacaaattaagagg

SEQ ID NO: 268127 - DNA, 55 bp, Artificial
  Synthetic oligonucleotide
gtatcgggtctagatcataatgatcgaacgaagagaataatctcattcggaaaag

SEQ ID NO: 268128 - DNA, 55 bp, Artificial
  Synthetic oligonucleotide
gtctcagtgagacgtcatctatgattcccaactcgttttgagttgaatcgggtga

SEQ ID NO: 268129 - DNA, 55 bp, Artificial
  Synthetic oligonucleotide
gtctgagacttcttgcacgagtattgtgtcaagcgacactcccggaacatgcttc

SEQ ID NO: 268130 - DNA, 55 bp, Artificial
  Synthetic oligonucleotide
tccgaactggaattcagagaatcccgaggcaacccgagtgtggaagcccttcggg

SEQ ID NO: 268131 - DNA, 55 bp, Artificial
  Synthetic oligonucleotide
cccctgaagggccctccgggactccaggagcactccgatctggtgagctcttaga

SEQ ID NO: 268132 - DNA, 55 bp, Artificial
  Synthetic oligonucleotide
cccctcaaagatctaaaatatctcagaatcctccggattcgacaattcgttcacc

SEQ ID NO: 268133 - DNA, 55 bp, Artificial
  Synthetic oligonucleotide
ccgagcgatgctcgtagattgagagatttgggcaattcacaagggtggagaactc

SEQ ID NO: 268134 - DNA, 60 bp, Artificial
  Synthetic oligonucleotide
tagagagtttgttacaaactgtcggattcagaactcctatggagtcatctctaatgcgac

SEQ ID NO: 268135 - DNA, 55 bp, Artificial
  Synthetic oligonucleotide
ccgggcctctgaaggccctccgggaagagggttccacagagatgatgattgaggg

SEQ ID NO: 268136 - DNA, 55 bp, Artificial
  Synthetic oligonucleotide
cgctatcctccaatatcgcggagatatttagaactataaagcggaattccggagg

SEQ ID NO: 268137 - DNA, 55 bp, Artificial
  Synthetic oligonucleotide
cgcttctcatgttggcaacatctcagaaacagcccgaagggcgaacccccggagg

SEQ ID NO: 268138 - DNA, 55 bp, Artificial
  Synthetic oligonucleotide
cactccgagctccggtagtgtcgctttacacgaccctcgagtgctctaaataatc

SEQ ID NO: 268139 - DNA, 55 bp, Artificial
  Synthetic oligonucleotide
cgggatgcgatcccatcgatctcccagaaggagcactccgaactggaattcagag

SEQ ID NO: 268140 - DNA, 55 bp, Artificial
  Synthetic oligonucleotide
caatatgttctcaacccgagtgtgtgactcgtgtattttgaatcctccggattat

SEQ ID NO: 268141 - DNA, 55 bp, Artificial
  Synthetic oligonucleotide
ctccggaccatcatatctcggtattgtggggaatatagaggttaagatatctcgg

SEQ ID NO: 268142 - DNA, 55 bp, Artificial
  Synthetic oligonucleotide
atatatccgaggaacagaaagagttcccttggtttgataattccgactctatccg

SEQ ID NO: 268143 - DNA, 55 bp, Artificial
  Synthetic oligonucleotide
cttaggattacaatgggtagaatatatcaacgcaccattcacaattgcagattca

SEQ ID NO: 268144 - DNA, 55 bp, Artificial
  Synthetic oligonucleotide
cttctggtggcgggacgtatgtagagaagcaacataccaaggacatcatacaaaa

SEQ ID NO: 268145 - DNA, 46 bp, Artificial
  Synthetic oligonucleotide
ggggtcattttttttggggccaacccccggagggggttcgcccttc

SEQ ID NO: 268146 - DNA, 54 bp, Artificial
  Synthetic oligonucleotide
gaatcaatccttggaaagcccgaagggcttcactcgggtcctcacggagaaacc

SEQ ID NO: 268147 - DNA, 54 bp, Artificial
  Synthetic oligonucleotide
gtctgtacttcaaaccaacttgtgtttccgcgaggtcttgtagaaggagtcttt

SEQ ID NO: 268148 - DNA, 53 bp, Artificial
  Synthetic oligonucleotide
tgtgggtaatttcaccgcgatgcaaccctcggtgatccaaaggagaagaatcc

SEQ ID NO: 268149 - DNA, 53 bp, Artificial
  Synthetic oligonucleotide
cccgagtgtgtgacactcgtgtctccgaaggatttatcgaagaactctagaga

SEQ ID NO: 268150 - DNA, 46 bp, Artificial
  Synthetic oligonucleotide
acccgtacctccctccgggaggttcgggctttgacccaaaccccgt

SEQ ID NO: 268151 - DNA, 53 bp, Artificial
  Synthetic oligonucleotide
ggagtgtctccgggcccccacctaaacagtggtggggagacacgaccctcgaa

SEQ ID NO: 268152 - DNA, 53 bp, Artificial
  Synthetic oligonucleotide
accgtcggaggtatacaacttcgctacagactgggacactaatgggtggctgt

SEQ ID NO: 268153 - DNA, 52 bp, Artificial
  Synthetic oligonucleotide
ggagttcttcatctccacactcgggttgcctcggtgattcggggaataagta

SEQ ID NO: 268154 - DNA, 52 bp, Artificial
  Synthetic oligonucleotide
gtctttaaattgttgacaaggcctagaagaatcctgagattcttgggtacat

SEQ ID NO: 268155 - DNA, 52 bp, Artificial
  Synthetic oligonucleotide
tacgagcaccgctcggaggaagaagaattgtcgaacagagttccttcttcat

SEQ ID NO: 268156 - DNA, 60 bp, Artificial
  Synthetic oligonucleotide
ggccagcgaagaatcattgattcttggccaagtatgtaacctgaaggtggtctcagaccg

SEQ ID NO: 268157 - DNA, 52 bp, Artificial
  Synthetic oligonucleotide
atgcgaggaagtccacaagatatcttatatcacggataagactacttcataa

SEQ ID NO: 268158 - DNA, 51 bp, Artificial
  Synthetic oligonucleotide
atactcgccccctaatcctgatcagtatccctacgggggtgtcgcgctagc

SEQ ID NO: 268159 - DNA, 51 bp, Artificial
  Synthetic oligonucleotide
cttagaggtaactcatagtattggctctgaagtctgtccggtgcaagtaag

SEQ ID NO: 268160 - DNA, 50 bp, Artificial
  Synthetic oligonucleotide
gtgaaaacggttaacgagattgttcttatatctctagaccgtcggttgtt

SEQ ID NO: 268161 - DNA, 50 bp, Artificial
  Synthetic oligonucleotide
tccgtactatccttgtatcgggaccgggaaacacaagttgtgtttcgagg

SEQ ID NO: 268162 - DNA, 50 bp, Artificial
  Synthetic oligonucleotide
agactaacaagtcgaacagggaggtaactcggtcatagtgatccccaaat

SEQ ID NO: 268163 - DNA, 56 bp, Artificial
  Synthetic oligonucleotide
ggaaggggggggtgagaacgtctcagtgagacgtcatctatgattcccaactcgtt

SEQ ID NO: 268164 - DNA, 60 bp, Artificial
  Synthetic oligonucleotide
gagtatgtttaacagattcggataacaacgacattgtgtaacaatgtggtggtgatctat

SEQ ID NO: 268165 - DNA, 57 bp, Artificial
  Synthetic oligonucleotide
ctcgttttgagttgaatcgggtgaattgtcaaagacgctaaggggagaatcgagatc

SEQ ID NO: 268166 - DNA, 60 bp, Artificial
  Synthetic oligonucleotide
ttctttgtcctcaagtctctgagaccctgcgatcgggtgcagactgacggagtctgctac

SEQ ID NO: 268167 - DNA, 55 bp, Artificial
  Synthetic oligonucleotide
gacccgaatcgaggtagatcctcgattcaaagggtcaagacctttttggtcagcc

SEQ ID NO: 268168 - DNA, 59 bp, Artificial
  Synthetic oligonucleotide
gaaggtctactccaatctagtaagagtacaatatgtacctctaatcttttatcgcagga

SEQ ID NO: 268169 - DNA, 58 bp, Artificial
  Synthetic oligonucleotide
cttttcaaagcttcgcagaagctttggctatgttgacggagaacttctttctccgtca

SEQ ID NO: 268170 - DNA, 54 bp, Artificial
  Synthetic oligonucleotide
ctccgtcaacaactaaaacacgaccttccgtcgtgctttagcaggccaaaaagc

SEQ ID NO: 268171 - DNA, 60 bp, Artificial
  Synthetic oligonucleotide
cggcccattcagctttgctgaggtgtgcggcggctccttgggaattctattggcacaagt

SEQ ID NO: 268172 - DNA, 58 bp, Artificial
  Synthetic oligonucleotide
catagcgaaggcacagtggggatttattcggaatttctgtacgaaattgcttagataa

SEQ ID NO: 268173 - DNA, 54 bp, Artificial
  Synthetic oligonucleotide
cagccccccaacctcttggagcactcctcctggaccccggaggagtgcggtggg

SEQ ID NO: 268174 - DNA, 60 bp, Artificial
  Synthetic oligonucleotide
atcggaaggccattgccactctatagcgcgagctatagtgctaaggagtcactcccttag

SEQ ID NO: 268175 - DNA, 58 bp, Artificial
  Synthetic oligonucleotide
atcgcaggattccactgtccccaaccggtgacattgttgccaaaggcaggcggcttta

SEQ ID NO: 268176 - DNA, 55 bp, Artificial
  Synthetic oligonucleotide
agtctgctacccgttacgcaactaaatctatgatttagttcaagggtctagttcc

SEQ ID NO: 268177 - DNA, 58 bp, Artificial
  Synthetic oligonucleotide
ttagataactcgagaggaaaaaagttgaaggcgctaggttctatgaactgacgcgtga

SEQ ID NO: 268178 - DNA, 52 bp, Artificial
  Synthetic oligonucleotide
actcccttagcggctcagaccgtctacctttggaacccccaaaggtagccta

SEQ ID NO: 268179 - DNA, 57 bp, Artificial
  Synthetic oligonucleotide
agctgacggcgcgcaaatcttgggtggcgtagaggttgggtgctcccccggagcttg

SEQ ID NO: 268180 - DNA, 55 bp, Artificial
  Synthetic oligonucleotide
ctaggactgaggatcctacggatcagccacctttgtagccgaacgctaatcctcg

SEQ ID NO: 268181 - DNA, 52 bp, Artificial
  Synthetic oligonucleotide
gtaaaatgttgacgcagtcaacgtttttcgtcgagggcgagttttaaaacac

SEQ ID NO: 268182 - DNA, 55 bp, Artificial
  Synthetic oligonucleotide
taagagtacaatatgtacctctaatcttttatcgcaggattccactgtccccaac

SEQ ID NO: 268183 - DNA, 54 bp, Artificial
  Synthetic oligonucleotide
ctaaatctatgatttagttcaagggtctagttcccgtacagccgttgggttcta

SEQ ID NO: 268184 - DNA, 50 bp, Artificial
  Synthetic oligonucleotide
gttccaattagtgctcccccgaatggggggggtaaggaatttcccgcagg

SEQ ID NO: 268185 - DNA, 52 bp, Artificial
  Synthetic oligonucleotide
aatgtgggggctggggccccaccgcttcattagaacccctctgcgaagaggg

SEQ ID NO: 268186 - DNA, 52 bp, Artificial
  Synthetic oligonucleotide
catgagattcgttcacttaccaagtggacgactctcatgacactgaggacgc

SEQ ID NO: 268187 - DNA, 51 bp, Artificial
  Synthetic oligonucleotide
tagggccacatatgggcctgtgttgccatagcgaaggcacagtggggattt

SEQ ID NO: 268188 - DNA, 57 bp, Artificial
  Synthetic oligonucleotide
ttaattggcaattagacaatgtcactctaagaaaatccgataaaagacaagaaggtc

SEQ ID NO: 268189 - DNA, 51 bp, Artificial
  Synthetic oligonucleotide
tgcccctctttgcagagaggctgtccgggaacgccagagaccggacaaagg

SEQ ID NO: 268190 - DNA, 60 bp, Artificial
  Synthetic oligonucleotide
tagtaggccctagcatttgaaagctagggccacatatgggcctgtgttgccatagcgaag

SEQ ID NO: 268191 - DNA, 60 bp, Artificial
  Synthetic oligonucleotide
tagtagatgctcttcactctgggaagctttgggctgcccttgttgagggggccccagcgc

SEQ ID NO: 268192 - DNA, 55 bp, Artificial
  Synthetic oligonucleotide
gttcccgtacagccgttgggttctactacggctgaagcttctcaagaagccggcc

SEQ ID NO: 268193 - DNA, 57 bp, Artificial
  Synthetic oligonucleotide
ggccttccgatttcacggcactccgaaggagtagctgatcaaaaaatcttgacccga

SEQ ID NO: 268194 - DNA, 60 bp, Artificial
  Synthetic oligonucleotide
gcgttggagctttagatcctaggactgaggatcctacggatcagccacctttgtagccga

SEQ ID NO: 268195 - DNA, 60 bp, Artificial
  Synthetic oligonucleotide
gagcttgggcattgcccaatggcttgcccagggtgttagagcacctacaatagtagatgc

SEQ ID NO: 268196 - DNA, 50 bp, Artificial
  Synthetic oligonucleotide
agaacctccgggactccccgtgtaattaaacaagaagtcccgtaagccta

SEQ ID NO: 268197 - DNA, 60 bp, Artificial
  Synthetic oligonucleotide
gatgatagcttaaatgaaatgcctgccacaggtataggagcagatttattcaaaggttca

SEQ ID NO: 268198 - DNA, 54 bp, Artificial
  Synthetic oligonucleotide
ttctcctgaggagggttgggtcatttcggttgtcccagtaaaatccctgccgtc

SEQ ID NO: 268199 - DNA, 60 bp, Artificial
  Synthetic oligonucleotide
ttcattatacatcagaaggtgcaaattttgttaatcttatagccagtggaatgaataata

SEQ ID NO: 268200 - DNA, 55 bp, Artificial
  Synthetic oligonucleotide
ttatactaaataaaagtccgcttcaacgatcagacgctaagtaccctacaccttg

SEQ ID NO: 268201 - DNA, 55 bp, Artificial
  Synthetic oligonucleotide
ttatacaccttcagcacagggaacggtccgtcccatttgtcgtcccatttcttct

SEQ ID NO: 268202 - DNA, 60 bp, Artificial
  Synthetic oligonucleotide
ttagttaaactactgctctctagcagtggacaacctcatacgtagagctaacatataacg

SEQ ID NO: 268203 - DNA, 60 bp, Artificial
  Synthetic oligonucleotide
ttactttgagactttagccctatactgtgtatgcttaatgtagacgataatgctctgcta

SEQ ID NO: 268204 - DNA, 59 bp, Artificial
  Synthetic oligonucleotide
ttacgtctccgtatcccctgacggctaatcgggagtctcctgccacgatatagtcgtca

SEQ ID NO: 268205 - DNA, 60 bp, Artificial
  Synthetic oligonucleotide
ttaatcgctggcgtagtacgtaatgttagctgcggctagtagtaatcaactgttaagcaa

SEQ ID NO: 268206 - DNA, 59 bp, Artificial
  Synthetic oligonucleotide
ttaaagcataatttagtatgtaggaggcagagatttaccctacgcaccgcctgatagcc

SEQ ID NO: 268207 - DNA, 60 bp, Artificial
  Synthetic oligonucleotide
tgttgagttacttcaaacactatatctgttctatatcctgctttgagttcatggttagct

SEQ ID NO: 268208 - DNA, 57 bp, Artificial
  Synthetic oligonucleotide
gagtttacctcgtgcggcgagttatccactgtgtgtagcttaacggattatcctacc

SEQ ID NO: 268209 - DNA, 57 bp, Artificial
  Synthetic oligonucleotide
tggttgctaaaatagagcgcctttcggagagcttgtgccacgggttcggggtagcgc

SEQ ID NO: 268210 - DNA, 53 bp, Artificial
  Synthetic oligonucleotide
tggtattgaggggaaatcctttaatataggttcttgaagagacggtaaagagg

SEQ ID NO: 268211 - DNA, 58 bp, Artificial
  Synthetic oligonucleotide
tggtacggtgactccttcttgttatatattacgtttagctaagtagtgcttcgcacta

SEQ ID NO: 268212 - DNA, 60 bp, Artificial
  Synthetic oligonucleotide
taaggctgtgagagtaggcagggcctgctagcacaagaattattaagctaatctcttttt

SEQ ID NO: 268213 - DNA, 57 bp, Artificial
  Synthetic oligonucleotide
taacaatcaaaatgcttggccgtctcaacccgtaccgcggctcgcgtatggttcgag

SEQ ID NO: 268214 - DNA, 57 bp, Artificial
  Synthetic oligonucleotide
taaaccgatgagagagctaaaaacggttgttattgctcccaaccataagcataatag

SEQ ID NO: 268215 - DNA, 60 bp, Artificial
  Synthetic oligonucleotide
gtttgcgaagtccagctgcagggtgctccaatggatctgcgggtcgtgctttgcgagcca

SEQ ID NO: 268216 - DNA, 60 bp, Artificial
  Synthetic oligonucleotide
gttcaacggtcgcttgtacatgtacatatactctagctgatagcggaattggatttgggt

SEQ ID NO: 268217 - DNA, 52 bp, Artificial
  Synthetic oligonucleotide
gttatatacgtgaaactggtgtaaaactttctattccctatacagggaacgg

SEQ ID NO: 268218 - DNA, 51 bp, Artificial
  Synthetic oligonucleotide
gttagccgcgggctgggttaaagctgaaaaaccccgatccgcgaggggtag

SEQ ID NO: 268219 - DNA, 58 bp, Artificial
  Synthetic oligonucleotide
gagcttgtgccacgggttcggggtagcgcgtgaactggcggctatagaagtaggtgta

SEQ ID NO: 268220 - DNA, 60 bp, Artificial
  Synthetic oligonucleotide
gtgttgccagctgcgggacgaggcgcggagggggcaacggatccggcgcgggatgatgca

SEQ ID NO: 268221 - DNA, 60 bp, Artificial
  Synthetic oligonucleotide
gtgggcacgtgctgcccacgtgacccaagcaggtcaggcttggtgccgtgacaacaatgg

SEQ ID NO: 268222 - DNA, 59 bp, Artificial
  Synthetic oligonucleotide
gtggatttgtataaaaatgcaagactttcgaagattaatatctatgttaagagatgtta

SEQ ID NO: 268223 - DNA, 57 bp, Artificial
  Synthetic oligonucleotide
gtgaggcgggaattattgtccggaataattcaggaacatcttcctggttgctttgga

SEQ ID NO: 268224 - DNA, 57 bp, Artificial
  Synthetic oligonucleotide
gtctcttcggagtgttttctacctaacgctctttgtctcattagctctttagtctct

SEQ ID NO: 268225 - DNA, 60 bp, Artificial
  Synthetic oligonucleotide
gtcggcgtcacgaccgagcaatttgaagagctctagctgtgtggcatactgctttcgtga

SEQ ID NO: 268226 - DNA, 60 bp, Artificial
  Synthetic oligonucleotide
gtccttctccctaagccgcaatctgattacacatttctgcagatagccgcccatttaaag

SEQ ID NO: 268227 - DNA, 57 bp, Artificial
  Synthetic oligonucleotide
gtcaacgaagacgtacagtcttgcagtctccaggttcaggggtaagaacgtgagtcc

SEQ ID NO: 268228 - DNA, 57 bp, Artificial
  Synthetic oligonucleotide
gtatttgattaccaccttacagacaaccatcatgttggattagaagggggtatcttg

SEQ ID NO: 268229 - DNA, 60 bp, Artificial
  Synthetic oligonucleotide
gtagtgtcagtcgaaccgtctgcagcatattctcgtacgcaaggcagtccttctcggggt

SEQ ID NO: 268230 - DNA, 55 bp, Artificial
  Synthetic oligonucleotide
gagccttcaccgtctgataaatcccagtaataaatcaagggtttaggtattagaa

SEQ ID NO: 268231 - DNA, 57 bp, Artificial
  Synthetic oligonucleotide
gtaggtcccggagtcgacacaccacagagttgtctactcttctcctgaggagggttg

SEQ ID NO: 268232 - DNA, 55 bp, Artificial
  Synthetic oligonucleotide
gtaggtaatccccagagactaaacgtgaaactacgagttatgtatctagaaaatc

SEQ ID NO: 268233 - DNA, 54 bp, Artificial
  Synthetic oligonucleotide
tcctcaattggggccgttaattgggttctcggtaagtgtgtataagtcggtcga

SEQ ID NO: 268234 - DNA, 52 bp, Artificial
  Synthetic oligonucleotide
tccggacgggagcaataggcttacgggacttcttgtttacacggggagtccc

SEQ ID NO: 268235 - DNA, 58 bp, Artificial
  Synthetic oligonucleotide
tccgcttttatatattagtgcgaagcactacttagctaaacgtaatatataacaagaa

SEQ ID NO: 268236 - DNA, 57 bp, Artificial
  Synthetic oligonucleotide
tccgcccatcgtatacacgtttcccacgccgcctctagttgccggacatgggcttcg

SEQ ID NO: 268237 - DNA, 56 bp, Artificial
  Synthetic oligonucleotide
tcattcggtagagtacccttaatcgctaaatacattaacacgaacacgctaggtat

SEQ ID NO: 268238 - DNA, 60 bp, Artificial
  Synthetic oligonucleotide
tcagtggtgggaccaatgcggcatcatgcatcttcgcactcgagctttgcatttcttcac

SEQ ID NO: 268239 - DNA, 60 bp, Artificial
  Synthetic oligonucleotide
tcagatgctagtcatagtacgcatgaagatccttctcctaaaaaagagcccgaaagtaat

SEQ ID NO: 268240 - DNA, 60 bp, Artificial
  Synthetic oligonucleotide
tcactctctgtcgggcgcatcacaacctcttatccatcggatatgtgcttctaatatcgg

SEQ ID NO: 268241 - DNA, 60 bp, Artificial
  Synthetic oligonucleotide
gacctagggtaaccggcaggacgttgatctgccgtgtatgctcgcttctcggcatcgctg

SEQ ID NO: 268242 - DNA, 60 bp, Artificial
  Synthetic oligonucleotide
tcacatccatagctgaacccttgtcagaatcactattagagtcttcgttattttcaggat

SEQ ID NO: 268243 - DNA, 59 bp, Artificial
  Synthetic oligonucleotide
tcaaggcaatgttatcgggctcagcggtcagtgttgctacgaggtcggagtcgttgttt

SEQ ID NO: 268244 - DNA, 54 bp, Artificial
  Synthetic oligonucleotide
tatgtattatacagtaataagtttaacaatttacgaaggccgacgtagttcaac

SEQ ID NO: 268245 - DNA, 60 bp, Artificial
  Synthetic oligonucleotide
tatactgccataacttggccgacgtgaggctttgacgtgtcatctgcactgtgacagtgc

SEQ ID NO: 268246 - DNA, 58 bp, Artificial
  Synthetic oligonucleotide
tagtattatacctttcacaagaaggtagagacgtcagtgtttccatacgttactcata

SEQ ID NO: 268247 - DNA, 54 bp, Artificial
  Synthetic oligonucleotide
tagggacgataccactaataaagcggggcaggggctcaattcttacgaaactta

SEQ ID NO: 268248 - DNA, 55 bp, Artificial
  Synthetic oligonucleotide
tactcataaaggttacagtcacggttaggacctaaggttgagatttggagggtga

SEQ ID NO: 268249 - DNA, 54 bp, Artificial
  Synthetic oligonucleotide
tacgtaaacatttaagaccactaggtgacgataaatttggccattatttggccg

SEQ ID NO: 268250 - DNA, 55 bp, Artificial
  Synthetic oligonucleotide
taattgggttctcggtaagtgtgtataagtcggtcgagatatttaagtctcggag

SEQ ID NO: 268251 - DNA, 60 bp, Artificial
  Synthetic oligonucleotide
taatgctttttattctactagcatgggtaatactagcattgatgatgtattaataggtaa

SEQ ID NO: 268252 - DNA, 54 bp, Artificial
  Synthetic oligonucleotide
gaccgtacgctccacttaagtttcgtaagaatgagcccctgccccgctttatta

SEQ ID NO: 268253 - DNA, 57 bp, Artificial
  Synthetic oligonucleotide
taagtataaactcctccccgcctgtatttataagcccctctattcaaagatcatcac

SEQ ID NO: 268254 - DNA, 60 bp, Artificial
  Synthetic oligonucleotide
aggatgggtatatattcttaagaagttgagtggatgcgctagctacaaaataaggctgtg

SEQ ID NO: 268255 - DNA, 54 bp, Artificial
  Synthetic oligonucleotide
aggagtaggcgggccgtgggaggtccagtgaacgaagcctaagggcggtgagcc

SEQ ID NO: 268256 - DNA, 51 bp, Artificial
  Synthetic oligonucleotide
cactcggtaaagtcctgttccgaaagggaatctaagcttttagggttagga

SEQ ID NO: 268257 - DNA, 57 bp, Artificial
  Synthetic oligonucleotide
cagaccccttgaaatgcgggggcggggtctgataaataatgaatggcgtcggcctca

SEQ ID NO: 268258 - DNA, 54 bp, Artificial
  Synthetic oligonucleotide
agcggtcccacccataccccgcctctccagggtagaaacgatgcccctgaagga

SEQ ID NO: 268259 - DNA, 54 bp, Artificial
  Synthetic oligonucleotide
agcccgggtcgaaacgggcctctaagtgcagaatcttggttgggtagtagcaaa

SEQ ID NO: 268260 - DNA, 55 bp, Artificial
  Synthetic oligonucleotide
cagttgaggcttccggacgtggcccaggagaggttcggcaaacgaccactcaagg

SEQ ID NO: 268261 - DNA, 58 bp, Artificial
  Synthetic oligonucleotide
cataacctcgctgaagctggtattcctgatgacgtaccaagcccgggccgtgtcggac

SEQ ID NO: 268262 - DNA, 59 bp, Artificial
  Synthetic oligonucleotide
agacgtggggtcttgccagtctacgatggctttgaccttctcggggtccatgctgaggc

SEQ ID NO: 268263 - DNA, 57 bp, Artificial
  Synthetic oligonucleotide
gacagcggcgcaattacgggtgcaaaagggtcagtgtcgtcctgggttcccttatca

SEQ ID NO: 268264 - DNA, 56 bp, Artificial
  Synthetic oligonucleotide
agacggtcatccctctgtaagcgactgtctacagagggttggcatttccctaaacg

SEQ ID NO: 268265 - DNA, 58 bp, Artificial
  Synthetic oligonucleotide
agaaggtgtaacagtagtaatctatcatactgtacctatcttagttaagtagtactca

SEQ ID NO: 268266 - DNA, 60 bp, Artificial
  Synthetic oligonucleotide
catcccatcaatcttaccatactcctcaaacaattccactgtcttgaacggaatcgtgcc

SEQ ID NO: 268267 - DNA, 55 bp, Artificial
  Synthetic oligonucleotide
catcgttgggaaaggcgaagtacgccggtagtccgtaggccggctgcccttgata

SEQ ID NO: 268268 - DNA, 55 bp, Artificial
  Synthetic oligonucleotide
actttatgtggctacggtaaggcaggattcactcccgagacacttggccccgagg

SEQ ID NO: 268269 - DNA, 60 bp, Artificial
  Synthetic oligonucleotide
actgatggtctcccgatgatcgcccacccacagttgaagcatcgtgtcgaactcaatcca

SEQ ID NO: 268270 - DNA, 54 bp, Artificial
  Synthetic oligonucleotide
actcccttgtcgttggcgacggaaaatgccgtttcccatttgtcgatgaaggtc

SEQ ID NO: 268271 - DNA, 57 bp, Artificial
  Synthetic oligonucleotide
ccaagagctcaaaaagggcaacaccgggctagaaatggacgattggaatcttgacag

SEQ ID NO: 268272 - DNA, 59 bp, Artificial
  Synthetic oligonucleotide
acgttgttgtttgatgcggctatcaaaccgaggtctcgagtgctgtcgcgacggtcgcg

SEQ ID NO: 268273 - DNA, 59 bp, Artificial
  Synthetic oligonucleotide
acgggtctccaggagctcttctgtctgggtggcaataacctggtcgaaatctgagatac

SEQ ID NO: 268274 - DNA, 58 bp, Artificial
  Synthetic oligonucleotide
gaatttagtacaaacgccgcaagaggccccgcaagaggctccgcaagaggctccgcag

SEQ ID NO: 268275 - DNA, 60 bp, Artificial
  Synthetic oligonucleotide
acgcagtacgcatttgattaacatctcttaacatagatattaatcttcgaaagtcttgca

SEQ ID NO: 268276 - DNA, 60 bp, Artificial
  Synthetic oligonucleotide
acgcacgtcgtacaggtgcatggtaccgttctaccttgccgatgctgttatgggcttcga

SEQ ID NO: 268277 - DNA, 52 bp, Artificial
  Synthetic oligonucleotide
ccatacctgttcaaagccaccgggggtacctaccggttgggtgacgcctcag

SEQ ID NO: 268278 - DNA, 60 bp, Artificial
  Synthetic oligonucleotide
ccatcctcagagaggatggcttaatctatcaaagtatcttaaaatatggacatggaaact

SEQ ID NO: 268279 - DNA, 54 bp, Artificial
  Synthetic oligonucleotide
acctgggcggaatgttggtgcttcgtccctacgggcgttggcgttgtcctcgta

SEQ ID NO: 268280 - DNA, 53 bp, Artificial
  Synthetic oligonucleotide
atcttaaactttagggtgtctccggaatttggcaatttatccccataaccaca

SEQ ID NO: 268281 - DNA, 60 bp, Artificial
  Synthetic oligonucleotide
atgaacgatgcctcctcaatggatcccactctccggccggcgagtcaatcctcgataacc

SEQ ID NO: 268282 - DNA, 60 bp, Artificial
  Synthetic oligonucleotide
atgactgatattatatagtcataggtaaaggcgcgttgcagctatatcatttcgtgctaa

SEQ ID NO: 268283 - DNA, 57 bp, Artificial
  Synthetic oligonucleotide
atcgcctcccttcctttgtgcaaagtgtgcgaagggtaagggggcatcttagactca

SEQ ID NO: 268284 - DNA, 60 bp, Artificial
  Synthetic oligonucleotide
atatataacaagaaggagtcaccgtaccacaaccagctatggcctgtcaactaatcagta

SEQ ID NO: 268285 - DNA, 59 bp, Artificial
  Synthetic oligonucleotide
gtactgcccgtgtaggtcccggagtcgacacaccacagagttgtctactcttctcctga

SEQ ID NO: 268286 - DNA, 60 bp, Artificial
  Synthetic oligonucleotide
atataccaggacgtcatccagataagctgtgcagtaaacatccagtgcgtcatggagaag

SEQ ID NO: 268287 - DNA, 60 bp, Artificial
  Synthetic oligonucleotide
atagttaaagtaagaatctatgtgtgctgcgcaagctagcactagacccacacaaaaacc

SEQ ID NO: 268288 - DNA, 56 bp, Artificial
  Synthetic oligonucleotide
attccttcctggatattttacttataggagctatgttttacagacgctgaaggttg

SEQ ID NO: 268289 - DNA, 60 bp, Artificial
  Synthetic oligonucleotide
ataggagcaagggatatgtggatctggttgagaacgatgccttgatggctatgaacgatg

SEQ ID NO: 268290 - DNA, 54 bp, Artificial
  Synthetic oligonucleotide
attgttatacggttgggctcacaccccacgtatcaatgttaataggttaaggta

SEQ ID NO: 268291 - DNA, 57 bp, Artificial
  Synthetic oligonucleotide
atactttcatgtcgagggggaaccacctaatatgaatcttacctggccatcccgcca

SEQ ID NO: 268292 - DNA, 58 bp, Artificial
  Synthetic oligonucleotide
agttatccactgtgtgtagcttaacggattatcctacctctttacgatatcacactcg

SEQ ID NO: 268293 - DNA, 52 bp, Artificial
  Synthetic oligonucleotide
atttcttcaccgacgaataacagtcccggaacgccgcacccgtatcctaccg

SEQ ID NO: 268294 - DNA, 53 bp, Artificial
  Synthetic oligonucleotide
caaataacttcaattgagaacttgaaagcgaccgaagtgggggaaaggttcca

SEQ ID NO: 268295 - DNA, 56 bp, Artificial
  Synthetic oligonucleotide
agtcggttgcgtgttgcgaaagcgaagtccacgaaccccatacccgtacatcctga

SEQ ID NO: 268296 - DNA, 54 bp, Artificial
  Synthetic oligonucleotide
gtaacgcggcagcgtttacccctcaggaggtgcaacgagaaaagcttagtttag

SEQ ID NO: 268297 - DNA, 59 bp, Artificial
  Synthetic oligonucleotide
caacgatcagacgctaagtaccctacaccttgggtatatcagattaggtgacacgtata

SEQ ID NO: 268298 - DNA, 60 bp, Artificial
  Synthetic oligonucleotide
caactagcttaggagtggctggacttcgttatagctatagaggtgcaactcctctagctt

SEQ ID NO: 268299 - DNA, 57 bp, Artificial
  Synthetic oligonucleotide
caactggatggttacgtctccgtatcccctgacggctaatcgggagtctcctgccac

SEQ ID NO: 268300 - DNA, 60 bp, Artificial
  Synthetic oligonucleotide
agtacataacaaataagtctagaaccccatcatacatagagatatccttcagaatatgtt

SEQ ID NO: 268301 - DNA, 52 bp, Artificial
  Synthetic oligonucleotide
caataaaaaatatcccccctaatttattaggccgctggacgttgggctgccg

SEQ ID NO: 268302 - DNA, 57 bp, Artificial
  Synthetic oligonucleotide
caattaactcctagagttagaagtataattgtaggtatcttactttcagatggttga

SEQ ID NO: 268303 - DNA, 59 bp, Artificial
  Synthetic oligonucleotide
cacctcttgaggacgcgtagctccatgggtgacagtggccggttcttcgaatatgggac

SEQ ID NO: 268304 - DNA, 56 bp, Artificial
  Synthetic oligonucleotide
aggcgggttgggagagggaggataggtaggttggtatatgaggtggccggtgcaga

SEQ ID NO: 268305 - DNA, 55 bp, Artificial
  Synthetic oligonucleotide
cacgggaatcattcctcgttccttcggaggcaaagtggggtgggcgtgatatttg

SEQ ID NO: 268306 - DNA, 57 bp, Artificial
  Synthetic oligonucleotide
aggcacactaatagctaaaccccctcagatactttaaaagcgtctgagggagccaga

SEQ ID NO: 268307 - DNA, 55 bp, Artificial
  Synthetic oligonucleotide
gatacgaatcgtacggtggtccggactttcttcatggcaaggggatgcgtttccg

SEQ ID NO: 268308 - DNA, 51 bp, Artificial
  Synthetic oligonucleotide
ggtttagctaagctagtttaattaagccgaattaagcggggtagttgttta

SEQ ID NO: 268309 - DNA, 56 bp, Artificial
  Synthetic oligonucleotide
ccccgcaaagatagtaccgatagatgagaacgtaatatgatttcttaccgttgcct

SEQ ID NO: 268310 - DNA, 57 bp, Artificial
  Synthetic oligonucleotide
acaacggcttgtaaactgtgagccgtttgttgttgtgagctgctccgacgtttagcc

SEQ ID NO: 268311 - DNA, 60 bp, Artificial
  Synthetic oligonucleotide
acacgtcgcatatcccggggagccagcacactcaaatgaggtgctcttttacatgccctg

SEQ ID NO: 268312 - DNA, 60 bp, Artificial
  Synthetic oligonucleotide
acaacaatggcccattggctctctaatacaataccaaagtctcgagctgcgtctttgcaa

SEQ ID NO: 268313 - DNA, 55 bp, Artificial
  Synthetic oligonucleotide
acagtcggaccttataacgagtgtgatatcgtaaagaggtaggataatccgttaa

SEQ ID NO: 268314 - DNA, 57 bp, Artificial
  Synthetic oligonucleotide
aattactccgcttttatatattagtgcgaagcactacttagctaaacgtaatatata

SEQ ID NO: 268315 - DNA, 60 bp, Artificial
  Synthetic oligonucleotide
aacagcgtgccacccgcggaccagtcggatgcgtcaacttccaccactgctggcttctcc

SEQ ID NO: 268316 - DNA, 55 bp, Artificial
  Synthetic oligonucleotide
aacattgatacgtggggtgtgagcccaaccgtataacaattcacccttcgaaaga

SEQ ID NO: 268317 - DNA, 54 bp, Artificial
  Synthetic oligonucleotide
aaccagttaagttaaggaatctgacaaatatcacgcccaccccactttgcctcc

SEQ ID NO: 268318 - DNA, 57 bp, Artificial
  Synthetic oligonucleotide
aagtcgatcataccattaccgtactgtattaaccgttttgcatccattaatcctcaa

SEQ ID NO: 268319 - DNA, 60 bp, Artificial
  Synthetic oligonucleotide
ggtactgcatgagtagatgtcaaatcagcttaccaggcgaagtcgtcttggtcggacctg

SEQ ID NO: 268320 - DNA, 57 bp, Artificial
  Synthetic oligonucleotide
acagtctcctatttacccacataaaccagtaaaggtgtaccaagatgccagcgtatc

SEQ ID NO: 268321 - DNA, 60 bp, Artificial
  Synthetic oligonucleotide
aagggaatctgcattgctctttattgatcgcagcgcgagtggtcttctgtctaggagtac

SEQ ID NO: 268322 - DNA, 60 bp, Artificial
  Synthetic oligonucleotide
accctgaggctcgactccgctacgccccagccttcatatgcaatagtccgattaaagcta

SEQ ID NO: 268323 - DNA, 58 bp, Artificial
  Synthetic oligonucleotide
aagagccaggagggccacagcctcctgtaggctacccagaaatagttaactcttctga

SEQ ID NO: 268324 - DNA, 57 bp, Artificial
  Synthetic oligonucleotide
cccatttctagcaaaacgcatacaaatgcgttttgcgggattgagaaatccacccca

SEQ ID NO: 268325 - DNA, 58 bp, Artificial
  Synthetic oligonucleotide
attggccccgctgatagaccaagcgctggacacctttgggtttggtgctgatgggtcc

SEQ ID NO: 268326 - DNA, 59 bp, Artificial
  Synthetic oligonucleotide
gtgcggtagtcgaaggtatctccctgagtgaggctcgcaagggtcccataggagaggga

SEQ ID NO: 268327 - DNA, 58 bp, Artificial
  Synthetic oligonucleotide
agccaacaacctcgtccgcttggcctcgaggccttcacgtggctgctcgggaacacta

SEQ ID NO: 268328 - DNA, 54 bp, Artificial
  Synthetic oligonucleotide
gcgttacttgtataaggagttcgtctccgtcggggtgggcacgtttcgtagtga

SEQ ID NO: 268329 - DNA, 59 bp, Artificial
  Synthetic oligonucleotide
gcccccaatttatagtgcatcctcgagataaaataaggctcgaccagatctattaatag

SEQ ID NO: 268330 - DNA, 56 bp, Artificial
  Synthetic oligonucleotide
ggtaccgtttccagacgaactgtccgccctcagtttcctaacagctgttgatccca

SEQ ID NO: 268331 - DNA, 58 bp, Artificial
  Synthetic oligonucleotide
ccgctcccagcttaagcgcagccccactttagtggtatcatccctataatatacctcc

SEQ ID NO: 268332 - DNA, 58 bp, Artificial
  Synthetic oligonucleotide
tagtcattcaaccatctgaaagtaagatacctacaattatacttctaactctaggagt

SEQ ID NO: 268333 - DNA, 59 bp, Artificial
  Synthetic oligonucleotide
gcagatgcaacccgccaatcagtagtcgacaccctcgctcaaggcctgaaaaccctagc

SEQ ID NO: 268334 - DNA, 55 bp, Artificial
  Synthetic oligonucleotide
ctccttcccatggtacttctccttggcgtgcggggggtgggtgtcggagactcga

SEQ ID NO: 268335 - DNA, 59 bp, Artificial
  Synthetic oligonucleotide
tcttcgatgtgctggatcgacgaaccgtagactgtgaggcacgtatgatgtatcttgcc

SEQ ID NO: 268336 - DNA, 58 bp, Artificial
  Synthetic oligonucleotide
gcataatggtaatgcaattgacttttaatcattcgaatattggtttgaatccgataga

SEQ ID NO: 268337 - DNA, 58 bp, Artificial
  Synthetic oligonucleotide
gccatttctgggcttctgctgtgactgatggtcgtttccagttcgtccagcgtgctga

SEQ ID NO: 268338 - DNA, 55 bp, Artificial
  Synthetic oligonucleotide
aagcgggaaaggccgggccaccagtaactccggttgagcaagtcgatagtcttga

SEQ ID NO: 268339 - DNA, 58 bp, Artificial
  Synthetic oligonucleotide
aagtgcacaggattgttggagatacataactatgcttcggagcccgttgtagtttgcc

SEQ ID NO: 268340 - DNA, 53 bp, Artificial
  Synthetic oligonucleotide
aggccggttgggagagggagggacttggtgcgagggcggtcttgaggcggtgg

SEQ ID NO: 268341 - DNA, 54 bp, Artificial
  Synthetic oligonucleotide
gggggggggtctgaacagaaacggccgttatctcgtggtcctcgcacctctcag

SEQ ID NO: 268342 - DNA, 57 bp, Artificial
  Synthetic oligonucleotide
ccccacgcacctcagtaagaggctaaacaccacgcaagcgcctaaggaagcagggcc

SEQ ID NO: 268343 - DNA, 58 bp, Artificial
  Synthetic oligonucleotide
ttcatcatacttctacctcgtatgatatacagccatcgtttaagcccagtaaatattg

SEQ ID NO: 268344 - DNA, 54 bp, Artificial
  Synthetic oligonucleotide
agcgtccgttggaaaggtctcggaaagaatggctgtggttaggaggggccagtg

SEQ ID NO: 268345 - DNA, 58 bp, Artificial
  Synthetic oligonucleotide
tccaagcgcacagcgaccattgccgtaaacgggttcacatctggacggcaagagctgc

SEQ ID NO: 268346 - DNA, 53 bp, Artificial
  Synthetic oligonucleotide
tagtgttacaaccgttaaaccctcagtgggtagcagggtttacaagtggagaa

SEQ ID NO: 268347 - DNA, 57 bp, Artificial
  Synthetic oligonucleotide
gggatcctacagttacggcagcccaggttagccgccacactgagacaacccgagtta

SEQ ID NO: 268348 - DNA, 55 bp, Artificial
  Synthetic oligonucleotide
aacgatcggttgtctcgcgtgcgtttcttgcctgaacgggtgcgtcctccccgcc

SEQ ID NO: 268349 - DNA, 57 bp, Artificial
  Synthetic oligonucleotide
gtaaaagagcgccaatcctttgccgcctaggcgccctctatccattagatccgtacc

SEQ ID NO: 268350 - DNA, 54 bp, Artificial
  Synthetic oligonucleotide
cctacccgccctcccatcgttaaatcaccacccacctttggaccagtctgtcgc

SEQ ID NO: 268351 - DNA, 56 bp, Artificial
  Synthetic oligonucleotide
cctaataaatcgcctgaagattgtaagaatttagctaacagtctcctatttaccca

SEQ ID NO: 268352 - DNA, 59 bp, Artificial
  Synthetic oligonucleotide
gggataaggtgtcgcatcttggttagtctgtccactactacaaggatgtgcctgtaggt

SEQ ID NO: 268353 - DNA, 55 bp, Artificial
  Synthetic oligonucleotide
agaacctccgagactccccgcgtgaacaagaagtcccgtaggcatattgctcccg

SEQ ID NO: 268354 - DNA, 57 bp, Artificial
  Synthetic oligonucleotide
acggaggaaaccaagaagttactatctgaattagctaagaatagagtgcattctgat

SEQ ID NO: 268355 - DNA, 54 bp, Artificial
  Synthetic oligonucleotide
ggtaacggctcttcagggtgacgttgttgataccccggtagtcgacgcaaattc

SEQ ID NO: 268356 - DNA, 57 bp, Artificial
  Synthetic oligonucleotide
cagatgtggatagatccacatggtcatagtgtaactatatatcgtgtactctagggt

SEQ ID NO: 268357 - DNA, 57 bp, Artificial
  Synthetic oligonucleotide
agtgtctctgcgttctttggcaggaaatgctccacatggtggtgaaactccgccggt

SEQ ID NO: 268358 - DNA, 57 bp, Artificial
  Synthetic oligonucleotide
cggtaaatgtaagatctaatattgctactccaagatgtgattttatcgttcaagatg

SEQ ID NO: 268359 - DNA, 57 bp, Artificial
  Synthetic oligonucleotide
tggcttctcccagtcgtaaattcgtaacgcgggcgctgtgacgaagcatcgcttcag

SEQ ID NO: 268360 - DNA, 57 bp, Artificial
  Synthetic oligonucleotide
ttggttgaattgttacttgtttgatgacgttagtgccaaaccactgtgattgaacaa

SEQ ID NO: 268361 - DNA, 52 bp, Artificial
  Synthetic oligonucleotide
gctataactacccctcgcggatcggggtttttcagctttaacccagcccgcg

SEQ ID NO: 268362 - DNA, 56 bp, Artificial
  Synthetic oligonucleotide
gagagattctgaatcttaactgaactctacgacccaatttactattagtagatggc

SEQ ID NO: 268363 - DNA, 60 bp, Artificial
  Synthetic oligonucleotide
ggctgagatgttatacaccaataccgttgcatgtctgcggcgctatggacggctaacatc

SEQ ID NO: 268364 - DNA, 56 bp, Artificial
  Synthetic oligonucleotide
cccctctgcggcactcttctccatgacctcaacccaacgcttgcaatcacccaaca

SEQ ID NO: 268365 - DNA, 52 bp, Artificial
  Synthetic oligonucleotide
cgcggggtcgcttgtcctttacccaattaggcggcccgggcttctctgggta

SEQ ID NO: 268366 - DNA, 56 bp, Artificial
  Synthetic oligonucleotide
ccttgggtatatcagattaggtgacacgtataaccatcctgacttcgtaggccgca

SEQ ID NO: 268367 - DNA, 55 bp, Artificial
  Synthetic oligonucleotide
ggttaatatatagtccacagtaatgtaatcttactttcttccctcgaatgttggg

SEQ ID NO: 268368 - DNA, 56 bp, Artificial
  Synthetic oligonucleotide
gagttaccatctgtatctgctcaagactctgatcacgtctactacccagatcatct

SEQ ID NO: 268369 - DNA, 56 bp, Artificial
  Synthetic oligonucleotide
tgcactaactcggtgcagttctattataggggaagacaccaaggttgcaacgaaac

SEQ ID NO: 268370 - DNA, 56 bp, Artificial
  Synthetic oligonucleotide
tatggtcgtctacgtgacggagggcagcgaagcgaggcgacttctagacgggcgtt

SEQ ID NO: 268371 - DNA, 55 bp, Artificial
  Synthetic oligonucleotide
cgagaaataacgattttatagtaacaaagatcgacaatagaatcaactccgtcgg

SEQ ID NO: 268372 - DNA, 55 bp, Artificial
  Synthetic oligonucleotide
aactctcaccagcttagcgatcctaccggtaagcgaccgccgccttctgccgtca

SEQ ID NO: 268373 - DNA, 55 bp, Artificial
  Synthetic oligonucleotide
ggcgtttgggtatgacttctatgaccctctggatcgcgtatccgttgatgaggtt

SEQ ID NO: 268374 - DNA, 59 bp, Artificial
  Synthetic oligonucleotide
ggctcttgcaaaagacttaatgcgacaggcaactatctttcgaagggtgaattgttata

SEQ ID NO: 268375 - DNA, 55 bp, Artificial
  Synthetic oligonucleotide
agttatagattactaggggaattctctagatatattaacgtttatctagagtacc

SEQ ID NO: 268376 - DNA, 53 bp, Artificial
  Synthetic oligonucleotide
ggcggagcctttcctggtttcggtagtactacagtcttcgccctcttgaaacg

SEQ ID NO: 268377 - DNA, 55 bp, Artificial
  Synthetic oligonucleotide
tttgatccggatgtagttagcgtgctaaggccctataggcccagtgcctccgggc

SEQ ID NO: 268378 - DNA, 55 bp, Artificial
  Synthetic oligonucleotide
aaactcggcgtgagcgatgcgtgcttgagacgtggcgccctgtctcgtacgggac

SEQ ID NO: 268379 - DNA, 55 bp, Artificial
  Synthetic oligonucleotide
gggatgatgacgagtcgatcagaaggttctgactcaccatgcactgcttcgtgcg

SEQ ID NO: 268380 - DNA, 55 bp, Artificial
  Synthetic oligonucleotide
ggctagtagagacttctcgctcaaaggcatcacattctacaccaaagagtagtgc

SEQ ID NO: 268381 - DNA, 55 bp, Artificial
  Synthetic oligonucleotide
atactcactagccgccggagaaaatcatgtatgaagtagtgttgttggtgtccgt

SEQ ID NO: 268382 - DNA, 54 bp, Artificial
  Synthetic oligonucleotide
atctagtaaatacgttaattatttaaagtgaagaaaagcttatataataattca

SEQ ID NO: 268383 - DNA, 55 bp, Artificial
  Synthetic oligonucleotide
ggtagcgggttacaaggtagtcgacgaataagtagttatttcagtccatctgttc

SEQ ID NO: 268384 - DNA, 50 bp, Artificial
  Synthetic oligonucleotide
gggaactggaaccggaactcaccccggaactcacccggttccgtaactga

SEQ ID NO: 268385 - DNA, 58 bp, Artificial
  Synthetic oligonucleotide
ggctcttcagggtgacgttgttgataccccggtagtcgacgcaaattctgatgccgcc

SEQ ID NO: 268386 - DNA, 55 bp, Artificial
  Synthetic oligonucleotide
gggcaacaccgggctagaaatggacgattggaatcttgacagtgccttgctaaag

SEQ ID NO: 268387 - DNA, 55 bp, Artificial
  Synthetic oligonucleotide
ggctatcgacgaggtcggctagaccatagtgcatgcccttggccagttgcgaacc

SEQ ID NO: 268388 - DNA, 55 bp, Artificial
  Synthetic oligonucleotide
gggttcatcggacgcgtttgctcatatagactggcggcttaatatcttggaaagg

SEQ ID NO: 268389 - DNA, 55 bp, Artificial
  Synthetic oligonucleotide
gggcacaatgttagatcgcacaaactgtcacggggcgaggtcaggggagtcgcgg

SEQ ID NO: 268390 - DNA, 55 bp, Artificial
  Synthetic oligonucleotide
tttaacacgtcgctagacgataagatctatgaatacttttatcgagtagaatccc

SEQ ID NO: 268391 - DNA, 55 bp, Artificial
  Synthetic oligonucleotide
gggaaccacctaatatgaatcttacctggccatcccgccaaaattttcgtggcac

SEQ ID NO: 268392 - DNA, 55 bp, Artificial
  Synthetic oligonucleotide
ggggagcttaatcctttatacggtaaatctcatagtgaagagactaaagagctaa

SEQ ID NO: 268393 - DNA, 53 bp, Artificial
  Synthetic oligonucleotide
ggggacggaaacacttgcagttgcggtctttcctaacgggaggagactgggga

SEQ ID NO: 268394 - DNA, 55 bp, Artificial
  Synthetic oligonucleotide
aatttctagaccacgtgtgcgaggcttcgattgcaacataagcctcaaggggggt

SEQ ID NO: 268395 - DNA, 55 bp, Artificial
  Synthetic oligonucleotide
tgcgacaggcaactatctttcgaaggctgaattgttatacggttgggctcacacc

SEQ ID NO: 268396 - DNA, 57 bp, Artificial
  Synthetic oligonucleotide
ggctatagctcaatacccattcgttgtctgtaacgttgtcgcgtgttgggttggtct

SEQ ID NO: 268397 - DNA, 55 bp, Artificial
  Synthetic oligonucleotide
agaccactaggtgacgataaatttggccattatttggccggcttaatagacgcca

SEQ ID NO: 268398 - DNA, 55 bp, Artificial
  Synthetic oligonucleotide
agaagttgagtggatgcgctagctacaaaataaggctgtgagagtaggcagggcc

SEQ ID NO: 268399 - DNA, 55 bp, Artificial
  Synthetic oligonucleotide
tgcctgccacaggtataggagcagatttattcaaaggttcagatgaagctgcttc

SEQ ID NO: 268400 - DNA, 55 bp, Artificial
  Synthetic oligonucleotide
agaaatcttttacgtaagtcaatagattgtcctacgtagatatctccagtgagtt

SEQ ID NO: 268401 - DNA, 55 bp, Artificial
  Synthetic oligonucleotide
actggtccaatcaggcaatcaagtatggttgttgtccgcgcttgttccgcgtccg

SEQ ID NO: 268402 - DNA, 55 bp, Artificial
  Synthetic oligonucleotide
actcctcaaacaattccactgtcttgaacggaatcgtgcccctgttgtagttcca

SEQ ID NO: 268403 - DNA, 53 bp, Artificial
  Synthetic oligonucleotide
actaataaagcggggcaggggctcaattcttacgaaacttaagtggagcgtac

SEQ ID NO: 268404 - DNA, 55 bp, Artificial
  Synthetic oligonucleotide
tcgcaagaactcgaactacaattcgcctgtcaccgatctttcgtccaacgacctg

SEQ ID NO: 268405 - DNA, 55 bp, Artificial
  Synthetic oligonucleotide
acggcggctaattcggatcgtgtccatgatagtcgcagggtcgcggtcgttcgca

SEQ ID NO: 268406 - DNA, 55 bp, Artificial
  Synthetic oligonucleotide
acggccgttatctcgtggtcctcgcacctctcagtggtgggaccaatgcggcatc

SEQ ID NO: 268407 - DNA, 59 bp, Artificial
  Synthetic oligonucleotide
ggcgacgagtaggtaatccgccggttcgacactgagtatacatgattgtgagcccaaac

SEQ ID NO: 268408 - DNA, 55 bp, Artificial
  Synthetic oligonucleotide
acgcggaatcacgtgagggagcggcaacacgactctccgttgcatcaatcagggg

SEQ ID NO: 268409 - DNA, 55 bp, Artificial
  Synthetic oligonucleotide
tctaagccgtagagtgactgctctcgaatgcaagagcggttgggtactagctcga

SEQ ID NO: 268410 - DNA, 55 bp, Artificial
  Synthetic oligonucleotide
tctatcatactgtacctatcttagttaagtagtactcagtgaaggctgtgatagg

SEQ ID NO: 268411 - DNA, 55 bp, Artificial
  Synthetic oligonucleotide
tgaccttccgcgtggtccccaactggatggttacgtctccgtatcccctgacggc

SEQ ID NO: 268412 - DNA, 55 bp, Artificial
  Synthetic oligonucleotide
acatgctgcttcagatttacgcgagcgcaaggtgtgtccattggaccctaggcat

SEQ ID NO: 268413 - DNA, 55 bp, Artificial
  Synthetic oligonucleotide
accagagttctagtccactgttcccgagccctgggaaccataccttacaatgttc

SEQ ID NO: 268414 - DNA, 55 bp, Artificial
  Synthetic oligonucleotide
tcttgtcatagtccacccggtatgcatcgcgaagcatccaaaggaaggttggcac

SEQ ID NO: 268415 - DNA, 55 bp, Artificial
  Synthetic oligonucleotide
agtcatcacaactggacgaagcttataccaacgacaagacgagaaaccacgtggt

SEQ ID NO: 268416 - DNA, 55 bp, Artificial
  Synthetic oligonucleotide
gtcataggtaaaggcgcgttgcagctatatcatttcgtgctaacctcgggaatgg

SEQ ID NO: 268417 - DNA, 55 bp, Artificial
  Synthetic oligonucleotide
gtcccgatcgaagcccataacagcatcggcaaggtagaacggtaccatgcacctg

SEQ ID NO: 268418 - DNA, 55 bp, Artificial
  Synthetic oligonucleotide
gcgtcgccgtgtaagtcctcgtcgtatttgacaaattcgaagacgcctcgggtaa

SEQ ID NO: 268419 - DNA, 60 bp, Artificial
  Synthetic oligonucleotide
ggcgaatcctgtactgcgtgtccaggtagatccagagtccgtcaaaggcttccacaagtg

SEQ ID NO: 268420 - DNA, 55 bp, Artificial
  Synthetic oligonucleotide
ttagtgcgaagcactacttagctaaacgtaatatataacaagaaggagtcaccgt

SEQ ID NO: 268421 - DNA, 55 bp, Artificial
  Synthetic oligonucleotide
ttacccacataaaccagtaaaggtgtaccaagatgccagcgtatctaaacctgag

SEQ ID NO: 268422 - DNA, 52 bp, Artificial
  Synthetic oligonucleotide
gtccgtttgccgtcgtcgcttgggctaggcgggtttggagttcggttttctc

SEQ ID NO: 268423 - DNA, 52 bp, Artificial
  Synthetic oligonucleotide
aggtccagtgaacgaagcctaagggcggtgagcccgggtcgaaacgggcctc

SEQ ID NO: 268424 - DNA, 54 bp, Artificial
  Synthetic oligonucleotide
gtctccggaatttggcaatttatccccataaccacattttcccgtaatatggcc

SEQ ID NO: 268425 - DNA, 55 bp, Artificial
  Synthetic oligonucleotide
gtgaacccgtttacggcaatggtctcaactgtgctgactgtccctgcgcctctct

SEQ ID NO: 268426 - DNA, 55 bp, Artificial
  Synthetic oligonucleotide
gtggatctggttgagaacgatgccttgatggctatgaacgatgcctcctcaatgg

SEQ ID NO: 268427 - DNA, 55 bp, Artificial
  Synthetic oligonucleotide
gtgttcccgatgcctgtaagcaggcggcgacccggaccagtcgtgaaaggtacca

SEQ ID NO: 268428 - DNA, 55 bp, Artificial
  Synthetic oligonucleotide
tgttctcagacgagtgttcctgtcagaataacacttcaaatccgactagctgggt

SEQ ID NO: 268429 - DNA, 55 bp, Artificial
  Synthetic oligonucleotide
tgtagaacttggcgttgcagagagagtcgagggtttcccggatgagtggcaacgg

SEQ ID NO: 268430 - DNA, 56 bp, Artificial
  Synthetic oligonucleotide
ggataatttcaaattaagaactaattcagacaataactcagataaagttaaagcta

SEQ ID NO: 268431 - DNA, 55 bp, Artificial
  Synthetic oligonucleotide
tgtaactaggaatcggcaatcgttgtctaggaccaaccaccaacccctattcatc

SEQ ID NO: 268432 - DNA, 54 bp, Artificial
  Synthetic oligonucleotide
aatccacttttcgagagcaagggccccgatcgagaagaccctaacgatcgaggg

SEQ ID NO: 268433 - DNA, 55 bp, Artificial
  Synthetic oligonucleotide
agcttgtagcgaactgtagctgtgattgctaactggagaactcccagagctctcc

SEQ ID NO: 268434 - DNA, 55 bp, Artificial
  Synthetic oligonucleotide
agcgtgtctctcgcggggcctacagtcaacgctctgcaccactcggctgtcctct

SEQ ID NO: 268435 - DNA, 54 bp, Artificial
  Synthetic oligonucleotide
gtttaacaatttacgaaggccgacgtagttcaactagcttaggagtggctggac

SEQ ID NO: 268436 - DNA, 55 bp, Artificial
  Synthetic oligonucleotide
gtttgtaaagttagatcgtctgtacttaagcctaatctaccaatatgttctgaag

SEQ ID NO: 268437 - DNA, 55 bp, Artificial
  Synthetic oligonucleotide
agatagaccagagttctagtccactgttcccgagccctgggaaccataccttaca

SEQ ID NO: 268438 - DNA, 54 bp, Artificial
  Synthetic oligonucleotide
tacggtaaggcaggattcactcccgagacacttggccccgagggcccgccgtaa

SEQ ID NO: 268439 - DNA, 55 bp, Artificial
  Synthetic oligonucleotide
cgtgacaagctcccgggtcgtgtcgggcacaagcaagcgagatgttggttgaccg

SEQ ID NO: 268440 - DNA, 55 bp, Artificial
  Synthetic oligonucleotide
cgcaaggagaccaagttgcactgaatgctagggatgaatgccacgtctcgaagtc

SEQ ID NO: 268441 - DNA, 52 bp, Artificial
  Synthetic oligonucleotide
ggagtcagaacctccgggactccccgtgtaaacaagaagtcccgtaagccta

SEQ ID NO: 268442 - DNA, 55 bp, Artificial
  Synthetic oligonucleotide
cagtgtaattgcaccttacgtaagcgaagccacattgaattgatccacggaaggc

SEQ ID NO: 268443 - DNA, 55 bp, Artificial
  Synthetic oligonucleotide
ccagtgctcttgcactggtaaaagagcaacgagtggatggtagttgcagttttct

SEQ ID NO: 268444 - DNA, 55 bp, Artificial
  Synthetic oligonucleotide
cagtcccggaacgccgcacccgtatcctaccgtcatgttgtgagacacatccact

SEQ ID NO: 268445 - DNA, 55 bp, Artificial
  Synthetic oligonucleotide
caggttgatgtaccactgggagatcgagtcatctgctttgcagcaggtccgtcga

SEQ ID NO: 268446 - DNA, 55 bp, Artificial
  Synthetic oligonucleotide
cgtacagtcttgcagtctccaggttcaggggtaagaacgtgagtcccctgtcctg

SEQ ID NO: 268447 - DNA, 55 bp, Artificial
  Synthetic oligonucleotide
cttcttgagtgcttcgtcgtcgttcaacgcgtcgacaaagtcgtggaattccgct

SEQ ID NO: 268448 - DNA, 55 bp, Artificial
  Synthetic oligonucleotide
cagagctctccagaacgagtgactatatactatctaggcttcctaggtaccggcg

SEQ ID NO: 268449 - DNA, 54 bp, Artificial
  Synthetic oligonucleotide
cgcaatataacggtaccgtttccagacgaactgtccgccctcagtttcctaaca

SEQ ID NO: 268450 - DNA, 55 bp, Artificial
  Synthetic oligonucleotide
ctttcggagagcttgtgccacgggttcggggtagcgcgtgaactggcggctatag

SEQ ID NO: 268451 - DNA, 55 bp, Artificial
  Synthetic oligonucleotide
cacgtcgcattcctctaactcccctgtggagtgactccaacgcgtcgggtcatct

SEQ ID NO: 268452 - DNA, 57 bp, Artificial
  Synthetic oligonucleotide
ggagtacaagttagcccagtttttcagttaactcaacataaacgtgatgaattgcta

SEQ ID NO: 268453 - DNA, 55 bp, Artificial
  Synthetic oligonucleotide
gaacttgacacggaacttggcattagaataacggatagggaatttcagatgacgg

SEQ ID NO: 268454 - DNA, 55 bp, Artificial
  Synthetic oligonucleotide
gaaggtagagacgtcagtgtttccatacgttactcataaaggttacagtcacggt

SEQ ID NO: 268455 - DNA, 55 bp, Artificial
  Synthetic oligonucleotide
gaagttataatatcttcctcactgagtttgtagttaacgaggactgcggccaggt

SEQ ID NO: 268456 - DNA, 55 bp, Artificial
  Synthetic oligonucleotide
cacgtcgacatagtgcaggccaacatgtacgttcggacgctgcgcccactgtcga

SEQ ID NO: 268457 - DNA, 55 bp, Artificial
  Synthetic oligonucleotide
ccctctagccaccgaaggaggcgtctcgcagttccgctggtcttccatcttccac

SEQ ID NO: 268458 - DNA, 55 bp, Artificial
  Synthetic oligonucleotide
cacgaaattatcgaaggattccgagtcgaccggtcgcgggagtctatttctagcg

SEQ ID NO: 268459 - DNA, 55 bp, Artificial
  Synthetic oligonucleotide
gacatgggttgtgtgttccttccgggtccgactatataccaggacgtcatccaga

SEQ ID NO: 268460 - DNA, 55 bp, Artificial
  Synthetic oligonucleotide
gacggtatgatattccccacgcgacagcctctggaacgttcttgatggatcggaa

SEQ ID NO: 268461 - DNA, 55 bp, Artificial
  Synthetic oligonucleotide
cggggtcgtcatagcgaaagccgtcgagtagtgtcagtcgaaccgtctgcagcat

SEQ ID NO: 268462 - DNA, 55 bp, Artificial
  Synthetic oligonucleotide
cgaatccagtgtctcccggatcagcggaatggggtaacggctcttcagggtgacg

SEQ ID NO: 268463 - DNA, 54 bp, Artificial
  Synthetic oligonucleotide
ggagggaatatacataggtagcgggttacaaggtagtcgacgaataagtagtta

SEQ ID NO: 268464 - DNA, 55 bp, Artificial
  Synthetic oligonucleotide
ccactcccatcctcggcgcttgcaccgcacatttatcttaccctggcagctcgca

SEQ ID NO: 268465 - DNA, 55 bp, Artificial
  Synthetic oligonucleotide
cgaaagcgaagtccacgaaccccatacccgtacatcctgaatcgaccaaggccac

SEQ ID NO: 268466 - DNA, 53 bp, Artificial
  Synthetic oligonucleotide
ccttttcctctatattgaacttcggaacccactgttctagcaggtccgggtcc

SEQ ID NO: 268467 - DNA, 55 bp, Artificial
  Synthetic oligonucleotide
cctacaaagacacctacaatacatatagtaccataccacgggcaatcctccgtac

SEQ ID NO: 268468 - DNA, 55 bp, Artificial
  Synthetic oligonucleotide
ctagccgaacagccatctccgtggagcggtgtgccctgttccccatttgttcgtc

SEQ ID NO: 268469 - DNA, 55 bp, Artificial
  Synthetic oligonucleotide
cctaatctaccaacatattctgaaggatatctctatgtatgatggggttctagac

SEQ ID NO: 268470 - DNA, 54 bp, Artificial
  Synthetic oligonucleotide
cctaagcacccttgagagattacctttaaccgaagctgaaccctaacaggacag

SEQ ID NO: 268471 - DNA, 53 bp, Artificial
  Synthetic oligonucleotide
cgttggcttaaaccaggttggggcttgttgggacagaaagaaacactcctcga

SEQ ID NO: 268472 - DNA, 55 bp, Artificial
  Synthetic oligonucleotide
ctcagtctttgcggccaagcacgatactgagtcggggaagcgattgagtgcgggg

SEQ ID NO: 268473 - DNA, 55 bp, Artificial
  Synthetic oligonucleotide
cgttgcccggacaacttctgtaggccatacacttcgtaatttgtttaggtctgag

SEQ ID NO: 268474 - DNA, 59 bp, Artificial
  Synthetic oligonucleotide
gcgttggattatccatttgtaccgcaggtcaatgtgataagttctggcggtgttaagag

SEQ ID NO: 268475 - DNA, 55 bp, Artificial
  Synthetic oligonucleotide
ccagaacgagtgactatatactatctgagcccataggtacctctcgtgcctgtgc

SEQ ID NO: 268476 - DNA, 55 bp, Artificial
  Synthetic oligonucleotide
ccgtagtgtttcagtgcgggctgtctcgtcgaggtttgtctgtaggaagtcgtgg

SEQ ID NO: 268477 - DNA, 54 bp, Artificial
  Synthetic oligonucleotide
cgtggcccaggagaggttcggcaaacgaccactcaagggccggaaagcctattc

SEQ ID NO: 268478 - DNA, 55 bp, Artificial
  Synthetic oligonucleotide
ctcgttctggagagctctgggagttctccggttagcaatcacagctacagttcgc

SEQ ID NO: 268479 - DNA, 54 bp, Artificial
  Synthetic oligonucleotide
ccggaataattcaggaacatcttcctggttgctttggacgtggagagggccccg

SEQ ID NO: 268480 - DNA, 55 bp, Artificial
  Synthetic oligonucleotide
cataccatatattcgttaacgtggattcttccctcggtggcctacggacgcagag

SEQ ID NO: 268481 - DNA, 55 bp, Artificial
  Synthetic oligonucleotide
ctgaagcccctagatgacgatatagcttactggagactcaagaatgccgcgtcat

SEQ ID NO: 268482 - DNA, 55 bp, Artificial
  Synthetic oligonucleotide
ctgagctaactatgaggctattcccagcttgcacgcgtggactatctacgacgaa

SEQ ID NO: 268483 - DNA, 55 bp, Artificial
  Synthetic oligonucleotide
ccgcggaccagtcggatgcgtcaacttccaccactgctggcttctcccagtcgta

SEQ ID NO: 268484 - DNA, 55 bp, Artificial
  Synthetic oligonucleotide
cgtgctgcggtgaggtctgccgacggcactggaatctgctcgacctctatatcgc

SEQ ID NO: 268485 - DNA, 60 bp, Artificial
  Synthetic oligonucleotide
gcgtgatgactaagaacacaaagaactggccagaacctgacaggaatatttgttagcgct

SEQ ID NO: 268486 - DNA, 55 bp, Artificial
  Synthetic oligonucleotide
ccgaggtaagggactcatcgggatggtcttacaccagcccctgttacgagctgcc

SEQ ID NO: 268487 - DNA, 55 bp, Artificial
  Synthetic oligonucleotide
ctgcgtgtccaggtagatccagagtccgtcaaaggcttccacaagtgtcttcccc

SEQ ID NO: 268488 - DNA, 55 bp, Artificial
  Synthetic oligonucleotide
cccgtctcccattcgcatcatacatccaagtggtagttatgactcacttacctcg

SEQ ID NO: 268489 - DNA, 55 bp, Artificial
  Synthetic oligonucleotide
attgagatcccgctgtaaatctcaaacgggaataggcatataagccgcaagtacc

SEQ ID NO: 268490 - DNA, 55 bp, Artificial
  Synthetic oligonucleotide
cccaacgcgaagtcaatctccgctggtatccacagaaagttgaccgagttccctc

SEQ ID NO: 268491 - DNA, 55 bp, Artificial
  Synthetic oligonucleotide
attaaagctagtgcataacctacatgaagggaccataccctgtaacacgtcatgg

SEQ ID NO: 268492 - DNA, 55 bp, Artificial
  Synthetic oligonucleotide
cgccgggacgaccgctgatgagatctagtgctggcgcaacctgttgaactgcagg

SEQ ID NO: 268493 - DNA, 55 bp, Artificial
  Synthetic oligonucleotide
gctctccagaacgggtgactgtatactatctaggcttcctaggtaccggcgtacc

SEQ ID NO: 268494 - DNA, 55 bp, Artificial
  Synthetic oligonucleotide
gctctctagcagtggacaacctcatacgtagagctaacatataacgggctagtgt

SEQ ID NO: 268495 - DNA, 55 bp, Artificial
  Synthetic oligonucleotide
gctgggatacatgcgcggtctgcttcaatgttggttgaattgttacttgtttgat

SEQ ID NO: 268496 - DNA, 58 bp, Artificial
  Synthetic oligonucleotide
ctactatgttgagagattctgaatcttaactgaactctacgacccaatttactattag

SEQ ID NO: 268497 - DNA, 55 bp, Artificial
  Synthetic oligonucleotide
gcttaacatggaccccacactgtaactcgcatggagcacaaatgcgcacaaccta

SEQ ID NO: 268498 - DNA, 55 bp, Artificial
  Synthetic oligonucleotide
gcttcgtccctacgggcgttggcgttgtcctcgtaccgttgctgggattgtctgg

SEQ ID NO: 268499 - DNA, 55 bp, Artificial
  Synthetic oligonucleotide
ggaacttggcattagaataacggatagggaatttcagatgacggctgctctgtcc

SEQ ID NO: 268500 - DNA, 55 bp, Artificial
  Synthetic oligonucleotide
ggaatcacagatccttgagagcgggcgggagcagttagacgacgaagcgcgtgcc

SEQ ID NO: 268501 - DNA, 55 bp, Artificial
  Synthetic oligonucleotide
cgccgcgaaaggatccgtcatatcctcgccatactggtgatacgcctgccaaggc

SEQ ID NO: 268502 - DNA, 55 bp, Artificial
  Synthetic oligonucleotide
ggaattcgggtaggagaggggaggtgcgccattcatgagagacttcaaccccgga

SEQ ID NO: 268503 - DNA, 55 bp, Artificial
  Synthetic oligonucleotide
ggacagcggacgaaaagattgtggtggacgccgttaacatgccgcctaagatccc

SEQ ID NO: 268504 - DNA, 55 bp, Artificial
  Synthetic oligonucleotide
atggtgccaacatcttacatgcatatccgtcacacaactgggagcctgtgagtcg

SEQ ID NO: 268505 - DNA, 52 bp, Artificial
  Synthetic oligonucleotide
ccccggggtctgatacaccggcggagcctttcctggtttcggtagtactaca

SEQ ID NO: 268506 - DNA, 54 bp, Artificial
  Synthetic oligonucleotide
cccctaatttattaggccgctggacgttgggctgccggatacttatcttggagg

SEQ ID NO: 268507 - DNA, 58 bp, Artificial
  Synthetic oligonucleotide
ctaattacttgcttaacagttgattactactagccgcagctaacattacgtactacgc

SEQ ID NO: 268508 - DNA, 55 bp, Artificial
  Synthetic oligonucleotide
ggcatacactctgtaaggatccgatgctcagtacagaatttgtcgaatgcaggcg

SEQ ID NO: 268509 - DNA, 55 bp, Artificial
  Synthetic oligonucleotide
cgcccacccacagttgaagcatcgtgtcgaactcaatccatgtcgacagctcgcc

SEQ ID NO: 268510 - DNA, 55 bp, Artificial
  Synthetic oligonucleotide
cggagactcgagcaagggtcggtcggaaaggaggtacttcatcgacctgtggccc

SEQ ID NO: 268511 - DNA, 53 bp, Artificial
  Synthetic oligonucleotide
caagaacccaaggggagcgctttcgttacctccttgtttgttggatggctacg

SEQ ID NO: 268512 - DNA, 55 bp, Artificial
  Synthetic oligonucleotide
gaggaccgtcccagtgagacgaggttcctcttcaagaacgcgccctgggcggaaa

SEQ ID NO: 268513 - DNA, 55 bp, Artificial
  Synthetic oligonucleotide
gaggccatagcgaagcagtgtagtaacctggttgaaaccaacttaatcaaggacc

SEQ ID NO: 268514 - DNA, 55 bp, Artificial
  Synthetic oligonucleotide
caaccgcgattataagcgattgaattgacaatgcgctaagctattcgtaaagtag

SEQ ID NO: 268515 - DNA, 55 bp, Artificial
  Synthetic oligonucleotide
gattcactggtccaatcaggcaatcaagtatggttgttgtccgcgcttcttccgc

SEQ ID NO: 268516 - DNA, 55 bp, Artificial
  Synthetic oligonucleotide
cgcttaaggtcgtaagccgaagagagagcactcgctgctgtgagcgaatatgtcc

SEQ ID NO: 268517 - DNA, 55 bp, Artificial
  Synthetic oligonucleotide
caaatcagcttaccaggcgaagtcgtcttggtcggacctggtggagataccaaca

SEQ ID NO: 268518 - DNA, 53 bp, Artificial
  Synthetic oligonucleotide
ctaacgggaggagactggggatctaaagaacccgtcctctcttcccagttcta

SEQ ID NO: 268519 - DNA, 55 bp, Artificial
  Synthetic oligonucleotide
gccgtcgtcttgtggttggattcccaattgcttcaactgcgagcacccaccagga

SEQ ID NO: 268520 - DNA, 55 bp, Artificial
  Synthetic oligonucleotide
gccttacgcaaggcgggaaacacgatctcggtcgtctggatccaagcgggtacca

SEQ ID NO: 268521 - DNA, 55 bp, Artificial
  Synthetic oligonucleotide
gcgagtaccagcatcaatttgacggctaaggcaactgactcggcggcggctagcg

SEQ ID NO: 268522 - DNA, 55 bp, Artificial
  Synthetic oligonucleotide
cgctcttgtgttgtttaatctcggactgggcacgcgataaatgatctatactccg

SEQ ID NO: 268523 - DNA, 55 bp, Artificial
  Synthetic oligonucleotide
gcgaggacgaccaggtcttgtcgtgggacgagggccgtatctcgatgcagcagtt

SEQ ID NO: 268524 - DNA, 55 bp, Artificial
  Synthetic oligonucleotide
gcgagcatgcctctcgtggggtctacagtcaacactctggaccactcggctatcc

SEQ ID NO: 268525 - DNA, 53 bp, Artificial
  Synthetic oligonucleotide
gcgacatacgtacgtccgtttaacctctgttttaaggtaatagacacccacaa

SEQ ID NO: 268526 - DNA, 51 bp, Artificial
  Synthetic oligonucleotide
aagcgtcttagctatctaaaatgaaaggaagttcgttacaagttaaaaaaa

SEQ ID NO: 268527 - DNA, 54 bp, Artificial
  Synthetic oligonucleotide
cgcgaacaataccgcgagacacaaataccccactccacactattatggcccatc

SEQ ID NO: 268528 - DNA, 54 bp, Artificial
  Synthetic oligonucleotide
ccgcattcttgagtctccagtaagctatatcgtcatctaggggcttcagtaatc

SEQ ID NO: 268529 - DNA, 57 bp, Artificial
  Synthetic oligonucleotide
gcgtacgcgctcataaagagcaacatttcttaggtcacgtaggccttttttcgtaga

SEQ ID NO: 268530 - DNA, 60 bp, Artificial
  Synthetic oligonucleotide
cgtgtgtcttcttctgtgatcttcttgagtgcttcgtcgtcgttcaacgcgtcgacaaag

SEQ ID NO: 268531 - DNA, 54 bp, Artificial
  Synthetic oligonucleotide
cattattgtgtgtgatggggttaccagttggctatagcgggtgagcccatgggg

SEQ ID NO: 268532 - DNA, 54 bp, Artificial
  Synthetic oligonucleotide
agtcatccagtatatcgtacagggtgtcgtttacgtagttctggaacgtcgctg

SEQ ID NO: 268533 - DNA, 54 bp, Artificial
  Synthetic oligonucleotide
ccatcgtggtgcaaggcactgcgccctcggtcggtgggtatatgagaagggaga

SEQ ID NO: 268534 - DNA, 54 bp, Artificial
  Synthetic oligonucleotide
aacaagagatcgagagccttattacccgaggcgtcttcgaatttgtcaaatacg

SEQ ID NO: 268535 - DNA, 54 bp, Artificial
  Synthetic oligonucleotide
caaattactctgactcggtccgggtttcgggcctccttcacaaccgcagcgcaa

SEQ ID NO: 268536 - DNA, 54 bp, Artificial
  Synthetic oligonucleotide
gtggaaggttgcacagcttacttgtggcggatacccgagtaccttacattgcaa

SEQ ID NO: 268537 - DNA, 54 bp, Artificial
  Synthetic oligonucleotide
cgtggaccgctcggaccgatcgcctccctgcgagccagcactctcctccactgg

SEQ ID NO: 268538 - DNA, 54 bp, Artificial
  Synthetic oligonucleotide
ctactgatcttcgacaaggtctagaacttcaacacagcagggagtcagtctcgc

SEQ ID NO: 268539 - DNA, 54 bp, Artificial
  Synthetic oligonucleotide
aaagtacttcgtacaagtgacgagttactagcactgcgaactgcaacggggagt

SEQ ID NO: 268540 - DNA, 54 bp, Artificial
  Synthetic oligonucleotide
ctcttgccgtccagatgtgaacccgtttacggcaatggtcgctgtgcgcttgga

SEQ ID NO: 268541 - DNA, 60 bp, Artificial
  Synthetic oligonucleotide
cgtctgatgagacgcaaggagaccaagttgcactgaatgctagggatgaatgccacgtct

SEQ ID NO: 268542 - DNA, 53 bp, Artificial
  Synthetic oligonucleotide
tcagggctgaacctcccggtcgggccttccttcttgggggcgcttaggcggtg

SEQ ID NO: 268543 - DNA, 53 bp, Artificial
  Synthetic oligonucleotide
tatccgtgcgacatgcacgggatatgagttcgcggtgtgtgttgtggaggacg

SEQ ID NO: 268544 - DNA, 50 bp, Artificial
  Synthetic oligonucleotide
ggggtacctaccggttggggacgcctcagggctgaacctcccggtcgggc

SEQ ID NO: 268545 - DNA, 53 bp, Artificial
  Synthetic oligonucleotide
ggtaggctggtcggcagagggaggataggctaggtatggaatacgtgggtggc

SEQ ID NO: 268546 - DNA, 53 bp, Artificial
  Synthetic oligonucleotide
cttcgtcggacatgcctgtcaaggctttgcaggtcgcaaggtaaagcttgtat

SEQ ID NO: 268547 - DNA, 53 bp, Artificial
  Synthetic oligonucleotide
gattactgggccctcctagctttagcttgcttgcgttgcaaagcaataggggc

SEQ ID NO: 268548 - DNA, 53 bp, Artificial
  Synthetic oligonucleotide
aggtagtatatatagatttggtgaggataaaaataacctacagagttaaatcg

SEQ ID NO: 268549 - DNA, 52 bp, Artificial
  Synthetic oligonucleotide
aaacgacgtggtcttcttcgattgcagcatgactagcgcatgggcaagttcg

SEQ ID NO: 268550 - DNA, 52 bp, Artificial
  Synthetic oligonucleotide
atcataagctaatatcaccccgctcgttttatgtgactggtttacttaaata

SEQ ID NO: 268551 - DNA, 52 bp, Artificial
  Synthetic oligonucleotide
gctacagctgcatgcatatgatcaccattctctaacgctatggttacattag

SEQ ID NO: 268552 - DNA, 60 bp, Artificial
  Synthetic oligonucleotide
cgtcatgttgtgagacacatccactcccatcctcggcgcttgcaccgcacatttatctta

SEQ ID NO: 268553 - DNA, 52 bp, Artificial
  Synthetic oligonucleotide
cgcgctgaaatacaaattaggggcgagaagtagggcatttgacaaattcggg

SEQ ID NO: 268554 - DNA, 52 bp, Artificial
  Synthetic oligonucleotide
ggtccgggtccgttgtttcgggcacatattgaaccttgttgctaaggccttc

SEQ ID NO: 268555 - DNA, 52 bp, Artificial
  Synthetic oligonucleotide
agtctcttcactatgagatttaccgtataaaggattaagctccccctttcgg

SEQ ID NO: 268556 - DNA, 52 bp, Artificial
  Synthetic oligonucleotide
ttgcgatctcgtgtgcatgccattaacggcctattaaggacagggatggcag

SEQ ID NO: 268557 - DNA, 52 bp, Artificial
  Synthetic oligonucleotide
ctttggacgtggagagggccccggacagagatgatatgagatctgctggtgt

SEQ ID NO: 268558 - DNA, 52 bp, Artificial
  Synthetic oligonucleotide
cttgttgatgagcacctctcgaccgaactgtataacctcaagcgccggggac

SEQ ID NO: 268559 - DNA, 52 bp, Artificial
  Synthetic oligonucleotide
agatctaggtcccatgatcaataggtcccatcgaggtatatctcctatggtt

SEQ ID NO: 268560 - DNA, 52 bp, Artificial
  Synthetic oligonucleotide
agataatccgattcctacaaccatcattccaagttgactcatagtagaatac

SEQ ID NO: 268561 - DNA, 52 bp, Artificial
  Synthetic oligonucleotide
aaccacctcagcataggggtggaattaatctcctgttgctaagccttaaaca

SEQ ID NO: 268562 - DNA, 52 bp, Artificial
  Synthetic oligonucleotide
ccgtactgcctgaacgaaagggcgcttcagatctgcctccgtcaaccacaat

SEQ ID NO: 268563 - DNA, 54 bp, Artificial
  Synthetic oligonucleotide
cgtatagctttctgctataactacccctcgcggatcggggtttttcagctttaa

SEQ ID NO: 268564 - DNA, 52 bp, Artificial
  Synthetic oligonucleotide
cccagtaacctagtgaactcttccgccctgaaacacgggcggttggccttaa

SEQ ID NO: 268565 - DNA, 52 bp, Artificial
  Synthetic oligonucleotide
catggggcccgaagtagcagacttgccccacggcattggccctagtgtagct

SEQ ID NO: 268566 - DNA, 52 bp, Artificial
  Synthetic oligonucleotide
cattaacccataaacaccgttagtatattcactaactgcataagggaatact

SEQ ID NO: 268567 - DNA, 51 bp, Artificial
  Synthetic oligonucleotide
ttatcaaccacgggattgtgcacaagtaagcgagaacacgtacgtacgtgg

SEQ ID NO: 268568 - DNA, 51 bp, Artificial
  Synthetic oligonucleotide
cccatgtcctggtatacacgagccttcaccaagaccaatacacttgcattg

SEQ ID NO: 268569 - DNA, 51 bp, Artificial
  Synthetic oligonucleotide
cataattaaagggtgcttattgcccctatcgaaaacggataagtcggatct

SEQ ID NO: 268570 - DNA, 51 bp, Artificial
  Synthetic oligonucleotide
tactggatggaagcaagtaggtaccatagcgcgccaccctactcgatgaaa

SEQ ID NO: 268571 - DNA, 51 bp, Artificial
  Synthetic oligonucleotide
tagatactacagactcgagcctcaagaagtttctgaccctattcaatggtg

SEQ ID NO: 268572 - DNA, 51 bp, Artificial
  Synthetic oligonucleotide
ctggttaaaattcttagtagtgtctatttttcttgtagtattaaacactaa

SEQ ID NO: 268573 - DNA, 51 bp, Artificial
  Synthetic oligonucleotide
cattgaagaagccagggaagagcgattacactctagccaagtcctggagac

SEQ ID NO: 268574 - DNA, 56 bp, Artificial
  Synthetic oligonucleotide
cgtaaaatcaatacctagtaagattgagctctctaatacaatagttcagtttaacc

SEQ ID NO: 268575 - DNA, 51 bp, Artificial
  Synthetic oligonucleotide
tccgacgagaggatctctacgattcatcctcggaccgtcactccagtccag

SEQ ID NO: 268576 - DNA, 51 bp, Artificial
  Synthetic oligonucleotide
gtcagatcatccagtttcgcagactgagatcttcgggaggcttaattggat

SEQ ID NO: 268577 - DNA, 51 bp, Artificial
  Synthetic oligonucleotide
actcaatccatgtcgacagctcgccgttcgccaggtagagaggtttcttcc

SEQ ID NO: 268578 - DNA, 51 bp, Artificial
  Synthetic oligonucleotide
gcggacggcgttgttgggcttgttagtttggattctcacaaaacacgtaag

SEQ ID NO: 268579 - DNA, 51 bp, Artificial
  Synthetic oligonucleotide
gcggtcatggttgccccccaagttgattcttaggcaactcccctacctagg

SEQ ID NO: 268580 - DNA, 51 bp, Artificial
  Synthetic oligonucleotide
tcctatcagacactgctcaatcggcccggatcttcccttcacggagagggg

SEQ ID NO: 268581 - DNA, 51 bp, Artificial
  Synthetic oligonucleotide
gggaggtgggctttatttatagccagctagatttaaccgtacgttaatacg

SEQ ID NO: 268582 - DNA, 51 bp, Artificial
  Synthetic oligonucleotide
ccagcgttcgagtcgctgaggaattatgggtgttaaatgcttaatagtgat

SEQ ID NO: 268583 - DNA, 51 bp, Artificial
  Synthetic oligonucleotide
ccattaatcagaaagctaatcccctttccgttaacaattcttcaatgttat

SEQ ID NO: 268584 - DNA, 51 bp, Artificial
  Synthetic oligonucleotide
atcttcccttgccggttgggatcccgtcgatttgctagactttagtcggct

SEQ ID NO: 268585 - DNA, 52 bp, Artificial
  Synthetic oligonucleotide
cggaattgaaccgaatgcttcgtacctaactcaaggggggaatctctaacgg

SEQ ID NO: 268586 - DNA, 50 bp, Artificial
  Synthetic oligonucleotide
ttgggtgtgatataacattacccgaggcgtcccaatggttgttcgtccag

SEQ ID NO: 268587 - DNA, 50 bp, Artificial
  Synthetic oligonucleotide
gtagtgccgttaagaaatgtaaagagtataatacaagggatctatagcat

SEQ ID NO: 268588 - DNA, 50 bp, Artificial
  Synthetic oligonucleotide
atgcagctgactacaatctggttttggtatccctatttctttccgcgtct

SEQ ID NO: 268589 - DNA, 50 bp, Artificial
  Synthetic oligonucleotide
gacacctagacgcagtcgctacccttacttttacactaattcgccacagt

SEQ ID NO: 268590 - DNA, 50 bp, Artificial
  Synthetic oligonucleotide
tttcgttagttcggactggatttggtcacggtggagggtggtttctttcg

SEQ ID NO: 268591 - DNA, 50 bp, Artificial
  Synthetic oligonucleotide
ccctgggtgataatccaaccagaacgaagtgtaggaaaaccggcccctct

SEQ ID NO: 268592 - DNA, 50 bp, Artificial
  Synthetic oligonucleotide
tactactatagtccgtttaactattagccaaactgatttaatcaaattcg

SEQ ID NO: 268593 - DNA, 50 bp, Artificial
  Synthetic oligonucleotide
ggctaaatctgcgaggtgtttagcatttcctcgcggtgcgtagtacggtt

SEQ ID NO: 268594 - DNA, 50 bp, Artificial
  Synthetic oligonucleotide
tatatctccttgtattacccagtgataaggggatccgttgtagtagaggt

SEQ ID NO: 268595 - DNA, 50 bp, Artificial
  Synthetic oligonucleotide
catcgctcaacccaactagagataaccttaggttgagttgaatatggcct

SEQ ID NO: 268596 - DNA, 57 bp, Artificial
  Synthetic oligonucleotide
cgctcataaagagcaacatttcttaggtcacgtaggccttttttcgtagagattcga

SEQ ID NO: 268597 - DNA, 50 bp, Artificial
  Synthetic oligonucleotide
agaaattaaggccaggctgagcctggcaatgcttaataaaatccccgggt

SEQ ID NO: 268598 - DNA, 50 bp, Artificial
  Synthetic oligonucleotide
ctaggtaggtaatagattacacttggcccggatgatggaaggacacttcc

SEQ ID NO: 268599 - DNA, 50 bp, Artificial
  Synthetic oligonucleotide
cctagtgatcacggtgatgtgcctgtggcagatgctagccggtaacttct

SEQ ID NO: 268600 - DNA, 50 bp, Artificial
  Synthetic oligonucleotide
tgtactcaccaattgaatctgacattgtgccttagactcggttcccggac

SEQ ID NO: 268601 - DNA, 50 bp, Artificial
  Synthetic oligonucleotide
tcctacctctttacgatatcacactcgttataaggtccgactgtacatta

SEQ ID NO: 268602 - DNA, 50 bp, Artificial
  Synthetic oligonucleotide
aatagcgatgtctgctagcgctattaaaggtcgtcattcaatcgcagtct

SEQ ID NO: 268603 - DNA, 50 bp, Artificial
  Synthetic oligonucleotide
aatgtgacttagatatccgagagcaacattattttgatactcttaaccct

SEQ ID NO: 268604 - DNA, 50 bp, Artificial
  Synthetic oligonucleotide
acgctgtttgaagcgcccgaatctaggcaaacagtgtcccgagtgatctt

SEQ ID NO: 268605 - DNA, 50 bp, Artificial
  Synthetic oligonucleotide
tggacgctctaggctgatgatctaagttatacaatgactaggataacgag

SEQ ID NO: 268606 - DNA, 50 bp, Artificial
  Synthetic oligonucleotide
tcttgcttccactaggctggagattcatgaagggaggaggtgtctaaccc

SEQ ID NO: 268607 - DNA, 55 bp, Artificial
  Synthetic oligonucleotide
cgcgggggccaccacgcgcgttctaggagttttggcgagtttgttctcctctcac

SEQ ID NO: 268608 - DNA, 50 bp, Artificial
  Synthetic oligonucleotide
cgcccagggcgcgttcttgaagaggaacctcgtctcactgggacggtcct

SEQ ID NO: 268609 - DNA, 45 bp, Artificial
  Synthetic oligonucleotide
ctctgggactccccgtgtaaacagaaagtcccgtaggcctactgc

SEQ ID NO: 268610 - DNA, 60 bp, Artificial
  Synthetic oligonucleotide
cgccttgcagatcgaatccagtgtctcccggatcagcggaatggggtaacggctcttcag

SEQ ID NO: 268611 - DNA, 52 bp, Artificial
  Synthetic oligonucleotide
cgagggcccgccgtaatgccacgggtatgtttgtttccaagaccccgctagg

SEQ ID NO: 268612 - DNA, 60 bp, Artificial
  Synthetic oligonucleotide
gcgcttctcgacagggatcctacagttacggcagcccaggttagccgccacactgagaca

SEQ ID NO: 268613 - DNA, 56 bp, Artificial
  Synthetic oligonucleotide
cgaaagtaatgaacctaataaatcgcctgaagattgtaagaatttagctaacagtc

SEQ ID NO: 268614 - DNA, 55 bp, Artificial
  Synthetic oligonucleotide
cctcgttccttcggaggcaaagtggggtgggcgtgatatttgtcagattccttaa

SEQ ID NO: 268615 - DNA, 58 bp, Artificial
  Synthetic oligonucleotide
ccgattaatgtgaaaggtccttcccatcggcggcttttctcgcgccacactctcacac

SEQ ID NO: 268616 - DNA, 55 bp, Artificial
  Synthetic oligonucleotide
ccctaaaattagtgatgatctttgaatagaggggcttataaatacaggcggggag

SEQ ID NO: 268617 - DNA, 59 bp, Artificial
  Synthetic oligonucleotide
cccgccaaaattttcgtggcacatccatgagaaattgaaatttaaggctgttgcatata

SEQ ID NO: 268618 - DNA, 53 bp, Artificial
  Synthetic oligonucleotide
gaagttgtacatgtagaatttaaacgtctacttaaagtctctggagaaacttt

SEQ ID NO: 268619 - DNA, 56 bp, Artificial
  Synthetic oligonucleotide
gaaagtccaccgcaaagtcacgatacgtgagcttcccttcttggaagtcttgccct

SEQ ID NO: 268620 - DNA, 58 bp, Artificial
  Synthetic oligonucleotide
gaaaattagctttacattccgattaacgcacgctaaatatagtgatcctcataaagta

SEQ ID NO: 268621 - DNA, 58 bp, Artificial
  Synthetic oligonucleotide
cttttagctgagagtttagaagagtgtgctttctataataggagtcacaaggaaatct

SEQ ID NO: 268622 - DNA, 53 bp, Artificial
  Synthetic oligonucleotide
cttggggagaaggtcctgccaagaaaaaggaaggtgggtcgctagggacgcca

SEQ ID NO: 268623 - DNA, 60 bp, Artificial
  Synthetic oligonucleotide
gccgacaacccaaacgcagatgcaacccgccaatcagtagtcgacaccctcgctcaaggc

SEQ ID NO: 268624 - DNA, 58 bp, Artificial
  Synthetic oligonucleotide
cttgacatgaactttacaatgaacttgacacggaacttggcattagaataacggatag

SEQ ID NO: 268625 - DNA, 60 bp, Artificial
  Synthetic oligonucleotide
cttcgagctaggtctggagaccagacattgggtatggactgaagggctaatatgtaataa

SEQ ID NO: 268626 - DNA, 57 bp, Artificial
  Synthetic oligonucleotide
cttcacataatcgaaaatctaaaataacgaatctagagagaaatatcttacaattaa

SEQ ID NO: 268627 - DNA, 60 bp, Artificial
  Synthetic oligonucleotide
cttattagagctaaccatgaactcaaagcaggatatagaacagatatagtgtttgaagta

SEQ ID NO: 268628 - DNA, 60 bp, Artificial
  Synthetic oligonucleotide
ctgtgcctttgttgagtactttatgaggatcactatatttagcgtgcgttaatcggaatg

SEQ ID NO: 268629 - DNA, 52 bp, Artificial
  Synthetic oligonucleotide
ctggaactgttccagttccgggaactggaaccggaactcaccccggaactca

SEQ ID NO: 268630 - DNA, 55 bp, Artificial
  Synthetic oligonucleotide
ctgcaccttgtattaagtggggacggaaacacttgcagttgcggtctttcctaac

SEQ ID NO: 268631 - DNA, 55 bp, Artificial
  Synthetic oligonucleotide
ctcttacgatcatttcattaattgaagttgttttggtattagttccagccttagt

SEQ ID NO: 268632 - DNA, 57 bp, Artificial
  Synthetic oligonucleotide
ctctagattttctcgtgacttatatccgattgaaagtagtacgtcgcaaactggaac

SEQ ID NO: 268633 - DNA, 56 bp, Artificial
  Synthetic oligonucleotide
ctcgctttctgagatagatcgggaaaactttctaccagtgatttagataaacctaa

SEQ ID NO: 268634 - DNA, 55 bp, Artificial
  Synthetic oligonucleotide
gcccatattatacaatgtgcgacatacgtacgtccgtttaacctctgttttaagg

SEQ ID NO: 268635 - DNA, 57 bp, Artificial
  Synthetic oligonucleotide
ctcgagtggtgaagtattctgagacggtagatttcgtagtgccgtcggctaacctaa

SEQ ID NO: 268636 - DNA, 60 bp, Artificial
  Synthetic oligonucleotide
ctcctcttggttgaagatgtggatggtagtccctgagtccagaattgccgataggagcaa

SEQ ID NO: 268637 - DNA, 56 bp, Artificial
  Synthetic oligonucleotide
ctccgtttggccgtcggtttctggatggaaggctgagctcgggtgtagtgttgtct

SEQ ID NO: 268638 - DNA, 54 bp, Artificial
  Synthetic oligonucleotide
ctccgcttactcaaataaatccgtattcggttacataggtatggtcaaaagtag

SEQ ID NO: 268639 - DNA, 56 bp, Artificial
  Synthetic oligonucleotide
ctattacaaattgtaatggttaatatatagtccacagtaatgtaatcttactttct

SEQ ID NO: 268640 - DNA, 60 bp, Artificial
  Synthetic oligonucleotide
tggctcccacctctttcttcaggttgatgtaccactgggagatcgagtcatctgctttgc

SEQ ID NO: 268641 - DNA, 60 bp, Artificial
  Synthetic oligonucleotide
tgctctgctatacttaccattggtaaacaacgagaacagagctctattaccagtaaatgt

SEQ ID NO: 268642 - DNA, 60 bp, Artificial
  Synthetic oligonucleotide
tgcggttgtcgatcagtatcgctctgtattccggaggggcgaacgtccatcgtggaccgc

SEQ ID NO: 268643 - DNA, 58 bp, Artificial
  Synthetic oligonucleotide
tgccctttggtttgacggtatgatattccccacgcgacagcctctggaacgttcttga

SEQ ID NO: 268644 - DNA, 54 bp, Artificial
  Synthetic oligonucleotide
tgcccccataggtactgggctgagttaaatcttggatttaccttaaacccaaga

SEQ ID NO: 268645 - DNA, 60 bp, Artificial
  Synthetic oligonucleotide
gcatgtctgcggcgctatggacggctaacatcatggggagcaggacatctaaaccttgcc

SEQ ID NO: 268646 - DNA, 59 bp, Artificial
  Synthetic oligonucleotide
tgccacgtctcgaagtctcatgaccttccgcgtggtccccaactggatggttacgtctc

SEQ ID NO: 268647 - DNA, 58 bp, Artificial
  Synthetic oligonucleotide
tgccacgggttcggggtagcgcgtgaactggcggctatagaagtaggtgtaatatgcg

SEQ ID NO: 268648 - DNA, 58 bp, Artificial
  Synthetic oligonucleotide
tgatatcggcattgtgacgtgattcgggatttatcctcaattggggccgttaattggg

SEQ ID NO: 268649 - DNA, 57 bp, Artificial
  Synthetic oligonucleotide
tgacaggaggtataatatagggacgataccactaataaagcggggcaggggctcaat

SEQ ID NO: 268650 - DNA, 57 bp, Artificial
  Synthetic oligonucleotide
tgacacctcggtggaggaccgtcccagtgagacgaggttcctcttcaagaacgcgcc

SEQ ID NO: 268651 - DNA, 58 bp, Artificial
  Synthetic oligonucleotide
tctttgcgtaggatttcgtacgcacgtcgtacaggtgcatggtaccgttctaccttgc

SEQ ID NO: 268652 - DNA, 60 bp, Artificial
  Synthetic oligonucleotide
tcttggcgcatgcctcgcactggactgtggttggccctctgatcttcaccccctgagctg

SEQ ID NO: 268653 - DNA, 60 bp, Artificial
  Synthetic oligonucleotide
tctgttgatatcatacataagctgggatacatgcgcggtctgcttcaatgttggttgaat

SEQ ID NO: 268654 - DNA, 55 bp, Artificial
  Synthetic oligonucleotide
tctcttttctcatccgttggcttaaaccaggttggggcttgttgggacagaaaga

SEQ ID NO: 268655 - DNA, 58 bp, Artificial
  Synthetic oligonucleotide
tctaacggaagtgcggtagtcgaaggtatctccctgagtgaggctcgcaagggtccca

SEQ ID NO: 268656 - DNA, 60 bp, Artificial
  Synthetic oligonucleotide
gattaccatggatcttcgagatgaactgagcattacaagcgaggtaaaaaatgtagctat

SEQ ID NO: 268657 - DNA, 60 bp, Artificial
  Synthetic oligonucleotide
tcgtgagcacgatattcttccagagcctggtcacgtatcagccctgtcgcgacgagagta

SEQ ID NO: 268658 - DNA, 57 bp, Artificial
  Synthetic oligonucleotide
tcgtcttgtccttgaatggagggggcctcgtataagcgaactttgagaggtatggaa

SEQ ID NO: 268659 - DNA, 57 bp, Artificial
  Synthetic oligonucleotide
tcggcgtcgacgactagaatttgttccacttgggtcttccaccgctcataggcgctt

SEQ ID NO: 268660 - DNA, 57 bp, Artificial
  Synthetic oligonucleotide
tcggccagtgtgtaccgtaggtgcgaatcctacttaattgctattatacttaattta

SEQ ID NO: 268661 - DNA, 55 bp, Artificial
  Synthetic oligonucleotide
tttgctgccaccctagtcctaatttccgcccagggcgcgttcttgaagaggaacc

SEQ ID NO: 268662 - DNA, 56 bp, Artificial
  Synthetic oligonucleotide
tttcatctagtatctccgtctccttggcccttatatactagtattagtttgttaaa

SEQ ID NO: 268663 - DNA, 60 bp, Artificial
  Synthetic oligonucleotide
ttgtgtcgagcttcatgtttctagggcgtcctgctgtcttcagaatgggtgtgggtcgtc

SEQ ID NO: 268664 - DNA, 59 bp, Artificial
  Synthetic oligonucleotide
ttgcatatatatttccttgaagttataatatcttcctcactgagtttgtagttaacgag

SEQ ID NO: 268665 - DNA, 60 bp, Artificial
  Synthetic oligonucleotide
ttgacatttcgtcgacgtagtttggcttttgctctatatatgcctgtactactgaggatc

SEQ ID NO: 268666 - DNA, 56 bp, Artificial
  Synthetic oligonucleotide
ttctgccaatccaggtttctaacatggaagactccattaaacccaaccttaatggc

SEQ ID NO: 268667 - DNA, 53 bp, Artificial
  Synthetic oligonucleotide
aaggcgcttcgtttgggacggagagtaactaggttcgatccctagcaacccga

SEQ ID NO: 268668 - DNA, 56 bp, Artificial
  Synthetic oligonucleotide
tcataggttagattaagctttaattaattagtttatcagtaatgaactaactatta

SEQ ID NO: 268669 - DNA, 58 bp, Artificial
  Synthetic oligonucleotide
cacaatattaggattctctaaacacggtctaaaattcttctcattattagtaccagca

SEQ ID NO: 268670 - DNA, 55 bp, Artificial
  Synthetic oligonucleotide
actgagccaatttgttaaattatagtctgtatgcttatactagtagatcagccta

SEQ ID NO: 268671 - DNA, 52 bp, Artificial
  Synthetic oligonucleotide
gaagtagaggagcctaaaaagtagaacggtatcaaaactgtttaaacattgg

SEQ ID NO: 268672 - DNA, 54 bp, Artificial
  Synthetic oligonucleotide
tggttagaaatagcttcatcagtttgaatctgatattctctgcattagactacc

SEQ ID NO: 268673 - DNA, 51 bp, Artificial
  Synthetic oligonucleotide
tatcagtgttcgatccactgaggaattactatgattataaagaacattaca

SEQ ID NO: 268674 - DNA, 50 bp, Artificial
  Synthetic oligonucleotide
attaggagtaccaggatactatgatagagtacctttcgcaccatacttct

SEQ ID NO: 268675 - DNA, 60 bp, Artificial
  Synthetic oligonucleotide
acttgtctatatgaacagaaatggatagggttatggggcatgatcgttcatgaagagggg

SEQ ID NO: 268676 - DNA, 57 bp, Artificial
  Synthetic oligonucleotide
catgtttaatagaacagcttcggtggaacatttacaagattcttacaagaaagtata

SEQ ID NO: 268677 - DNA, 58 bp, Artificial
  Synthetic oligonucleotide
cctctttattagccgtaccattaataggtacaataatagtatctactatagactcata

SEQ ID NO: 268678 - DNA, 60 bp, Artificial
  Synthetic oligonucleotide
gggattacaaggcatgcctagaagaataggggactatcctgacgcattcgctggatgaaa

SEQ ID NO: 268679 - DNA, 60 bp, Artificial
  Synthetic oligonucleotide
taatttatgatacacaacatcctgctacatatatgggaatacctatagaatgtaattctc

SEQ ID NO: 268680 - DNA, 60 bp, Artificial
  Synthetic oligonucleotide
tcaagccttacctagtaatgtggttactcacgtctcacctcgaaataacagatatccgca

SEQ ID NO: 268681 - DNA, 56 bp, Artificial
  Synthetic oligonucleotide
tgattggtaaggcgcttcgtttgggacggagagtaactaggttcgatccctagcaa

SEQ ID NO: 268682 - DNA, 49 bp, Artificial
  Synthetic oligonucleotide
ggaaggttaaagggtaggattaacctaaaacggttattggggctggata

SEQ ID NO: 268683 - DNA, 56 bp, Artificial
  Synthetic oligonucleotide
ctagtgaaaaatgtacaggaaatatcatgatatagtaaccgtacctagaaaccgac

SEQ ID NO: 268684 - DNA, 56 bp, Artificial
  Synthetic oligonucleotide
gtgtaattatacttatcttaatgatgggtataggattcctgggttactttaacata

SEQ ID NO: 268685 - DNA, 50 bp, Artificial
  Synthetic oligonucleotide
gttaacttttcacgttaaaagcctagggtcgattcctagtttttccaagc

SEQ ID NO: 268686 - DNA, 57 bp, Artificial
  Synthetic oligonucleotide
gttagaaggaagtataatcttaggattatctcacggatttgtatcaagtggattatt

SEQ ID NO: 268687 - DNA, 55 bp, Artificial
  Synthetic oligonucleotide
gttataactgaatctggttttactgaaccaaatttaaaacctatatggattgata

SEQ ID NO: 268688 - DNA, 58 bp, Artificial
  Synthetic oligonucleotide
gttatgcatagtttgctgctacttagtttgctttttagtaagctaaaattaagcaagc

SEQ ID NO: 268689 - DNA, 55 bp, Artificial
  Synthetic oligonucleotide
tacctacaaacgttagtatatcatcctagttcagcctagtttcttagtttactaa

SEQ ID NO: 268690 - DNA, 58 bp, Artificial
  Synthetic oligonucleotide
taggttcgatcctattatttataccatatctcgtagattaataggtaaatcatgaatt

SEQ ID NO: 268691 - DNA, 60 bp, Artificial
  Synthetic oligonucleotide
tagtctatagcggattagtgtaatagagacacgttcggctcatgatcgaaaaatattggt

SEQ ID NO: 268692 - DNA, 59 bp, Artificial
  Synthetic oligonucleotide
tatattagtggcgtgctatataaaaattcttagatcgagtatatagtaccttttatgta

SEQ ID NO: 268693 - DNA, 60 bp, Artificial
  Synthetic oligonucleotide
tcatagctgaatctagttctcaagctcaaagtaatatacctgaaatgagggttataactg

SEQ ID NO: 268694 - DNA, 53 bp, Artificial
  Synthetic oligonucleotide
cttaccttgttatgcttcgcataaaagttttatggtatacctaaaataagtag

SEQ ID NO: 268695 - DNA, 60 bp, Artificial
  Synthetic oligonucleotide
tctgcgttcaattcgcggaggaattattgttagcttgctcagcaagttaagcaaactaaa

SEQ ID NO: 268696 - DNA, 60 bp, Artificial
  Synthetic oligonucleotide
tgcgaatgcgaagctgcacaataatagaagatattattcaacgtctgctatttatagctt

SEQ ID NO: 268697 - DNA, 52 bp, Artificial
  Synthetic oligonucleotide
ttaacgcaatcccttgctttatttttgttcgtacaaactaaggcttagttaa

SEQ ID NO: 268698 - DNA, 54 bp, Artificial
  Synthetic oligonucleotide
ttctgcccttcggcctaggcccctggacctagtcctgggccgcgaggaagaaac

SEQ ID NO: 268699 - DNA, 60 bp, Artificial
  Synthetic oligonucleotide
atctagttttcaagctcaaagtaatatgcctgaaataagagctatggctgaatctagttt

SEQ ID NO: 268700 - DNA, 55 bp, Artificial
  Synthetic oligonucleotide
atcttaggtgtaattatacttatcttaatgatgggtataggattcctgggttact

SEQ ID NO: 268701 - DNA, 53 bp, Artificial
  Synthetic oligonucleotide
agtatccacttaagaggacgataaatattttcggaataggtagtagtgaaggt

SEQ ID NO: 268702 - DNA, 56 bp, Artificial
  Synthetic oligonucleotide
acgttctacttgttaattgacacgaagtataaactaagggagaatatgaatacaga

SEQ ID NO: 268703 - DNA, 60 bp, Artificial
  Synthetic oligonucleotide
acggttagaacactgatctcatacattggtaataagagttcgattctcttctcaggctta

SEQ ID NO: 268704 - DNA, 60 bp, Artificial
  Synthetic oligonucleotide
cactatatggtgagtgttatgcatagtttgctgctacttagtttgcttttagtaagctaa

SEQ ID NO: 268705 - DNA, 56 bp, Artificial
  Synthetic oligonucleotide
cttagtttctaggggagtttattaagctaatagtatgcatgtttcacagtgaaggg

SEQ ID NO: 268706 - DNA, 60 bp, Artificial
  Synthetic oligonucleotide
ataacgtttagtggtcacataataagcttatctctataaggcatgcttgcttcagtacaa

SEQ ID NO: 268707 - DNA, 55 bp, Artificial
  Synthetic oligonucleotide
catactaaggcctgtaataaaccttctattttacttcaggcagttttgatcgaaa

SEQ ID NO: 268708 - DNA, 56 bp, Artificial
  Synthetic oligonucleotide
catgatcgaaaaatattggtgcaattcctttgtccgcgtatttaatgttacttacc

SEQ ID NO: 268709 - DNA, 56 bp, Artificial
  Synthetic oligonucleotide
atcatgatatagtaaccgtacctagaaaccgactacggtaagctagtagagtatac

SEQ ID NO: 268710 - DNA, 53 bp, Artificial
  Synthetic oligonucleotide
aagttccctgttcgaaccagggtttccacccaaagcgtgcctattactcagta

SEQ ID NO: 268711 - DNA, 59 bp, Artificial
  Synthetic oligonucleotide
catgatcgaaaaatattggtgcaatttctttgtccgcgtattttatgcagcttagtttc

SEQ ID NO: 268712 - DNA, 54 bp, Artificial
  Synthetic oligonucleotide
ccaacaacctagtcttgtatttataacttgcgcacaaaaattgtggagggggag

SEQ ID NO: 268713 - DNA, 58 bp, Artificial
  Synthetic oligonucleotide
atatttatgaccgaccttagagtgaaggtaatcttcatatataaaggattagtatcca

SEQ ID NO: 268714 - DNA, 56 bp, Artificial
  Synthetic oligonucleotide
cctatggttgaacatagaccagaagtttataccgttgaacctagaccatctagttc

SEQ ID NO: 268715 - DNA, 55 bp, Artificial
  Synthetic oligonucleotide
ctaccttttaataagctatatgtaaatatagtgcttaattattaggcggagttcc

SEQ ID NO: 268716 - DNA, 60 bp, Artificial
  Synthetic oligonucleotide
gcgaactaaagatgcacaataatagaagatattattcaacgtctgctatttatagcttac

SEQ ID NO: 268717 - DNA, 58 bp, Artificial
  Synthetic oligonucleotide
taccatacgctatttatagcttgcgcagaaaaaaaatacaggactagcgcctgagcta

SEQ ID NO: 268718 - DNA, 56 bp, Artificial
  Synthetic oligonucleotide
aggttgtaagttcgaatcttatcacgagcaatagctagaaccagggttttagtata

SEQ ID NO: 268719 - DNA, 57 bp, Artificial
  Synthetic oligonucleotide
atacaaaagattgctatactgcttaatggtaatatgcgtacacctaagattgaagcc

SEQ ID NO: 268720 - DNA, 56 bp, Artificial
  Synthetic oligonucleotide
agcctaatgttataagctaaattaataggtgtcccttccttgcctgcttcttgcgc

SEQ ID NO: 268721 - DNA, 56 bp, Artificial
  Synthetic oligonucleotide
caagctcaaagtaatatgcctgaaataagagctatggctgaatctagttttcaagc

SEQ ID NO: 268722 - DNA, 56 bp, Artificial
  Synthetic oligonucleotide
gctgcacaataatagaagatattattcaacgtctgctatttatagcttacgcacgg

SEQ ID NO: 268723 - DNA, 56 bp, Artificial
  Synthetic oligonucleotide
aatatgccggaataggtagacgggatggttttaggagccattgaatttatattcat

SEQ ID NO: 268724 - DNA, 56 bp, Artificial
  Synthetic oligonucleotide
ttatatcatatctcgtagattaataggtaaatcatgaatttttggtattcaatagt

SEQ ID NO: 268725 - DNA, 55 bp, Artificial
  Synthetic oligonucleotide
agacctgaagttttgactgttgaacctagaccatcaggatctagttctcgagtta

SEQ ID NO: 268726 - DNA, 55 bp, Artificial
  Synthetic oligonucleotide
aaaggtagacttttcgctttccacccgaaatgtgtcagttcgattctgactatcc

SEQ ID NO: 268727 - DNA, 57 bp, Artificial
  Synthetic oligonucleotide
gctatttgtggcatagcaagttccctgttcgaaccagggtttccacccaaagcgtgc

SEQ ID NO: 268728 - DNA, 52 bp, Artificial
  Synthetic oligonucleotide
gtaaccgtacctagaaaccgactacggtaagctagtagagtatacgaaggcg

SEQ ID NO: 268729 - DNA, 55 bp, Artificial
  Synthetic oligonucleotide
ggtgcaatttctttgtccgcgtattttatgcagcttagtttctaggggagtttat

SEQ ID NO: 268730 - DNA, 55 bp, Artificial
  Synthetic oligonucleotide
ggtcacataataagcttatctctataaggcatgcttgcttcagtacaagatagag

SEQ ID NO: 268731 - DNA, 55 bp, Artificial
  Synthetic oligonucleotide
ggacgataaatattttcggaataggtagtagtgaaggttatgtcttcactagcct

SEQ ID NO: 268732 - DNA, 55 bp, Artificial
  Synthetic oligonucleotide
cgaaccagggtttccacccaaagcgtgcctattactcagtaaggtaagctatgcc

SEQ ID NO: 268733 - DNA, 54 bp, Artificial
  Synthetic oligonucleotide
gggctataggcatgcatgtttcacagtgaagtgggcacgcctatataaagcccg

SEQ ID NO: 268734 - DNA, 54 bp, Artificial
  Synthetic oligonucleotide
gagttagcattattataggttacttataaaaccatattcgtagagcttgcgcct

SEQ ID NO: 268735 - DNA, 53 bp, Artificial
  Synthetic oligonucleotide
gtataataaattcggattagggccgggcggtcaggcacttcgtttgggacgga

SEQ ID NO: 268736 - DNA, 52 bp, Artificial
  Synthetic oligonucleotide
ttaacatagactataggaccatattaaataatatggacactaatttagctat

SEQ ID NO: 268737 - DNA, 52 bp, Artificial
  Synthetic oligonucleotide
cccatgttttcaagtttacttccttgacaggaaatacaactttctgagataa

SEQ ID NO: 268738 - DNA, 58 bp, Artificial
  Synthetic oligonucleotide
ggaattactaactgataaatttcctagtatgcaaaaagcagctgattattttaacata

SEQ ID NO: 268739 - DNA, 51 bp, Artificial
  Synthetic oligonucleotide
gtcttattcgatattagatgttcctacaacatattttgcggcacctaatcc

SEQ ID NO: 268740 - DNA, 51 bp, Artificial
  Synthetic oligonucleotide
agtgggctatttatatgtgccgggggtgtattatatgatagaacaggtaca

SEQ ID NO: 268741 - DNA, 50 bp, Artificial
  Synthetic oligonucleotide
tagggcttagttaaagctatatctagttactataaagcatttgaccctat

SEQ ID NO: 268742 - DNA, 50 bp, Artificial
  Synthetic oligonucleotide
gggcttaacttacgtagcgagctaagcgagctaaagctattcaaaggtaa

SEQ ID NO: 268743 - DNA, 50 bp, Artificial
  Synthetic oligonucleotide
gaatgaattgatatacctacaagtgttacgtatatcatcctagttcagcc

SEQ ID NO: 268744 - DNA, 54 bp, Artificial
  Synthetic oligonucleotide
ggataataatacccttaatgttgaatctagaccaactacccctgtggttgaacc

SEQ ID NO: 268745 - DNA, 52 bp, Artificial
  Synthetic oligonucleotide
gggtataggttaaaggtagacttttcgctttccacccgaaatgtgtcagttc

SEQ ID NO: 268746 - DNA, 54 bp, Artificial
  Synthetic oligonucleotide
gggttgcatgaattaacgcaatcccttgctttatttttgttcgtacaaactagg

SEQ ID NO: 268747 - DNA, 60 bp, Artificial
  Synthetic oligonucleotide
ctattgtgctaagactggctgtgagattgtggctacgtctgcaggacttgttagtgtgta

SEQ ID NO: 268748 - DNA, 58 bp, Artificial
  Synthetic oligonucleotide
attctagactcatttaacctttatttcaacaaatgaatatcgatgtaaagtcgaatca

SEQ ID NO: 268749 - DNA, 54 bp, Artificial
  Synthetic oligonucleotide
cttacagttggttctgtagtaaatttgcaacgtttatagtgaggttcgattcct

SEQ ID NO: 268750 - DNA, 56 bp, Artificial
  Synthetic oligonucleotide
caagatgtgagaagattaggaggtttaatcaacttcttaccgtttacctatactgc

SEQ ID NO: 268751 - DNA, 55 bp, Artificial
  Synthetic oligonucleotide
ctcctttcttacaaattgaagctattggacaagggctttatacttatggtgcttc

SEQ ID NO: 268752 - DNA, 55 bp, Artificial
  Synthetic oligonucleotide
ctggacacctgccgagtccaaaatctattgcgcgaaaggttccagtccattcgtc

SEQ ID NO: 268753 - DNA, 55 bp, Artificial
  Synthetic oligonucleotide
ctggactaacgatctagtagttcctcgaagggttcttccagtgcatccctcattg

SEQ ID NO: 268754 - DNA, 53 bp, Artificial
  Synthetic oligonucleotide
ctttacctagtcatggttaaactgtcggcttttactgatcaggggtaaaagta

SEQ ID NO: 268755 - DNA, 55 bp, Artificial
  Synthetic oligonucleotide
gaaccttctcatttagctaaactagtgacatgtgctagatggggatgcggagctg

SEQ ID NO: 268756 - DNA, 55 bp, Artificial
  Synthetic oligonucleotide
gaacgagtccgaatcaggataggttgcggaatcccgcgtcattgccctatgatgg

SEQ ID NO: 268757 - DNA, 55 bp, Artificial
  Synthetic oligonucleotide
actgaacactactacactcaccgtggcgacgattgacatctgtcgtacctggttg

SEQ ID NO: 268758 - DNA, 53 bp, Artificial
  Synthetic oligonucleotide
aatatactagtaaacttaacctagataatgttattccttattataaaccttca

SEQ ID NO: 268759 - DNA, 55 bp, Artificial
  Synthetic oligonucleotide
actgtgacggtggtgtcctctgatagtctcgatgcaagcacacagccagcggttc

SEQ ID NO: 268760 - DNA, 55 bp, Artificial
  Synthetic oligonucleotide
cgcgcggcatcaactctgacgcattaacgtgctcacaggtactacgaccgtgagg

SEQ ID NO: 268761 - DNA, 55 bp, Artificial
  Synthetic oligonucleotide
ataatagtaagcgaaatagtgtaaaggtaagcacgtcagtttcatggcctggcag

SEQ ID NO: 268762 - DNA, 55 bp, Artificial
  Synthetic oligonucleotide
cgcgcatacaacgagtgacagctgaccggagagtacttgggtaaccgcccttata

SEQ ID NO: 268763 - DNA, 55 bp, Artificial
  Synthetic oligonucleotide
cacaaacagctaatacgttagaatgggcagtacaaagtccaattccattccacgc

SEQ ID NO: 268764 - DNA, 55 bp, Artificial
  Synthetic oligonucleotide
cacaggctcaatagtggtcggtaacatccacgggattcatatggaccctgcacgg

SEQ ID NO: 268765 - DNA, 55 bp, Artificial
  Synthetic oligonucleotide
cacatggagcgtctcttcttttctgcaccggaacataacgcggagacttgcacag

SEQ ID NO: 268766 - DNA, 55 bp, Artificial
  Synthetic oligonucleotide
cagcgtacacacctaatggcttacatatatcaggttccgaaccctacgccgccgg

SEQ ID NO: 268767 - DNA, 55 bp, Artificial
  Synthetic oligonucleotide
cctatacatatccctcagcggaacatgcgcgatcactattcgcctccccgtgatt

SEQ ID NO: 268768 - DNA, 55 bp, Artificial
  Synthetic oligonucleotide
tgatatccttagatcctaagcagaatactcagggcgaaggccactttccactaat

SEQ ID NO: 268769 - DNA, 54 bp, Artificial
  Synthetic oligonucleotide
aacggtggacccctaaggatattaatatctatggaaataccgtgggaagctgta

SEQ ID NO: 268770 - DNA, 55 bp, Artificial
  Synthetic oligonucleotide
tccgtctcaacccgcctccccatctacccgcattccccaacctgtcaccagcaca

SEQ ID NO: 268771 - DNA, 55 bp, Artificial
  Synthetic oligonucleotide
tccaccatatgcctacggcccatcatctgagtatccgcaatgcatctctcactgt

SEQ ID NO: 268772 - DNA, 55 bp, Artificial
  Synthetic oligonucleotide
aaaataatcgttacaacagtagctacacctattgttgccgatgcaacatcagcaa

SEQ ID NO: 268773 - DNA, 55 bp, Artificial
  Synthetic oligonucleotide
tcaatcatcgccaatcttaagacccatcagggtgtagacaatcgacgacgcaggg

SEQ ID NO: 268774 - DNA, 55 bp, Artificial
  Synthetic oligonucleotide
gtcgattctatgtggaccgcatcatgagtagtgttgaaggaccagatccctaaga

SEQ ID NO: 268775 - DNA, 55 bp, Artificial
  Synthetic oligonucleotide
gtaggctttgaaagatgcctacacgttgagcagttccgctcatgatacgctatgc

SEQ ID NO: 268776 - DNA, 55 bp, Artificial
  Synthetic oligonucleotide
ggttagtacggctcgccttcaatgagcaaatatcagttcaattctgataaagatc

SEQ ID NO: 268777 - DNA, 55 bp, Artificial
  Synthetic oligonucleotide
gggttcctgtcgtccaaatgccgacgaccataacagtcgagggctaagggtaatc

SEQ ID NO: 268778 - DNA, 55 bp, Artificial
  Synthetic oligonucleotide
ggctcttagggtctaaagattctaagaagatagctgatctgaaaagatgctgact

SEQ ID NO: 268779 - DNA, 55 bp, Artificial
  Synthetic oligonucleotide
ggccttgacacgagtgacatcataccgaacctaggaggagtgaatgacgcacact

SEQ ID NO: 268780 - DNA, 53 bp, Artificial
  Synthetic oligonucleotide
tcacgtccaaaaaacactagctttcggtaaaatacgtcaaattgatactgggg

SEQ ID NO: 268781 - DNA, 55 bp, Artificial
  Synthetic oligonucleotide
ggcacgactcctgtgctggcgctgtatgatccccatcgggagacacacatagaag

SEQ ID NO: 268782 - DNA, 55 bp, Artificial
  Synthetic oligonucleotide
ggatcatggacgatggtcaaagagtagctagaggaggtgtaactttatgtactga

SEQ ID NO: 268783 - DNA, 55 bp, Artificial
  Synthetic oligonucleotide
ggaatgcacgtcctctgtatgaaaggtcctcgggacatgcaagtgtgcgtcgccg

SEQ ID NO: 268784 - DNA, 55 bp, Artificial
  Synthetic oligonucleotide
gcgacggccatcggacaactgctatcgagttcaactgttctgtgtcgacttgacc

SEQ ID NO: 268785 - DNA, 55 bp, Artificial
  Synthetic oligonucleotide
gccgtggtgaactgtgaagttcatcttattacgtcactgtatgcgggaaagcctt

SEQ ID NO: 268786 - DNA, 55 bp, Artificial
  Synthetic oligonucleotide
gcagatagcgaagacatactcaggtagacggactggtggacactgttgtcgtgcg

SEQ ID NO: 268787 - DNA, 55 bp, Artificial
  Synthetic oligonucleotide
tggaattccctgctgcgcgtgtcaacaccctagccgggcacctggcgggttatcc

SEQ ID NO: 268788 - DNA, 55 bp, Artificial
  Synthetic oligonucleotide
gatgacgggtactttgattcttatggaagagctaaaacagttctactttgtacag

SEQ ID NO: 268789 - DNA, 55 bp, Artificial
  Synthetic oligonucleotide
tgtagcaaaattctccgaagagttttaggaagcggtaagacattttgccgctttg

SEQ ID NO: 268790 - DNA, 55 bp, Artificial
  Synthetic oligonucleotide
gacgcgtacctgtagatgaattcgcctccaacgcgatactggagcaagaagtcga

SEQ ID NO: 268791 - DNA, 60 bp, Artificial
  Synthetic oligonucleotide
ctgcatcttatacagcatcattacggaggtcaattattagaacgtgcatatattctagag

SEQ ID NO: 268792 - DNA, 55 bp, Artificial
  Synthetic oligonucleotide
gaccgatggttctgcataaagcggtacaccgcaagaccgcacagcacactctccg

SEQ ID NO: 268793 - DNA, 54 bp, Artificial
  Synthetic oligonucleotide
tgtggaggaaaagctgagaagcccttactccacggttagataccccggtactcc

SEQ ID NO: 268794 - DNA, 54 bp, Artificial
  Synthetic oligonucleotide
gcacccatcctccgaatcccggatgcaacgtccccatttagacttgagactgac

SEQ ID NO: 268795 - DNA, 54 bp, Artificial
  Synthetic oligonucleotide
gataagtctccgacccagccattacatcctacggcgcacttctatcatcacacg

SEQ ID NO: 268796 - DNA, 54 bp, Artificial
  Synthetic oligonucleotide
gacatggggctggtaagtgtacccgggcaactttaggacgggtagctctatata

SEQ ID NO: 268797 - DNA, 50 bp, Artificial
  Synthetic oligonucleotide
agtttaagggttaaaacaagaatcttcgaaattcgaaattaatggttcaa

SEQ ID NO: 268798 - DNA, 53 bp, Artificial
  Synthetic oligonucleotide
ggctaagggaggtagtgatcttttcgatacggttaaagatcaagtttaatcag

SEQ ID NO: 268799 - DNA, 53 bp, Artificial
  Synthetic oligonucleotide
gagacgcaaccggcccaacacatcgtgacatgctacggtgcttccttgagacg

SEQ ID NO: 268800 - DNA, 52 bp, Artificial
  Synthetic oligonucleotide
ataatgcaagatggctcgagaggaacttctaaaggtttatatctttgtactg

SEQ ID NO: 268801 - DNA, 52 bp, Artificial
  Synthetic oligonucleotide
acatatctcgaaaagggtatgtagaactaagcgtagtaatggagccacgtga

SEQ ID NO: 268802 - DNA, 56 bp, Artificial
  Synthetic oligonucleotide
ctcgaatagaggtaaaacgtatagtatattatcatgattattatggaaaagtaaag

SEQ ID NO: 268803 - DNA, 52 bp, Artificial
  Synthetic oligonucleotide
tcttcataaataggagataatgaaaggaaataattctgctataggattctat

SEQ ID NO: 268804 - DNA, 51 bp, Artificial
  Synthetic oligonucleotide
aagaggttatagtgtataacgcttagaggagggctgatatccttagatcct

SEQ ID NO: 268805 - DNA, 50 bp, Artificial
  Synthetic oligonucleotide
aaaccgtaacgctcgtaggcgcattgcagcacggcacctgcgtcattcaa

SEQ ID NO: 268806 - DNA, 50 bp, Artificial
  Synthetic oligonucleotide
aaaccccgcggtgagcccacagccgactcccaaaacgggacggccacaca

SEQ ID NO: 268807 - DNA, 50 bp, Artificial
  Synthetic oligonucleotide
aaacccccgggcgcatgactgaatcgtgggccgttcgctaggtggatatc

SEQ ID NO: 268808 - DNA, 50 bp, Artificial
  Synthetic oligonucleotide
aaacccatgctgagatagcgacgaggacactaggtcgtccccgcgcgcat

SEQ ID NO: 268809 - DNA, 50 bp, Artificial
  Synthetic oligonucleotide
aaaccagagacggacattggcagcgcagtagactgggccatggcgtggat

SEQ ID NO: 268810 - DNA, 50 bp, Artificial
  Synthetic oligonucleotide
aaaccacgcacccaccgtgacaagaccggagaggagcatcggacgcattt

SEQ ID NO: 268811 - DNA, 50 bp, Artificial
  Synthetic oligonucleotide
aaacagcggtcgtgctcagaatgcctcctgtcggcgcgacttcgatcctc

SEQ ID NO: 268812 - DNA, 50 bp, Artificial
  Synthetic oligonucleotide
aaacagacttgtccctggggcgtgcccgacagagcgtctctcacgacata

SEQ ID NO: 268813 - DNA, 56 bp, Artificial
  Synthetic oligonucleotide
gtaccttctttaggtctaaaaattgatgctgttccaggaagattaaatcaaacatc

SEQ ID NO: 268814 - DNA, 50 bp, Artificial
  Synthetic oligonucleotide
tcaaacttcattcggagcatctagtcgtaccagtttctccgtgctggccc

SEQ ID NO: 268815 - DNA, 50 bp, Artificial
  Synthetic oligonucleotide
aaacacccgcccttggggtctttctctcgcccggacgaactctggagggc

SEQ ID NO: 268816 - DNA, 50 bp, Artificial
  Synthetic oligonucleotide
aaaatcgagggggcagcatgcgactgcgagtgtgctcacctgcgaacgtc

SEQ ID NO: 268817 - DNA, 50 bp, Artificial
  Synthetic oligonucleotide
aaaagatcaacgcacgacccgctggacatggctgcattcagcgtgccgtt

SEQ ID NO: 268818 - DNA, 50 bp, Artificial
  Synthetic oligonucleotide
aaaagagtcgccttctagacgcacatgccggagggcccatcgcagcacgg

SEQ ID NO: 268819 - DNA, 50 bp, Artificial
  Synthetic oligonucleotide
aaaagacgtgggctgcacgctgcaacgtcgggattcgaggggagatgagg

SEQ ID NO: 268820 - DNA, 50 bp, Artificial
  Synthetic oligonucleotide
aaaactcacctggactcgggggcatctgggtgagagtcccagcctcgcgt

SEQ ID NO: 268821 - DNA, 50 bp, Artificial
  Synthetic oligonucleotide
aaaacgccgtccgctaaacgcaggcgaccgagaaacccgccacagtgaac

SEQ ID NO: 268822 - DNA, 50 bp, Artificial
  Synthetic oligonucleotide
aaaacgcactgacgcacgggctacggttgccttgggctctacccaggcca

SEQ ID NO: 268823 - DNA, 50 bp, Artificial
  Synthetic oligonucleotide
aaaacgaccgcacagctcctgagcgcatcatgtccgcacagctcctggaa

SEQ ID NO: 268824 - DNA, 59 bp, Artificial
  Synthetic oligonucleotide
tgatctcattttttctgatgctagtattattagaagtagtgtggataatatagttagag

SEQ ID NO: 268825 - DNA, 50 bp, Artificial
  Synthetic oligonucleotide
aaagaaacactcacgcagagcgtttgggcatgacccgccgggggatagcc

SEQ ID NO: 268826 - DNA, 50 bp, Artificial
  Synthetic oligonucleotide
aaacttccccggaccccgactttcacatgacttgaccccgcgggtaacga

SEQ ID NO: 268827 - DNA, 50 bp, Artificial
  Synthetic oligonucleotide
aaacttcacgacagaactccgacatggggctcccgacagctcaccgcgga

SEQ ID NO: 268828 - DNA, 50 bp, Artificial
  Synthetic oligonucleotide
aaactgcgtagctaggtcgctggatgtgcgcaggtaacgcccttgggtga

SEQ ID NO: 268829 - DNA, 50 bp, Artificial
  Synthetic oligonucleotide
aaactcagcgcgttagggacccgtgaaagcggtagggatgcactagcgcg

SEQ ID NO: 268830 - DNA, 50 bp, Artificial
  Synthetic oligonucleotide
aaactagcgaggtcatggagcctgcacccaaacgcaagcggggacgacca

SEQ ID NO: 268831 - DNA, 50 bp, Artificial
  Synthetic oligonucleotide
aaacgtcccggtcgttacggactgcgtggaccaggctttcttggctgcgt

SEQ ID NO: 268832 - DNA, 50 bp, Artificial
  Synthetic oligonucleotide
aaacgtcacgcacacacacgctttcctgcgatctcaccagcgggcaggct

SEQ ID NO: 268833 - DNA, 50 bp, Artificial
  Synthetic oligonucleotide
aaacgggtttgagacagacctaaggacagcgacgcaggggcaggcgttct

SEQ ID NO: 268834 - DNA, 50 bp, Artificial
  Synthetic oligonucleotide
aaacggcgctgtgcatcccgcttacctaccccgttcccgcactctatcgc

SEQ ID NO: 268835 - DNA, 58 bp, Artificial
  Synthetic oligonucleotide
cggcacactaaaatagaaacataattcgtgagataaggttgatagtagctcaaatctc

SEQ ID NO: 268836 - DNA, 50 bp, Artificial
  Synthetic oligonucleotide
aaacggccgacaaccttccacgatgacccccatgtcccggagaacgtcat

SEQ ID NO: 268837 - DNA, 50 bp, Artificial
  Synthetic oligonucleotide
aaacgcgttggcagcacgtgatcgcgacgctatggactcaagcctgcatc

SEQ ID NO: 268838 - DNA, 50 bp, Artificial
  Synthetic oligonucleotide
aaacgcgtactgttctcgcatgccgcacgctgcgtcagaggcttgaaagc

SEQ ID NO: 268839 - DNA, 50 bp, Artificial
  Synthetic oligonucleotide
aaacgcgcgtgtgatcgcaagccattctgggtcgaatgcgagtactggcg

SEQ ID NO: 268840 - DNA, 50 bp, Artificial
  Synthetic oligonucleotide
aaacgcgccaaagcgactcacagcgcaggagctaggggctccgaagggga

SEQ ID NO: 268841 - DNA, 50 bp, Artificial
  Synthetic oligonucleotide
aaacgcgaggtttttgggcgcgtgacccagtgccgcaccagacattgctt

SEQ ID NO: 268842 - DNA, 50 bp, Artificial
  Synthetic oligonucleotide
aaacgcccgctcatcactggcgtgccgacttgagggcttgccgactaccc

SEQ ID NO: 268843 - DNA, 50 bp, Artificial
  Synthetic oligonucleotide
aaacgaacggcgcctcgagtagtctgcaaccacctccgaagcccatgcgc

SEQ ID NO: 268844 - DNA, 50 bp, Artificial
  Synthetic oligonucleotide
aaacctggcctaccacccaacgtttgaaccccacctcacggcgacctcta

SEQ ID NO: 268845 - DNA, 50 bp, Artificial
  Synthetic oligonucleotide
aaaccgtggtaggttggccaggtttggtttcacgccagtcgcgcgctcat

SEQ ID NO: 268846 - DNA, 58 bp, Artificial
  Synthetic oligonucleotide
ttccgggccgtctttctatccaccattcacactagccatgtctcggcttatttagggc

SEQ ID NO: 268847 - DNA, 55 bp, Artificial
  Synthetic oligonucleotide
catagattagtaagggtacatcccttaatcaattagtactttcactccctcttgg

SEQ ID NO: 268848 - DNA, 55 bp, Artificial
  Synthetic oligonucleotide
catactcggccgctagtgactaggggattttttaacttaatcgacacgattagtg

SEQ ID NO: 268849 - DNA, 56 bp, Artificial
  Synthetic oligonucleotide
atgaccgctggttgagtcgggaggggtcttagccctgcatccgtagtctaactttc

SEQ ID NO: 268850 - DNA, 53 bp, Artificial
  Synthetic oligonucleotide
agcttttcttgggggggggtttgatttatctctttcgttctcttagtcatcta

SEQ ID NO: 268851 - DNA, 54 bp, Artificial
  Synthetic oligonucleotide
acttttaaatgaccgctggttgagtcgggaggggtcttagccctgcatccgtag

SEQ ID NO: 268852 - DNA, 56 bp, Artificial
  Synthetic oligonucleotide
cagccattatatcccttattcctctcgtactttcactccctcttggttacgcctaa

SEQ ID NO: 268853 - DNA, 55 bp, Artificial
  Synthetic oligonucleotide
tcatctaagtaccggacccctctatgtaccggaccccctcacaatctaagacgtc

SEQ ID NO: 268854 - DNA, 54 bp, Artificial
  Synthetic oligonucleotide
taagggtacatcccttaatcaattagtactttcactccctcttggttacgccta

SEQ ID NO: 268855 - DNA, 55 bp, Artificial
  Synthetic oligonucleotide
ccagcatgaaatggaaactgcgaccatccccagccattatatcccttattcctct

SEQ ID NO: 268856 - DNA, 53 bp, Artificial
  Synthetic oligonucleotide
ggggtttgatttatctctttcgttctcttagtcatctaagtaccggacccctc

SEQ ID NO: 268857 - DNA, 59 bp, Artificial
  Synthetic oligonucleotide
tggtgacaccgactcgcttagccaccttcgcaggtttgacctcgtctgccagcttttct

SEQ ID NO: 268858 - DNA, 57 bp, Artificial
  Synthetic oligonucleotide
gttcctaaaactctattttcatgaatgctgtatagagctcttttcccttacgaggac

SEQ ID NO: 268859 - DNA, 60 bp, Artificial
  Synthetic oligonucleotide
ggccgctagtgactaggggattgttttacttacgagtgcatcatactcggccgctagtga

SEQ ID NO: 268860 - DNA, 59 bp, Artificial
  Synthetic oligonucleotide
gaggggtcttagccctgcatccgtagtctaactttccagacatccgtgtgcctgttata

SEQ ID NO: 268861 - DNA, 51 bp, Artificial
  Synthetic oligonucleotide
gacccgtgtcggggttccaactatttctagcggatttcgtctagttaaggg

SEQ ID NO: 268862 - DNA, 57 bp, Artificial
  Synthetic oligonucleotide
cttttgttcggccgctagtgactaggggattgttttacttacgagtgcatcatactc

SEQ ID NO: 268863 - DNA, 60 bp, Artificial
  Synthetic oligonucleotide
cctgttatattatccatcttccagcatgaaatggaaactgcgaccatccccagccattat

SEQ ID NO: 268864 - DNA, 55 bp, Artificial
  Synthetic oligonucleotide
ccagggggcaagcctgagcgccacttttaaatgaccgctggttgagtcgggaggg

SEQ ID NO: 268865 - DNA, 59 bp, Artificial
  Synthetic oligonucleotide
acaaagtatatacatactaaattacgcttttatctagactcgaactagaataagatgca

SEQ ID NO: 268866 - DNA, 59 bp, Artificial
  Synthetic oligonucleotide
gaccataattaacttgaatatctcctacagagaatcaagtacctaaatggatagaaata

SEQ ID NO: 268867 - DNA, 55 bp, Artificial
  Synthetic oligonucleotide
cggaatctggcggtcagtaagtcatcggctagtgaaactagaccattcggtagcg

SEQ ID NO: 268868 - DNA, 55 bp, Artificial
  Synthetic oligonucleotide
cggaatacgaggttgcatggccattcgctgagatgcttgaagttgaccgttccgt

SEQ ID NO: 268869 - DNA, 55 bp, Artificial
  Synthetic oligonucleotide
cgctcctccttggacatagtgtcgtttgattccgcatccactacagactctttcg

SEQ ID NO: 268870 - DNA, 55 bp, Artificial
  Synthetic oligonucleotide
cgcggttcactacagaattgcgctcgctgtggcttaattgagagcgaaacacgac

SEQ ID NO: 268871 - DNA, 55 bp, Artificial
  Synthetic oligonucleotide
cgcctttggcgacaatcattatatattaatccacatcgtggacatatcgccctaa

SEQ ID NO: 268872 - DNA, 55 bp, Artificial
  Synthetic oligonucleotide
cgcctttgattgcactcgacgcaactatactccagctcctatctttcaaatctgt

SEQ ID NO: 268873 - DNA, 55 bp, Artificial
  Synthetic oligonucleotide
cgcctgtggcgacgatttacttaccctctacacgggatagccggctacaccagcg

SEQ ID NO: 268874 - DNA, 55 bp, Artificial
  Synthetic oligonucleotide
cgccggattctcgttgacgacacctaataaaggagaggctatcgtgataaaatta

SEQ ID NO: 268875 - DNA, 55 bp, Artificial
  Synthetic oligonucleotide
cgcactcacctgacttacatttgagtgtaatgaaagggtctccgaatacagactg

SEQ ID NO: 268876 - DNA, 55 bp, Artificial
  Synthetic oligonucleotide
cgcaatgagttcatcaggtgccatttgtttaacttatgcagtggattcttacccc

SEQ ID NO: 268877 - DNA, 60 bp, Artificial
  Synthetic oligonucleotide
gttagttctatatccgccgactacgccagcatgttgcctacggcgtcgatatacactaat

SEQ ID NO: 268878 - DNA, 55 bp, Artificial
  Synthetic oligonucleotide
cgcaacgtattcgcgtcaaagtcaacgaaataaagtcgaaagagtcacgaatgtg

SEQ ID NO: 268879 - DNA, 55 bp, Artificial
  Synthetic oligonucleotide
cgattcttcgtctgaaaataccatcgtggaccaccatagccatgctaaggctcag

SEQ ID NO: 268880 - DNA, 55 bp, Artificial
  Synthetic oligonucleotide
cgatgctataagtatttctagccatatccaataatctgccactggacttgggtta

SEQ ID NO: 268881 - DNA, 55 bp, Artificial
  Synthetic oligonucleotide
cgagtcctggcaacaatgctaacttgaatgtaccaggtaaccacaagggccatct

SEQ ID NO: 268882 - DNA, 55 bp, Artificial
  Synthetic oligonucleotide
cgagtattgcgcttaaacggtggatcaaagccgattcgcatacaactcggagacg

SEQ ID NO: 268883 - DNA, 55 bp, Artificial
  Synthetic oligonucleotide
cgaggaagcacagtatgggttgcgacaccaaccgttgccacaccctttggtcaac

SEQ ID NO: 268884 - DNA, 53 bp, Artificial
  Synthetic oligonucleotide
cttgctaccctctctatagcaccggaaaatttggggaacgggaatctttcttc

SEQ ID NO: 268885 - DNA, 55 bp, Artificial
  Synthetic oligonucleotide
cttcgctccacactcatggcttattaagtgtacgcctgagttcaattcactgtgg

SEQ ID NO: 268886 - DNA, 55 bp, Artificial
  Synthetic oligonucleotide
cttacgcccacagtatactacgatgaaagcaggagtgcacagagcccggtggtct

SEQ ID NO: 268887 - DNA, 55 bp, Artificial
  Synthetic oligonucleotide
cttaaagcccaactcggggtatactaaggcgtcgcagacatttgagattgtgcct

SEQ ID NO: 268888 - DNA, 58 bp, Artificial
  Synthetic oligonucleotide
cggtggcccttaccagagcacgtatagcaacgggtattccagataggagaggtggcag

SEQ ID NO: 268889 - DNA, 55 bp, Artificial
  Synthetic oligonucleotide
ctgttacatgtgactccgaggcaccaggagtcaaagaatctaatcagtagcttcg

SEQ ID NO: 268890 - DNA, 55 bp, Artificial
  Synthetic oligonucleotide
ctgtacctcttagatataaagttttggactgtcattcggcagcgcctacgttacg

SEQ ID NO: 268891 - DNA, 54 bp, Artificial
  Synthetic oligonucleotide
ctgggtatcgtagtaagcacaaggggatacacgaacgtcctgttttacgcaggg

SEQ ID NO: 268892 - DNA, 55 bp, Artificial
  Synthetic oligonucleotide
ctgctcgtattgcccactcttcttagaccatgtcgtccgtattcagaagaccgcc

SEQ ID NO: 268893 - DNA, 55 bp, Artificial
  Synthetic oligonucleotide
ctgcgggctgtctgatatatggctgaggatgtaacaagtcagagctgctataagt

SEQ ID NO: 268894 - DNA, 55 bp, Artificial
  Synthetic oligonucleotide
ctgacgatttcaaatactcagtggacgtagcagcgtgtgagttaccagtgcgtca

SEQ ID NO: 268895 - DNA, 55 bp, Artificial
  Synthetic oligonucleotide
ctctccatcagtggatgtaacgcttacggttccctttaagatccagtacattgac

SEQ ID NO: 268896 - DNA, 55 bp, Artificial
  Synthetic oligonucleotide
ctcgtcttatggttacaaacccaacttcgactcaaggatcagctctaagatcgct

SEQ ID NO: 268897 - DNA, 55 bp, Artificial
  Synthetic oligonucleotide
ctcgtcagcttcgtggctggggtgagctattgtgtttgcggcatcttctgagtcg

SEQ ID NO: 268898 - DNA, 55 bp, Artificial
  Synthetic oligonucleotide
ctcgattcctcttgcctcggaattgggctctctacagatggaatacggtgtaccc

SEQ ID NO: 268899 - DNA, 54 bp, Artificial
  Synthetic oligonucleotide
cgtaacccttcaatccgtgctacaattttccctcaagcaatattaggtttcgcc

SEQ ID NO: 268900 - DNA, 55 bp, Artificial
  Synthetic oligonucleotide
ctcccaagtggtgcactatagggttagggttggtaatctcgtggaaccatgggtg

SEQ ID NO: 268901 - DNA, 55 bp, Artificial
  Synthetic oligonucleotide
ctccagtattattgcgaccggaaaagacacgatatgggtgcgagtaaatgggtga

SEQ ID NO: 268902 - DNA, 55 bp, Artificial
  Synthetic oligonucleotide
ctccaggaactggagcattagttaccgactttcataccgctccaacatgttctcc

SEQ ID NO: 268903 - DNA, 55 bp, Artificial
  Synthetic oligonucleotide
ctcaagtgtaccaattgtcttggtaatggccacaaggccactagctgtccttctc

SEQ ID NO: 268904 - DNA, 55 bp, Artificial
  Synthetic oligonucleotide
ctatcgtgaatggcgtacgcgtatggaggtcactattgggactcttggtatggag

SEQ ID NO: 268905 - DNA, 55 bp, Artificial
  Synthetic oligonucleotide
ctatagtcttgagctgattctaccgtggcattagtaagtggtcgggcgtagctcg

SEQ ID NO: 268906 - DNA, 55 bp, Artificial
  Synthetic oligonucleotide
ctataacttcatggtcttaataaggtctgatagattaatctcttcggctgactcg

SEQ ID NO: 268907 - DNA, 55 bp, Artificial
  Synthetic oligonucleotide
ctagaccttctttgctgcagatatcggttgtgtcgtggggccctccagtggttct

SEQ ID NO: 268908 - DNA, 55 bp, Artificial
  Synthetic oligonucleotide
ctaataagcataccaagagtagaatgacgagctccaacactgtaaatgtcttgaa

SEQ ID NO: 268909 - DNA, 55 bp, Artificial
  Synthetic oligonucleotide
ctaagccctagaagtagcatttagcacgtgattgaatataataacggcccaatcg

SEQ ID NO: 268910 - DNA, 60 bp, Artificial
  Synthetic oligonucleotide
gaccaagatatgtctcaaagctaacagttatataaggaataaactgaattgttgaagatc

SEQ ID NO: 268911 - DNA, 55 bp, Artificial
  Synthetic oligonucleotide
ctaacgagacgtattcttctgaggttcgttgtctacttccaattgccgtatcaca

SEQ ID NO: 268912 - DNA, 55 bp, Artificial
  Synthetic oligonucleotide
cgtgctctggtaagggccaccgttcgaatgtttgtacttcccctgttctcaagtg

SEQ ID NO: 268913 - DNA, 55 bp, Artificial
  Synthetic oligonucleotide
taagcggttatgatgaaaaggtagacataggacacttaaaatgtccgggcaaagc

SEQ ID NO: 268914 - DNA, 55 bp, Artificial
  Synthetic oligonucleotide
gttctggcagccttggtatacattgggaacttagggtttgtaactgcaatttcct

SEQ ID NO: 268915 - DNA, 55 bp, Artificial
  Synthetic oligonucleotide
gttctagacatcttgatatgaacttccttcctggttcgcttaattggtctgcaga

SEQ ID NO: 268916 - DNA, 55 bp, Artificial
  Synthetic oligonucleotide
gttcggaagatttgcattctttcgagtagggactttgccagagtccgttgcaatg

SEQ ID NO: 268917 - DNA, 55 bp, Artificial
  Synthetic oligonucleotide
gttccactatcggacttgaaacttgccgtttctaactgtcttctgatctgcactg

SEQ ID NO: 268918 - DNA, 55 bp, Artificial
  Synthetic oligonucleotide
gttcaacgactagttaatgagtaatataacaataatttaaccacgagagccttac

SEQ ID NO: 268919 - DNA, 53 bp, Artificial
  Synthetic oligonucleotide
gttaatcgggagtactagcagagtatacggtaaggttgtaggtaaatccaacg

SEQ ID NO: 268920 - DNA, 55 bp, Artificial
  Synthetic oligonucleotide
gtgcctggtaactcacaccaaaatggacgtgctgaaagagccattcgctccgttc

SEQ ID NO: 268921 - DNA, 58 bp, Artificial
  Synthetic oligonucleotide
gtgaattgcggggacatccatatgcctcaccttcggtgaggtaatcccccatcctacg

SEQ ID NO: 268922 - DNA, 55 bp, Artificial
  Synthetic oligonucleotide
gtgcaggtatagtacaactcgaacaagcagtgtcgagtacgtatcccgtgtcgag

SEQ ID NO: 268923 - DNA, 55 bp, Artificial
  Synthetic oligonucleotide
gtgcaatcaagggtgtttatcttggatctgatccgtttcggaaggctcatcttgt

SEQ ID NO: 268924 - DNA, 55 bp, Artificial
  Synthetic oligonucleotide
gtcttggatcgccatggattaatggctgcaactctgaatatgctctagtcacgaa

SEQ ID NO: 268925 - DNA, 55 bp, Artificial
  Synthetic oligonucleotide
gtcgttgactaatcggcaagtcccctaggtttgagctaggtctatgtatgttcga

SEQ ID NO: 268926 - DNA, 55 bp, Artificial
  Synthetic oligonucleotide
gtcgtgaattccgccaagcacgtaaaacgaggagggcagatacactaggtgccga

SEQ ID NO: 268927 - DNA, 55 bp, Artificial
  Synthetic oligonucleotide
gtcgaagcagacgtagttggcgcatgatcaggtgagttttcaaatgggtagatcg

SEQ ID NO: 268928 - DNA, 55 bp, Artificial
  Synthetic oligonucleotide
gtcgaactgaatacgcttgtgaaattgtccagttcgtgaaatctagcaatcttcg

SEQ ID NO: 268929 - DNA, 55 bp, Artificial
  Synthetic oligonucleotide
gtccaaccgcagcaaagatgaaatgcggggcccacaacgtgcatgaatcgcattc

SEQ ID NO: 268930 - DNA, 55 bp, Artificial
  Synthetic oligonucleotide
gtcacgttatgtcatgcccgtgcaaacaactagtatctcgtaaattttgtcaccc

SEQ ID NO: 268931 - DNA, 55 bp, Artificial
  Synthetic oligonucleotide
gtatcctcgatcaatgtcatatttgaaagatcgggtgaattgcctcttctggcac

SEQ ID NO: 268932 - DNA, 57 bp, Artificial
  Synthetic oligonucleotide
gtgaaaccacgttagagttggagagcctagtgataggtaactatctcgctgggttcg

SEQ ID NO: 268933 - DNA, 55 bp, Artificial
  Synthetic oligonucleotide
gtaggtttggccagcagggattggacattgagtaacgtattcaggtccatccatc

SEQ ID NO: 268934 - DNA, 55 bp, Artificial
  Synthetic oligonucleotide
gtagcggcgaagatggtcctccacttcaaaacgacgagataattatcactcaaag

SEQ ID NO: 268935 - DNA, 55 bp, Artificial
  Synthetic oligonucleotide
gtacttcgagacacaattgtaacggagaagtggaagcattggttaataagaccca

SEQ ID NO: 268936 - DNA, 55 bp, Artificial
  Synthetic oligonucleotide
gtacggtcttctggggctcacaattactgtactctctgtctcatagttaacgatc

SEQ ID NO: 268937 - DNA, 55 bp, Artificial
  Synthetic oligonucleotide
gtacgacagtagaccgttaaaccgtttgacgctaagtgatatagagacaggttaa

SEQ ID NO: 268938 - DNA, 54 bp, Artificial
  Synthetic oligonucleotide
ttttccggcggtctctggttaaagaacggcttaccaggttgtctgtgaaactgc

SEQ ID NO: 268939 - DNA, 55 bp, Artificial
  Synthetic oligonucleotide
tttgtctacagagagaacacaatgccgacttgaggcgattgggatacgggagcag

SEQ ID NO: 268940 - DNA, 55 bp, Artificial
  Synthetic oligonucleotide
ttgtgactttgccaaagcgaagagggtatgatagtagttggacttctgtgccgcg

SEQ ID NO: 268941 - DNA, 55 bp, Artificial
  Synthetic oligonucleotide
ttggagttgaagtagtcgtcgcagttgacgtagatggtagatgtgtagccttcgg

SEQ ID NO: 268942 - DNA, 55 bp, Artificial
  Synthetic oligonucleotide
ttggaaggtatactcttcgtcttcatcacaccgggctcattgtgtataccaaggc

SEQ ID NO: 268943 - DNA, 60 bp, Artificial
  Synthetic oligonucleotide
acttccgtgcctcaaccaatatctcgcatcagtggtcacgttatgtcctgcccgtgcaac

SEQ ID NO: 268944 - DNA, 55 bp, Artificial
  Synthetic oligonucleotide
ttgctacaacgatataattatgaagagagtgcgctagtttgggtagaggggaaga

SEQ ID NO: 268945 - DNA, 55 bp, Artificial
  Synthetic oligonucleotide
ttgacaaatgatcctcccatgaaaccgactacagcaaagcatccgtacaaggtag

SEQ ID NO: 268946 - DNA, 55 bp, Artificial
  Synthetic oligonucleotide
tgttccaccaggcgagagaaggtgccgaccaagaatacacccaaccttcacccat

SEQ ID NO: 268947 - DNA, 55 bp, Artificial
  Synthetic oligonucleotide
tgtagacaagtctctagccgtcgttatttcaagagaaggcactcgtcaaaccctc

SEQ ID NO: 268948 - DNA, 55 bp, Artificial
  Synthetic oligonucleotide
tgatagcgctttaagcgagccgcaccctttaattctggatgatcgctatgagcgg

SEQ ID NO: 268949 - DNA, 55 bp, Artificial
  Synthetic oligonucleotide
tctttaatgatcgtaccaacctacgtcaaaatgtgacgctgcctaatctagagtt

SEQ ID NO: 268950 - DNA, 55 bp, Artificial
  Synthetic oligonucleotide
tcgtccgttttcattgggtcggccattattagagcaagtgacccggactcgtagg

SEQ ID NO: 268951 - DNA, 55 bp, Artificial
  Synthetic oligonucleotide
tcggttttcgagtctgcttggcactagtttctgtccgcttcgttgggagcataac

SEQ ID NO: 268952 - DNA, 55 bp, Artificial
  Synthetic oligonucleotide
tcctcaaactgagaacaccacactgttccttcgtggccgttgagtacaccaacgc

SEQ ID NO: 268953 - DNA, 55 bp, Artificial
  Synthetic oligonucleotide
tccgagtagatccctgtaagcgtacggctccaaatctatattaagtcaacccgat

SEQ ID NO: 268954 - DNA, 60 bp, Artificial
  Synthetic oligonucleotide
ggatgtgtaagatccacgatactaccattaatctaatgacttattctatctaattaggag

SEQ ID NO: 268955 - DNA, 55 bp, Artificial
  Synthetic oligonucleotide
tcccaacggagaatggccaactgattcgccattgaatgctaccttctggcataag

SEQ ID NO: 268956 - DNA, 55 bp, Artificial
  Synthetic oligonucleotide
tccaactaaactcgtgccgagcaacaactatttgcgtcttgaaatttaccctaag

SEQ ID NO: 268957 - DNA, 55 bp, Artificial
  Synthetic oligonucleotide
tcaaactgccgtttcaattggcggaggcgtgccacaatcgaataatgcatacagc

SEQ ID NO: 268958 - DNA, 55 bp, Artificial
  Synthetic oligonucleotide
tagtgacctccatacgcgtacgccattcacgatagttgaaacgcgaaactagttt

SEQ ID NO: 268959 - DNA, 55 bp, Artificial
  Synthetic oligonucleotide
taggagccatgctagacgatgctgccggatatttgatgagcggctacgaaggatc

SEQ ID NO: 268960 - DNA, 55 bp, Artificial
  Synthetic oligonucleotide
tagaagtagtgtccaacatcgttctgttgtttccgttcttggataatctaccata

SEQ ID NO: 268961 - DNA, 55 bp, Artificial
  Synthetic oligonucleotide
taccacgtttagttgtgtattaaggctcatctttctgtttcgccgatctacggtg

SEQ ID NO: 268962 - DNA, 55 bp, Artificial
  Synthetic oligonucleotide
ggcccttctcgctggtttagttgacagtgatggatgctacgttgagtcctacaac

SEQ ID NO: 268963 - DNA, 55 bp, Artificial
  Synthetic oligonucleotide
ggcatagacatttggcgatgtggcgcctgacttataagagcgcatcaggaagggc

SEQ ID NO: 268964 - DNA, 55 bp, Artificial
  Synthetic oligonucleotide
ggatgtgctagtattgccaattacttccttcagcccagacgttggacaaatgggt

SEQ ID NO: 268965 - DNA, 59 bp, Artificial
  Synthetic oligonucleotide
atattcttacctatgcacttcttaggattaaatggaatgcctcgtcgtataccacaata

SEQ ID NO: 268966 - DNA, 55 bp, Artificial
  Synthetic oligonucleotide
ggatcggaaatcgaaaagagtacttaagattaggcacctcgctcgcgtcaacgtt

SEQ ID NO: 268967 - DNA, 55 bp, Artificial
  Synthetic oligonucleotide
ggatccctattagtcacgctattctaggcacagtcattgagtatttgccaagtcc

SEQ ID NO: 268968 - DNA, 55 bp, Artificial
  Synthetic oligonucleotide
ggacttcaaccacgctccttgtactttaccagctcatattcgcttgcttatgggg

SEQ ID NO: 268969 - DNA, 55 bp, Artificial
  Synthetic oligonucleotide
ggactcgccagagcattttatctttctctgtcggcagttgtcacacgctttcaag

SEQ ID NO: 268970 - DNA, 55 bp, Artificial
  Synthetic oligonucleotide
ggacgcccactctccaagaacgaccaattatagcgcaatttctcaacaaccgaga

SEQ ID NO: 268971 - DNA, 55 bp, Artificial
  Synthetic oligonucleotide
ggaccctagatgcctccttagaacccgagtatagtccgtgcaatatcgcagcctc

SEQ ID NO: 268972 - DNA, 55 bp, Artificial
  Synthetic oligonucleotide
ggaatgtgcaggagcgagcagacactcacgcttaactatggcagatagtgggtcc

SEQ ID NO: 268973 - DNA, 55 bp, Artificial
  Synthetic oligonucleotide
ggaagcatccgtggaatcgcttaagtttgtcacttctcacgaagaattcggtacc

SEQ ID NO: 268974 - DNA, 55 bp, Artificial
  Synthetic oligonucleotide
ggaacctctaagtggcatagaaccttctaagatccagtactgccctgattgtatc

SEQ ID NO: 268975 - DNA, 55 bp, Artificial
  Synthetic oligonucleotide
gcttgcattcggcactgactaatccaccgattaatgtatgtgtctcatcagtaca

SEQ ID NO: 268976 - DNA, 56 bp, Artificial
  Synthetic oligonucleotide
taggtagtgttggagtttttggttcattatttgctggttgagctggaaatagtaaa

SEQ ID NO: 268977 - DNA, 51 bp, Artificial
  Synthetic oligonucleotide
atatcccacaaacccccacgcgacgcgtgggggataccttaccgaaggtaa

SEQ ID NO: 268978 - DNA, 55 bp, Artificial
  Synthetic oligonucleotide
gcttctcggatctacaacccaccaaagtccttttgtaagagtctacttcatttgt

SEQ ID NO: 268979 - DNA, 55 bp, Artificial
  Synthetic oligonucleotide
gctgtagaaggtaccttgtcttcatatcctggctttgcggttctacctaaaggat

SEQ ID NO: 268980 - DNA, 55 bp, Artificial
  Synthetic oligonucleotide
gctgctttcacgcagatttgtccccaattcaggttcatcactcatgtgacctaag

SEQ ID NO: 268981 - DNA, 55 bp, Artificial
  Synthetic oligonucleotide
gctcagttgacggagcactctcaactagtgaggttatgagatcttgtaattggac

SEQ ID NO: 268982 - DNA, 55 bp, Artificial
  Synthetic oligonucleotide
gcgttgaactaatggaaagctatagtactaactctataaccgtgaggggaggagg

SEQ ID NO: 268983 - DNA, 54 bp, Artificial
  Synthetic oligonucleotide
gcgggataagaaaggttacccatatgaatgttccactgcctaggaaaggtcctt

SEQ ID NO: 268984 - DNA, 55 bp, Artificial
  Synthetic oligonucleotide
gcgaggtctgcattgggcaggtccgatcagttggtgacagctttgaactcgcaga

SEQ ID NO: 268985 - DNA, 55 bp, Artificial
  Synthetic oligonucleotide
gcctgtcggaacagaagagtacaagggtttgtatgatactgtgtcacgtttcacg

SEQ ID NO: 268986 - DNA, 55 bp, Artificial
  Synthetic oligonucleotide
gcccagtgagtgctaaccctgagaggatcaagagtgaacaccaacagttgtgcgg

SEQ ID NO: 268987 - DNA, 55 bp, Artificial
  Synthetic oligonucleotide
gcatgttggatcccggttgagtccgatagaaaatgcatgggttattgcaactccc

SEQ ID NO: 268988 - DNA, 52 bp, Artificial
  Synthetic oligonucleotide
atagtataagactatccccctaaatcataaggtttaactataaacgaacgga

SEQ ID NO: 268989 - DNA, 55 bp, Artificial
  Synthetic oligonucleotide
gcagtggtcgttcccatctgtttactgcaagctcataatggttacttgctttcgg

SEQ ID NO: 268990 - DNA, 53 bp, Artificial
  Synthetic oligonucleotide
gtacccttgacccggtattatagactccgtaaggtcgatcgtattagggtcta

SEQ ID NO: 268991 - DNA, 55 bp, Artificial
  Synthetic oligonucleotide
gtacagtaactacgacctcagtaaggtcaacgagttatggaggccgtatgctgtg

SEQ ID NO: 268992 - DNA, 55 bp, Artificial
  Synthetic oligonucleotide
gtacagatggagaccgcctatagtagttgcgtgatctaattgtggtcacgagaga

SEQ ID NO: 268993 - DNA, 55 bp, Artificial
  Synthetic oligonucleotide
gtaatacttgtgatggagaaggtatagtacgcaagattcgtagagtgggtcccgg

SEQ ID NO: 268994 - DNA, 55 bp, Artificial
  Synthetic oligonucleotide
gtaatacgctgatctaaaacgtgaatagaggcgaaattacggcgctagcgggtaa

SEQ ID NO: 268995 - DNA, 55 bp, Artificial
  Synthetic oligonucleotide
ggtttattctcgatacgatagggctaggaagggctatttgtgtgaatcctgtaac

SEQ ID NO: 268996 - DNA, 55 bp, Artificial
  Synthetic oligonucleotide
ggttgccctataaatttcgcccacatgtcctaaatgacggccaatacttttcgcg

SEQ ID NO: 268997 - DNA, 55 bp, Artificial
  Synthetic oligonucleotide
ggtgggcgacagaaatctcttaatgtagtggcaatcatggctcgattgcggtaac

SEQ ID NO: 268998 - DNA, 55 bp, Artificial
  Synthetic oligonucleotide
ggtgacgcctcaggggtgaccatgtaaaagatccccttgagcttatctgctacag

SEQ ID NO: 268999 - DNA, 56 bp, Artificial
  Synthetic oligonucleotide
atagaaataggctcttcaaagaagtaaattaatcaagccattataaaatattagta

SEQ ID NO: 269000 - DNA, 55 bp, Artificial
  Synthetic oligonucleotide
ggtcttcttaccggtgagcggatcatgaataagaaccaaatcgatgtacccaagc

SEQ ID NO: 269001 - DNA, 55 bp, Artificial
  Synthetic oligonucleotide
ggtctagggaagaaatatattccgcgacattttgttgaagacgacattgcgaccg

SEQ ID NO: 269002 - DNA, 55 bp, Artificial
  Synthetic oligonucleotide
ggtcgtaaccgactagggagtcgacgaccgtttgtagtctcatgttgagcacttg

SEQ ID NO: 269003 - DNA, 55 bp, Artificial
  Synthetic oligonucleotide
ggtcccattgaactcaaatccttactcggattcaaccctatagactcacccaacg

SEQ ID NO: 269004 - DNA, 55 bp, Artificial
  Synthetic oligonucleotide
ggtacgcgttttgtcaagaacggagcgaatggctctttcagcacgtccattttgg

SEQ ID NO: 269005 - DNA, 55 bp, Artificial
  Synthetic oligonucleotide
gggttactactgcattccttcgatgccatagatccactgtaccatccagacaccc

SEQ ID NO: 269006 - DNA, 54 bp, Artificial
  Synthetic oligonucleotide
ggggaagtacaaacattcgaacggtggcccttaccagagcacgtatagcaacgg

SEQ ID NO: 269007 - DNA, 55 bp, Artificial
  Synthetic oligonucleotide
gggcccttggtcctgataccaacacgcttgtgtgtaaataatgaacggtccttga

SEQ ID NO: 269008 - DNA, 55 bp, Artificial
  Synthetic oligonucleotide
gggatgacactcgatgctccctcagatggtgggtacttccagcgcactcgtatcg

SEQ ID NO: 269009 - DNA, 55 bp, Artificial
  Synthetic oligonucleotide
gggaacataccccagtcaaagcatcccagaaccggatcgtatgatcatagccagc

SEQ ID NO: 269010 - DNA, 56 bp, Artificial
  Synthetic oligonucleotide
agattctgtatccttacattaatttattcgccgccgtagccggtatgtcgccttag

SEQ ID NO: 269011 - DNA, 55 bp, Artificial
  Synthetic oligonucleotide
ggctgtattcgattggttgttgggtccccatagctgtagccagccactagagttg

SEQ ID NO: 269012 - DNA, 55 bp, Artificial
  Synthetic oligonucleotide
ggctaattggtaaaccttgacacttccaatgtcattttgcgtgttcgactcacgt

SEQ ID NO: 269013 - DNA, 55 bp, Artificial
  Synthetic oligonucleotide
ggcgcttatgtcaaggcgcgtcaaatgttctgccgggtaaccgctttgcgtgcat

SEQ ID NO: 269014 - DNA, 55 bp, Artificial
  Synthetic oligonucleotide
ggcctcaacacatccttgaacgtgttttggtagagcaattggtcgatccctctcg

SEQ ID NO: 269015 - DNA, 53 bp, Artificial
  Synthetic oligonucleotide
ggccgagtgaacgaaatacgaacaccggaaggttctggaactaggttggttgc

SEQ ID NO: 269016 - DNA, 55 bp, Artificial
  Synthetic oligonucleotide
ccaacgtctaaccctagcacggcattgggcagaattggtataaatgttcaacaag

SEQ ID NO: 269017 - DNA, 55 bp, Artificial
  Synthetic oligonucleotide
ccaagatctcagcaataagaggtgtcgcatactgtactagagtttcacccagcgt

SEQ ID NO: 269018 - DNA, 55 bp, Artificial
  Synthetic oligonucleotide
ccaagggctgagcccagatacaaggtggatggatagtgggtaatgtgcatgtgac

SEQ ID NO: 269019 - DNA, 55 bp, Artificial
  Synthetic oligonucleotide
ccaatgacacgaattcgaccaagttccgtctcttcttatcatgtctcctctcgtg

SEQ ID NO: 269020 - DNA, 55 bp, Artificial
  Synthetic oligonucleotide
atcggacctattatggtagttgtgattcaggctccaacgaacggacttcgagcac

SEQ ID NO: 269021 - DNA, 60 bp, Artificial
  Synthetic oligonucleotide
agtttactaggattatgcctagtaatacaaatagccagtggtctgtttctcgcaatgcat

SEQ ID NO: 269022 - DNA, 55 bp, Artificial
  Synthetic oligonucleotide
ccacaagggctctagtaacagtgcgaaatacaattgcgtttatgcacactgtggc

SEQ ID NO: 269023 - DNA, 55 bp, Artificial
  Synthetic oligonucleotide
ccacaggatcattcttagggatcttgggccctttccgagcaacgcttttagggga

SEQ ID NO: 269024 - DNA, 54 bp, Artificial
  Synthetic oligonucleotide
atccaccttaatttgtcccaagaaccataattttggccaactggtacatggtcc

SEQ ID NO: 269025 - DNA, 55 bp, Artificial
  Synthetic oligonucleotide
ccaccaagtgacatccttggccgtggaaggagagtactcacagagcttgtccaaa

SEQ ID NO: 269026 - DNA, 55 bp, Artificial
  Synthetic oligonucleotide
ccacgtctgatcctagtctatagttaccaatcgcttgaccccaattgattttcga

SEQ ID NO: 269027 - DNA, 55 bp, Artificial
  Synthetic oligonucleotide
atagggcaaccggaaataggagctaaacaatcgggcacctgggccttgtggcaca

SEQ ID NO: 269028 - DNA, 55 bp, Artificial
  Synthetic oligonucleotide
ccacttcgtacttcggtgcttcgctttggagatttaaccacggaagagtcgcaag

SEQ ID NO: 269029 - DNA, 55 bp, Artificial
  Synthetic oligonucleotide
agttgttcaacagctatgtgagtcaagtttccgacacagttaaagagggcaagtc

SEQ ID NO: 269030 - DNA, 54 bp, Artificial
  Synthetic oligonucleotide
ccataataccccagaaaactgtagtccccacaaactacattcgacatattgttt

SEQ ID NO: 269031 - DNA, 55 bp, Artificial
  Synthetic oligonucleotide
ccattacaccaaaagcgtgacagcagatctcgacatgtaccgtctggtttacgag

SEQ ID NO: 269032 - DNA, 58 bp, Artificial
  Synthetic oligonucleotide
agtcgctataagcgatttgtccgatatgaggacaattaggtaatttagttacctgata

SEQ ID NO: 269033 - DNA, 55 bp, Artificial
  Synthetic oligonucleotide
ccattcagagttgtaggctttaccggtggcaacagaaacaggactaggagatgat

SEQ ID NO: 269034 - DNA, 55 bp, Artificial
  Synthetic oligonucleotide
cccaaataggatataacgtgaccaaagggatgtgagataatagttgcggcacgga

SEQ ID NO: 269035 - DNA, 55 bp, Artificial
  Synthetic oligonucleotide
aggagtagtgatcatgccaggaattatagtgtgataggatcttttgttcccttcg

SEQ ID NO: 269036 - DNA, 55 bp, Artificial
  Synthetic oligonucleotide
cccagatccaatttctgctaggattcccaccctgctacgctcattatactccttg

SEQ ID NO: 269037 - DNA, 55 bp, Artificial
  Synthetic oligonucleotide
agctagcaccggacttgtcaagcacgtcatagttcagagacgatttgcggcggga

SEQ ID NO: 269038 - DNA, 55 bp, Artificial
  Synthetic oligonucleotide
agctaaatacatcggagcttcaatagctacattaggattaggaggtgccgctatc

SEQ ID NO: 269039 - DNA, 54 bp, Artificial
  Synthetic oligonucleotide
ccccagtgtctacaagtttgtttctactaccgtcctagtctgtacacccacgag

SEQ ID NO: 269040 - DNA, 53 bp, Artificial
  Synthetic oligonucleotide
cccctaaatcataaggtttaactataaacgaacggaccctaagatgaagcaga

SEQ ID NO: 269041 - DNA, 55 bp, Artificial
  Synthetic oligonucleotide
cccctcaagacttcgccataccgttgacagcccctgtggactatggcttacagga

SEQ ID NO: 269042 - DNA, 55 bp, Artificial
  Synthetic oligonucleotide
cccgatctatctggaccgctatccttaggtatcgtctgggctcctcctaataaga

SEQ ID NO: 269043 - DNA, 57 bp, Artificial
  Synthetic oligonucleotide
agtcgcggtgaaattcttaactacttcgtactaaccactcatcaacagcaagaagct

SEQ ID NO: 269044 - DNA, 55 bp, Artificial
  Synthetic oligonucleotide
cccgcacacgccaccttcataactccaactctcaactggtgcgaacagatccgat

SEQ ID NO: 269045 - DNA, 55 bp, Artificial
  Synthetic oligonucleotide
cccggaactccataccaagagtcccaatagtgacctccatacgcgtacgccattc

SEQ ID NO: 269046 - DNA, 55 bp, Artificial
  Synthetic oligonucleotide
cccggccacgcctccaatatcagaggtcagaatatgggcacctttattgcgtggg

SEQ ID NO: 269047 - DNA, 55 bp, Artificial
  Synthetic oligonucleotide
agcgaaattaacgcatgcgaatatagcataagtatatgcaccgatatgtgcgaag

SEQ ID NO: 269048 - DNA, 55 bp, Artificial
  Synthetic oligonucleotide
caattgatgcacttgatatcgccggagccgaagaattgtatcgaatcattgagtc

SEQ ID NO: 269049 - DNA, 55 bp, Artificial
  Synthetic oligonucleotide
caatatattatacagcgatagaacctgggagctgatgtggtagcgccgacctcaa

SEQ ID NO: 269050 - DNA, 55 bp, Artificial
  Synthetic oligonucleotide
caagtacttgatatgcaacttagatgtatttacgcccgacgtattttctgtcgag

SEQ ID NO: 269051 - DNA, 55 bp, Artificial
  Synthetic oligonucleotide
cacgacgctacgcctgttggacagatattattaggactcccgttccaaaatgagc

SEQ ID NO: 269052 - DNA, 55 bp, Artificial
  Synthetic oligonucleotide
caagatcaggaatgctctatgcgattatacggaagctacgtcttgtagggaataa

SEQ ID NO: 269053 - DNA, 55 bp, Artificial
  Synthetic oligonucleotide
cacgagtagccttacagacggggcctccatagaccctcgaaagtataatgggagg

SEQ ID NO: 269054 - DNA, 59 bp, Artificial
  Synthetic oligonucleotide
agtaggttaagaatataatattcgccggtgtagcgtgcatgtagccgttggcgtcgata

SEQ ID NO: 269055 - DNA, 55 bp, Artificial
  Synthetic oligonucleotide
caaccacttatgccgtattgtgaagaccatggattgtatataatcccgaggatgc

SEQ ID NO: 269056 - DNA, 55 bp, Artificial
  Synthetic oligonucleotide
caaacgggtgtgcacgttaactatgggaaaaccctgctatctccaagtgcagggg

SEQ ID NO: 269057 - DNA, 55 bp, Artificial
  Synthetic oligonucleotide
cacgcagcgcaaggagagtgggtcttagcccaacaagattcggtcgttacactac

SEQ ID NO: 269058 - DNA, 55 bp, Artificial
  Synthetic oligonucleotide
cacggcacgattgtctgagttagcaagggcgttctggtacgaaggagagttttcg

SEQ ID NO: 269059 - DNA, 55 bp, Artificial
  Synthetic oligonucleotide
cacgtatttctcaataaaacatggggcataatatgcaatggagcagcctggtcac

SEQ ID NO: 269060 - DNA, 55 bp, Artificial
  Synthetic oligonucleotide
attgaggtgctgtggttgtaatttcatcccttatttattgatctggggttacccc

SEQ ID NO: 269061 - DNA, 55 bp, Artificial
  Synthetic oligonucleotide
cactaaacagaactcgtacttcgtcgtgcattcaattcctctaacgagagactga

SEQ ID NO: 269062 - DNA, 55 bp, Artificial
  Synthetic oligonucleotide
cactaaatagcgaaacttgaagaacgcaaattgtccacaaccttgtcacactttg

SEQ ID NO: 269063 - DNA, 55 bp, Artificial
  Synthetic oligonucleotide
cactctatgtgggcgttacggttcccttcgctaacggtccaggagcacggcattg

SEQ ID NO: 269064 - DNA, 55 bp, Artificial
  Synthetic oligonucleotide
atgggagctgcactgacaaactaggataacattttgcagaatcgtaaattacccg

SEQ ID NO: 269065 - DNA, 53 bp, Artificial
  Synthetic oligonucleotide
aggtattaaaactccttatataagtttaacttcagattgtacttatagagaaa

SEQ ID NO: 269066 - DNA, 55 bp, Artificial
  Synthetic oligonucleotide
atgatgccgacacagacttgatctgtgtcctcgtatacactcgatacacgagtat

SEQ ID NO: 269067 - DNA, 55 bp, Artificial
  Synthetic oligonucleotide
atgagttacggggatatagcgcatttatatggcggtcgaggaattaacattgttg

SEQ ID NO: 269068 - DNA, 55 bp, Artificial
  Synthetic oligonucleotide
cagggatcttatcagtggagaaccatactcatcggaatgaatgctatctcgggga

SEQ ID NO: 269069 - DNA, 55 bp, Artificial
  Synthetic oligonucleotide
cagtaagcgggtgcgcctatagtttccctttggatgcaaatgagcaatgttaccg

SEQ ID NO: 269070 - DNA, 55 bp, Artificial
  Synthetic oligonucleotide
cagtcccttctcaatttaattaactattattcgcccgctacgcgggctagctggt

SEQ ID NO: 269071 - DNA, 55 bp, Artificial
  Synthetic oligonucleotide
cagtgttatcttgcacatgatggcctgtgcgtacctctcaaataaaagcgaccgg

SEQ ID NO: 269072 - DNA, 55 bp, Artificial
  Synthetic oligonucleotide
atgagcttgcagtaaacagatgggaacgaccactgcaaatggtcacatagagctg

SEQ ID NO: 269073 - DNA, 55 bp, Artificial
  Synthetic oligonucleotide
catgggaataacggccagtatgaaatacaagatggtattctatgtgcggacaagg

SEQ ID NO: 269074 - DNA, 55 bp, Artificial
  Synthetic oligonucleotide
catgtcgcgtccaagtgcgtcaggtgactcagggctcaaaatgtggatataacct

SEQ ID NO: 269075 - DNA, 55 bp, Artificial
  Synthetic oligonucleotide
atgaatgacatccgagaaacagcggggagcagccaagtgagctgcttagaatcgg

SEQ ID NO: 269076 - DNA, 57 bp, Artificial
  Synthetic oligonucleotide
ctttgtggacctatatattttattagcccgcgtagcgtgagagtcagttacgttgac

SEQ ID NO: 269077 - DNA, 55 bp, Artificial
  Synthetic oligonucleotide
ccaaactgctccttcccgtgccgttgttccggttcagaggtccgatctgcctccc

SEQ ID NO: 269078 - DNA, 55 bp, Artificial
  Synthetic oligonucleotide
ccaacggacaaggcagagacaagagctacaatgtaaggaagacagtcaagttggt

SEQ ID NO: 269079 - DNA, 55 bp, Artificial
  Synthetic oligonucleotide
atgaatcgatctacccatttgaaaactcacctgatcatgcgccaactacgtctgc

SEQ ID NO: 269080 - DNA, 55 bp, Artificial
  Synthetic oligonucleotide
ccgtgctacaattttccctcaagcaatattaggtttcgcccttgcggaagcatgt

SEQ ID NO: 269081 - DNA, 55 bp, Artificial
  Synthetic oligonucleotide
cctagtaatacaaatagccagtggtctgtttctcgcaatgcattacagctctaac

SEQ ID NO: 269082 - DNA, 55 bp, Artificial
  Synthetic oligonucleotide
cctatacttaatgagtctctctcccgataccagaggaaagggtcggtggacatga

SEQ ID NO: 269083 - DNA, 55 bp, Artificial
  Synthetic oligonucleotide
aatgttattatcacaggtcatgctatagctatgattttcttattcgtaatgccag

SEQ ID NO: 269084 - DNA, 55 bp, Artificial
  Synthetic oligonucleotide
cctcgtcttcctcgttcttgtcgacacctgtgtcaatcgcatgcatatcacgctg

SEQ ID NO: 269085 - DNA, 55 bp, Artificial
  Synthetic oligonucleotide
cctctcaacaacatacgagtgtgcaccaacactcaacaatggcacaccagggact

SEQ ID NO: 269086 - DNA, 54 bp, Artificial
  Synthetic oligonucleotide
aatcgggaagccgtagcataattcgttaatagacgtcgtctgtttctttaagcc

SEQ ID NO: 269087 - DNA, 60 bp, Artificial
  Synthetic oligonucleotide
gagattcagatttagagttaatcttatctagacctgctgaatatcatacatttagtgaat

SEQ ID NO: 269088 - DNA, 55 bp, Artificial
  Synthetic oligonucleotide
ggtctaaatggaaacaaccaagattattaaccaaatgtcccataatatatgttaa

SEQ ID NO: 269089 - DNA, 55 bp, Artificial
  Synthetic oligonucleotide
cctctgtctaatgtcggctggtcgctaattgcgaatcaaggaggacaatgggcgg

SEQ ID NO: 269090 - DNA, 55 bp, Artificial
  Synthetic oligonucleotide
aatccagccaagtaggacaatatcctttcattagacatctgtggattcaagagcc

SEQ ID NO: 269091 - DNA, 55 bp, Artificial
  Synthetic oligonucleotide
cctggagctggttggctctcatcacgtccccaatgatagacgcattctcgatcgt

SEQ ID NO: 269092 - DNA, 55 bp, Artificial
  Synthetic oligonucleotide
cctggtgttggcgccaaatgaagaccgtgatacatccaacggtcaagtagcctcc

SEQ ID NO: 269093 - DNA, 55 bp, Artificial
  Synthetic oligonucleotide
cctggttcctacaacttgttacgccacgaaagcggggtccatcgagtccagagga

SEQ ID NO: 269094 - DNA, 55 bp, Artificial
  Synthetic oligonucleotide
ccttacgacgacttgtaccaagttcgttccagattgggtgaaatcgctcctcatt

SEQ ID NO: 269095 - DNA, 55 bp, Artificial
  Synthetic oligonucleotide
ccttagtgaaatccaagttgtgctgtataacatctgggtaacatgtgactgtctg

SEQ ID NO: 269096 - DNA, 55 bp, Artificial
  Synthetic oligonucleotide
ccttgtgaactacgcggtccaaaacaaagatcatgcaatgtcagcgtacaagacc

SEQ ID NO: 269097 - DNA, 55 bp, Artificial
  Synthetic oligonucleotide
cgaaacgtagaggccaagacgaactacttctgtgttcaagatctgagcgtagtgg

SEQ ID NO: 269098 - DNA, 55 bp, Artificial
  Synthetic oligonucleotide
cgaaactcctaagaccttttgtacatctactggttggcttaacgacgacaagctg

SEQ ID NO: 269099 - DNA, 60 bp, Artificial
  Synthetic oligonucleotide
ggtattagagaggatctagccgtcgaactggagccgatgattatcgtcagaacggtcaca

SEQ ID NO: 269100 - DNA, 55 bp, Artificial
  Synthetic oligonucleotide
cgaaagtattaagaccccatcaggtggctggagtaaagtttctctacaggtgtac

SEQ ID NO: 269101 - DNA, 55 bp, Artificial
  Synthetic oligonucleotide
cgaagacccgttcgcattgtctcttaatataggaagcattctctccacggtagac

SEQ ID NO: 269102 - DNA, 55 bp, Artificial
  Synthetic oligonucleotide
cgacacgtgcgaggtgactgtctttctttcgcacacttatgggtaagtgcttacg

SEQ ID NO: 269103 - DNA, 55 bp, Artificial
  Synthetic oligonucleotide
aacggcgcctggtgcatatggattagccctggccctcgctttcttaggtgcgacg

SEQ ID NO: 269104 - DNA, 55 bp, Artificial
  Synthetic oligonucleotide
cgacggcaataagtatcagcatcaagcgataacagttggttcaggcgacgttcta

SEQ ID NO: 269105 - DNA, 55 bp, Artificial
  Synthetic oligonucleotide
cgagaaacctgattgtgttctcgcttacctagaatgatacactcgcagtcattcc

SEQ ID NO: 269106 - DNA, 55 bp, Artificial
  Synthetic oligonucleotide
aaatgccgtttagtttgtttagcctgcggtcaccatatctaggcgagaaatgata

SEQ ID NO: 269107 - DNA, 55 bp, Artificial
  Synthetic oligonucleotide
cgagacatagatctcaaacctattccggtactaccccagtattgcatgagtctag

SEQ ID NO: 269108 - DNA, 55 bp, Artificial
  Synthetic oligonucleotide
cgagatttgcatccggtagggcgacgtgaaaagggttcgatacgtgccagcacga

SEQ ID NO: 269109 - DNA, 55 bp, Artificial
  Synthetic oligonucleotide
aaagtccatctggcgttccgccatgaaaccacattggtcgtaaccgactagggag

SEQ ID NO: 269110 - DNA, 57 bp, Artificial
  Synthetic oligonucleotide
aggacaaaatctgaaaatacacggctatgccttgtatgcccggctacgccgggtgaa

SEQ ID NO: 269111 - DNA, 55 bp, Artificial
  Synthetic oligonucleotide
agactgcaattgcatctggggaattgtcccaaaattctgatccacagacccaggt

SEQ ID NO: 269112 - DNA, 55 bp, Artificial
  Synthetic oligonucleotide
ccgcgagtctctccttaactactttatgcaccctaaatttatcccattcagtaga

SEQ ID NO: 269113 - DNA, 55 bp, Artificial
  Synthetic oligonucleotide
ccgctaccgttgctattagcgttaccgttgcccttttgacttgaaatggtcttca

SEQ ID NO: 269114 - DNA, 55 bp, Artificial
  Synthetic oligonucleotide
acttggacagagttgcggaatggaaccttcttcttggtgtaattgctatccctgg

SEQ ID NO: 269115 - DNA, 55 bp, Artificial
  Synthetic oligonucleotide
ccgccaagtgccttaccacttgtagttatatcaggtacaaagtcctcctgttccc

SEQ ID NO: 269116 - DNA, 55 bp, Artificial
  Synthetic oligonucleotide
acggtacatgtcgagatctgctgtcacgcttttggtgtaatggaactcgatgcac

SEQ ID NO: 269117 - DNA, 55 bp, Artificial
  Synthetic oligonucleotide
acctaacaagggtaaatcccacaagagaacggtatcttgcaccgatgtttctctc

SEQ ID NO: 269118 - DNA, 55 bp, Artificial
  Synthetic oligonucleotide
accggccaatgcaatcaacgacaagtgtctatccttgagtccgtgtttcaatcct

SEQ ID NO: 269119 - DNA, 55 bp, Artificial
  Synthetic oligonucleotide
ccgatttatagtacggcaaccggctcttgatgtcgttgtagataccgtagcccca

SEQ ID NO: 269120 - DNA, 55 bp, Artificial
  Synthetic oligonucleotide
agccaactatagcaccatgctacacaattcctcaatccctacgcagagtaagtct

SEQ ID NO: 269121 - DNA, 60 bp, Artificial
  Synthetic oligonucleotide
attgttgcacgggcaggacataacgtgaccactgatgcgtgctattggttgaggcacgga

SEQ ID NO: 269122 - DNA, 53 bp, Artificial
  Synthetic oligonucleotide
ccgtcaaattattcattaagtcggccccatccgggtttggtttgagagtcaac

SEQ ID NO: 269123 - DNA, 55 bp, Artificial
  Synthetic oligonucleotide
ccctcattgacatagatatattccccagtagcatttccggagaacccaaatccat

SEQ ID NO: 269124 - DNA, 55 bp, Artificial
  Synthetic oligonucleotide
agccaatagtagctggtgacagtagcggcctacaatagcatattagctcatattg

SEQ ID NO: 269125 - DNA, 55 bp, Artificial
  Synthetic oligonucleotide
acatggtgtagaatgacaagacaagagaggatcgactagtttcccggtggaatgc

SEQ ID NO: 269126 - DNA, 55 bp, Artificial
  Synthetic oligonucleotide
acagacgttagacgcgtgggacgtccctcctagtttacgaagcttggacataaga

SEQ ID NO: 269127 - DNA, 55 bp, Artificial
  Synthetic oligonucleotide
aatttagggtgcataaagtagttaaggagagactcgcggaaattcatctgttggg

SEQ ID NO: 269128 - DNA, 54 bp, Artificial
  Synthetic oligonucleotide
caaccatgagtgcaaaggaccgcagagatgaggttcgagcaaagttggcgatgc

SEQ ID NO: 269129 - DNA, 54 bp, Artificial
  Synthetic oligonucleotide
aaatttgcggtgcacgtatgtccggattattccctcagtccgttcggcgcgcct

SEQ ID NO: 269130 - DNA, 52 bp, Artificial
  Synthetic oligonucleotide
aaccagttgctatcacacaaagagttatttctggggtttaccaaggggttaa

SEQ ID NO: 269131 - DNA, 54 bp, Artificial
  Synthetic oligonucleotide
agcgacgaaccccgatccgcatccgatgtccaatgctagctcgtgtgcagagtt

SEQ ID NO: 269132 - DNA, 55 bp, Artificial
  Synthetic oligonucleotide
aaatggtactacacgtaacccttcaatccgtgctacaattttccctcaagcaata

SEQ ID NO: 269133 - DNA, 54 bp, Artificial
  Synthetic oligonucleotide
ttcggtagttacactgttgataaaatcgtatcctagagacgaccctgacgtaca

SEQ ID NO: 269134 - DNA, 54 bp, Artificial
  Synthetic oligonucleotide
attgcccgttcacaaaccacgacgcaatgtccccgtctgcaaagtcctgctcgc

SEQ ID NO: 269135 - DNA, 54 bp, Artificial
  Synthetic oligonucleotide
agccgagactacgctagctgccgagaatagttgcccgctagcctgggctcaggc

SEQ ID NO: 269136 - DNA, 52 bp, Artificial
  Synthetic oligonucleotide
ggttctacaggagagcaccccgttcagttctcctaaggcaaaaccttttacc

SEQ ID NO: 269137 - DNA, 54 bp, Artificial
  Synthetic oligonucleotide
agacaggtagcgaggccaagtatgggccgccaacacacgttagacgcaagccgt

SEQ ID NO: 269138 - DNA, 54 bp, Artificial
  Synthetic oligonucleotide
tgggtatggtagaagaactggttgactctttacgcttcttcacgtcagttatgc

SEQ ID NO: 269139 - DNA, 54 bp, Artificial
  Synthetic oligonucleotide
agaactagcggtggatgcggtagtggggataccgactaaacttaatgggcgtag

SEQ ID NO: 269140 - DNA, 54 bp, Artificial
  Synthetic oligonucleotide
ggacatttctattggaggagccgtctgacagcgggaccaattgagtacggtgtg

SEQ ID NO: 269141 - DNA, 54 bp, Artificial
  Synthetic oligonucleotide
actccatcttctcctggcgtggagctgttggcagtccgctgtaatccggacgta

SEQ ID NO: 269142 - DNA, 54 bp, Artificial
  Synthetic oligonucleotide
tgggtacagggtcgtttggccgggtgcacttgacacggtcgatccataacggac

SEQ ID NO: 269143 - DNA, 54 bp, Artificial
  Synthetic oligonucleotide
cgattatatcggttaaccttaaaaggtgattataccatcgccaaagggcgacta

SEQ ID NO: 269144 - DNA, 54 bp, Artificial
  Synthetic oligonucleotide
agttccccgtaccataaaggaagaggagcgctttcatggagtcgttatcgtact

SEQ ID NO: 269145 - DNA, 54 bp, Artificial
  Synthetic oligonucleotide
tacagacacggtagtagttcggtgggttacgtcgcatcggggttctggggtgga

SEQ ID NO: 269146 - DNA, 54 bp, Artificial
  Synthetic oligonucleotide
tacgtccggattacagcggactgccaacagctccacgccaggagaagatggagt

SEQ ID NO: 269147 - DNA, 54 bp, Artificial
  Synthetic oligonucleotide
tagacgtacctactccttgagctatgcgttttcaagattctgcaactcctaacc

SEQ ID NO: 269148 - DNA, 54 bp, Artificial
  Synthetic oligonucleotide
atattcagctacatccccagcgaagtcaacaaactaatcgaaacaaacgagttc

SEQ ID NO: 269149 - DNA, 54 bp, Artificial
  Synthetic oligonucleotide
atattccagtaaacgagatagagcctacggacgtacatattgaggagcctgaaa

SEQ ID NO: 269150 - DNA, 54 bp, Artificial
  Synthetic oligonucleotide
atccattgacaaagacgcacagtcccgagcctggactaaacgaacttccaggag

SEQ ID NO: 269151 - DNA, 54 bp, Artificial
  Synthetic oligonucleotide
cagatgctgaaccttggcccaaaatatcgacgttcgaacttctagcagatggta

SEQ ID NO: 269152 - DNA, 54 bp, Artificial
  Synthetic oligonucleotide
caccatatgtacgtagtaggtttagatatagattctagagcatactttactagt

SEQ ID NO: 269153 - DNA, 54 bp, Artificial
  Synthetic oligonucleotide
cggtgctacttggatgtctcacgtgcctgtttagtgtatctcgacaaggacttg

SEQ ID NO: 269154 - DNA, 55 bp, Artificial
  Synthetic oligonucleotide
aacctatatatatcatttacgttagcgataaatgataaagggttataaacgttca

SEQ ID NO: 269155 - DNA, 54 bp, Artificial
  Synthetic oligonucleotide
ctttaccgatcgtgccaacacaattatgggtctaatacacaatacctatccgaa

SEQ ID NO: 269156 - DNA, 54 bp, Artificial
  Synthetic oligonucleotide
cccatacgcccaagccctctcgcctaatcgagtacctttgcggtgaccacctgc

SEQ ID NO: 269157 - DNA, 54 bp, Artificial
  Synthetic oligonucleotide
cgtctcaactccgccttgcgagcaaaccctattaagaagtaaggacacgaatca

SEQ ID NO: 269158 - DNA, 54 bp, Artificial
  Synthetic oligonucleotide
cggtattcgtttcttatgctggacttgtagctgtggtttcgtttccatagatgg

SEQ ID NO: 269159 - DNA, 54 bp, Artificial
  Synthetic oligonucleotide
cgagctactagaaagtttcctagagacatggacgtttggagtcgctatctaaaa

SEQ ID NO: 269160 - DNA, 53 bp, Artificial
  Synthetic oligonucleotide
catcgaataacgcgttgttgcttattgtgtcgatgctgacaagcacgggttgt

SEQ ID NO: 269161 - DNA, 53 bp, Artificial
  Synthetic oligonucleotide
tgcccacgcaatgcgtggggataccgtactaaaggtgcggcatttagtttaaa

SEQ ID NO: 269162 - DNA, 53 bp, Artificial
  Synthetic oligonucleotide
tctctcgtgccgatggaatggccaatacgggtacttattgccacagcgtaagc

SEQ ID NO: 269163 - DNA, 53 bp, Artificial
  Synthetic oligonucleotide
tcgtgggccaatttagggcaaggtgcgcctgaacacggtgatacgatccctgg

SEQ ID NO: 269164 - DNA, 53 bp, Artificial
  Synthetic oligonucleotide
ctaacagccccaaacgggctcgatctctgatcgcgctgtgtgcacgtctatac

SEQ ID NO: 269165 - DNA, 53 bp, Artificial
  Synthetic oligonucleotide
ttaggctaataaattaaagtaacgaataaccagtgaatcgaacactgaacctt

SEQ ID NO: 269166 - DNA, 53 bp, Artificial
  Synthetic oligonucleotide
cgtcgtaggcgacatgccggctatgccggcgaatatgctatcatttataggat

SEQ ID NO: 269167 - DNA, 53 bp, Artificial
  Synthetic oligonucleotide
aggaggtttaactggagttatgctttctaatgctagtatagatgtagctttcc

SEQ ID NO: 269168 - DNA, 53 bp, Artificial
  Synthetic oligonucleotide
acccttcgttcagatgacatgccctcccgtgtacggggctcgcttagccagcc

SEQ ID NO: 269169 - DNA, 53 bp, Artificial
  Synthetic oligonucleotide
tgttgtagttataaaacaatacaacgtgctttagatttaggatgaatatatgt

SEQ ID NO: 269170 - DNA, 53 bp, Artificial
  Synthetic oligonucleotide
tatcaattgcacttatgatggtctccgatctctcgtgatgatcactgtctatt

SEQ ID NO: 269171 - DNA, 53 bp, Artificial
  Synthetic oligonucleotide
ctttgctcccctcgcactcagaatttcttatgttgcgcaatcgtacatacctc

SEQ ID NO: 269172 - DNA, 53 bp, Artificial
  Synthetic oligonucleotide
tcagagtagcatcgggtgagttcgggttcactggcggagtttctggctgtgga

SEQ ID NO: 269173 - DNA, 53 bp, Artificial
  Synthetic oligonucleotide
accaacgccgacagattggattgaggtagttcgagctccctagagaccatatg

SEQ ID NO: 269174 - DNA, 53 bp, Artificial
  Synthetic oligonucleotide
tagctgactattccctttcacaaactaatcgtccgctacgcggacatgccggc

SEQ ID NO: 269175 - DNA, 53 bp, Artificial
  Synthetic oligonucleotide
ggtaacgctgcggacgtaaatatgggcacgggctgcggtgagaagcagatatc

SEQ ID NO: 269176 - DNA, 54 bp, Artificial
  Synthetic oligonucleotide
ttaccttataaggtaagcggttatgatgaaaaggtagacataggacacttaaaa

SEQ ID NO: 269177 - DNA, 52 bp, Artificial
  Synthetic oligonucleotide
cttaggtgactaaggtaaaattaaagacttattacgtagtaggtcaaatggc

SEQ ID NO: 269178 - DNA, 52 bp, Artificial
  Synthetic oligonucleotide
ggcttcatttgcgcttcttagttgcaacttaatgtttgcgatggtttctttc

SEQ ID NO: 269179 - DNA, 52 bp, Artificial
  Synthetic oligonucleotide
tgcgggacgtcaatgcactcggtaaacgatgtcatgccgtcgttgaggccct

SEQ ID NO: 269180 - DNA, 52 bp, Artificial
  Synthetic oligonucleotide
tgcttcccgtcacaacagctgtaggagcccttggtgccgtgccgatcgtttt

SEQ ID NO: 269181 - DNA, 52 bp, Artificial
  Synthetic oligonucleotide
agctatgtctggagtcgcacttcgcactcgcagaatcacaggcgccaaccga

SEQ ID NO: 269182 - DNA, 52 bp, Artificial
  Synthetic oligonucleotide
ggtcgtgtgggggccggcaattgtaccatccctcggagccaggcatgagaga

SEQ ID NO: 269183 - DNA, 52 bp, Artificial
  Synthetic oligonucleotide
agctggcggatcgcgaatcaccactgccgtgttccaagctattgtgcgcatc

SEQ ID NO: 269184 - DNA, 52 bp, Artificial
  Synthetic oligonucleotide
ggtaccatcgattccaatctctgcaacaatcaacgtcaagcctcctacggct

SEQ ID NO: 269185 - DNA, 52 bp, Artificial
  Synthetic oligonucleotide
tgatagcaaacggtttgaaagaggaccgcacgaaatctcctccgtgtatagc

SEQ ID NO: 269186 - DNA, 52 bp, Artificial
  Synthetic oligonucleotide
tgagaggtgtggtggccaaatgggtgcgctgtggagtcgttgtctgtaggct

SEQ ID NO: 269187 - DNA, 57 bp, Artificial
  Synthetic oligonucleotide
ttacctagtgtaacccattgcgttgaactaatggaaagctatagtactaactctata

SEQ ID NO: 269188 - DNA, 52 bp, Artificial
  Synthetic oligonucleotide
gtcataactggtggaacgaccaacttgggtggtgaaaccgctaaggaattgg

SEQ ID NO: 269189 - DNA, 52 bp, Artificial
  Synthetic oligonucleotide
gtccagtttcagcgctattctgaaagccagctgattccatcggtaccacgta

SEQ ID NO: 269190 - DNA, 52 bp, Artificial
  Synthetic oligonucleotide
cgtctccgtttacactagctgatacggctgctacggctgcattggctataga

SEQ ID NO: 269191 - DNA, 52 bp, Artificial
  Synthetic oligonucleotide
gtggctagctcaccaacgtcgcgtaaaccttcgcttagattcaatcttcccc

SEQ ID NO: 269192 - DNA, 52 bp, Artificial
  Synthetic oligonucleotide
gtgtcttcaacacatgtaatagtagttcgattctgcttactcttgtgcctct

SEQ ID NO: 269193 - DNA, 52 bp, Artificial
  Synthetic oligonucleotide
aatagaacttatccgtaatgaaattggaggcgggctagagataagaataggg

SEQ ID NO: 269194 - DNA, 52 bp, Artificial
  Synthetic oligonucleotide
tccccagtgctgcaagtgacgaacgaggcacgaatgaggtaccggaaggtac

SEQ ID NO: 269195 - DNA, 52 bp, Artificial
  Synthetic oligonucleotide
taatttcggggtggactggatcaatgctcatatgggatactcggtgtccaga

SEQ ID NO: 269196 - DNA, 52 bp, Artificial
  Synthetic oligonucleotide
accctcagaaacttttccacgagcgactgataataatatggcacccctccca

SEQ ID NO: 269197 - DNA, 52 bp, Artificial
  Synthetic oligonucleotide
tagcccagctaacgactcgagcagcgtattcgtcggtgatataagcataaag

SEQ ID NO: 269198 - DNA, 59 bp, Artificial
  Synthetic oligonucleotide
tagactaatgagtcgttgactaatcggcaagtcccctaggtttgagctaggtctatgta

SEQ ID NO: 269199 - DNA, 60 bp, Artificial
  Synthetic oligonucleotide
gctatttcactgagcttagtcttgatacagttatcgcatcgtgtattcattcatgcggga

SEQ ID NO: 269200 - DNA, 52 bp, Artificial
  Synthetic oligonucleotide
tagctgctcaggctgttaagaagcgttggactcaagcaaacaaggtgtactc

SEQ ID NO: 269201 - DNA, 52 bp, Artificial
  Synthetic oligonucleotide
acacggccattagcttcaggtcgtgtgggggccggcaattgtaccatccctc

SEQ ID NO: 269202 - DNA, 52 bp, Artificial
  Synthetic oligonucleotide
tatccaatttgcagccgtcacgtgacacgaccactctcgttctcaacttctc

SEQ ID NO: 269203 - DNA, 52 bp, Artificial
  Synthetic oligonucleotide
tatccgatgtacggtccactgcagcatatatgtacggacataaattcatgac

SEQ ID NO: 269204 - DNA, 52 bp, Artificial
  Synthetic oligonucleotide
ttgtcgagtggtgataccacaagatgggtcatcacatacaagccaacctgcg

SEQ ID NO: 269205 - DNA, 52 bp, Artificial
  Synthetic oligonucleotide
attcgagaggtaggggagtcttggttgcacttaatgatagaatcggagcagg

SEQ ID NO: 269206 - DNA, 52 bp, Artificial
  Synthetic oligonucleotide
tttcgcacgtggaggggtatataccgatatcgatactgttggtttgaaaccg

SEQ ID NO: 269207 - DNA, 52 bp, Artificial
  Synthetic oligonucleotide
cagagcactgaatgtaccccactacacggcagtatgttctcagacatcactg

SEQ ID NO: 269208 - DNA, 52 bp, Artificial
  Synthetic oligonucleotide
atggacggagataagtcttcgagtaatgcagccgagggcggtagagctgaaa

SEQ ID NO: 269209 - DNA, 52 bp, Artificial
  Synthetic oligonucleotide
atgagttttcgggttagcccttggcttcgcaggtctacggctggccaacaga

SEQ ID NO: 269210 - DNA, 60 bp, Artificial
  Synthetic oligonucleotide
tgatgcctcatatgcatccaatgtaggttcaattcctaccttaggcaagaaatgagtcat

SEQ ID NO: 269211 - DNA, 52 bp, Artificial
  Synthetic oligonucleotide
gccacatgaaaatgtcaaacgggggccaagatcccactcccgccagttcgct

SEQ ID NO: 269212 - DNA, 52 bp, Artificial
  Synthetic oligonucleotide
ggacaaggcccggctgtgggtcagcaatcactgcaaccgacaatagtacgga

SEQ ID NO: 269213 - DNA, 52 bp, Artificial
  Synthetic oligonucleotide
cgacattcttcgcggtagatgtatcgaatcgcccaaaagcagccactcacgt

SEQ ID NO: 269214 - DNA, 52 bp, Artificial
  Synthetic oligonucleotide
cattatgtgtgttcaattcacacttgtcatatgaatatagttatctatggtt

SEQ ID NO: 269215 - DNA, 52 bp, Artificial
  Synthetic oligonucleotide
gaacctggtgcgatttcctgtggtagcaccatattctacagtctcgccactg

SEQ ID NO: 269216 - DNA, 52 bp, Artificial
  Synthetic oligonucleotide
ccaatgtaggtgacgtcacaagaggacttctttccagtgcttgcattattag

SEQ ID NO: 269217 - DNA, 52 bp, Artificial
  Synthetic oligonucleotide
ggccattagcccgataagactgcaagtgtcgtgtatataaattgcgtcggta

SEQ ID NO: 269218 - DNA, 51 bp, Artificial
  Synthetic oligonucleotide
gagtgtgcctccaattagcgctacggcccttgccattccgccactcaggtc

SEQ ID NO: 269219 - DNA, 51 bp, Artificial
  Synthetic oligonucleotide
tcataccctctggtacaactaccttctgccgcttaaaatcatctttctcga

SEQ ID NO: 269220 - DNA, 51 bp, Artificial
  Synthetic oligonucleotide
cgaccggtggagtacgcatggttgggtgggggaatgcgtgcgagagaatgt

SEQ ID NO: 269221 - DNA, 54 bp, Artificial
  Synthetic oligonucleotide
cgccgtagccggtatgtcgccttaggcgacgatttacttccccactacacggga

SEQ ID NO: 269222 - DNA, 51 bp, Artificial
  Synthetic oligonucleotide
ccagtttgtggcgttccaatatgtggcgaacgtctggggtcatggcgccta

SEQ ID NO: 269223 - DNA, 51 bp, Artificial
  Synthetic oligonucleotide
ctaaatattctgccaccaagcaagcgtcttagcatccacttttcgagaaaa

SEQ ID NO: 269224 - DNA, 51 bp, Artificial
  Synthetic oligonucleotide
cgatgtacataggcacctcgccccaacgcttacgccccacgcttcacgcac

SEQ ID NO: 269225 - DNA, 51 bp, Artificial
  Synthetic oligonucleotide
tcgccttggacgtcaatgagtcgaagattaaccccttggtcatgcttgcag

SEQ ID NO: 269226 - DNA, 51 bp, Artificial
  Synthetic oligonucleotide
gctggttggggccacgattggtgtagcggggctcatcatcagattcgtcgc

SEQ ID NO: 269227 - DNA, 51 bp, Artificial
  Synthetic oligonucleotide
gctggggtttacccatgtggtgtgccaacccgcctcaggaagagcgcaggc

SEQ ID NO: 269228 - DNA, 51 bp, Artificial
  Synthetic oligonucleotide
gtctgcccctatattagcggaatgtgctttcccatcccaaagaccagcgat

SEQ ID NO: 269229 - DNA, 51 bp, Artificial
  Synthetic oligonucleotide
gtcttgatctacatcagagtattttcgaatcatagtcaaagctggtgactg

SEQ ID NO: 269230 - DNA, 51 bp, Artificial
  Synthetic oligonucleotide
actgaagcagacccacacaaccctgccacgcgaaatgcccaagattcgcct

SEQ ID NO: 269231 - DNA, 51 bp, Artificial
  Synthetic oligonucleotide
actcctaggccatgggttccagaatcggcccactacgctcaggcacagctc

SEQ ID NO: 269232 - DNA, 58 bp, Artificial
  Synthetic oligonucleotide
cacgagctcctatttgtgatttaaccatgtttaaaattgtatcataaacagctaataa

SEQ ID NO: 269233 - DNA, 51 bp, Artificial
  Synthetic oligonucleotide
cttgtagtgatctcagtgcacttgctactctaaaatacacaaacgacttcg

SEQ ID NO: 269234 - DNA, 51 bp, Artificial
  Synthetic oligonucleotide
ccggagttgcttggctgcactccaccgtcccagtatgggtgcgagttaacg

SEQ ID NO: 269235 - DNA, 51 bp, Artificial
  Synthetic oligonucleotide
cggctgagactgctgttgagacgtataagcatcgtagtcctcgttgccatg

SEQ ID NO: 269236 - DNA, 51 bp, Artificial
  Synthetic oligonucleotide
taattttgccttcagtcaatggctatattaggataaagttgcggggctgtc

SEQ ID NO: 269237 - DNA, 51 bp, Artificial
  Synthetic oligonucleotide
ttggcgacagttccaacgaggcttccgctagatgggctgcgagcagcatcg

SEQ ID NO: 269238 - DNA, 51 bp, Artificial
  Synthetic oligonucleotide
aagtgtctgtcgggtcgaaaccgtgtctgtctggcttacgctatctcaaac

SEQ ID NO: 269239 - DNA, 51 bp, Artificial
  Synthetic oligonucleotide
tgtgcaagagctcagaatatggacactttaatagcaggtagagttatacag

SEQ ID NO: 269240 - DNA, 51 bp, Artificial
  Synthetic oligonucleotide
gttatgtggagttaatcatggattaatgcctatcaaactagaatgtgtacc

SEQ ID NO: 269241 - DNA, 51 bp, Artificial
  Synthetic oligonucleotide
cgtatggcgtgtcgtgttgtggcagggccaacttgtctccgcgtggccata

SEQ ID NO: 269242 - DNA, 51 bp, Artificial
  Synthetic oligonucleotide
accgaaagctgttcaacttaagctttatgaagcaccagccacgtgtcttgc

SEQ ID NO: 269243 - DNA, 59 bp, Artificial
  Synthetic oligonucleotide
cgcctttcgcgacgataataatgttcctcatgagtgacttgccttttatattaggctaa

SEQ ID NO: 269244 - DNA, 51 bp, Artificial
  Synthetic oligonucleotide
cgatgcgtgtgcccgcgggaaggcgactagttctgttccgaaggctttaga

SEQ ID NO: 269245 - DNA, 51 bp, Artificial
  Synthetic oligonucleotide
gtttactaatcgactcgagacactacaatgcattatacggtattggaatgg

SEQ ID NO: 269246 - DNA, 51 bp, Artificial
  Synthetic oligonucleotide
cttggcttcgcaggtctacggctggccaacagaggctaaactacgggcgta

SEQ ID NO: 269247 - DNA, 51 bp, Artificial
  Synthetic oligonucleotide
ttttccgtgcaagataatgagggcaaagcatacattagcgaaactgcattc

SEQ ID NO: 269248 - DNA, 51 bp, Artificial
  Synthetic oligonucleotide
ctgcaaaagaaggttctacggggcttggtgtctgaaacttgctaggtgatc

SEQ ID NO: 269249 - DNA, 51 bp, Artificial
  Synthetic oligonucleotide
gcaatgctcataaccttgtaattggtagttcgaatctatctactgcacttt

SEQ ID NO: 269250 - DNA, 51 bp, Artificial
  Synthetic oligonucleotide
gcaagaccctgcaaaggttcggcagccaacggaccctcgttcatggcgagt

SEQ ID NO: 269251 - DNA, 51 bp, Artificial
  Synthetic oligonucleotide
aacgtcgcaaaccgcgttccatcgtgcatcgagctcgcttggttccatccg

SEQ ID NO: 269252 - DNA, 51 bp, Artificial
  Synthetic oligonucleotide
agggataataggaagtttagttttatgtatagcacatgggtttgtatcacc

SEQ ID NO: 269253 - DNA, 51 bp, Artificial
  Synthetic oligonucleotide
ttagcaacgccgaataagtaactatcaccccaagcatgtataatatgaacc

SEQ ID NO: 269254 - DNA, 59 bp, Artificial
  Synthetic oligonucleotide
tcctgccacctctcctatctggaatacccgttgctatacgtgctctggtaagggccacc

SEQ ID NO: 269255 - DNA, 51 bp, Artificial
  Synthetic oligonucleotide
aggggtctaagacaggtagcgaggccaagtatgggccgccaacacacgtta

SEQ ID NO: 269256 - DNA, 51 bp, Artificial
  Synthetic oligonucleotide
ccgtccttttatgagccagcgtacgctaattggtgtctagtggggttgata

SEQ ID NO: 269257 - DNA, 51 bp, Artificial
  Synthetic oligonucleotide
tggcgccactatttacgctctactctgctagcccaattccgtgtgtagtga

SEQ ID NO: 269258 - DNA, 51 bp, Artificial
  Synthetic oligonucleotide
ggggatagcaggcggagttgccggctcttgtgcaaagacgctagttgcccc

SEQ ID NO: 269259 - DNA, 51 bp, Artificial
  Synthetic oligonucleotide
cgacaggtagtggggtatcgggagtataccgggagtcccagcggagtgcgg

SEQ ID NO: 269260 - DNA, 51 bp, Artificial
  Synthetic oligonucleotide
tgtcgcgaacaagtttggtttggcactagggtatagcgatcaaaggactaa

SEQ ID NO: 269261 - DNA, 51 bp, Artificial
  Synthetic oligonucleotide
cggttatggttggcgacagttccaacgaggcttccgctagatgggctgcga

SEQ ID NO: 269262 - DNA, 51 bp, Artificial
  Synthetic oligonucleotide
agcatgcaaaacttcgggagacttgcttcgcgacggctgtggagcagccat

SEQ ID NO: 269263 - DNA, 51 bp, Artificial
  Synthetic oligonucleotide
agtgctaacctgggcacagcttcgggattgaatgtcaatggacagtctaat

SEQ ID NO: 269264 - DNA, 51 bp, Artificial
  Synthetic oligonucleotide
agtaggcagatgctggttggggccacgattggtgtagcggggctcatcatc

SEQ ID NO: 269265 - DNA, 55 bp, Artificial
  Synthetic oligonucleotide
ccttaacaggtgaacccactatacggaattatataggtaatagctaatatagtag

SEQ ID NO: 269266 - DNA, 51 bp, Artificial
  Synthetic oligonucleotide
aaacttcgggagacttgcttcgcgacggctgtggagcagccattagtggcg

SEQ ID NO: 269267 - DNA, 51 bp, Artificial
  Synthetic oligonucleotide
tgactggaccggtggtcgttttgggaataacccgagtgctcttggagcgaa

SEQ ID NO: 269268 - DNA, 51 bp, Artificial
  Synthetic oligonucleotide
cacacccattcgggtgcaatatcttagaagggattacgtcatgtatatatt

SEQ ID NO: 269269 - DNA, 51 bp, Artificial
  Synthetic oligonucleotide
gcatcggcccctgttcctgtcacaagcagctttacaaaccgaggcccacta

SEQ ID NO: 269270 - DNA, 51 bp, Artificial
  Synthetic oligonucleotide
gatgacgggttcaccttgcgagctgccaagtatgggcgcgagacggagatt

SEQ ID NO: 269271 - DNA, 50 bp, Artificial
  Synthetic oligonucleotide
tcacatcgattttcactaaagtgggtatccccgtgtttggaccaagtgcc

SEQ ID NO: 269272 - DNA, 50 bp, Artificial
  Synthetic oligonucleotide
tatgaggataggcttgagcgcagcaaacccaaaaacgggcccagcggcta

SEQ ID NO: 269273 - DNA, 50 bp, Artificial
  Synthetic oligonucleotide
aaagagtgggtgcttcctccacgtcccaaaccgggccgaaagcctagcgt

SEQ ID NO: 269274 - DNA, 50 bp, Artificial
  Synthetic oligonucleotide
tccaccagggcgacttttctcccttcggtggttaccctgcctcgtcgttc

SEQ ID NO: 269275 - DNA, 50 bp, Artificial
  Synthetic oligonucleotide
cctctggcaccgggattagtagcgtcctggtcgtaaccgctgagctggta

SEQ ID NO: 269276 - DNA, 60 bp, Artificial
  Synthetic oligonucleotide
aatcactcaataaagtcactaattgaaacacattctagtttaataggcattaatccatga

SEQ ID NO: 269277 - DNA, 50 bp, Artificial
  Synthetic oligonucleotide
aaaacggccctggttgacgattcggtcgaaaagttcgccacccgtggcca

SEQ ID NO: 269278 - DNA, 50 bp, Artificial
  Synthetic oligonucleotide
tcccaccggcaaatgtcgctcttgcttgatcggctccaaccatagcaccc

SEQ ID NO: 269279 - DNA, 50 bp, Artificial
  Synthetic oligonucleotide
tttgcgccccagagccgtaggtgcattgcccagcggattttgccggctct

SEQ ID NO: 269280 - DNA, 50 bp, Artificial
  Synthetic oligonucleotide
acaacggaatgggggaaggtcccgtaacttccagtgctgtgcgcctcggt

SEQ ID NO: 269281 - DNA, 50 bp, Artificial
  Synthetic oligonucleotide
tcacgaagagcctcagggcggtgcggctcacgacaatttgctaccccaga

SEQ ID NO: 269282 - DNA, 50 bp, Artificial
  Synthetic oligonucleotide
aagcaccagcggcaattctttgcgcggggcaacggagatgacatatgcgg

SEQ ID NO: 269283 - DNA, 50 bp, Artificial
  Synthetic oligonucleotide
tgtctgccaggttgcccaactatggtgatgtctcgggcctctggccaggg

SEQ ID NO: 269284 - DNA, 50 bp, Artificial
  Synthetic oligonucleotide
aagacgtcaccccggcctacttaccgtctgccaacgggacggcagagcga

SEQ ID NO: 269285 - DNA, 50 bp, Artificial
  Synthetic oligonucleotide
aactccttccagcaacaagccagtcagccgtcgggcccaatgggcagtat

SEQ ID NO: 269286 - DNA, 50 bp, Artificial
  Synthetic oligonucleotide
aagcgggactgacatcgtggagatcccccggtactccacttccgagggtt

SEQ ID NO: 269287 - DNA, 56 bp, Artificial
  Synthetic oligonucleotide
aataaaagtgacaataggctaattggtaaaccttgacacttccaatgtcattttgc

SEQ ID NO: 269288 - DNA, 50 bp, Artificial
  Synthetic oligonucleotide
cgcctgactacacgtcgttgcacgaaggtttgcccgagcactttcggggt

SEQ ID NO: 269289 - DNA, 50 bp, Artificial
  Synthetic oligonucleotide
cgcgttggtcggaaacgcgagcaccgttgcatttcgccccggctgcaccc

SEQ ID NO: 269290 - DNA, 50 bp, Artificial
  Synthetic oligonucleotide
aacggtgcaacaaggcggatgcattggtcgcgatgcgagaatctcggtcc

SEQ ID NO: 269291 - DNA, 50 bp, Artificial
  Synthetic oligonucleotide
aagcgtccgccaatcaaattgcgtcctgggaccggctcccgcgttagcgc

SEQ ID NO: 269292 - DNA, 50 bp, Artificial
  Synthetic oligonucleotide
aagctccggggtaatgacccagggaagctttttcgcagtccgagacccga

SEQ ID NO: 269293 - DNA, 50 bp, Artificial
  Synthetic oligonucleotide
aacgcgacaggttgtcatactggtttggacacgccgcgacgcccacacga

SEQ ID NO: 269294 - DNA, 50 bp, Artificial
  Synthetic oligonucleotide
tgacatgccctcccgtgtacggggctcgcttagccagcctaatcggacgt

SEQ ID NO: 269295 - DNA, 50 bp, Artificial
  Synthetic oligonucleotide
aaggtggggttccttggcgtgagttcgaccgacgatggccattgggcttt

SEQ ID NO: 269296 - DNA, 50 bp, Artificial
  Synthetic oligonucleotide
tctctcaacgccggggatgctgagacgtcccgagaaccgagagacaccta

SEQ ID NO: 269297 - DNA, 50 bp, Artificial
  Synthetic oligonucleotide
ttgccctcaataaggtcctcgccacgaatacccttcatatgcgaatacct

SEQ ID NO: 269298 - DNA, 58 bp, Artificial
  Synthetic oligonucleotide
ttttgcgtgttcgactcacgtttgtcatataaaacagttataaactgtataagatcat

SEQ ID NO: 269299 - DNA, 50 bp, Artificial
  Synthetic oligonucleotide
aaggttccgtgttcgttgttgcgacccaccgacactaccccgtagcctgg

SEQ ID NO: 269300 - DNA, 50 bp, Artificial
  Synthetic oligonucleotide
aagtcctgcgatgcccgacacagcgattccgcccgaaatcagcaagagcc

SEQ ID NO: 269301 - DNA, 50 bp, Artificial
  Synthetic oligonucleotide
tcgctgcggtaccagggaacaaagcgcctcgctcacactttgtcgcgata

SEQ ID NO: 269302 - DNA, 50 bp, Artificial
  Synthetic oligonucleotide
tcgccgcgcgaagtcatctgtgtccgatagggcaatgtacgaagcacgga

SEQ ID NO: 269303 - DNA, 50 bp, Artificial
  Synthetic oligonucleotide
tcgacggcactcagcacgaacgtccgacattttggtgcgggacgcatata

SEQ ID NO: 269304 - DNA, 50 bp, Artificial
  Synthetic oligonucleotide
tcgacagacaagcctacagcgacgtccatattgggagccctgccgagtcg

SEQ ID NO: 269305 - DNA, 50 bp, Artificial
  Synthetic oligonucleotide
aagtgggggcgccactagctccactgaaactggacgctggtgtggtccta

SEQ ID NO: 269306 - DNA, 50 bp, Artificial
  Synthetic oligonucleotide
aaatgggccgttcgccccaaatcgaagtggcatcagccgccttaacccat

SEQ ID NO: 269307 - DNA, 50 bp, Artificial
  Synthetic oligonucleotide
tcctatctgcgggggagttggaaggtgcgatgttcatggtgggtgccggt

SEQ ID NO: 269308 - DNA, 50 bp, Artificial
  Synthetic oligonucleotide
aaatgctgctgcgtggttccagtcgcggatttgcaatcgtcaccacgggc

SEQ ID NO: 269309 - DNA, 59 bp, Artificial
  Synthetic oligonucleotide
tagactaatatccttaattagtcgctataagcgatttgtccgatatgaggacaattagg

SEQ ID NO: 269310 - DNA, 59 bp, Artificial
  Synthetic oligonucleotide
gaatatctcctacagagaatcaagtacctaaatggatagaaataggctcttcaaagaag

SEQ ID NO: 269311 - DNA, 50 bp, Artificial
  Synthetic oligonucleotide
tccgccctggtttgacaaaagggcttgagggctgacttcgtaggtgcggc

SEQ ID NO: 269312 - DNA, 50 bp, Artificial
  Synthetic oligonucleotide
cggacgatatccgagcccactggccctgaagcgggaatcattcgaacgga

SEQ ID NO: 269313 - DNA, 50 bp, Artificial
  Synthetic oligonucleotide
ggactccgaggcaaggggaccagacgttatcaggaggtggccccgtatct

SEQ ID NO: 269314 - DNA, 50 bp, Artificial
  Synthetic oligonucleotide
atgaaagcaccccaagcccattgctagcacgacatgcaaatgaaacgatc

SEQ ID NO: 269315 - DNA, 50 bp, Artificial
  Synthetic oligonucleotide
atccctgtctagggccggtctgtgcacgaccccaaaagcaatcactcggc

SEQ ID NO: 269316 - DNA, 50 bp, Artificial
  Synthetic oligonucleotide
atccctgctctcgcagtcatgttggtgagtttccagatcgccgggagccg

SEQ ID NO: 269317 - DNA, 50 bp, Artificial
  Synthetic oligonucleotide
ggcagttcgcggggtcgtgcatgccacaatgtgtgacaatcaccggtcgt

SEQ ID NO: 269318 - DNA, 50 bp, Artificial
  Synthetic oligonucleotide
ggccgtttctacgccggctagcgctgccttctccgagctacaccgtggga

SEQ ID NO: 269319 - DNA, 50 bp, Artificial
  Synthetic oligonucleotide
agtttcacgaaagagtggccccggcaacacaccctacaaaatgggcggga

SEQ ID NO: 269320 - DNA, 50 bp, Artificial
  Synthetic oligonucleotide
ccagagggctctgaccgggccaagacacttgcgattggtccacagatcct

SEQ ID NO: 269321 - DNA, 53 bp, Artificial
  Synthetic oligonucleotide
ttggtaaagctttatattacggtagttaccgttcacctagagttttattatga

SEQ ID NO: 269322 - DNA, 50 bp, Artificial
  Synthetic oligonucleotide
gggcgaaatggctacgtaggggtctttggtcgctcggaagtagtatgact

SEQ ID NO: 269323 - DNA, 50 bp, Artificial
  Synthetic oligonucleotide
agtaacctagttcggacctaatgggtgtgcggtgccaccaggatgtatat

SEQ ID NO: 269324 - DNA, 50 bp, Artificial
  Synthetic oligonucleotide
agcttgcagcgggtggtatgcctcctatgcggaaggacggtaaccctgcg

SEQ ID NO: 269325 - DNA, 50 bp, Artificial
  Synthetic oligonucleotide
ctcgtgcaatgtcgctccagatgcatcaggggccctcttctgacccggcc

SEQ ID NO: 269326 - DNA, 50 bp, Artificial
  Synthetic oligonucleotide
agcgccgctctcagggcgctatgtgccaaagttgcgattctcagtcgaga

SEQ ID NO: 269327 - DNA, 50 bp, Artificial
  Synthetic oligonucleotide
ggtggatccgcgtttgtgcaccgctccttacagtttcagcgatggccggt

SEQ ID NO: 269328 - DNA, 50 bp, Artificial
  Synthetic oligonucleotide
agcgactaggaccgtcggtcgtactgcatcccgctgcatgtctagggtcg

SEQ ID NO: 269329 - DNA, 50 bp, Artificial
  Synthetic oligonucleotide
cccctacagaagaataaatggccgatgggcttattgtaactaccgtagat

SEQ ID NO: 269330 - DNA, 50 bp, Artificial
  Synthetic oligonucleotide
cccggccacgtctgggatagtagctgtcttgacgaggtggaggcaccgcg

SEQ ID NO: 269331 - DNA, 50 bp, Artificial
  Synthetic oligonucleotide
gcacgaatggccctagtgggtcccccgcaaggactccgaccacgtcaata

SEQ ID NO: 269332 - DNA, 59 bp, Artificial
  Synthetic oligonucleotide
gggtgcacccgcctggcactcagattcggcgttgggggacccgatggcatggctcgagg

SEQ ID NO: 269333 - DNA, 50 bp, Artificial
  Synthetic oligonucleotide
gcaccggaatacccccgggtgttgcaaagtttcctgggttgctcgccata

SEQ ID NO: 269334 - DNA, 50 bp, Artificial
  Synthetic oligonucleotide
gagttctgagccgtcgggaccaagcagcccccatgtgctaaagccgtccg

SEQ ID NO: 269335 - DNA, 50 bp, Artificial
  Synthetic oligonucleotide
gccctggattagggccggggtgggccatttgtcagtgccttatggtgcga

SEQ ID NO: 269336 - DNA, 50 bp, Artificial
  Synthetic oligonucleotide
gcctgggctcaggcctatgcacaacgggccagtcattaacgctttcgcca

SEQ ID NO: 269337 - DNA, 50 bp, Artificial
  Synthetic oligonucleotide
gagctcggccagtccgcttcagccgttgccacgaaactacttcggctgga

SEQ ID NO: 269338 - DNA, 50 bp, Artificial
  Synthetic oligonucleotide
gagccagacaggtaggtgttggccctactccggccctctttggcaggaac

SEQ ID NO: 269339 - DNA, 50 bp, Artificial
  Synthetic oligonucleotide
gcggagttgccggctcttgtgcaaagacgctagttgcccccttggaccga

SEQ ID NO: 269340 - DNA, 50 bp, Artificial
  Synthetic oligonucleotide
gcggcggaactgagggcctgagcaagagaccccggcctcttgaaaccaac

SEQ ID NO: 269341 - DNA, 50 bp, Artificial
  Synthetic oligonucleotide
attagccgtgccattctagccctaccgtttactacctgcctgaccggaag

SEQ ID NO: 269342 - DNA, 50 bp, Artificial
  Synthetic oligonucleotide
atgtcgctccagatgcatcaggggccctcttctgacccggccgttcctat

SEQ ID NO: 269343 - DNA, 56 bp, Artificial
  Synthetic oligonucleotide
actcggtattggtaaaccaaactacttgctatgtagtgactttctgtcctcagtgt

SEQ ID NO: 269344 - DNA, 50 bp, Artificial
  Synthetic oligonucleotide
atgtagacgacgtaatgaccagtgtggggtgaagaacccttgtggcaaat

SEQ ID NO: 269345 - DNA, 50 bp, Artificial
  Synthetic oligonucleotide
atgggactgtccgaaacgacaaaccacagctgatttcttaacttcgttga

SEQ ID NO: 269346 - DNA, 50 bp, Artificial
  Synthetic oligonucleotide
atgcccaagtggccccacaacccatcagattacgaaaccagacttcttcc

SEQ ID NO: 269347 - DNA, 50 bp, Artificial
  Synthetic oligonucleotide
gacgatttacacatctccaagacccgaccttgtattagcagagtcggggt

SEQ ID NO: 269348 - DNA, 50 bp, Artificial
  Synthetic oligonucleotide
cagagccgttgttgggcagatacggtgcagccacctctggtcgggtggag

SEQ ID NO: 269349 - DNA, 50 bp, Artificial
  Synthetic oligonucleotide
atgacacggctgagaagttcggtgccaaaggagtgtggggcccagcatcg

SEQ ID NO: 269350 - DNA, 50 bp, Artificial
  Synthetic oligonucleotide
ggacggggtgcaatgggagataccaaaagtgtgtgcgtgccagtgacgga

SEQ ID NO: 269351 - DNA, 50 bp, Artificial
  Synthetic oligonucleotide
acggccccctcagggtgcattgggacctctccctcctatagcaaatgggc

SEQ ID NO: 269352 - DNA, 50 bp, Artificial
  Synthetic oligonucleotide
acgctgctaagccaggcgtgcgtctaccaaatgtcatggccggctgtctg

SEQ ID NO: 269353 - DNA, 50 bp, Artificial
  Synthetic oligonucleotide
acctcgggccacagtttcgaagcattccccaaacgcctgagcgtgggaaa

SEQ ID NO: 269354 - DNA, 56 bp, Artificial
  Synthetic oligonucleotide
agattgcgcgtgttttccatagttaaggggcacacccgtttgggtgcaatgtcgcg

SEQ ID NO: 269355 - DNA, 50 bp, Artificial
  Synthetic oligonucleotide
acctcgctaaattctaagcctacctcccgagccgagcgggcaccactcgc

SEQ ID NO: 269356 - DNA, 50 bp, Artificial
  Synthetic oligonucleotide
cgtcagagtgaccgcggtatggaggactccgaggcaaggggaccagacgt

SEQ ID NO: 269357 - DNA, 50 bp, Artificial
  Synthetic oligonucleotide
gtttaaacagatgaagcttagttttattagctattaacgatactatctta

SEQ ID NO: 269358 - DNA, 50 bp, Artificial
  Synthetic oligonucleotide
taaagggccggatcccatccacacagctggaccgcagagggtgtttacta

SEQ ID NO: 269359 - DNA, 50 bp, Artificial
  Synthetic oligonucleotide
taaggtgccacacgacagagtgtttcagcgtgtgaggaggggagcggcta

SEQ ID NO: 269360 - DNA, 50 bp, Artificial
  Synthetic oligonucleotide
acccttactggttttgggcgaccacgggcataaccagcacgtgagccggg

SEQ ID NO: 269361 - DNA, 50 bp, Artificial
  Synthetic oligonucleotide
cgtatgagcgttggttccagatccgccccgttattgcgcacctccgtcct

SEQ ID NO: 269362 - DNA, 50 bp, Artificial
  Synthetic oligonucleotide
accccggtgcctgtcaagattgcaccacgcccatttgcatccaccccaat

SEQ ID NO: 269363 - DNA, 50 bp, Artificial
  Synthetic oligonucleotide
tacggtctacccttcgttcagatgacatgccctcccgtgtacggggctcg

SEQ ID NO: 269364 - DNA, 50 bp, Artificial
  Synthetic oligonucleotide
ccggcgcaaacatccggtggcttgtatgggaaccgacggttgcgaccaag

SEQ ID NO: 269365 - DNA, 55 bp, Artificial
  Synthetic oligonucleotide
gtaacgaataaccagtgaatcgaacactgaacctttaaattaaggcaactatgta

SEQ ID NO: 269366 - DNA, 50 bp, Artificial
  Synthetic oligonucleotide
acccattgtgaacgcacccacgcttcccaagtagccctcgtggcgcaaga

SEQ ID NO: 269367 - DNA, 50 bp, Artificial
  Synthetic oligonucleotide
accagccaagggggagtgtcggacagccgatgggtctgctaatgggaagg

SEQ ID NO: 269368 - DNA, 50 bp, Artificial
  Synthetic oligonucleotide
tagctataggtagtgttggtgtatttggttctttattcgccggttgatct

SEQ ID NO: 269369 - DNA, 50 bp, Artificial
  Synthetic oligonucleotide
taggacgacaaacgtcgcaaaccgcgttccatcgtgcatcgagctcgctt

SEQ ID NO: 269370 - DNA, 50 bp, Artificial
  Synthetic oligonucleotide
tagggccggggtgggccatttgtcagtgccttatggtgcgatagcaacgg

SEQ ID NO: 269371 - DNA, 50 bp, Artificial
  Synthetic oligonucleotide
cccgtcgtagctccaccggcctctgaaggatcagacccatgcgattggta

SEQ ID NO: 269372 - DNA, 50 bp, Artificial
  Synthetic oligonucleotide
agcctcgaattgcatacgacctggcgctccgaactcgttccacggaccaa

SEQ ID NO: 269373 - DNA, 50 bp, Artificial
  Synthetic oligonucleotide
agccgccaagtgccgcgcaccgaatgtggctcaagataccgagaattgtg

SEQ ID NO: 269374 - DNA, 50 bp, Artificial
  Synthetic oligonucleotide
agccgcacggcgcacattaggcgaggtggtatcggcatttcacgtggaac

SEQ ID NO: 269375 - DNA, 50 bp, Artificial
  Synthetic oligonucleotide
ctagccttctgccacgttgtggcgatgtgctcctggactcagccgtagcg

SEQ ID NO: 269376 - DNA, 57 bp, Artificial
  Synthetic oligonucleotide
ccttaggcgacgatttacttccccactacacgggatagccggctacaccagctatca

SEQ ID NO: 269377 - DNA, 50 bp, Artificial
  Synthetic oligonucleotide
agccgacagactgccgcttgcaaccgccgttcctgcacgcgagcccatcg

SEQ ID NO: 269378 - DNA, 50 bp, Artificial
  Synthetic oligonucleotide
gtaccaacaccttgaggaatacgtttccaagatgccgcaacacctaatgc

SEQ ID NO: 269379 - DNA, 50 bp, Artificial
  Synthetic oligonucleotide
ctagcctcgtgtgacggtagcgattccgcaacacgttgggaagccccgaa

SEQ ID NO: 269380 - DNA, 50 bp, Artificial
  Synthetic oligonucleotide
ccgagttggcccattggcttttgggctcagctctggcaacggacaccgtt

SEQ ID NO: 269381 - DNA, 50 bp, Artificial
  Synthetic oligonucleotide
agatccctggtacgtgtggatcccccggtggtggcgcactggagccaggt

SEQ ID NO: 269382 - DNA, 50 bp, Artificial
  Synthetic oligonucleotide
agatcaccgccttgccacagctttacgggacgcccgaccccagtcgttgg

SEQ ID NO: 269383 - DNA, 50 bp, Artificial
  Synthetic oligonucleotide
agagcgccggttggggcgtaaaagctccagagcgtcctatggacgatgga

SEQ ID NO: 269384 - DNA, 50 bp, Artificial
  Synthetic oligonucleotide
agacttgcaggtagaggtgcttctggaggtgtttcagccgcgcagagcga

SEQ ID NO: 269385 - DNA, 50 bp, Artificial
  Synthetic oligonucleotide
agaatcggcccactacgctcaggcacagctccaacggagagctgatgcta

SEQ ID NO: 269386 - DNA, 50 bp, Artificial
  Synthetic oligonucleotide
agaactctcctcgtgtttagcccgaggggcctagaaaccacctgggggcg

SEQ ID NO: 269387 - DNA, 57 bp, Artificial
  Synthetic oligonucleotide
atggtagtgcaatggctttccggtgcccatcggttcaaccggtatacacttgcgcga

SEQ ID NO: 269388 - DNA, 50 bp, Artificial
  Synthetic oligonucleotide
acttctgcctacacggcgctcttgactctgttcgctgccgcaccccaaac

SEQ ID NO: 269389 - DNA, 50 bp, Artificial
  Synthetic oligonucleotide
cgtccgaactatacttgattggtgccaaagaaacttcgtagttctcgagg

SEQ ID NO: 269390 - DNA, 50 bp, Artificial
  Synthetic oligonucleotide
acggccctggttctccttcgggccccaactcacctgcggatgtaaccaat

SEQ ID NO: 269391 - DNA, 57 bp, Artificial
  Synthetic oligonucleotide
cgcagccacaacctcagcataatcgactgcggagacgtccccatgacgccgtttgac

SEQ ID NO: 269392 - DNA, 57 bp, Artificial
  Synthetic oligonucleotide
tttcaatacaggtttctacgaagtaggagcaggaggagatccaatcctttatgagca

SEQ ID NO: 269393 - DNA, 59 bp, Artificial
  Synthetic oligonucleotide
tacattaagtaatgaaacctaaattcatcgcgtatacctatttcgccatagtcatattc

SEQ ID NO: 269394 - DNA, 56 bp, Artificial
  Synthetic oligonucleotide
tccggtgcccatcggttcaaccggtatacacttgcgcgagtccaagcgtgagatat

SEQ ID NO: 269395 - DNA, 56 bp, Artificial
  Synthetic oligonucleotide
tccatagttaaggggcacacccgtttgggtgcaatgtcgcggtgcaatatcgtggg

SEQ ID NO: 269396 - DNA, 52 bp, Artificial
  Synthetic oligonucleotide
cttttctacggcccgatccagtgacagtcttagaacgtttagaaaccgcttt

SEQ ID NO: 269397 - DNA, 55 bp, Artificial
  Synthetic oligonucleotide
gaaactatctcttacatacttggttaatggcttacccaaggcgagtctatctggt

SEQ ID NO: 269398 - DNA, 55 bp, Artificial
  Synthetic oligonucleotide
gcacttggagattgcgcgtgttttccatagttaaggggcacacccgtttgggtgc

SEQ ID NO: 269399 - DNA, 55 bp, Artificial
  Synthetic oligonucleotide
ctttgtattggaacctgttcgctaactgacatgaacgtgttaacgtacaggcagc

SEQ ID NO: 269400 - DNA, 55 bp, Artificial
  Synthetic oligonucleotide
gcagaagaaggtaccggagcagaagaaggtaccggagcagaagaaggtaccggag

SEQ ID NO: 269401 - DNA, 55 bp, Artificial
  Synthetic oligonucleotide
gaaaggatccaaattctggcgcactgttccttcgattgtttgtgagtcctgaggt

SEQ ID NO: 269402 - DNA, 55 bp, Artificial
  Synthetic oligonucleotide
gaacccagagctcgtaaccaaaattatgtacacaagaacccaccaaagtgctatt

SEQ ID NO: 269403 - DNA, 55 bp, Artificial
  Synthetic oligonucleotide
gaacctattacgtgtgatgagtctactaattgcaaggggccaacctctagtgagg

SEQ ID NO: 269404 - DNA, 56 bp, Artificial
  Synthetic oligonucleotide
taattatttatattaaccagagtagctgactattccctttcacaaactaatcgtcc

SEQ ID NO: 269405 - DNA, 55 bp, Artificial
  Synthetic oligonucleotide
gcagagaaatcatgtaatagctcctaacagatccagagatagcagagaaatcatg

SEQ ID NO: 269406 - DNA, 55 bp, Artificial
  Synthetic oligonucleotide
gagctgaattcagagtagcaggtgcccgtgtcaacgaaggagcaccagcttgtca

SEQ ID NO: 269407 - DNA, 55 bp, Artificial
  Synthetic oligonucleotide
gacgcggattatgaatggatagcccagatcaatgttaaacaacccgattatatgt

SEQ ID NO: 269408 - DNA, 55 bp, Artificial
  Synthetic oligonucleotide
gacgaaagtggctcgctcacacacaagaatttgcgcagacttttccccgttgacc

SEQ ID NO: 269409 - DNA, 55 bp, Artificial
  Synthetic oligonucleotide
gaccgttgatagtatattccaagatacatggggaacagccggcttaactatcgat

SEQ ID NO: 269410 - DNA, 55 bp, Artificial
  Synthetic oligonucleotide
gatccgagacgtgtgtgaaatgtgattcaactttcccagcaaatggggagtgatg

SEQ ID NO: 269411 - DNA, 55 bp, Artificial
  Synthetic oligonucleotide
gacggtgacacgggacataaaggagctagtggtgaaggaggtaacaccggagcta

SEQ ID NO: 269412 - DNA, 55 bp, Artificial
  Synthetic oligonucleotide
gactacctactgactaccccggacgatatccgagcccactggccctgaagcggga

SEQ ID NO: 269413 - DNA, 55 bp, Artificial
  Synthetic oligonucleotide
gacactgctggtacctatccagtaggtgtcaatttactcggaaacgtgcacggtg

SEQ ID NO: 269414 - DNA, 55 bp, Artificial
  Synthetic oligonucleotide
gcaagatctggggactcgtcctatgctatggttgggtggtagcttcggcaccggt

SEQ ID NO: 269415 - DNA, 60 bp, Artificial
  Synthetic oligonucleotide
atgacctatatttacatcatttagtttaatgaatttagctctttctatcgcattaacatc

SEQ ID NO: 269416 - DNA, 55 bp, Artificial
  Synthetic oligonucleotide
gacacgcccataggaatagtcgaagcagacgtagttggcgcatgatcaggtgagt

SEQ ID NO: 269417 - DNA, 55 bp, Artificial
  Synthetic oligonucleotide
gacaaagcccatttacttgcacaacacccgacaccaacttaccatccctagttgc

SEQ ID NO: 269418 - DNA, 55 bp, Artificial
  Synthetic oligonucleotide
gacaaaagctacctgtagacggaaatttattgctggagcctagcgcagttttgtg

SEQ ID NO: 269419 - DNA, 55 bp, Artificial
  Synthetic oligonucleotide
gaggggctcctagcggataataatgaaggcactaatagattagctgatatcactc

SEQ ID NO: 269420 - DNA, 55 bp, Artificial
  Synthetic oligonucleotide
gaatttcgcacgactatttagctgcggtgcttgatcgaattggtttaggcacgcg

SEQ ID NO: 269421 - DNA, 55 bp, Artificial
  Synthetic oligonucleotide
gaattgagtgtaggtcttgtacgctgacattgcatgatctttgttttggaccgcg

SEQ ID NO: 269422 - DNA, 55 bp, Artificial
  Synthetic oligonucleotide
gcaatcccgagaactctattgtaaccaacaccaatctatcgaacaacttgttaga

SEQ ID NO: 269423 - DNA, 55 bp, Artificial
  Synthetic oligonucleotide
gcacgaattgggtatgcatcatgacgatagaatcaaccaggttgaaaccggacct

SEQ ID NO: 269424 - DNA, 55 bp, Artificial
  Synthetic oligonucleotide
gagccgacaacaagcggtttcgatccgaattgaagaaggctggtgcccaactcac

SEQ ID NO: 269425 - DNA, 55 bp, Artificial
  Synthetic oligonucleotide
gaactattctcatagggtacgaatctgaatgctagaaccataccgtgtgtcgtgt

SEQ ID NO: 269426 - DNA, 57 bp, Artificial
  Synthetic oligonucleotide
cggggcggatctggaaccaacgctcatacggagacacgaacggtgcttgtagcaggg

SEQ ID NO: 269427 - DNA, 55 bp, Artificial
  Synthetic oligonucleotide
gcacttcttaggattaaatggaatgcctcgtcgtataccacaatatcctgatgca

SEQ ID NO: 269428 - DNA, 55 bp, Artificial
  Synthetic oligonucleotide
cgtgaccactgattcgagatattggttgaggcacggaagtttagtgaggcgaccc

SEQ ID NO: 269429 - DNA, 55 bp, Artificial
  Synthetic oligonucleotide
cgtatagcaacgggtattccagataggagaggtggcaggagctttctggtgagac

SEQ ID NO: 269430 - DNA, 55 bp, Artificial
  Synthetic oligonucleotide
cgtacaaactagatattcagaaacggatcgctagtgctagacaagagacacggac

SEQ ID NO: 269431 - DNA, 55 bp, Artificial
  Synthetic oligonucleotide
cgggttcgagagttgtccgataaactatacgagcattattgcactgtcatccctt

SEQ ID NO: 269432 - DNA, 55 bp, Artificial
  Synthetic oligonucleotide
cgggagcagcgtgttcccataatactgaatctaacgggaaagccgtcgtacgacc

SEQ ID NO: 269433 - DNA, 55 bp, Artificial
  Synthetic oligonucleotide
cggcgacttgatcgaaatgttgaagagggaattaccagatatcgacaaggatgca

SEQ ID NO: 269434 - DNA, 55 bp, Artificial
  Synthetic oligonucleotide
cggatgtcaccgaaaagtcgattacaattggctacgtgtctacgaaaacatctaa

SEQ ID NO: 269435 - DNA, 55 bp, Artificial
  Synthetic oligonucleotide
cggatgagacaagggagaaacgaaattccttcacagcactaagcggcgacaactc

SEQ ID NO: 269436 - DNA, 55 bp, Artificial
  Synthetic oligonucleotide
cggatctacatgtgcccgatctcggtatcccatgcccttagcggtaatatgaaag

SEQ ID NO: 269437 - DNA, 60 bp, Artificial
  Synthetic oligonucleotide
acgacgtagtatctcctaacgtagctgaagcatcacgaacggaatctgaacaatctcgag

SEQ ID NO: 269438 - DNA, 55 bp, Artificial
  Synthetic oligonucleotide
ctagtactgttgttgcgactactgcttctagtttaacaactatacctatgccagg

SEQ ID NO: 269439 - DNA, 55 bp, Artificial
  Synthetic oligonucleotide
ctgctagtgaaggttatcgtggttcagttaatggttccgaggtagaagcagtgtt

SEQ ID NO: 269440 - DNA, 55 bp, Artificial
  Synthetic oligonucleotide
gaaaacgagcagtttagtatgactgatcgattgtgatatgaggcattttgcgaag

SEQ ID NO: 269441 - DNA, 51 bp, Artificial
  Synthetic oligonucleotide
gccatatttatggggtttaaggtgtactctaaggggttttgaaagaaacga

SEQ ID NO: 269442 - DNA, 55 bp, Artificial
  Synthetic oligonucleotide
ggcgaaatatagatcgctgatcgattcagggcacggtagaagaatatgatggcgg

SEQ ID NO: 269443 - DNA, 55 bp, Artificial
  Synthetic oligonucleotide
ggggaggctcaagaaactgcgtataatgcttatatagggcatgctcgagcccata

SEQ ID NO: 269444 - DNA, 54 bp, Artificial
  Synthetic oligonucleotide
gggtagcagtaggttatagactaaaagatttataccttaggcgtgagtttcaaa

SEQ ID NO: 269445 - DNA, 55 bp, Artificial
  Synthetic oligonucleotide
gtataggaaagtccggagcctattgaatgtcaacacctaaaatatgagtgttggg

SEQ ID NO: 269446 - DNA, 55 bp, Artificial
  Synthetic oligonucleotide
gtctaaatggatagttcattaattattcagggagaaggacctcactcagctattg

SEQ ID NO: 269447 - DNA, 55 bp, Artificial
  Synthetic oligonucleotide
tacacgcggcggttcaatcccgtctgaggctagccgtattagatcgttttcacga

SEQ ID NO: 269448 - DNA, 56 bp, Artificial
  Synthetic oligonucleotide
ttacaccgcttataccttgaagtactattatagcggaaagtacttcaagtgttaca

SEQ ID NO: 269449 - DNA, 55 bp, Artificial
  Synthetic oligonucleotide
tttcactctcgattcagccgaccgatgatacattttcagagccaaccatagattg

SEQ ID NO: 269450 - DNA, 55 bp, Artificial
  Synthetic oligonucleotide
acaaagttaggtcagacgccaaagctactctgcttacttctagaatacaattcat

SEQ ID NO: 269451 - DNA, 54 bp, Artificial
  Synthetic oligonucleotide
agtcgacaagttagtactaataggtacccgtacggagcataatagcaaggtact

SEQ ID NO: 269452 - DNA, 55 bp, Artificial
  Synthetic oligonucleotide
atatttatagagtcgcctacctacttatactctagtgcgggtactggcaatactg

SEQ ID NO: 269453 - DNA, 55 bp, Artificial
  Synthetic oligonucleotide
attacgttatggaatagcgttatggagtcattgcttgtctgctagccatcgtagc

SEQ ID NO: 269454 - DNA, 55 bp, Artificial
  Synthetic oligonucleotide
attggtagattttctacgtgaaactcttaacacactcttgcttaggcaagatggt

SEQ ID NO: 269455 - DNA, 55 bp, Artificial
  Synthetic oligonucleotide
caccttggccgttatacacatgtatagcgttattaacattaacaaccagcggtgt

SEQ ID NO: 269456 - DNA, 53 bp, Artificial
  Synthetic oligonucleotide
ccgaaactccgaattagctacaagaggtggtttaacatatttcctactaggag

SEQ ID NO: 269457 - DNA, 55 bp, Artificial
  Synthetic oligonucleotide
cgagtggcatactcgtctggaaaagtgcaagtatttacgtcgtaaacgcgacacc

SEQ ID NO: 269458 - DNA, 55 bp, Artificial
  Synthetic oligonucleotide
cgattccttcataacccttaatttcgcagttcttctgcgaagtacttgcttcgaa

SEQ ID NO: 269459 - DNA, 59 bp, Artificial
  Synthetic oligonucleotide
tcgcagtaaagactcctactatattcttgaacacgtgattgttaaaagctcacgtggag

SEQ ID NO: 269460 - DNA, 55 bp, Artificial
  Synthetic oligonucleotide
cgtagctgaagcatcacgaacggaatctgaacaatctcgaggcgtaggtcagcaa

SEQ ID NO: 269461 - DNA, 52 bp, Artificial
  Synthetic oligonucleotide
ctaatcctactttaatagtcgacaagttagtactaataggtacccgtacgga

SEQ ID NO: 269462 - DNA, 54 bp, Artificial
  Synthetic oligonucleotide
gtaggcaagaagatagaaatatagcctattctatgctagaaggcaaagatgggc

SEQ ID NO: 269463 - DNA, 54 bp, Artificial
  Synthetic oligonucleotide
atgtttatgagctgatgtcatcagatatctttagtataagcggacataatctcc

SEQ ID NO: 269464 - DNA, 53 bp, Artificial
  Synthetic oligonucleotide
gtttactaagagctgctatcagacatcgtattgataatatgattgggctcccc

SEQ ID NO: 269465 - DNA, 51 bp, Artificial
  Synthetic oligonucleotide
cctggcggagccatgatactggattatgagcatataaactatatcctacat

SEQ ID NO: 269466 - DNA, 51 bp, Artificial
  Synthetic oligonucleotide
actatttagtccaggaaggtaactatatctctgtatatagcgagggtcggt

SEQ ID NO: 269467 - DNA, 50 bp, Artificial
  Synthetic oligonucleotide
catggttaagttatataacctacctgcagtgaactctcactacttggtcc

SEQ ID NO: 269468 - DNA, 58 bp, Artificial
  Synthetic oligonucleotide
cgaacatttacgcaatctttagatacacttagttatgaggatttagttgctatacaaa

SEQ ID NO: 269469 - DNA, 59 bp, Artificial
  Synthetic oligonucleotide
ccatggcctgactatgtaagtacacctggctagaatgcacagatttaagttaaactaac

SEQ ID NO: 269470 - DNA, 54 bp, Artificial
  Synthetic oligonucleotide
cggacttagacggttataaaatagtgtattctcattagcgaatttgtaaggaaa

SEQ ID NO: 269471 - DNA, 56 bp, Artificial
  Synthetic oligonucleotide
gaagtactattatagcggaaagtacttcaagtgttacagtagaaactgtggtaaca

SEQ ID NO: 269472 - DNA, 56 bp, Artificial
  Synthetic oligonucleotide
ccacttatatggacttatctttatattgacaaccttgtagtttagggttgcctaca

SEQ ID NO: 269473 - DNA, 57 bp, Artificial
  Synthetic oligonucleotide
gaggtgtaagagtagaagctaagggtaggttaactcgacgatctactgcctcaagat

SEQ ID NO: 269474 - DNA, 59 bp, Artificial
  Synthetic oligonucleotide
gttaacataaagaggactaagacaaatcaagatgacccaaatagatagggctacagatg

SEQ ID NO: 269475 - DNA, 60 bp, Artificial
  Synthetic oligonucleotide
atatttacatctcgcaatccgcgagatagtaaataagatagtcgactacataatgagagt

SEQ ID NO: 269476 - DNA, 55 bp, Artificial
  Synthetic oligonucleotide
cagacacttcatatcgggaaacaatcgggatctaagactggaataagacctccgc

SEQ ID NO: 269477 - DNA, 55 bp, Artificial
  Synthetic oligonucleotide
cagaggatctatccgtgtctagcggaatcagctccgggtcgattacggaagaccc

SEQ ID NO: 269478 - DNA, 55 bp, Artificial
  Synthetic oligonucleotide
cagagtacttgtaggaccctatcgtctacaacacgtgctttacattccgtttcga

SEQ ID NO: 269479 - DNA, 55 bp, Artificial
  Synthetic oligonucleotide
cagtgccaacagtgtgttgcaggtacaattttcgtgtttgagacacgtatcccgt

SEQ ID NO: 269480 - DNA, 55 bp, Artificial
  Synthetic oligonucleotide
cagtttcaaaccaacttgcaatcacccttcgcgtcccaagaggggagtctgattg

SEQ ID NO: 269481 - DNA, 55 bp, Artificial
  Synthetic oligonucleotide
catccatagttcgcgtaaatctcagctcccatttaccacagggagtttcgcccgc

SEQ ID NO: 269482 - DNA, 55 bp, Artificial
  Synthetic oligonucleotide
aatcaagatgagcataggttgagacaggatgacgactgttcgatgagactcatgg

SEQ ID NO: 269483 - DNA, 55 bp, Artificial
  Synthetic oligonucleotide
catggccgtgtaccatggatctgtttgccgttcttcgaccatggtagtgcccagg

SEQ ID NO: 269484 - DNA, 55 bp, Artificial
  Synthetic oligonucleotide
acaattagtatatccttctgtcgcgtgcccagtcggaccggagttatgtgtcttg

SEQ ID NO: 269485 - DNA, 54 bp, Artificial
  Synthetic oligonucleotide
tgcttacagttcagtaattatgggctcacacttaggtgtcacgtttcaagtggc

SEQ ID NO: 269486 - DNA, 52 bp, Artificial
  Synthetic oligonucleotide
cggggaacccttaaagctatttcaactaaacaaagatggtaacatctttgtg

SEQ ID NO: 269487 - DNA, 54 bp, Artificial
  Synthetic oligonucleotide
gcttccacgagtgtaccccttaacgatctaacgaaacttgtctcgtggacctat

SEQ ID NO: 269488 - DNA, 54 bp, Artificial
  Synthetic oligonucleotide
tgtgtgacttgacgtaatctcgcgtcttggctccggatagggtgggacatgtga

SEQ ID NO: 269489 - DNA, 54 bp, Artificial
  Synthetic oligonucleotide
ccgatcgcaaacgacgtgattggagacgcaacctgtttggccgctacaagcgca

SEQ ID NO: 269490 - DNA, 53 bp, Artificial
  Synthetic oligonucleotide
agagacaactgcgccatgatgagtgtctaaaggaaggagcgtggcgaggcgaa

SEQ ID NO: 269491 - DNA, 53 bp, Artificial
  Synthetic oligonucleotide
gactcgggaccaagtctacacgatgactcctatcacattgtagctagacgtcg

SEQ ID NO: 269492 - DNA, 53 bp, Artificial
  Synthetic oligonucleotide
ccaccataaaggctcatttacggcaactaccaaccgagagagtggccaagagc

SEQ ID NO: 269493 - DNA, 53 bp, Artificial
  Synthetic oligonucleotide
cccaacagagtggttcaattgtagacatctgaaaagatgtttaatgtgcactc

SEQ ID NO: 269494 - DNA, 53 bp, Artificial
  Synthetic oligonucleotide
ccggttacccggcagtggccccgcctgaacacttcttactcacaccatatggg

SEQ ID NO: 269495 - DNA, 53 bp, Artificial
  Synthetic oligonucleotide
cctcactaccctcgacttctaccgtgaacacctatcctccaatacttgtactc

SEQ ID NO: 269496 - DNA, 53 bp, Artificial
  Synthetic oligonucleotide
agttgacgattcgacaatgcggccggagtttgtacagcaacccgtggaggttg

SEQ ID NO: 269497 - DNA, 59 bp, Artificial
  Synthetic oligonucleotide
gctcagtaggtaaccctacattacaaagattcttcgcattacattatttaatgccattc

SEQ ID NO: 269498 - DNA, 52 bp, Artificial
  Synthetic oligonucleotide
cccaccttgttcaatacggcaactacaagtacgaggttggaactaaaactac

SEQ ID NO: 269499 - DNA, 52 bp, Artificial
  Synthetic oligonucleotide
ggttaatttaattaatcgaggatttggccacattaacatgaagtcatcatgc

SEQ ID NO: 269500 - DNA, 52 bp, Artificial
  Synthetic oligonucleotide
ggactgatgcacgagtccattgatgtacatgactctaccaagttttcccgtc

SEQ ID NO: 269501 - DNA, 52 bp, Artificial
  Synthetic oligonucleotide
cgagacattgacggggagaagagtctggtcgtctatctttctgcctcgggct

SEQ ID NO: 269502 - DNA, 52 bp, Artificial
  Synthetic oligonucleotide
tgtagtcagagagtctcattccacactaacggggtgtgcgcaggaggccaga

SEQ ID NO: 269503 - DNA, 52 bp, Artificial
  Synthetic oligonucleotide
ggggtgttgcaacgctcggtgtcacgaaatgtcttctcgaaactccagaaga

SEQ ID NO: 269504 - DNA, 51 bp, Artificial
  Synthetic oligonucleotide
ctattttgggccgcgatcttctacttttgcaagtgtggaccatttgagggg

SEQ ID NO: 269505 - DNA, 51 bp, Artificial
  Synthetic oligonucleotide
ccccacaagcagacgctatgcgacgttatgccaacaaggaggtatccacat

SEQ ID NO: 269506 - DNA, 50 bp, Artificial
  Synthetic oligonucleotide
acctgctcattagtggctcgatcagcccggtctttggtggcggtccccat

SEQ ID NO: 269507 - DNA, 50 bp, Artificial
  Synthetic oligonucleotide
acacactgcagttggactcccggtgcattaccactgccgggcgggtgggc

SEQ ID NO: 269508 - DNA, 57 bp, Artificial
  Synthetic oligonucleotide
tcaggccgcgttactcattataaatgggttagggctgaaagattaattatgagttta

SEQ ID NO: 269509 - DNA, 50 bp, Artificial
  Synthetic oligonucleotide
acactgcgcaaaccccgcacttggcacccttaatacagggaacgcctgga

SEQ ID NO: 269510 - DNA, 50 bp, Artificial
  Synthetic oligonucleotide
acctcacagctaagcgaaaccgcacgcgtctatcactgccggcgctctga

SEQ ID NO: 269511 - DNA, 50 bp, Artificial
  Synthetic oligonucleotide
acagacacggccctcgcaactagcgccatacaaccagcgttttcccacga

SEQ ID NO: 269512 - DNA, 50 bp, Artificial
  Synthetic oligonucleotide
acagagcgcggcctcaccaaacctaccgtgagccttgttcgcgttggttc

SEQ ID NO: 269513 - DNA, 50 bp, Artificial
  Synthetic oligonucleotide
acaggtgcatatcccaggcaaccagtgtgggtcccggcgagatctgggga

SEQ ID NO: 269514 - DNA, 50 bp, Artificial
  Synthetic oligonucleotide
accagtagggtaacgtcccggccgatgtaacaagtgggtaggacgcccga

SEQ ID NO: 269515 - DNA, 50 bp, Artificial
  Synthetic oligonucleotide
acccaccgtcgctgccagagactatataagagcccgctgcccactccggt

SEQ ID NO: 269516 - DNA, 50 bp, Artificial
  Synthetic oligonucleotide
gtactggtcacccgagatatgaacgacttctctccgatgaacgtctcccc

SEQ ID NO: 269517 - DNA, 50 bp, Artificial
  Synthetic oligonucleotide
accgcttgaagccgccgggagtgtaaaagtctccgcgggctccaagtctg

SEQ ID NO: 269518 - DNA, 50 bp, Artificial
  Synthetic oligonucleotide
acccacgccgcactgcgtgcttggctctctaccgtactaacccagggacg

SEQ ID NO: 269519 - DNA, 57 bp, Artificial
  Synthetic oligonucleotide
cttatagatcccctcataggagatattccctctatactaatgtcccatccccccaaa

SEQ ID NO: 269520 - DNA, 50 bp, Artificial
  Synthetic oligonucleotide
accgcccctttgggctaattggggtaattagctgccggaatcgcgcacct

SEQ ID NO: 269521 - DNA, 50 bp, Artificial
  Synthetic oligonucleotide
aaagctcccttgtgtcgccggcactaacccccgcttccacacggtgctaa

SEQ ID NO: 269522 - DNA, 50 bp, Artificial
  Synthetic oligonucleotide
aaatccgcctgagacaccgtcgggtccgttgtactcaccggttccaaccc

SEQ ID NO: 269523 - DNA, 50 bp, Artificial
  Synthetic oligonucleotide
aaattgggtccccgacacgacccacacgagcgcagttgagatgtgggccc

SEQ ID NO: 269524 - DNA, 50 bp, Artificial
  Synthetic oligonucleotide
aaccacgtgtgccacagtcggttcgccgtctctgtccaccccagaatcac

SEQ ID NO: 269525 - DNA, 50 bp, Artificial
  Synthetic oligonucleotide
aaccgggctatccaactaagcgcccatagccgagccctatcgtgttccgc

SEQ ID NO: 269526 - DNA, 50 bp, Artificial
  Synthetic oligonucleotide
aacggagagctaatcggttcggcttgcacagagcgacaccgcggactcct

SEQ ID NO: 269527 - DNA, 50 bp, Artificial
  Synthetic oligonucleotide
aagaccggctcgagcccacacctccgcgagacatgccagagtcgttaggc

SEQ ID NO: 269528 - DNA, 50 bp, Artificial
  Synthetic oligonucleotide
aagagtgtacggcagaggcgactctcttgctgcacgcagaggcagatgcg

SEQ ID NO: 269529 - DNA, 50 bp, Artificial
  Synthetic oligonucleotide
aagcagtccgccatgtcactccggagaacacagatgcccttgtggcaggc

SEQ ID NO: 269530 - DNA, 59 bp, Artificial
  Synthetic oligonucleotide
cttagcaggtgtagagtcagctataggtttatcattattagtaagttattatagattaa

SEQ ID NO: 269531 - DNA, 50 bp, Artificial
  Synthetic oligonucleotide
aagcatcaaaacggcggagggaggtccaggtctgtgcagagccccagcgg

SEQ ID NO: 269532 - DNA, 50 bp, Artificial
  Synthetic oligonucleotide
aagcgcccatagccgagccctatcgtgttccgcgcccaccaatcaggcca

SEQ ID NO: 269533 - DNA, 50 bp, Artificial
  Synthetic oligonucleotide
aagcggcacaatgtacgccgaggactacccgtatcccaggtcgccgaagg

SEQ ID NO: 269534 - DNA, 50 bp, Artificial
  Synthetic oligonucleotide
aagctggcgcatatgtgatcgtttgggactggcagcgcgtgggggttaca

SEQ ID NO: 269535 - DNA, 50 bp, Artificial
  Synthetic oligonucleotide
aaggacgagtgcagagaaatcctccggtcgagcacgcgaggggtcggatg

SEQ ID NO: 269536 - DNA, 50 bp, Artificial
  Synthetic oligonucleotide
aaggaggagcgcgcgggttgaagttggaattggcccgctgaagactagca

SEQ ID NO: 269537 - DNA, 50 bp, Artificial
  Synthetic oligonucleotide
aaggccccgggtgagaaagtgtatgcacatccgggctcggtcgggacagt

SEQ ID NO: 269538 - DNA, 50 bp, Artificial
  Synthetic oligonucleotide
aaggccctccgatttttcgtaggagccttcgaggctgcctggtaccccct

SEQ ID NO: 269539 - DNA, 50 bp, Artificial
  Synthetic oligonucleotide
aagtcgccggaaaacgcccaggggccggtgtacgtgaaatgttgggctgt

SEQ ID NO: 269540 - DNA, 50 bp, Artificial
  Synthetic oligonucleotide
aatcaaggcaactctgaggccgattgaacacgggcggcgtctcacgtgct

SEQ ID NO: 269541 - DNA, 57 bp, Artificial
  Synthetic oligonucleotide
ggtagcgggcagggtatttaatacttttagctctactgagttgtagattaattggca

SEQ ID NO: 269542 - DNA, 50 bp, Artificial
  Synthetic oligonucleotide
aatgtacagactcgtcggccgcgtctcacacaacccaccacgcgaccctc

SEQ ID NO: 269543 - DNA, 50 bp, Artificial
  Synthetic oligonucleotide
actgatccagcgatcccagaccatggacgcttacacgggcatgggaccgc

SEQ ID NO: 269544 - DNA, 50 bp, Artificial
  Synthetic oligonucleotide
actgccggagtcgcacggcctcggggtttccaacggcgctgttttcgagt

SEQ ID NO: 269545 - DNA, 50 bp, Artificial
  Synthetic oligonucleotide
actggattcgggtgctacaagtggaggtgcctcccggggccttgccgttg

SEQ ID NO: 269546 - DNA, 50 bp, Artificial
  Synthetic oligonucleotide
actgtgtggggtgccaagcggtgagtgacaggtgttgccaccaggttcga

SEQ ID NO: 269547 - DNA, 50 bp, Artificial
  Synthetic oligonucleotide
agaagcgaggctccgacctgtgtgctcctcagtacgaggttaccgacgcc

SEQ ID NO: 269548 - DNA, 50 bp, Artificial
  Synthetic oligonucleotide
agaatggcacgggaatctacggcgcgggaatccacggcacgtgatctgtc

SEQ ID NO: 269549 - DNA, 50 bp, Artificial
  Synthetic oligonucleotide
agacccgagatgtccgggagtcacgtgagcggtcgctatcacccactcgc

SEQ ID NO: 269550 - DNA, 50 bp, Artificial
  Synthetic oligonucleotide
agagccactcgcctgcaaatttggcccgggacccgcccgtctcagcgctg

SEQ ID NO: 269551 - DNA, 50 bp, Artificial
  Synthetic oligonucleotide
agagggaattccggtcacccccgagttgacgccagcgggactctctccaa

SEQ ID NO: 269552 - DNA, 58 bp, Artificial
  Synthetic oligonucleotide
agctcccatttaccacagggagtttcgcccgcaatgatagcaagaggacagggaactc

SEQ ID NO: 269553 - DNA, 50 bp, Artificial
  Synthetic oligonucleotide
agatcctcctgcccagacaggacccacgggcctgactcctggtgtgccca

SEQ ID NO: 269554 - DNA, 50 bp, Artificial
  Synthetic oligonucleotide
agatggcccatatcgccacccctctccattacgagcgtttgacgggcctg

SEQ ID NO: 269555 - DNA, 50 bp, Artificial
  Synthetic oligonucleotide
agatggtcttcccaaaactgccggcgaccagcttcgttctcacagccgcg

SEQ ID NO: 269556 - DNA, 50 bp, Artificial
  Synthetic oligonucleotide
agattccgtcagttgggcgaacctggctcgtcattgtccgtctgtcgcgg

SEQ ID NO: 269557 - DNA, 50 bp, Artificial
  Synthetic oligonucleotide
agcaggacttgcgacatctggggacgcggagcgatgcaggtcacgtggaa

SEQ ID NO: 269558 - DNA, 50 bp, Artificial
  Synthetic oligonucleotide
agccacggcaggagtaaggcatatggaggagcccaggccgcagacaatac

SEQ ID NO: 269559 - DNA, 50 bp, Artificial
  Synthetic oligonucleotide
agcgaatcggcagtcccagagcccaggagtacgttcggggtcttcccttc

SEQ ID NO: 269560 - DNA, 50 bp, Artificial
  Synthetic oligonucleotide
agcgatgacactacccggtcgtctgttcgtttgcgcggttgccacgagga

SEQ ID NO: 269561 - DNA, 50 bp, Artificial
  Synthetic oligonucleotide
agctgctaagaccgcaaaaagagcggtgttgggatttatgggccccggga

SEQ ID NO: 269562 - DNA, 50 bp, Artificial
  Synthetic oligonucleotide
cgttgactcgctatatatacgtgcggctacagacggggttagctctacac

SEQ ID NO: 269563 - DNA, 60 bp, Artificial
  Synthetic oligonucleotide
ttcatatagtatctcaaattatgttgtttattgaattgcttatctaagtgctgtattaac

SEQ ID NO: 269564 - DNA, 50 bp, Artificial
  Synthetic oligonucleotide
agcttagccgccggacctctgctgccgaacttgagcctcttgtcgacagt

SEQ ID NO: 269565 - DNA, 50 bp, Artificial
  Synthetic oligonucleotide
acgaagggtcacgtgccccgcgtacgcccgtatcccagcaacggcgccac

SEQ ID NO: 269566 - DNA, 50 bp, Artificial
  Synthetic oligonucleotide
acgagacacgcgtgccaagaatggaccgctgtctgctcgggggttaccaa

SEQ ID NO: 269567 - DNA, 50 bp, Artificial
  Synthetic oligonucleotide
acgaggccacgagactgggggcgaacgaaaagaaggtccgcgggtagaga

SEQ ID NO: 269568 - DNA, 50 bp, Artificial
  Synthetic oligonucleotide
acgcgtagcacgtgtgggggacgtgaatatgggtcatgtgagcaccccca

SEQ ID NO: 269569 - DNA, 50 bp, Artificial
  Synthetic oligonucleotide
acgctccctacaacgagcatgaggcccgtctgcatgtgatccgagtgcga

SEQ ID NO: 269570 - DNA, 50 bp, Artificial
  Synthetic oligonucleotide
acggaagcgtcgcgacagcaggcgaatcacgtgactgagacaaccaccgg

SEQ ID NO: 269571 - DNA, 50 bp, Artificial
  Synthetic oligonucleotide
acggaggacaacttgtggcccattcttcggtggcacggcacactctggca

SEQ ID NO: 269572 - DNA, 50 bp, Artificial
  Synthetic oligonucleotide
acggatcgccctccaagattcccagacgaatggagcccgctgcgagtgtt

SEQ ID NO: 269573 - DNA, 50 bp, Artificial
  Synthetic oligonucleotide
acggcagaggcgactctcttgctgcacgcagaggcagatgcggtcagaat

SEQ ID NO: 269574 - DNA, 53 bp, Artificial
  Synthetic oligonucleotide
ctaaaccccctaagccatttataatagctaacctatatataatggaggggttc

SEQ ID NO: 269575 - DNA, 50 bp, Artificial
  Synthetic oligonucleotide
acggcgctggcccgatctgtgagcgagcagtcgtacccgtttgcgactcc

SEQ ID NO: 269576 - DNA, 50 bp, Artificial
  Synthetic oligonucleotide
acgggaggcagattctgtgtgggcccagtgccagtctctacacggtgagc

SEQ ID NO: 269577 - DNA, 50 bp, Artificial
  Synthetic oligonucleotide
gcgaccagtccaataaggctatttgcctgttccctgattggccgctgata

SEQ ID NO: 269578 - DNA, 50 bp, Artificial
  Synthetic oligonucleotide
acgggtctccgcgatgagaacacgtctgcttccatgcgactgcctcgagc

SEQ ID NO: 269579 - DNA, 50 bp, Artificial
  Synthetic oligonucleotide
acgggtgccaagcgagcgaagcccagtgtctgcgggtgaatctcttggtc

SEQ ID NO: 269580 - DNA, 50 bp, Artificial
  Synthetic oligonucleotide
acgtgccccgcgtacgcccgtatcccagcaacggcgccactggagagcct

SEQ ID NO: 269581 - DNA, 50 bp, Artificial
  Synthetic oligonucleotide
acgtgtgcgactcggccgacagagacgaagcgttggtcgacggtttgagc

SEQ ID NO: 269582 - DNA, 50 bp, Artificial
  Synthetic oligonucleotide
actagtagcaccgccccaagagacccgccaagtgcaaggtgcgtctgcgg

SEQ ID NO: 269583 - DNA, 50 bp, Artificial
  Synthetic oligonucleotide
actagtgacccccacgagccgaatagacacccccacactccacgggaggc

SEQ ID NO: 269584 - DNA, 50 bp, Artificial
  Synthetic oligonucleotide
actcgacggaccgaccctcccaccgtgtctaacgctcccccaaccataca

SEQ ID NO: 269585 - DNA, 55 bp, Artificial
  Synthetic oligonucleotide
attcataaatggattcggactatttactttaaggtaattagtcaatagggcaata

SEQ ID NO: 269586 - DNA, 58 bp, Artificial
  Synthetic oligonucleotide
ggatcctaaacgatttatcaacaataaataacctcgaaatatgatatgtaattcataa

SEQ ID NO: 269587 - DNA, 50 bp, Artificial
  Synthetic oligonucleotide
actcgagccaggccgctcatcagagggccggcgttttccagagacaggtt

SEQ ID NO: 269588 - DNA, 50 bp, Artificial
  Synthetic oligonucleotide
actctgatccacgtgggatgcgtacaggcgccctttggaggtgtcggaga

SEQ ID NO: 269589 - DNA, 57 bp, Artificial
  Synthetic oligonucleotide
atgggaccatcattcagggtcacttgtctaccacacccgggcaagatacgtccgagg

SEQ ID NO: 269590 - DNA, 58 bp, Artificial
  Synthetic oligonucleotide
ccagtgccatatggattatatttccaagattcggcaactcctactttcgatggtataa

SEQ ID NO: 269591 - DNA, 56 bp, Artificial
  Synthetic oligonucleotide
tatctaaatacccaagagttagaattgaactatataactaacccatctttgatggg

SEQ ID NO: 269592 - DNA, 58 bp, Artificial
  Synthetic oligonucleotide
ttcatgtatgattaccagttgtacactcagaatctcctttagctggttctatgatctt

SEQ ID NO: 269593 - DNA, 47 bp, Artificial
  Synthetic oligonucleotide
gtttaaccccccccctctctctaaccttttttagggagtgaataaag

SEQ ID NO: 269594 - DNA, 57 bp, Artificial
  Synthetic oligonucleotide
gtagggggtaggacagttttagccatctttgatggattgggggcagctagaatattg

SEQ ID NO: 269595 - DNA, 56 bp, Artificial
  Synthetic oligonucleotide
ctataatattgagactaaatttagtaaaccattaacttattatgatggttgattag

SEQ ID NO: 269596 - DNA, 54 bp, Artificial
  Synthetic oligonucleotide
accataatttacttacccatgattgaaagattataagataaaaggtttataatg

SEQ ID NO: 269597 - DNA, 56 bp, Artificial
  Synthetic oligonucleotide
cataccttcggtatggccaccccggctgagtcatcagtcggcttagtcacggggcc

SEQ ID NO: 269598 - DNA, 60 bp, Artificial
  Synthetic oligonucleotide
gttgaaaccaagtagcatcattaggatcaatcatatctatcgtagcttcaatagtattta

SEQ ID NO: 269599 - DNA, 55 bp, Artificial
  Synthetic oligonucleotide
ctggcgattttcgtctttagacacgacgctacaacccagtcagtttcaaaccaac

SEQ ID NO: 269600 - DNA, 55 bp, Artificial
  Synthetic oligonucleotide
ctggtgctttcgtcttcatgtacggtatgctgtcttcttcgggtaacctgggtcc

SEQ ID NO: 269601 - DNA, 54 bp, Artificial
  Synthetic oligonucleotide
gagggttggaataatagggccctcttaaaatttcactatatacgagaatatccc

SEQ ID NO: 269602 - DNA, 55 bp, Artificial
  Synthetic oligonucleotide
gaggatttcggatacaaacacattatgtgggtattttcgggccgacgaggagccc

SEQ ID NO: 269603 - DNA, 55 bp, Artificial
  Synthetic oligonucleotide
gactcccctcttgggacgcgaagggtgattgcaagttggtttgaaactgactggg

SEQ ID NO: 269604 - DNA, 55 bp, Artificial
  Synthetic oligonucleotide
gaccgggatagggacggtgtcgtccataaagtaaccaggctgagaggcgttatgg

SEQ ID NO: 269605 - DNA, 55 bp, Artificial
  Synthetic oligonucleotide
gaccccgcttgacgcatctggagacagttcctggttcagttgtcactagcacgcg

SEQ ID NO: 269606 - DNA, 55 bp, Artificial
  Synthetic oligonucleotide
gaaatggtgtcccttcgtcaaggagctcgctgttatggttgtccgatctaccgac

SEQ ID NO: 269607 - DNA, 55 bp, Artificial
  Synthetic oligonucleotide
cttgctaccaacaggtggctaaaccccaaccttagacgaaccatagatctctaca

SEQ ID NO: 269608 - DNA, 55 bp, Artificial
  Synthetic oligonucleotide
ctgcaatcgcatctaaaccagtatttggtgtacaaggaatgatttacgctatgtg

SEQ ID NO: 269609 - DNA, 57 bp, Artificial
  Synthetic oligonucleotide
cggagttccctgtcctcttgctatcattgcgggcgaaactccctgtggtaaatggga

SEQ ID NO: 269610 - DNA, 55 bp, Artificial
  Synthetic oligonucleotide
ctctacaccttccgatgcgtatttgatcgctgccctcacagagtcaatgtgtgtc

SEQ ID NO: 269611 - DNA, 55 bp, Artificial
  Synthetic oligonucleotide
ctaacctcgctgtagaagactcgacgagctatgacaaatgttatttccggtgact

SEQ ID NO: 269612 - DNA, 55 bp, Artificial
  Synthetic oligonucleotide
cgttggtcccgtctcgctagcgtctatatcgcgacttctagagccgttccacaac

SEQ ID NO: 269613 - DNA, 55 bp, Artificial
  Synthetic oligonucleotide
cgttccaggaaagtgtttctcggccaaacgagcggctcagacctggcaacataag

SEQ ID NO: 269614 - DNA, 55 bp, Artificial
  Synthetic oligonucleotide
cgtagacgccgtcctttccgccagagaaatctcgctcctcggactcggctcggta

SEQ ID NO: 269615 - DNA, 55 bp, Artificial
  Synthetic oligonucleotide
cggagggactgtaactcgtctcgaacttccgaatggggagtgccttggtgaatcc

SEQ ID NO: 269616 - DNA, 55 bp, Artificial
  Synthetic oligonucleotide
cgctgtcaatgacgtacttgacctggatctgtccatgtcgcgagccgactctgtc

SEQ ID NO: 269617 - DNA, 55 bp, Artificial
  Synthetic oligonucleotide
cgctagtggcaggcaaaagatggtgttagataggtctgtgtgcggccgtaatagt

SEQ ID NO: 269618 - DNA, 55 bp, Artificial
  Synthetic oligonucleotide
cgatcttcccctgtcacacgacccgacgatcataacagcggcgagattccagggg

SEQ ID NO: 269619 - DNA, 55 bp, Artificial
  Synthetic oligonucleotide
cgacgctacaacccagtcagtttcaaaccaacttgcaatcacccttcgcgtccca

SEQ ID NO: 269620 - DNA, 60 bp, Artificial
  Synthetic oligonucleotide
taatattcctctccattagaggtgcaatttatatagtataatcaattatacgaatagtta

SEQ ID NO: 269621 - DNA, 55 bp, Artificial
  Synthetic oligonucleotide
cgaatttactctctgcgctagtcctgtgttgctgtgatgccacagaggcgggtcc

SEQ ID NO: 269622 - DNA, 55 bp, Artificial
  Synthetic oligonucleotide
cgaacagatgtcttcagctacccctgtggcgttcgttacttgcaccccatgtctt

SEQ ID NO: 269623 - DNA, 55 bp, Artificial
  Synthetic oligonucleotide
ccgccatttacaccggacaataacatccgactcctctcaactagacccttccaga

SEQ ID NO: 269624 - DNA, 55 bp, Artificial
  Synthetic oligonucleotide
ccgcagtgctgttcagtcaaatcacacttgtccttcacttcaggagccacaagag

SEQ ID NO: 269625 - DNA, 55 bp, Artificial
  Synthetic oligonucleotide
gtaggtctgttcaggggaagccgaacggtctgtgttagtggatgcgtgtgggtgg

SEQ ID NO: 269626 - DNA, 55 bp, Artificial
  Synthetic oligonucleotide
gtatccgattcagttttcacgcagccacgtgagatcgtttcccagtctcgtttgt

SEQ ID NO: 269627 - DNA, 55 bp, Artificial
  Synthetic oligonucleotide
gtatggccaccccggctgagtcatcagtcggcttagtcacggggcctgggttcta

SEQ ID NO: 269628 - DNA, 55 bp, Artificial
  Synthetic oligonucleotide
gtcgaagagcttcagggatgccgcgtgagctgagactcacatgtgacatgtacag

SEQ ID NO: 269629 - DNA, 55 bp, Artificial
  Synthetic oligonucleotide
gtgccagtcgaacggaagaaagcataaatactcactcaagccgcctctttcttag

SEQ ID NO: 269630 - DNA, 55 bp, Artificial
  Synthetic oligonucleotide
gtgctacatttgcatagcatagaattcacgctgtagtgtgtgtattcggatggat

SEQ ID NO: 269631 - DNA, 60 bp, Artificial
  Synthetic oligonucleotide
gaatagtagtacctacaaatacacatttaagatttatcgtgacatctagagatgttatac

SEQ ID NO: 269632 - DNA, 55 bp, Artificial
  Synthetic oligonucleotide
gttaatttggataatagttctaatcgtaatccaagcttaacacctcgatgtcggc

SEQ ID NO: 269633 - DNA, 55 bp, Artificial
  Synthetic oligonucleotide
gttctggaacatgtgtaacgtctagtctggggttcgatacttactcgtgtggccc

SEQ ID NO: 269634 - DNA, 55 bp, Artificial
  Synthetic oligonucleotide
taacacgtctcgccacaaagagtccggtcggagatacgtacatgcgaatccggac

SEQ ID NO: 269635 - DNA, 55 bp, Artificial
  Synthetic oligonucleotide
tacagtatgagtaccaacgggtatcgtagagacggtgcgaagattaaggtcgtgg

SEQ ID NO: 269636 - DNA, 55 bp, Artificial
  Synthetic oligonucleotide
tacttgaggccatacaccgacgcctgccacttgtattggcagcccgctgggatgg

SEQ ID NO: 269637 - DNA, 55 bp, Artificial
  Synthetic oligonucleotide
taggtggtcatatggggcggaggcagtgtagagggctgtgcaccagttgcggtgg

SEQ ID NO: 269638 - DNA, 55 bp, Artificial
  Synthetic oligonucleotide
tagtacaactcactctagggacaccatgttcccattatacacacccttctgacaa

SEQ ID NO: 269639 - DNA, 55 bp, Artificial
  Synthetic oligonucleotide
tagtgctgccttgttccgatatctcgctgtttgcccacgtcgtgcgtctaccatg

SEQ ID NO: 269640 - DNA, 55 bp, Artificial
  Synthetic oligonucleotide
tgactggctgactccgagaggggtatcgtgtgaagtgtcccacgtaccattgctc

SEQ ID NO: 269641 - DNA, 55 bp, Artificial
  Synthetic oligonucleotide
tgcatcgagagggtggttcaaatggctatcagtgaccctcgacttttaggagttg

SEQ ID NO: 269642 - DNA, 60 bp, Artificial
  Synthetic oligonucleotide
gaatctaattatgattcttaggaagcaatctatatgcgtagaatttattatcagtccgat

SEQ ID NO: 269643 - DNA, 55 bp, Artificial
  Synthetic oligonucleotide
tggcgcccaatattacaaaggtctctgtacttgtgtaacgaacacccgacccaag

SEQ ID NO: 269644 - DNA, 53 bp, Artificial
  Synthetic oligonucleotide
tgggtgggacgaggagaagtctcctaacgatacgtttgacgtacccaaggacg

SEQ ID NO: 269645 - DNA, 53 bp, Artificial
  Synthetic oligonucleotide
ttgacgacgggacaacttaaacctttaggccattcgaaacggaatgtaaagca

SEQ ID NO: 269646 - DNA, 55 bp, Artificial
  Synthetic oligonucleotide
gagtactgtaccggaagtatcccctgaacagtgtgggttgagcccggtgtgtgcg

SEQ ID NO: 269647 - DNA, 55 bp, Artificial
  Synthetic oligonucleotide
gatcgcgtgtcaggagcgcacgtgaggacactggctgagaagtcatatgaacgcg

SEQ ID NO: 269648 - DNA, 55 bp, Artificial
  Synthetic oligonucleotide
gattgtcgctgtctaatctaaccgttgctcgctgtctgtaatacgttcacaggct

SEQ ID NO: 269649 - DNA, 54 bp, Artificial
  Synthetic oligonucleotide
gcaccttcccatcgacacccaaacttctcggccggacaactaatgggtcgttcc

SEQ ID NO: 269650 - DNA, 55 bp, Artificial
  Synthetic oligonucleotide
gcacgtgttgtagacgatagggtcctacaagtactctgataaccacatggtgtat

SEQ ID NO: 269651 - DNA, 55 bp, Artificial
  Synthetic oligonucleotide
gcactgtacatacaaatacgaccggtgcgcacatttcacctgtactcgttgtcgc

SEQ ID NO: 269652 - DNA, 55 bp, Artificial
  Synthetic oligonucleotide
gcccttggagttgctgagcccctgtaacagctctttgtgaccccgaagagacggg

SEQ ID NO: 269653 - DNA, 53 bp, Artificial
  Synthetic oligonucleotide
caccattagaacaatttacaactagagtttacttcggtttaagctcaggttta

SEQ ID NO: 269654 - DNA, 55 bp, Artificial
  Synthetic oligonucleotide
gcgaaagctcgacaccggagtcaattccattgtccctacgattcttgtgcgagac

SEQ ID NO: 269655 - DNA, 55 bp, Artificial
  Synthetic oligonucleotide
gcggtcttgtggtgttgtcggcgcgtggtgacactatctgagggcgtctagttag

SEQ ID NO: 269656 - DNA, 55 bp, Artificial
  Synthetic oligonucleotide
gcggtgtctggctatcacacagacggtgcttgagcaggtggagacgtctctggag

SEQ ID NO: 269657 - DNA, 55 bp, Artificial
  Synthetic oligonucleotide
gctggtcatctgctgttgtcttgtggtaacgactctaaaatcaagctatgggacg

SEQ ID NO: 269658 - DNA, 55 bp, Artificial
  Synthetic oligonucleotide
ggactatctccgaaacgtgcgcaatttaattcgggtgtgctgacttaagctctcg

SEQ ID NO: 269659 - DNA, 55 bp, Artificial
  Synthetic oligonucleotide
ggatagaaaccggtaccagatgtgacgctgttgtcagtcatcccctaacctgtag

SEQ ID NO: 269660 - DNA, 55 bp, Artificial
  Synthetic oligonucleotide
ggattgtgtcattgtgatggaccggacttgtcccggagggtgttctagagtcagc

SEQ ID NO: 269661 - DNA, 55 bp, Artificial
  Synthetic oligonucleotide
ggcacgcgggcgtgtttagtatatgtggggagccctagtgtatgttgtgcgcagg

SEQ ID NO: 269662 - DNA, 55 bp, Artificial
  Synthetic oligonucleotide
ggcgttagaccaagccgggaagactagacacttgattaattgtagcgaaacggtg

SEQ ID NO: 269663 - DNA, 55 bp, Artificial
  Synthetic oligonucleotide
ggctcgctcgggctccgataattgcggatgtggtccctaatgtactctgttctcc

SEQ ID NO: 269664 - DNA, 56 bp, Artificial
  Synthetic oligonucleotide
gacattagctatggagggttggaataatagggccctcttaaaatttcactatatac

SEQ ID NO: 269665 - DNA, 55 bp, Artificial
  Synthetic oligonucleotide
ggctctcaagagacgacaggacaacgagagaaagcataacaagaacctgcctgac

SEQ ID NO: 269666 - DNA, 55 bp, Artificial
  Synthetic oligonucleotide
gggagttgggacgaaagcgctgtcgaaagaggcgcacgcagacacgtgtacgaat

SEQ ID NO: 269667 - DNA, 55 bp, Artificial
  Synthetic oligonucleotide
ggggtacaaattgaactgggttcgcaggtgtaacggaggacgcacatgttggccg

SEQ ID NO: 269668 - DNA, 55 bp, Artificial
  Synthetic oligonucleotide
ggtgctcagctgcgtccgtagaacttcatcgtacgaaggatgtacacatggttgg

SEQ ID NO: 269669 - DNA, 55 bp, Artificial
  Synthetic oligonucleotide
atacaaccctccactccgagccccactcaatcacgtgaccccaaattccggtcca

SEQ ID NO: 269670 - DNA, 55 bp, Artificial
  Synthetic oligonucleotide
atgaacaagttgaaccgttgtacaataactagaagcccgagaagctatctgaaat

SEQ ID NO: 269671 - DNA, 55 bp, Artificial
  Synthetic oligonucleotide
atgtcgctacaaaccgtcagaatctcagaccgtccaccccatccctttccacagc

SEQ ID NO: 269672 - DNA, 55 bp, Artificial
  Synthetic oligonucleotide
caacatgacgcattccgctcctccgtggcaataggcgagtccacagagctgtgcc

SEQ ID NO: 269673 - DNA, 55 bp, Artificial
  Synthetic oligonucleotide
caatctccgttgatgtgattttgagcggacccctgcgataccggcgctcctgtgc

SEQ ID NO: 269674 - DNA, 55 bp, Artificial
  Synthetic oligonucleotide
caatggccgagatatcctcttatctgtcctatttcgatccgtcggttttggtctg

SEQ ID NO: 269675 - DNA, 55 bp, Artificial
  Synthetic oligonucleotide
ttttggtgatcatcgggttgttattcaaagaatcccctaccgatcttctagagtt

SEQ ID NO: 269676 - DNA, 52 bp, Artificial
  Synthetic oligonucleotide
cttactagtaaaggtggttatagaggggtattacttactataccagagtact

SEQ ID NO: 269677 - DNA, 55 bp, Artificial
  Synthetic oligonucleotide
ctatacccgcaacaaccgacatacacccaggcaccagccagtaaacacgactggg

SEQ ID NO: 269678 - DNA, 55 bp, Artificial
  Synthetic oligonucleotide
cgtccttgatcctaagatacgtctaagagtgtcaccttcgccctccgttaatcca

SEQ ID NO: 269679 - DNA, 55 bp, Artificial
  Synthetic oligonucleotide
cccgaccgatcgtatggccgtggtatgaagtcaggtatccaagtcggattcatgc

SEQ ID NO: 269680 - DNA, 55 bp, Artificial
  Synthetic oligonucleotide
ccaggatgtcttactatacgtccaagagcctgattaacagctctaatagcttgga

SEQ ID NO: 269681 - DNA, 55 bp, Artificial
  Synthetic oligonucleotide
cagctgctgtagtgggtgttcgtgctacatcggatgtatcggacagattgtgacc

SEQ ID NO: 269682 - DNA, 55 bp, Artificial
  Synthetic oligonucleotide
atgcacgcccgattattgtcgaccggtagaattcatatagcatggtattagggtg

SEQ ID NO: 269683 - DNA, 55 bp, Artificial
  Synthetic oligonucleotide
caaaatggatcctacctgagtatgcaatatgcaggaacaccagcactacattcac

SEQ ID NO: 269684 - DNA, 55 bp, Artificial
  Synthetic oligonucleotide
atgcactatacgtaaatcaccgtacactacacaagtcacagattccatcctgggc

SEQ ID NO: 269685 - DNA, 55 bp, Artificial
  Synthetic oligonucleotide
atgtggaaaccgaacaatttctgtatcttcgagttgtctgaatggccactcacac

SEQ ID NO: 269686 - DNA, 55 bp, Artificial
  Synthetic oligonucleotide
tggtagagttgcttacctctctgagaacgagttcgaaaggtcgggaattccatcc

SEQ ID NO: 269687 - DNA, 53 bp, Artificial
  Synthetic oligonucleotide
cgaggaaatttacgagggtaggaatcttaaggccaattacagagtcttggagg

SEQ ID NO: 269688 - DNA, 53 bp, Artificial
  Synthetic oligonucleotide
ggttctatcgattgtccagggaaataagcgctcacagaagcgcccggttgtgt

SEQ ID NO: 269689 - DNA, 53 bp, Artificial
  Synthetic oligonucleotide
tcctgcagttgcaccaactcgcccaatgcgagcaaccggccattaacccgaac

SEQ ID NO: 269690 - DNA, 53 bp, Artificial
  Synthetic oligonucleotide
ctagtttggcatacggtcatcgcaaattgtccgagatgcaatgatcaacacag

SEQ ID NO: 269691 - DNA, 53 bp, Artificial
  Synthetic oligonucleotide
gatgacgcgaactaatcttttgaaatccgtagtgttacggatagacttcaagt

SEQ ID NO: 269692 - DNA, 52 bp, Artificial
  Synthetic oligonucleotide
cgattacacatctgaacgaacccagagagtaattacgtgtgtctccttggtc

SEQ ID NO: 269693 - DNA, 52 bp, Artificial
  Synthetic oligonucleotide
gatgaatccgcttagcacaataaatattggcgttgccgacttcagaattgtg

SEQ ID NO: 269694 - DNA, 51 bp, Artificial
  Synthetic oligonucleotide
gtgatgtatgtaccagtcactcgctttcgacgactgatatcaagagacagt

SEQ ID NO: 269695 - DNA, 51 bp, Artificial
  Synthetic oligonucleotide
aatcaagcggctcccgacatcccgcgagcatccccctttttggactctgcg

SEQ ID NO: 269696 - DNA, 51 bp, Artificial
  Synthetic oligonucleotide
acagacaaggcggcatagatgcacatggcccaaggcgggggaagtactcga

SEQ ID NO: 269697 - DNA, 55 bp, Artificial
  Synthetic oligonucleotide
tggcttgttgcgattctcccaactggttgaccacccactcttgcagcgccccggg

SEQ ID NO: 269698 - DNA, 51 bp, Artificial
  Synthetic oligonucleotide
aagggaaagctttgagactaagtgggcgcgcgttggagcgacgtatggcga

SEQ ID NO: 269699 - DNA, 51 bp, Artificial
  Synthetic oligonucleotide
aacgtcgccgcagcctgggggtgtttggtggcctgatggtcgtgattctgc

SEQ ID NO: 269700 - DNA, 51 bp, Artificial
  Synthetic oligonucleotide
ttagacccacggcaatagagctgagcaggaaactttatccgcctggccttt

SEQ ID NO: 269701 - DNA, 50 bp, Artificial
  Synthetic oligonucleotide
tccttcaactcttgcactctcgctgggcactccagtccccgtcggaacac

SEQ ID NO: 269702 - DNA, 50 bp, Artificial
  Synthetic oligonucleotide
tcttgcactccgctggcactcatgccccgtcggaacacgaagactcatcc

SEQ ID NO: 269703 - DNA, 50 bp, Artificial
  Synthetic oligonucleotide
tccggcatccctccccgaacagcgatcgtagcctgaccggccactcagcg

SEQ ID NO: 269704 - DNA, 50 bp, Artificial
  Synthetic oligonucleotide
tcaagtgcaacgtcgccgcagcctgggggtgtttggtggcctgatggtcg

SEQ ID NO: 269705 - DNA, 50 bp, Artificial
  Synthetic oligonucleotide
taccgcgtaggagatgggaatctggcggaagacgaccgagctccaggtga

SEQ ID NO: 269706 - DNA, 50 bp, Artificial
  Synthetic oligonucleotide
tttcgggggcgagccagtggttgctggctttaatgcgagcatgcatgagg

SEQ ID NO: 269707 - DNA, 50 bp, Artificial
  Synthetic oligonucleotide
aaacccgcaagggaaagctttgagactaagtgggcgcgcgttggagcgac

SEQ ID NO: 269708 - DNA, 55 bp, Artificial
  Synthetic oligonucleotide
taccgcatgtttcgcatataaatgcgtcaaattcatctgaacagtgcatgagtcg

SEQ ID NO: 269709 - DNA, 50 bp, Artificial
  Synthetic oligonucleotide
gttggggcacgggggtgttaccggggatcaacttggcgcctttaggcctt

SEQ ID NO: 269710 - DNA, 50 bp, Artificial
  Synthetic oligonucleotide
gtattcgagacccaatttgcgggtcgctcactggcttacgtcgagcaaaa

SEQ ID NO: 269711 - DNA, 50 bp, Artificial
  Synthetic oligonucleotide
ggttttggcacacacctggggtttcagcggcgtttctacgggggtgtccg

SEQ ID NO: 269712 - DNA, 50 bp, Artificial
  Synthetic oligonucleotide
gggtcatggcgccacttgccttgcaatcttcatcggtgcgtccgctcggt

SEQ ID NO: 269713 - DNA, 50 bp, Artificial
  Synthetic oligonucleotide
gggcccagtcgtgtttactggctggtgcctgggtgtatgtcggttgttgc

SEQ ID NO: 269714 - DNA, 50 bp, Artificial
  Synthetic oligonucleotide
aggaattggtggcgatgttggggcgtggccactacgtgcggtacgacgaa

SEQ ID NO: 269715 - DNA, 50 bp, Artificial
  Synthetic oligonucleotide
caaccgacatacacccaggcaccagccagtaaacacgactgggcccggaa

SEQ ID NO: 269716 - DNA, 50 bp, Artificial
  Synthetic oligonucleotide
caatgcccgcgacagacaaggcggcatagatgcacatggcccaaggcggg

SEQ ID NO: 269717 - DNA, 50 bp, Artificial
  Synthetic oligonucleotide
cgccacttgccttgcaatcttcatcggtgcgtccgctcggttgcctacag

SEQ ID NO: 269718 - DNA, 50 bp, Artificial
  Synthetic oligonucleotide
ccgtgaccagagtcacctggtcgaacgccctgccgtagcgcgaaccttgt

SEQ ID NO: 269719 - DNA, 55 bp, Artificial
  Synthetic oligonucleotide
gtacccctcacttaacgcagaaaccaatcgatcaggtaccgaccctagccgagac

SEQ ID NO: 269720 - DNA, 50 bp, Artificial
  Synthetic oligonucleotide
ccgcgcaaatgcgcaacctagaccttcgaaactgaccacccatcgcccca

SEQ ID NO: 269721 - DNA, 50 bp, Artificial
  Synthetic oligonucleotide
catcgtctcttggggataaatactagttgcggaatatctttcgttgacaa

SEQ ID NO: 269722 - DNA, 55 bp, Artificial
  Synthetic oligonucleotide
ggcttcataattatggtcgaggacacccaatgaatccaatacgaattagcatgac

SEQ ID NO: 269723 - DNA, 55 bp, Artificial
  Synthetic oligonucleotide
ggatatgagtggataaggtttgcctactaatcttcgagagtggggaactaggagg

SEQ ID NO: 269724 - DNA, 55 bp, Artificial
  Synthetic oligonucleotide
gcatctcccgctgcagttccaatacagatatagtaccgtcactgtcaaacgcagt

SEQ ID NO: 269725 - DNA, 55 bp, Artificial
  Synthetic oligonucleotide
gagcgggactgatgaaagggttaatccgatgggtatctccagtgttattagcggg

SEQ ID NO: 269726 - DNA, 52 bp, Artificial
  Synthetic oligonucleotide
ttagggttttgaaaaacccttggtagagcataattctccttcgggattacta

SEQ ID NO: 269727 - DNA, 56 bp, Artificial
  Synthetic oligonucleotide
cgggaatacacacccacctctagacaaggggtagaggggggtggcagatataatca

SEQ ID NO: 269728 - DNA, 60 bp, Artificial
  Synthetic oligonucleotide
cccgtgtgtgtgaggcacctttttgagacatatgaagagcacacctatgagaggttgtac

SEQ ID NO: 269729 - DNA, 58 bp, Artificial
  Synthetic oligonucleotide
ccccacatttcgatatactttgtacacccatcactgttacatagaggtttgactttca

SEQ ID NO: 269730 - DNA, 58 bp, Artificial
  Synthetic oligonucleotide
caataagacatactatcatcttcataggtttctaagtctaaaacaccaatgttagtat

SEQ ID NO: 269731 - DNA, 60 bp, Artificial
  Synthetic oligonucleotide
caagataggtattatctcctatttcaatggaattcgtcataagcctagtaatagatatag

SEQ ID NO: 269732 - DNA, 59 bp, Artificial
  Synthetic oligonucleotide
atttttatatacagtagttataatagcacattatagtattatcgatttatagttaatgc

SEQ ID NO: 269733 - DNA, 60 bp, Artificial
  Synthetic oligonucleotide
agatggataagccaaaacaaattacagcattaatgcctaacttagtgcattccttagatg

SEQ ID NO: 269734 - DNA, 59 bp, Artificial
  Synthetic oligonucleotide
aaagtgtgaatttctatagtgtacatgattgttatggagttaccgctaaatatgtggaa

SEQ ID NO: 269735 - DNA, 58 bp, Artificial
  Synthetic oligonucleotide
cctaatacagcgaatatttattctatcccgctattaccttatataatttgtgaccgca

SEQ ID NO: 269736 - DNA, 58 bp, Artificial
  Synthetic oligonucleotide
tctagccatatcaggtttatcttctagcccagatataactaacttcgcaaagtcagag

SEQ ID NO: 269737 - DNA, 57 bp, Artificial
  Synthetic oligonucleotide
tgttagaacctacaacaataggagaggtggcgactcatttatcctttacgaatattc

SEQ ID NO: 269738 - DNA, 57 bp, Artificial
  Synthetic oligonucleotide
acagttagatggtacttgtaatggcttccaacatcttgcgttattatccaatgaaac

SEQ ID NO: 269739 - DNA, 57 bp, Artificial
  Synthetic oligonucleotide
tatactgtctgtgtcagtataataaagagttccgccgttttttaagatatatagtct

SEQ ID NO: 269740 - DNA, 55 bp, Artificial
  Synthetic oligonucleotide
cccttggtagagcataattctccttcgggattactagtcgccattgacatccggt

SEQ ID NO: 269741 - DNA, 55 bp, Artificial
  Synthetic oligonucleotide
cgcagtgtgactgacgcagtgtgaccgcacagtgatgcaagaggcagtctaacgc

SEQ ID NO: 269742 - DNA, 55 bp, Artificial
  Synthetic oligonucleotide
aggagaggtggcgactcatttatcctttacgaatattcttttacgcttgttatag

SEQ ID NO: 269743 - DNA, 55 bp, Artificial
  Synthetic oligonucleotide
aagatctcttaatgatctaggtaaaatagtgtaactatctgatattttcaccact

SEQ ID NO: 269744 - DNA, 54 bp, Artificial
  Synthetic oligonucleotide
aatagaaccaaggtgccaaacgaaagggtgtaggaggagcacatgcaggtgcaa

SEQ ID NO: 269745 - DNA, 51 bp, Artificial
  Synthetic oligonucleotide
tctacgaaattttgaaagactccaggaactttattaaagttatacccttta

SEQ ID NO: 269746 - DNA, 56 bp, Artificial
  Synthetic oligonucleotide
tacctgttgtttgaagattaccgcatgggttaatggttagtcaaaaatacatggta

SEQ ID NO: 269747 - DNA, 59 bp, Artificial
  Synthetic oligonucleotide
tacactccatggacctaatacagcgaatatttattctatcccgctattaccttatataa

SEQ ID NO: 269748 - DNA, 60 bp, Artificial
  Synthetic oligonucleotide
taatcaagcagtgaaagtcaaacctctatgtaacagtgatgggtgtacaaagtatatcga

SEQ ID NO: 269749 - DNA, 55 bp, Artificial
  Synthetic oligonucleotide
ggatagtttgttttatgtagacgggtgcttaatatcacttggggtatgatacctt

SEQ ID NO: 269750 - DNA, 57 bp, Artificial
  Synthetic oligonucleotide
gactttcactgcttgattatatctgccacccccctctaccccttgtctagaggtggg

SEQ ID NO: 269751 - DNA, 60 bp, Artificial
  Synthetic oligonucleotide
cttatataatttgtgaccgcagtgtgactgacgcagtgtgaccgcacagtgatgcaagag

SEQ ID NO: 269752 - DNA, 58 bp, Artificial
  Synthetic oligonucleotide
gagtcaagagattttggcgacttctgttaagttgtagcaaagtagggctagaggaatc

SEQ ID NO: 269753 - DNA, 54 bp, Artificial
  Synthetic oligonucleotide
cctccggccaaggggagtcaaggcaatcaaataaccaggggtacgataggccgc

SEQ ID NO: 269754 - DNA, 57 bp, Artificial
  Synthetic oligonucleotide
ggtggtaaatcatctaaggctactttagactcactaactaagagtggacaaataaca

SEQ ID NO: 269755 - DNA, 57 bp, Artificial
  Synthetic oligonucleotide
cctgaaacaccttaagcggtggcataaaccgcatatctctatctttcctcctactac

SEQ ID NO: 269756 - DNA, 59 bp, Artificial
  Synthetic oligonucleotide
agggaaatagctatgaggattagctattaaggtatagtccataaatagacaatcaacga

SEQ ID NO: 269757 - DNA, 58 bp, Artificial
  Synthetic oligonucleotide
tagattagactagagtcgggatagtataagggttaatacgcacgtttcatatacgtga

SEQ ID NO: 269758 - DNA, 57 bp, Artificial
  Synthetic oligonucleotide
atgtctatctggctatatgctgggaaacccactaactttctatttaagttaagaata

SEQ ID NO: 269759 - DNA, 56 bp, Artificial
  Synthetic oligonucleotide
tagatagggggcgggtgtaaatagagaagtatttagtatcacctatagcgaatatt

SEQ ID NO: 269760 - DNA, 56 bp, Artificial
  Synthetic oligonucleotide
gacggatgaatccacagccacgagaggctaatctccaactgcaaccaataggttct

SEQ ID NO: 269761 - DNA, 55 bp, Artificial
  Synthetic oligonucleotide
ttacctagctcttctgggactaacctttctagccctaagttacctcatcatatac

SEQ ID NO: 269762 - DNA, 54 bp, Artificial
  Synthetic oligonucleotide
gacttaccttaagaacaaatgtggcactagcttcagcggttactgcctattccc

SEQ ID NO: 269763 - DNA, 58 bp, Artificial
  Synthetic oligonucleotide
accctctgtgcgccactagagggccgagttagcttcatacctttactagaccaggata

SEQ ID NO: 269764 - DNA, 54 bp, Artificial
  Synthetic oligonucleotide
tcgggtttgcttagggagtcctagccgttacctttatccttgtctagatatctc

SEQ ID NO: 269765 - DNA, 53 bp, Artificial
  Synthetic oligonucleotide
gctcttcccgggagattaaatcaaacctcagctatcataaaccgtgagggtgt

SEQ ID NO: 269766 - DNA, 53 bp, Artificial
  Synthetic oligonucleotide
gtaaaccgtaagaatcttgttctcatgttgctctgtctagagcttatgctcct

SEQ ID NO: 269767 - DNA, 53 bp, Artificial
  Synthetic oligonucleotide
gtcttcgaaggggaggatctccttcgacctagaggacttacgacggtaggttg

SEQ ID NO: 269768 - DNA, 53 bp, Artificial
  Synthetic oligonucleotide
attgttaagcaacttggttttaccagatcgttctgtaatcaaaccttggccgt

SEQ ID NO: 269769 - DNA, 52 bp, Artificial
  Synthetic oligonucleotide
cctcctagcttctatggcctctgggcttttaggtagaaaactaggtacaaca

SEQ ID NO: 269770 - DNA, 52 bp, Artificial
  Synthetic oligonucleotide
tgcctccttactaagttgcgtagcattcttcgaggtagctttagctggttcc

SEQ ID NO: 269771 - DNA, 51 bp, Artificial
  Synthetic oligonucleotide
aaggtctattcttgcgatactctcacaatcggtaatgtaaggaccttagac

SEQ ID NO: 269772 - DNA, 50 bp, Artificial
  Synthetic oligonucleotide
cgctttccttggatcattaagatcttcagcacaacttgtaagctatgaac

SEQ ID NO: 269773 - DNA, 59 bp, Artificial
  Synthetic oligonucleotide
ctcctacagttgaactaggttgcagttggcccccagcaggtatacaacccatagatcca

SEQ ID NO: 269774 - DNA, 56 bp, Artificial
  Synthetic oligonucleotide
accgtgccctcttaggctacctatgccgctagagggtcaggcttggaactggggaa

SEQ ID NO: 269775 - DNA, 56 bp, Artificial
  Synthetic oligonucleotide
agttatccctcctacccggataatcattcttactcccaccactacattgaaatatc

SEQ ID NO: 269776 - DNA, 52 bp, Artificial
  Synthetic oligonucleotide
ataagggggtactggagctattaggtccctacggcttaactaacctgctaag

SEQ ID NO: 269777 - DNA, 58 bp, Artificial
  Synthetic oligonucleotide
ctaataaacgtatgttactcctcattgttagtaacactgggccctctagtggcgcaca

SEQ ID NO: 269778 - DNA, 55 bp, Artificial
  Synthetic oligonucleotide
tgctccctacgtagacccctccggccaaggggagtcaaggcaatcaaataaccag

SEQ ID NO: 269779 - DNA, 60 bp, Artificial
  Synthetic oligonucleotide
cggctgagtcgcagtactcggaaggtaagggaccatttagcacaaggctgtctgtatcgc

SEQ ID NO: 269780 - DNA, 60 bp, Artificial
  Synthetic oligonucleotide
gccttgcaaggctactggggtctggctatgccagaccccagaggctaggctagctagtaa

SEQ ID NO: 269781 - DNA, 52 bp, Artificial
  Synthetic oligonucleotide
tattgtctatttcctttggggtggttttagtgttgataacgctactttaaac

SEQ ID NO: 269782 - DNA, 54 bp, Artificial
  Synthetic oligonucleotide
atttactggtcttatggatattaaccctttcttagctttaattgctagtactgg

SEQ ID NO: 269783 - DNA, 53 bp, Artificial
  Synthetic oligonucleotide
ctaccacgttactctttattctatggttcaaacttatattggttctaaagccg

SEQ ID NO: 269784 - DNA, 60 bp, Artificial
  Synthetic oligonucleotide
ggtgtttatggttctcacgctatttcttacgctcgtaactctcatggccacactattgaa

SEQ ID NO: 269785 - DNA, 57 bp, Artificial
  Synthetic oligonucleotide
ggtcgtttaaactctagcggtattattatctctcgtccaggtgtcttctatggtcaa

SEQ ID NO: 269786 - DNA, 58 bp, Artificial
  Synthetic oligonucleotide
cttagttcgtggtgtttatggttctcacgctatttcttacgctcgtaactctcatggc

SEQ ID NO: 269787 - DNA, 59 bp, Artificial
  Synthetic oligonucleotide
gtggccagctagagcgtaagccatagctcgccaccctgtcaccacagagtggtgacagg

SEQ ID NO: 269788 - DNA, 55 bp, Artificial
  Synthetic oligonucleotide
cttttacaaggttttgaatactatgtcactgaattcagtttagccgattctgttt

SEQ ID NO: 269789 - DNA, 59 bp, Artificial
  Synthetic oligonucleotide
ctatcttcgatagggttcccgagatcctaggatctcgggagctatgcatagctagtctg

SEQ ID NO: 269790 - DNA, 55 bp, Artificial
  Synthetic oligonucleotide
ggtgttactttcttaactattatgcttatccgtatgttccgtgaccaatttacta

SEQ ID NO: 269791 - DNA, 57 bp, Artificial
  Synthetic oligonucleotide
aactcttcggagtctagaaaggcaactatttgtcagcccggagatcacttccctgga

SEQ ID NO: 269792 - DNA, 58 bp, Artificial
  Synthetic oligonucleotide
ctgaactcccaggtattgatctcatgaaacgacttagtattattactaacaactatcc

SEQ ID NO: 269793 - DNA, 58 bp, Artificial
  Synthetic oligonucleotide
ctatgcatagctactgggatcaaagatcccagtggacccaaagggtccagaggtccta

SEQ ID NO: 269794 - DNA, 51 bp, Artificial
  Synthetic oligonucleotide
ggtcacactttagttaaagttgtaagtggtttcatttacgaaggtttctta

SEQ ID NO: 269795 - DNA, 55 bp, Artificial
  Synthetic oligonucleotide
gctttgcatagttcccgagatcgaaaatctcggttataaatcctatgggattaat

SEQ ID NO: 269796 - DNA, 55 bp, Artificial
  Synthetic oligonucleotide
gccctgctcgaagttctcctgaaggaagactaagcttagggaatcataactgagg

SEQ ID NO: 269797 - DNA, 55 bp, Artificial
  Synthetic oligonucleotide
ctttggacccggaattataaatcactaagggattttagaggctatgcaaagcttc

SEQ ID NO: 269798 - DNA, 55 bp, Artificial
  Synthetic oligonucleotide
ggcacctttagtgccagactagccctgcatagctaactctcgtcctctggcgctc

SEQ ID NO: 269799 - DNA, 54 bp, Artificial
  Synthetic oligonucleotide
ggcttgcctgaggctcgtcaaactttcgtttcctcgcctttaggtttgaaggtg

SEQ ID NO: 269800 - DNA, 55 bp, Artificial
  Synthetic oligonucleotide
gggatcaaagatcccagtggacccaaagggtccagaggtcctagataattaacta

SEQ ID NO: 269801 - DNA, 49 bp, Artificial
  Synthetic oligonucleotide
ggggtggttttagtgttgataacgctactttaaaccgtttctttagtct

SEQ ID NO: 269802 - DNA, 60 bp, Artificial
  Synthetic oligonucleotide
ttcccaagtagcagactcgaagtctttgacctcgagagctatgcatagcttatttccggg

SEQ ID NO: 269803 - DNA, 55 bp, Artificial
  Synthetic oligonucleotide
ggtaccagagcgtaaattttaatttagattgtcaccatctgaactcttcggagtc

SEQ ID NO: 269804 - DNA, 55 bp, Artificial
  Synthetic oligonucleotide
ggtacctttagtgtcagattagctatgcatagcctctgagaacctaggctttgca

SEQ ID NO: 269805 - DNA, 54 bp, Artificial
  Synthetic oligonucleotide
gtaaaacctgacctttgccataggcactagaaggtttcagagcccttaaagggc

SEQ ID NO: 269806 - DNA, 55 bp, Artificial
  Synthetic oligonucleotide
tggcgtctttgacgccagactagctatgcatggctaattcccgccctaaaagggc

SEQ ID NO: 269807 - DNA, 55 bp, Artificial
  Synthetic oligonucleotide
ttagtagatcccctattaattccgttcttttcttatgtggtatgtaccttgctgg

SEQ ID NO: 269808 - DNA, 54 bp, Artificial
  Synthetic oligonucleotide
ttccttcggaacagtatctagctatgcaaacctaatttccgccctaaaagggcg

SEQ ID NO: 269809 - DNA, 55 bp, Artificial
  Synthetic oligonucleotide
agttctttcagagctagaaagctatacttagtgtttggaactcctcttaaggagt

SEQ ID NO: 269810 - DNA, 55 bp, Artificial
  Synthetic oligonucleotide
cattttagggtccgggtgcttacttaaatcaaatccaatttctgatatctcgctc

SEQ ID NO: 269811 - DNA, 54 bp, Artificial
  Synthetic oligonucleotide
cccctgaaaactgggctattggtttccaagacgttgcttcccctactatgtatg

SEQ ID NO: 269812 - DNA, 55 bp, Artificial
  Synthetic oligonucleotide
cccttctctcggtattaaattagatgctgtccctggtcgtcttaactctcttggg

SEQ ID NO: 269813 - DNA, 56 bp, Artificial
  Synthetic oligonucleotide
agccatgcatagttaatctccgaccccaaagggtcggagagggtaaatgattccca

SEQ ID NO: 269814 - DNA, 53 bp, Artificial
  Synthetic oligonucleotide
ccgaccccaaagggtcggagagggtaaatgattcccaagtagcagactcgaag

SEQ ID NO: 269815 - DNA, 54 bp, Artificial
  Synthetic oligonucleotide
ccgccctttcagggcggaaataagctttgcatggctattaaggtcaggtaaaac

SEQ ID NO: 269816 - DNA, 55 bp, Artificial
  Synthetic oligonucleotide
cgatcttaggtaagccagagaccactttgtggtcctttctggcgtctttgacgcc

SEQ ID NO: 269817 - DNA, 55 bp, Artificial
  Synthetic oligonucleotide
cgctataggtctcaatagctatccatagcttccaagatagaagatctcggagctt

SEQ ID NO: 269818 - DNA, 54 bp, Artificial
  Synthetic oligonucleotide
cttgtcgttgtttcttggttcttagttcgtggtgtttatggttctcacgctatt

SEQ ID NO: 269819 - DNA, 55 bp, Artificial
  Synthetic oligonucleotide
cggttttatcgccattcgaattatgattaagactaaggcatgcacgcgtggtcca

SEQ ID NO: 269820 - DNA, 55 bp, Artificial
  Synthetic oligonucleotide
ctctagcggtattattatctctcgtccaggtgtcttctatggtcaatgcagtgaa

SEQ ID NO: 269821 - DNA, 54 bp, Artificial
  Synthetic oligonucleotide
ctctttattctatggttcaaacttatattggttctaaagccggtgcttggttcc

SEQ ID NO: 269822 - DNA, 55 bp, Artificial
  Synthetic oligonucleotide
cttatgtggtatgtaccttgctggtggtggtattttcctcttattagaccattac

SEQ ID NO: 269823 - DNA, 54 bp, Artificial
  Synthetic oligonucleotide
cttcctgctttcggtgttattagtcacgttattagtcgtttcgccattaaacca

SEQ ID NO: 269824 - DNA, 60 bp, Artificial
  Synthetic oligonucleotide
cttctgggagagcaccctatgctctcccagccttagctcgcattctcaggataattcata

SEQ ID NO: 269825 - DNA, 54 bp, Artificial
  Synthetic oligonucleotide
tagtagatatcagatggcaaattttgacttacaccaaggtttatataaataagc

SEQ ID NO: 269826 - DNA, 53 bp, Artificial
  Synthetic oligonucleotide
gaaccactagatggttcctgactaaaggtatcaaattacacaacccctttggg

SEQ ID NO: 269827 - DNA, 52 bp, Artificial
  Synthetic oligonucleotide
aatccgggctccttataacccggacctatacctagctaatctaactggactt

SEQ ID NO: 269828 - DNA, 52 bp, Artificial
  Synthetic oligonucleotide
atacggttctactaaccctcttgctgttaaaggtgattatttacgtttccac

SEQ ID NO: 269829 - DNA, 53 bp, Artificial
  Synthetic oligonucleotide
cccttccatggtttactcgtttaagattagccggtaatactcctcttatgaaa

SEQ ID NO: 269830 - DNA, 53 bp, Artificial
  Synthetic oligonucleotide
ggctcccggaagctcatgtagaatctccaactggtggttctattcttttagcc

SEQ ID NO: 269831 - DNA, 52 bp, Artificial
  Synthetic oligonucleotide
cactttagtcactagcggtaattgggaaagtaacttccgttctatttatgcc

SEQ ID NO: 269832 - DNA, 52 bp, Artificial
  Synthetic oligonucleotide
ggtcctcaggggctatgcatagctcccgaggtcaaagacctcgggcatagtg

SEQ ID NO: 269833 - DNA, 50 bp, Artificial
  Synthetic oligonucleotide
ccgcccctttggggcgggaattaacctttcatagtccgccctttcagggc

SEQ ID NO: 269834 - DNA, 52 bp, Artificial
  Synthetic oligonucleotide
tggaccctttgggtccaggttaaaagctatgcattgcctctggaatcaaaga

SEQ ID NO: 269835 - DNA, 56 bp, Artificial
  Synthetic oligonucleotide
agtctatcttcatatcggtcgtggtctttactttgcttcttaccgccctccacgtc

SEQ ID NO: 269836 - DNA, 52 bp, Artificial
  Synthetic oligonucleotide
aggtcaaagacctcagaggctaacttaagcttactaccaggagcatagctcc

SEQ ID NO: 269837 - DNA, 51 bp, Artificial
  Synthetic oligonucleotide
ggtttcttaggtggtacttctattcttattcttgccttacctgttgctctt

SEQ ID NO: 269838 - DNA, 51 bp, Artificial
  Synthetic oligonucleotide
attccctttagggaatttcaggggaagcccaggtaaggctattgggctcct

SEQ ID NO: 269839 - DNA, 51 bp, Artificial
  Synthetic oligonucleotide
aacactctttacgcctttgctagtgttgaacacattatgcgtgatgtaaac

SEQ ID NO: 269840 - DNA, 50 bp, Artificial
  Synthetic oligonucleotide
gtggtcacagtgttgatcttgctattttaagtcttcatttagctggtgtc

SEQ ID NO: 269841 - DNA, 50 bp, Artificial
  Synthetic oligonucleotide
cgggagcatagctcccggtataatttcaaagccccaggggtttactaaaa

SEQ ID NO: 269842 - DNA, 58 bp, Artificial
  Synthetic oligonucleotide
cttagtgagagagtatgaatgttaactagaatgttagccaggtatagggaattcttgg

SEQ ID NO: 269843 - DNA, 59 bp, Artificial
  Synthetic oligonucleotide
tgactttgttcctttagctgccttcttagtagctccatttatgattcaaactaattata

SEQ ID NO: 269844 - DNA, 51 bp, Artificial
  Synthetic oligonucleotide
atctttcctttcggggaattattaggtttgaaggtggaactagtataggta

SEQ ID NO: 269845 - DNA, 55 bp, Artificial
  Synthetic oligonucleotide
ttactcaaatcgtggaatatctttactaaaacaagttactaataatttagagctg

SEQ ID NO: 269846 - DNA, 55 bp, Artificial
  Synthetic oligonucleotide
gagggtaattcactctctagcctttaaaaaatacgctctttttatctattatagc

SEQ ID NO: 269847 - DNA, 60 bp, Artificial
  Synthetic oligonucleotide
gagccataaattgttaatgacagatacaatgggtataccgatcagtaagtctagtggatt

SEQ ID NO: 269848 - DNA, 59 bp, Artificial
  Synthetic oligonucleotide
ctagtggattactcggaagttttgtgcctcattatggctgcgattgaatactcggacct

SEQ ID NO: 269849 - DNA, 60 bp, Artificial
  Synthetic oligonucleotide
cgagcgccctcatatcttacaatgtaaggtataagacatagtctaaataagagagagatc

SEQ ID NO: 269850 - DNA, 56 bp, Artificial
  Synthetic oligonucleotide
cctacttagctagagaaatcgtaagctgtaggtatggttcgtgaaaaactaatcac

SEQ ID NO: 269851 - DNA, 57 bp, Artificial
  Synthetic oligonucleotide
aactaaccagctgttttatgcactacgatctggtaaataggtactgtaaatctttga

SEQ ID NO: 269852 - DNA, 55 bp, Artificial
  Synthetic oligonucleotide
aactagaatttgttatagacaaagtgacaaacatagcgattatttgttttgactt

SEQ ID NO: 269853 - DNA, 54 bp, Artificial
  Synthetic oligonucleotide
cagaggggaatggtattttactaacttaccctatgatataaataacactcctaa

SEQ ID NO: 269854 - DNA, 60 bp, Artificial
  Synthetic oligonucleotide
aatgttatgttcgtaacaagtaatagttgagatggaaacatggctgaaactagtcatata

SEQ ID NO: 269855 - DNA, 56 bp, Artificial
  Synthetic oligonucleotide
cacgccctagaggatcaacttaaaggaaagcttcgtcaaatgaagtcggtacataa

SEQ ID NO: 269856 - DNA, 51 bp, Artificial
  Synthetic oligonucleotide
ttaaagatataatacccgttactagacctttagtaaaattacctaccacag

SEQ ID NO: 269857 - DNA, 56 bp, Artificial
  Synthetic oligonucleotide
caacaagaaataggtaggtagcgaccaattagattgcgaactgggggtatccgctc

SEQ ID NO: 269858 - DNA, 57 bp, Artificial
  Synthetic oligonucleotide
agttttaacctgctgtgagcgatgaagaaacagttgttatccttatcacagaaaaaa

SEQ ID NO: 269859 - DNA, 60 bp, Artificial
  Synthetic oligonucleotide
agagatattatggtgtctcaacgcaacgtattgaactttgttatgttgatagtagctcac

SEQ ID NO: 269860 - DNA, 55 bp, Artificial
  Synthetic oligonucleotide
gaaaaaaggatctgtgggaagactgctaagagatagtccttttagaagattaccc

SEQ ID NO: 269861 - DNA, 56 bp, Artificial
  Synthetic oligonucleotide
ggatctgcccacaaaaatatctttagtagcctatcttagttagttctacgataggg

SEQ ID NO: 269862 - DNA, 51 bp, Artificial
  Synthetic oligonucleotide
acccgttactagacctttagtaaaattacctaccacagttcttccatctta

SEQ ID NO: 269863 - DNA, 55 bp, Artificial
  Synthetic oligonucleotide
gtgcaaaacagaatgagatcaatatagttgtttctggttatgctccgcctttgtg

SEQ ID NO: 269864 - DNA, 55 bp, Artificial
  Synthetic oligonucleotide
acattatggattcgggtacaccaatgtttcgcgccttaggtgaggagcatttaag

SEQ ID NO: 269865 - DNA, 55 bp, Artificial
  Synthetic oligonucleotide
tacaggaagaattcctattcttccggatcctaagggatatggtaataggaaaagc

SEQ ID NO: 269866 - DNA, 55 bp, Artificial
  Synthetic oligonucleotide
cagatacaatgggtataccgatcagtaagtctagtggattactcggaagttttgt

SEQ ID NO: 269867 - DNA, 60 bp, Artificial
  Synthetic oligonucleotide
tatgcctagcagtgcttgctactattttataagaagtatgcattaaaagcctaagtagtt

SEQ ID NO: 269868 - DNA, 55 bp, Artificial
  Synthetic oligonucleotide
aactaaggttttacctgaggattctttacattcaattatcgcagaatctagagaa

SEQ ID NO: 269869 - DNA, 55 bp, Artificial
  Synthetic oligonucleotide
cccagagggtcgagaaataacatctccatatataatcctcaatgactagctgggt

SEQ ID NO: 269870 - DNA, 54 bp, Artificial
  Synthetic oligonucleotide
gtacactagggctaatttgcccctagcaacaccgggagtttagaacaaggaaga

SEQ ID NO: 269871 - DNA, 52 bp, Artificial
  Synthetic oligonucleotide
attctcctttgcaggtgtaccacctttaataggatttttcggaaaacagatg

SEQ ID NO: 269872 - DNA, 52 bp, Artificial
  Synthetic oligonucleotide
ggtgttcgcaatgtttgctggatgatacttctgatcaccaaaaatgttaggt

SEQ ID NO: 269873 - DNA, 52 bp, Artificial
  Synthetic oligonucleotide
ctagtttgacgaattacatagttgttgtacgacgtagctctgttcaactttg

SEQ ID NO: 269874 - DNA, 60 bp, Artificial
  Synthetic oligonucleotide
tagtgactctgaaaatgttattatgtgcgaacaaaaatgaatagatcttattcaaccaga

SEQ ID NO: 269875 - DNA, 54 bp, Artificial
  Synthetic oligonucleotide
tacacaaccatacaacccacttttagaaggattcggtataaagcttcgtcttcc

SEQ ID NO: 269876 - DNA, 60 bp, Artificial
  Synthetic oligonucleotide
gtcatgaaacctgtacccagagggtcgagaaataacatctccatatataatcctcaatga

SEQ ID NO: 269877 - DNA, 55 bp, Artificial
  Synthetic oligonucleotide
ggaaggtgtaattcttgtaacttatcttataaatggttacatgagaacacctaaa

SEQ ID NO: 269878 - DNA, 54 bp, Artificial
  Synthetic oligonucleotide
gctttccttacgtagtacaggaagaattcctattcttccggatcctaagggata

SEQ ID NO: 269879 - DNA, 60 bp, Artificial
  Synthetic oligonucleotide
gctggaagattcatctgccgctgaaagcactagtactactactgctaatcctaaggaatt

SEQ ID NO: 269880 - DNA, 60 bp, Artificial
  Synthetic oligonucleotide
ttgcatgcgaagcctaaataagtatgcctacatagcattaagctaatgctgcgatattag

SEQ ID NO: 269881 - DNA, 60 bp, Artificial
  Synthetic oligonucleotide
atatatagcgccgtatacatatagacatacttcgtcagtacgtatgcaagctctaagctc

SEQ ID NO: 269882 - DNA, 60 bp, Artificial
  Synthetic oligonucleotide
aaggatcagaaatggtattagagtaaggtacactagatatgcggatgactgagttattgg

SEQ ID NO: 269883 - DNA, 54 bp, Artificial
  Synthetic oligonucleotide
aactgaagagtgaacaattccgttttagaccaacgcgtagggtgtacataccta

SEQ ID NO: 269884 - DNA, 56 bp, Artificial
  Synthetic oligonucleotide
ccgatgataaccatagttatgtgcgaggtaggggcacatagcatagtatgctatgt

SEQ ID NO: 269885 - DNA, 56 bp, Artificial
  Synthetic oligonucleotide
gattactaactatggtaggattatgtgtttccatagggattaagatagctatagcc

SEQ ID NO: 269886 - DNA, 55 bp, Artificial
  Synthetic oligonucleotide
gggcgctatatgtagaaatgcgaaatcgactaaaggcaggaatgcccatttggtc

SEQ ID NO: 269887 - DNA, 55 bp, Artificial
  Synthetic oligonucleotide
agttgaaatcctactcttctcgctttaatatataacattagcgagctctatagat

SEQ ID NO: 269888 - DNA, 52 bp, Artificial
  Synthetic oligonucleotide
gaaccaactttctctgaacacaaccatgggtttaggccaggaagggggtgtc

SEQ ID NO: 269889 - DNA, 59 bp, Artificial
  Synthetic oligonucleotide
ttatagtcagttcactgtagcaggaaacatttagaactctacttcatatcccggaggga

SEQ ID NO: 269890 - DNA, 60 bp, Artificial
  Synthetic oligonucleotide
tcagaggggggcgcaagctcgctctgagaaatggacaatcgcgtatctaagtcagtatta

SEQ ID NO: 269891 - DNA, 60 bp, Artificial
  Synthetic oligonucleotide
tactaggctggggggcgctatatgtagaaatgcgaaatcgactaaaggcaggaatgccca

SEQ ID NO: 269892 - DNA, 60 bp, Artificial
  Synthetic oligonucleotide
gagataaattgggcccttatctagctggattagttgaggctgacggttcatttgctgttc

SEQ ID NO: 269893 - DNA, 60 bp, Artificial
  Synthetic oligonucleotide
cttatttcgtagggctaggcatatgagtttgcgtcttatgtcgagctttacatatagcgc

SEQ ID NO: 269894 - DNA, 55 bp, Artificial
  Synthetic oligonucleotide
ctgccttacgggcaaatgtccttatgaggtgctacggttattactaaccttgtta

SEQ ID NO: 269895 - DNA, 60 bp, Artificial
  Synthetic oligonucleotide
cgtctgcgctatatatagcgaggagcttgcgctatatatagcgaggagcttgcgctatat

SEQ ID NO: 269896 - DNA, 55 bp, Artificial
  Synthetic oligonucleotide
cctttgacctaggcaggcttctaaaccctccgggatatgaagtagagctcgaaag

SEQ ID NO: 269897 - DNA, 53 bp, Artificial
  Synthetic oligonucleotide
caatatattgccaatataggttaaatggtaaaccgtccctcttccaaagggaa

SEQ ID NO: 269898 - DNA, 55 bp, Artificial
  Synthetic oligonucleotide
tcattagccttgatagcttaactggttaaagtacggaactgaaaattctgggtag

SEQ ID NO: 269899 - DNA, 54 bp, Artificial
  Synthetic oligonucleotide
ctgaaatagaattaggtggtttatggccaccattaggaatagaagctgtaaatc

SEQ ID NO: 269900 - DNA, 53 bp, Artificial
  Synthetic oligonucleotide
aataaatggaaggtgtactaatcgcccgtcaagggctgaaacagattggtctc

SEQ ID NO: 269901 - DNA, 51 bp, Artificial
  Synthetic oligonucleotide
aattttcgtgtatgaaacgaatgttttactttaaactatcttgtctttaat

SEQ ID NO: 269902 - DNA, 51 bp, Artificial
  Synthetic oligonucleotide
ctcggattatttataaaaccgttcggaaaaatcttaaataaggagcaattc

SEQ ID NO: 269903 - DNA, 49 bp, Artificial
  Synthetic oligonucleotide
cgaaaatgtaaagggtcttaagttattaaccgatataaggttgaaaaag

SEQ ID NO: 269904 - DNA, 55 bp, Artificial
  Synthetic oligonucleotide
gggttcaaatcccaatattctcattagccttgatagcttaactggttaaagtacg

SEQ ID NO: 269905 - DNA, 55 bp, Artificial
  Synthetic oligonucleotide
gtacggaactgaaaattctgggtaggatgttcaagtcatccttaaggcataaaat

SEQ ID NO: 269906 - DNA, 56 bp, Artificial
  Synthetic oligonucleotide
gttgacgtttaggatcacaatccaaaacgagtcgtaagacggacatagtgaaccga

SEQ ID NO: 269907 - DNA, 52 bp, Artificial
  Synthetic oligonucleotide
tatgttaggttaaataccttaaaagtttaaatgaacgcataaagataagtta

SEQ ID NO: 269908 - DNA, 53 bp, Artificial
  Synthetic oligonucleotide
agtcccaacttttttgttgccaataattggattaagggctatatttctgaaaa

SEQ ID NO: 269909 - DNA, 57 bp, Artificial
  Synthetic oligonucleotide
ctcataacaggaaagatattagttcaaatctaattctcctcaaaaagcgaattggtg

SEQ ID NO: 269910 - DNA, 57 bp, Artificial
  Synthetic oligonucleotide
tatcgaatccaaatttcgaggccttacctacttggctacatccaattagccgagtat

SEQ ID NO: 269911 - DNA, 55 bp, Artificial
  Synthetic oligonucleotide
cgactagcaggataggagactgccagatacaggcatgcaactgaacagctttaca

SEQ ID NO: 269912 - DNA, 55 bp, Artificial
  Synthetic oligonucleotide
gatagggcaaagatgcgactgtgggccgaatatcttcgagacaatggtcgaaact

SEQ ID NO: 269913 - DNA, 55 bp, Artificial
  Synthetic oligonucleotide
ggagagaccccagtgcaaagcacggacctggtagcttacagccttgcaattgtcg

SEQ ID NO: 269914 - DNA, 55 bp, Artificial
  Synthetic oligonucleotide
ggccactcggcacgtgaatcccgggtacttggctatatgcatcgctaggatcttg

SEQ ID NO: 269915 - DNA, 55 bp, Artificial
  Synthetic oligonucleotide
ggggtcggagatgtggagcccaacgttactacccgttggtgtggcgatttcgcag

SEQ ID NO: 269916 - DNA, 55 bp, Artificial
  Synthetic oligonucleotide
gggtgcaactggtacaaggacaagtggggtaagttaatactatgagttgattcca

SEQ ID NO: 269917 - DNA, 55 bp, Artificial
  Synthetic oligonucleotide
gtcctggtcattccgggcgttatgcaagcagacttgggttcggaacgcactgacc

SEQ ID NO: 269918 - DNA, 55 bp, Artificial
  Synthetic oligonucleotide
gtgggcactatgagaaatcatcaggatagaagaccggcatgtaagggcaaggggt

SEQ ID NO: 269919 - DNA, 55 bp, Artificial
  Synthetic oligonucleotide
gtgggtgggagcaggaccattggtcggtccatcaccagtcaagatatacccgcag

SEQ ID NO: 269920 - DNA, 55 bp, Artificial
  Synthetic oligonucleotide
tactgaacaagggccctggtctgaagcacgggccactgatgtcgacaggcaggct

SEQ ID NO: 269921 - DNA, 55 bp, Artificial
  Synthetic oligonucleotide
tggaccggaaggcatggtccacaactattggcggaagctctgtgattgtagacgc

SEQ ID NO: 269922 - DNA, 55 bp, Artificial
  Synthetic oligonucleotide
cggagtcgcgatttcctctccccgactattaattaatcggctgcccaatgagagg

SEQ ID NO: 269923 - DNA, 55 bp, Artificial
  Synthetic oligonucleotide
tggttgggctatatatgagccaagaggcatgatggttggatagacggaagacggg

SEQ ID NO: 269924 - DNA, 55 bp, Artificial
  Synthetic oligonucleotide
ttgcacattacttagagatgacttagctaccgatcaagggtgcttggacgaaagg

SEQ ID NO: 269925 - DNA, 54 bp, Artificial
  Synthetic oligonucleotide
actgtagaccccgaataaactatggtatcatcccagctgggtattcttttcggg

SEQ ID NO: 269926 - DNA, 55 bp, Artificial
  Synthetic oligonucleotide
acggaccaaagcttatgcatagtcgtaaggccagattgtgtcacccaattaaggt

SEQ ID NO: 269927 - DNA, 55 bp, Artificial
  Synthetic oligonucleotide
acaccttggatcctcagttttcctggtcccacaccaagcctagcaatcccaagct

SEQ ID NO: 269928 - DNA, 55 bp, Artificial
  Synthetic oligonucleotide
catagcttcgggccagcttgggaacgtgggaggagattgcacaatgcgtatgacc

SEQ ID NO: 269929 - DNA, 53 bp, Artificial
  Synthetic oligonucleotide
catcaccaacgaggtttacaaccgttggaccgactgcgtaatgaagtttaccc

SEQ ID NO: 269930 - DNA, 54 bp, Artificial
  Synthetic oligonucleotide
aaacgcagggtcgcggtaacaaaaggtgaagacgagtccaacagaagacgagtc

SEQ ID NO: 269931 - DNA, 55 bp, Artificial
  Synthetic oligonucleotide
ccctgtttaaagcagctcttccggccgcaaatgcaatgtccgttcggtggtacta

SEQ ID NO: 269932 - DNA, 55 bp, Artificial
  Synthetic oligonucleotide
cccgcatatctcaccatggtttcttgcctgtactccaggacgctgtcgtcttggc

SEQ ID NO: 269933 - DNA, 55 bp, Artificial
  Synthetic oligonucleotide
ctaacagttgtgcaaccaacataggcgcatccgtcatagcctccctcgaccaacc

SEQ ID NO: 269934 - DNA, 55 bp, Artificial
  Synthetic oligonucleotide
aagtacatattgtagctgcccctcgtatgttcttacagaggcgcacaaacctacc

SEQ ID NO: 269935 - DNA, 54 bp, Artificial
  Synthetic oligonucleotide
acggcctgtgagtcaaagcggaccacccgtgctatcgggaacgagggatagcac

SEQ ID NO: 269936 - DNA, 53 bp, Artificial
  Synthetic oligonucleotide
caatgtcccgaggttgctggctaggatgaaggtctcgggagcctgctggatta

SEQ ID NO: 269937 - DNA, 53 bp, Artificial
  Synthetic oligonucleotide
cttggacctatacaagtccagcccgcagcacggcacgatagatctggctttac

SEQ ID NO: 269938 - DNA, 52 bp, Artificial
  Synthetic oligonucleotide
agatactttgggagacgtttcagccgtaccccttagtatacttgacgggccc

SEQ ID NO: 269939 - DNA, 52 bp, Artificial
  Synthetic oligonucleotide
ggagggtaacttgttccacattgtgctaccataaaagccacaagcccgtcag

SEQ ID NO: 269940 - DNA, 52 bp, Artificial
  Synthetic oligonucleotide
aacggtcacgatctttggtatactggttacggcccttcttccgagatccgga

SEQ ID NO: 269941 - DNA, 52 bp, Artificial
  Synthetic oligonucleotide
caccaatggatttgtaccatggttatccctagcgtttggttcctgtcccgta

SEQ ID NO: 269942 - DNA, 51 bp, Artificial
  Synthetic oligonucleotide
gaaagcacaaccggccaggctaccatcactcaatcacagctgcaagatctt

SEQ ID NO: 269943 - DNA, 51 bp, Artificial
  Synthetic oligonucleotide
atcgttctgtgatgcttcccgtctcacccgtggctacctctccaggtgcgg

SEQ ID NO: 269944 - DNA, 55 bp, Artificial
  Synthetic oligonucleotide
ctaagccaggtagctaatctggctgttcgttgttgtggatcccagaaaagtttaa

SEQ ID NO: 269945 - DNA, 51 bp, Artificial
  Synthetic oligonucleotide
gcgactggttagactggatcgaaactgcccgattcggtctagggtgacgcc

SEQ ID NO: 269946 - DNA, 50 bp, Artificial
  Synthetic oligonucleotide
acccgcatgcatttcaacgcacctctaccccgtcttgcgacgatcggctt

SEQ ID NO: 269947 - DNA, 50 bp, Artificial
  Synthetic oligonucleotide
acggacaggccagctagagccctcctagtcgctggatacccagcctgcca

SEQ ID NO: 269948 - DNA, 50 bp, Artificial
  Synthetic oligonucleotide
gtcaaggcccgagctgtgctagaccgcaccatggcattaatccctccgga

SEQ ID NO: 269949 - DNA, 50 bp, Artificial
  Synthetic oligonucleotide
acaaccctacggtcaaggcccgagctgtgctagaccgcaccatggcatta

SEQ ID NO: 269950 - DNA, 50 bp, Artificial
  Synthetic oligonucleotide
gggccgtacactgttggagaaaccctgcactgcccgcttcgggagtgctt

SEQ ID NO: 269951 - DNA, 50 bp, Artificial
  Synthetic oligonucleotide
gggccggccatccacagtcgaatgagctccggggtcgggaccttgactcg

SEQ ID NO: 269952 - DNA, 50 bp, Artificial
  Synthetic oligonucleotide
acgtggcaggctgggtatccagcgactaggagggctctagctggcctgtc

SEQ ID NO: 269953 - DNA, 50 bp, Artificial
  Synthetic oligonucleotide
ggcacgttccgatcgttgcgcgtctgtggatccgtcaagtcaccgtcgta

SEQ ID NO: 269954 - DNA, 50 bp, Artificial
  Synthetic oligonucleotide
ggattgccggtctgcttgggggtgcatgaagatcaggaggggcctgttca

SEQ ID NO: 269955 - DNA, 55 bp, Artificial
  Synthetic oligonucleotide
ctagtctaattggatgaacctgtccgtcctgtcgtctaataccaagcaaagttcg

SEQ ID NO: 269956 - DNA, 50 bp, Artificial
  Synthetic oligonucleotide
taatgccatggtgcggtctagcacagctcgggccttgaccgtagggttgt

SEQ ID NO: 269957 - DNA, 50 bp, Artificial
  Synthetic oligonucleotide
cctcggttacggtagaagctcttaccccacgaggctttccccaggcgggg

SEQ ID NO: 269958 - DNA, 50 bp, Artificial
  Synthetic oligonucleotide
cgatcttttgggccggccatccacagtcgaatgagctccggggtcgggac

SEQ ID NO: 269959 - DNA, 50 bp, Artificial
  Synthetic oligonucleotide
cgccaaccgcacctgtctgagtcgaaccgaggcaacatcgccgttgcttt

SEQ ID NO: 269960 - DNA, 50 bp, Artificial
  Synthetic oligonucleotide
cgcctgagcacgtgtggggaagatcggtcaatcgtcgggagccatagtgg

SEQ ID NO: 269961 - DNA, 50 bp, Artificial
  Synthetic oligonucleotide
ctgcccgcttcgggagtgcttagcgacagccattacccctgacttgcccc

SEQ ID NO: 269962 - DNA, 50 bp, Artificial
  Synthetic oligonucleotide
cttggagtaccacagggcgtgctcgttgagtgccctcgggacgtttgggt

SEQ ID NO: 269963 - DNA, 50 bp, Artificial
  Synthetic oligonucleotide
agggctctagctggcctgtccgttagagggtctggtccaaccctgtgact

SEQ ID NO: 269964 - DNA, 50 bp, Artificial
  Synthetic oligonucleotide
gagagaggggttaccaaaggacatgggaggcatgcgtgtccggggcggtt

SEQ ID NO: 269965 - DNA, 50 bp, Artificial
  Synthetic oligonucleotide
gagaggggcggcttgaacggtggcgggatgcagggtagtcacgtcgggac

SEQ ID NO: 269966 - DNA, 55 bp, Artificial
  Synthetic oligonucleotide
ctcggaatctagatcgcgtctaggtcaactacccttgcgggatagtacataggcg

SEQ ID NO: 269967 - DNA, 50 bp, Artificial
  Synthetic oligonucleotide
agcgacagccattacccctgacttgccccggttagaagcctgggacgggg

SEQ ID NO: 269968 - DNA, 50 bp, Artificial
  Synthetic oligonucleotide
gcgaaatcgtcgtatccaaccggttgcctgctgcggggcttaccagacta

SEQ ID NO: 269969 - DNA, 50 bp, Artificial
  Synthetic oligonucleotide
gcgcaaaatccccaagcgacagcatgtgtcccctcgagccgccaagcgca

SEQ ID NO: 269970 - DNA, 50 bp, Artificial
  Synthetic oligonucleotide
gcgggtacgttcaaggcggtggctgtcagagaaattggtcccccaacgca

SEQ ID NO: 269971 - DNA, 50 bp, Artificial
  Synthetic oligonucleotide
gcgtcgagtcttgcggtggtagtgacgccaaacagacaacccctcggtcc

SEQ ID NO: 269972 - DNA, 50 bp, Artificial
  Synthetic oligonucleotide
gctccggcccgccagactttcgcgtatagtccacaggatgatgagcgagg

SEQ ID NO: 269973 - DNA, 50 bp, Artificial
  Synthetic oligonucleotide
gcttatgagccgcgccaaccgcacctgtctgagtcgaaccgaggcaacat

SEQ ID NO: 269974 - DNA, 50 bp, Artificial
  Synthetic oligonucleotide
ggacccacgcccccgggtcgtcgtattccgttgtcccgccagagtggtgc

SEQ ID NO: 269975 - DNA, 50 bp, Artificial
  Synthetic oligonucleotide
ggagcccaacagtcgcgaaccgttgcgagggtgtggattacagagtggcc

SEQ ID NO: 269976 - DNA, 55 bp, Artificial
  Synthetic oligonucleotide
cttgtcacaaagctcagcgactctgatgacgtgagcaaactctgcacgcaataga

SEQ ID NO: 269977 - DNA, 51 bp, Artificial
  Synthetic oligonucleotide
gaacgcgtttgtcgtcggtcggacttggattgtaaaaccccgacattttgg

SEQ ID NO: 269978 - DNA, 55 bp, Artificial
  Synthetic oligonucleotide
gaggctaaccaaccggtatgcgtgccctggttaacacatccattgggaacggaga

SEQ ID NO: 269979 - DNA, 55 bp, Artificial
  Synthetic oligonucleotide
cacttatcgtgtaggtgcactatccacccgtacgacatgacatacacagccgtgc

SEQ ID NO: 269980 - DNA, 55 bp, Artificial
  Synthetic oligonucleotide
gactcgctcgcatcactagcaggcgaaaatgccatagtgagatccatagtttgcg

SEQ ID NO: 269981 - DNA, 55 bp, Artificial
  Synthetic oligonucleotide
gagtcgcgggaatcttcgttttgggcgggacagtagccttggttgcgtgtgagga

SEQ ID NO: 269982 - DNA, 55 bp, Artificial
  Synthetic oligonucleotide
gatcgctgcggaggcgcagctacgtcaaaggcataggagtccctcgcatgaacgc

SEQ ID NO: 269983 - DNA, 55 bp, Artificial
  Synthetic oligonucleotide
gcccgtccatcgtacggatacttcgacgatggtaagcgtgtcgagtacgtagcga

SEQ ID NO: 269984 - DNA, 55 bp, Artificial
  Synthetic oligonucleotide
gcctacttgcgctgtgatggtcgtttccactagatcacctcgtgctgtgccaagc

SEQ ID NO: 269985 - DNA, 55 bp, Artificial
  Synthetic oligonucleotide
gcgcacttggccacgtctgctcggtacgtatcgatggagatgggtgtctcctgtg

SEQ ID NO: 269986 - DNA, 55 bp, Artificial
  Synthetic oligonucleotide
gcgccgtcgtcccatgcgcatcattggtctcaacctagtatgctacaacgaagtc

SEQ ID NO: 269987 - DNA, 55 bp, Artificial
  Synthetic oligonucleotide
gcgtgtacctgtgtgtggtgcaatcctcctctccgaagactggacagaagtacgt

SEQ ID NO: 269988 - DNA, 55 bp, Artificial
  Synthetic oligonucleotide
ggcatagttgcgttccatagcccattggacgagtgcatccgctgagtcggccaca

SEQ ID NO: 269989 - DNA, 55 bp, Artificial
  Synthetic oligonucleotide
ggctccaggctcctatacctcaccttgaacgctgcctggtagccactccttctcc

SEQ ID NO: 269990 - DNA, 55 bp, Artificial
  Synthetic oligonucleotide
cccaaagacgtatcttcgtctgcggtcaaagagagttgatccatcacagcatgca

SEQ ID NO: 269991 - DNA, 55 bp, Artificial
  Synthetic oligonucleotide
gtcaaatgcctccactcactgagtgttgtaacctttgcccacacagatctagtac

SEQ ID NO: 269992 - DNA, 55 bp, Artificial
  Synthetic oligonucleotide
gtgacacgagccttcgtagatgcatgctgatgtgagcccatgtgacaagcgtgcg

SEQ ID NO: 269993 - DNA, 55 bp, Artificial
  Synthetic oligonucleotide
gttggctccgtctttatgctagaattcgcccataccttcgctgcgatattacgtc

SEQ ID NO: 269994 - DNA, 55 bp, Artificial
  Synthetic oligonucleotide
taagcggtgcgactgagatttgcgtcgctggctttcaacactttgtgcgtgagca

SEQ ID NO: 269995 - DNA, 55 bp, Artificial
  Synthetic oligonucleotide
tacgtgcccagtcttctcatacaagagcgtctctggagccgtcgttctcgtgagc

SEQ ID NO: 269996 - DNA, 55 bp, Artificial
  Synthetic oligonucleotide
tgacgtggatccttgttcgatgagtgcgagtacgagtacttcgggcttagccacg

SEQ ID NO: 269997 - DNA, 55 bp, Artificial
  Synthetic oligonucleotide
agcacgactacagatcacgagcgtttggtaaatgcgtggcgggacctaagttcca

SEQ ID NO: 269998 - DNA, 54 bp, Artificial
  Synthetic oligonucleotide
aactattccggttggtatcgttgcactcccgttgaagccgtggactcgtgattg

SEQ ID NO: 269999 - DNA, 54 bp, Artificial
  Synthetic oligonucleotide
tctcgcagagtgcgaattgccagtaagtgatgttcaaatggtgacacacgtttc

SEQ ID NO: 270000 - DNA, 52 bp, Artificial
  Synthetic oligonucleotide
cgctaccccagatccgatgtcgcagatagtcgacgtagggttctccaccata

SEQ ID NO: 270001 - DNA, 55 bp, Artificial
  Synthetic oligonucleotide
cccatgtttcctcaaaatcgcatgcatacagagacaatgcatcgtctagctgtcg

SEQ ID NO: 270002 - DNA, 52 bp, Artificial
  Synthetic oligonucleotide
tgagcgcctgttgagagcctatccctccacaggctgtattggacacgccttg

SEQ ID NO: 270003 - DNA, 50 bp, Artificial
  Synthetic oligonucleotide
aagccacatctcgcgtagtggcggcatcgtcccatggactcggagtgcgt

SEQ ID NO: 270004 - DNA, 50 bp, Artificial
  Synthetic oligonucleotide
aagcatgccgcctgaatgcatcgggtagccgccttgtgcctctacggagc

SEQ ID NO: 270005 - DNA, 50 bp, Artificial
  Synthetic oligonucleotide
aagagtgcctttacacgatcgacgctcgctcccatgcgatgggtgcctcc

SEQ ID NO: 270006 - DNA, 50 bp, Artificial
  Synthetic oligonucleotide
aagaggccctcttccctgttgcgggtgggtgcttcggacgcagagacatc

SEQ ID NO: 270007 - DNA, 50 bp, Artificial
  Synthetic oligonucleotide
aacgcgtcagcgtgggcaagtgtgtgtcggagaagcacgcgcgatccatc

SEQ ID NO: 270008 - DNA, 50 bp, Artificial
  Synthetic oligonucleotide
aacgcggtttcatcccatgcgcctgcgtctcccaaggcagccacacacga

SEQ ID NO: 270009 - DNA, 50 bp, Artificial
  Synthetic oligonucleotide
aacgcgggtggtagtctctttgggcagagtaccaagcagccaggcacgac

SEQ ID NO: 270010 - DNA, 50 bp, Artificial
  Synthetic oligonucleotide
aacgaccgcgcaatcacagctagctccgcatgcaactccgcaagagacct

SEQ ID NO: 270011 - DNA, 50 bp, Artificial
  Synthetic oligonucleotide
aacctgatgcggcgagtcttgctgagctcgtcgtgccacatgcagctttg

SEQ ID NO: 270012 - DNA, 55 bp, Artificial
  Synthetic oligonucleotide
cgaatccaagcgccgtacaggtggccatggtaccgaggataacgaagtattcgag

SEQ ID NO: 270013 - DNA, 50 bp, Artificial
  Synthetic oligonucleotide
aaccacgactcgtcgcccgaaaacttctatgcgccgcatgccatgccaca

SEQ ID NO: 270014 - DNA, 50 bp, Artificial
  Synthetic oligonucleotide
aaccaaagacagcgcagcactcgttccatgctgcctcaagtggctccgct

SEQ ID NO: 270015 - DNA, 50 bp, Artificial
  Synthetic oligonucleotide
aacaggtggttgcacgcgagctcgtcagccggagcaaatagcaggatcga

SEQ ID NO: 270016 - DNA, 50 bp, Artificial
  Synthetic oligonucleotide
aacagcatggcaggtgtagtctctgcgccactctggcggtcgaccctgaa

SEQ ID NO: 270017 - DNA, 50 bp, Artificial
  Synthetic oligonucleotide
aacacgagggaaagggctcgtccgacctggcccccactaggcactccatc

SEQ ID NO: 270018 - DNA, 50 bp, Artificial
  Synthetic oligonucleotide
aacaatgatgggcatgccgcaggtactacgcagttgccacgggacccaac

SEQ ID NO: 270019 - DNA, 50 bp, Artificial
  Synthetic oligonucleotide
aaatggcctcgcgttcctaccatatcgccgcgtgcggacgaagagctctc

SEQ ID NO: 270020 - DNA, 50 bp, Artificial
  Synthetic oligonucleotide
aaaggccacaccacggcagcttttgtgcgagggacgcacactccatacgc

SEQ ID NO: 270021 - DNA, 50 bp, Artificial
  Synthetic oligonucleotide
aaactagagatacggcgctcctagcaccgcgtggcacaccattgctgcgc

SEQ ID NO: 270022 - DNA, 50 bp, Artificial
  Synthetic oligonucleotide
aaacgtgccacgcgcctgtctcgacgtttgcccttgcggcgtcaacagtt

SEQ ID NO: 270023 - DNA, 55 bp, Artificial
  Synthetic oligonucleotide
cgctcagcccgtgcaatgatacgctcactcgttggtactgtcaattggcaagctg

SEQ ID NO: 270024 - DNA, 50 bp, Artificial
  Synthetic oligonucleotide
aaacggggcatgtggcacaaggggcaagctcgcagacgaatcacacgctc

SEQ ID NO: 270025 - DNA, 50 bp, Artificial
  Synthetic oligonucleotide
aaaacgactgggtttctcaggtgggggcaacgccggtgcagagagcgatg

SEQ ID NO: 270026 - DNA, 50 bp, Artificial
  Synthetic oligonucleotide
aagaggcaagctgtggtctgcctgcgtacgtctaggagcggcgtccacca

SEQ ID NO: 270027 - DNA, 50 bp, Artificial
  Synthetic oligonucleotide
aagagcctcatacctacgctgccacccaacctgcgcctggcatctacgac

SEQ ID NO: 270028 - DNA, 50 bp, Artificial
  Synthetic oligonucleotide
aagacacagccacgtcatgacaggggcgccatacgtgactcgaccctccc

SEQ ID NO: 270029 - DNA, 50 bp, Artificial
  Synthetic oligonucleotide
aacttccagcctccaagcatgccgcctgaatgcatcgggtagccgccttg

SEQ ID NO: 270030 - DNA, 50 bp, Artificial
  Synthetic oligonucleotide
aactggtcgccccgttcgagcacttgtagagtttgcgcgtcgtttggcct

SEQ ID NO: 270031 - DNA, 50 bp, Artificial
  Synthetic oligonucleotide
aactccctgccaagtttcgcgctgcgaccatcgtagcacgggtccgattg

SEQ ID NO: 270032 - DNA, 50 bp, Artificial
  Synthetic oligonucleotide
aacgtgtcacccacgcaccactcgacacagcccctcggaccttctgcttc

SEQ ID NO: 270033 - DNA, 50 bp, Artificial
  Synthetic oligonucleotide
aacgtcgtgcactggcagctccggttgggctctcacacgtatgcgacgca

SEQ ID NO: 270034 - DNA, 55 bp, Artificial
  Synthetic oligonucleotide
cgctcgctcagatacggcgatctgactccatggcaagcctacgcgcgctagcaca

SEQ ID NO: 270035 - DNA, 50 bp, Artificial
  Synthetic oligonucleotide
aacggtgcgcctgctgccgaaagaaacagccgtgcgccccattatcaact

SEQ ID NO: 270036 - DNA, 50 bp, Artificial
  Synthetic oligonucleotide
aacgggtatgcgcctgagcgcaccactaccaactttccgcccctgcacgc

SEQ ID NO: 270037 - DNA, 50 bp, Artificial
  Synthetic oligonucleotide
aacgggagcgccccatagcacgaatagacggcgcagctccatccgtaaat

SEQ ID NO: 270038 - DNA, 50 bp, Artificial
  Synthetic oligonucleotide
aacggcatcacaggaccgcacagtgctgatttggacacagaacacgccga

SEQ ID NO: 270039 - DNA, 50 bp, Artificial
  Synthetic oligonucleotide
aacggatgacgccgactcgggtgccgcacttctagcgcaactggcgccac

SEQ ID NO: 270040 - DNA, 50 bp, Artificial
  Synthetic oligonucleotide
aacggatcagagcgtgcagacgactagcatgaaccgcactgggcggaagg

SEQ ID NO: 270041 - DNA, 50 bp, Artificial
  Synthetic oligonucleotide
aacggacgccaacgcttgagagacgtccacgagtgattcggtcgaggcca

SEQ ID NO: 270042 - DNA, 50 bp, Artificial
  Synthetic oligonucleotide
aacgctgtgaggcatgcaccatagccgcacatggccatttgagccgccag

SEQ ID NO: 270043 - DNA, 50 bp, Artificial
  Synthetic oligonucleotide
aacgctgggaaagacgagtgaccgccgtacgtgagggagcacggacgaat

SEQ ID NO: 270044 - DNA, 55 bp, Artificial
  Synthetic oligonucleotide
cgtcacaaacgatttgctatgctccgcccctcggctgatgcattatcacacacat

SEQ ID NO: 270045 - DNA, 55 bp, Artificial
  Synthetic oligonucleotide
ctagatgttcctaagactgaagcgagttgcttgtatctctctccgcgtaccactt

SEQ ID NO: 270046 - DNA, 55 bp, Artificial
  Synthetic oligonucleotide
ctcacgcattcgcctatcgcgccagagtcttgcgtcatttccgagcgtagaagcc

SEQ ID NO: 270047 - DNA, 60 bp, Artificial
  Synthetic oligonucleotide
cacagcagccatgcatgctcctctttccgaaggaagctgctcttatcttaaccgccccct

SEQ ID NO: 270048 - DNA, 58 bp, Artificial
  Synthetic oligonucleotide
cttttagtctccaattatatatgattactttcctctaactttataatcatatcgagaa

SEQ ID NO: 270049 - DNA, 50 bp, Artificial
  Synthetic oligonucleotide
aacgggccgggtctttgacagttcagtcgggtacccctgctgccacatta

SEQ ID NO: 270050 - DNA, 50 bp, Artificial
  Synthetic oligonucleotide
gaaggttgagtgtcccacttttaatgggaaagtcttggttcaagtccatg

SEQ ID NO: 270051 - DNA, 50 bp, Artificial
  Synthetic oligonucleotide
aacgggcagggagagaggcgtccaactggtttgggtaggaagcgcgagtt

SEQ ID NO: 270052 - DNA, 50 bp, Artificial
  Synthetic oligonucleotide
aacggctctagtgcacgcctgaatgccgacgcggcagctaaagacgccaa

SEQ ID NO: 270053 - DNA, 50 bp, Artificial
  Synthetic oligonucleotide
aacgctcacggcttggtggttcgctgggatcctctgggcgacggatgaat

SEQ ID NO: 270054 - DNA, 50 bp, Artificial
  Synthetic oligonucleotide
aacgcctatcgcacccagtgcttcgcctcccacgaccgactagctcatgc

SEQ ID NO: 270055 - DNA, 50 bp, Artificial
  Synthetic oligonucleotide
aacgccccgggggcccttaagctgcgtccctccggaatgcccattatacg

SEQ ID NO: 270056 - DNA, 50 bp, Artificial
  Synthetic oligonucleotide
aacgagccatcaaagctgaaggggccacccccaccagggatgagcgtatc

SEQ ID NO: 270057 - DNA, 50 bp, Artificial
  Synthetic oligonucleotide
aaccttggtgtgtccattgtaacgcgccagggaatccccggagtggagcc

SEQ ID NO: 270058 - DNA, 50 bp, Artificial
  Synthetic oligonucleotide
aaccttctctcccggcaacattgatagcagccacacgagcgagggccgta

SEQ ID NO: 270059 - DNA, 58 bp, Artificial
  Synthetic oligonucleotide
ctaatcagttatgagtcgtactagttttgtagtgttatcaacattagtatggcaaggc

SEQ ID NO: 270060 - DNA, 50 bp, Artificial
  Synthetic oligonucleotide
aacctgagacgtgccgatgataggaaggcggaggcagggctatgtcccga

SEQ ID NO: 270061 - DNA, 50 bp, Artificial
  Synthetic oligonucleotide
aacctctgccggcggttgcattgaggcggactgctacgatgcccagcatt

SEQ ID NO: 270062 - DNA, 50 bp, Artificial
  Synthetic oligonucleotide
aacctcgatggatggaggcgcatgtatggtcgttggggtcgggcgaagga

SEQ ID NO: 270063 - DNA, 50 bp, Artificial
  Synthetic oligonucleotide
aacctacccaagcggtgtttggggtagcacggcacccggtctccgtgaac

SEQ ID NO: 270064 - DNA, 50 bp, Artificial
  Synthetic oligonucleotide
aaccgtgggtcgaaacccagtgcgcaccacactcgtcagtgtcagatccg

SEQ ID NO: 270065 - DNA, 50 bp, Artificial
  Synthetic oligonucleotide
aaccggtccacgtccatgtggcaatgcccctcattcggtaaccgcggatg

SEQ ID NO: 270066 - DNA, 50 bp, Artificial
  Synthetic oligonucleotide
aaccggggcacgagcgtctgaggtgggcgcttccaacttagcacagagct

SEQ ID NO: 270067 - DNA, 50 bp, Artificial
  Synthetic oligonucleotide
aaccggggatccatctgtggctgcttataccacgggccaacgttgcgcac

SEQ ID NO: 270068 - DNA, 50 bp, Artificial
  Synthetic oligonucleotide
aaccggccgtcgcacgcacgtgcattatctacagcgtctgtgtcgactga

SEQ ID NO: 270069 - DNA, 50 bp, Artificial
  Synthetic oligonucleotide
aacagcgtggcggtgtgaccccagaggagacggtgtagggtgcgaagcaa

SEQ ID NO: 270070 - DNA, 57 bp, Artificial
  Synthetic oligonucleotide
gataagagctagatataaattatactgctactccgaacctcacaaaagatctagcag

SEQ ID NO: 270071 - DNA, 57 bp, Artificial
  Synthetic oligonucleotide
caattctaagcgtaaaatctgattaagcttatcttgatctagttcttcctacggagc

SEQ ID NO: 270072 - DNA, 56 bp, Artificial
  Synthetic oligonucleotide
accgctctaaaacctagttgtgctcactcagcactcctacttagctgtatatgcgt

SEQ ID NO: 270073 - DNA, 54 bp, Artificial
  Synthetic oligonucleotide
acggtactgctaagctttagcaaaccatcttctacgtttaacacctctctttag

SEQ ID NO: 270074 - DNA, 55 bp, Artificial
  Synthetic oligonucleotide
agatccttagctctgcttggtatcgataagtgtcaatgctacgccaaacgcagaa

SEQ ID NO: 270075 - DNA, 55 bp, Artificial
  Synthetic oligonucleotide
agcgcctcttccttacatcccgaaggaaagaagggcagcgttcccaccgctttgc

SEQ ID NO: 270076 - DNA, 55 bp, Artificial
  Synthetic oligonucleotide
caaagcagatctaagttcttattatgcagccgtgcggagctgcggagcagccatc

SEQ ID NO: 270077 - DNA, 55 bp, Artificial
  Synthetic oligonucleotide
cacaacgaacgaaagcgtaggtgattgtgggagaggaaaagtcggacaggcaaaa

SEQ ID NO: 270078 - DNA, 52 bp, Artificial
  Synthetic oligonucleotide
attttaacccggtgattactattcacgattgttttggaacattacctaacta

SEQ ID NO: 270079 - DNA, 55 bp, Artificial
  Synthetic oligonucleotide
aagctacgcgcaagctacgcgcaagctacgcgcttgctacacgctcgctacgcga

SEQ ID NO: 270080 - DNA, 55 bp, Artificial
  Synthetic oligonucleotide
cacctgcgatatcagaagcgatacccagctcagttggtgcccctgctgcgacgag

SEQ ID NO: 270081 - DNA, 55 bp, Artificial
  Synthetic oligonucleotide
cacctgcgtccaaaaccaaacgagtaatgtccttcatccttagtatcgggaggtg

SEQ ID NO: 270082 - DNA, 55 bp, Artificial
  Synthetic oligonucleotide
ccaagttcagcatccgacacttgaaacagggtatccacacagttacagtacatct

SEQ ID NO: 270083 - DNA, 55 bp, Artificial
  Synthetic oligonucleotide
ccgcactgcggtgcttgcggagcatgcaagaagcagtgtacctctacttatactt

SEQ ID NO: 270084 - DNA, 55 bp, Artificial
  Synthetic oligonucleotide
ccgcctggccagctgaagactgataatggaatggattcaagttcgttcggcttcc

SEQ ID NO: 270085 - DNA, 55 bp, Artificial
  Synthetic oligonucleotide
cctacgctacttctactttgtaagaaggcgcagtcggtccacactcataagagta

SEQ ID NO: 270086 - DNA, 55 bp, Artificial
  Synthetic oligonucleotide
cgagctacaggtataatgtgatacgatgtcagttacgaattaaacgtttcgcgtc

SEQ ID NO: 270087 - DNA, 55 bp, Artificial
  Synthetic oligonucleotide
cgcactgcagtatcatagtgatagtcacttaacaccgagaagcagtacgctcagg

SEQ ID NO: 270088 - DNA, 55 bp, Artificial
  Synthetic oligonucleotide
cgcttaggagcaaggaaaaggtaagcgaagcataagcagcccctgctgctgttcc

SEQ ID NO: 270089 - DNA, 60 bp, Artificial
  Synthetic oligonucleotide
ataatgcagatagctctaataaacttaatgaatccagataagtatagaaaccatctaagt

SEQ ID NO: 270090 - DNA, 55 bp, Artificial
  Synthetic oligonucleotide
cggtacaggactctatgggctcgagcatagcgtgaaggcctttcttccctgtgcg

SEQ ID NO: 270091 - DNA, 55 bp, Artificial
  Synthetic oligonucleotide
cggttgcggttaagataagagctagggaaggaaagcagttcttttctgcttgcgg

SEQ ID NO: 270092 - DNA, 55 bp, Artificial
  Synthetic oligonucleotide
ctaaataacttctacttcacttgcggagcagccatattacatatctttacagagg

SEQ ID NO: 270093 - DNA, 55 bp, Artificial
  Synthetic oligonucleotide
ctaggtcattgttgttgaaagattgcttctacaatcgactacttataaggacagg

SEQ ID NO: 270094 - DNA, 55 bp, Artificial
  Synthetic oligonucleotide
ctcggagcgagagtgcctattctgctagtgaaacgtattcaacatgagctctacg

SEQ ID NO: 270095 - DNA, 55 bp, Artificial
  Synthetic oligonucleotide
ctgccacgacctgtctacaatcgctcactatatcaagttctccctaatcgccgct

SEQ ID NO: 270096 - DNA, 55 bp, Artificial
  Synthetic oligonucleotide
tctcggtctcacatggccgatgtatcacctagtccgattgagtatgtatatcaac

SEQ ID NO: 270097 - DNA, 54 bp, Artificial
  Synthetic oligonucleotide
gtttgtttatgcggttcccctgttgaagttaacttaggaagttggatagactca

SEQ ID NO: 270098 - DNA, 55 bp, Artificial
  Synthetic oligonucleotide
gtttatgctcacataggaagaggtctttattatggttcatacagaagtcctagag

SEQ ID NO: 270099 - DNA, 55 bp, Artificial
  Synthetic oligonucleotide
gtgttggagagcgttaccaaaatggctgatacgacttcagctaccgtgtcagacc

SEQ ID NO: 270100 - DNA, 60 bp, Artificial
  Synthetic oligonucleotide
cgatcctgtgtgaaagcacagagtaatctacctctcttgcctttatggtagtgacagagg

SEQ ID NO: 270101 - DNA, 55 bp, Artificial
  Synthetic oligonucleotide
gtgctttagttgagaatggagccggtacaggatggacagtaaatgatatgctgtc

SEQ ID NO: 270102 - DNA, 55 bp, Artificial
  Synthetic oligonucleotide
gtgctgacgcactctatggcagttaggttgaattagtgaggtagagggcgtagcg

SEQ ID NO: 270103 - DNA, 55 bp, Artificial
  Synthetic oligonucleotide
gtagaaagccgttctcaccgacaacgtcagatgatttccactggaactcgtagcc

SEQ ID NO: 270104 - DNA, 55 bp, Artificial
  Synthetic oligonucleotide
gtaacagacctacgtgggtcaagacaactcgtgtcactgaccggacggcctgagc

SEQ ID NO: 270105 - DNA, 55 bp, Artificial
  Synthetic oligonucleotide
ggtatggctagacattgaatggaggtcaatcgaccagtgaagggtcgcgcagagt

SEQ ID NO: 270106 - DNA, 55 bp, Artificial
  Synthetic oligonucleotide
gggtcactccgaaccatcaggaacatggcctcaacaccacaagcgaagctttgcg

SEQ ID NO: 270107 - DNA, 55 bp, Artificial
  Synthetic oligonucleotide
gggactgttatcaagactgtggggagtaacctgcgccgcatgtcgttacgcgtgg

SEQ ID NO: 270108 - DNA, 55 bp, Artificial
  Synthetic oligonucleotide
ggagagtggtgagcgcgtagcaaatggttaatcttgctaacacagcatagcttac

SEQ ID NO: 270109 - DNA, 55 bp, Artificial
  Synthetic oligonucleotide
ggaaaagaaggcgcagtcggtccacactcataagagtaaaagtctttagagtgag

SEQ ID NO: 270110 - DNA, 55 bp, Artificial
  Synthetic oligonucleotide
gcgcgagtgtgtacggtccttgttggcctcaataggagtgttcgatgcctcagtg

SEQ ID NO: 270111 - DNA, 60 bp, Artificial
  Synthetic oligonucleotide
gtaacgtaagcacagcagccatgcatgctcctctttccgaaggaagctgctcttatctta

SEQ ID NO: 270112 - DNA, 55 bp, Artificial
  Synthetic oligonucleotide
gatagtgtatttggaactacattttatgcgtcaactggactgcatgggttccacg

SEQ ID NO: 270113 - DNA, 55 bp, Artificial
  Synthetic oligonucleotide
cttcttcatgcttattcaattctacttctgcggtaacttcagaacctactcctgc

SEQ ID NO: 270114 - DNA, 55 bp, Artificial
  Synthetic oligonucleotide
gcaaccaaaggggctgcgcaggagtgtaaaccatcttaccataacacaagagaga

SEQ ID NO: 270115 - DNA, 55 bp, Artificial
  Synthetic oligonucleotide
gcaccctctcgagtgcacttaaagtcattgcacatcgatacgaaggtaacccgcc

SEQ ID NO: 270116 - DNA, 55 bp, Artificial
  Synthetic oligonucleotide
aactgcagcgtagtaagcctagctaatatcgctaactacaaatctaacactttgc

SEQ ID NO: 270117 - DNA, 55 bp, Artificial
  Synthetic oligonucleotide
gcccaactggaaacctcgactatcacactcacccgagagtacttgcacattactc

SEQ ID NO: 270118 - DNA, 55 bp, Artificial
  Synthetic oligonucleotide
gccgtaagctatgaagctacttagggcagatgtaaaacaaattaagaccttaggt

SEQ ID NO: 270119 - DNA, 53 bp, Artificial
  Synthetic oligonucleotide
gcctccttctactaggggaaagtacagtgcttgggtcccaccaacgtcctacg

SEQ ID NO: 270120 - DNA, 52 bp, Artificial
  Synthetic oligonucleotide
gcgagcaaattaaggaagggagggttaagtacaccccattaagagaggtacg

SEQ ID NO: 270121 - DNA, 54 bp, Artificial
  Synthetic oligonucleotide
ggatatagtcgaccatatacgtgatcttcgtataccccacgtacaaggaaaggc

SEQ ID NO: 270122 - DNA, 60 bp, Artificial
  Synthetic oligonucleotide
cgcgcaagctacgcgcaagctacgcgcaagctacgcgcaagctacgcgcttgctacacgc

SEQ ID NO: 270123 - DNA, 54 bp, Artificial
  Synthetic oligonucleotide
cgacctcagtcgtattcttcacgtcggggagatgagctatgatcgaggtcatcg

SEQ ID NO: 270124 - DNA, 54 bp, Artificial
  Synthetic oligonucleotide
gctagagcaatctctttaggagttcgattatttgctaatttaactgcgggtcac

SEQ ID NO: 270125 - DNA, 54 bp, Artificial
  Synthetic oligonucleotide
gctacgaataaggcagtatgcgctatgccaaatgtgctaacgctttaagtagct

SEQ ID NO: 270126 - DNA, 54 bp, Artificial
  Synthetic oligonucleotide
tactacacggttgccggccactgttcgtaccacccgtgcagataatgtcctcac

SEQ ID NO: 270127 - DNA, 54 bp, Artificial
  Synthetic oligonucleotide
aatatgtgctcgatttgctgcagcttctattgatataagtagtggatcaaacaa

SEQ ID NO: 270128 - DNA, 53 bp, Artificial
  Synthetic oligonucleotide
tcaccaccaaattgggagtgatgcattgtggcgttgttgctagacagcgggag

SEQ ID NO: 270129 - DNA, 53 bp, Artificial
  Synthetic oligonucleotide
tgctaacgctgcacacttttatagttagggtgttttttcttacccttaacagg

SEQ ID NO: 270130 - DNA, 53 bp, Artificial
  Synthetic oligonucleotide
tggaaccgtatgcagtgttgtgtcatccgaacacagtgtgctccgtgcatcat

SEQ ID NO: 270131 - DNA, 53 bp, Artificial
  Synthetic oligonucleotide
agagtcaataggcgttagatcctttggtccagagcacagatttgacacccgca

SEQ ID NO: 270132 - DNA, 53 bp, Artificial
  Synthetic oligonucleotide
cacactcataagagtaaaagtctttagagtgagggatcctcactacactattc

SEQ ID NO: 270133 - DNA, 55 bp, Artificial
  Synthetic oligonucleotide
gtagtcagctactactcttattccggtaggttatgcctaaatagtatgagggggg

SEQ ID NO: 270134 - DNA, 52 bp, Artificial
  Synthetic oligonucleotide
cggataagagcaaggaaaaggaagcgctaggaaaggggaggcgaagcagctt

SEQ ID NO: 270135 - DNA, 52 bp, Artificial
  Synthetic oligonucleotide
cgctgatgatgggtcacactcaaggcaaaatgggaatgtgccaaacatgagg

SEQ ID NO: 270136 - DNA, 52 bp, Artificial
  Synthetic oligonucleotide
gcagatcccaagagtgggtgacgcagagatataacgttgctagagacatctt

SEQ ID NO: 270137 - DNA, 52 bp, Artificial
  Synthetic oligonucleotide
gcggtgcttttccttgctcttatcttatccgcactgctgcggagctgcggat

SEQ ID NO: 270138 - DNA, 51 bp, Artificial
  Synthetic oligonucleotide
gacgcgtcggcctagtccttatatcaagctagcgtccgcagcggtttgagt

SEQ ID NO: 270139 - DNA, 51 bp, Artificial
  Synthetic oligonucleotide
gcagctccctcttcccttcggttgctcctttccgaaggaagctgctgttcc

SEQ ID NO: 270140 - DNA, 51 bp, Artificial
  Synthetic oligonucleotide
ctgccatatcacttttgtaatctaaaagtttcgaaagataatgatgtccta

SEQ ID NO: 270141 - DNA, 51 bp, Artificial
  Synthetic oligonucleotide
ctagttttgctacgcttctccgcaagcgaaggatgtggcgcttaatccttc

SEQ ID NO: 270142 - DNA, 51 bp, Artificial
  Synthetic oligonucleotide
cgagcgcgcaggtcgttcctaaacattaatgcgagggacgggaatttggtg

SEQ ID NO: 270143 - DNA, 50 bp, Artificial
  Synthetic oligonucleotide
aacacgggaagcatggccacgcatgtatcggcactgcacggagtccaact

SEQ ID NO: 270144 - DNA, 57 bp, Artificial
  Synthetic oligonucleotide
cgtcgcttgcttaagtaactagcttcgctatctatctagcgaagtaagtagtaaaag

SEQ ID NO: 270145 - DNA, 50 bp, Artificial
  Synthetic oligonucleotide
aacaaaagcgccatagagctccccgagcgcctaagccctagtgctcctcc

SEQ ID NO: 270146 - DNA, 50 bp, Artificial
  Synthetic oligonucleotide
aaatcataataggttttattacgctttaaatatgagtaatttcgatggta

SEQ ID NO: 270147 - DNA, 50 bp, Artificial
  Synthetic oligonucleotide
aaagttcagattcgctggatattcggccagcgggggcgcattgggacccg

SEQ ID NO: 270148 - DNA, 50 bp, Artificial
  Synthetic oligonucleotide
aaagtctgcccatcgggtttgcgtccaggcctccatgccttgcccgttgt

SEQ ID NO: 270149 - DNA, 50 bp, Artificial
  Synthetic oligonucleotide
aaagtcccaaactgccaccctgccgaaataccccgacactcgaggcccgg

SEQ ID NO: 270150 - DNA, 50 bp, Artificial
  Synthetic oligonucleotide
aaagtatgcccatcgagggtccgtgcacaactacacctcgcctcgcgtga

SEQ ID NO: 270151 - DNA, 50 bp, Artificial
  Synthetic oligonucleotide
aaagggctgagccttgcattccatcgtcggcgcccctcattcaatgctcc

SEQ ID NO: 270152 - DNA, 50 bp, Artificial
  Synthetic oligonucleotide
aaagccacgagccgcttccgtgagtgcctttgttcttaggctgcgacccg

SEQ ID NO: 270153 - DNA, 50 bp, Artificial
  Synthetic oligonucleotide
aaagacgcaagcgtcccaaaggggtcaacacggcacagggtcgggacgat

SEQ ID NO: 270154 - DNA, 50 bp, Artificial
  Synthetic oligonucleotide
aaactggcgcgttcggctatggaggcgtatccagttgcagtccctggcga

SEQ ID NO: 270155 - DNA, 60 bp, Artificial
  Synthetic oligonucleotide
ctagatataaattatactgctactccgaacctcacaaaagatctagtagtagagtatcac

SEQ ID NO: 270156 - DNA, 50 bp, Artificial
  Synthetic oligonucleotide
aaacgcgtagatatcgcttgcaaacgtccgccgagggggttctccggtga

SEQ ID NO: 270157 - DNA, 50 bp, Artificial
  Synthetic oligonucleotide
aaacgcaccacgagagttgttgacgcggcggggcatccaacaccaggtcc

SEQ ID NO: 270158 - DNA, 50 bp, Artificial
  Synthetic oligonucleotide
aaacgatgctggtgcctagttgcacctgccagcccattgcacgggttctg

SEQ ID NO: 270159 - DNA, 50 bp, Artificial
  Synthetic oligonucleotide
aaaccttcccgcgtccagatgatccatagtgagcggttgccggcagagga

SEQ ID NO: 270160 - DNA, 50 bp, Artificial
  Synthetic oligonucleotide
tcattaaatgttgtctaataatagagtcaattctattattaaaatgaggt

SEQ ID NO: 270161 - DNA, 50 bp, Artificial
  Synthetic oligonucleotide
aaacctccacgctctgcagtgacccctccagcgctcgacacatagtccca

SEQ ID NO: 270162 - DNA, 50 bp, Artificial
  Synthetic oligonucleotide
aaaatggcccggtccgctctttccgttgcccaaatcagcgacgggtcctc

SEQ ID NO: 270163 - DNA, 50 bp, Artificial
  Synthetic oligonucleotide
tgctccgcaaggaagtgctaagctttagcaaaccatcttctacgtttaac

SEQ ID NO: 270164 - DNA, 50 bp, Artificial
  Synthetic oligonucleotide
aaaacactcaccggccgggacttcaaagacggggtggtggagacgtgctc

SEQ ID NO: 270165 - DNA, 50 bp, Artificial
  Synthetic oligonucleotide
aacggggccagcaagtttttccgcaggcaaatccccggatgcgtattgct

SEQ ID NO: 270166 - DNA, 55 bp, Artificial
  Synthetic oligonucleotide
cacggaatacaccactacatttgcatccaccgactctactggccggattagacac

SEQ ID NO: 270167 - DNA, 55 bp, Artificial
  Synthetic oligonucleotide
cgggtgtcggagctcttccgatgacaaggtgaggctaggacgggatagtaagatg

SEQ ID NO: 270168 - DNA, 55 bp, Artificial
  Synthetic oligonucleotide
cgtggtattcgagtatgactcgtcggttttagacagatggcgatctatccattta

SEQ ID NO: 270169 - DNA, 55 bp, Artificial
  Synthetic oligonucleotide
gccacacccatgccatcgtctgtcacaccgtaagatgtggggacagagtcgtagt

SEQ ID NO: 270170 - DNA, 55 bp, Artificial
  Synthetic oligonucleotide
gcgaagctacttcgtacggctcgaatacaaataatggctctgccatttccgacgc

SEQ ID NO: 270171 - DNA, 55 bp, Artificial
  Synthetic oligonucleotide
gcgactcgagcgcctgcatgggttggggtgtacagtagagagatgggcttgcata

SEQ ID NO: 270172 - DNA, 55 bp, Artificial
  Synthetic oligonucleotide
gcgatgctctcacgtgaacctgtagccgggaaataggtaagagcttaatcggctc

SEQ ID NO: 270173 - DNA, 55 bp, Artificial
  Synthetic oligonucleotide
gcgggactattgagctccatctccactaacttgttgaacgtcagggatacgatct

SEQ ID NO: 270174 - DNA, 55 bp, Artificial
  Synthetic oligonucleotide
gctgtgctccgtgaaacagtggaacgaagagtatgagaacgttacaagcccagac

SEQ ID NO: 270175 - DNA, 55 bp, Artificial
  Synthetic oligonucleotide
ggaccgacgttcttacgcagacagaggccatagccaccgaaagagacaattttgc

SEQ ID NO: 270176 - DNA, 55 bp, Artificial
  Synthetic oligonucleotide
gtagagatgaagcgcgggaagcatcgctttagttgtgcacgtgactgcgcacgtg

SEQ ID NO: 270177 - DNA, 53 bp, Artificial
  Synthetic oligonucleotide
cagagcgtagttaagactcgccaggataacgaaaacaagggttacgtcacctt

SEQ ID NO: 270178 - DNA, 55 bp, Artificial
  Synthetic oligonucleotide
gtgccgaggactgagtcgatacagtcgatgggcgtttaggcaactcaggaggaag

SEQ ID NO: 270179 - DNA, 55 bp, Artificial
  Synthetic oligonucleotide
gtgggacgagatccaagtgccagcgaatggagaagccacaagtcgtggacgtcgg

SEQ ID NO: 270180 - DNA, 55 bp, Artificial
  Synthetic oligonucleotide
gttgggcgtcacttggcgactctgacctacggcccagagtcttattaatctgtgt

SEQ ID NO: 270181 - DNA, 55 bp, Artificial
  Synthetic oligonucleotide
atgctcgcgcctttatataatgcgaactgtggaggattgaagtccgagcctcacc

SEQ ID NO: 270182 - DNA, 55 bp, Artificial
  Synthetic oligonucleotide
acttgcgccgcacggaggagttcagtgccgacgggaagttggtggggactcgcta

SEQ ID NO: 270183 - DNA, 54 bp, Artificial
  Synthetic oligonucleotide
attttcgcatctagtggtatgcaggtcttgaatagatggcctgagatgaaaagt

SEQ ID NO: 270184 - DNA, 54 bp, Artificial
  Synthetic oligonucleotide
tggccgtgtccgaattgaagcctgtgctcgatggtgaaagcagtcagtccattt

SEQ ID NO: 270185 - DNA, 53 bp, Artificial
  Synthetic oligonucleotide
caagaatcgcttgcaaggagtcgctatctgatgcgttgctgcttggttcgagg

SEQ ID NO: 270186 - DNA, 53 bp, Artificial
  Synthetic oligonucleotide
taactttgggtcccatgggtatcttagcttgggcaggagcctgcgttttgacg

SEQ ID NO: 270187 - DNA, 53 bp, Artificial
  Synthetic oligonucleotide
tcgcggcttgacagccgcccatgccccatttacggagattgttgtcgcgtttg

SEQ ID NO: 270188 - DNA, 55 bp, Artificial
  Synthetic oligonucleotide
cccacacgcgtgtctccaaccatatcattgagcaacgattcctgagcgcctccaa

SEQ ID NO: 270189 - DNA, 50 bp, Artificial
  Synthetic oligonucleotide
acggccaacttgcccccacggcggtcccgtttagtcgcaggcgcatttca

SEQ ID NO: 270190 - DNA, 50 bp, Artificial
  Synthetic oligonucleotide
acggagcatggcatctgcgtaggtgacagggcggtctgggtcgctcgaac

SEQ ID NO: 270191 - DNA, 50 bp, Artificial
  Synthetic oligonucleotide
acggaatcgacttggacgcgacagaaaacgagcctcggccccagtcgcca

SEQ ID NO: 270192 - DNA, 50 bp, Artificial
  Synthetic oligonucleotide
acgcggggtgctccatatggaccgtagtggcaggccgtctaaagcctcga

SEQ ID NO: 270193 - DNA, 50 bp, Artificial
  Synthetic oligonucleotide
aaactgtgtcgcgggcaagatactgagctacggcaggcgcgcactcttcg

SEQ ID NO: 270194 - DNA, 50 bp, Artificial
  Synthetic oligonucleotide
aacaagttggacacccacgcaaacaagccactggggctctctgccggttt

SEQ ID NO: 270195 - DNA, 50 bp, Artificial
  Synthetic oligonucleotide
aacagggcacggcgcgcagtacatagaacatgcgggcgaaggaacaacgt

SEQ ID NO: 270196 - DNA, 50 bp, Artificial
  Synthetic oligonucleotide
aacattcctgttgtggccgctggtccaagcacgggccccactcgcaatcc

SEQ ID NO: 270197 - DNA, 50 bp, Artificial
  Synthetic oligonucleotide
aaccatggcggccgataagtaagaggtgggtctccggtcacgtgctgccg

SEQ ID NO: 270198 - DNA, 50 bp, Artificial
  Synthetic oligonucleotide
aacgggtaaagtgagtgcgtcgtgcaggacttggcccatgcaaggcccac

SEQ ID NO: 270199 - DNA, 54 bp, Artificial
  Synthetic oligonucleotide
cccacatgtagggtgtttctaatccacgtgacctgttttaactccgttatttga

SEQ ID NO: 270200 - DNA, 50 bp, Artificial
  Synthetic oligonucleotide
aactcactcacaatattcacggcccacatgacgctaaattctatgcttta

SEQ ID NO: 270201 - DNA, 50 bp, Artificial
  Synthetic oligonucleotide
aagcccgcagacgaattcttagatggggcgcgaatgcagtgacggcgact

SEQ ID NO: 270202 - DNA, 50 bp, Artificial
  Synthetic oligonucleotide
aagccgtcagtggccgtggcctttagtcccgtgcgctacaagagcagaaa

SEQ ID NO: 270203 - DNA, 50 bp, Artificial
  Synthetic oligonucleotide
aagcgtagtcactaggccttcgtgttgcgtggtgggaaacgaggggagcg

SEQ ID NO: 270204 - DNA, 50 bp, Artificial
  Synthetic oligonucleotide
aagggcttacgtgggacgcgagggggcagagatacaacgcgacctttgga

SEQ ID NO: 270205 - DNA, 50 bp, Artificial
  Synthetic oligonucleotide
aagtgcccgagccacggggcgtctggaggccgattccgttgtgtgacatg

SEQ ID NO: 270206 - DNA, 50 bp, Artificial
  Synthetic oligonucleotide
aagtggggtgccacggaacgccaatcgcgggtctgaagctcggtagacca

SEQ ID NO: 270207 - DNA, 50 bp, Artificial
  Synthetic oligonucleotide
aatcaaccacaggtgcctcggagcacttggctcgtgtcattgtgcgcaga

SEQ ID NO: 270208 - DNA, 50 bp, Artificial
  Synthetic oligonucleotide
aatccgcgtataggcaggattgggtgcggcaccagtgttcgaacggctcc

SEQ ID NO: 270209 - DNA, 50 bp, Artificial
  Synthetic oligonucleotide
aatcgttcaccaggggagcaagcacgggataacgggcgatcgagtgctga

SEQ ID NO: 270210 - DNA, 55 bp, Artificial
  Synthetic oligonucleotide
cctctaagaatgtgttactagcaaaattagccactcggaaggcaaaaccgcgtgg

SEQ ID NO: 270211 - DNA, 50 bp, Artificial
  Synthetic oligonucleotide
acaaggcaatgtacgcagccactgcaagcggagccgtccgcacaaactcg

SEQ ID NO: 270212 - DNA, 50 bp, Artificial
  Synthetic oligonucleotide
accacgggacgtagatgtagcggcggccctgagacgcatcaaattgggcc

SEQ ID NO: 270213 - DNA, 50 bp, Artificial
  Synthetic oligonucleotide
accacggtaacgcgcggcacactctcgcgcattaaccctcgtcacccgaa

SEQ ID NO: 270214 - DNA, 50 bp, Artificial
  Synthetic oligonucleotide
accatctcggagcccccgtgcacaagccctgccgtagcgtgctacatcct

SEQ ID NO: 270215 - DNA, 50 bp, Artificial
  Synthetic oligonucleotide
accattccccgtgggtctgccacatgcaaatacaccccctgcgtcgcgtc

SEQ ID NO: 270216 - DNA, 50 bp, Artificial
  Synthetic oligonucleotide
acccaccggaaggcgtgcgtacatgggtttgaaacttgccctgggctggc

SEQ ID NO: 270217 - DNA, 50 bp, Artificial
  Synthetic oligonucleotide
acccacgcaaacaagccactggggctctctgccggtttcaagtccttggg

SEQ ID NO: 270218 - DNA, 50 bp, Artificial
  Synthetic oligonucleotide
acccacttgcaacattgcccgtggtcccttaggtggcagggcgttcgagt

SEQ ID NO: 270219 - DNA, 50 bp, Artificial
  Synthetic oligonucleotide
accccaggcgccgcatcattgggaaaccgaggcccgctaggatttctgta

SEQ ID NO: 270220 - DNA, 50 bp, Artificial
  Synthetic oligonucleotide
acccctccggcctgagctgcacatgtcacgcaagttgttacccatgcgca

SEQ ID NO: 270221 - DNA, 55 bp, Artificial
  Synthetic oligonucleotide
cgagtctctcatggtaacagcgtagccaagtaggcgatccacaacatgggtgtcg

SEQ ID NO: 270222 - DNA, 50 bp, Artificial
  Synthetic oligonucleotide
accctgatccaagggcttacgtgggacgcgagggggcagagatacaacgc

SEQ ID NO: 270223 - DNA, 50 bp, Artificial
  Synthetic oligonucleotide
accgcaatgacgagagcggaggagccaacggttattcgcggcccgtggcg

SEQ ID NO: 270224 - DNA, 50 bp, Artificial
  Synthetic oligonucleotide
accggggccgtagggccgcagtgtgttcatgcgtggggaagcagtgcctg

SEQ ID NO: 270225 - DNA, 50 bp, Artificial
  Synthetic oligonucleotide
acgactcggtgtggcgagcgacctagttgctcggtcatgggcagtcccct

SEQ ID NO: 270226 - DNA, 50 bp, Artificial
  Synthetic oligonucleotide
acgcaaaataggggtggcgcaaagagcgtccttgtagggcggacgtcgcg

SEQ ID NO: 270227 - DNA, 50 bp, Artificial
  Synthetic oligonucleotide
acgccacaagcccacgccaccggcccatctactagccagatctttcagcc

SEQ ID NO: 270228 - DNA, 55 bp, Artificial
  Synthetic oligonucleotide
cgcaatcctatcgcagggacctacgcagtcgaatggttcgttacctccattggcc

SEQ ID NO: 270229 - DNA, 55 bp, Artificial
  Synthetic oligonucleotide
cgcatatggatcgtaaggtaaaagccttattctgccaatgacaggtccgcttttg

SEQ ID NO: 270230 - DNA, 55 bp, Artificial
  Synthetic oligonucleotide
aatggtatggttttcatctaagggacgtagtttaccatggcgttgattagtccac

SEQ ID NO: 270231 - DNA, 53 bp, Artificial
  Synthetic oligonucleotide
ttctcgggttctccatgggagaacccgagggggcccattcagatttcccttag

SEQ ID NO: 270232 - DNA, 51 bp, Artificial
  Synthetic oligonucleotide
caaagaggcttaaatagcctaggttagcccctcaggtttcccgtagggaaa

SEQ ID NO: 270233 - DNA, 55 bp, Artificial
  Synthetic oligonucleotide
atttctatctaggcaccgggataagggattatttccttatactaggatagattcg

SEQ ID NO: 270234 - DNA, 51 bp, Artificial
  Synthetic oligonucleotide
accattcttcttcctaaaggaagaacccgagggggcccattcaattcaagt

SEQ ID NO: 270235 - DNA, 53 bp, Artificial
  Synthetic oligonucleotide
atggggcccattcagatttcccctagggaaatctgtaagcgggccccttccag

SEQ ID NO: 270236 - DNA, 55 bp, Artificial
  Synthetic oligonucleotide
atctcgaactgaagggacttatcgccttcgagtctttcttaaaagtatggattta

SEQ ID NO: 270237 - DNA, 51 bp, Artificial
  Synthetic oligonucleotide
gtccccctactgggggacatgagtagcccatttctttagttcccctacggg

SEQ ID NO: 270238 - DNA, 55 bp, Artificial
  Synthetic oligonucleotide
cgcacggatgaattttaacccttctcgtctcccacatggtacttatcaacccaat

SEQ ID NO: 270239 - DNA, 55 bp, Artificial
  Synthetic oligonucleotide
cgtgagaatcctgagtatagaattcgtaccagttctcttagtactaatcgtacta

SEQ ID NO: 270240 - DNA, 53 bp, Artificial
  Synthetic oligonucleotide
ctaaacggccttcctatgcggaacctacacccttagattttcccctcaggaga

SEQ ID NO: 270241 - DNA, 55 bp, Artificial
  Synthetic oligonucleotide
ctcgtagagtaacttaaggtactgataggcaggcccggtcagattcctcaagtac

SEQ ID NO: 270242 - DNA, 53 bp, Artificial
  Synthetic oligonucleotide
tcccaaagggaaatctatggccccatctagttccccttaggggaactagattc

SEQ ID NO: 270243 - DNA, 54 bp, Artificial
  Synthetic oligonucleotide
cacaaccttagtaccaatgttaattaaaggaaatctaggtaattctctcgcacg

SEQ ID NO: 270244 - DNA, 55 bp, Artificial
  Synthetic oligonucleotide
ggcaccgggataagggattatttccttatactaggatagattcgtaatatcaggt

SEQ ID NO: 270245 - DNA, 55 bp, Artificial
  Synthetic oligonucleotide
tagtctaagtgacctccatggctggtattcatttctatctaggcaccgggataag

SEQ ID NO: 270246 - DNA, 53 bp, Artificial
  Synthetic oligonucleotide
ggttcaccgattatcccattcctttcggaatgggtcccttcttatctagttcc

SEQ ID NO: 270247 - DNA, 54 bp, Artificial
  Synthetic oligonucleotide
accatggatattacagtaaagccttagcttaatggtagagtaccggtttgtcaa

SEQ ID NO: 270248 - DNA, 53 bp, Artificial
  Synthetic oligonucleotide
tcacctactcaagttaccctgcgggtaacttgagaagcccatcccttcaggtt

SEQ ID NO: 270249 - DNA, 52 bp, Artificial
  Synthetic oligonucleotide
gggttcgctcttgtaattctagaggcttacactgaggcgccaattactcaat

SEQ ID NO: 270250 - DNA, 52 bp, Artificial
  Synthetic oligonucleotide
attcgtaatatcaggtatcacagtacaactcctatgtttcccgtagggaaac

SEQ ID NO: 270251 - DNA, 51 bp, Artificial
  Synthetic oligonucleotide
gttggaccgtatatccacctttatccgatagcctttacgcttctggtcaca

SEQ ID NO: 270252 - DNA, 51 bp, Artificial
  Synthetic oligonucleotide
atttcccctagggaaatctgtaagcgggccccttccaggtccatatatgga

SEQ ID NO: 270253 - DNA, 53 bp, Artificial
  Synthetic oligonucleotide
gttttccctcaggttcctcaagttccctcttagggaacttgagaatctgaagg

SEQ ID NO: 270254 - DNA, 50 bp, Artificial
  Synthetic oligonucleotide
gttccctaagagggaacttgagggacatgaggccgcgctctcaagcctac

SEQ ID NO: 270255 - DNA, 52 bp, Artificial
  Synthetic oligonucleotide
ggttatctagttttccctcggttcaccgattatcccattcctttcggaatgg

SEQ ID NO: 270256 - DNA, 54 bp, Artificial
  Synthetic oligonucleotide
gggaacatgaggtcccacctcgtttaccttggtaaactaggtcctctcatgtcc

SEQ ID NO: 270257 - DNA, 53 bp, Artificial
  Synthetic oligonucleotide
gaaatctgggtaaattggggacgtataggcaggccggagtgccggttagtaaa

SEQ ID NO: 270258 - DNA, 56 bp, Artificial
  Synthetic oligonucleotide
cttctagtttgctatcagtttacctaaggtaaactggataggcaaactagaagcgc

SEQ ID NO: 270259 - DNA, 54 bp, Artificial
  Synthetic oligonucleotide
ctgaaaaggaggggccgcccattccaggtccatatatggacctggaaggggccc

SEQ ID NO: 270260 - DNA, 56 bp, Artificial
  Synthetic oligonucleotide
ctcgtagggggggatagaattcgtgtagaccaaattcgattagtcatgattgaccc

SEQ ID NO: 270261 - DNA, 60 bp, Artificial
  Synthetic oligonucleotide
ttgatcgtaatattgcatagaatggaagtaaatagaattctggtacaattgagataggtg

SEQ ID NO: 270262 - DNA, 53 bp, Artificial
  Synthetic oligonucleotide
cctgggaaaggttaaatcatccatgtagaccttttaagaaatctactaaccca

SEQ ID NO: 270263 - DNA, 56 bp, Artificial
  Synthetic oligonucleotide
acagattaagggttgtgatactgttgctggcagtatcgggtaatcgttctagatag

SEQ ID NO: 270264 - DNA, 50 bp, Artificial
  Synthetic oligonucleotide
ttaggggaatggtgagtaaagggtaaggtaaattaaaggtcagattaagg

SEQ ID NO: 270265 - DNA, 55 bp, Artificial
  Synthetic oligonucleotide
ttagctaaacctcccattcgtcttacgtcttgttcatctgccatagcatgaatta

SEQ ID NO: 270266 - DNA, 54 bp, Artificial
  Synthetic oligonucleotide
tgtggcgaccctagcctatttaacttataagggttgattaaccaatggcgagtt

SEQ ID NO: 270267 - DNA, 55 bp, Artificial
  Synthetic oligonucleotide
aactaccaatctcttaagtcaaatttaagtgtcctgccagattagactagaaccc

SEQ ID NO: 270268 - DNA, 54 bp, Artificial
  Synthetic oligonucleotide
aactgattgtacagttaatagacctttccctttcgtaagcttgcgggagagaag

SEQ ID NO: 270269 - DNA, 55 bp, Artificial
  Synthetic oligonucleotide
gtaaagcgctcgactccaaaccgagaaactggaagttcaagtctccctcgtcctg

SEQ ID NO: 270270 - DNA, 55 bp, Artificial
  Synthetic oligonucleotide
ggttaacacataagactcatgatcttgtattgatagttcaattctgtcatccgcg

SEQ ID NO: 270271 - DNA, 55 bp, Artificial
  Synthetic oligonucleotide
gggttgtgatactgttgctggcagtatcgggtaatcgttctagataggtcgggaa

SEQ ID NO: 270272 - DNA, 52 bp, Artificial
  Synthetic oligonucleotide
tgtaacgctttaaccccaattacttacttaggttatggggagtgttattcaa

SEQ ID NO: 270273 - DNA, 55 bp, Artificial
  Synthetic oligonucleotide
gctagaatagtaagcttttatcttatcttatcagagttcgagtctctgcgttctc

SEQ ID NO: 270274 - DNA, 54 bp, Artificial
  Synthetic oligonucleotide
gagttaccacattcaaccttccttgttcctcggagtttaggatacctctaacaa

SEQ ID NO: 270275 - DNA, 55 bp, Artificial
  Synthetic oligonucleotide
caactactgttgcaatagtactggatgagctgtggtagggagtgaaaggctaatc

SEQ ID NO: 270276 - DNA, 55 bp, Artificial
  Synthetic oligonucleotide
cttcctggaattgcatcaagtttaagtcctaaggctgggattgcaaaagagtgaa

SEQ ID NO: 270277 - DNA, 55 bp, Artificial
  Synthetic oligonucleotide
ctcctgcattccatgcgtttgaaggacaattacctgtacaatcagttaactcccc

SEQ ID NO: 270278 - DNA, 55 bp, Artificial
  Synthetic oligonucleotide
ctactttattgggccctattcttcgttgcatacttcccattactttacgctcagc

SEQ ID NO: 270279 - DNA, 55 bp, Artificial
  Synthetic oligonucleotide
cggaataccacccatagagaatagggatattgcaagagctaggctaagagtagga

SEQ ID NO: 270280 - DNA, 55 bp, Artificial
  Synthetic oligonucleotide
cctactagtcaacattgtgctataactgcatagctatactatctctcaattgctc

SEQ ID NO: 270281 - DNA, 53 bp, Artificial
  Synthetic oligonucleotide
ccccaattacttacttaggttatggggagtgttattcaagttagcttatgagg

SEQ ID NO: 270282 - DNA, 55 bp, Artificial
  Synthetic oligonucleotide
cattaatcctgttcggaccccttcggagggtcctcattgattatatcaacatgga

SEQ ID NO: 270283 - DNA, 52 bp, Artificial
  Synthetic oligonucleotide
tgccaaagacgtaagttacgccagtttttttttataatagtcttagccgagt

SEQ ID NO: 270284 - DNA, 55 bp, Artificial
  Synthetic oligonucleotide
cacatggaaagctgtaataggtggaccagtacttgcgttaattagtattatacca

SEQ ID NO: 270285 - DNA, 54 bp, Artificial
  Synthetic oligonucleotide
ggtagattgtggatctatataccaaggttcgaacccttgttttcgcccagacct

SEQ ID NO: 270286 - DNA, 54 bp, Artificial
  Synthetic oligonucleotide
cactttacagggatattagtgggtattacgggccgggtgtggctagtttataga

SEQ ID NO: 270287 - DNA, 52 bp, Artificial
  Synthetic oligonucleotide
gctccatggtcaaatggtcaagacattactccttcacagtaaagttaccggt

SEQ ID NO: 270288 - DNA, 50 bp, Artificial
  Synthetic oligonucleotide
tttatactagcaacattaatcctgttcggaccccttcggagggtcctcat

SEQ ID NO: 270289 - DNA, 51 bp, Artificial
  Synthetic oligonucleotide
gtccagggggggttaaatcacccacgtaaagccttttaagcatctaccaac

SEQ ID NO: 270290 - DNA, 60 bp, Artificial
  Synthetic oligonucleotide
gaattctcttctgctaatatctggcattgtagacatatatcttgaagcagtcccgaacga

SEQ ID NO: 270291 - DNA, 57 bp, Artificial
  Synthetic oligonucleotide
aaaatgattaattggcagtttacctggggcgggattctcataaatagtatctgagaa

SEQ ID NO: 270292 - DNA, 59 bp, Artificial
  Synthetic oligonucleotide
ccatgtcattattgcctatagtactatataattcaccacgagtgttatacattaacgct

SEQ ID NO: 270293 - DNA, 56 bp, Artificial
  Synthetic oligonucleotide
ctttacgactgctgttaagtcgaaacatagtcatggtacgggaacgtgctttggag

SEQ ID NO: 270294 - DNA, 55 bp, Artificial
  Synthetic oligonucleotide
caccccaataattatgcaattcactcttagagttaaaataatacgaggtttcacc

SEQ ID NO: 270295 - DNA, 56 bp, Artificial
  Synthetic oligonucleotide
atgaagacggttcagtttatatgaaatttgaaggtattcgattaatggctaaacac

SEQ ID NO: 270296 - DNA, 58 bp, Artificial
  Synthetic oligonucleotide
gtggactaattttggcaagtcatcgacttttgatgtcgactaatgggagttcgagcct

SEQ ID NO: 270297 - DNA, 50 bp, Artificial
  Synthetic oligonucleotide
atgaatcgcgaatagaccgaccaagctcgctcctcccacgcacggcgttg

SEQ ID NO: 270298 - DNA, 50 bp, Artificial
  Synthetic oligonucleotide
atccccacgccacttgtcaccgtagcccccataggttttctcacccgtcg

SEQ ID NO: 270299 - DNA, 50 bp, Artificial
  Synthetic oligonucleotide
atccacgatcctcaagctgtcctggtggccatcccgaccctcattgcact

SEQ ID NO: 270300 - DNA, 50 bp, Artificial
  Synthetic oligonucleotide
atagaccgaccaagctcgctcctcccacgcacggcgttggctgaccttgt

SEQ ID NO: 270301 - DNA, 50 bp, Artificial
  Synthetic oligonucleotide
agtccctgcgaagcgtccgggcctctccgatataataggccatgcccgag

SEQ ID NO: 270302 - DNA, 50 bp, Artificial
  Synthetic oligonucleotide
aggtgtcccttcgcccagcgaagcctacttttgcggtgtcttgcagtcaa

SEQ ID NO: 270303 - DNA, 50 bp, Artificial
  Synthetic oligonucleotide
aggtcaagcccaacgtggcgcgggcactgtacaagaaggagccgccaata

SEQ ID NO: 270304 - DNA, 50 bp, Artificial
  Synthetic oligonucleotide
aggggaagcatgtggacggggaacggtagcaatagggacgcgcttaggca

SEQ ID NO: 270305 - DNA, 50 bp, Artificial
  Synthetic oligonucleotide
agggccagcaaatcacgattgtagtccctgcgaagcgtccgggcctctcc

SEQ ID NO: 270306 - DNA, 50 bp, Artificial
  Synthetic oligonucleotide
aggcacgaggctggatgcctccatggtttgccatttgccgtctcgtttga

SEQ ID NO: 270307 - DNA, 49 bp, Artificial
  Synthetic oligonucleotide
acgattaaaccaaacttccgttttagtagaacgagaaggagtttactac

SEQ ID NO: 270308 - DNA, 50 bp, Artificial
  Synthetic oligonucleotide
aggacgaaaggcggcttgggccatgtaagccaagggtctcagacgggagc

SEQ ID NO: 270309 - DNA, 50 bp, Artificial
  Synthetic oligonucleotide
agctgtccgagaaccgacaagagaacctctggtcccaagatgcgggccgt

SEQ ID NO: 270310 - DNA, 50 bp, Artificial
  Synthetic oligonucleotide
agctcacgccactagccaagggtcctttgctttcacgagcggcccagtag

SEQ ID NO: 270311 - DNA, 58 bp, Artificial
  Synthetic oligonucleotide
gcagccgccctcttgagtagagccgccgcgctatgcgcggcggccccaccttttacct

SEQ ID NO: 270312 - DNA, 54 bp, Artificial
  Synthetic oligonucleotide
gggaaaataaggcaatcgctaaaatcatggttaatacaccgaataaaaccatta

SEQ ID NO: 270313 - DNA, 56 bp, Artificial
  Synthetic oligonucleotide
ggggggcattttaacccacaagagacatagagctgttcattaggctcttaaattac

SEQ ID NO: 270314 - DNA, 55 bp, Artificial
  Synthetic oligonucleotide
ccaccccgtggcactggcctcaatcttaggagttccacaactggggtcctcccag

SEQ ID NO: 270315 - DNA, 56 bp, Artificial
  Synthetic oligonucleotide
gttgttgacaaactcgatgtaattgttgaagacgtgaagtgtgtcgaatatagccg

SEQ ID NO: 270316 - DNA, 56 bp, Artificial
  Synthetic oligonucleotide
tcgagaaagaccaaaggtcgaggagccgctctgcggctccttgaccaagaaaaaag

SEQ ID NO: 270317 - DNA, 55 bp, Artificial
  Synthetic oligonucleotide
cgctctgatgtccgatcgcattttgacactaggtgagctgaatagtcgaaaagag

SEQ ID NO: 270318 - DNA, 55 bp, Artificial
  Synthetic oligonucleotide
cgccccgatccccttatctacaggccgttgacagaaccgcacaacgtcgtgggtc

SEQ ID NO: 270319 - DNA, 51 bp, Artificial
  Synthetic oligonucleotide
atcttaggagttccacaactggggtcctcccagttgttaaacgaggggtcc

SEQ ID NO: 270320 - DNA, 55 bp, Artificial
  Synthetic oligonucleotide
gagagtagcgtttacagagtatcattggataaactgcccatccttcgaccatccg

SEQ ID NO: 270321 - DNA, 55 bp, Artificial
  Synthetic oligonucleotide
cgaggaggataatcacgaaaacgatgatagatgaagacgagtgtcgctacttgcc

SEQ ID NO: 270322 - DNA, 55 bp, Artificial
  Synthetic oligonucleotide
ctgttacggtggttacatcaaacagcaagtcgggaaggtttatttggtaccagca

SEQ ID NO: 270323 - DNA, 55 bp, Artificial
  Synthetic oligonucleotide
atgttcgaagtaatcatgattggtaacagacattcccagcttatagcgtagttca

SEQ ID NO: 270324 - DNA, 55 bp, Artificial
  Synthetic oligonucleotide
ccttggatgtctttagacaacttcaggtatagcttactcccagcccgtgacaggc

SEQ ID NO: 270325 - DNA, 55 bp, Artificial
  Synthetic oligonucleotide
ctcgaatatcgtctatattgtcgtcatccgtttgagtcaatcgagaaatgctcgc

SEQ ID NO: 270326 - DNA, 55 bp, Artificial
  Synthetic oligonucleotide
caaagctcggcctatcaagatagctaagtctcgatctactgttctgataatggag

SEQ ID NO: 270327 - DNA, 55 bp, Artificial
  Synthetic oligonucleotide
ctccactaatggccagtatctcatcaatacatacagcgcggatggttaagtggta

SEQ ID NO: 270328 - DNA, 55 bp, Artificial
  Synthetic oligonucleotide
cctgacaggggcattgaagaggataacgacctctttggctatattgatgaaaacg

SEQ ID NO: 270329 - DNA, 55 bp, Artificial
  Synthetic oligonucleotide
cggacatcaaagcaacacgtaccatttcaccgtttctgtactggtacgttggcat

SEQ ID NO: 270330 - DNA, 59 bp, Artificial
  Synthetic oligonucleotide
attaaagcttcaagatctactaactgcctgtcacgggctgggagtaagctatacctgaa

SEQ ID NO: 270331 - DNA, 55 bp, Artificial
  Synthetic oligonucleotide
caattaatccgtaaataactcctgctcggttaccttggattaaactatgatgagc

SEQ ID NO: 270332 - DNA, 55 bp, Artificial
  Synthetic oligonucleotide
ccggctacgacgattggcggtacaaggtgtgtacgatgcaaggaggcgttccggg

SEQ ID NO: 270333 - DNA, 55 bp, Artificial
  Synthetic oligonucleotide
cacatcatctgtgtctgagagatcacaagtagacatacctgtgtcgattctacgc

SEQ ID NO: 270334 - DNA, 55 bp, Artificial
  Synthetic oligonucleotide
ctatggtatccgatgaagtagtctcggaggtgctctcatcaaaaggggatcgccc

SEQ ID NO: 270335 - DNA, 55 bp, Artificial
  Synthetic oligonucleotide
cacgctagatggtcggggaaagatgggaagtttggtgggtgctagtgaagacgtc

SEQ ID NO: 270336 - DNA, 55 bp, Artificial
  Synthetic oligonucleotide
ccgagttaagtttatgaactagatttagcagtcacctatcatagccacatcctca

SEQ ID NO: 270337 - DNA, 55 bp, Artificial
  Synthetic oligonucleotide
cccggccaaattacgtcttcgtcagcatccaagtgcgcggatggttaagtggtat

SEQ ID NO: 270338 - DNA, 55 bp, Artificial
  Synthetic oligonucleotide
cggccgctgacaacgacaccgatcattgctgtccgcagactgtctcgtctttccc

SEQ ID NO: 270339 - DNA, 51 bp, Artificial
  Synthetic oligonucleotide
cgttaaattaaatctaaaaggcgtttgtactatgggagggaagttgaagga

SEQ ID NO: 270340 - DNA, 55 bp, Artificial
  Synthetic oligonucleotide
ccactggatctcactttatcaagctgtgtctatccacctgattcattccacagaa

SEQ ID NO: 270341 - DNA, 54 bp, Artificial
  Synthetic oligonucleotide
ggcgtcgccattaggataaaaacctacgtgggttttgacttatttagacagata

SEQ ID NO: 270342 - DNA, 55 bp, Artificial
  Synthetic oligonucleotide
ttggcaagtcatcgacttttgatgtcgactaatgggagttcgagccttcccggcc

SEQ ID NO: 270343 - DNA, 55 bp, Artificial
  Synthetic oligonucleotide
aaagggtcctttgccctgccccagtgcttttcgaatggcatcatagctagtttga

SEQ ID NO: 270344 - DNA, 53 bp, Artificial
  Synthetic oligonucleotide
ttatcctcctttccgttaggactttatcaaattaatgtatccgtccttctagg

SEQ ID NO: 270345 - DNA, 55 bp, Artificial
  Synthetic oligonucleotide
ttacaatgaatcggatgtgagttcctactggaactactactcggttatctacttc

SEQ ID NO: 270346 - DNA, 55 bp, Artificial
  Synthetic oligonucleotide
tgggtgagtctgggctaggtggaatagcgaaggaatgtggattagttaaaagcgc

SEQ ID NO: 270347 - DNA, 55 bp, Artificial
  Synthetic oligonucleotide
tggaggaaagaggaactccgagagtagggatggaatctgttgatcctcggaagac

SEQ ID NO: 270348 - DNA, 55 bp, Artificial
  Synthetic oligonucleotide
tctgaaagcaaaacaaatgatcaataggtcctttgcaaatcggggcttcgcttcg

SEQ ID NO: 270349 - DNA, 55 bp, Artificial
  Synthetic oligonucleotide
tcaatgcgaccatctactcttctctggacaagtccgttggatctcgtgtctcccg

SEQ ID NO: 270350 - DNA, 55 bp, Artificial
  Synthetic oligonucleotide
tatctaaagtcctttgatcttaccctcccatacacatttcgcaatgaacgtaccc

SEQ ID NO: 270351 - DNA, 54 bp, Artificial
  Synthetic oligonucleotide
tacgcgtcctataccttgtgtaacggtcggaagagcgaaagaaagggtggtcgc

SEQ ID NO: 270352 - DNA, 58 bp, Artificial
  Synthetic oligonucleotide
agattttattacagagtaataagataattcagtacttgggtcaattattcgttgctca

SEQ ID NO: 270353 - DNA, 55 bp, Artificial
  Synthetic oligonucleotide
gtcattatactccttttgcatacccatggcgcttggtacatccaattgagcttgg

SEQ ID NO: 270354 - DNA, 55 bp, Artificial
  Synthetic oligonucleotide
gtatgctcgagtatcaacatctaatcctacagtatacatatggtgagaccatacg

SEQ ID NO: 270355 - DNA, 49 bp, Artificial
  Synthetic oligonucleotide
ggtcgtagggactcgaaccctaataataccgattaaaagtcgggaactt

SEQ ID NO: 270356 - DNA, 55 bp, Artificial
  Synthetic oligonucleotide
gggtctaaagggtacgtaggctgtatcataagactgaaaggtatcgaactaaatg

SEQ ID NO: 270357 - DNA, 55 bp, Artificial
  Synthetic oligonucleotide
gggctttaggagtttcgggcatatagtgagattatccccatctaataatgagggg

SEQ ID NO: 270358 - DNA, 55 bp, Artificial
  Synthetic oligonucleotide
ggacggatacattaatttgataaagtcctaacggaaaggaggataatgactgtac

SEQ ID NO: 270359 - DNA, 55 bp, Artificial
  Synthetic oligonucleotide
ggaagtcccactggcaacaattagctgaacaggcacctgtcttggacgagagcgt

SEQ ID NO: 270360 - DNA, 55 bp, Artificial
  Synthetic oligonucleotide
gccaaagaggtcgttatcctcttcaatgcccctgtcaggcattctatactactga

SEQ ID NO: 270361 - DNA, 55 bp, Artificial
  Synthetic oligonucleotide
gcagccttagtcttctactgcccataacgatccattcggattgatgcaaatccgg

SEQ ID NO: 270362 - DNA, 55 bp, Artificial
  Synthetic oligonucleotide
gagtgagccatagcagagttcaagagcaatgtataagaaccgatccgattcttcc

SEQ ID NO: 270363 - DNA, 56 bp, Artificial
  Synthetic oligonucleotide
tctacttctcgaaacccttctctacgacctcaattattctcttacacaattcttgg

SEQ ID NO: 270364 - DNA, 54 bp, Artificial
  Synthetic oligonucleotide
catcaagcattctgacatgagagggtcctcgttcaaattgacgatgaaggggac

SEQ ID NO: 270365 - DNA, 54 bp, Artificial
  Synthetic oligonucleotide
agttttgtcacaatttgctccttaccttgagttccaacaagacgacgtttacgc

SEQ ID NO: 270366 - DNA, 53 bp, Artificial
  Synthetic oligonucleotide
acaaggatttagcaacatgttgaacaaggtcaaccactctgcaactgtaaccc

SEQ ID NO: 270367 - DNA, 53 bp, Artificial
  Synthetic oligonucleotide
tggaattcttgcaattcacccgatgtttccatatgatcttacgatcaaagggg

SEQ ID NO: 270368 - DNA, 52 bp, Artificial
  Synthetic oligonucleotide
ggaacgggtgcattaccaggtgtactacaaacaagtcgttaaggtttcaacc

SEQ ID NO: 270369 - DNA, 52 bp, Artificial
  Synthetic oligonucleotide
gacaacttcaggtatagcttactcccagcccgtgacaggcagttagtagatc

SEQ ID NO: 270370 - DNA, 52 bp, Artificial
  Synthetic oligonucleotide
gattatgaacgttcgggttggaaaaggtcgcgttggtgctgggttccctgtg

SEQ ID NO: 270371 - DNA, 52 bp, Artificial
  Synthetic oligonucleotide
cccaaattctaaaataggagaagatcgtagaagtaaataaactcctgcagtt

SEQ ID NO: 270372 - DNA, 51 bp, Artificial
  Synthetic oligonucleotide
agcaacgctagaattcacgccacttagtaacctttatgactgaccaatgct

SEQ ID NO: 270373 - DNA, 51 bp, Artificial
  Synthetic oligonucleotide
ccatatgtatactgtaggattagatgttgatactcgagcatacttcacagc

SEQ ID NO: 270374 - DNA, 57 bp, Artificial
  Synthetic oligonucleotide
tctaatgagatagttgttaagtgagtaatggttttattcggtgtattaaccatgatt

SEQ ID NO: 270375 - DNA, 51 bp, Artificial
  Synthetic oligonucleotide
ttgataataaccattttgagcactatcaaaatatacattgcctccaaatac

SEQ ID NO: 270376 - DNA, 51 bp, Artificial
  Synthetic oligonucleotide
aaatcaagattaccgaaagtccagaaaatagcccaaagaccaatactgaaa

SEQ ID NO: 270377 - DNA, 51 bp, Artificial
  Synthetic oligonucleotide
gttagggattttattatttactggtgttgtatctggggaaggtggtgttac

SEQ ID NO: 270378 - DNA, 51 bp, Artificial
  Synthetic oligonucleotide
cttattaataaggacgggattaacaggtaagtatcctcaccgctactactt

SEQ ID NO: 270379 - DNA, 51 bp, Artificial
  Synthetic oligonucleotide
atacatccaggcttagctacccgtacaagttctttaatgacaataggccat

SEQ ID NO: 270380 - DNA, 50 bp, Artificial
  Synthetic oligonucleotide
agaaatggaggacggtatgcaggtgaggcgcctggcggaggaggtttgta

SEQ ID NO: 270381 - DNA, 50 bp, Artificial
  Synthetic oligonucleotide
acggggttgtttaccgttcgtgcgacgagtgggcacgggtaagatgcggc

SEQ ID NO: 270382 - DNA, 50 bp, Artificial
  Synthetic oligonucleotide
acgcaggcttctacgcccgccttaccgtatggcccccgaactgcgtatac

SEQ ID NO: 270383 - DNA, 50 bp, Artificial
  Synthetic oligonucleotide
acgcacggcgttggctgaccttgtttggcgcgatctggcgaaacgcagtc

SEQ ID NO: 270384 - DNA, 50 bp, Artificial
  Synthetic oligonucleotide
accagccgtgcaaggtcaaccgccgagacctatgcgtccacctatgcctg

SEQ ID NO: 270385 - DNA, 56 bp, Artificial
  Synthetic oligonucleotide
agaggcccgtagggcctctccgtaagtgccaccccgtggcactggcctcaatctta

SEQ ID NO: 270386 - DNA, 50 bp, Artificial
  Synthetic oligonucleotide
aatccacccgaggccacaaattgacccgagggggaataggccgtggtcat

SEQ ID NO: 270387 - DNA, 50 bp, Artificial
  Synthetic oligonucleotide
aagtctagtcgggccagtaaacgcgacgaagcacggccggaacgagacga

SEQ ID NO: 270388 - DNA, 50 bp, Artificial
  Synthetic oligonucleotide
aagggggagacggcacagatgatacaggggccgtggttgcagcaccaaac

SEQ ID NO: 270389 - DNA, 50 bp, Artificial
  Synthetic oligonucleotide
aagggccgacggttggcgcaggattcattcgacgcttgccaccgactaga

SEQ ID NO: 270390 - DNA, 50 bp, Artificial
  Synthetic oligonucleotide
aaggacctcaccagacgagcaagcgagattgctgtcagtgcggccacgca

SEQ ID NO: 270391 - DNA, 50 bp, Artificial
  Synthetic oligonucleotide
tgcggaaagtgaaatcaaagtcgcatagcagccacattgttgtcgatcat

SEQ ID NO: 270392 - DNA, 50 bp, Artificial
  Synthetic oligonucleotide
aagagaacctctggtcccaagatgcgggccgtcggacgatgggcagacaa

SEQ ID NO: 270393 - DNA, 50 bp, Artificial
  Synthetic oligonucleotide
aacggataataacaacctaatggcaacctaatagcaatttaatggcaatc

SEQ ID NO: 270394 - DNA, 50 bp, Artificial
  Synthetic oligonucleotide
aacgagagcgtgtgcgaggtcggaccatgctggctgaggctcaagaggtc

SEQ ID NO: 270395 - DNA, 50 bp, Artificial
  Synthetic oligonucleotide
aacacggcagcgttcggacaggtccagacaccggtttgagtcacgcagat

SEQ ID NO: 270396 - DNA, 48 bp, Artificial
  Synthetic oligonucleotide
aatagattaaggggttgtaacttaatcggtaaagttcccgacttttaa

SEQ ID NO: 270397 - DNA, 50 bp, Artificial
  Synthetic oligonucleotide
ttactgcagcttcccacgtcaaaggacgagccctttctacttcgtaagcg

SEQ ID NO: 270398 - DNA, 50 bp, Artificial
  Synthetic oligonucleotide
aaaactcgctggaggcagccaccgttcgcttggagcataccgcaaagtcc

SEQ ID NO: 270399 - DNA, 50 bp, Artificial
  Synthetic oligonucleotide
ccgttggacaggcaaacgactcaatttgtatgctcccgaaatcttgttaa

SEQ ID NO: 270400 - DNA, 50 bp, Artificial
  Synthetic oligonucleotide
cacctgtgattgatcgtggccgctttggacctgagcgactcgtgccccaa

SEQ ID NO: 270401 - DNA, 50 bp, Artificial
  Synthetic oligonucleotide
caagctcgctcctcccacgcacggcgttggctgaccttgtttggcgcgat

SEQ ID NO: 270402 - DNA, 50 bp, Artificial
  Synthetic oligonucleotide
attggggtgcggtcgcttcgtaaccctctcggatctcacgttcgttggga

SEQ ID NO: 270403 - DNA, 50 bp, Artificial
  Synthetic oligonucleotide
ctctgcagtaaccgttgtccgagttattgttgctcccaagagtcttttca

SEQ ID NO: 270404 - DNA, 50 bp, Artificial
  Synthetic oligonucleotide
atgggacgagggggaggcatcggatgaggcgtcagttgaaaagtgggtgg

SEQ ID NO: 270405 - DNA, 50 bp, Artificial
  Synthetic oligonucleotide
atgccgaccgctgacagggaagcgtcctcggtaaaggacgttggctgagg

SEQ ID NO: 270406 - DNA, 50 bp, Artificial
  Synthetic oligonucleotide
atgccacgcaaggagattacgcccaccgatggatttgcacccccgatcgc

SEQ ID NO: 270407 - DNA, 58 bp, Artificial
  Synthetic oligonucleotide
aatgctaacctaaaataggtctaccaagtatcccgctagatctagtagctcctctaga

SEQ ID NO: 270408 - DNA, 56 bp, Artificial
  Synthetic oligonucleotide
gtgttgtttaagtgcatatccactaaagtattctcgattaagcttactagaggcac

SEQ ID NO: 270409 - DNA, 55 bp, Artificial
  Synthetic oligonucleotide
tgtcccacttttaggcaatgaaggagcctgctcaagtggcgtacttgcttcaagc

SEQ ID NO: 270410 - DNA, 55 bp, Artificial
  Synthetic oligonucleotide
tgccaactaatctatcacaggagcttactagttcgttaactagactagctactag

SEQ ID NO: 270411 - DNA, 55 bp, Artificial
  Synthetic oligonucleotide
tctataggctatgtatgaattcagccggtccctctaatagttctggaggagctac

SEQ ID NO: 270412 - DNA, 55 bp, Artificial
  Synthetic oligonucleotide
tccgcaggaaatctaatgaatataagctcaatatcggggtttaatatccgtacgt

SEQ ID NO: 270413 - DNA, 55 bp, Artificial
  Synthetic oligonucleotide
agactggatagattctgtactgtttattgccaaagcaagcaggataaacccaaca

SEQ ID NO: 270414 - DNA, 55 bp, Artificial
  Synthetic oligonucleotide
caactatctaattacgccccgctaaaacttttgtaagcgtgcctatactggtgac

SEQ ID NO: 270415 - DNA, 55 bp, Artificial
  Synthetic oligonucleotide
gtggactctcttcaactgaagtactaagtctgtgatgtatgcttcacagtccgtc

SEQ ID NO: 270416 - DNA, 55 bp, Artificial
  Synthetic oligonucleotide
gtcatgtgatttatgctcagatatgaaggaagtcttgttattgtacaacagccgg

SEQ ID NO: 270417 - DNA, 55 bp, Artificial
  Synthetic oligonucleotide
gtaacctgattgtattagcacacctgaaggtagagttcaaggtacaggtagattc

SEQ ID NO: 270418 - DNA, 60 bp, Artificial
  Synthetic oligonucleotide
aatgtagtagttactattgcatctactagaggctctactttattgctagccttcatcgtt

SEQ ID NO: 270419 - DNA, 55 bp, Artificial
  Synthetic oligonucleotide
gggctaatcccaacacgattccaccttctattccctgtatagtgttactgaatac

SEQ ID NO: 270420 - DNA, 53 bp, Artificial
  Synthetic oligonucleotide
ggattgacacttaggttccttagcttaactggtaaagtgtacttttgataagg

SEQ ID NO: 270421 - DNA, 55 bp, Artificial
  Synthetic oligonucleotide
cccgtgctttgacgatacataagcagttaggtcacttataaattggtaggtaagt

SEQ ID NO: 270422 - DNA, 55 bp, Artificial
  Synthetic oligonucleotide
cctgttcaagtcaggatatacaccctagcgaataataaacacggttaaagagcta

SEQ ID NO: 270423 - DNA, 55 bp, Artificial
  Synthetic oligonucleotide
cccaaaagtggaaagactgcggatagaaggataatattgttacctacgtgataat

SEQ ID NO: 270424 - DNA, 55 bp, Artificial
  Synthetic oligonucleotide
cgctgtgcttataaggaatagagctccacatattatgaatacaataatcaacggg

SEQ ID NO: 270425 - DNA, 55 bp, Artificial
  Synthetic oligonucleotide
ctagagccgtccgttgccgaacttagaaaacatgttaaggatggttacacacagc

SEQ ID NO: 270426 - DNA, 55 bp, Artificial
  Synthetic oligonucleotide
ctattgcatctactagaggctctactttattgctagccttcatcgtttctattgc

SEQ ID NO: 270427 - DNA, 55 bp, Artificial
  Synthetic oligonucleotide
ctcctgaagaattcctattatcataacgtgtttgcagagtatccgctatgctatg

SEQ ID NO: 270428 - DNA, 55 bp, Artificial
  Synthetic oligonucleotide
ctgcagttacagctacacacttacacgaaatctttgagtggttaaatctacttgt

SEQ ID NO: 270429 - DNA, 60 bp, Artificial
  Synthetic oligonucleotide
taggctgaggctctaaagtgtatccgtcactagcagatgatagatgaccaaatgtagtag

SEQ ID NO: 270430 - DNA, 55 bp, Artificial
  Synthetic oligonucleotide
ctggcttgtaaaatagctacggaaattctgagtccctgtacactagtagggctta

SEQ ID NO: 270431 - DNA, 55 bp, Artificial
  Synthetic oligonucleotide
gaggacttgcactgtcctggaagtatacacctcatggctgaggtgcgtccagtga

SEQ ID NO: 270432 - DNA, 52 bp, Artificial
  Synthetic oligonucleotide
cacctttacaccaccttacttcgtatcaagctaagagtttactttcgtaaaa

SEQ ID NO: 270433 - DNA, 55 bp, Artificial
  Synthetic oligonucleotide
gcacgttataagcattgtataagttactccccatgttatcacccgctagtgtttg

SEQ ID NO: 270434 - DNA, 55 bp, Artificial
  Synthetic oligonucleotide
gcgagtaagaaccatggatctgagttaaataacgtgcataactcagcaatatcta

SEQ ID NO: 270435 - DNA, 54 bp, Artificial
  Synthetic oligonucleotide
gaaagccgcactcgaatgcactgtctttctcctcatagggattatgaggtgcaa

SEQ ID NO: 270436 - DNA, 52 bp, Artificial
  Synthetic oligonucleotide
tcggatcgtagccggcctaactcgaagatctatattataacctaagtactat

SEQ ID NO: 270437 - DNA, 54 bp, Artificial
  Synthetic oligonucleotide
cctttctacctgcattgtagttgtaagtcattaaggcggttttaatttgactta

SEQ ID NO: 270438 - DNA, 52 bp, Artificial
  Synthetic oligonucleotide
gttcttgctaaactccaatattaagggtacggacaaattgtaataaagggta

SEQ ID NO: 270439 - DNA, 55 bp, Artificial
  Synthetic oligonucleotide
gatatgcttgtacttaggttcaatagacctttctctaaaccaaaaggtcctacta

SEQ ID NO: 270440 - DNA, 57 bp, Artificial
  Synthetic oligonucleotide
ccctctgtgtgataacctaccgtaacacctaacaaataacctacagatacatccatc

SEQ ID NO: 270441 - DNA, 56 bp, Artificial
  Synthetic oligonucleotide
tgacgataaaccacccaataggaagtatgtcaaaccactagcagttgcggtttccg

SEQ ID NO: 270442 - DNA, 56 bp, Artificial
  Synthetic oligonucleotide
taaaccgtccaagataggagtaggatatacacccaatataactgtcaaggatacta

SEQ ID NO: 270443 - DNA, 60 bp, Artificial
  Synthetic oligonucleotide
agatagtccactgtctactgaagatagtccactgtctatgatgtcagacagtgaattctt

SEQ ID NO: 270444 - DNA, 59 bp, Artificial
  Synthetic oligonucleotide
gatagacggaagtcgtaaaggactgcgagttgattactcgagtgaacataacgcattat

SEQ ID NO: 270445 - DNA, 55 bp, Artificial
  Synthetic oligonucleotide
cggcctgtacataagaccacagaggaggcgtccaagggtcttcgaatgcatggac

SEQ ID NO: 270446 - DNA, 55 bp, Artificial
  Synthetic oligonucleotide
cggcttctgcccaattaaatcgcaacgcttcacgaaatgaaaaggtccctacatc

SEQ ID NO: 270447 - DNA, 55 bp, Artificial
  Synthetic oligonucleotide
cgggaataacgactgggaatggtagaagcgccatatcactactggcgccatgcac

SEQ ID NO: 270448 - DNA, 55 bp, Artificial
  Synthetic oligonucleotide
acctgacgagactaaaatactaacacatgtagcggccatgaggcttcgacaactc

SEQ ID NO: 270449 - DNA, 53 bp, Artificial
  Synthetic oligonucleotide
ccgtaatccctttgcttcttgggaatagtatagggcaaacggccggcgggctc

SEQ ID NO: 270450 - DNA, 55 bp, Artificial
  Synthetic oligonucleotide
ccggattctgttactgagattaaaccaccgtctactgaatattggacgctctcag

SEQ ID NO: 270451 - DNA, 55 bp, Artificial
  Synthetic oligonucleotide
cggggatattcgcatgtatcagtgagtcccacaggaccgcggcaaacacgttgcc

SEQ ID NO: 270452 - DNA, 55 bp, Artificial
  Synthetic oligonucleotide
cggggatcggtgtgagtttgctcagccctcgccgtgtcactaatatactctgcgc

SEQ ID NO: 270453 - DNA, 55 bp, Artificial
  Synthetic oligonucleotide
acgtgccaagggttctcgccagattgcgtctgtagaatggcgaatgtacgtttgg

SEQ ID NO: 270454 - DNA, 55 bp, Artificial
  Synthetic oligonucleotide
cctcggttggagactgccgagcgaatagactcgtggcgttcaatagagttcacac

SEQ ID NO: 270455 - DNA, 59 bp, Artificial
  Synthetic oligonucleotide
cttgcgccgtaaaaggcgtggcgcaaagctattattatatagtgttaccagaattcatc

SEQ ID NO: 270456 - DNA, 55 bp, Artificial
  Synthetic oligonucleotide
cgaaaagattcacaaacgcaaatcacgatgctactttcagtcttacgataaggcg

SEQ ID NO: 270457 - DNA, 55 bp, Artificial
  Synthetic oligonucleotide
cgaagcgtctatggatactgcccgacagctcgtgtcgcttcatggtcacctttcg

SEQ ID NO: 270458 - DNA, 55 bp, Artificial
  Synthetic oligonucleotide
cgacaaatgttctcgcgatgaagctcaggtcattctcaaaggacacctcccagac

SEQ ID NO: 270459 - DNA, 55 bp, Artificial
  Synthetic oligonucleotide
cgacgagaaatcccagtccaccctgaggagagaggagctgttgcgagttccgtac

SEQ ID NO: 270460 - DNA, 55 bp, Artificial
  Synthetic oligonucleotide
cgagatcgataggattgctcacgttcgagggtatccatgaacctcctttgttcgt

SEQ ID NO: 270461 - DNA, 55 bp, Artificial
  Synthetic oligonucleotide
acggaccacatgtagaagatcgaatttgtgccaggggacgtcgggtatgggatat

SEQ ID NO: 270462 - DNA, 55 bp, Artificial
  Synthetic oligonucleotide
cgagtggcctcgcttagacgcgactgcctgagtcatgatcgacatcgttgtgtga

SEQ ID NO: 270463 - DNA, 55 bp, Artificial
  Synthetic oligonucleotide
cgatgcgcaatggcactctacatgctgataattcacggtacgacatactacacgc

SEQ ID NO: 270464 - DNA, 55 bp, Artificial
  Synthetic oligonucleotide
acgttgactcacatccaaagaacgttacctccggctaagcacaggcactcactac

SEQ ID NO: 270465 - DNA, 55 bp, Artificial
  Synthetic oligonucleotide
cgcacacctcggtaatgacagaatgtcaagccatgcgtatacagaggttcaacaa

SEQ ID NO: 270466 - DNA, 60 bp, Artificial
  Synthetic oligonucleotide
tctgaaccatagtttacataatcactgaacgctatatgtataactttattaataggttgc

SEQ ID NO: 270467 - DNA, 55 bp, Artificial
  Synthetic oligonucleotide
cgcacgtacgcattgaccccatataacacgtcttctctagccttggctaaagact

SEQ ID NO: 270468 - DNA, 55 bp, Artificial
  Synthetic oligonucleotide
cgcagccgtgtccacttactaaagataatcataaccattcatcctcgagcactcc

SEQ ID NO: 270469 - DNA, 55 bp, Artificial
  Synthetic oligonucleotide
cgcatcacgaaaggtctaattgatgtgtaactctagacggcgtttggccatagac

SEQ ID NO: 270470 - DNA, 55 bp, Artificial
  Synthetic oligonucleotide
cgcatccgtcaatgtcgcagaacagatttgggtcagaggcaagtcgcaagtctcc

SEQ ID NO: 270471 - DNA, 55 bp, Artificial
  Synthetic oligonucleotide
actagcaaacgtaccatatggcggatagacgtcagtcacgttagtattgtgagcg

SEQ ID NO: 270472 - DNA, 55 bp, Artificial
  Synthetic oligonucleotide
cgccgtcgttcgtgctccaattttgagtcgcaaaaggatctgatttcgtctggcg

SEQ ID NO: 270473 - DNA, 55 bp, Artificial
  Synthetic oligonucleotide
ccgagcgggataaatacttggtcacctgatgaatcgaacgtcagcaagtgaactc

SEQ ID NO: 270474 - DNA, 55 bp, Artificial
  Synthetic oligonucleotide
agacccttctggcagctgctctcactatcccagtcgcggtcgtatcatggagtga

SEQ ID NO: 270475 - DNA, 55 bp, Artificial
  Synthetic oligonucleotide
ctcgctcttcgctatgttaccagtgtcttggttgtcaaagaatgggagttggatg

SEQ ID NO: 270476 - DNA, 55 bp, Artificial
  Synthetic oligonucleotide
ccgagccaagccgcgtacgccaactcaagagccgatttatccagtgggccacatc

SEQ ID NO: 270477 - DNA, 54 bp, Artificial
  Synthetic oligonucleotide
ttcattagggaatcaggaggctcgagccccggggggggcaactcgatataaact

SEQ ID NO: 270478 - DNA, 55 bp, Artificial
  Synthetic oligonucleotide
ccgaccttgtgatctggactgtgtaagtaacacgatatgcgctggcatacgaacg

SEQ ID NO: 270479 - DNA, 55 bp, Artificial
  Synthetic oligonucleotide
ctctatctcgccaacaccccaccctaggtcgcattggatctgactcgatcgatgg

SEQ ID NO: 270480 - DNA, 55 bp, Artificial
  Synthetic oligonucleotide
ctggcattcctgcgtaatcctagaccgcctttcttaggcagttcgaggtcctgcc

SEQ ID NO: 270481 - DNA, 55 bp, Artificial
  Synthetic oligonucleotide
ctgtgaccatcgcgcctgtagtaaacacgcgtcttgctcgcaaacaacacttagc

SEQ ID NO: 270482 - DNA, 55 bp, Artificial
  Synthetic oligonucleotide
ctgtgagggcgctggaaggagaacttgaatcactgtagggctcggggtagttatc

SEQ ID NO: 270483 - DNA, 55 bp, Artificial
  Synthetic oligonucleotide
ctgttcgctatacttcctttcaatctgaacctgggtctcaaagggtctatggagt

SEQ ID NO: 270484 - DNA, 55 bp, Artificial
  Synthetic oligonucleotide
cccttcacgaactttgcgccatatctccttgagggtcgttgtcttgggacgttgg

SEQ ID NO: 270485 - DNA, 55 bp, Artificial
  Synthetic oligonucleotide
ccctggatacctaccggaccacccattctacaatgaagcgtcaatcgtcattcgc

SEQ ID NO: 270486 - DNA, 55 bp, Artificial
  Synthetic oligonucleotide
cttgatgcctcgcagaatggagctcaagaactctttggagtctgatacggttctc

SEQ ID NO: 270487 - DNA, 55 bp, Artificial
  Synthetic oligonucleotide
ctttagtgcggttatagagcgaggaatgagcgagtagcaagttcttgcccgggta

SEQ ID NO: 270488 - DNA, 54 bp, Artificial
  Synthetic oligonucleotide
gtaatcctaaataattgttattagactcgactttacaataataaaatccgaata

SEQ ID NO: 270489 - DNA, 55 bp, Artificial
  Synthetic oligonucleotide
ctttggttagacgaagtctcagcgagctaaggaatcagcaagctccgacccctgc

SEQ ID NO: 270490 - DNA, 53 bp, Artificial
  Synthetic oligonucleotide
gaaaccaacgctaaggcgccgcttttccacaacgttaaaggcactcgaaatgg

SEQ ID NO: 270491 - DNA, 55 bp, Artificial
  Synthetic oligonucleotide
ccctactgagtactctaccctacccattcgcccatatcgacaatcgcatgtcgac

SEQ ID NO: 270492 - DNA, 55 bp, Artificial
  Synthetic oligonucleotide
cggggttaccattcataccacatggcctcgtatatgtaagtgctctagcgtccag

SEQ ID NO: 270493 - DNA, 55 bp, Artificial
  Synthetic oligonucleotide
cggtcctacagtcacgcccttgcatttactagccgaccaagccgattcggtcgac

SEQ ID NO: 270494 - DNA, 55 bp, Artificial
  Synthetic oligonucleotide
cggtcgtattacagcgactctaaaccgcacgtggttccaccatgaaactatccgt

SEQ ID NO: 270495 - DNA, 55 bp, Artificial
  Synthetic oligonucleotide
ccgctttcatgcagcgaaatataacgatatcttgcgacttgctcacaggtccggt

SEQ ID NO: 270496 - DNA, 55 bp, Artificial
  Synthetic oligonucleotide
cgtctgtttgttgctagacagagaattgaacgagggatgagcctcgatctccctc

SEQ ID NO: 270497 - DNA, 55 bp, Artificial
  Synthetic oligonucleotide
cgtgtcgctaacgacataaaccaatcagttccagttacatggtctgacattggtc

SEQ ID NO: 270498 - DNA, 55 bp, Artificial
  Synthetic oligonucleotide
ctacacgctatcgcgtctcgtctaagtctgcttagtaggcatgaacgtccaaact

SEQ ID NO: 270499 - DNA, 60 bp, Artificial
  Synthetic oligonucleotide
gtaaccataatcgaataatttgatagatcaggctagatagcttattactgcttgcgagtc

SEQ ID NO: 270500 - DNA, 55 bp, Artificial
  Synthetic oligonucleotide
ctacaggtagtacgatagcgttgatatcaccttgggttttccctgtcagtggctg

SEQ ID NO: 270501 - DNA, 55 bp, Artificial
  Synthetic oligonucleotide
ctacgctctggtgcattgtcggctttaatctcgatctaccttgccgactacctag

SEQ ID NO: 270502 - DNA, 55 bp, Artificial
  Synthetic oligonucleotide
ctacgtaggtaagttaaacatgctcatcgattggcattattataacgtgggtagg

SEQ ID NO: 270503 - DNA, 55 bp, Artificial
  Synthetic oligonucleotide
ctagacaggaaagacgtcgtgggatctcctcatgaccgtgaataatggcccgggg

SEQ ID NO: 270504 - DNA, 55 bp, Artificial
  Synthetic oligonucleotide
ccgctaaacgccgatccagaaccaaccaacagcataacaagacggaaccgaagag

SEQ ID NO: 270505 - DNA, 55 bp, Artificial
  Synthetic oligonucleotide
ctagccttttggaatgaactgcccgcagacgcagggtacagcagagtccatcatc

SEQ ID NO: 270506 - DNA, 55 bp, Artificial
  Synthetic oligonucleotide
ctattactgcgaggcaaacgagaggtaaggctagcttcgctagccctttcggagc

SEQ ID NO: 270507 - DNA, 55 bp, Artificial
  Synthetic oligonucleotide
ctcaacgcctcagccgttatgaccgcattgcatcgcctcacttcaacccaacatc

SEQ ID NO: 270508 - DNA, 55 bp, Artificial
  Synthetic oligonucleotide
ctcaaggataccaggtcaatgctgaggatatcggtacgttgattacgcattgggg

SEQ ID NO: 270509 - DNA, 55 bp, Artificial
  Synthetic oligonucleotide
ctcacttgtcagggagccttggctagcacaaatactagcccataatgacaacgcc

SEQ ID NO: 270510 - DNA, 54 bp, Artificial
  Synthetic oligonucleotide
atcattacctattaacttacctatgatagttaaacctaaagagtacactattac

SEQ ID NO: 270511 - DNA, 55 bp, Artificial
  Synthetic oligonucleotide
ctccacaagcctacattctcgcctgacagaactccgaacctcttgttgcttgcta

SEQ ID NO: 270512 - DNA, 55 bp, Artificial
  Synthetic oligonucleotide
gtttcgctggaggcaggaaggttatcgattgtaagtgacactcgggcatcggttg

SEQ ID NO: 270513 - DNA, 54 bp, Artificial
  Synthetic oligonucleotide
aaaccagctgggacgggtccgacttctccgttggcaccgacagggagaagccag

SEQ ID NO: 270514 - DNA, 55 bp, Artificial
  Synthetic oligonucleotide
gttgagatccgtcggctcgtcagtgctgcgagacctagatgggccccgtggagac

SEQ ID NO: 270515 - DNA, 55 bp, Artificial
  Synthetic oligonucleotide
gttcagggttggcattggcagccataaatgtatcgactgtgacaacaggaccttg

SEQ ID NO: 270516 - DNA, 53 bp, Artificial
  Synthetic oligonucleotide
gttacaaagggccttgacactacccacgttgcctgtttgcgtgtctttcccgg

SEQ ID NO: 270517 - DNA, 55 bp, Artificial
  Synthetic oligonucleotide
gtgtcgtttacccgcccaaagatgtctcctacctgcccgagtacaatgccgatcg

SEQ ID NO: 270518 - DNA, 55 bp, Artificial
  Synthetic oligonucleotide
gtggcgatgaacagtaaggctccttcctctctaactaatagtggcacgtttgact

SEQ ID NO: 270519 - DNA, 55 bp, Artificial
  Synthetic oligonucleotide
gtgcctgtgtcttgtgatactgttcgaaccattccggagaaaagatgctaaatag

SEQ ID NO: 270520 - DNA, 55 bp, Artificial
  Synthetic oligonucleotide
agtttcagcgtgttcaaataagtatcaggcatgcagtaatagtcgagggttccct

SEQ ID NO: 270521 - DNA, 53 bp, Artificial
  Synthetic oligonucleotide
ccctaattccctaacgaagtgtatccctacacttcgttagggaataggataca

SEQ ID NO: 270522 - DNA, 55 bp, Artificial
  Synthetic oligonucleotide
gtgactgtgaaacggaacatgaacactgtccccaacggcactccaccgcgctgcc

SEQ ID NO: 270523 - DNA, 55 bp, Artificial
  Synthetic oligonucleotide
gtgacgatctcaaaagcttggatggcaccgttggcagtgggtgggttctcggtga

SEQ ID NO: 270524 - DNA, 55 bp, Artificial
  Synthetic oligonucleotide
gtcttgtgccatcatgtccctctcgtaacacccggcgaatgtcaagcttactgac

SEQ ID NO: 270525 - DNA, 55 bp, Artificial
  Synthetic oligonucleotide
gtcttctgcgacggtcaggtcctacgcactcagcagcgctccgaatggcgcaaac

SEQ ID NO: 270526 - DNA, 55 bp, Artificial
  Synthetic oligonucleotide
gtctcactcaggacgatcgcttctacacggccgttcacgagattctgaagaggac

SEQ ID NO: 270527 - DNA, 55 bp, Artificial
  Synthetic oligonucleotide
gtctattcctgtcgaggagactgttgcggctacgatgcctgttcctctcacggcc

SEQ ID NO: 270528 - DNA, 55 bp, Artificial
  Synthetic oligonucleotide
gtctatctcaactacgcaactggagatcaggacccgatatcgcattatgggtccg

SEQ ID NO: 270529 - DNA, 55 bp, Artificial
  Synthetic oligonucleotide
ggtctgttgagacactcacgaaccaacaacgactgtctgttagttcaatctgata

SEQ ID NO: 270530 - DNA, 55 bp, Artificial
  Synthetic oligonucleotide
ggtgatctttgcgcatgccgtatacccaggtagcgaaggattgggcaggcactcg

SEQ ID NO: 270531 - DNA, 55 bp, Artificial
  Synthetic oligonucleotide
ggtgcacttacagtagctccaccaactgacggtgagtccatcgccacgtcttcgc

SEQ ID NO: 270532 - DNA, 52 bp, Artificial
  Synthetic oligonucleotide
atgtttaaaagtttctaaatctatagtaccaatattttgattaacactaggt

SEQ ID NO: 270533 - DNA, 52 bp, Artificial
  Synthetic oligonucleotide
ggtgggagcacgaactcgtaagctttgaggggaaactaaaggtggaacttaa

SEQ ID NO: 270534 - DNA, 55 bp, Artificial
  Synthetic oligonucleotide
ggttcaggcgctgcctcagaagtagcagcaggggtctccggcttagactcgacag

SEQ ID NO: 270535 - DNA, 55 bp, Artificial
  Synthetic oligonucleotide
ggttgtcgacgagccaggctcttctgagatactgtatcgaattagttcactgtcg

SEQ ID NO: 270536 - DNA, 55 bp, Artificial
  Synthetic oligonucleotide
gtaaaccaacgcatttgtcagtacagcaacgagacctcatcatgacagtcatgcc

SEQ ID NO: 270537 - DNA, 55 bp, Artificial
  Synthetic oligonucleotide
gtacacgaaatggcccgtccctagccccgaggttatcaacgcgaagctatacgac

SEQ ID NO: 270538 - DNA, 55 bp, Artificial
  Synthetic oligonucleotide
ttcaaactcgatgagtaatcgacttgagcagggcctacggtaacggaccaactac

SEQ ID NO: 270539 - DNA, 55 bp, Artificial
  Synthetic oligonucleotide
gtacataagcctgtagaaacccctcttgttagatctagatagcctgttgcccggc

SEQ ID NO: 270540 - DNA, 55 bp, Artificial
  Synthetic oligonucleotide
gtacgatatcccgtcccacaggtcaactggtctctaacaacaacacgttcaggac

SEQ ID NO: 270541 - DNA, 55 bp, Artificial
  Synthetic oligonucleotide
gtagactggtagcgcaccgtttgccattcgcctccaaaccggagtacggctctgc

SEQ ID NO: 270542 - DNA, 55 bp, Artificial
  Synthetic oligonucleotide
gtatcgtgtcaaatgggatacaagatgtaaccttcaactgtgccggttatccgtg

SEQ ID NO: 270543 - DNA, 58 bp, Artificial
  Synthetic oligonucleotide
ttgcgtatacgaagtctcttcgtgaaacgaatagcgccatatccctccgggtacgcag

SEQ ID NO: 270544 - DNA, 53 bp, Artificial
  Synthetic oligonucleotide
agccttgattctcggagacaccttttgcctaataggggctgggttaatttcgg

SEQ ID NO: 270545 - DNA, 55 bp, Artificial
  Synthetic oligonucleotide
gtcgtccctggtacactgaaaagcgttggggtgtttgctaagcatgggaccagca

SEQ ID NO: 270546 - DNA, 55 bp, Artificial
  Synthetic oligonucleotide
cagtcaccagtgtagtgtttctcgaggtcagcgtacgagtcgccggtataactaa

SEQ ID NO: 270547 - DNA, 55 bp, Artificial
  Synthetic oligonucleotide
tgtttccccgtgtgcaccaaccaattataacaccactccattcacgctcctcgag

SEQ ID NO: 270548 - DNA, 55 bp, Artificial
  Synthetic oligonucleotide
tgcttgacagatgcgatccgtggcctttagctgggacgaagcctcatagtcgcgg

SEQ ID NO: 270549 - DNA, 55 bp, Artificial
  Synthetic oligonucleotide
tgctggtccaagactaaaagtctccattgagagggatctgacggcgttgtctcac

SEQ ID NO: 270550 - DNA, 55 bp, Artificial
  Synthetic oligonucleotide
tgcatctttctaaggtccacgccaagtatttgacggataaacggcgccccttagg

SEQ ID NO: 270551 - DNA, 52 bp, Artificial
  Synthetic oligonucleotide
aggtaccgagtttactgaagttccgacttcccctacggttagctgtccgtgc

SEQ ID NO: 270552 - DNA, 55 bp, Artificial
  Synthetic oligonucleotide
agtactttcatactatcgtcagaagagtgcttatacggcgtcagatgcaatgggg

SEQ ID NO: 270553 - DNA, 55 bp, Artificial
  Synthetic oligonucleotide
tctcttaactcattgaggtatccggccactgacacgacatgtaggcgcaacggca

SEQ ID NO: 270554 - DNA, 54 bp, Artificial
  Synthetic oligonucleotide
cgggggattaatatctttcctacctttaacctattctgtgatattaatcgctag

SEQ ID NO: 270555 - DNA, 60 bp, Artificial
  Synthetic oligonucleotide
atgataatctttatacacctggtgatcatttagatagtaatatataccaaaatgtggaag

SEQ ID NO: 270556 - DNA, 55 bp, Artificial
  Synthetic oligonucleotide
tctactcacccgggtgcctcaaaacggaccccaagcactgatggtctgcgaggta

SEQ ID NO: 270557 - DNA, 55 bp, Artificial
  Synthetic oligonucleotide
tctaagatctctagctcaggagaaatcttccattcagcacgctcatccccagtcg

SEQ ID NO: 270558 - DNA, 55 bp, Artificial
  Synthetic oligonucleotide
tcgtttgcggcctcgtgttggctctagtaagacctctgacgtcgacgcgactgag

SEQ ID NO: 270559 - DNA, 55 bp, Artificial
  Synthetic oligonucleotide
tcgtcgtagacgaagtctccgggattagttagccttctgatgagtcgaaaggtcg

SEQ ID NO: 270560 - DNA, 55 bp, Artificial
  Synthetic oligonucleotide
tcgtagatggtaagtcgggtcttagacacttgacgaggaaagtcatctcgcaagg

SEQ ID NO: 270561 - DNA, 53 bp, Artificial
  Synthetic oligonucleotide
tcgggctggtaaacaaaggaacgtttgtcgtatcctggttttgagtttgaagc

SEQ ID NO: 270562 - DNA, 55 bp, Artificial
  Synthetic oligonucleotide
tcggcacctacgtagtatcaatcggtgaaaatacacgagagacgatcaaatacag

SEQ ID NO: 270563 - DNA, 55 bp, Artificial
  Synthetic oligonucleotide
caaagcagattagccagtaagatggtcacaagaatacgtgaagcgagtgcacgag

SEQ ID NO: 270564 - DNA, 55 bp, Artificial
  Synthetic oligonucleotide
agggacgatcttcttactccggtccggtaacacacccatgagttgttcgtatggc

SEQ ID NO: 270565 - DNA, 55 bp, Artificial
  Synthetic oligonucleotide
tggcagaagtatgataacggcacactgggtcggctattcatttatcacacgagag

SEQ ID NO: 270566 - DNA, 59 bp, Artificial
  Synthetic oligonucleotide
gtgcagtagggttgaccctctctccgatggcgattctggagtccgagcttccctaacga

SEQ ID NO: 270567 - DNA, 55 bp, Artificial
  Synthetic oligonucleotide
gtttcggagtggaacatcgcgaatcattgtccgagctctgttacttcgtgtgtgt

SEQ ID NO: 270568 - DNA, 55 bp, Artificial
  Synthetic oligonucleotide
cagctccgagtgatgcttcgaactgaacgtctaggtctcaacccagagacgcggg

SEQ ID NO: 270569 - DNA, 55 bp, Artificial
  Synthetic oligonucleotide
cacttgagttgagacagcttaattcagccgatcttctcacagcatgcaacttggg

SEQ ID NO: 270570 - DNA, 55 bp, Artificial
  Synthetic oligonucleotide
caccccataagggtaacgatacctcggtatcatacaaggatgctttcgaaggccc

SEQ ID NO: 270571 - DNA, 55 bp, Artificial
  Synthetic oligonucleotide
tggctccgccgacggaagaaactcagggattatctgtatgacgacttcatccgtg

SEQ ID NO: 270572 - DNA, 55 bp, Artificial
  Synthetic oligonucleotide
agctatggagacgtacgtcctgcacaatatcgagactctcagaatgatggctcga

SEQ ID NO: 270573 - DNA, 55 bp, Artificial
  Synthetic oligonucleotide
tatgtccaggcggacccaccactccgtcgtcggcggagagtacacttcgttaggg

SEQ ID NO: 270574 - DNA, 55 bp, Artificial
  Synthetic oligonucleotide
tatgttccattggcaagcttcctcgctacctacccctcatcgtaacgggcgcccc

SEQ ID NO: 270575 - DNA, 55 bp, Artificial
  Synthetic oligonucleotide
aaagagtcggcattgtgtgtatgtcgttccaagatgataactctaggtgttgtcc

SEQ ID NO: 270576 - DNA, 55 bp, Artificial
  Synthetic oligonucleotide
caatggttccgatgatggcctcaagtggtcgtgggtaggagatggtagcccgttg

SEQ ID NO: 270577 - DNA, 57 bp, Artificial
  Synthetic oligonucleotide
agttcgaggcttcgcctatccgacccctgaatcagtagccttcgcctagccttcgcc

SEQ ID NO: 270578 - DNA, 55 bp, Artificial
  Synthetic oligonucleotide
caaccggcgcgagatgaataacccaaggccagagcctccgtatttggtatgcgtc

SEQ ID NO: 270579 - DNA, 55 bp, Artificial
  Synthetic oligonucleotide
tcatagactgtagatccttaccgacgcccagaaagggatcgtagaatatctgtag

SEQ ID NO: 270580 - DNA, 55 bp, Artificial
  Synthetic oligonucleotide
aggatcgacaagaagtcgttgtgaggcaacatctgagattggcatcggttgtgaa

SEQ ID NO: 270581 - DNA, 55 bp, Artificial
  Synthetic oligonucleotide
caaccaggtatcggtcctggtctcattcaagaccctgccaacaacactctatacg

SEQ ID NO: 270582 - DNA, 55 bp, Artificial
  Synthetic oligonucleotide
caacatcaaaacgacacagttcgtagcaatgcacgagcactctaccagagagtga

SEQ ID NO: 270583 - DNA, 55 bp, Artificial
  Synthetic oligonucleotide
tcccgacaagcgatagcggttgcgccctctcgctctagtccatcgttttgccagg

SEQ ID NO: 270584 - DNA, 55 bp, Artificial
  Synthetic oligonucleotide
caaagccagcatccgaatacagtgcacttcgccaagggcccatcgtggggacctg

SEQ ID NO: 270585 - DNA, 55 bp, Artificial
  Synthetic oligonucleotide
ggaccggacagactctcgcactatatcggacaccgaagacaagtcatcacgcggc

SEQ ID NO: 270586 - DNA, 55 bp, Artificial
  Synthetic oligonucleotide
ggaccgaaggacttacaccacggtccagtgtaagagtacaggtggcatgctgcac

SEQ ID NO: 270587 - DNA, 55 bp, Artificial
  Synthetic oligonucleotide
ggacacacgggccagtcgttctcgcacactggttcaaccgttcaagctcagtcgg

SEQ ID NO: 270588 - DNA, 57 bp, Artificial
  Synthetic oligonucleotide
cgatggcgattctggagtccgagcttccctaacgaagtgtatccctccgggagagag

SEQ ID NO: 270589 - DNA, 55 bp, Artificial
  Synthetic oligonucleotide
ggaactcggagagggagccttctcatgttatgcctcctaagtgggttcgaggtgc

SEQ ID NO: 270590 - DNA, 54 bp, Artificial
  Synthetic oligonucleotide
ggaaaagtacgggcagagggagtttgtgtcggccccaactggattatcgctccc

SEQ ID NO: 270591 - DNA, 55 bp, Artificial
  Synthetic oligonucleotide
gcttccgtactccagccgatatgaattgtgcaacctataccagagtacggccacc

SEQ ID NO: 270592 - DNA, 55 bp, Artificial
  Synthetic oligonucleotide
gctgttaggttggtcacgatacatggagtgggcgcataacgtcgatattcgattg

SEQ ID NO: 270593 - DNA, 55 bp, Artificial
  Synthetic oligonucleotide
gctggttcccaggctactccatctcctccttcgcaaacggctacgtcaatgagac

SEQ ID NO: 270594 - DNA, 55 bp, Artificial
  Synthetic oligonucleotide
gctgcgaaaccgcatcttccatcattctggactccgtcactgacaccggatgccc

SEQ ID NO: 270595 - DNA, 55 bp, Artificial
  Synthetic oligonucleotide
gctctcactagagcgggaattgagaacgggataggcgatgatcatccatggctag

SEQ ID NO: 270596 - DNA, 55 bp, Artificial
  Synthetic oligonucleotide
gctcgtgtgcccaccgaggaaggttgccaaatcgagcaagatcccgaatcgaagc

SEQ ID NO: 270597 - DNA, 55 bp, Artificial
  Synthetic oligonucleotide
gctcggtctttcacgtatctcacgttctatggaaggatctaccgtaagcaataag

SEQ ID NO: 270598 - DNA, 55 bp, Artificial
  Synthetic oligonucleotide
gctcatttgacatgatcggaggtgccaaacctaagcctggatcatggagtatttg

SEQ ID NO: 270599 - DNA, 57 bp, Artificial
  Synthetic oligonucleotide
gtttgcaaatcacgtttgagatattacgtggtcttcaagtcatgtcgattcaaatac

SEQ ID NO: 270600 - DNA, 55 bp, Artificial
  Synthetic oligonucleotide
ccacagctgccgggtctatgcaatagacgtgcttgggacaacaggaaattacatg

SEQ ID NO: 270601 - DNA, 55 bp, Artificial
  Synthetic oligonucleotide
gctagcctctaattcttggaatgaggcgatgtgtatttcgacatttgggttttcg

SEQ ID NO: 270602 - DNA, 55 bp, Artificial
  Synthetic oligonucleotide
gctacgagtattcccgattccctaacgaagtgtacccatccttcggagggataca

SEQ ID NO: 270603 - DNA, 55 bp, Artificial
  Synthetic oligonucleotide
ttccatcaaacacgggttcggtgtacatcctcaagggcctcactattgtgggatc

SEQ ID NO: 270604 - DNA, 55 bp, Artificial
  Synthetic oligonucleotide
gcgtgatgttttaaggctattaccccgatatggattcttgtcaagttgacgtatg

SEQ ID NO: 270605 - DNA, 55 bp, Artificial
  Synthetic oligonucleotide
gcgtgatactagaaacgtgttgcatagtgcgccattaagaattcggccttatatg

SEQ ID NO: 270606 - DNA, 55 bp, Artificial
  Synthetic oligonucleotide
gcgtcgcatttgtcagcttgggatttgcaagtcgtgtaaccgccgcactacgagg

SEQ ID NO: 270607 - DNA, 55 bp, Artificial
  Synthetic oligonucleotide
gcgtaggtgtctcggggacgggagtctgaatgatgatagtcccgggctgtccacc

SEQ ID NO: 270608 - DNA, 55 bp, Artificial
  Synthetic oligonucleotide
gcggttagggcgcagccagtctcgtagtactgggcgttctaggtagaaggctcac

SEQ ID NO: 270609 - DNA, 55 bp, Artificial
  Synthetic oligonucleotide
ttccgtacaaacttgccgtctcatacgactctgccaatctggactcaaggcccat

SEQ ID NO: 270610 - DNA, 57 bp, Artificial
  Synthetic oligonucleotide
gagctttcgcgattcgttcccctaacgaagtgtatgaatgccacccagagggatatg

SEQ ID NO: 270611 - DNA, 55 bp, Artificial
  Synthetic oligonucleotide
gcggaatccagctgctcagaaaacgtttcagacgaggacgcatacacaagatttc

SEQ ID NO: 270612 - DNA, 55 bp, Artificial
  Synthetic oligonucleotide
gcgcgaaggtacagtgcctacagttagtacctgcagtatagcgtgactaaaagct

SEQ ID NO: 270613 - DNA, 55 bp, Artificial
  Synthetic oligonucleotide
gcgcctccattgggcgccaacttgactcacccgtctgcaattcccatgttggacc

SEQ ID NO: 270614 - DNA, 55 bp, Artificial
  Synthetic oligonucleotide
gcgcctcatctcatgcgtggaagatgaacgtgtaaggtgaatctcttcggtgtcc

SEQ ID NO: 270615 - DNA, 55 bp, Artificial
  Synthetic oligonucleotide
gcgagcgacgggccggcaagttaactcgttttcagagctaccctggtaaggtcag

SEQ ID NO: 270616 - DNA, 55 bp, Artificial
  Synthetic oligonucleotide
gcgactcgagtgtaacgtggtccgggttgatacaacgtctccagttacataggtg

SEQ ID NO: 270617 - DNA, 55 bp, Artificial
  Synthetic oligonucleotide
gcctgtgagcacagatcatttgggaatcttattagcagcctccaggtaaagtaac

SEQ ID NO: 270618 - DNA, 55 bp, Artificial
  Synthetic oligonucleotide
gccctcatattccgaacctcttaacattcacgacgtattgtttgactgtggttca

SEQ ID NO: 270619 - DNA, 55 bp, Artificial
  Synthetic oligonucleotide
gccctaagactcactcacaagcctgcctgcaaattactagacgtccatggatcca

SEQ ID NO: 270620 - DNA, 55 bp, Artificial
  Synthetic oligonucleotide
ggtcgaagcgtactgatggctgagtcgataggcattgaacttgagcccattccca

SEQ ID NO: 270621 - DNA, 55 bp, Artificial
  Synthetic oligonucleotide
taaattgaagttattaaagtctaaatacccactctcacccatagaatctaaagac

SEQ ID NO: 270622 - DNA, 55 bp, Artificial
  Synthetic oligonucleotide
ttcacaccgtacacttactctttgtaacttacaggctcgattgccggtcctgtag

SEQ ID NO: 270623 - DNA, 55 bp, Artificial
  Synthetic oligonucleotide
ggtccgcgactccgttggcacgagtaccattcacccatcgatcctctagtcttgg

SEQ ID NO: 270624 - DNA, 55 bp, Artificial
  Synthetic oligonucleotide
ggtcaatgagctagctcacgcaaacttccaacggctgaagcttaggaaccacgga

SEQ ID NO: 270625 - DNA, 55 bp, Artificial
  Synthetic oligonucleotide
ggtagtcctcgaagaccactcattaaaagcgtatgtataagccatgctaggtttg

SEQ ID NO: 270626 - DNA, 55 bp, Artificial
  Synthetic oligonucleotide
ggtagcgtctttaccgttgactcaatccgaagacatgcataaacgggagggagcc

SEQ ID NO: 270627 - DNA, 55 bp, Artificial
  Synthetic oligonucleotide
gggtttggtgatagggaacagacggtatgtcgccagcctgttattgatgggccga

SEQ ID NO: 270628 - DNA, 55 bp, Artificial
  Synthetic oligonucleotide
gggttagcttggggccaattcgggagatatggggtcgactgcaagtcgcatcaca

SEQ ID NO: 270629 - DNA, 51 bp, Artificial
  Synthetic oligonucleotide
gggtgggatggaaatttaactaacccctgttcccgctagttagggctgaag

SEQ ID NO: 270630 - DNA, 55 bp, Artificial
  Synthetic oligonucleotide
gggtcatttggacgcagattggagtgaggcaacttggtgttccgacgatgtactg

SEQ ID NO: 270631 - DNA, 55 bp, Artificial
  Synthetic oligonucleotide
ggggtccagaacccgtggtgtctccgcacgttgagttcatgcaatagcgggcgct

SEQ ID NO: 270632 - DNA, 56 bp, Artificial
  Synthetic oligonucleotide
aatagaggtagattgtacccaagacctgcttatcttaactatcaaggtagtgagtt

SEQ ID NO: 270633 - DNA, 55 bp, Artificial
  Synthetic oligonucleotide
ggggtcatgccagggctctaattctcgatcgatgatcgctcggacctcgtggccc

SEQ ID NO: 270634 - DNA, 55 bp, Artificial
  Synthetic oligonucleotide
ggggagccatgtacatccagtgatagggatatgtagatcctccacaggtgctcgg

SEQ ID NO: 270635 - DNA, 55 bp, Artificial
  Synthetic oligonucleotide
ataggcagcgacataaagccctggtaccccatacctgagactccgcttggtaaaa

SEQ ID NO: 270636 - DNA, 55 bp, Artificial
  Synthetic oligonucleotide
gggcgtgcactctttgatgggtcaagtctcgctcagtccggagcttaccgctcct

SEQ ID NO: 270637 - DNA, 55 bp, Artificial
  Synthetic oligonucleotide
gggcgagtctgactgcactcttgtagtctacttggttatgcacggaacccgaggc

SEQ ID NO: 270638 - DNA, 55 bp, Artificial
  Synthetic oligonucleotide
catgtgagatacatgatctgcaatatggtccggacaagcagggtagaggttacac

SEQ ID NO: 270639 - DNA, 55 bp, Artificial
  Synthetic oligonucleotide
ggagcctgctaacgctaagttgaccgaggtgcaacctgagatcgctgtttggtcc

SEQ ID NO: 270640 - DNA, 55 bp, Artificial
  Synthetic oligonucleotide
ggaggacatcggtgtactcagacccgtcaagaatggtcttagatacgcgcttccc

SEQ ID NO: 270641 - DNA, 55 bp, Artificial
  Synthetic oligonucleotide
agccgactgccaggtttgtcagtcaggggtcacggaacgtgttggttcaacggac

SEQ ID NO: 270642 - DNA, 55 bp, Artificial
  Synthetic oligonucleotide
ggatccgacaccgaaggcagggtagccagactcgacggatagaagacggtgtgtc

SEQ ID NO: 270643 - DNA, 56 bp, Artificial
  Synthetic oligonucleotide
aatagtctacgcgcaagcttttcgctatggagaagggctagcttcgctagagaata

SEQ ID NO: 270644 - DNA, 55 bp, Artificial
  Synthetic oligonucleotide
ggatgaacgcctggctcaatatcgccccacgccgttgctctcgtattggttgctc

SEQ ID NO: 270645 - DNA, 55 bp, Artificial
  Synthetic oligonucleotide
ggattccatgcaggagtcaaaagtcaaggccaaacaaagcctgagcgtgagggtc

SEQ ID NO: 270646 - DNA, 55 bp, Artificial
  Synthetic oligonucleotide
ggccagaaatatcctggatctctcctatgaccgctggtgttccattcggagcaac

SEQ ID NO: 270647 - DNA, 55 bp, Artificial
  Synthetic oligonucleotide
catcacagtacggttgggcaacttcaataagttcagccttggtcatcccagtagc

SEQ ID NO: 270648 - DNA, 55 bp, Artificial
  Synthetic oligonucleotide
gggactgagatcattcccgataacctcggctgaagggtgctcactaagatacatc

SEQ ID NO: 270649 - DNA, 55 bp, Artificial
  Synthetic oligonucleotide
gggagagatttcgtctaggcaagctcgatacttcgtctacctgagggaatatgga

SEQ ID NO: 270650 - DNA, 55 bp, Artificial
  Synthetic oligonucleotide
aacgattagtgggatatctctcactcgaagagtcaaagtgaagatgtgggtcggc

SEQ ID NO: 270651 - DNA, 55 bp, Artificial
  Synthetic oligonucleotide
gggagcatgtaactcccaccaattgctaacatgttctagataaccagttggtgcc

SEQ ID NO: 270652 - DNA, 55 bp, Artificial
  Synthetic oligonucleotide
gggatgggtgagatcttagagtcaaatcttgttaaccgtgatgagccaatgcaag

SEQ ID NO: 270653 - DNA, 55 bp, Artificial
  Synthetic oligonucleotide
gggcctagaacgtatttcgagactggcgacatgtcgacacttgagtatttgtacg

SEQ ID NO: 270654 - DNA, 56 bp, Artificial
  Synthetic oligonucleotide
tatgatgtcagacagtgaattcttcgagctagaacgtcaaatcgcgagtctaaagc

SEQ ID NO: 270655 - DNA, 54 bp, Artificial
  Synthetic oligonucleotide
agtgcaggcgtcaagaacacagtagatgcagctaactcaggtcaggtacagagc

SEQ ID NO: 270656 - DNA, 54 bp, Artificial
  Synthetic oligonucleotide
ttcgcgtacccaacagatgttgcgcttttgacatcgatcactccacgacttctc

SEQ ID NO: 270657 - DNA, 54 bp, Artificial
  Synthetic oligonucleotide
attgatctcgatctaataaacagttaaacatagggagtagcttagtaggaatac

SEQ ID NO: 270658 - DNA, 54 bp, Artificial
  Synthetic oligonucleotide
ataggatacccctactagattagttagcgcgtaagccgctaggacctgcgactt

SEQ ID NO: 270659 - DNA, 54 bp, Artificial
  Synthetic oligonucleotide
cctggcagctaccatgtccaaaatctacagtctcggtgacccttacggtataga

SEQ ID NO: 270660 - DNA, 54 bp, Artificial
  Synthetic oligonucleotide
attgtgcggctccctgaccatgtgtcattcgagcaaggatcaactatcggcgtc

SEQ ID NO: 270661 - DNA, 54 bp, Artificial
  Synthetic oligonucleotide
gcccgtctgcttttgaatctcagggtcctgctattgtcagcttaatgactcttc

SEQ ID NO: 270662 - DNA, 54 bp, Artificial
  Synthetic oligonucleotide
caacctgtaaacgaggatggcgatagacgtggttccccaaccaagcaggtagcc

SEQ ID NO: 270663 - DNA, 54 bp, Artificial
  Synthetic oligonucleotide
ccagagactcaaggctggaaactctcgctggctgggtctttcggagaatcctct

SEQ ID NO: 270664 - DNA, 54 bp, Artificial
  Synthetic oligonucleotide
ctagcatagggttaaatatggatagatgaagacgttaggactccgagctgaata

SEQ ID NO: 270665 - DNA, 60 bp, Artificial
  Synthetic oligonucleotide
gagcctataccacttaagagcgcattggatctagcggggtcagccagctatatagcggca

SEQ ID NO: 270666 - DNA, 55 bp, Artificial
  Synthetic oligonucleotide
gagcctaaacctgttcgtttgaaccagtcgcaccaggcagtcgcaccagacgccg

SEQ ID NO: 270667 - DNA, 54 bp, Artificial
  Synthetic oligonucleotide
ctgacatgagccgaactatgttctcttgtcccatcatgatgccttatctcaccc

SEQ ID NO: 270668 - DNA, 54 bp, Artificial
  Synthetic oligonucleotide
gtcgaacgaccttcaagcagcgtctcaagacaattgacgttggaggtcaagtat

SEQ ID NO: 270669 - DNA, 54 bp, Artificial
  Synthetic oligonucleotide
cttggaaacccaatccgactttcgactggtggtgctatatcacacatggatatg

SEQ ID NO: 270670 - DNA, 54 bp, Artificial
  Synthetic oligonucleotide
aaccatgcgtatcgcaggagggctgtcgatgctagcgctatctcgatcttgaag

SEQ ID NO: 270671 - DNA, 54 bp, Artificial
  Synthetic oligonucleotide
gagaagtcttattgtgagggcgagttgtataacaccatagggctggccgtccca

SEQ ID NO: 270672 - DNA, 53 bp, Artificial
  Synthetic oligonucleotide
atggacttcgcacctctcaagtcaccgttgttaatgggtgatgtgcgtagcgt

SEQ ID NO: 270673 - DNA, 53 bp, Artificial
  Synthetic oligonucleotide
agattgggtttggcctcgtatcgggtcaaacaggagagagggcgtattccttt

SEQ ID NO: 270674 - DNA, 53 bp, Artificial
  Synthetic oligonucleotide
ccacgccgaggccatacgtgcggatattccaccgcatatctgcatctatcacg

SEQ ID NO: 270675 - DNA, 53 bp, Artificial
  Synthetic oligonucleotide
ccgagtcaacatcctcaacgttgtaccatactacaacccctggcggcacttta

SEQ ID NO: 270676 - DNA, 53 bp, Artificial
  Synthetic oligonucleotide
acttgtttaaatcatcactaccgtatacaataagacaacctttatctgcagtc

SEQ ID NO: 270677 - DNA, 55 bp, Artificial
  Synthetic oligonucleotide
gagcgacaagtaacgggcccatgtgagatcaccccaaagatacgtacattgctct

SEQ ID NO: 270678 - DNA, 53 bp, Artificial
  Synthetic oligonucleotide
actcgtagggaatacatgggttatcgtagtctcctcggatgacccagtggtca

SEQ ID NO: 270679 - DNA, 53 bp, Artificial
  Synthetic oligonucleotide
cctcaagtgcacatcgaggggtggtcccagaggctgaaacggagctcctgggg

SEQ ID NO: 270680 - DNA, 53 bp, Artificial
  Synthetic oligonucleotide
cttctactaggggtgtttatcccctccttcatggcaaggcaccctgcgccgcc

SEQ ID NO: 270681 - DNA, 53 bp, Artificial
  Synthetic oligonucleotide
tgaaacacaagtagcggcattgtcttctttgtcgcactagcggtatctcggtc

SEQ ID NO: 270682 - DNA, 53 bp, Artificial
  Synthetic oligonucleotide
gatcgaagctgactagcagggaggcccgaatagtcgacgctcacatacggcta

SEQ ID NO: 270683 - DNA, 53 bp, Artificial
  Synthetic oligonucleotide
tggtaggtctaaggtacctggccctcggtagagtatgcgcgtaaataacaagt

SEQ ID NO: 270684 - DNA, 53 bp, Artificial
  Synthetic oligonucleotide
gtctagagctacgccctagactattccatccttcggaggaattagcaagctct

SEQ ID NO: 270685 - DNA, 53 bp, Artificial
  Synthetic oligonucleotide
ggagtagacggccttttgaaatgcggccaaacttattgtgctcctctgttacg

SEQ ID NO: 270686 - DNA, 53 bp, Artificial
  Synthetic oligonucleotide
ggagatgggtccgcaggttttcacattgcggagcttgacacgtacgcacgctt

SEQ ID NO: 270687 - DNA, 53 bp, Artificial
  Synthetic oligonucleotide
cgcgcagcggagaccaaaggatcgaacccgtggctttgttcggggatatgctc

SEQ ID NO: 270688 - DNA, 55 bp, Artificial
  Synthetic oligonucleotide
ccccagtccaactttgtacacgcgagccatttaggctggtgtactttgtaagacg

SEQ ID NO: 270689 - DNA, 53 bp, Artificial
  Synthetic oligonucleotide
ttgctaggaacaatctcatccccctattcccctagggggagagacttcgtctc

SEQ ID NO: 270690 - DNA, 52 bp, Artificial
  Synthetic oligonucleotide
cataccgccgcacacgtgaaacaacagaaggaatcctcgagagcctgacctc

SEQ ID NO: 270691 - DNA, 52 bp, Artificial
  Synthetic oligonucleotide
gcatcagccccatgagccaacagtgccttcacagactcgacgctcccgtcca

SEQ ID NO: 270692 - DNA, 52 bp, Artificial
  Synthetic oligonucleotide
gcaagtctgtcacaagaatgaggtcaaccagtatcaagtctttggcagcttg

SEQ ID NO: 270693 - DNA, 52 bp, Artificial
  Synthetic oligonucleotide
aagactcgggcaacaatgacgacttgagcaaaacaggagcttccgccctcat

SEQ ID NO: 270694 - DNA, 52 bp, Artificial
  Synthetic oligonucleotide
gctagtcgcagaatatggtctcgaaatgggttgtgtggcccgtcgataaaga

SEQ ID NO: 270695 - DNA, 52 bp, Artificial
  Synthetic oligonucleotide
tagcctagttgtggttaccttcagcacccacggtgcattcacgaccccgcat

SEQ ID NO: 270696 - DNA, 52 bp, Artificial
  Synthetic oligonucleotide
tcaacgtacacggtaccggggtctccaactatgcctggacgagagtaacggg

SEQ ID NO: 270697 - DNA, 52 bp, Artificial
  Synthetic oligonucleotide
agccaaagacccagctcggcgtgtgacaactgacctgccgtcctggtgtcca

SEQ ID NO: 270698 - DNA, 52 bp, Artificial
  Synthetic oligonucleotide
gagagtgccaagactgattgtcgcaagtcactcaagagcgtcatattgagtt

SEQ ID NO: 270699 - DNA, 55 bp, Artificial
  Synthetic oligonucleotide
gaggctcatggctctcccgaaaggtgcaaaaccgctagtgccacctgtgatgaac

SEQ ID NO: 270700 - DNA, 52 bp, Artificial
  Synthetic oligonucleotide
tcacacttcgttaggagaagtctctccctaacgaagtgtacacatattcccg

SEQ ID NO: 270701 - DNA, 52 bp, Artificial
  Synthetic oligonucleotide
agagacgcagcctccataggtagcaccccgcctactgcagcggcccttctat

SEQ ID NO: 270702 - DNA, 52 bp, Artificial
  Synthetic oligonucleotide
cttcagaccacgtaaatgctgtgcctcatagagtcatcgccgaaagtgacag

SEQ ID NO: 270703 - DNA, 52 bp, Artificial
  Synthetic oligonucleotide
attcatgccaatatgtgcattattgccaagtcttagcagcagcgtttaacac

SEQ ID NO: 270704 - DNA, 52 bp, Artificial
  Synthetic oligonucleotide
aaaatttagggtacggactgagcgacacttggcgtttctatctaccgtgagg

SEQ ID NO: 270705 - DNA, 52 bp, Artificial
  Synthetic oligonucleotide
attcggcgtcggggaataccaaggggccatctcatatagagcggagcattaa

SEQ ID NO: 270706 - DNA, 52 bp, Artificial
  Synthetic oligonucleotide
cgctcactccaagtggagttgaggcgctagaggcgctggagttgtaagctcg

SEQ ID NO: 270707 - DNA, 52 bp, Artificial
  Synthetic oligonucleotide
ccgtacttcgaaatggtcatatccaagtgatgcacctagatcttttgcccga

SEQ ID NO: 270708 - DNA, 52 bp, Artificial
  Synthetic oligonucleotide
tgtctgccagctgggagtttgagtcagaataacctcgtaactagcgacgcca

SEQ ID NO: 270709 - DNA, 52 bp, Artificial
  Synthetic oligonucleotide
cgggaatatgtcgtttgccagtcgtcaaggaacctctcaaagtgcatcggtc

SEQ ID NO: 270710 - DNA, 55 bp, Artificial
  Synthetic oligonucleotide
ccccaatgattaacatcatgcctaggtatgaggcatcctcgaggctgtcaagtcc

SEQ ID NO: 270711 - DNA, 52 bp, Artificial
  Synthetic oligonucleotide
cgggagtgcacattcccacacaacgggatcttggattgccgcaccaggtacg

SEQ ID NO: 270712 - DNA, 52 bp, Artificial
  Synthetic oligonucleotide
cgtcaacgggctggctgctcagtatgctagacgccagatccatagccggacg

SEQ ID NO: 270713 - DNA, 52 bp, Artificial
  Synthetic oligonucleotide
tggaagtgtaccaaatatcctcgcgcttcaaaccagccgcgttctcactact

SEQ ID NO: 270714 - DNA, 52 bp, Artificial
  Synthetic oligonucleotide
ctcagactaacaccatcagcggccgatgcacagccaccacaagccatccagc

SEQ ID NO: 270715 - DNA, 52 bp, Artificial
  Synthetic oligonucleotide
agggcagaaggattgtcggcaagggaggaacagcaatacgacaatttatgtc

SEQ ID NO: 270716 - DNA, 52 bp, Artificial
  Synthetic oligonucleotide
ctcgctacgccggtggcaagctttcgtatagatgtgttctcggacaatacac

SEQ ID NO: 270717 - DNA, 52 bp, Artificial
  Synthetic oligonucleotide
ctcggacgtgcccagaacgacaactactaccgattaccacgcccgcctccat

SEQ ID NO: 270718 - DNA, 52 bp, Artificial
  Synthetic oligonucleotide
ctctactggccctagccaaagacccagctcggcgtgtgacaactgacctgcc

SEQ ID NO: 270719 - DNA, 51 bp, Artificial
  Synthetic oligonucleotide
tacggtatcttgcgaataaataagccaggatggcgtgcctcacacttcgtt

SEQ ID NO: 270720 - DNA, 51 bp, Artificial
  Synthetic oligonucleotide
tggccagcacagctcattagggacgaagctacactatactataccccttga

SEQ ID NO: 270721 - DNA, 55 bp, Artificial
  Synthetic oligonucleotide
aatcgcaaggctactgtagtattatccgtagcactatgcatccctcgtccattgt

SEQ ID NO: 270722 - DNA, 51 bp, Artificial
  Synthetic oligonucleotide
agcgcaaggagacgacacaagggttgggagtcattgtggcaactgggcaga

SEQ ID NO: 270723 - DNA, 51 bp, Artificial
  Synthetic oligonucleotide
tgtcatgacatgtccccaccgctcggtcagtcagatcgccctcgactgcta

SEQ ID NO: 270724 - DNA, 51 bp, Artificial
  Synthetic oligonucleotide
caatgtccgtaaggggtccatcagactcgaccaattcatccgaaagtctca

SEQ ID NO: 270725 - DNA, 51 bp, Artificial
  Synthetic oligonucleotide
tccatccggctaccgattattcaagggcaacggcgatatgaagacacccgt

SEQ ID NO: 270726 - DNA, 51 bp, Artificial
  Synthetic oligonucleotide
gaaccgagtcaacatattggcgagagcaagctgattccatcgtcgacgggt

SEQ ID NO: 270727 - DNA, 51 bp, Artificial
  Synthetic oligonucleotide
ccacgatctcgccaagaccacgagtcgccggggcgaaaacaagggccgttc

SEQ ID NO: 270728 - DNA, 51 bp, Artificial
  Synthetic oligonucleotide
ccttgtggtgttgacgggccaggggactcgtcatggacgttgttttgcatt

SEQ ID NO: 270729 - DNA, 51 bp, Artificial
  Synthetic oligonucleotide
ctccgatcctggtgtttggcaggcgataacgtgtgcgcgcagggtactgat

SEQ ID NO: 270730 - DNA, 51 bp, Artificial
  Synthetic oligonucleotide
gaggatctcgaaccaaggggaatgttatcgaggccgctaagcggatcgtta

SEQ ID NO: 270731 - DNA, 51 bp, Artificial
  Synthetic oligonucleotide
gatgccgaagagacgcagcctccataggtagcaccccgcctactgcagcgg

SEQ ID NO: 270732 - DNA, 55 bp, Artificial
  Synthetic oligonucleotide
gaactgcccatggggctcgtacgcccgcataagcacgtacgtatagcacgttggc

SEQ ID NO: 270733 - DNA, 51 bp, Artificial
  Synthetic oligonucleotide
ctagccatgcttgtgtgcccgagtggtctcttgctaatgcgacttgtcaac

SEQ ID NO: 270734 - DNA, 51 bp, Artificial
  Synthetic oligonucleotide
actcgcttccgcgttgcattgacagatgtccatccttacgataagactccc

SEQ ID NO: 270735 - DNA, 50 bp, Artificial
  Synthetic oligonucleotide
caaagggggtgctcttgagcacaaacgccattgcgacaagccacggagca

SEQ ID NO: 270736 - DNA, 50 bp, Artificial
  Synthetic oligonucleotide
tcctcgcgccattccaacgcgcctaccaacctccattcctgacacgagtc

SEQ ID NO: 270737 - DNA, 50 bp, Artificial
  Synthetic oligonucleotide
tcgattccatgggttggctccagtgctggctggcacaaacatcaggctcc

SEQ ID NO: 270738 - DNA, 50 bp, Artificial
  Synthetic oligonucleotide
tcgcgagcagcgacccagtttacccgacattcccctgggaacacagacgc

SEQ ID NO: 270739 - DNA, 50 bp, Artificial
  Synthetic oligonucleotide
tctccaagtctcggtccttggcattcaggggaactacaggggttcgcgct

SEQ ID NO: 270740 - DNA, 50 bp, Artificial
  Synthetic oligonucleotide
cgtgtgtgcaccacttgatcgattggaagatgagttagtctgaccggtag

SEQ ID NO: 270741 - DNA, 50 bp, Artificial
  Synthetic oligonucleotide
tggatgcttgttccaacactgcggggtccttgctagaaggcccggcggcg

SEQ ID NO: 270742 - DNA, 50 bp, Artificial
  Synthetic oligonucleotide
ccggacctaccaacggcaacatccagcctttcgctacccccagcgtcaag

SEQ ID NO: 270743 - DNA, 55 bp, Artificial
  Synthetic oligonucleotide
gaagtgtgatcccaatattcgactccgttaggcaattcttcggtcggcagagcat

SEQ ID NO: 270744 - DNA, 50 bp, Artificial
  Synthetic oligonucleotide
cgggcgttccctccagaccccttcgcaaactgtaagcagatccacggcac

SEQ ID NO: 270745 - DNA, 50 bp, Artificial
  Synthetic oligonucleotide
cgggatcgagggaggtgttttcgccaagggggaatagaggagcgtggcca

SEQ ID NO: 270746 - DNA, 50 bp, Artificial
  Synthetic oligonucleotide
cgcatctggccagagtttcgtacaagacggccgcccctaccatccctctt

SEQ ID NO: 270747 - DNA, 50 bp, Artificial
  Synthetic oligonucleotide
ttagatggtacttgtaacggttttcaacatctcgctttaatgtctcatga

SEQ ID NO: 270748 - DNA, 50 bp, Artificial
  Synthetic oligonucleotide
cctcgggctcagcgagtctcccgctcttgactacagcagacgaagtggcc

SEQ ID NO: 270749 - DNA, 50 bp, Artificial
  Synthetic oligonucleotide
ttcgcacaagaccaaacgaacgcggccatccgtcgatgaaatcttaggac

SEQ ID NO: 270750 - DNA, 50 bp, Artificial
  Synthetic oligonucleotide
cgcaagggacaatcgcgcccgctctgccgctatggcttgtgatcgccagc

SEQ ID NO: 270751 - DNA, 50 bp, Artificial
  Synthetic oligonucleotide
ttgagacatacactcgctgaacggtatgagacgaggcggtacgggtattg

SEQ ID NO: 270752 - DNA, 50 bp, Artificial
  Synthetic oligonucleotide
atggcttatgttgcatgcctggaatcggagggacggggactggggtcacc

SEQ ID NO: 270753 - DNA, 50 bp, Artificial
  Synthetic oligonucleotide
atggcatttacgacacaggagcggcccatagagacgcccagaccgcgata

SEQ ID NO: 270754 - DNA, 55 bp, Artificial
  Synthetic oligonucleotide
gaatctttgagagggttgaacccaagatcatgagagaaaaccttggccattacca

SEQ ID NO: 270755 - DNA, 50 bp, Artificial
  Synthetic oligonucleotide
tttcatggttgctcatctcgtcgctttcgagacttacgctcgtgctatga

SEQ ID NO: 270756 - DNA, 50 bp, Artificial
  Synthetic oligonucleotide
catttgggggttagccctagtccatccatatcccttagggatcaggagga

SEQ ID NO: 270757 - DNA, 50 bp, Artificial
  Synthetic oligonucleotide
ccaatcgacggcatgccatggtgtcatggccggacagacccgctaacacc

SEQ ID NO: 270758 - DNA, 50 bp, Artificial
  Synthetic oligonucleotide
catgttggcatcgggggcaacgcggcactcatcgaacttgtcggagcaca

SEQ ID NO: 270759 - DNA, 50 bp, Artificial
  Synthetic oligonucleotide
gctaaaacctctaccatgtcgcaaccaaatctcacccagcctctcttgac

SEQ ID NO: 270760 - DNA, 50 bp, Artificial
  Synthetic oligonucleotide
gcggggtccttgctagaaggcccggcggcgcaaacagtacgctggatact

SEQ ID NO: 270761 - DNA, 50 bp, Artificial
  Synthetic oligonucleotide
ggctggccgagccccaaattgtttccagccctaggcatcgttggtatggg

SEQ ID NO: 270762 - DNA, 50 bp, Artificial
  Synthetic oligonucleotide
gcgagggctttaggcgaccagactctcaggccatgactcgggtggaggaa

SEQ ID NO: 270763 - DNA, 50 bp, Artificial
  Synthetic oligonucleotide
gtccttctcaggtcagcattcagcctaagcgaacctgtccgagcaaactc

SEQ ID NO: 270764 - DNA, 50 bp, Artificial
  Synthetic oligonucleotide
ccaggcagacttacacagcttcaaggggagggcggaactccgcacgctaa

SEQ ID NO: 270765 - DNA, 55 bp, Artificial
  Synthetic oligonucleotide
gaattagatcccagcgccggataaaatccttatcgtaagggtctatttgcacgac

SEQ ID NO: 270766 - DNA, 50 bp, Artificial
  Synthetic oligonucleotide
tacaatgagggcattcaggagatgcccaactacggctgctgcgcacaggg

SEQ ID NO: 270767 - DNA, 50 bp, Artificial
  Synthetic oligonucleotide
caggcgtccggtgggttggatctcacgatgacggaccaaaggaccccaat

SEQ ID NO: 270768 - DNA, 50 bp, Artificial
  Synthetic oligonucleotide
cagctgcgagcctgttggcatccacaacgcccaccgaaccattgcctact

SEQ ID NO: 270769 - DNA, 50 bp, Artificial
  Synthetic oligonucleotide
tacacgcttccgtgcacagcaatccacatacggcctcccttgcgatgacc

SEQ ID NO: 270770 - DNA, 50 bp, Artificial
  Synthetic oligonucleotide
tacgcgctgctggtgcgtatgatgggtgcccgtgaagctataaacggagc

SEQ ID NO: 270771 - DNA, 50 bp, Artificial
  Synthetic oligonucleotide
cacgccatatccgccggacgctactcccgttaccgtagagctctcgccca

SEQ ID NO: 270772 - DNA, 50 bp, Artificial
  Synthetic oligonucleotide
cacctccagaccctgttatgcctggggccaactactgggggctaactcga

SEQ ID NO: 270773 - DNA, 50 bp, Artificial
  Synthetic oligonucleotide
gagtggtgtaaagactctcgtagtacatggagcgatgcgctttcattagt

SEQ ID NO: 270774 - DNA, 50 bp, Artificial
  Synthetic oligonucleotide
cacaggacctccaagagttcgacgtgcgatttgcggcagctggatgccta

SEQ ID NO: 270775 - DNA, 50 bp, Artificial
  Synthetic oligonucleotide
cccggcttcgagattgggtccgcagcgttccacattccttcttttgcgcg

SEQ ID NO: 270776 - DNA, 57 bp, Artificial
  Synthetic oligonucleotide
agttagagctatgtacgctaatttagcgtgggcgcactctttgctagggaacaaagt

SEQ ID NO: 270777 - DNA, 55 bp, Artificial
  Synthetic oligonucleotide
gaccccatggtcacgaacgagaggtacggatggcacccgagacagttatttcgca

SEQ ID NO: 270778 - DNA, 50 bp, Artificial
  Synthetic oligonucleotide
cccggtcccgaaaagacagaagccctcgttgagaaggcagtgccgctctt

SEQ ID NO: 270779 - DNA, 50 bp, Artificial
  Synthetic oligonucleotide
gaaggtttctagtaccaacggtttacgctctgcagctcaactcatggaaa

SEQ ID NO: 270780 - DNA, 50 bp, Artificial
  Synthetic oligonucleotide
tcacagggctaatggcggttccagagaactacggggcttcgtcccccaac

SEQ ID NO: 270781 - DNA, 50 bp, Artificial
  Synthetic oligonucleotide
tcatccagcacggcgctaatatccacgccatgtggacaccgatatatccc

SEQ ID NO: 270782 - DNA, 50 bp, Artificial
  Synthetic oligonucleotide
tccaccaacgaagcgtcccggtgctctcttgacgaatcgccggttctcat

SEQ ID NO: 270783 - DNA, 50 bp, Artificial
  Synthetic oligonucleotide
tccacttcatccgtccggaggatccccatttccatacccttgtccccgcc

SEQ ID NO: 270784 - DNA, 50 bp, Artificial
  Synthetic oligonucleotide
aacggcagagctcggcgctatcgaccacgcatttgctaacggataccggc

SEQ ID NO: 270785 - DNA, 50 bp, Artificial
  Synthetic oligonucleotide
aacggcgcaacgtacggggcttgagggaacgcgatacggatttgagggac

SEQ ID NO: 270786 - DNA, 50 bp, Artificial
  Synthetic oligonucleotide
aacggcgtgagcaacctgtgtctcgacatcgacaggcgaggagatggcgt

SEQ ID NO: 270787 - DNA, 50 bp, Artificial
  Synthetic oligonucleotide
aacggtctcagtgcaggtgcctaccccgtgtgccctggcactcctggtat

SEQ ID NO: 270788 - DNA, 55 bp, Artificial
  Synthetic oligonucleotide
gacctagacattacattgacttactcactcactggacgcctcaattcatggcggg

SEQ ID NO: 270789 - DNA, 50 bp, Artificial
  Synthetic oligonucleotide
aacgtcaaggggtgtcttggtccgggaactcgcaagttgaagccgtcccg

SEQ ID NO: 270790 - DNA, 50 bp, Artificial
  Synthetic oligonucleotide
aactccatggcggcaggaatcaagatctcgccaggcgggacctcgaggcc

SEQ ID NO: 270791 - DNA, 50 bp, Artificial
  Synthetic oligonucleotide
aactcccctcgcgaaggtggagagggcttgggcatccgccgtcctgtagc

SEQ ID NO: 270792 - DNA, 50 bp, Artificial
  Synthetic oligonucleotide
aactcctgcttgccgaccctaacagcgtgcaagccaaacgcgcactcttc

SEQ ID NO: 270793 - DNA, 50 bp, Artificial
  Synthetic oligonucleotide
aactcggacgggaccacaacctccgggcgcagatgggtcactctgccagg

SEQ ID NO: 270794 - DNA, 50 bp, Artificial
  Synthetic oligonucleotide
aactgcacgagaacggcgcgctagagccgcaagtcagaacggtacgcctg

SEQ ID NO: 270795 - DNA, 50 bp, Artificial
  Synthetic oligonucleotide
aactgcacggggacgggagtttatttccagggggtccctgcgaccggctg

SEQ ID NO: 270796 - DNA, 50 bp, Artificial
  Synthetic oligonucleotide
aactgcgcttccgtttgccttgccctcagcggtcacactcttctccagcg

SEQ ID NO: 270797 - DNA, 50 bp, Artificial
  Synthetic oligonucleotide
aactttccaagaccaggacgtgggggcaaagcgggagggggcgagaaata

SEQ ID NO: 270798 - DNA, 50 bp, Artificial
  Synthetic oligonucleotide
aagaagcccccagggcagttgagcaagggaagcatgcggcggtaataccg

SEQ ID NO: 270799 - DNA, 54 bp, Artificial
  Synthetic oligonucleotide
gacctggcctaacctcaggggtaagacgttctagacaccgctagcccggacggc

SEQ ID NO: 270800 - DNA, 50 bp, Artificial
  Synthetic oligonucleotide
aagaccgcgggcgttgaggttcatacacgagagaggacgagggagacgct

SEQ ID NO: 270801 - DNA, 50 bp, Artificial
  Synthetic oligonucleotide
aagaccggagcgagcatgtgagccgcaacgagctatcacggcgttgggca

SEQ ID NO: 270802 - DNA, 50 bp, Artificial
  Synthetic oligonucleotide
aagacgcctggaaactaccatgccccatcgccgggcctccgagttgagcg

SEQ ID NO: 270803 - DNA, 50 bp, Artificial
  Synthetic oligonucleotide
aagacgttgtcccgtctgtgtgcggtggtatcaggcgccttcccctgcag

SEQ ID NO: 270804 - DNA, 50 bp, Artificial
  Synthetic oligonucleotide
aagagaatgtgcggtcaggggtggccggagctcagtccatcgtgctgttt

SEQ ID NO: 270805 - DNA, 50 bp, Artificial
  Synthetic oligonucleotide
aagaggcccgacttccactcgtgcgtcgcaggcccctccgccctgaatct

SEQ ID NO: 270806 - DNA, 50 bp, Artificial
  Synthetic oligonucleotide
aagagggagtggcgcacacgagatgcaaggtcgtggacaggctgggaatg

SEQ ID NO: 270807 - DNA, 50 bp, Artificial
  Synthetic oligonucleotide
aagagggccccgcgatggtgcatcccatcaaaggtgcgcatccgagcaac

SEQ ID NO: 270808 - DNA, 50 bp, Artificial
  Synthetic oligonucleotide
aacagggagatgggggtgcgtcgagccactcttggtccgcaatcgcgttg

SEQ ID NO: 270809 - DNA, 50 bp, Artificial
  Synthetic oligonucleotide
aacatctaccccgtcacactcgcttggctcgaccagtccattgcgcgagg

SEQ ID NO: 270810 - DNA, 55 bp, Artificial
  Synthetic oligonucleotide
gacgcgaaacatgtcctttatattgaagatggcactctaacgtgggcatcatgcg

SEQ ID NO: 270811 - DNA, 50 bp, Artificial
  Synthetic oligonucleotide
aacatggctcgagactgtctgtgtcgcacgcatcttggagtcctggcggc

SEQ ID NO: 270812 - DNA, 50 bp, Artificial
  Synthetic oligonucleotide
aaccaaacgagctggcgcaatacaggtcgcacgtgaggcgtaccgggagg

SEQ ID NO: 270813 - DNA, 50 bp, Artificial
  Synthetic oligonucleotide
aacccactgggcgagagcatgattggaatcgtcctcctacagtcggcggc

SEQ ID NO: 270814 - DNA, 50 bp, Artificial
  Synthetic oligonucleotide
aaccccctgtagtcaaggtaccgctagccctgcttggggcccgcttgctc

SEQ ID NO: 270815 - DNA, 50 bp, Artificial
  Synthetic oligonucleotide
aaccccgactcgaatcgactccgcctccttccgttaagaggcaagggccc

SEQ ID NO: 270816 - DNA, 50 bp, Artificial
  Synthetic oligonucleotide
aacccctaatccaacctggcactctcccgactccaggtgaacctcggcca

SEQ ID NO: 270817 - DNA, 50 bp, Artificial
  Synthetic oligonucleotide
aacccggtgtacgctcgtcaacccttgcgcccccatcgttgtggtagtac

SEQ ID NO: 270818 - DNA, 50 bp, Artificial
  Synthetic oligonucleotide
aaccgaaggggcttgggtagcgagacgggacgaaggacgcacgtatcagg

SEQ ID NO: 270819 - DNA, 50 bp, Artificial
  Synthetic oligonucleotide
aaccgacaccgaggccccaactcctctgcgacagggctcgtcaggcgttc

SEQ ID NO: 270820 - DNA, 50 bp, Artificial
  Synthetic oligonucleotide
aaccgcacctcatgctccgatagaccgtgtagcgtgcgaccagcgttacg

SEQ ID NO: 270821 - DNA, 55 bp, Artificial
  Synthetic oligonucleotide
gacgtccctactgtggtcttcgattccatgggttggctccagtgctggctggcac

SEQ ID NO: 270822 - DNA, 50 bp, Artificial
  Synthetic oligonucleotide
aaccgcccctctcctcgctttccagactcggcggtccctccgcacctggt

SEQ ID NO: 270823 - DNA, 50 bp, Artificial
  Synthetic oligonucleotide
aaccgcgaatgaccgccccgcaaccgggactatcccttgtcaataacgcg

SEQ ID NO: 270824 - DNA, 50 bp, Artificial
  Synthetic oligonucleotide
aaccgtggcgtccatagcctgagcgttgaggttgtacgcattggggcgat

SEQ ID NO: 270825 - DNA, 50 bp, Artificial
  Synthetic oligonucleotide
aacgaaattggcccagcacccgtagtctcccatcgtagccgctgcccgat

SEQ ID NO: 270826 - DNA, 50 bp, Artificial
  Synthetic oligonucleotide
aacgaaggatggcacatgtctgccgccgccgtagccttgcaagaccccta

SEQ ID NO: 270827 - DNA, 50 bp, Artificial
  Synthetic oligonucleotide
aacgacggtaggaaacttccttgcgacacccaacgccgtccgcttgtcga

SEQ ID NO: 270828 - DNA, 50 bp, Artificial
  Synthetic oligonucleotide
aacgagccggtggctccactagccgtggccgcagggagcacatcccttca

SEQ ID NO: 270829 - DNA, 50 bp, Artificial
  Synthetic oligonucleotide
aacgatgccgccgtgcacaataccaggatacccgctcacgccctctccca

SEQ ID NO: 270830 - DNA, 50 bp, Artificial
  Synthetic oligonucleotide
aacgccaacattcacctgcgcctacctgggttccgatggtgagagagggc

SEQ ID NO: 270831 - DNA, 50 bp, Artificial
  Synthetic oligonucleotide
aacgcgacccttgatgacagggaggggacgaagctccttgggccgttgcg

SEQ ID NO: 270832 - DNA, 55 bp, Artificial
  Synthetic oligonucleotide
gacgtgaacggctccattggtggttccgtcatccgtggctatcctgccccactcg

SEQ ID NO: 270833 - DNA, 50 bp, Artificial
  Synthetic oligonucleotide
aacggaggggtatcaacgtccgctcgcccttccgaggcctgtgactcgaa

SEQ ID NO: 270834 - DNA, 50 bp, Artificial
  Synthetic oligonucleotide
aaggcatggaatgagcaacgagagggggagccagggtccatccggagtgt

SEQ ID NO: 270835 - DNA, 50 bp, Artificial
  Synthetic oligonucleotide
aaggccagtgcacggcatggtacatgtgcggttgctctaggctgtcctgg

SEQ ID NO: 270836 - DNA, 50 bp, Artificial
  Synthetic oligonucleotide
aaggccgcaagaggaaacgcaggcgcccttactagggcttctgcacgagg

SEQ ID NO: 270837 - DNA, 50 bp, Artificial
  Synthetic oligonucleotide
aaggccgctgagcccgtctggattaggtgcccggggttttctaggagtgg

SEQ ID NO: 270838 - DNA, 50 bp, Artificial
  Synthetic oligonucleotide
aaggcggtctatccctgaatcccagccgtgtctcggcggttggttgactg

SEQ ID NO: 270839 - DNA, 50 bp, Artificial
  Synthetic oligonucleotide
aaggctggcgttcggcgctaattcgctccgtttcatcacgcgtctgtggt

SEQ ID NO: 270840 - DNA, 50 bp, Artificial
  Synthetic oligonucleotide
aaggctgtgtgggcccttgttgacaagcgactttggggacacgccatgtt

SEQ ID NO: 270841 - DNA, 50 bp, Artificial
  Synthetic oligonucleotide
aagggaacggcccggcaagggtttgatgcaccgaaatccttcctcaggcg

SEQ ID NO: 270842 - DNA, 50 bp, Artificial
  Synthetic oligonucleotide
aagggaactgcgctacgaagcatgaaggagcccggaacagcctacgacga

SEQ ID NO: 270843 - DNA, 55 bp, Artificial
  Synthetic oligonucleotide
acaaactcttgcaccatggctctttagtgtgtggaatgtatcccactcagctgac

SEQ ID NO: 270844 - DNA, 50 bp, Artificial
  Synthetic oligonucleotide
aagggatgggcccggtacctcgtacggagcggatcttccatttcgatgcc

SEQ ID NO: 270845 - DNA, 50 bp, Artificial
  Synthetic oligonucleotide
aagggcctaaagacttgggcgtccgttgatgcaaagctctcccagcggca

SEQ ID NO: 270846 - DNA, 50 bp, Artificial
  Synthetic oligonucleotide
aagggcggacctgaggcagggacgagagtgatcggagcttgaatgcccgt

SEQ ID NO: 270847 - DNA, 50 bp, Artificial
  Synthetic oligonucleotide
aaggggcgactgtagagttcttgcgcgagggcgcagcgaccgagttcttt

SEQ ID NO: 270848 - DNA, 50 bp, Artificial
  Synthetic oligonucleotide
aaggtaggcctaaggggcggtccagttgagggagcgaggtgagtggtcgt

SEQ ID NO: 270849 - DNA, 50 bp, Artificial
  Synthetic oligonucleotide
aaggtcccatggggttgccttagcgattggcacttgcgccctcgtgagct

SEQ ID NO: 270850 - DNA, 50 bp, Artificial
  Synthetic oligonucleotide
aaggttgccgccgctcgtgtcattgccgatcgaccttctacctctgaggg

SEQ ID NO: 270851 - DNA, 50 bp, Artificial
  Synthetic oligonucleotide
aagtactgccagcgcaggccctatcgcaggagagccagtattggtaccgc

SEQ ID NO: 270852 - DNA, 50 bp, Artificial
  Synthetic oligonucleotide
aagtaggtgcgcctgctagcctccctacgcgtaaacgtcgctgcaaccct

SEQ ID NO: 270853 - DNA, 50 bp, Artificial
  Synthetic oligonucleotide
aagtccaacaacgcgcaaaagctcccgtaagacggtgcatgcccacacgc

SEQ ID NO: 270854 - DNA, 55 bp, Artificial
  Synthetic oligonucleotide
gactcaagggtcagcaggtagtgttcctcatcggcagtggtatttctgtcgtcgg

SEQ ID NO: 270855 - DNA, 50 bp, Artificial
  Synthetic oligonucleotide
aagtcctccggctagtgatcggtcgacaccagaaccatctgccccgccag

SEQ ID NO: 270856 - DNA, 50 bp, Artificial
  Synthetic oligonucleotide
aagtcgcccacggcgccagactcggccttagcatcgcccatcatggtacc

SEQ ID NO: 270857 - DNA, 50 bp, Artificial
  Synthetic oligonucleotide
aagtctccacggggtccatctgggtctcgcagcactgacgagccgacgga

SEQ ID NO: 270858 - DNA, 50 bp, Artificial
  Synthetic oligonucleotide
aagaggtcacgacggcttatggtggggttgcagggtgcgatagcggcatg

SEQ ID NO: 270859 - DNA, 50 bp, Artificial
  Synthetic oligonucleotide
aagagtgtcagccattccgtaaggcaggtggccggcgagagagccagacg

SEQ ID NO: 270860 - DNA, 50 bp, Artificial
  Synthetic oligonucleotide
aagatccccaaggcttctagccaacaaataccccacgcgcccctaccgcg

SEQ ID NO: 270861 - DNA, 50 bp, Artificial
  Synthetic oligonucleotide
aagccacaagcaccgcacggcagtttgagctgtcagagtggatgggttgg

SEQ ID NO: 270862 - DNA, 50 bp, Artificial
  Synthetic oligonucleotide
aagcccagtccaggggtccaagaggcgggatcggtagcgaggtagactag

SEQ ID NO: 270863 - DNA, 50 bp, Artificial
  Synthetic oligonucleotide
aagccccatgctgcctccatgataacccccaaacctcccgccacggagaa

SEQ ID NO: 270864 - DNA, 50 bp, Artificial
  Synthetic oligonucleotide
aagcccggcacagctagttcaatcgaacctcctggcgtcggctggctata

SEQ ID NO: 270865 - DNA, 55 bp, Artificial
  Synthetic oligonucleotide
gactcggcttgttgaccgatcgatgcgtcgaggaccatgatcgtttcgtcaggct

SEQ ID NO: 270866 - DNA, 50 bp, Artificial
  Synthetic oligonucleotide
aagcctaacaccctcgctctcccatttctcggggcacccactgagccgat

SEQ ID NO: 270867 - DNA, 50 bp, Artificial
  Synthetic oligonucleotide
aagcctcacatgcgtctgggaagcccagctagtggcctgtaagacgacgg

SEQ ID NO: 270868 - DNA, 50 bp, Artificial
  Synthetic oligonucleotide
aagcctggcgagtattgcccgccggttggagctttctgaaggccgcctgg

SEQ ID NO: 270869 - DNA, 50 bp, Artificial
  Synthetic oligonucleotide
aagccttggttgaaccgggctagggcagctcttccgttgtcgagagcgac

SEQ ID NO: 270870 - DNA, 50 bp, Artificial
  Synthetic oligonucleotide
aagcggccgcgtgagggtggtcttggagcatgtgggggagcggctaaaag

SEQ ID NO: 270871 - DNA, 50 bp, Artificial
  Synthetic oligonucleotide
aagcggcgcacaatgctgtgacgcaacgatctcgagagccaccgacaaga

SEQ ID NO: 270872 - DNA, 50 bp, Artificial
  Synthetic oligonucleotide
aagcggtaagggcccgggaaccatcgtttgacgaagtgcgacggcgctta

SEQ ID NO: 270873 - DNA, 50 bp, Artificial
  Synthetic oligonucleotide
aagcggtagagctagggcagtgagccgtcaactaatggctcgtggggcac

SEQ ID NO: 270874 - DNA, 50 bp, Artificial
  Synthetic oligonucleotide
aagcgtccggtgcgacagattcaagggaccacggcgcccaaagtttgtgc

SEQ ID NO: 270875 - DNA, 50 bp, Artificial
  Synthetic oligonucleotide
aagctacctcgaggggatggaccccgtttctgagcgctctagcgcctgta

SEQ ID NO: 270876 - DNA, 55 bp, Artificial
  Synthetic oligonucleotide
gactctcgccattatgcttggaggaactttgatcgttgcatccagcgaaactcgc

SEQ ID NO: 270877 - DNA, 50 bp, Artificial
  Synthetic oligonucleotide
aagctcacgtgggacaaccacgggtaagggtccgcagggagggtcttaga

SEQ ID NO: 270878 - DNA, 50 bp, Artificial
  Synthetic oligonucleotide
aagctcggccactgggaggcacaggacagacagtacgggacagcatccgt

SEQ ID NO: 270879 - DNA, 50 bp, Artificial
  Synthetic oligonucleotide
aagcttccaagccccatccgcgtcggcttgcacaacgtgtttgtgaccgt

SEQ ID NO: 270880 - DNA, 50 bp, Artificial
  Synthetic oligonucleotide
aagcttcctagggccatggctctttgcgtccctgttggttgcatcgcagg

SEQ ID NO: 270881 - DNA, 50 bp, Artificial
  Synthetic oligonucleotide
aaggaacctgggcaactcctgaatgctgcagcttggctgcgcctctgaac

SEQ ID NO: 270882 - DNA, 50 bp, Artificial
  Synthetic oligonucleotide
aaggagcccagtaggggcgcagcccaacagacccctaccaaccgaaaggt

SEQ ID NO: 270883 - DNA, 50 bp, Artificial
  Synthetic oligonucleotide
aaaccgcctggtcgcagcacaatgagccgggattctgaccgggacagccc

SEQ ID NO: 270884 - DNA, 50 bp, Artificial
  Synthetic oligonucleotide
aaaccgcgcgctcttgggacagcggccatgctaacctccaggctctgggc

SEQ ID NO: 270885 - DNA, 50 bp, Artificial
  Synthetic oligonucleotide
aaacctaaggtgccgatggctcatcgaccccgtcgactgacggtggcgta

SEQ ID NO: 270886 - DNA, 50 bp, Artificial
  Synthetic oligonucleotide
aaacctgacaggtcgcttggtgctggcttctccgcaccctgccacgagac

SEQ ID NO: 270887 - DNA, 60 bp, Artificial
  Synthetic oligonucleotide
cagtagtattccatatccctttggttagacgaagtctcagcgagctaaggaatcagcaag

SEQ ID NO: 270888 - DNA, 55 bp, Artificial
  Synthetic oligonucleotide
gagaactcctggagacgcagcttggtgggcttctggaaacgagagcattggtccc

SEQ ID NO: 270889 - DNA, 50 bp, Artificial
  Synthetic oligonucleotide
aaacctgatgtcgcttgctgaaccgaacccagaagaggcgctcccacccc

SEQ ID NO: 270890 - DNA, 50 bp, Artificial
  Synthetic oligonucleotide
aaacgacccgccagcacggaacttgcacttggcgacacgacgcagggata

SEQ ID NO: 270891 - DNA, 50 bp, Artificial
  Synthetic oligonucleotide
aaacgcgcgcaccgtgggagagacgattgcgtgaggcaccgaccatttca

SEQ ID NO: 270892 - DNA, 50 bp, Artificial
  Synthetic oligonucleotide
aaacgcggctggctcgcactgtgactggttcaaacgccgtgaggactcct

SEQ ID NO: 270893 - DNA, 50 bp, Artificial
  Synthetic oligonucleotide
aaacggccggtggaagagaggcatcgagcctgtgcgacagtgaagcttcg

SEQ ID NO: 270894 - DNA, 50 bp, Artificial
  Synthetic oligonucleotide
aaacggctcaattgctggccctgtccaggcagtagccaagtacgctgtgc

SEQ ID NO: 270895 - DNA, 50 bp, Artificial
  Synthetic oligonucleotide
aaacgggatggttctcccctgggcgcaaccctcctgcctaaccaggtcca

SEQ ID NO: 270896 - DNA, 50 bp, Artificial
  Synthetic oligonucleotide
aaacggggtcggtagttgtggcgtgcggacacagcgagtcccacgatgcg

SEQ ID NO: 270897 - DNA, 50 bp, Artificial
  Synthetic oligonucleotide
aaacggtagggagggggaatatcggagcgtgagcatttccccgcagtcgg

SEQ ID NO: 270898 - DNA, 50 bp, Artificial
  Synthetic oligonucleotide
aaacggtgcgtacaacgcagaggacccacgaggagaccaacgcggttgta

SEQ ID NO: 270899 - DNA, 55 bp, Artificial
  Synthetic oligonucleotide
gagaaggtagctgcctcgctatttcgcataatgctacctggggaaaccagacgtg

SEQ ID NO: 270900 - DNA, 50 bp, Artificial
  Synthetic oligonucleotide
aaacgtccagagctcctccttgggaggcgcagtgatgacacgccctgtct

SEQ ID NO: 270901 - DNA, 50 bp, Artificial
  Synthetic oligonucleotide
aaacgttccggggcaattggggagccgaagcctcgttggcccaagggtgg

SEQ ID NO: 270902 - DNA, 50 bp, Artificial
  Synthetic oligonucleotide
aaacgttggcgccttcagtgtctttacccgcggcgctcccattattggcc

SEQ ID NO: 270903 - DNA, 50 bp, Artificial
  Synthetic oligonucleotide
aaactacgtgtgcacgtcgcgtgagggagaacccgggatgcattcccacc

SEQ ID NO: 270904 - DNA, 50 bp, Artificial
  Synthetic oligonucleotide
aaactccccaagcactcaggtgggcttgctgtcctgcgctcgactgagtc

SEQ ID NO: 270905 - DNA, 50 bp, Artificial
  Synthetic oligonucleotide
aaacttgctggccccctccccagttggcagttggttccgggcctgggacc

SEQ ID NO: 270906 - DNA, 50 bp, Artificial
  Synthetic oligonucleotide
aaactttccggtgtctccggctatgtcgtggtggacgttctgagcgggcg

SEQ ID NO: 270907 - DNA, 50 bp, Artificial
  Synthetic oligonucleotide
aaagaagtccctgtgcgcactttcgggtgccctgtcccgatccgacgtcc

SEQ ID NO: 270908 - DNA, 50 bp, Artificial
  Synthetic oligonucleotide
aaaaccgcccccaattcaacgcagcctcacaaacgtcccgtcgacccacg

SEQ ID NO: 270909 - DNA, 50 bp, Artificial
  Synthetic oligonucleotide
aaaacctcgtattgggcgccgtggggtatgccaacatgccgggtcggttt

SEQ ID NO: 270910 - DNA, 54 bp, Artificial
  Synthetic oligonucleotide
cccggttccgacaagaatactaccgacctacggatactgcctcagctagttacg

SEQ ID NO: 270911 - DNA, 50 bp, Artificial
  Synthetic oligonucleotide
aaaacggttgagctggctgtgctgtgcgagtgtccacgtcggcgaatccc

SEQ ID NO: 270912 - DNA, 50 bp, Artificial
  Synthetic oligonucleotide
aaaactcatgcaacggagcggagtggcggggcccagacagcggcatgtcg

SEQ ID NO: 270913 - DNA, 50 bp, Artificial
  Synthetic oligonucleotide
aaaagacgaacccgacgtgtccagcgcatctagtccagcgcgtccctcca

SEQ ID NO: 270914 - DNA, 50 bp, Artificial
  Synthetic oligonucleotide
aaaagcacgccaggcagcctcgactgtcctctcacgcctctggttggtcc

SEQ ID NO: 270915 - DNA, 50 bp, Artificial
  Synthetic oligonucleotide
aaaagctcaaagtgggccatggcgccgagacagggacgaccatgggtccc

SEQ ID NO: 270916 - DNA, 50 bp, Artificial
  Synthetic oligonucleotide
aaaaggcgcgtgagggcagtgacggccacgctgtcggtagtgctcacaac

SEQ ID NO: 270917 - DNA, 50 bp, Artificial
  Synthetic oligonucleotide
aaaagggggcgtctgcctggccattgccaaacgaggcgttcagcatgtcc

SEQ ID NO: 270918 - DNA, 50 bp, Artificial
  Synthetic oligonucleotide
aaacaacccgtgcgcccacattccatggtcccctgtcgagccctgacgcg

SEQ ID NO: 270919 - DNA, 50 bp, Artificial
  Synthetic oligonucleotide
aaacacgacccgacccattcacacaccgtcagcggtaaatcggcagggcc

SEQ ID NO: 270920 - DNA, 50 bp, Artificial
  Synthetic oligonucleotide
aaacacggctaagcgagatctgtgcgatccacatcggctctgctccgcga

SEQ ID NO: 270921 - DNA, 55 bp, Artificial
  Synthetic oligonucleotide
gagagttcttgatgcctcgaagcattcatctgggtctttcttcctcaagatgggt

SEQ ID NO: 270922 - DNA, 50 bp, Artificial
  Synthetic oligonucleotide
aaacacggggagcattgtgcttgccacggtgtaagcgagtcggtgagcgc

SEQ ID NO: 270923 - DNA, 50 bp, Artificial
  Synthetic oligonucleotide
aaacatgatccgccctcggagtaagctccggtgtcgccctctgagccctc

SEQ ID NO: 270924 - DNA, 50 bp, Artificial
  Synthetic oligonucleotide
aaaccattagctcgtccagggggcccgtcgtgatactgggtgctctcgct

SEQ ID NO: 270925 - DNA, 50 bp, Artificial
  Synthetic oligonucleotide
aaacccaacttgcgaccggctgcctcacttcccgccaagggctgacaggc

SEQ ID NO: 270926 - DNA, 50 bp, Artificial
  Synthetic oligonucleotide
aaacccaccatgccctttggagattcggtcctgttgcgttaacggcggcc

SEQ ID NO: 270927 - DNA, 50 bp, Artificial
  Synthetic oligonucleotide
aaacccccagggatcgccggcaagaagtcacggacacgaacgaacaccgt

SEQ ID NO: 270928 - DNA, 50 bp, Artificial
  Synthetic oligonucleotide
aaaccccgcgaacatgtccccacacgcttgcccggtggtacaagcgcaag

SEQ ID NO: 270929 - DNA, 50 bp, Artificial
  Synthetic oligonucleotide
aaaccccttgtttggcgtgtcaggctgaggctatgcggtccgtgaaccct

SEQ ID NO: 270930 - DNA, 50 bp, Artificial
  Synthetic oligonucleotide
aaacccgcaacgccagattccgatccccgagcaactccgttaagctgcta

SEQ ID NO: 270931 - DNA, 50 bp, Artificial
  Synthetic oligonucleotide
aaaccctccgaatctcaccgcacttcggcgtccctgacacttccgcgcac

SEQ ID NO: 270932 - DNA, 55 bp, Artificial
  Synthetic oligonucleotide
gagatagaggctacaaagaacgctttcgggctgtcattatccaaatgaggctgtc

SEQ ID NO: 270933 - DNA, 50 bp, Artificial
  Synthetic oligonucleotide
aaaccgagtccgactcgtgactccgacaatggcgagacggagggagggct

SEQ ID NO: 270934 - DNA, 50 bp, Artificial
  Synthetic oligonucleotide
aaatggggcaactcccctggcagacgcaccaccaagtctgatccttggcg

SEQ ID NO: 270935 - DNA, 50 bp, Artificial
  Synthetic oligonucleotide
aaattctgagtgcacagcaatgagaggcgcccaagcccagtcacgcgcat

SEQ ID NO: 270936 - DNA, 50 bp, Artificial
  Synthetic oligonucleotide
aacaagcagactgatacgttggcggacagtcgggcgctgtaggcagggca

SEQ ID NO: 270937 - DNA, 50 bp, Artificial
  Synthetic oligonucleotide
aacaaggatgtcaagccggcgagagtggggtcattcgctccgggattcgg

SEQ ID NO: 270938 - DNA, 50 bp, Artificial
  Synthetic oligonucleotide
aacaagtacattgcagacaaggcctgccgagtagaaggcgcgcccacgcc

SEQ ID NO: 270939 - DNA, 50 bp, Artificial
  Synthetic oligonucleotide
aacaatcgttcgggtcttggccaggggtccgcagaggaaccgttggacaa

SEQ ID NO: 270940 - DNA, 50 bp, Artificial
  Synthetic oligonucleotide
aacaatgcacatgcgccctgtgatccaacagcacactatgcggcggctgg

SEQ ID NO: 270941 - DNA, 50 bp, Artificial
  Synthetic oligonucleotide
aacaatgcgcgcctggatgagctctctgcaaaggtctccgccctccgagg

SEQ ID NO: 270942 - DNA, 50 bp, Artificial
  Synthetic oligonucleotide
aacacaaccgctcctcctggtaaccccttgccggctcccacagcaccgta

SEQ ID NO: 270943 - DNA, 55 bp, Artificial
  Synthetic oligonucleotide
gcagaatcgtgccggcgctaatcccaaagtgcttggatcgtgttgatccccggaa

SEQ ID NO: 270944 - DNA, 50 bp, Artificial
  Synthetic oligonucleotide
aacacccggcggtggaaacaactgctttgaccgagccgtgcaaggtctcc

SEQ ID NO: 270945 - DNA, 50 bp, Artificial
  Synthetic oligonucleotide
aacacgcaacgcagctgtcccgaagcttttgaacgaccgggcgataggcc

SEQ ID NO: 270946 - DNA, 50 bp, Artificial
  Synthetic oligonucleotide
aacacggccgttggcctcctgcgctctattcgacttcctcgctgctccgg

SEQ ID NO: 270947 - DNA, 50 bp, Artificial
  Synthetic oligonucleotide
aacactcgagggccacactctccgacatccaaatggagccgcgagcgaag

SEQ ID NO: 270948 - DNA, 50 bp, Artificial
  Synthetic oligonucleotide
aacactgcccggactcgtcatgcccgctcgaagctttctcaaggtgtcgg

SEQ ID NO: 270949 - DNA, 50 bp, Artificial
  Synthetic oligonucleotide
aacactgggcgccaagaaggactgggctactcccgaacgcatcgacagta

SEQ ID NO: 270950 - DNA, 50 bp, Artificial
  Synthetic oligonucleotide
aacacttgggaagagtgccccagagggcgtgcacagtttttggccgccac

SEQ ID NO: 270951 - DNA, 50 bp, Artificial
  Synthetic oligonucleotide
aacagcctgtcatcgcgctgtgagggggaacatccttaggccgcgctgac

SEQ ID NO: 270952 - DNA, 50 bp, Artificial
  Synthetic oligonucleotide
aacagctccgaatggccctggtcccgtcaaaggagtgatgtcgacggccc

SEQ ID NO: 270953 - DNA, 50 bp, Artificial
  Synthetic oligonucleotide
aacaggacaatccgaccgattgccagcccctggttcctcggatacccctg

SEQ ID NO: 270954 - DNA, 55 bp, Artificial
  Synthetic oligonucleotide
aaggtatgggcatggcattctcggtagacgcccgtcgatacgtaggtcggggtcc

SEQ ID NO: 270955 - DNA, 50 bp, Artificial
  Synthetic oligonucleotide
aacaggaggctcaacccaaccctggatgcggccgtctcgccagtcagtga

SEQ ID NO: 270956 - DNA, 50 bp, Artificial
  Synthetic oligonucleotide
aacaggccgactgtgctggtgcgtccaagaggaacgaccaccctttgagc

SEQ ID NO: 270957 - DNA, 50 bp, Artificial
  Synthetic oligonucleotide
aacaggcgcactttttgctcgtcgtcccttcgagggccatcaactgccga

SEQ ID NO: 270958 - DNA, 50 bp, Artificial
  Synthetic oligonucleotide
aaagacccgctccaaatctggccgcaagagctggcgacattggtgggctc

SEQ ID NO: 270959 - DNA, 50 bp, Artificial
  Synthetic oligonucleotide
aaagacgagtatggagacaccccgtgagcatgagagccccgtagggggcg

SEQ ID NO: 270960 - DNA, 50 bp, Artificial
  Synthetic oligonucleotide
aaagagcgcaggtggcttgcctcgtccaggtgctatggcccgtagcggca

SEQ ID NO: 270961 - DNA, 50 bp, Artificial
  Synthetic oligonucleotide
aaagatcgcagcccaaacctcccggaacccacagccgtcagtgacagtcc

SEQ ID NO: 270962 - DNA, 50 bp, Artificial
  Synthetic oligonucleotide
aaagcgctcctgggtccagcaagttgttagtggcaggtacggccgtgtcc

SEQ ID NO: 270963 - DNA, 50 bp, Artificial
  Synthetic oligonucleotide
aaagcggcatgataagctcgcaccgtcgttgtctcacggagaccagccct

SEQ ID NO: 270964 - DNA, 50 bp, Artificial
  Synthetic oligonucleotide
aaagcggtccggggctagaatgagttgggcagtccgtgcaagtgcccgat

SEQ ID NO: 270965 - DNA, 55 bp, Artificial
  Synthetic oligonucleotide
gcagattccgtatgacaacaggccatcacacagtgtcgagacatatgcaccattg

SEQ ID NO: 270966 - DNA, 50 bp, Artificial
  Synthetic oligonucleotide
aaagcgtacgcggcattcagcgaggattgtggccctgggacaactcgaca

SEQ ID NO: 270967 - DNA, 50 bp, Artificial
  Synthetic oligonucleotide
aaagctcgcagcggacttcttccattcctggagcgccccaatctgcctcg

SEQ ID NO: 270968 - DNA, 50 bp, Artificial
  Synthetic oligonucleotide
aaagctgcatcccgtcagggggtggctgtatggacccagagtctggctga

SEQ ID NO: 270969 - DNA, 50 bp, Artificial
  Synthetic oligonucleotide
aaagcttccccgacagtcccgtcgcactagccacacacgtgcagcagtat

SEQ ID NO: 270970 - DNA, 50 bp, Artificial
  Synthetic oligonucleotide
aaagctttggacgtggcaaggcgacaccgggcgagactgctaatggtcgc

SEQ ID NO: 270971 - DNA, 50 bp, Artificial
  Synthetic oligonucleotide
aaaggcaccagaggtgattgccgcgtacaatcagtcgtcgccagcaccct

SEQ ID NO: 270972 - DNA, 50 bp, Artificial
  Synthetic oligonucleotide
aaaggcacgactcgggtctgttccaaacacccacgccacgctagtggcag

SEQ ID NO: 270973 - DNA, 50 bp, Artificial
  Synthetic oligonucleotide
aaaggcgcatcagccccttgagctaggtacgacatttctagcgcgcggcc

SEQ ID NO: 270974 - DNA, 50 bp, Artificial
  Synthetic oligonucleotide
aaagggaccatcagcagggctagtaatgctcgagatggccggtccagccg

SEQ ID NO: 270975 - DNA, 50 bp, Artificial
  Synthetic oligonucleotide
aaaggtgcggggacttgaggtgagggcatttcagagcgggcgactggttt

SEQ ID NO: 270976 - DNA, 55 bp, Artificial
  Synthetic oligonucleotide
gcagcgcttgcaaagcgtactgttcggataaaggaacctcgcactggtccgcttt

SEQ ID NO: 270977 - DNA, 50 bp, Artificial
  Synthetic oligonucleotide
aaaggtggtaagcccgtggatgatacaagccgcctaggtcccggccagtt

SEQ ID NO: 270978 - DNA, 50 bp, Artificial
  Synthetic oligonucleotide
aaagtcgcatgccgaaggttgagccccatgcaaggctgttggtccgtcat

SEQ ID NO: 270979 - DNA, 50 bp, Artificial
  Synthetic oligonucleotide
aaagtctgggtcgccccagttcgtgatatttgccacccatggcgctgggg

SEQ ID NO: 270980 - DNA, 50 bp, Artificial
  Synthetic oligonucleotide
aaagtcttgccggtgtcggcagagttgaggacaacgaggccaatggcgta

SEQ ID NO: 270981 - DNA, 50 bp, Artificial
  Synthetic oligonucleotide
aaatacggccgagggatggactgcttggccgctaacgacgagccaaccac

SEQ ID NO: 270982 - DNA, 50 bp, Artificial
  Synthetic oligonucleotide
aaatccccgttcccagctcgctcatggagaacaagtgtcccacgtccgcc

SEQ ID NO: 270983 - DNA, 50 bp, Artificial
  Synthetic oligonucleotide
acgtcatggtaccccgctcgtgcgtacggttcatgggaccccaactggcg

SEQ ID NO: 270984 - DNA, 50 bp, Artificial
  Synthetic oligonucleotide
acgtcccgcatttgaagcagatacgggctggggtgctgcgtcgtctgcag

SEQ ID NO: 270985 - DNA, 50 bp, Artificial
  Synthetic oligonucleotide
acgtcctcctcaagccccgcgctggtaaactcggtctcggaacggcctac

SEQ ID NO: 270986 - DNA, 50 bp, Artificial
  Synthetic oligonucleotide
acgtgcttgctaccaaccctcgaattgcctaaacgggccctggagcgcca

SEQ ID NO: 270987 - DNA, 55 bp, Artificial
  Synthetic oligonucleotide
gcaggctgttgatcgagcgatgtaggcatatggtatggtatggccagtgtctgag

SEQ ID NO: 270988 - DNA, 50 bp, Artificial
  Synthetic oligonucleotide
actacgctggggccctttggtgccgaggctgctgcactagcggaatgtgc

SEQ ID NO: 270989 - DNA, 50 bp, Artificial
  Synthetic oligonucleotide
actcagcacagtcgcagggacggaccgccgggacccacaaaccttatctg

SEQ ID NO: 270990 - DNA, 50 bp, Artificial
  Synthetic oligonucleotide
actcccggggagtcaaactggcctcatcacgggtgtagtggtcgccagca

SEQ ID NO: 270991 - DNA, 50 bp, Artificial
  Synthetic oligonucleotide
actccgtccgcccaagcactcgggccttgaagcgttgcacatgcttcatg

SEQ ID NO: 270992 - DNA, 50 bp, Artificial
  Synthetic oligonucleotide
actcgacaggttagtccgcccgatgtctggaggagcaagcttggccgcgc

SEQ ID NO: 270993 - DNA, 50 bp, Artificial
  Synthetic oligonucleotide
actgcgaaaaggagtcctggccaaccgaccaggccgacaattgcggatgg

SEQ ID NO: 270994 - DNA, 50 bp, Artificial
  Synthetic oligonucleotide
acttaagcctccgcgacgccaatggtgctcgccgcccccagatttccggt

SEQ ID NO: 270995 - DNA, 50 bp, Artificial
  Synthetic oligonucleotide
acttggcagcgcagaaagacatgttggcatcgggggcaacgcggcactca

SEQ ID NO: 270996 - DNA, 50 bp, Artificial
  Synthetic oligonucleotide
acttgtgctagcccagcccaacccccaagacagacacggtacgtccccac

SEQ ID NO: 270997 - DNA, 50 bp, Artificial
  Synthetic oligonucleotide
agaagaaacgggcaacacgtcgagtgagcgccaacgctgcctgagtagga

SEQ ID NO: 270998 - DNA, 57 bp, Artificial
  Synthetic oligonucleotide
actgttactacggtcctctggatgtcgagaagttacgtacctgcggctacaatggtg

SEQ ID NO: 270999 - DNA, 55 bp, Artificial
  Synthetic oligonucleotide
gcagtcttgtctccgaacatcgttggttcaggctctctgtcacctagtgtctccc

SEQ ID NO: 271000 - DNA, 50 bp, Artificial
  Synthetic oligonucleotide
agaaggcattccctgaggcttctaccgtggggcatgtgaagcccgcagtc

SEQ ID NO: 271001 - DNA, 50 bp, Artificial
  Synthetic oligonucleotide
agaatgagggttggcgggcactcttcaaggggcttggccctaccacggtt

SEQ ID NO: 271002 - DNA, 50 bp, Artificial
  Synthetic oligonucleotide
agacgcgttccagggctaatttccagcgcgactcttgcacgtccacggtg

SEQ ID NO: 271003 - DNA, 50 bp, Artificial
  Synthetic oligonucleotide
agacggaagacagaactgagtcgcgggacagcccaagatggggcggctac

SEQ ID NO: 271004 - DNA, 50 bp, Artificial
  Synthetic oligonucleotide
agacgtccgaaccaaacccgtgtttatctcgccaagcggcgacgagccac

SEQ ID NO: 271005 - DNA, 50 bp, Artificial
  Synthetic oligonucleotide
agacttcggggtcctgcagagttgcaccaaagggtaggggtgggcagatt

SEQ ID NO: 271006 - DNA, 50 bp, Artificial
  Synthetic oligonucleotide
agagaacaacgcgctcggagccacaagtcccctgactgtgagtcccgaca

SEQ ID NO: 271007 - DNA, 50 bp, Artificial
  Synthetic oligonucleotide
agagaggtgttggggatcgtctctggggtaaggaggggcgcgactaagga

SEQ ID NO: 271008 - DNA, 50 bp, Artificial
  Synthetic oligonucleotide
acgagcccgttggtttcggttcttggaccacctggcaccgacccttgttg

SEQ ID NO: 271009 - DNA, 50 bp, Artificial
  Synthetic oligonucleotide
acgagctgcaacttcaggtgaggcgaagggctgtctgtgcgacaagcagc

SEQ ID NO: 271010 - DNA, 55 bp, Artificial
  Synthetic oligonucleotide
gcatcaggagatgcgtcacgtcgggaaagatgcgatcttcggcaaatatggcaac

SEQ ID NO: 271011 - DNA, 50 bp, Artificial
  Synthetic oligonucleotide
acgataagaaggattgtgctcaccgcgcctaggcccactcgcgtgccctt

SEQ ID NO: 271012 - DNA, 50 bp, Artificial
  Synthetic oligonucleotide
acgcacaccactcctgctcagacccgtctgcccatcgccactttgcaacc

SEQ ID NO: 271013 - DNA, 50 bp, Artificial
  Synthetic oligonucleotide
acgcatcagaggagcgctcggcacggacttcagactcggaccctgggact

SEQ ID NO: 271014 - DNA, 50 bp, Artificial
  Synthetic oligonucleotide
acgcatggacctggtcgtgttggaccgaagtcagggtctcctagccacgc

SEQ ID NO: 271015 - DNA, 50 bp, Artificial
  Synthetic oligonucleotide
acgccaccaacaagccatgacggcactgcgacgacagtggtttccaccag

SEQ ID NO: 271016 - DNA, 50 bp, Artificial
  Synthetic oligonucleotide
acgccagagaaacgaagccggggatagagtccctccagacaccgacgcgc

SEQ ID NO: 271017 - DNA, 50 bp, Artificial
  Synthetic oligonucleotide
acgcccccaacggtactaccaccattgctccgccggatcccaacagacgc

SEQ ID NO: 271018 - DNA, 50 bp, Artificial
  Synthetic oligonucleotide
acgccgcgcctcaatgtggcacacctttctactcgcgacccaagacgcca

SEQ ID NO: 271019 - DNA, 50 bp, Artificial
  Synthetic oligonucleotide
acgccgtcctaggtctcgtggcagactgggctcgacagcagctcgtggta

SEQ ID NO: 271020 - DNA, 50 bp, Artificial
  Synthetic oligonucleotide
acgccgtctcaccgcctcacaaactcaccctgtgtacgacagacgaggga

SEQ ID NO: 271021 - DNA, 55 bp, Artificial
  Synthetic oligonucleotide
gcatcgattacatcccttggcccgacctgcgagactttctctgtacgaatccacg

SEQ ID NO: 271022 - DNA, 50 bp, Artificial
  Synthetic oligonucleotide
acgcgacgggaactggtattctctcgagcctgcagagcggggccaggagt

SEQ ID NO: 271023 - DNA, 50 bp, Artificial
  Synthetic oligonucleotide
acgcgatggattccactgccgaaagcccttcagcccccgtcacgttgagc

SEQ ID NO: 271024 - DNA, 50 bp, Artificial
  Synthetic oligonucleotide
acgcgattgtgaactccgtggggattgttgagggtgactgggtggcctgc

SEQ ID NO: 271025 - DNA, 50 bp, Artificial
  Synthetic oligonucleotide
acgcgcggccgacataaggtttctcgctccccgatgcttgaccgatgact

SEQ ID NO: 271026 - DNA, 50 bp, Artificial
  Synthetic oligonucleotide
acgcggagaagacgtggccatgccaggcgaaccagtcagagcacccccga

SEQ ID NO: 271027 - DNA, 50 bp, Artificial
  Synthetic oligonucleotide
acgctgccaagtgggccgaggcatggggtagagtcgtcgagaaacactcc

SEQ ID NO: 271028 - DNA, 50 bp, Artificial
  Synthetic oligonucleotide
acggaacccacctgccagcgtagctcaccagtacgtacccgtagcccaag

SEQ ID NO: 271029 - DNA, 50 bp, Artificial
  Synthetic oligonucleotide
acggagccctcggtgccacactcggatcctagacgcaagttcgcatggtc

SEQ ID NO: 271030 - DNA, 50 bp, Artificial
  Synthetic oligonucleotide
acggcgaaccctcgtgggtgcactcaaaggtcctcgagtcttacccccac

SEQ ID NO: 271031 - DNA, 50 bp, Artificial
  Synthetic oligonucleotide
acggctcgcgttggcggtggctatcttgccttttgcgaagcggaacaggg

SEQ ID NO: 271032 - DNA, 55 bp, Artificial
  Synthetic oligonucleotide
gcatctccttagccctgaccctttcatctagggcccaatgcgcgtgataccagtc

SEQ ID NO: 271033 - DNA, 50 bp, Artificial
  Synthetic oligonucleotide
acggtatacttcaccccgcctttacgccttttcgccccagcgtccggctt

SEQ ID NO: 271034 - DNA, 50 bp, Artificial
  Synthetic oligonucleotide
agcgtccccgtgtgcttcgcccaatcatggaagaacctcacaggggcgga

SEQ ID NO: 271035 - DNA, 50 bp, Artificial
  Synthetic oligonucleotide
agcgtctagcctacctcgttgcttcagagcagcgaatctggcgccgtgta

SEQ ID NO: 271036 - DNA, 50 bp, Artificial
  Synthetic oligonucleotide
agcgtgagcacggatggacccatcgccacgagtttggacgcggtataagc

SEQ ID NO: 271037 - DNA, 50 bp, Artificial
  Synthetic oligonucleotide
agcgttgataggagccttggcactgttacttgtctgaatgatgggcaaat

SEQ ID NO: 271038 - DNA, 50 bp, Artificial
  Synthetic oligonucleotide
agcgttggcgtcggctgagggtggtctataggttcgtacctcgagaggga

SEQ ID NO: 271039 - DNA, 50 bp, Artificial
  Synthetic oligonucleotide
agctacgcggggttgagctatggcggggatggcgctcacgttttcgtgct

SEQ ID NO: 271040 - DNA, 50 bp, Artificial
  Synthetic oligonucleotide
agctccaagctcgcgatcccacaacgccccaccgacattgccttcctcac

SEQ ID NO: 271041 - DNA, 50 bp, Artificial
  Synthetic oligonucleotide
agcttccggacacatggcccggtcccgaaaagacagaagccctcgttgag

SEQ ID NO: 271042 - DNA, 50 bp, Artificial
  Synthetic oligonucleotide
agcttcgcggagggtcgagtgcatcgttgcgtatgcagcattgtaccggg

SEQ ID NO: 271043 - DNA, 53 bp, Artificial
  Synthetic oligonucleotide
gccacaaacctgagatcaagtaccgggaaaactaaacctcggttggaacagtc

SEQ ID NO: 271044 - DNA, 50 bp, Artificial
  Synthetic oligonucleotide
aggagatggctgacggatactgctctgtgaagcccgggcctggtgagggg

SEQ ID NO: 271045 - DNA, 50 bp, Artificial
  Synthetic oligonucleotide
aggcagttcgcgatagagaccccatcagagccgtcatccgaggtaccggg

SEQ ID NO: 271046 - DNA, 50 bp, Artificial
  Synthetic oligonucleotide
aggcatgcaaggattgctcattggatccgggactgttggtcccaaggcga

SEQ ID NO: 271047 - DNA, 50 bp, Artificial
  Synthetic oligonucleotide
aggcccagtcatgccccgatgttcacatctttggcgcccgtgagacatcc

SEQ ID NO: 271048 - DNA, 50 bp, Artificial
  Synthetic oligonucleotide
aggcttgggggcagcggctgtgatagagacggatgcaagggttctttggg

SEQ ID NO: 271049 - DNA, 50 bp, Artificial
  Synthetic oligonucleotide
agggggcaactcggcggatctctgtctctggcggaacccgcagagcaggt

SEQ ID NO: 271050 - DNA, 50 bp, Artificial
  Synthetic oligonucleotide
agggttctgaccgggctgaggcatgtagggaggttgctgcataggcgcac

SEQ ID NO: 271051 - DNA, 50 bp, Artificial
  Synthetic oligonucleotide
agtccaagtctcgtgcgtcgtcacgggtctgctatcaagcccaacgccct

SEQ ID NO: 271052 - DNA, 50 bp, Artificial
  Synthetic oligonucleotide
atacttgagccgactgtccgccagtgtacgagctctcggggctcggatcg

SEQ ID NO: 271053 - DNA, 50 bp, Artificial
  Synthetic oligonucleotide
atccgaattacgcagtaaacccggtccaaaggagggccaagacgcccccg

SEQ ID NO: 271054 - DNA, 55 bp, Artificial
  Synthetic oligonucleotide
aaggctaaatgactcctggaaagactagaagtaagcgagactcctcttgtgcccc

SEQ ID NO: 271055 - DNA, 50 bp, Artificial
  Synthetic oligonucleotide
atcctcttgatgcccgcaagtcggagcatctcggtccagcgttcccacat

SEQ ID NO: 271056 - DNA, 50 bp, Artificial
  Synthetic oligonucleotide
atgaggagggcgagtcaccatttgaccgcgagggagctagcaagtcccca

SEQ ID NO: 271057 - DNA, 50 bp, Artificial
  Synthetic oligonucleotide
atgcccgcaagtcggagcatctcggtccagcgttcccacatgtaaggctt

SEQ ID NO: 271058 - DNA, 50 bp, Artificial
  Synthetic oligonucleotide
agagcaggctcacacgctgtcagctagggtgtcgcaccaactgggcgact

SEQ ID NO: 271059 - DNA, 50 bp, Artificial
  Synthetic oligonucleotide
agaggacgcgtcgacaatgagctacgcggggttgagctatggcggggatg

SEQ ID NO: 271060 - DNA, 50 bp, Artificial
  Synthetic oligonucleotide
agaggcacgtcctgcgtagtgtgaggagcagctctggtggtttcgggccc

SEQ ID NO: 271061 - DNA, 50 bp, Artificial
  Synthetic oligonucleotide
agagggaggcgccgttcgctcccgtcaattaccgcagaccgggcggggat

SEQ ID NO: 271062 - DNA, 50 bp, Artificial
  Synthetic oligonucleotide
agagggcccattacaccacggcaaacgacgcgatcgctaccctgaagacg

SEQ ID NO: 271063 - DNA, 50 bp, Artificial
  Synthetic oligonucleotide
agaggtgccggccactcatcgggcggactggagtggttctcgccaggagt

SEQ ID NO: 271064 - DNA, 50 bp, Artificial
  Synthetic oligonucleotide
agaggttgccaacggcgtgaatggtaccaacggccaccctacacctcgtc

SEQ ID NO: 271065 - DNA, 55 bp, Artificial
  Synthetic oligonucleotide
gccagatagcttatcttaatgcacttagcacctctagttactactaggccccact

SEQ ID NO: 271066 - DNA, 50 bp, Artificial
  Synthetic oligonucleotide
agagtcccgtccggctctaggtacctgcagtgtaccgcatgtcgacgcgt

SEQ ID NO: 271067 - DNA, 50 bp, Artificial
  Synthetic oligonucleotide
agattccagtgttctacctccccctccgcggtatcccaccatggggccct

SEQ ID NO: 271068 - DNA, 50 bp, Artificial
  Synthetic oligonucleotide
agcaatagctgccacgatggcatccaaagcactgctgtgcgagggaccgg

SEQ ID NO: 271069 - DNA, 50 bp, Artificial
  Synthetic oligonucleotide
agcacccgcgtgtgtctgcccagcgctatccagccacttggcgaggagca

SEQ ID NO: 271070 - DNA, 50 bp, Artificial
  Synthetic oligonucleotide
agcagcgtacggatgcaccgagttgggagggcctaccacgaggactgata

SEQ ID NO: 271071 - DNA, 50 bp, Artificial
  Synthetic oligonucleotide
agcaggctgtgcgtagcatcagtctcagcggctgcggtcctcgggagaag

SEQ ID NO: 271072 - DNA, 50 bp, Artificial
  Synthetic oligonucleotide
agcattggtgccggatccaagacatcccatgagcggaccgcagtaagggc

SEQ ID NO: 271073 - DNA, 50 bp, Artificial
  Synthetic oligonucleotide
agccaagcacgtttgcaggattgtccagttagcgacgggccagaccgtcc

SEQ ID NO: 271074 - DNA, 50 bp, Artificial
  Synthetic oligonucleotide
agccagttcgccttgtgaggaacgggtggctttcccaagcctgtggtcta

SEQ ID NO: 271075 - DNA, 50 bp, Artificial
  Synthetic oligonucleotide
agcccagtcgcccgtcttctctcagtttgccgatactctcgcgggtctcc

SEQ ID NO: 271076 - DNA, 55 bp, Artificial
  Synthetic oligonucleotide
gcccagccagtcagcatagttatcccgacctttaaagtctcgaccggcagcctcc

SEQ ID NO: 271077 - DNA, 50 bp, Artificial
  Synthetic oligonucleotide
agcctatgtgcacacagcaaactcggacttggctttctcgggccctcccg

SEQ ID NO: 271078 - DNA, 50 bp, Artificial
  Synthetic oligonucleotide
agcctgcctaacaaggctctccgagttggagggggtgccatagcctcagt

SEQ ID NO: 271079 - DNA, 50 bp, Artificial
  Synthetic oligonucleotide
agcgagtccgggtcaggcgtccaagggtttgtgttttcgactatccgggg

SEQ ID NO: 271080 - DNA, 50 bp, Artificial
  Synthetic oligonucleotide
agcgcgttaggtccaggcgtccaccccgtgtagagacgaagctcagtgat

SEQ ID NO: 271081 - DNA, 50 bp, Artificial
  Synthetic oligonucleotide
agcgggcatagcaacacctacctttcgctcgctcccagctttcccggcgt

SEQ ID NO: 271082 - DNA, 50 bp, Artificial
  Synthetic oligonucleotide
agcggggtcatgggactggattcagttcatcattagggagggggcacgga

SEQ ID NO: 271083 - DNA, 50 bp, Artificial
  Synthetic oligonucleotide
aattgaagtcttgggcgacgggcgagggttatgggtggttgcagtcgcgg

SEQ ID NO: 271084 - DNA, 50 bp, Artificial
  Synthetic oligonucleotide
aattggggaacccatcccagccctcttgtgacggctctgtaggggcgctt

SEQ ID NO: 271085 - DNA, 50 bp, Artificial
  Synthetic oligonucleotide
acaaaagggttgccgtgatgccgagcgtaggagctcagccctgctagcgc

SEQ ID NO: 271086 - DNA, 50 bp, Artificial
  Synthetic oligonucleotide
acaaccacgtcaggggagtcctgccttctgggccacaagtccagtctggc

SEQ ID NO: 271087 - DNA, 55 bp, Artificial
  Synthetic oligonucleotide
gcccattcacagatacgggcttccgcaaatagtctctctctcgcacgatttagag

SEQ ID NO: 271088 - DNA, 50 bp, Artificial
  Synthetic oligonucleotide
acaacgggagtaccggcagtgacggggcagttggtaacctcggggccgca

SEQ ID NO: 271089 - DNA, 50 bp, Artificial
  Synthetic oligonucleotide
acaagcacgccggtgacaagaggaggcgtagcagtctggtcggggtgaat

SEQ ID NO: 271090 - DNA, 50 bp, Artificial
  Synthetic oligonucleotide
acaatttacggcgcgggatcggaagaaagtgggggccatcggagccgact

SEQ ID NO: 271091 - DNA, 50 bp, Artificial
  Synthetic oligonucleotide
acaccaagtgagtaatccagtcaggcacggggtcctgcggtctcgcgctt

SEQ ID NO: 271092 - DNA, 50 bp, Artificial
  Synthetic oligonucleotide
acaccacggcaaacgacgcgatcgctaccctgaagacgatgggcgtcaca

SEQ ID NO: 271093 - DNA, 50 bp, Artificial
  Synthetic oligonucleotide
acacccgcaaggggccagtggtgcacaaaacgcgagacgtctggacacac

SEQ ID NO: 271094 - DNA, 50 bp, Artificial
  Synthetic oligonucleotide
acacccgcactcaaggtacccgggctgcactgttcgtcaagccacacgct

SEQ ID NO: 271095 - DNA, 50 bp, Artificial
  Synthetic oligonucleotide
acacccgtacaacatcgggggccacgccagtacaaatgccactccgtggt

SEQ ID NO: 271096 - DNA, 50 bp, Artificial
  Synthetic oligonucleotide
acaccctgatagcccgtctccgaagagcctaccgcgcccctgaaccatgc

SEQ ID NO: 271097 - DNA, 50 bp, Artificial
  Synthetic oligonucleotide
acacgacccgactgggtgcataccgttgaggcggccaatgcctaccgtgg

SEQ ID NO: 271098 - DNA, 55 bp, Artificial
  Synthetic oligonucleotide
gccccttggacagacttgcagcgaagtcctccattgctatgtcgaatgagcttga

SEQ ID NO: 271099 - DNA, 50 bp, Artificial
  Synthetic oligonucleotide
acacggatcccgcggagcttgtgaacgcactgaaagggctcaacgtgcga

SEQ ID NO: 271100 - DNA, 50 bp, Artificial
  Synthetic oligonucleotide
acactccagacacggctgcatacagccctctggcctcgtttgcgcccaac

SEQ ID NO: 271101 - DNA, 50 bp, Artificial
  Synthetic oligonucleotide
acactgattgggccccgcgtaaacggggtcgacgtatggacacagccacg

SEQ ID NO: 271102 - DNA, 50 bp, Artificial
  Synthetic oligonucleotide
acagcggacgtagtgggggttttgttgaccgggacccgatgggcgggaac

SEQ ID NO: 271103 - DNA, 50 bp, Artificial
  Synthetic oligonucleotide
acaggagccgaagcacatcctcgggcagtccagggaatgggcctattccg

SEQ ID NO: 271104 - DNA, 50 bp, Artificial
  Synthetic oligonucleotide
acagggattagggaggcctagatgcttgcagatggagctccggcgggcga

SEQ ID NO: 271105 - DNA, 50 bp, Artificial
  Synthetic oligonucleotide
acagtctttgctggagcaccacggggagcaagtcccgttggttgagggta

SEQ ID NO: 271106 - DNA, 50 bp, Artificial
  Synthetic oligonucleotide
acatgcaccccgccttctgattcgacggtttgccttttgcgtcgcccgaa

SEQ ID NO: 271107 - DNA, 50 bp, Artificial
  Synthetic oligonucleotide
aagtctgcgaaggattgaagcgccagggcgaaaaggacggcgcgggatgg

SEQ ID NO: 271108 - DNA, 50 bp, Artificial
  Synthetic oligonucleotide
aagtgctcaggaggtcgtgactcgcgaggaaagcaagtcgcagcccgaag

SEQ ID NO: 271109 - DNA, 56 bp, Artificial
  Synthetic oligonucleotide
aggcggaggttactgctctcgttccctcttcgaaccataacctcctcttactcgca

SEQ ID NO: 271110 - DNA, 55 bp, Artificial
  Synthetic oligonucleotide
gcccgcaagctctctggcacaaagacacagcgatgcaattctatgatgtgtattg

SEQ ID NO: 271111 - DNA, 50 bp, Artificial
  Synthetic oligonucleotide
aagtggcgccctctccatcactaaggggtccaacgggctctcgcttcccg

SEQ ID NO: 271112 - DNA, 50 bp, Artificial
  Synthetic oligonucleotide
aagtgggtgtcatcctcgttaggcgcctcaatggcgatagcctctgcgcc

SEQ ID NO: 271113 - DNA, 50 bp, Artificial
  Synthetic oligonucleotide
aagttcgagctaagctcacgaagcgccgaagttcgatgctccgcggtgga

SEQ ID NO: 271114 - DNA, 50 bp, Artificial
  Synthetic oligonucleotide
aatacggcggcgggtgttcgtgttaggccctgtcctaggctccaactccc

SEQ ID NO: 271115 - DNA, 50 bp, Artificial
  Synthetic oligonucleotide
aatactgcgtccgcctttgggattctcgggagggttcggtgttgcggggg

SEQ ID NO: 271116 - DNA, 50 bp, Artificial
  Synthetic oligonucleotide
aatccaggaggggcgaacggggtttggccagcgggcatctgaggcatctg

SEQ ID NO: 271117 - DNA, 50 bp, Artificial
  Synthetic oligonucleotide
aatcccccggaacgaaattggcccagcacccgtagtctcccatcgtagcc

SEQ ID NO: 271118 - DNA, 50 bp, Artificial
  Synthetic oligonucleotide
aatccgctcgtggtgccgtcaaaggaccctgaggagcgctaatgccgccc

SEQ ID NO: 271119 - DNA, 50 bp, Artificial
  Synthetic oligonucleotide
aatcgcgcccgctctgccgctatggcttgtgatcgccagctatccgagtt

SEQ ID NO: 271120 - DNA, 50 bp, Artificial
  Synthetic oligonucleotide
aatcggacgcatttcaggggcgaccgagcagacttgacagagggggccat

SEQ ID NO: 271121 - DNA, 55 bp, Artificial
  Synthetic oligonucleotide
gcccggagcattccgcaccaatttcctcgacgccagtgtcaagagcaacatatca

SEQ ID NO: 271122 - DNA, 50 bp, Artificial
  Synthetic oligonucleotide
aatctagccgttgaggcgcccgcgtaacgccagatcctaggacgagcgtg

SEQ ID NO: 271123 - DNA, 50 bp, Artificial
  Synthetic oligonucleotide
aatgcaacggacacccgcactcaaggtacccgggctgcactgttcgtcaa

SEQ ID NO: 271124 - DNA, 50 bp, Artificial
  Synthetic oligonucleotide
aatgcagcatcgtgcgcccaacgtgctcacggcagtggataagaaggctc

SEQ ID NO: 271125 - DNA, 50 bp, Artificial
  Synthetic oligonucleotide
aatgccggacccaagccaacgggtctccgtggaagggcacgatgcatcgg

SEQ ID NO: 271126 - DNA, 50 bp, Artificial
  Synthetic oligonucleotide
aatgccgtgcaaaacgaagaacacggtatgagtccacggccagtcgcgcc

SEQ ID NO: 271127 - DNA, 50 bp, Artificial
  Synthetic oligonucleotide
aatgcctcccgaacagtagccacagcagtccatggctctccatgcggcaa

SEQ ID NO: 271128 - DNA, 50 bp, Artificial
  Synthetic oligonucleotide
aatgctgcgctggtcacgtagccaactgctcggcccttgacgaacacagg

SEQ ID NO: 271129 - DNA, 50 bp, Artificial
  Synthetic oligonucleotide
aatgggctcctactgcccagttagtggcactcggtcacgagttggggctg

SEQ ID NO: 271130 - DNA, 50 bp, Artificial
  Synthetic oligonucleotide
aatgtagggggccgacaccactcaaggcctcgtattctcgtacggccggg

SEQ ID NO: 271131 - DNA, 50 bp, Artificial
  Synthetic oligonucleotide
aatgtgagaggcgcgagccatagggcagcccagggtgtgttccagaccac

SEQ ID NO: 271132 - DNA, 55 bp, Artificial
  Synthetic oligonucleotide
gcccgggccagaggagccctcaaatgatcccggtaccagagcttttcgtggactg

SEQ ID NO: 271133 - DNA, 50 bp, Artificial
  Synthetic oligonucleotide
aattcaggggcctgcctggaggtttgggctatcgaccccgctagacctca

SEQ ID NO: 271134 - DNA, 50 bp, Artificial
  Synthetic oligonucleotide
accctggctctgtcgaatcaagttgcctcccgctcccctgcctctacgct

SEQ ID NO: 271135 - DNA, 50 bp, Artificial
  Synthetic oligonucleotide
accgaaacgccggtccctccgcctacgcaactcacgttaagcaagggccc

SEQ ID NO: 271136 - DNA, 50 bp, Artificial
  Synthetic oligonucleotide
accgaccacccgtctcgcgcctcgcaggattacaccacacacggcttaag

SEQ ID NO: 271137 - DNA, 50 bp, Artificial
  Synthetic oligonucleotide
accgactccggggcaccatcgggagactttcccactaactccgacagcta

SEQ ID NO: 271138 - DNA, 50 bp, Artificial
  Synthetic oligonucleotide
accgagcctgtcaactccgtcacgatttgccccgccagtgactcgctcga

SEQ ID NO: 271139 - DNA, 50 bp, Artificial
  Synthetic oligonucleotide
accgcacaatggtggtgtatgtgcgtacaaccgcagcccggacttggtga

SEQ ID NO: 271140 - DNA, 50 bp, Artificial
  Synthetic oligonucleotide
accgcacaccccaaccatggcctcaattggcctcagggtaagctcccata

SEQ ID NO: 271141 - DNA, 50 bp, Artificial
  Synthetic oligonucleotide
accgccctcctcgacccgagtcaaaccgtcaggaccagttgttccacggc

SEQ ID NO: 271142 - DNA, 50 bp, Artificial
  Synthetic oligonucleotide
accgcgttgatttggctcccaaccctcccaaggcgtacggctaccccgct

SEQ ID NO: 271143 - DNA, 55 bp, Artificial
  Synthetic oligonucleotide
gagtgtcgtttgtgaatgtcccattcaacggttgtggtaggctctctgttccgcg

SEQ ID NO: 271144 - DNA, 50 bp, Artificial
  Synthetic oligonucleotide
accggcaagcgtgctcgttacctaccccaccatcgccagagacccccgcc

SEQ ID NO: 271145 - DNA, 50 bp, Artificial
  Synthetic oligonucleotide
accggggaagactggtggaccatccaagggaagccaatgcggtaccccta

SEQ ID NO: 271146 - DNA, 50 bp, Artificial
  Synthetic oligonucleotide
accgtgactgccccgtcccgttccttggcgtgcatgcgggagcattaacc

SEQ ID NO: 271147 - DNA, 50 bp, Artificial
  Synthetic oligonucleotide
accgtgagcaccgctctagccaacaatgccggtgggttccgcagaccatt

SEQ ID NO: 271148 - DNA, 50 bp, Artificial
  Synthetic oligonucleotide
accgttttgacaccgctgctatccccctgacacccgctcgccgtcacaag

SEQ ID NO: 271149 - DNA, 50 bp, Artificial
  Synthetic oligonucleotide
acctacaagagatcagcgctcggacccccgcctagaaatcccgccttgct

SEQ ID NO: 271150 - DNA, 50 bp, Artificial
  Synthetic oligonucleotide
acctacaagggggcctccgtccgtgtctttggcggtccgcgcagtctagt

SEQ ID NO: 271151 - DNA, 50 bp, Artificial
  Synthetic oligonucleotide
accttgaggccctcccaaaggtggcattaacggaccccggtctccggttg

SEQ ID NO: 271152 - DNA, 50 bp, Artificial
  Synthetic oligonucleotide
acgaaaggggaaacttgctggccccctccccagttggcagttggttccgg

SEQ ID NO: 271153 - DNA, 50 bp, Artificial
  Synthetic oligonucleotide
acgacaagaggcatggcgtgttgaggagcaggcctgttggactcaagggc

SEQ ID NO: 271154 - DNA, 55 bp, Artificial
  Synthetic oligonucleotide
gatcactggtcccggattgcctgaggagccgaataagttgatcatcaaggcgcag

SEQ ID NO: 271155 - DNA, 50 bp, Artificial
  Synthetic oligonucleotide
acgacaaggtgcctcctgcgacacatcgggtgaccgacagtgaccccgta

SEQ ID NO: 271156 - DNA, 50 bp, Artificial
  Synthetic oligonucleotide
acgaccacaaagagaccgggtctgtcgccgcacttcctagctctggcccg

SEQ ID NO: 271157 - DNA, 50 bp, Artificial
  Synthetic oligonucleotide
acgacgtggggtagccagttgggcgaagccagctgtcatggtctccggac

SEQ ID NO: 271158 - DNA, 50 bp, Artificial
  Synthetic oligonucleotide
acattccatgccaggtccccgtcacctccggtcacggcttcacagtccgt

SEQ ID NO: 271159 - DNA, 50 bp, Artificial
  Synthetic oligonucleotide
accaactcttcgggcgccaactacctatcccgaaagcccagcaccggtgc

SEQ ID NO: 271160 - DNA, 50 bp, Artificial
  Synthetic oligonucleotide
accaagaactgtggtgacatgcatctcgaaccccgggcaaccgcaacccc

SEQ ID NO: 271161 - DNA, 50 bp, Artificial
  Synthetic oligonucleotide
accacctggctatggcagcggtccttccacaactgagacctacgagcccc

SEQ ID NO: 271162 - DNA, 50 bp, Artificial
  Synthetic oligonucleotide
accacggctaatgccccgactccgggaccgccagggcttactacgtctct

SEQ ID NO: 271163 - DNA, 50 bp, Artificial
  Synthetic oligonucleotide
accactgctcgacatcaaacgccatacagggtgatccttgcgggctgggc

SEQ ID NO: 271164 - DNA, 50 bp, Artificial
  Synthetic oligonucleotide
accatcatgtcagatgctaccacggctaatgccccgactccgggaccgcc

SEQ ID NO: 271165 - DNA, 55 bp, Artificial
  Synthetic oligonucleotide
gatccctcaaattcatcagatgctgcgaagatcgtatggcaccgtgcctccatgg

SEQ ID NO: 271166 - DNA, 50 bp, Artificial
  Synthetic oligonucleotide
acccacatcagagccttggtatcaccgtggtgccacgacgcaccctcgta

SEQ ID NO: 271167 - DNA, 50 bp, Artificial
  Synthetic oligonucleotide
acccaccctgtggcgcagttagaacccagctgcctattgagaccgcgcac

SEQ ID NO: 271168 - DNA, 50 bp, Artificial
  Synthetic oligonucleotide
acccatccgccttgtctcggacgctctttggatctgctccggccaacacc

SEQ ID NO: 271169 - DNA, 50 bp, Artificial
  Synthetic oligonucleotide
accccgagagctgacacggcatggggcctaccgaaacgaggtgggtgaac

SEQ ID NO: 271170 - DNA, 50 bp, Artificial
  Synthetic oligonucleotide
accccgccagcggcacacgttagcaaccagtttggcaaaatagacccgca

SEQ ID NO: 271171 - DNA, 50 bp, Artificial
  Synthetic oligonucleotide
accccgctcggatcttcccaatgcccatccacgaccaaggaattgcggta

SEQ ID NO: 271172 - DNA, 50 bp, Artificial
  Synthetic oligonucleotide
accccgttggtatctcattgcccgaacctgaatgcccagccggccccaca

SEQ ID NO: 271173 - DNA, 50 bp, Artificial
  Synthetic oligonucleotide
acccctcggaacggaactcgcctggcttaccctccagaagagcccagtcg

SEQ ID NO: 271174 - DNA, 50 bp, Artificial
  Synthetic oligonucleotide
acccctgaggctctcgctgaatctgtccgcggtggtttgtccatgggtct

SEQ ID NO: 271175 - DNA, 50 bp, Artificial
  Synthetic oligonucleotide
acccgagccgtgtgtctgaatcgcattgggttcgccttcagcccatgtcg

SEQ ID NO: 271176 - DNA, 55 bp, Artificial
  Synthetic oligonucleotide
cccactgcgtggtgccctactgtcgccgactataagctctggcgtgttatcaatg

SEQ ID NO: 271177 - DNA, 50 bp, Artificial
  Synthetic oligonucleotide
acccggtagctgatgccagggggctatgccgtgtgcggtataactcggca

SEQ ID NO: 271178 - DNA, 50 bp, Artificial
  Synthetic oligonucleotide
acccggtgtccggtcgcagttctcccatcgcatgctatgtccgagactgg

SEQ ID NO: 271179 - DNA, 50 bp, Artificial
  Synthetic oligonucleotide
acccgtgctaccaggttccccttggcgctcacagcgctgaaatcgctctt

SEQ ID NO: 271180 - DNA, 50 bp, Artificial
  Synthetic oligonucleotide
accctcccaagccatcgtggtgtaacttctgggccgagccgccttcagat

SEQ ID NO: 271181 - DNA, 50 bp, Artificial
  Synthetic oligonucleotide
accctcggcgacgtttggttccttgaggctctctcgggcgagcagccgta

SEQ ID NO: 271182 - DNA, 50 bp, Artificial
  Synthetic oligonucleotide
accctgcgatcatcgaccacagtggcattccccacgtcggtccttgccag

SEQ ID NO: 271183 - DNA, 55 bp, Artificial
  Synthetic oligonucleotide
ccaggaagagcgcacgttcctctgcctcttctgatcatatcatccctttggatta

SEQ ID NO: 271184 - DNA, 55 bp, Artificial
  Synthetic oligonucleotide
aagtgtcgtgtaacggttatgaggtcttggaacgtctgtggaaggtcggcgatgg

SEQ ID NO: 271185 - DNA, 55 bp, Artificial
  Synthetic oligonucleotide
gattggaccatagagctctaactgctttcagagcttgaacacggacatgcgagcc

SEQ ID NO: 271186 - DNA, 55 bp, Artificial
  Synthetic oligonucleotide
gttgagaatcgtaagtagggtattcgtattctctccggaaattgagtaagctaaa

SEQ ID NO: 271187 - DNA, 55 bp, Artificial
  Synthetic oligonucleotide
gattgtgcgggttggtagagatagctaggatggttgtgggtgatatacggcgcgg

SEQ ID NO: 271188 - DNA, 55 bp, Artificial
  Synthetic oligonucleotide
gcaaaggggcacatattgaatgttacagggtgtttgttggcgtttcacatctatg

SEQ ID NO: 271189 - DNA, 53 bp, Artificial
  Synthetic oligonucleotide
aagtgacatccacccaccgtaggggtcccttttggaaccaataccagtcgatc

SEQ ID NO: 271190 - DNA, 55 bp, Artificial
  Synthetic oligonucleotide
gcaactccgcagtgctcacgagctatgtgttgcatgcaaggccaccttgaactac

SEQ ID NO: 271191 - DNA, 54 bp, Artificial
  Synthetic oligonucleotide
agagtctcgcgaagggttagggaaaacaggctcggtcctactcataggacctac

SEQ ID NO: 271192 - DNA, 55 bp, Artificial
  Synthetic oligonucleotide
gcaattaaccctggacgtactcaaagtttgtcacgacattgcccctggtagccct

SEQ ID NO: 271193 - DNA, 55 bp, Artificial
  Synthetic oligonucleotide
gcaccagttatgagggttgttaagcccagtgtagaatttgtttgaatcacccgtc

SEQ ID NO: 271194 - DNA, 55 bp, Artificial
  Synthetic oligonucleotide
gcacggctcatgctgagagcggcctcactccttttgcccttcatatgaaacgtgt

SEQ ID NO: 271195 - DNA, 55 bp, Artificial
  Synthetic oligonucleotide
gcacgggcagacgacctcaagtaacacatgcttgatcacatgactgccaggtcac

SEQ ID NO: 271196 - DNA, 55 bp, Artificial
  Synthetic oligonucleotide
gcacgtgagattggacgagaattgaacacgaggcgatataaattgtacgagagcc

SEQ ID NO: 271197 - DNA, 60 bp, Artificial
  Synthetic oligonucleotide
cattccctccgagaatagtagtattccttgctaaaatcagagagtgagctgcctcttaaa

SEQ ID NO: 271198 - DNA, 55 bp, Artificial
  Synthetic oligonucleotide
gcacgtgagtggtttcaggaaacattccctaccatcatgactgtcataccgcatc

SEQ ID NO: 271199 - DNA, 55 bp, Artificial
  Synthetic oligonucleotide
cctcgaggtccggtaaaactagattcgacgatcgatggtaacagatccgagggtc

SEQ ID NO: 271200 - DNA, 55 bp, Artificial
  Synthetic oligonucleotide
cggaacagcccagtagtcgctcgccacataggcgtataggcactcactggactct

SEQ ID NO: 271201 - DNA, 55 bp, Artificial
  Synthetic oligonucleotide
cctatgggacttcactacgaagagctacggattgcttgcgctgaacggggtatcg

SEQ ID NO: 271202 - DNA, 55 bp, Artificial
  Synthetic oligonucleotide
cggagccaactaccgtcctcacccagacaagcgagagcgctggtgctccagaaca

SEQ ID NO: 271203 - DNA, 55 bp, Artificial
  Synthetic oligonucleotide
cggagctgtcaacgctggacacttctgatgaactcgacatgtgtgagtgtcttgg

SEQ ID NO: 271204 - DNA, 55 bp, Artificial
  Synthetic oligonucleotide
cggatttatatagggctgatctcaaatcgagctgctaggttggtttcaccagggc

SEQ ID NO: 271205 - DNA, 55 bp, Artificial
  Synthetic oligonucleotide
cggcagaaaatctttggctaccgggttttgtgtctgcatcctgggatcgagaggg

SEQ ID NO: 271206 - DNA, 55 bp, Artificial
  Synthetic oligonucleotide
cggccaagctccatggcatcactgacgacctcaacatgacgaccgaagaattcgc

SEQ ID NO: 271207 - DNA, 55 bp, Artificial
  Synthetic oligonucleotide
cggcctgaggatcggtagtccagaacactctgactggatactgaggctgtgtaac

SEQ ID NO: 271208 - DNA, 59 bp, Artificial
  Synthetic oligonucleotide
cgagtgatcagaatacgagcgtctcaaattatcttatagtagacataaaaggttgtaaa

SEQ ID NO: 271209 - DNA, 55 bp, Artificial
  Synthetic oligonucleotide
gcccttaaacgcccgtgttgacatacgtctgcgtcatcttgactatgttgagaag

SEQ ID NO: 271210 - DNA, 52 bp, Artificial
  Synthetic oligonucleotide
gccaagtaagtatccttacggggtaaatcaaaccttctcaggagtaaaagct

SEQ ID NO: 271211 - DNA, 55 bp, Artificial
  Synthetic oligonucleotide
gagcgtatgcgacgaaaatggacatgtagtgacaactgattgtccagatgatacg

SEQ ID NO: 271212 - DNA, 55 bp, Artificial
  Synthetic oligonucleotide
gacggggtatcagacaagccagtactcgatgattatacgggtaacgtcatacatg

SEQ ID NO: 271213 - DNA, 55 bp, Artificial
  Synthetic oligonucleotide
ctaacgccacactaaatgcctcctataaaccattgaccatttcgcactctcccac

SEQ ID NO: 271214 - DNA, 55 bp, Artificial
  Synthetic oligonucleotide
cgtaggcacaaatacgtctcagtactggaatggtgttgttagtgctacagatgtt

SEQ ID NO: 271215 - DNA, 55 bp, Artificial
  Synthetic oligonucleotide
aaggtgcgctctaaggcgcccagaacccctagccaacgcccaatcactcagaccc

SEQ ID NO: 271216 - DNA, 54 bp, Artificial
  Synthetic oligonucleotide
accagatttaaacttcatcgagattttgtgggccccaactaagagggagttggc

SEQ ID NO: 271217 - DNA, 54 bp, Artificial
  Synthetic oligonucleotide
acctcccaaacgccaaaggtgcgctctaaggcgcccagaacccctagccaacgc

SEQ ID NO: 271218 - DNA, 55 bp, Artificial
  Synthetic oligonucleotide
agcggttcaaatgttgtaacgtgctctatagatagtagcattgttgattcggatg

SEQ ID NO: 271219 - DNA, 55 bp, Artificial
  Synthetic oligonucleotide
tcatcaggaatacggccagtggcgagataagtcttaagtacgcttaaggttctag

SEQ ID NO: 271220 - DNA, 55 bp, Artificial
  Synthetic oligonucleotide
atacgggatgcatctggttccgataatagttctctcaaagttgatagggctaagt

SEQ ID NO: 271221 - DNA, 53 bp, Artificial
  Synthetic oligonucleotide
atgggaagttaaaacccaacccatctagtcctctagacaacaagcctaacgta

SEQ ID NO: 271222 - DNA, 55 bp, Artificial
  Synthetic oligonucleotide
caatgtgaatcgtcctagaaaatggatctggtgggctagcgctaaatcggtattc

SEQ ID NO: 271223 - DNA, 55 bp, Artificial
  Synthetic oligonucleotide
cccgtaacctgtgttcagcagggttctaaaggatcacacctgactcaatcgtcag

SEQ ID NO: 271224 - DNA, 55 bp, Artificial
  Synthetic oligonucleotide
cgcaagtaatgcatgccatgcacccactcataatccaacagtataatatccgtaa

SEQ ID NO: 271225 - DNA, 54 bp, Artificial
  Synthetic oligonucleotide
gcataaagataagagtaacttggggctgtgatccttgtcaaactggtactgtgg

SEQ ID NO: 271226 - DNA, 54 bp, Artificial
  Synthetic oligonucleotide
caaacattcatccgcgtaaagaacgctcctatcactgatagtcttatgcatagc

SEQ ID NO: 271227 - DNA, 54 bp, Artificial
  Synthetic oligonucleotide
atatcacggctagagaggaagtagaaccttgcgcactacaaaattgaaacgtgt

SEQ ID NO: 271228 - DNA, 54 bp, Artificial
  Synthetic oligonucleotide
ggccctaccgcctttccgaccacaagatccagcgaagctctggtctggtagcgt

SEQ ID NO: 271229 - DNA, 54 bp, Artificial
  Synthetic oligonucleotide
gggcagactatgccggctgcactccaactaacaggtggactggcacccgatatt

SEQ ID NO: 271230 - DNA, 55 bp, Artificial
  Synthetic oligonucleotide
tagggtaagatgggtaaccatcggtagcaatgatgggtccgggtacaacatgttc

SEQ ID NO: 271231 - DNA, 54 bp, Artificial
  Synthetic oligonucleotide
accccaaagctactaacctcccaaacgccaaaggtgcgctctaaggcgcccaga

SEQ ID NO: 271232 - DNA, 54 bp, Artificial
  Synthetic oligonucleotide
taccccagatccgataaaacccttctcgctctcacaggcgtgccagatagcgcc

SEQ ID NO: 271233 - DNA, 53 bp, Artificial
  Synthetic oligonucleotide
cataccgtttgtacgcaaagtagaccctatcatgtatttagggtttgattgca

SEQ ID NO: 271234 - DNA, 53 bp, Artificial
  Synthetic oligonucleotide
cttaaattggctggcccgcaattggtacaaatgtacataggagatggtgccag

SEQ ID NO: 271235 - DNA, 51 bp, Artificial
  Synthetic oligonucleotide
catcttacagctccgccttttctaaccagtgtcattaaccctggcctgttc

SEQ ID NO: 271236 - DNA, 51 bp, Artificial
  Synthetic oligonucleotide
cgattgtacaaattaactccgttgtttatactgattgctggcgcgaatgtt

SEQ ID NO: 271237 - DNA, 50 bp, Artificial
  Synthetic oligonucleotide
cggtttggttaggaggcccgaacattgttgtacaggtcgacaagactgag

SEQ ID NO: 271238 - DNA, 55 bp, Artificial
  Synthetic oligonucleotide
gtcgtaggttatgtatcgtaggttatgtatcgtaggttatgtgtcgtaggttatg

SEQ ID NO: 271239 - DNA, 55 bp, Artificial
  Synthetic oligonucleotide
gtcgtagacatacgaaccaatcagagtaattacgatgagtcgccttgatgtgtta

SEQ ID NO: 271240 - DNA, 55 bp, Artificial
  Synthetic oligonucleotide
gggtacactattggtgcctaggcctgcatctcaggtgtgtcggttctttgggatt

SEQ ID NO: 271241 - DNA, 55 bp, Artificial
  Synthetic oligonucleotide
ggactagaaccacaggctcaaagcccgtgacctgcgttcagcaggattctaaagg

SEQ ID NO: 271242 - DNA, 55 bp, Artificial
  Synthetic oligonucleotide
gctaggtcgtttgcatataggcggtggtaaattgtcattataccattccacgtga

SEQ ID NO: 271243 - DNA, 55 bp, Artificial
  Synthetic oligonucleotide
gcgaacgacctaggattagaaccacgcaccgagttatatatacagacaggagtcc

SEQ ID NO: 271244 - DNA, 55 bp, Artificial
  Synthetic oligonucleotide
agctacttgcatgttctctccaagccagggcatttgttccgagcacaactatacc

SEQ ID NO: 271245 - DNA, 55 bp, Artificial
  Synthetic oligonucleotide
ctcgacttggagatgactgacagactatcgaggttgaaaaccgggagttgtcctg

SEQ ID NO: 271246 - DNA, 53 bp, Artificial
  Synthetic oligonucleotide
cttaagtatcacccgacagccaagttggtttgtccaaacgagtcctagggcgg

SEQ ID NO: 271247 - DNA, 55 bp, Artificial
  Synthetic oligonucleotide
gacaacagctttgatattctaggtaatgttcagtgtactagtcgtgagaccggga

SEQ ID NO: 271248 - DNA, 55 bp, Artificial
  Synthetic oligonucleotide
gacatggatggggtagatgccagccgggttggcgatggtgcagctatagacggag

SEQ ID NO: 271249 - DNA, 55 bp, Artificial
  Synthetic oligonucleotide
ttttgtctcgagtatcccaaattcggccatctcctctgcaagtctggcttcgtcg

SEQ ID NO: 271250 - DNA, 55 bp, Artificial
  Synthetic oligonucleotide
ttcgggctgaaacttgtatggatcaacgtctgggttctgaggctccccacctggg

SEQ ID NO: 271251 - DNA, 55 bp, Artificial
  Synthetic oligonucleotide
gtccacggtataactcgcactcggccgttcccattctagccgatgccctcccttg

SEQ ID NO: 271252 - DNA, 55 bp, Artificial
  Synthetic oligonucleotide
gtagtgtattcactgtgcgagctccactatctacaccgatatgtcttcacatgtc

SEQ ID NO: 271253 - DNA, 55 bp, Artificial
  Synthetic oligonucleotide
gggccgattctctccaagtgtctcatacttatcgcgtaaggcttgagttgcgcgc

SEQ ID NO: 271254 - DNA, 55 bp, Artificial
  Synthetic oligonucleotide
ggcccgttgcagtaaagatgtagttgaaggatatccttgtcggagtccggaacga

SEQ ID NO: 271255 - DNA, 55 bp, Artificial
  Synthetic oligonucleotide
caaggacactcggttctggcttccgggttcaattgcgatttgtctcgttggcgtc

SEQ ID NO: 271256 - DNA, 55 bp, Artificial
  Synthetic oligonucleotide
ggatgcttggtttatggacgcatggggagtggcagtgcgtggtccgcccgtagac

SEQ ID NO: 271257 - DNA, 55 bp, Artificial
  Synthetic oligonucleotide
gctgtttaggcgacgcaatcggcatcagcttacaaccgtaagaaaatgcaacaag

SEQ ID NO: 271258 - DNA, 55 bp, Artificial
  Synthetic oligonucleotide
gctctccgtagaaccgctcattctcgtcagacctctctattacaatagtcccgtc

SEQ ID NO: 271259 - DNA, 55 bp, Artificial
  Synthetic oligonucleotide
gctaggtagctgctcctcactagtggtgttcttacaattatcctcctcttagggg

SEQ ID NO: 271260 - DNA, 55 bp, Artificial
  Synthetic oligonucleotide
gcgtggaagataggaaaggtggctcttaccaaggcgttcgcaagtataccgtaac

SEQ ID NO: 271261 - DNA, 55 bp, Artificial
  Synthetic oligonucleotide
gagttctttcccttgctgcctagatccaagctaagtattacggcggagactaagc

SEQ ID NO: 271262 - DNA, 55 bp, Artificial
  Synthetic oligonucleotide
gacgttagcaaccacacgactcgtttgtgagaattcatgggatcaggacccaaga

SEQ ID NO: 271263 - DNA, 54 bp, Artificial
  Synthetic oligonucleotide
acctgaggtcgtccgcatctcggtcacgtgcaaactcctttcctccacgtaact

SEQ ID NO: 271264 - DNA, 53 bp, Artificial
  Synthetic oligonucleotide
ctttatggcccttaacccgccagccgtacgttagactgcgcggcgaactcatt

SEQ ID NO: 271265 - DNA, 51 bp, Artificial
  Synthetic oligonucleotide
ggatagtcccctcaccgcatatacgtatggttagcactgcttaatatcccc

SEQ ID NO: 271266 - DNA, 55 bp, Artificial
  Synthetic oligonucleotide
ccagtacgcagtgttatccaagtagcgagcgttgggactggcacactccgcatcg

SEQ ID NO: 271267 - DNA, 50 bp, Artificial
  Synthetic oligonucleotide
cgacgcccaaaccatcgttcagtcgggtcgagggcaaggaatatataagt

SEQ ID NO: 271268 - DNA, 50 bp, Artificial
  Synthetic oligonucleotide
aaccggcgacaccacgtgacttggtgcctaattcgagcctccacgcgttt

SEQ ID NO: 271269 - DNA, 50 bp, Artificial
  Synthetic oligonucleotide
aaccggcacggcacaaacgtcctcacccgacgactcgcgatcgcactctc

SEQ ID NO: 271270 - DNA, 50 bp, Artificial
  Synthetic oligonucleotide
aaccgccaccggaagtacatgggagcgcatccgtcaatcagccgccgccc

SEQ ID NO: 271271 - DNA, 50 bp, Artificial
  Synthetic oligonucleotide
aaccctgggaatctgccttgagcagccagaaaacgggcgatggtctccgg

SEQ ID NO: 271272 - DNA, 50 bp, Artificial
  Synthetic oligonucleotide
aaaggtccgtgccggaacagagcgcatcccctgctaacaacaacgcgaga

SEQ ID NO: 271273 - DNA, 49 bp, Artificial
  Synthetic oligonucleotide
aaaggtcaaccggaccgaatgtactccccaccaacccggggatccccaa

SEQ ID NO: 271274 - DNA, 50 bp, Artificial
  Synthetic oligonucleotide
aaaggcgaatcgaaccctgacgtgggagtgcccactccggtaacgaaccg

SEQ ID NO: 271275 - DNA, 50 bp, Artificial
  Synthetic oligonucleotide
aaaggagggccggcgacattgagcctccgccttagcgtaccatgtgacct

SEQ ID NO: 271276 - DNA, 50 bp, Artificial
  Synthetic oligonucleotide
aaagacgccgcacttgcatgtatccgcaagtcaagggaggcggaaagggc

SEQ ID NO: 271277 - DNA, 55 bp, Artificial
  Synthetic oligonucleotide
cgagacttcgctggctaggttgtaggttgctcgcaaagccactatccgaggcaac

SEQ ID NO: 271278 - DNA, 50 bp, Artificial
  Synthetic oligonucleotide
aaagaccccagctcagtcccacgggaaatccgcctcttcgaccctggtgc

SEQ ID NO: 271279 - DNA, 50 bp, Artificial
  Synthetic oligonucleotide
aaacttttcccacgcgttgcctgtctcacgccacggttctttcgcgcacc

SEQ ID NO: 271280 - DNA, 50 bp, Artificial
  Synthetic oligonucleotide
aaacttgggcgcgctggagtagcttcgcattgaggatcggagggcatggc

SEQ ID NO: 271281 - DNA, 50 bp, Artificial
  Synthetic oligonucleotide
aaacttggcagccagtggtccacggcacctttccaacctagcttccggca

SEQ ID NO: 271282 - DNA, 50 bp, Artificial
  Synthetic oligonucleotide
aaacgccccggcgacacaccagggtccaagatgagggaaggctggctaga

SEQ ID NO: 271283 - DNA, 50 bp, Artificial
  Synthetic oligonucleotide
aaaccgcgcgatagcctgtgggtagggtctccgtcaagcgttgtgccaga

SEQ ID NO: 271284 - DNA, 50 bp, Artificial
  Synthetic oligonucleotide
aaaccagcaggtgattccaagcgcgtaaatgagcactaccagcgccggga

SEQ ID NO: 271285 - DNA, 50 bp, Artificial
  Synthetic oligonucleotide
aaacacccagcggtgctgcgggcgtctataggcatcacatggccctagac

SEQ ID NO: 271286 - DNA, 50 bp, Artificial
  Synthetic oligonucleotide
aaaagggacggttgcgtgcttgctccgctccgaagccatctgcccgcgct

SEQ ID NO: 271287 - DNA, 50 bp, Artificial
  Synthetic oligonucleotide
aaaaggaggggccgccgtccaaaggcttcgtggagatgtgcccaggcgag

SEQ ID NO: 271288 - DNA, 55 bp, Artificial
  Synthetic oligonucleotide
cgagccattggtgcgtgagcttcatcatactgtcaagctccttgacccgagcgtt

SEQ ID NO: 271289 - DNA, 50 bp, Artificial
  Synthetic oligonucleotide
aaaagaaggccgatgctggctcaaccctcaccagagctccttcgaccccg

SEQ ID NO: 271290 - DNA, 50 bp, Artificial
  Synthetic oligonucleotide
aaaacccgctcacggtattggggacgtgcgccttggggctttagacatga

SEQ ID NO: 271291 - DNA, 50 bp, Artificial
  Synthetic oligonucleotide
aaccctgctgccttggagggctacgagcgattcgaagtgcgacccgacta

SEQ ID NO: 271292 - DNA, 50 bp, Artificial
  Synthetic oligonucleotide
aacccgatggtccaggcggacgtctcccctccacgtaagtgtggccccag

SEQ ID NO: 271293 - DNA, 50 bp, Artificial
  Synthetic oligonucleotide
aacccctagggaagcccaaggcctgagctcgccgggttattgacacaagg

SEQ ID NO: 271294 - DNA, 50 bp, Artificial
  Synthetic oligonucleotide
aacccagccaggttaccagtcgccgggctagagccacgatcagttagcgc

SEQ ID NO: 271295 - DNA, 50 bp, Artificial
  Synthetic oligonucleotide
aacccaatctgtctcaccgccttggtccgtgggagttggacccgtctgcc

SEQ ID NO: 271296 - DNA, 50 bp, Artificial
  Synthetic oligonucleotide
aacccaaccggaactgccactgagccaagcgattccgccacaaacagcgg

SEQ ID NO: 271297 - DNA, 50 bp, Artificial
  Synthetic oligonucleotide
aaccagtctcgggtgtcaaggcccaccccttgagcacgcaaagtgcgacg

SEQ ID NO: 271298 - DNA, 50 bp, Artificial
  Synthetic oligonucleotide
aaccaacggcccccgtagttcttagttgctgccgtcccacctttgggcac

SEQ ID NO: 271299 - DNA, 55 bp, Artificial
  Synthetic oligonucleotide
cggctagctatgacatcgaatgaaccaaggtatggagtccattgcccggtttccc

SEQ ID NO: 271300 - DNA, 50 bp, Artificial
  Synthetic oligonucleotide
aacatgtcagccgaagcggtcaatggagcccccgttgtcgagcccggtag

SEQ ID NO: 271301 - DNA, 50 bp, Artificial
  Synthetic oligonucleotide
aacatggtacgatggcccaaagaagcgcacgcgactcgcaggacgaggga

SEQ ID NO: 271302 - DNA, 50 bp, Artificial
  Synthetic oligonucleotide
aacatggacgctcccaaaccgacatggcaagccgagcacggttccagccg

SEQ ID NO: 271303 - DNA, 50 bp, Artificial
  Synthetic oligonucleotide
aacatccgcatctgtcctgtgccccgttgcgcgacgacatcacactcacg

SEQ ID NO: 271304 - DNA, 50 bp, Artificial
  Synthetic oligonucleotide
aacaccaggcttgagcacctggagcaagtcagcggttgacacccgtgagc

SEQ ID NO: 271305 - DNA, 50 bp, Artificial
  Synthetic oligonucleotide
aacaacgtcaactggcgagtcgcaaggcactacgaggccgatgggcagtc

SEQ ID NO: 271306 - DNA, 50 bp, Artificial
  Synthetic oligonucleotide
aaatgggatcttcgggattcgcgcgacggctaaagccctggcgaggtacg

SEQ ID NO: 271307 - DNA, 50 bp, Artificial
  Synthetic oligonucleotide
aaatggcggtccacaacatcgtagaggcgggacgcttccgcaaacgaggc

SEQ ID NO: 271308 - DNA, 50 bp, Artificial
  Synthetic oligonucleotide
aaatgatggggagttcgctgccccgcgcccaccaacctccgaattcatca

SEQ ID NO: 271309 - DNA, 55 bp, Artificial
  Synthetic oligonucleotide
cggttgaaagacgtacatctcagtcgcagggcggcaaccgttactattgcaagtt

SEQ ID NO: 271310 - DNA, 55 bp, Artificial
  Synthetic oligonucleotide
ctacattccaccatctgatctaggtggtcccgaggtaaatgttaacacgaaatct

SEQ ID NO: 271311 - DNA, 55 bp, Artificial
  Synthetic oligonucleotide
ctccactgaacagtagatcatgtcatccataaatccccagaactgagactgaccg

SEQ ID NO: 271312 - DNA, 60 bp, Artificial
  Synthetic oligonucleotide
tagaatcagcagtttataattgatatcctatagatttacatgtaggccctcctattgtcg

SEQ ID NO: 271313 - DNA, 54 bp, Artificial
  Synthetic oligonucleotide
atatcggttcgatgccgttttaattcgtaagcaggaaaagtagccatgggtaag

SEQ ID NO: 271314 - DNA, 58 bp, Artificial
  Synthetic oligonucleotide
aaatgcaagtcttgttagagcagctgatatgagtgatgaatttagtgattttcatact

SEQ ID NO: 271315 - DNA, 57 bp, Artificial
  Synthetic oligonucleotide
ccaactcttaataatcttgtagagattagacatagactaaaccctgctataagtgca

SEQ ID NO: 271316 - DNA, 55 bp, Artificial
  Synthetic oligonucleotide
gggattacaaactccatatgaccaatcactattacatcctagagatcaagcttct

SEQ ID NO: 271317 - DNA, 55 bp, Artificial
  Synthetic oligonucleotide
gtctggtaatcctctaggaattgccggtacttatgatagagtgccttttgctccc

SEQ ID NO: 271318 - DNA, 55 bp, Artificial
  Synthetic oligonucleotide
gtgtaatgcaaaatcttattgatagagttccaggaggtttagcagctatgcaaag

SEQ ID NO: 271319 - DNA, 53 bp, Artificial
  Synthetic oligonucleotide
actgctcatgacagtactaatgagtgttcgactcactctagccttatattgcg

SEQ ID NO: 271320 - DNA, 52 bp, Artificial
  Synthetic oligonucleotide
ttagattacaaggttaattctagaagcgctcgggattatggacttataggta

SEQ ID NO: 271321 - DNA, 52 bp, Artificial
  Synthetic oligonucleotide
ttatgatgtagatggtttacacttagattgcaaatctaaagtatgaggttcg

SEQ ID NO: 271322 - DNA, 52 bp, Artificial
  Synthetic oligonucleotide
gactgggttgcatttagtcaatttaggttcgattcctaatatctccattaaa

SEQ ID NO: 271323 - DNA, 60 bp, Artificial
  Synthetic oligonucleotide
ttaaatcatatgggattacaaactccatatgaccaatcactattacatcctagagatcaa

SEQ ID NO: 271324 - DNA, 51 bp, Artificial
  Synthetic oligonucleotide
acctaataatcaaaatcagtctaatagtcttaaacgaactgcagaacaggc

SEQ ID NO: 271325 - DNA, 49 bp, Artificial
  Synthetic oligonucleotide
ttgggtataggtattcaaggggacggtttttttcaacgtaaggaattat

SEQ ID NO: 271326 - DNA, 57 bp, Artificial
  Synthetic oligonucleotide
gcagctatattagtactacttactttacctttcactgatttaggtagatcaagaggt

SEQ ID NO: 271327 - DNA, 60 bp, Artificial
  Synthetic oligonucleotide
gaaagtagtctagatgtaaatcgtgctatgtgaagaatttatcataaaagtgtaaatgat

SEQ ID NO: 271328 - DNA, 60 bp, Artificial
  Synthetic oligonucleotide
cttcacgatacagctgggtctggtaatcctctaggaattgccggtacttatgatagagtg

SEQ ID NO: 271329 - DNA, 60 bp, Artificial
  Synthetic oligonucleotide
ccagggggtttagcggctatgcaaagtagtatgcattctaattcatatgtgcatggatca

SEQ ID NO: 271330 - DNA, 59 bp, Artificial
  Synthetic oligonucleotide
caatgtttgcagctatattagtactacttactttacctttcactgatttaggtagatca

SEQ ID NO: 271331 - DNA, 58 bp, Artificial
  Synthetic oligonucleotide
caagtgttgcatggctgttttaaattaatgttgcgaaactacagcgatagttgtaaaa

SEQ ID NO: 271332 - DNA, 52 bp, Artificial
  Synthetic oligonucleotide
attctgtaggtttattaccttattacgaaaaagaactcaatagacttaacga

SEQ ID NO: 271333 - DNA, 57 bp, Artificial
  Synthetic oligonucleotide
ttagaggtgcgactaaattaggtcgtaaacatacggaagcggctaaatagcgactgc

SEQ ID NO: 271334 - DNA, 60 bp, Artificial
  Synthetic oligonucleotide
gcgacgttcattaataataccgaggcgactgactatcgtcgatcgtagtatctggccgaa

SEQ ID NO: 271335 - DNA, 59 bp, Artificial
  Synthetic oligonucleotide
gtgggagctacttgattattcttacatatcttgtatgtgcaattagttgaaggtaatgc

SEQ ID NO: 271336 - DNA, 57 bp, Artificial
  Synthetic oligonucleotide
ggcaacgtatcggtccacataatatagacgttttgtcagtgttaattggatcgatac

SEQ ID NO: 271337 - DNA, 57 bp, Artificial
  Synthetic oligonucleotide
cttcgctaattaacacagataaagctctaaataatcacagagatgagacaggcaaag

SEQ ID NO: 271338 - DNA, 57 bp, Artificial
  Synthetic oligonucleotide
gtctcagtcttaggctgattgatctaaaggagaggttaaaatagaacactgtaaaag

SEQ ID NO: 271339 - DNA, 57 bp, Artificial
  Synthetic oligonucleotide
gcacagagctattaattgatttaacgagtttgacagttgtgctattgaatgtctagc

SEQ ID NO: 271340 - DNA, 48 bp, Artificial
  Synthetic oligonucleotide
cgtactacgtacccggggtgttaattttcgtaaaagaatagtaacaag

SEQ ID NO: 271341 - DNA, 57 bp, Artificial
  Synthetic oligonucleotide
gttatgataggtactgcttttatcgcagtagggttatgacgagtactagcctaccat

SEQ ID NO: 271342 - DNA, 56 bp, Artificial
  Synthetic oligonucleotide
gttctattaaacacaagtctgtaagcggtattagaatagaagcagctggtagattg

SEQ ID NO: 271343 - DNA, 55 bp, Artificial
  Synthetic oligonucleotide
gcgactctaggtatggcttcttatttgtaaccaatatggcaccatctccatataa

SEQ ID NO: 271344 - DNA, 59 bp, Artificial
  Synthetic oligonucleotide
gttggattacttcgataggtggcgaaatgagctcgacgttctgtccgtatgttggatta

SEQ ID NO: 271345 - DNA, 55 bp, Artificial
  Synthetic oligonucleotide
gctgttataccatttggccctggtctggccttattagactttaacttaggtatac

SEQ ID NO: 271346 - DNA, 55 bp, Artificial
  Synthetic oligonucleotide
gcctggctcatgaccagtttatagaggtgcgaatcctttgtccgttatagggttt

SEQ ID NO: 271347 - DNA, 54 bp, Artificial
  Synthetic oligonucleotide
gcttaattgactaatataagttaggctttgaaggaaaccccgttcaatggcggc

SEQ ID NO: 271348 - DNA, 55 bp, Artificial
  Synthetic oligonucleotide
ggcgaaatgagcccgacgttctgtccgtatgttggattacttcgataggtggcga

SEQ ID NO: 271349 - DNA, 55 bp, Artificial
  Synthetic oligonucleotide
ggtgttccgccaatgctactaaataaatcgagtgctttgcaccctcatttgcatg

SEQ ID NO: 271350 - DNA, 55 bp, Artificial
  Synthetic oligonucleotide
gtgctttatctcctactattgaactgggtgctaaatgacctcctctaggtgtaga

SEQ ID NO: 271351 - DNA, 55 bp, Artificial
  Synthetic oligonucleotide
gtgggtattaatcctacgttctgtccgtatgttgaattacttcgataggtggcga

SEQ ID NO: 271352 - DNA, 55 bp, Artificial
  Synthetic oligonucleotide
gttgaataagtgtagaaacagtgtcggaagccggatcttgatacggatccgtagc

SEQ ID NO: 271353 - DNA, 55 bp, Artificial
  Synthetic oligonucleotide
aataataccgaggcgactgactatcgtcgatcgtagtatctggccgaatcgtcga

SEQ ID NO: 271354 - DNA, 55 bp, Artificial
  Synthetic oligonucleotide
aggtactgcttttatcgcagtaggattatgacgagtactagcctatcattgtact

SEQ ID NO: 271355 - DNA, 60 bp, Artificial
  Synthetic oligonucleotide
aggcacggcaggaaggctatgttagttaatgataagagctgaatacatataggcacgaaa

SEQ ID NO: 271356 - DNA, 55 bp, Artificial
  Synthetic oligonucleotide
caccccgcacattgattgttaatagagttaaggtactgcaagatgcgatgtcaat

SEQ ID NO: 271357 - DNA, 55 bp, Artificial
  Synthetic oligonucleotide
cgaatgaaacagggacgaatagttccgaataggctgataatcgtcgtttatagcg

SEQ ID NO: 271358 - DNA, 50 bp, Artificial
  Synthetic oligonucleotide
cgtctcgtattaaaattaggaggacaaactaccagggttttagataaagg

SEQ ID NO: 271359 - DNA, 55 bp, Artificial
  Synthetic oligonucleotide
cgtgttagctaaataggtatagcactgtgctacgaccacagttaatgtaagttcg

SEQ ID NO: 271360 - DNA, 55 bp, Artificial
  Synthetic oligonucleotide
ctatagctctgagtgataattgatatacttacgcctgaaccgctataagtggagt

SEQ ID NO: 271361 - DNA, 55 bp, Artificial
  Synthetic oligonucleotide
ctggagtaatatatggaatgaacattgacacggcttttagaaggagagattcaca

SEQ ID NO: 271362 - DNA, 54 bp, Artificial
  Synthetic oligonucleotide
gacaattaaagtaagcggaaccaccgaccgtcgacatactcaattaaagtaagc

SEQ ID NO: 271363 - DNA, 55 bp, Artificial
  Synthetic oligonucleotide
gagacaactcttatggttttaaagtcgtcaatgggtccgaatgaatttggcgttg

SEQ ID NO: 271364 - DNA, 55 bp, Artificial
  Synthetic oligonucleotide
gatgaaattctgtgataccagatgattggcacgggtctatgcgaaggcatctcct

SEQ ID NO: 271365 - DNA, 55 bp, Artificial
  Synthetic oligonucleotide
gatttagttgctagtagttctggttatcacgaggctatggctcaagagatacgaa

SEQ ID NO: 271366 - DNA, 55 bp, Artificial
  Synthetic oligonucleotide
agtaaatacgttcgataggagtgggtattaatcctacgttctgtccgtatgttga

SEQ ID NO: 271367 - DNA, 55 bp, Artificial
  Synthetic oligonucleotide
gccagtttaaattctatgcctggatctaattgtacctacattgagaggtcggata

SEQ ID NO: 271368 - DNA, 54 bp, Artificial
  Synthetic oligonucleotide
tttgactcacagtcaaatgtatccctccgttccatatagatgtctgttacaggt

SEQ ID NO: 271369 - DNA, 53 bp, Artificial
  Synthetic oligonucleotide
tttcgcgattgggtaatagggttggttttcgcgatggggtaatagggttggca

SEQ ID NO: 271370 - DNA, 52 bp, Artificial
  Synthetic oligonucleotide
ctattataagtgtgggagctacttgattattcttacatatcttgtatgtgca

SEQ ID NO: 271371 - DNA, 51 bp, Artificial
  Synthetic oligonucleotide
ctgattaacagggtttacagatggagaagggagttttatggtaagtatgtc

SEQ ID NO: 271372 - DNA, 51 bp, Artificial
  Synthetic oligonucleotide
agatcagttttcaatacgaagctatataagtttagatgcaccagttttagc

SEQ ID NO: 271373 - DNA, 50 bp, Artificial
  Synthetic oligonucleotide
gtgagcatactaagcaataatcttgacacgagtacccgggacctttataa

SEQ ID NO: 271374 - DNA, 50 bp, Artificial
  Synthetic oligonucleotide
cgactgctaatgcccaacctcagtcttactgtcacagataattaaacggg

SEQ ID NO: 271375 - DNA, 59 bp, Artificial
  Synthetic oligonucleotide
atagttgtatctagcgaatgaaacagggacgaatagttccgaataggctgataatcgtc

SEQ ID NO: 271376 - DNA, 57 bp, Artificial
  Synthetic oligonucleotide
gacttactatcgtctatagttgtatctggcgaacgaaacagggacgaatagttccga

SEQ ID NO: 271377 - DNA, 55 bp, Artificial
  Synthetic oligonucleotide
cgaatagttccgaataggctggtaatcgtcgtttatagcgtaacaagctagagtt

SEQ ID NO: 271378 - DNA, 54 bp, Artificial
  Synthetic oligonucleotide
gttcgcgataagcactagggtactctgttggaggtggtaatagggttggttttc

SEQ ID NO: 271379 - DNA, 56 bp, Artificial
  Synthetic oligonucleotide
ggtgtaagtccaaccgactgagccaaatatcctatatttctgtgggtaaagcgacg

SEQ ID NO: 271380 - DNA, 58 bp, Artificial
  Synthetic oligonucleotide
gggtacggtgacttactattatagtgaggtgcgtatatgacgtaccagtcacctgtgg

SEQ ID NO: 271381 - DNA, 60 bp, Artificial
  Synthetic oligonucleotide
tgataatactatttattcgcgtgagagttccacagcagatttagtggagaatagaggtag

SEQ ID NO: 271382 - DNA, 59 bp, Artificial
  Synthetic oligonucleotide
aatgctacttcgtatttatgcggaaaggtcacaagtccttgcaaaagcagagtgtatac

SEQ ID NO: 271383 - DNA, 58 bp, Artificial
  Synthetic oligonucleotide
tattgaacaatctataagaaaagctattacattgatccaatatcataaaataaggggg

SEQ ID NO: 271384 - DNA, 58 bp, Artificial
  Synthetic oligonucleotide
gccttcgattaggtgttctgaaagtaacatacttagaacaagcactatactatctaaa

SEQ ID NO: 271385 - DNA, 57 bp, Artificial
  Synthetic oligonucleotide
ccttaagatttatgcggtgtaattttaaagtcggtctgatacattgtcattccatac

SEQ ID NO: 271386 - DNA, 54 bp, Artificial
  Synthetic oligonucleotide
caatgaaattgcgtcgaaaaatattacccaaccaggtttgttttgcaaagacga

SEQ ID NO: 271387 - DNA, 58 bp, Artificial
  Synthetic oligonucleotide
cattaagttcacaacaagcataatacctttgacatcccctataatataacgagtagcg

SEQ ID NO: 271388 - DNA, 55 bp, Artificial
  Synthetic oligonucleotide
aactagtaaaagatgccaatttgctactaaacgcataaggtatagatagctcccc

SEQ ID NO: 271389 - DNA, 55 bp, Artificial
  Synthetic oligonucleotide
aacgcaaactatactgctaatagtgctagacagtgcttcgtagccttagagtgca

SEQ ID NO: 271390 - DNA, 55 bp, Artificial
  Synthetic oligonucleotide
cgacgctatgtaatgttcggtgtgatatgtgagagcgaggttcagagtcatacgg

SEQ ID NO: 271391 - DNA, 58 bp, Artificial
  Synthetic oligonucleotide
ggtggaagttctataggtggaagttctatagatgaaagttctacagatgactcgggtc

SEQ ID NO: 271392 - DNA, 55 bp, Artificial
  Synthetic oligonucleotide
cgtagaatctggcccgattgtaggactacgctctctcggactgagggctgtagac

SEQ ID NO: 271393 - DNA, 55 bp, Artificial
  Synthetic oligonucleotide
cgttccgaggttgatgcggactttcctagcagccctgacacaagtggttcaacag

SEQ ID NO: 271394 - DNA, 55 bp, Artificial
  Synthetic oligonucleotide
cgtttgaaaccccaccgcgaatggaagtgtcagccgagccgattgtgagctcacg

SEQ ID NO: 271395 - DNA, 55 bp, Artificial
  Synthetic oligonucleotide
ctgcaatatacttaaattggctggttcttccttagggtttgagcgttattactcc

SEQ ID NO: 271396 - DNA, 55 bp, Artificial
  Synthetic oligonucleotide
cgaaattcgagtctaccaatattagacaactgacaattgccaggttcgcagatac

SEQ ID NO: 271397 - DNA, 55 bp, Artificial
  Synthetic oligonucleotide
acaccgaaaggggactacaattcgaagggtatatcatacacggctgggctgacac

SEQ ID NO: 271398 - DNA, 55 bp, Artificial
  Synthetic oligonucleotide
acctatcgttctacgaggcttcagcgagactacgaacgaggactactttctcgcc

SEQ ID NO: 271399 - DNA, 55 bp, Artificial
  Synthetic oligonucleotide
acttgttagtatagctactaacgacataaataggtaaccgttgtcaatagctgcg

SEQ ID NO: 271400 - DNA, 55 bp, Artificial
  Synthetic oligonucleotide
cctccggcgctcttacctagacagtacgtaaacggcgagactcagggatcagacc

SEQ ID NO: 271401 - DNA, 55 bp, Artificial
  Synthetic oligonucleotide
caccgagttttcccagttgcgcacgcgatatgccatttcgaaacgcctggcggag

SEQ ID NO: 271402 - DNA, 52 bp, Artificial
  Synthetic oligonucleotide
gtaccctatgactcggagaaacgctaccacgtattgtaaaactccctaaccc

SEQ ID NO: 271403 - DNA, 55 bp, Artificial
  Synthetic oligonucleotide
cagctgctcttagagtaggcttactagcttctttaacgtagtagttgcagcgatc

SEQ ID NO: 271404 - DNA, 55 bp, Artificial
  Synthetic oligonucleotide
catgaatcaccgagaatagagcgagtcacattgttaccgcacgtatacagaaccg

SEQ ID NO: 271405 - DNA, 55 bp, Artificial
  Synthetic oligonucleotide
ccatgggtaaggtctaacataagaaacgtgtgtagctctcgtacatattagtttt

SEQ ID NO: 271406 - DNA, 50 bp, Artificial
  Synthetic oligonucleotide
ccccgtaaagaaaacgcccacccgctcccgaagtatgaaatgcctaaaac

SEQ ID NO: 271407 - DNA, 55 bp, Artificial
  Synthetic oligonucleotide
tcttttcttatttgcaggtggaattgaaaatggagtaggtacagggtgaactctg

SEQ ID NO: 271408 - DNA, 55 bp, Artificial
  Synthetic oligonucleotide
cttacacgattgtcaacgagccctaaacgaaaatccacgcgttatagagtcgtgc

SEQ ID NO: 271409 - DNA, 55 bp, Artificial
  Synthetic oligonucleotide
gaggatgagagaaatatccgtagagcgctagaagcttcattgaagccgcctaaga

SEQ ID NO: 271410 - DNA, 55 bp, Artificial
  Synthetic oligonucleotide
gcagcattaacgttgcattgggtatcgttgtttccatccgtctacaggccatcct

SEQ ID NO: 271411 - DNA, 55 bp, Artificial
  Synthetic oligonucleotide
tcgctttgctaatactcttgacgtctccgaggctccgcaacctgtgcgcaacccc

SEQ ID NO: 271412 - DNA, 55 bp, Artificial
  Synthetic oligonucleotide
gccatcagatgcacaccactcactctgggcgcatcatccaactcgcagcatatgt

SEQ ID NO: 271413 - DNA, 59 bp, Artificial
  Synthetic oligonucleotide
agctcttaaaatagtagaaccagaatctgatgtctacaaaaaacatccagggcagatta

SEQ ID NO: 271414 - DNA, 55 bp, Artificial
  Synthetic oligonucleotide
gcctcgtgtgagcgaggtccctagtggtgactgagagtagcgagcgtaagaatag

SEQ ID NO: 271415 - DNA, 55 bp, Artificial
  Synthetic oligonucleotide
gcgcgctgtgcgtgcgtgtcgcttgcggttcaatcccatcgcatgtatgcagggt

SEQ ID NO: 271416 - DNA, 55 bp, Artificial
  Synthetic oligonucleotide
gctgggcgtctactcatcggtcttgcaaatgggtggtacatgacttactcgcaac

SEQ ID NO: 271417 - DNA, 55 bp, Artificial
  Synthetic oligonucleotide
gctgtcctaatccagaaactcggtgtaagtcaattcgcggcgactatgctgcaga

SEQ ID NO: 271418 - DNA, 55 bp, Artificial
  Synthetic oligonucleotide
ggcgactctcatacttagcacatgcatacttcgagatgcgggtacacgtgacgtc

SEQ ID NO: 271419 - DNA, 55 bp, Artificial
  Synthetic oligonucleotide
tataagtactcatttgcgtagttgcagtacccgtatagctaaacccgttaggtac

SEQ ID NO: 271420 - DNA, 55 bp, Artificial
  Synthetic oligonucleotide
ggcgagcagctaatgcctagaagaacgaggtagttgcaatagatcttataaactt

SEQ ID NO: 271421 - DNA, 55 bp, Artificial
  Synthetic oligonucleotide
gggcagattagagttaatactctactggagaagatgaaagcacgtagaaattagg

SEQ ID NO: 271422 - DNA, 55 bp, Artificial
  Synthetic oligonucleotide
gtctggacgaagctatgccagcggttatcggtacagggctggagctcgtagcgtg

SEQ ID NO: 271423 - DNA, 52 bp, Artificial
  Synthetic oligonucleotide
caatatgcatgcttccgactgtccaaccaaggtagcctcgcgtatgtcatat

SEQ ID NO: 271424 - DNA, 59 bp, Artificial
  Synthetic oligonucleotide
tacacctaagttcaaccctctttgtacggcgagtgtgtgatgacctatatatgtcaaaa

SEQ ID NO: 271425 - DNA, 52 bp, Artificial
  Synthetic oligonucleotide
tacggtctaggcccggtgggatacatcgacgacaacaccattccgcggctgg

SEQ ID NO: 271426 - DNA, 52 bp, Artificial
  Synthetic oligonucleotide
acatagtacccacctaggctaggggacatgtacgaccctcagggaagttttg

SEQ ID NO: 271427 - DNA, 52 bp, Artificial
  Synthetic oligonucleotide
ctgtccaccaagttttagtataataccagtaatgtatctgttgtagaatagt

SEQ ID NO: 271428 - DNA, 51 bp, Artificial
  Synthetic oligonucleotide
tactgcagccaggcgtgtaggctagcagatctggagaaggctggtcgcacc

SEQ ID NO: 271429 - DNA, 51 bp, Artificial
  Synthetic oligonucleotide
tatgttagctttatagaaagagaacgaaagtttagtttatcttatacaccg

SEQ ID NO: 271430 - DNA, 51 bp, Artificial
  Synthetic oligonucleotide
cgagctcagacgtcgcaaataagtgcacgttcaacctgtggcataagcaac

SEQ ID NO: 271431 - DNA, 51 bp, Artificial
  Synthetic oligonucleotide
ttattatagacatatcttgcaactttctctattcctgcagccttgcggtta

SEQ ID NO: 271432 - DNA, 51 bp, Artificial
  Synthetic oligonucleotide
tttgcgggcgaagctccgttcgtgcatgttgctttcgagacagtcgtgaag

SEQ ID NO: 271433 - DNA, 51 bp, Artificial
  Synthetic oligonucleotide
acttatcctcctatgataaacttatcctcctatgataaacttatcctctta

SEQ ID NO: 271434 - DNA, 50 bp, Artificial
  Synthetic oligonucleotide
aaagccccagcgtcgtgcagccaaactgtcggatcaagcgggtagagtcg

SEQ ID NO: 271435 - DNA, 56 bp, Artificial
  Synthetic oligonucleotide
ggggatagaaccctctgctcaatttagttcaaaatctagttcagttagaggttcta

SEQ ID NO: 271436 - DNA, 50 bp, Artificial
  Synthetic oligonucleotide
aaagaaccgagcggcactcgtagctggctcgtgcgcagttactcaccggg

SEQ ID NO: 271437 - DNA, 50 bp, Artificial
  Synthetic oligonucleotide
aaagaaagctcctccgggtactgttctcgccctcaagccaagccccgccc

SEQ ID NO: 271438 - DNA, 50 bp, Artificial
  Synthetic oligonucleotide
aaacttttggctcggcgataacgcggacataggctccccaccgcctgcaa

SEQ ID NO: 271439 - DNA, 50 bp, Artificial
  Synthetic oligonucleotide
aaacggcgggttccctggatccgagtttgcgcgctggtaacgttgtctgt

SEQ ID NO: 271440 - DNA, 50 bp, Artificial
  Synthetic oligonucleotide
aaacgcggggttggaggtgctcaggcgggtcccactggtcaacttacgtt

SEQ ID NO: 271441 - DNA, 50 bp, Artificial
  Synthetic oligonucleotide
aaacgcatacccgcgctgcttgcgcatacgctgtacttgtcggaccttgc

SEQ ID NO: 271442 - DNA, 50 bp, Artificial
  Synthetic oligonucleotide
aaacgcagatcgcgaaagcgtagcaaggccagcagaggacgccgaggaat

SEQ ID NO: 271443 - DNA, 50 bp, Artificial
  Synthetic oligonucleotide
aaacgacgggacgacgccatgtggtacacctgtcaatccgtggctggacg

SEQ ID NO: 271444 - DNA, 50 bp, Artificial
  Synthetic oligonucleotide
aaacctaacccgagggtcggcgcacgcgcaaatatgtcgcgcaacgtgag

SEQ ID NO: 271445 - DNA, 50 bp, Artificial
  Synthetic oligonucleotide
aaacccccaatggtccaccatcaaagagggcacgcctctccaacggacgc

SEQ ID NO: 271446 - DNA, 60 bp, Artificial
  Synthetic oligonucleotide
tagttcagcaagtgaagctataggtatatctttggatagtatttatacttatctaaggcg

SEQ ID NO: 271447 - DNA, 50 bp, Artificial
  Synthetic oligonucleotide
aaaccaggatcgacccctttcgaaggcgccactctctgctcctcggcaca

SEQ ID NO: 271448 - DNA, 50 bp, Artificial
  Synthetic oligonucleotide
aaacatccaggcttttcagtcgggccgaaaaggtgcactcctcgcggcgc

SEQ ID NO: 271449 - DNA, 50 bp, Artificial
  Synthetic oligonucleotide
aaacacatgggcacacgagtcgcgagggcagaaacacccgccaaccactc

SEQ ID NO: 271450 - DNA, 50 bp, Artificial
  Synthetic oligonucleotide
aaacaagcccggctgtcgaaccgctcaaggggccacgtctgcttgtgttc

SEQ ID NO: 271451 - DNA, 50 bp, Artificial
  Synthetic oligonucleotide
aaaatgtgcgggggcccagagacgagcatgcgaaatcggcgggtaagcca

SEQ ID NO: 271452 - DNA, 50 bp, Artificial
  Synthetic oligonucleotide
aaaagaacccaagcgcgtgagtgcccgccttcgagatgcagccagtgctg

SEQ ID NO: 271453 - DNA, 50 bp, Artificial
  Synthetic oligonucleotide
aaaactaccacgccaaccccctccgccccaaagatcgaagaggtcaccga

SEQ ID NO: 271454 - DNA, 50 bp, Artificial
  Synthetic oligonucleotide
aaaacgggacgagcgcacgcagaacctctcgttgggtcgcctaaggatgg

SEQ ID NO: 271455 - DNA, 50 bp, Artificial
  Synthetic oligonucleotide
aaaacgacagcgcaaagccgaaagccctcatgcagcgtccggcgaccttg

SEQ ID NO: 271456 - DNA, 50 bp, Artificial
  Synthetic oligonucleotide
atatatggcagccggaatagtccacagtcgtcccattccctcatcgtgta

SEQ ID NO: 271457 - DNA, 57 bp, Artificial
  Synthetic oligonucleotide
gcacttataacacttgttagtatagctactaacgacataaataggtaaccgttgtca

SEQ ID NO: 271458 - DNA, 50 bp, Artificial
  Synthetic oligonucleotide
aatcacctctatagcggaaagtgtacttgtaaattaacttatataaaccg

SEQ ID NO: 271459 - DNA, 50 bp, Artificial
  Synthetic oligonucleotide
aacacgagacggaacgccctcccaccacaagttgcaaagaagcgtcccgc

SEQ ID NO: 271460 - DNA, 50 bp, Artificial
  Synthetic oligonucleotide
aacacatgcgtcgcttaccgcccgttacaccaacgggtcccacgtgcact

SEQ ID NO: 271461 - DNA, 50 bp, Artificial
  Synthetic oligonucleotide
aacacacgtgctgctgcgaccagtaagtagcgagtgacggacgccatcga

SEQ ID NO: 271462 - DNA, 50 bp, Artificial
  Synthetic oligonucleotide
aacacaagatggcgccactctaccggtacctcgcccacccgacagacggc

SEQ ID NO: 271463 - DNA, 50 bp, Artificial
  Synthetic oligonucleotide
aacaacccctccgtcgaacttgcatcacggacggtaagcgcagcgtggaa

SEQ ID NO: 271464 - DNA, 50 bp, Artificial
  Synthetic oligonucleotide
aacaaacgcatgctccctccccgctccatacgtgccaaaggcaccgctca

SEQ ID NO: 271465 - DNA, 50 bp, Artificial
  Synthetic oligonucleotide
aaatgtgcgcatggtgtaggctgcgacttgcgagggggcttgtccgggga

SEQ ID NO: 271466 - DNA, 50 bp, Artificial
  Synthetic oligonucleotide
aaatgcggaaagacgccaggtccccttcccagccccgaccacccatgaaa

SEQ ID NO: 271467 - DNA, 50 bp, Artificial
  Synthetic oligonucleotide
aaatgcatccgcggttgtcaagtagggggcgtggcgacattgcgaggtca

SEQ ID NO: 271468 - DNA, 60 bp, Artificial
  Synthetic oligonucleotide
tctacggagagatctgttccatcttatggttttcacttacatagcgtgagatcacgtagc

SEQ ID NO: 271469 - DNA, 50 bp, Artificial
  Synthetic oligonucleotide
aaatcgccaaccgcgttggagttgcagcgttgccaagcgtgtagctcgtc

SEQ ID NO: 271470 - DNA, 50 bp, Artificial
  Synthetic oligonucleotide
aaagttgtcgtcctccgtggactggggcggacacactgtggcatagggcg

SEQ ID NO: 271471 - DNA, 50 bp, Artificial
  Synthetic oligonucleotide
aaagttgggcggagccaccgaataacgctgttacccttccgtccacgcga

SEQ ID NO: 271472 - DNA, 50 bp, Artificial
  Synthetic oligonucleotide
aaagtggccgccttccccaatgtggtcgcatagcaacggcgcatagcgta

SEQ ID NO: 271473 - DNA, 50 bp, Artificial
  Synthetic oligonucleotide
aaagtgacaaacgcccagttccgcatgccgtgttggcgcgcccaagcttt

SEQ ID NO: 271474 - DNA, 50 bp, Artificial
  Synthetic oligonucleotide
aaaggtcggcgaccgtagcgtacgtcactggcagccacctgggatcatgc

SEQ ID NO: 271475 - DNA, 50 bp, Artificial
  Synthetic oligonucleotide
aaagggcgcaaggtctgcctacgctgtggcatcctaagtccgaaggccga

SEQ ID NO: 271476 - DNA, 50 bp, Artificial
  Synthetic oligonucleotide
aaagcgcttcgtagcgtggaggagcatgcgctgtgggcggatttcgtgat

SEQ ID NO: 271477 - DNA, 50 bp, Artificial
  Synthetic oligonucleotide
aaagcgccggtacccaacttgcccaaccttccgaccacgatcctcgcgct

SEQ ID NO: 271478 - DNA, 50 bp, Artificial
  Synthetic oligonucleotide
aaagcgacccaggactgccgagcattcgtggtcgacgtgcaaggcgtttg

SEQ ID NO: 271479 - DNA, 57 bp, Artificial
  Synthetic oligonucleotide
cagttctcaatgaaccagcctacctagtgtggtttcacccaggcacttaagataggt

SEQ ID NO: 271480 - DNA, 56 bp, Artificial
  Synthetic oligonucleotide
gagtaacgaagtgcgaatggagtgaaatagtacaggtgttacatagtcgtttaaag

SEQ ID NO: 271481 - DNA, 56 bp, Artificial
  Synthetic oligonucleotide
aggtctagggacacgcctaagtctgagccaggagtctaaccgtagtgagtacctag

SEQ ID NO: 271482 - DNA, 57 bp, Artificial
  Synthetic oligonucleotide
gccgatagtgacactaacgttttcactactaggttgaggtgtagtaccgataggtca

SEQ ID NO: 271483 - DNA, 60 bp, Artificial
  Synthetic oligonucleotide
agccgtatagatacaggagtaacaacatcttatgcgacttatatgctatttgcgacactt

SEQ ID NO: 271484 - DNA, 60 bp, Artificial
  Synthetic oligonucleotide
tcaacttaggagactaatagcatttagtacgattaatcatgtaggtttcatagtactatg

SEQ ID NO: 271485 - DNA, 60 bp, Artificial
  Synthetic oligonucleotide
tcagtgaagtaggagtatttctgaggtttgaccacttcagttctagcacaaagattgtag

SEQ ID NO: 271486 - DNA, 60 bp, Artificial
  Synthetic oligonucleotide
tgctccaatgagaaggtgcttgattcagagtcagagtactaaccttcacaatttcactcc

SEQ ID NO: 271487 - DNA, 50 bp, Artificial
  Synthetic oligonucleotide
ttaaagttcgtattgtaagatgtaaggtttaccccgtaaacggacgacat

SEQ ID NO: 271488 - DNA, 60 bp, Artificial
  Synthetic oligonucleotide
ttatgagatgctatgcaatattgcgagagtgtacggaggatatgtaatacgaggtaattc

SEQ ID NO: 271489 - DNA, 58 bp, Artificial
  Synthetic oligonucleotide
ctttagtgtgtatagtagatttgtggcgcactgaaaagctattaagagctgaataagt

SEQ ID NO: 271490 - DNA, 60 bp, Artificial
  Synthetic oligonucleotide
cagggataggtacggatgggctaatatcatctatgtgtcatagacccgaatcagtaacac

SEQ ID NO: 271491 - DNA, 55 bp, Artificial
  Synthetic oligonucleotide
ggactttacagaccttttacagactgggacaggcccaaatggtgccctgaaagcc

SEQ ID NO: 271492 - DNA, 58 bp, Artificial
  Synthetic oligonucleotide
atttgtagtatggctaatcagtattctagcggagactaataggacaccatttgatcta

SEQ ID NO: 271493 - DNA, 57 bp, Artificial
  Synthetic oligonucleotide
gccaacaaaggttgaggccatctaattaggttactctgagcatatttgctctattaa

SEQ ID NO: 271494 - DNA, 57 bp, Artificial
  Synthetic oligonucleotide
atagggtgtctatggacgtattcagggatagattacgggacatcgtttagtctatca

SEQ ID NO: 271495 - DNA, 56 bp, Artificial
  Synthetic oligonucleotide
gtttgctctgtatattatagcagcactatcaagggactcactaaggtcagtacagg

SEQ ID NO: 271496 - DNA, 56 bp, Artificial
  Synthetic oligonucleotide
gtatttaacctaagtgatacagctgtgcgttgtgcgctttgaagtttatcacgctt

SEQ ID NO: 271497 - DNA, 56 bp, Artificial
  Synthetic oligonucleotide
atgctatcgattagtcatggtgtagtaagtccagctctatttattctagtaggggg

SEQ ID NO: 271498 - DNA, 54 bp, Artificial
  Synthetic oligonucleotide
agggggtataatgactctactaccttttacatatacggcgattatagtagggag

SEQ ID NO: 271499 - DNA, 55 bp, Artificial
  Synthetic oligonucleotide
gcgcaactaggtctacacacgtgactagtatcagcgatagagggtccgactccgg

SEQ ID NO: 271500 - DNA, 55 bp, Artificial
  Synthetic oligonucleotide
gacagcgcatgctgaggcgaatagtgcggtatcagtagtactagcaggtctagta

SEQ ID NO: 271501 - DNA, 60 bp, Artificial
  Synthetic oligonucleotide
cctaagagagaggcttaggataagagatattcgtgagagaggtaaggtaagatcttatca

SEQ ID NO: 271502 - DNA, 55 bp, Artificial
  Synthetic oligonucleotide
taagattggatggtagatctggttgattggacagattcctgccttgccctggtga

SEQ ID NO: 271503 - DNA, 55 bp, Artificial
  Synthetic oligonucleotide
gaaccagcctacctagtgtggtttcacccaggcacttaagataggtttgccctta

SEQ ID NO: 271504 - DNA, 55 bp, Artificial
  Synthetic oligonucleotide
gctttgattccagtccccgtcgcctaaaactcaggcgtgacgatcggatgcacct

SEQ ID NO: 271505 - DNA, 55 bp, Artificial
  Synthetic oligonucleotide
ggagtatttctgaggtttgaccacttcagttctagcacaaagattgtagcgaggt

SEQ ID NO: 271506 - DNA, 55 bp, Artificial
  Synthetic oligonucleotide
caccctcatgaaggcgtgcatgagctctgatgggcttgacacagtttcaacaatg

SEQ ID NO: 271507 - DNA, 54 bp, Artificial
  Synthetic oligonucleotide
ggtaattagcccgacactaacggtaaaggtaacagggagtcagtgattttgatc

SEQ ID NO: 271508 - DNA, 54 bp, Artificial
  Synthetic oligonucleotide
cccatgactaccactcttccggacttcgacttagtaacttccacagaaacccca

SEQ ID NO: 271509 - DNA, 55 bp, Artificial
  Synthetic oligonucleotide
cgcgactctaggcgccactaccctctggagttatatggattcccgcctaacaagg

SEQ ID NO: 271510 - DNA, 55 bp, Artificial
  Synthetic oligonucleotide
cactccaactggcctctaaaacgttgcaatttatgatcacagccataggagaagt

SEQ ID NO: 271511 - DNA, 55 bp, Artificial
  Synthetic oligonucleotide
gtagaggtgagacagagatatcgagcacaacgaggagtaattacgagctagggag

SEQ ID NO: 271512 - DNA, 60 bp, Artificial
  Synthetic oligonucleotide
cgggacgcatagtagaggtgagacagagatatcgagcacaacgaggagtaattacgagct

SEQ ID NO: 271513 - DNA, 55 bp, Artificial
  Synthetic oligonucleotide
ggtcgcgactcgcgtcgatctttcttccttttgcggcctttgcccttacacgggc

SEQ ID NO: 271514 - DNA, 54 bp, Artificial
  Synthetic oligonucleotide
attgagctaatttcgtatatagcgagagcggtatctctaggggtacgtctattt

SEQ ID NO: 271515 - DNA, 54 bp, Artificial
  Synthetic oligonucleotide
gctactcagagaatgtattacctgtgtatcagatggaccccatggattgtttga

SEQ ID NO: 271516 - DNA, 53 bp, Artificial
  Synthetic oligonucleotide
agtatccaggcaccccctcattactgttaagtactgttgaccctaacaaaact

SEQ ID NO: 271517 - DNA, 53 bp, Artificial
  Synthetic oligonucleotide
cttccgattcccttacctgctctcaagaccggggacgagacgacctctgggag

SEQ ID NO: 271518 - DNA, 53 bp, Artificial
  Synthetic oligonucleotide
cggccccaaaactggttgagatgctcaagatcgagtcaccaaaagattctgtg

SEQ ID NO: 271519 - DNA, 53 bp, Artificial
  Synthetic oligonucleotide
gggtctaatagctcaactaccatttacctatacggcgattatagtagggagta

SEQ ID NO: 271520 - DNA, 52 bp, Artificial
  Synthetic oligonucleotide
cttatacttaaggttgtcagggcgcaatgaataaggccaaagccttttacca

SEQ ID NO: 271521 - DNA, 52 bp, Artificial
  Synthetic oligonucleotide
ccctgatagaccttctgagatcacccaacccttctcaagaagtagctaaggg

SEQ ID NO: 271522 - DNA, 52 bp, Artificial
  Synthetic oligonucleotide
gatcttatcatgaaaggacgtagtcagagatgagagtctaaagatcacctta

SEQ ID NO: 271523 - DNA, 60 bp, Artificial
  Synthetic oligonucleotide
gggcagtgagttaagattggatggtagatctggttgattggacagattcctgccttgccc

SEQ ID NO: 271524 - DNA, 52 bp, Artificial
  Synthetic oligonucleotide
gtatatagcaagagcagtatctctaggggtacgtctatttgcgaatctggta

SEQ ID NO: 271525 - DNA, 51 bp, Artificial
  Synthetic oligonucleotide
tgtcctgagtggtggtgttgaatagcccccatcctttgctctaaccagacc

SEQ ID NO: 271526 - DNA, 51 bp, Artificial
  Synthetic oligonucleotide
taggtagtgcagcaggagtatcacgagtaattgatcattgtgggtgcctgc

SEQ ID NO: 271527 - DNA, 51 bp, Artificial
  Synthetic oligonucleotide
caacccttaccctgtcagagatgggctcaagagactacagtatcatcctct

SEQ ID NO: 271528 - DNA, 51 bp, Artificial
  Synthetic oligonucleotide
cagtaatataataagtatcacgggggtgacaattatactaaagggtaggat

SEQ ID NO: 271529 - DNA, 50 bp, Artificial
  Synthetic oligonucleotide
aacgctttacgtcgtcggccctgcgatatctacatcacgtcaccgcccga

SEQ ID NO: 271530 - DNA, 50 bp, Artificial
  Synthetic oligonucleotide
aagcccggtcccgctttgcgcccagtcacgtgcattttgctagcagaatg

SEQ ID NO: 271531 - DNA, 50 bp, Artificial
  Synthetic oligonucleotide
aagcgaaagacacgggagtgcgttgggctgcctacctagcaggctgagtg

SEQ ID NO: 271532 - DNA, 50 bp, Artificial
  Synthetic oligonucleotide
aatacgtggcgcgcagcaacttcgcaacccctctcgggcatgattgacat

SEQ ID NO: 271533 - DNA, 50 bp, Artificial
  Synthetic oligonucleotide
acaacgtggggtagatattgcaggaccaacaacgcaagggggtcgggcgg

SEQ ID NO: 271534 - DNA, 60 bp, Artificial
  Synthetic oligonucleotide
gaactaccttggtatcaaaatcacaccctcacataggttggtcaatacatagcttcctga

SEQ ID NO: 271535 - DNA, 50 bp, Artificial
  Synthetic oligonucleotide
acacatgctgcagcttacgcaacactcttgccaccccgcacaactccagt

SEQ ID NO: 271536 - DNA, 50 bp, Artificial
  Synthetic oligonucleotide
agtcgagagcctcccgcctatacgtcacgccggtagtggggttaagcgct

SEQ ID NO: 271537 - DNA, 50 bp, Artificial
  Synthetic oligonucleotide
atcacgtcaccgcccaaccccttacgtcgtcggccctgcgatatctacat

SEQ ID NO: 271538 - DNA, 50 bp, Artificial
  Synthetic oligonucleotide
atcctgtcgaccaacgtggatcaggggacgtacgaagttgatgagaaggc

SEQ ID NO: 271539 - DNA, 50 bp, Artificial
  Synthetic oligonucleotide
cccctaggaaccccctgacctctgtggtgtccttaggtacaggccagctt

SEQ ID NO: 271540 - DNA, 50 bp, Artificial
  Synthetic oligonucleotide
cccgtgtggtagcgagtccaaaacccccgccatggcctaaaggcacgttc

SEQ ID NO: 271541 - DNA, 50 bp, Artificial
  Synthetic oligonucleotide
ccctcgacttgccccctgtaaaacccgaccgcacgtcaatcggtgggtcg

SEQ ID NO: 271542 - DNA, 50 bp, Artificial
  Synthetic oligonucleotide
ccctgcgatatctacatcacgtcaccgcccgaccccttacgtcgtcggcc

SEQ ID NO: 271543 - DNA, 50 bp, Artificial
  Synthetic oligonucleotide
ccgactttacttcccggtcaactaggcgtccccctaatccgccgcgaggt

SEQ ID NO: 271544 - DNA, 50 bp, Artificial
  Synthetic oligonucleotide
cggctgtactggggctacggccaaagtaccaacccacgcatgggtacgcg

SEQ ID NO: 271545 - DNA, 58 bp, Artificial
  Synthetic oligonucleotide
gaagtccctaggataatgtaactaaggctgcttggtattactgccacaaggctagtta

SEQ ID NO: 271546 - DNA, 50 bp, Artificial
  Synthetic oligonucleotide
cggggacaccttggaggagcccggcctttaccctcccccgcggacgatcg

SEQ ID NO: 271547 - DNA, 50 bp, Artificial
  Synthetic oligonucleotide
cggggcacttgggccactcctagctcggcatgggtggaaggaggctcgcg

SEQ ID NO: 271548 - DNA, 50 bp, Artificial
  Synthetic oligonucleotide
cgtcgtcggccctgcgatacctacatcacgtcaccgcacaaccccttacg

SEQ ID NO: 271549 - DNA, 50 bp, Artificial
  Synthetic oligonucleotide
ctacatcacgtcaccgcccaaacccttacgtcattggccctgcaatatct

SEQ ID NO: 271550 - DNA, 50 bp, Artificial
  Synthetic oligonucleotide
ctctgtccacggcgccttacgagccgagcgagtaggcaacccacctacac

SEQ ID NO: 271551 - DNA, 50 bp, Artificial
  Synthetic oligonucleotide
cttagcgccccctcgctttcttccagctgtagctcctctggttggcctcc

SEQ ID NO: 271552 - DNA, 50 bp, Artificial
  Synthetic oligonucleotide
gagtgcgttgggctgcctacctagcaggctgagtggcttggtcaggctat

SEQ ID NO: 271553 - DNA, 50 bp, Artificial
  Synthetic oligonucleotide
gcagcttacgcaacactcttgctaccccgcacaactccagctttggctga

SEQ ID NO: 271554 - DNA, 60 bp, Artificial
  Synthetic oligonucleotide
gagaagtcttgtactttaatactatcagagtataagccttttagaacatatagatagcag

SEQ ID NO: 271555 - DNA, 60 bp, Artificial
  Synthetic oligonucleotide
taggtgcgatatccaagagtgcgcaactaggtctacacacgtgactagtatcagcgatag

SEQ ID NO: 271556 - DNA, 60 bp, Artificial
  Synthetic oligonucleotide
tttagcagcaccaatatgagtagatcgtagaccgagattacttttaggtaatggagtaga

SEQ ID NO: 271557 - DNA, 55 bp, Artificial
  Synthetic oligonucleotide
acgtgagctagaatagaacagtctatatattaagtaaaacggtcaagaaactgtt

SEQ ID NO: 271558 - DNA, 56 bp, Artificial
  Synthetic oligonucleotide
cataagaaattttcatactactagagctctttcggcagatatatatactttaacga

SEQ ID NO: 271559 - DNA, 56 bp, Artificial
  Synthetic oligonucleotide
cggtagatcaactgtttgtggtacagtctgttccctgttcgagccagggtattcac

SEQ ID NO: 271560 - DNA, 55 bp, Artificial
  Synthetic oligonucleotide
gaagtagactcaggtctagatagcgatgaacaagttcaaagtagtggatccgagg

SEQ ID NO: 271561 - DNA, 55 bp, Artificial
  Synthetic oligonucleotide
gaccattcgcttggccggtgataccaccataagactgcacattactggaccggca

SEQ ID NO: 271562 - DNA, 55 bp, Artificial
  Synthetic oligonucleotide
ctgcaaggggttgcacattcggctcgagctatacacactcttgatatcaggcagc

SEQ ID NO: 271563 - DNA, 55 bp, Artificial
  Synthetic oligonucleotide
gaggggattacgcttccgtgatcactaaccttgcagtcacgtgacgggctccacc

SEQ ID NO: 271564 - DNA, 55 bp, Artificial
  Synthetic oligonucleotide
ctcgactttcgaaaaggacgccgtgacctgccgcattagtcgacctcgtaattca

SEQ ID NO: 271565 - DNA, 55 bp, Artificial
  Synthetic oligonucleotide
ctccatgcgtccccgtaggatgcactcatttcacgccgagtcaacccagctcggt

SEQ ID NO: 271566 - DNA, 55 bp, Artificial
  Synthetic oligonucleotide
gcatcaatctctggcgaatgatagcgtgccatcgttggctctaagtcatgccgat

SEQ ID NO: 271567 - DNA, 60 bp, Artificial
  Synthetic oligonucleotide
ttaagtgttcgaatcacttcaacataattttaaggtggatatagatcaatcggtagatca

SEQ ID NO: 271568 - DNA, 55 bp, Artificial
  Synthetic oligonucleotide
ctccagatattggagactatttcaggtcgcggttcatatgtgagaggctgcaacg

SEQ ID NO: 271569 - DNA, 55 bp, Artificial
  Synthetic oligonucleotide
gcccagacgccggatgttcattccagggttagtatggagtgtacaaagttgactg

SEQ ID NO: 271570 - DNA, 52 bp, Artificial
  Synthetic oligonucleotide
gccttacttaccggttgaccaatgttttgggctcgggcctcgacaggtttct

SEQ ID NO: 271571 - DNA, 55 bp, Artificial
  Synthetic oligonucleotide
aactccgcacgagaacaccgtccactgaaagatccgagacttcgccccggcatac

SEQ ID NO: 271572 - DNA, 55 bp, Artificial
  Synthetic oligonucleotide
ggattgcagtacgagtcacccgaataaggcgatctcactgaggctatccaacacg

SEQ ID NO: 271573 - DNA, 55 bp, Artificial
  Synthetic oligonucleotide
atcataaagccactcggcaaactaactaccctaacttcgggacaagcagagctca

SEQ ID NO: 271574 - DNA, 55 bp, Artificial
  Synthetic oligonucleotide
ggctccggtgccacgcatgaagacaatgtcctctgccacggggctcaactcgaac

SEQ ID NO: 271575 - DNA, 55 bp, Artificial
  Synthetic oligonucleotide
taccagccgatggcaacattacagcctgatgtctgtcggtgtcgagagagccccg

SEQ ID NO: 271576 - DNA, 55 bp, Artificial
  Synthetic oligonucleotide
cgggcaccggccatccttttgtacccgatagttcgcaacccacgagccatggtcc

SEQ ID NO: 271577 - DNA, 55 bp, Artificial
  Synthetic oligonucleotide
cacacctcgccaacgacagcggcccaccccgccattctgtgtccgtgtgacagta

SEQ ID NO: 271578 - DNA, 60 bp, Artificial
  Synthetic oligonucleotide
ggatcacttgtagccatacagggtcatgataacccagtaccaactcaagacaacttatct

SEQ ID NO: 271579 - DNA, 55 bp, Artificial
  Synthetic oligonucleotide
cacatcgcagtaaggaatatgttcgcgcgctagaagaacgactctctaagatgga

SEQ ID NO: 271580 - DNA, 55 bp, Artificial
  Synthetic oligonucleotide
cgattcaccgtacgtctcgcgaaatgacatagcgttcgttcatcattggtgtgtc

SEQ ID NO: 271581 - DNA, 55 bp, Artificial
  Synthetic oligonucleotide
cagaattggaggcccctcccctcactacatctcgcagctgtcatgcgtcgtcacc

SEQ ID NO: 271582 - DNA, 54 bp, Artificial
  Synthetic oligonucleotide
aaaatcttatcgcaacgtcttatcgcagctagtgcgggacagcttctcgcaagg

SEQ ID NO: 271583 - DNA, 54 bp, Artificial
  Synthetic oligonucleotide
gacgaccactgcgtcccgagtcgaattttcagtaaaccgtgttcgtggacatgg

SEQ ID NO: 271584 - DNA, 54 bp, Artificial
  Synthetic oligonucleotide
tgagtgtcttgacaaagttagtcaagctacaactaagtttatttctggtcaatg

SEQ ID NO: 271585 - DNA, 53 bp, Artificial
  Synthetic oligonucleotide
gagtgcctcgaaacactgtgccatcagcacacgtcacagagccagcacccgag

SEQ ID NO: 271586 - DNA, 53 bp, Artificial
  Synthetic oligonucleotide
cgtatccatcgagtaagcacctccgtcattccgggctgcggactcgtactcac

SEQ ID NO: 271587 - DNA, 53 bp, Artificial
  Synthetic oligonucleotide
aagcggcccgtctatgcacggagcagaaacatacccagctagcgttagggtca

SEQ ID NO: 271588 - DNA, 53 bp, Artificial
  Synthetic oligonucleotide
gttgcatctgtcgcctctgttctcctcttgcagtggcttggctcccaatcggt

SEQ ID NO: 271589 - DNA, 59 bp, Artificial
  Synthetic oligonucleotide
gccatattaaatctataggatttagtaatgaaagtgtagaaaatgtattattggctatg

SEQ ID NO: 271590 - DNA, 52 bp, Artificial
  Synthetic oligonucleotide
ctcgtagagtcgcccgtagcgacaaccccgtcaagggccctggctccatggt

SEQ ID NO: 271591 - DNA, 52 bp, Artificial
  Synthetic oligonucleotide
cgtggaaaggtgtggtagtagatgtgggatgcgacgaagaaagtaatagcgc

SEQ ID NO: 271592 - DNA, 52 bp, Artificial
  Synthetic oligonucleotide
tactgctcatgacagtactcataagtgttcaactcactttagccttaaatcc

SEQ ID NO: 271593 - DNA, 51 bp, Artificial
  Synthetic oligonucleotide
tcacccataggcatcacggtagcagacatgtcgtccgaaagcatatcctga

SEQ ID NO: 271594 - DNA, 51 bp, Artificial
  Synthetic oligonucleotide
ggcggcagcaaaagggtgtacgaggagcgagctttcaacaaggtttccctt

SEQ ID NO: 271595 - DNA, 51 bp, Artificial
  Synthetic oligonucleotide
ggcctaaagtctgagccctctgtaaagtaggcgccagacgagagtgctata

SEQ ID NO: 271596 - DNA, 50 bp, Artificial
  Synthetic oligonucleotide
aaaacgggaccgggctcattcgtcgtcttcctacagctccgacccgcctc

SEQ ID NO: 271597 - DNA, 50 bp, Artificial
  Synthetic oligonucleotide
tatgttcagccatagcgctcagtatcgtcatcactgatggcaacgaaggg

SEQ ID NO: 271598 - DNA, 50 bp, Artificial
  Synthetic oligonucleotide
aaaacggtagtctcagtgggaaggcgggcggactggggagcttccatgtt

SEQ ID NO: 271599 - DNA, 50 bp, Artificial
  Synthetic oligonucleotide
aaaagccacaatgacgcgcgctgctgtcttgccgtggggtgtgctcgagt

SEQ ID NO: 271600 - DNA, 58 bp, Artificial
  Synthetic oligonucleotide
gatgccgatctagttcgcttacggaaaggtcgctattggtagggtaagctgtttgcta

SEQ ID NO: 271601 - DNA, 50 bp, Artificial
  Synthetic oligonucleotide
aaaacgccctgcgtcgctgtggaggcattggtcgcttcgagacgtcgagg

SEQ ID NO: 271602 - DNA, 50 bp, Artificial
  Synthetic oligonucleotide
aaaacaagtgcgcgcgtccctcctcagctctctcgcatccgtgacatccg

SEQ ID NO: 271603 - DNA, 50 bp, Artificial
  Synthetic oligonucleotide
aaagccggtgcttgatcgccagtctatgagccgtccctggcatggctgac

SEQ ID NO: 271604 - DNA, 50 bp, Artificial
  Synthetic oligonucleotide
aaagcccgagtgcgatgttggtgtggcgagggcgccgctcatgacatctt

SEQ ID NO: 271605 - DNA, 50 bp, Artificial
  Synthetic oligonucleotide
aaagcccccgcacaggactgcaagaggcgtctgcaggcaccacagaataa

SEQ ID NO: 271606 - DNA, 50 bp, Artificial
  Synthetic oligonucleotide
aaagccatgactcgcgaccaccagggggctagcgaagtctcgcccacccc

SEQ ID NO: 271607 - DNA, 50 bp, Artificial
  Synthetic oligonucleotide
aaagccatccccgttggatagccaggctctggcgacaccgctctcgtagc

SEQ ID NO: 271608 - DNA, 50 bp, Artificial
  Synthetic oligonucleotide
aaacttgcttccccgacagcccggctggaccgttggtttaatgggcgatg

SEQ ID NO: 271609 - DNA, 50 bp, Artificial
  Synthetic oligonucleotide
aaacttctccgctggtttcccgcccctaaccgctgaggggttcctctcgc

SEQ ID NO: 271610 - DNA, 50 bp, Artificial
  Synthetic oligonucleotide
aaacgtggtagacgagtcgcgtgccggaggaccatgggggtggctaacga

SEQ ID NO: 271611 - DNA, 56 bp, Artificial
  Synthetic oligonucleotide
cagccgctaatgggctaacaatcataaagccactcggcaaactaactaccctaact

SEQ ID NO: 271612 - DNA, 50 bp, Artificial
  Synthetic oligonucleotide
aaacgcgagcgaccacaaagaaaccgaacggccccctcctacgtcagcgc

SEQ ID NO: 271613 - DNA, 50 bp, Artificial
  Synthetic oligonucleotide
aaacctcttccgtccgggcgactcacgccggcagcgtttcttgtctacac

SEQ ID NO: 271614 - DNA, 50 bp, Artificial
  Synthetic oligonucleotide
aaaccggttctcccgtacagcagcttagccggcatcatggtagccgcgtc

SEQ ID NO: 271615 - DNA, 50 bp, Artificial
  Synthetic oligonucleotide
aaacccgcgttgctcccccggaaagcctgtgcccgcgtcactcgatcaac

SEQ ID NO: 271616 - DNA, 50 bp, Artificial
  Synthetic oligonucleotide
aaaccccattggtcctctgcgtcacgtcacctacgcctcccacgaccaac

SEQ ID NO: 271617 - DNA, 50 bp, Artificial
  Synthetic oligonucleotide
aaacccatctacgggggactacgaccccagtccgcccaaagtcgatgcct

SEQ ID NO: 271618 - DNA, 50 bp, Artificial
  Synthetic oligonucleotide
aaaccacccaacgacacgcgcccctactctcgtctcggcggtctcctctc

SEQ ID NO: 271619 - DNA, 50 bp, Artificial
  Synthetic oligonucleotide
aaacacgtggcgacgaacagacacaggggcgccgaagaggggctaatgcg

SEQ ID NO: 271620 - DNA, 50 bp, Artificial
  Synthetic oligonucleotide
aaacaccgcgggcttatggcaggatgaccgcccacgctacctctgccctc

SEQ ID NO: 271621 - DNA, 50 bp, Artificial
  Synthetic oligonucleotide
aaaagcgagggcctttgccgggagtcaacacggcttctcagtcccccgaa

SEQ ID NO: 271622 - DNA, 59 bp, Artificial
  Synthetic oligonucleotide
cacttcaacataattttaaggtggatatagatcaatcggtagatcaactgtttgtggta

SEQ ID NO: 271623 - DNA, 50 bp, Artificial
  Synthetic oligonucleotide
aaaagctggtagcgagcatggagtgccgcgttgccgggatcacagagaga

SEQ ID NO: 271624 - DNA, 50 bp, Artificial
  Synthetic oligonucleotide
aaaagggcgacatagggcacccattggctcgtgttgggcacgtttggcaa

SEQ ID NO: 271625 - DNA, 50 bp, Artificial
  Synthetic oligonucleotide
aaaatgcgggggacggcagatcgggctgcattgggctgcataagctcaaa

SEQ ID NO: 271626 - DNA, 50 bp, Artificial
  Synthetic oligonucleotide
aaagtggtctgctgccggatggagacaggggttcgctaccaggatgccat

SEQ ID NO: 271627 - DNA, 50 bp, Artificial
  Synthetic oligonucleotide
aaagtgggcccttcctcaagagcgagcagtccaatagccagcgccccacg

SEQ ID NO: 271628 - DNA, 50 bp, Artificial
  Synthetic oligonucleotide
aaagtgcgcgcttgatcctggccgcatccccgggccgtttacgaagccca

SEQ ID NO: 271629 - DNA, 50 bp, Artificial
  Synthetic oligonucleotide
aaagtacctggtgtcgtctgtccgggcagcccaagccaagcgctatgcct

SEQ ID NO: 271630 - DNA, 50 bp, Artificial
  Synthetic oligonucleotide
aaaggtgatgcggggcgttcccgtccccagatcgtactcgaccctgtctg

SEQ ID NO: 271631 - DNA, 50 bp, Artificial
  Synthetic oligonucleotide
aaagggcggccacggcactcgaaacgccaacaggacggaggaaatgaggc

SEQ ID NO: 271632 - DNA, 50 bp, Artificial
  Synthetic oligonucleotide
aaagggcgcaggagtttgcccctcgtagcattagtgggaagggtctgccc

SEQ ID NO: 271633 - DNA, 60 bp, Artificial
  Synthetic oligonucleotide
attctttagctactgaccctgaagtagactcaggtctagatagcgatgaacaagttcaaa

SEQ ID NO: 271634 - DNA, 50 bp, Artificial
  Synthetic oligonucleotide
aaagggccgcccatagccctccccgacttgagctgccgtcatatcatagc

SEQ ID NO: 271635 - DNA, 50 bp, Artificial
  Synthetic oligonucleotide
aaaggctggacacctgcgtggctgcggcttacgtgagtctctccgaacag

SEQ ID NO: 271636 - DNA, 50 bp, Artificial
  Synthetic oligonucleotide
aaaggagaggcatcccaggcggttgtgggagggaccagtctgctgctcga

SEQ ID NO: 271637 - DNA, 50 bp, Artificial
  Synthetic oligonucleotide
aaagcgcagaacaacgcccctcgcattctatcgagccaagtcgggccgat

SEQ ID NO: 271638 - DNA, 50 bp, Artificial
  Synthetic oligonucleotide
aaagcgacaaaccctcgccctcctgatagggccaagcccgactgacgtgc

SEQ ID NO: 271639 - DNA, 50 bp, Artificial
  Synthetic oligonucleotide
aaagcctgtcacccgattcagagagcgctggactcaaccagctggcggtt

SEQ ID NO: 271640 - DNA, 54 bp, Artificial
  Synthetic oligonucleotide
atgatatctcgaccaaccttaaagtgaggataaattccttataaagataaaagg

SEQ ID NO: 271641 - DNA, 58 bp, Artificial
  Synthetic oligonucleotide
gccccgattacgtctcaacacgaagcgctaagccggtacaactccagctggacaccta

SEQ ID NO: 271642 - DNA, 55 bp, Artificial
  Synthetic oligonucleotide
cggtctcaaggtagtgtcaagtggagagtacaccaggtaaggaggccgcatgctc

SEQ ID NO: 271643 - DNA, 50 bp, Artificial
  Synthetic oligonucleotide
aggcgtgagacagccccgattcgctactgtgcagattggcttgcgggcta

SEQ ID NO: 271644 - DNA, 50 bp, Artificial
  Synthetic oligonucleotide
aggcggcagtcggtcgcggagcactcgacgggcgtgtactcgcagtacag

SEQ ID NO: 271645 - DNA, 50 bp, Artificial
  Synthetic oligonucleotide
ccgggcaccgagagctggactgcgaagctatacttgggacggggaagcgt

SEQ ID NO: 271646 - DNA, 50 bp, Artificial
  Synthetic oligonucleotide
cctagccggggcttcttacgcggcggcgttacagtgtgagctgaagtggc

SEQ ID NO: 271647 - DNA, 50 bp, Artificial
  Synthetic oligonucleotide
cctagcggggagcttggacgcagctgcacgcaacacggatctacgaacgt

SEQ ID NO: 271648 - DNA, 50 bp, Artificial
  Synthetic oligonucleotide
ccttccgtccaaggtcacatgccacgcccgagtgttgccagctccattcg

SEQ ID NO: 271649 - DNA, 50 bp, Artificial
  Synthetic oligonucleotide
aaatccggcatgcgcttgttcgcagtcatccgtccccggtgttcgctgtg

SEQ ID NO: 271650 - DNA, 50 bp, Artificial
  Synthetic oligonucleotide
aacacacggcactgccacctaatgcgtccgcccagagctggcaccatgcg

SEQ ID NO: 271651 - DNA, 50 bp, Artificial
  Synthetic oligonucleotide
aacaccacagaacacgaaccgctcccccggcctacagagcccaaacggca

SEQ ID NO: 271652 - DNA, 50 bp, Artificial
  Synthetic oligonucleotide
aacaccagggatgggagcatgatagtcggaatggcggggtgcgcggagga

SEQ ID NO: 271653 - DNA, 55 bp, Artificial
  Synthetic oligonucleotide
cgggccttcagtctcgagacataggtaggtcagagttgtctcatgaccgcgtagc

SEQ ID NO: 271654 - DNA, 50 bp, Artificial
  Synthetic oligonucleotide
aacacgcccgctagggacggtctgcctttgagcccacacaatccgcctcg

SEQ ID NO: 271655 - DNA, 50 bp, Artificial
  Synthetic oligonucleotide
aaggcctcccgcctcacacgagtagccctacgcccatagcgcgctgccgt

SEQ ID NO: 271656 - DNA, 50 bp, Artificial
  Synthetic oligonucleotide
cgtggagagcccaaagtcagacgcagcgtaaaaggggcgcgtcaaagcca

SEQ ID NO: 271657 - DNA, 50 bp, Artificial
  Synthetic oligonucleotide
acgcaccaatgcgtccgtacgagaatcagggccccaccatcctcgcatca

SEQ ID NO: 271658 - DNA, 50 bp, Artificial
  Synthetic oligonucleotide
agatcgtgtggacgcagccatacggatcccaggcgcttaaatctcggccc

SEQ ID NO: 271659 - DNA, 50 bp, Artificial
  Synthetic oligonucleotide
agccgttatcggggtatcgacggaggacgcaagccacgaccgctccttgc

SEQ ID NO: 271660 - DNA, 50 bp, Artificial
  Synthetic oligonucleotide
cggaactgcacatccgctcgaaacgccgacaagcaatacacagcccccaa

SEQ ID NO: 271661 - DNA, 50 bp, Artificial
  Synthetic oligonucleotide
agcctcagcagctccactcggctccacggagacatgcagccttcttcgac

SEQ ID NO: 271662 - DNA, 50 bp, Artificial
  Synthetic oligonucleotide
cgcgcacaagctagcttcccgtgtttagcccgccaacgtgcaaacacacg

SEQ ID NO: 271663 - DNA, 50 bp, Artificial
  Synthetic oligonucleotide
agcgttgagaggcgtgagacagccccgattcgctactgtgcagattggct

SEQ ID NO: 271664 - DNA, 55 bp, Artificial
  Synthetic oligonucleotide
accagaccatctgctcagtggctagcacatcaaggtgggttcaatgaagatgggg

SEQ ID NO: 271665 - DNA, 50 bp, Artificial
  Synthetic oligonucleotide
cgattgccgccgcgtcatctgtcacgtgtgcgtggttggaccctgaacca

SEQ ID NO: 271666 - DNA, 50 bp, Artificial
  Synthetic oligonucleotide
cgagccgggcaaccgtcagccatgtgccttgttccgcgagcgcttgacct

SEQ ID NO: 271667 - DNA, 50 bp, Artificial
  Synthetic oligonucleotide
ccttgccggtacctggtccctctaacctaaagacacgaccagcccgcggg

SEQ ID NO: 271668 - DNA, 55 bp, Artificial
  Synthetic oligonucleotide
acgagccctagaatatccacaccttgacgtgtatccgggagtatgtgcggtcgac

SEQ ID NO: 271669 - DNA, 54 bp, Artificial
  Synthetic oligonucleotide
cggccaaaggtaccgagctatagtttgttagtgaatgttggtaagtgggaagtg

SEQ ID NO: 271670 - DNA, 55 bp, Artificial
  Synthetic oligonucleotide
acttgactaggtgactcgcgttgcttaacatgtcgttgtttaggtatttgagtag

SEQ ID NO: 271671 - DNA, 55 bp, Artificial
  Synthetic oligonucleotide
cggcatcaaagtataggagctcgtttgtaaaagccaaggacagcggcgtatgtgc

SEQ ID NO: 271672 - DNA, 55 bp, Artificial
  Synthetic oligonucleotide
cggagtactctcagtcaccaatcgaatgactagaaggccgaaagattacggacgt

SEQ ID NO: 271673 - DNA, 55 bp, Artificial
  Synthetic oligonucleotide
cgctattagccttcttaagactagagatctaatcgcgcattagcttagtagagag

SEQ ID NO: 271674 - DNA, 55 bp, Artificial
  Synthetic oligonucleotide
cgcctacggtacgaacagtctcccgttcacacagtccagctctcccactggtgag

SEQ ID NO: 271675 - DNA, 55 bp, Artificial
  Synthetic oligonucleotide
ctctttagcgagcttggcgacctacttgagccaaaacgacgagctctaggcagtg

SEQ ID NO: 271676 - DNA, 55 bp, Artificial
  Synthetic oligonucleotide
ccggcatgttcgtagccgagttacacaaccactacaaggactccgctacctctgt

SEQ ID NO: 271677 - DNA, 55 bp, Artificial
  Synthetic oligonucleotide
ccgcatgcccacatggagtatgagcccgccacttttcagtcttactatcgtgcgg

SEQ ID NO: 271678 - DNA, 54 bp, Artificial
  Synthetic oligonucleotide
ccctctttcaacctcactagaacatcctaacctgcggaatactacccgtctacc

SEQ ID NO: 271679 - DNA, 55 bp, Artificial
  Synthetic oligonucleotide
catttgggttagtgtcgtctatagctaggacggtgagagtatccgcagtctcagt

SEQ ID NO: 271680 - DNA, 55 bp, Artificial
  Synthetic oligonucleotide
catactgaataacttcgtatgctcccgcggcccttagcttggcaaccatcagggg

SEQ ID NO: 271681 - DNA, 55 bp, Artificial
  Synthetic oligonucleotide
cagccgtactggcgatagttcttttcagccatgcgggcttctacatattccgacc

SEQ ID NO: 271682 - DNA, 55 bp, Artificial
  Synthetic oligonucleotide
caagtggtgggacgagggttgctacacaggatctactaccgcccaacgtacggag

SEQ ID NO: 271683 - DNA, 55 bp, Artificial
  Synthetic oligonucleotide
ttccgatggctcactaccacccacgtatcgatgatactcttttacgtgtatctgc

SEQ ID NO: 271684 - DNA, 55 bp, Artificial
  Synthetic oligonucleotide
tggacctttcttatcgtacgagaagcagccccagaacataaactcagagtatccc

SEQ ID NO: 271685 - DNA, 55 bp, Artificial
  Synthetic oligonucleotide
tgcaagtgagacgtctagttatctagtttcccaggacgtgtttggctgtgattgc

SEQ ID NO: 271686 - DNA, 55 bp, Artificial
  Synthetic oligonucleotide
ctctcgctctgcgcattacatggatgttttgctccgcccgaggttgaggggtagc

SEQ ID NO: 271687 - DNA, 55 bp, Artificial
  Synthetic oligonucleotide
tcgtttcgccatcacatatggcaaccgtagcttgcagctagagggagtcgccgtg

SEQ ID NO: 271688 - DNA, 55 bp, Artificial
  Synthetic oligonucleotide
tcagaactaggctgcaaccttcgtcaaacgtcgccctaagcttaaggtcaaattc

SEQ ID NO: 271689 - DNA, 55 bp, Artificial
  Synthetic oligonucleotide
gttgagctgcaaggtacacgatacattctctgcgcgtttgtggataaggggtcat

SEQ ID NO: 271690 - DNA, 55 bp, Artificial
  Synthetic oligonucleotide
gtggtgttgaggaatattactgcaaagatgggacgcttgggtggctcaaaagcgc

SEQ ID NO: 271691 - DNA, 55 bp, Artificial
  Synthetic oligonucleotide
gggtccttaatgaagggaatggcgccagaatataacccaaagagagagcgatgcg

SEQ ID NO: 271692 - DNA, 55 bp, Artificial
  Synthetic oligonucleotide
gggatgtagcttccccgcctacatctgacaacgccggtttaccatccggtctcac

SEQ ID NO: 271693 - DNA, 50 bp, Artificial
  Synthetic oligonucleotide
gggacttttgggaccccgttagttgggtgcccgagacgtttgtgggcgag

SEQ ID NO: 271694 - DNA, 55 bp, Artificial
  Synthetic oligonucleotide
ggcctgacacgagcctagtatagggacgtgcatacctaattaggaatcaagcctg

SEQ ID NO: 271695 - DNA, 55 bp, Artificial
  Synthetic oligonucleotide
gcgttacaggataggcgtggctttgccttcagatcaaaagaggatgcgggtggga

SEQ ID NO: 271696 - DNA, 55 bp, Artificial
  Synthetic oligonucleotide
gcgcaccagatctaaggtacccgtactgctgcagtagtctacaacgtagccgaaa

SEQ ID NO: 271697 - DNA, 55 bp, Artificial
  Synthetic oligonucleotide
ctcggtattcgaggaggtgtctactgggttccgctccgctggaggtaaacgcacg

SEQ ID NO: 271698 - DNA, 55 bp, Artificial
  Synthetic oligonucleotide
gccgatcgtgaggctgcagagacatgtacggagcgttgcccaaagccgtactcgc

SEQ ID NO: 271699 - DNA, 55 bp, Artificial
  Synthetic oligonucleotide
gcacttacagatggctactgctcccacgtgtagttcgtgggtcgtcccgcctggc

SEQ ID NO: 271700 - DNA, 55 bp, Artificial
  Synthetic oligonucleotide
gcaccaacagtagctgatgcctgctcggatacacgattatccaccccttggcccc

SEQ ID NO: 271701 - DNA, 55 bp, Artificial
  Synthetic oligonucleotide
gcacaactaaacgtgcgacactactcgagagagaggcccagtcaacgtgtggccc

SEQ ID NO: 271702 - DNA, 55 bp, Artificial
  Synthetic oligonucleotide
gatcgatacacagggaacgcaaacgcaaaagtcgcaggtcttgggtcgcaccttc

SEQ ID NO: 271703 - DNA, 55 bp, Artificial
  Synthetic oligonucleotide
gagtttatgttctggggctgcttctcgtacgacaagaaaggtccatgccatgtct

SEQ ID NO: 271704 - DNA, 55 bp, Artificial
  Synthetic oligonucleotide
gacaccaactggtcgagacaggaagttgatgtcttgtcccagagcactgcggatg

SEQ ID NO: 271705 - DNA, 55 bp, Artificial
  Synthetic oligonucleotide
cttgtcgtacgagaagcagccccagaacataaactcagagtatcccttccacctc

SEQ ID NO: 271706 - DNA, 55 bp, Artificial
  Synthetic oligonucleotide
ctggcgagaggggttgcatttgaaagacgcatgaacaacgctaatggtgagtcgc

SEQ ID NO: 271707 - DNA, 54 bp, Artificial
  Synthetic oligonucleotide
gcagttgcctctagtcgctgccaggagtagtaataaaggataagatctagtcct

SEQ ID NO: 271708 - DNA, 55 bp, Artificial
  Synthetic oligonucleotide
ctcggatacgactaggagcaatagtaacatcgatccgcgaagacgcagagtggac

SEQ ID NO: 271709 - DNA, 54 bp, Artificial
  Synthetic oligonucleotide
gtatcggatgtttcgcaacagggacgccgctagaaaaccatggaccatacaact

SEQ ID NO: 271710 - DNA, 54 bp, Artificial
  Synthetic oligonucleotide
gacgcgggaagcagcatactgatatccacttctgcgataactgatgtcatactt

SEQ ID NO: 271711 - DNA, 54 bp, Artificial
  Synthetic oligonucleotide
tggtctaccgcctctaagagatgggcccgatgatgtatacgaacgactgtatgc

SEQ ID NO: 271712 - DNA, 53 bp, Artificial
  Synthetic oligonucleotide
ccctatgtacgggtgcgagctgagcgggaagcttggtccaactagtggtccaa

SEQ ID NO: 271713 - DNA, 52 bp, Artificial
  Synthetic oligonucleotide
accacggtacatctaaactccgtcgttaacatgcagctaggaagcgggatac

SEQ ID NO: 271714 - DNA, 51 bp, Artificial
  Synthetic oligonucleotide
caagtaggcatacataggtctagctgtcgagacgcggtgagagccttcact

SEQ ID NO: 271715 - DNA, 51 bp, Artificial
  Synthetic oligonucleotide
acagcttggatcaaggttgcatgcatcggcgaacgttgttaaaacacggcg

SEQ ID NO: 271716 - DNA, 50 bp, Artificial
  Synthetic oligonucleotide
aaagcttcttgccgcttgtaggcgcgggcagacgcgatgcctattccgtc

SEQ ID NO: 271717 - DNA, 50 bp, Artificial
  Synthetic oligonucleotide
aaagcttgcagctggtcgtgccgacttgggcgcagctaccgacctcaacg

SEQ ID NO: 271718 - DNA, 50 bp, Artificial
  Synthetic oligonucleotide
aaaggaactgcatttcgcgaagggcgtcgggggcgattccgttggggtat

SEQ ID NO: 271719 - DNA, 55 bp, Artificial
  Synthetic oligonucleotide
ctccaaaacagtacggttacaagacccagacttaccattacgtgatctccgcaga

SEQ ID NO: 271720 - DNA, 50 bp, Artificial
  Synthetic oligonucleotide
aaaggactgggacgttggtcacaacgactgggttcgcccggtgggttgga

SEQ ID NO: 271721 - DNA, 50 bp, Artificial
  Synthetic oligonucleotide
aaaggcacgaccgtacctgtatgtacgcccgtagtgccgccaagcccttg

SEQ ID NO: 271722 - DNA, 50 bp, Artificial
  Synthetic oligonucleotide
gacggtggaccctgaccgttcgggcacgtttgtgggtgtcatggctcgta

SEQ ID NO: 271723 - DNA, 50 bp, Artificial
  Synthetic oligonucleotide
aaaggtctggcggcacgagttcgggaatgtgtcttcggtgggcagtaggg

SEQ ID NO: 271724 - DNA, 50 bp, Artificial
  Synthetic oligonucleotide
aaaggtggcccgagcgcgacaaatggacagggagagggcccaatcaagct

SEQ ID NO: 271725 - DNA, 50 bp, Artificial
  Synthetic oligonucleotide
gaagccagactggcaaccagttccacagtagtcggcggtggagccacacc

SEQ ID NO: 271726 - DNA, 50 bp, Artificial
  Synthetic oligonucleotide
aaagtccacgggcggaaacgccgcgctaacctccggggctaaatgcgttg

SEQ ID NO: 271727 - DNA, 50 bp, Artificial
  Synthetic oligonucleotide
aaagtgggtcgacgcgtgtgctcgtgaactgtgcagggccgaggcttgat

SEQ ID NO: 271728 - DNA, 50 bp, Artificial
  Synthetic oligonucleotide
ctgacaggcctacacgcgaggctacacatctgccgctcagcacacctgac

SEQ ID NO: 271729 - DNA, 50 bp, Artificial
  Synthetic oligonucleotide
aaagttggaccggaatcgcactacgccgcacatcgcaacgaagctgcccg

SEQ ID NO: 271730 - DNA, 55 bp, Artificial
  Synthetic oligonucleotide
ctatggtccaacgctggctatgactgatccagttgttttgactcctatataagca

SEQ ID NO: 271731 - DNA, 50 bp, Artificial
  Synthetic oligonucleotide
ctctctgcgtcggcgtagcagcatttatcctcgcagccgccactacctcc

SEQ ID NO: 271732 - DNA, 50 bp, Artificial
  Synthetic oligonucleotide
aaatatccgccggctgcccacgcaccctcacctacctacagcacacaccc

SEQ ID NO: 271733 - DNA, 50 bp, Artificial
  Synthetic oligonucleotide
aaaagcgatggtcggcgacgtaagtccgtgcccgacataccccacactcg

SEQ ID NO: 271734 - DNA, 50 bp, Artificial
  Synthetic oligonucleotide
aaaagcgcgctgtagctgtctacaacgtcccctaaacgactgtacgccgc

SEQ ID NO: 271735 - DNA, 50 bp, Artificial
  Synthetic oligonucleotide
aaaagtctggacgcttgactccagcggtcggggtgttgacctggcggtgc

SEQ ID NO: 271736 - DNA, 50 bp, Artificial
  Synthetic oligonucleotide
aaacacaggcgcgtggggcgattggtggctagtagccgcactcttggcac

SEQ ID NO: 271737 - DNA, 50 bp, Artificial
  Synthetic oligonucleotide
aaacacgcatcgcacgccctacactgtcgaccaaggcggaccaagacctc

SEQ ID NO: 271738 - DNA, 50 bp, Artificial
  Synthetic oligonucleotide
aaacatgggtagtctggtggtggagccgcatccctgtggcgcaactcgca

SEQ ID NO: 271739 - DNA, 50 bp, Artificial
  Synthetic oligonucleotide
aaaccccgtcaaggatgcttgagctccgcacacaacgaggcttacgcccc

SEQ ID NO: 271740 - DNA, 50 bp, Artificial
  Synthetic oligonucleotide
aaacgaggctggcggagtcacccctgctgtactttgcgttcgccgtatgc

SEQ ID NO: 271741 - DNA, 55 bp, Artificial
  Synthetic oligonucleotide
ctatacttctctaggctcggtccgtactaaggcgaggtagacttaagcggtaggc

SEQ ID NO: 271742 - DNA, 50 bp, Artificial
  Synthetic oligonucleotide
aaacgagggcgctatacaccaggcatcatggtcgatcgccggccactcat

SEQ ID NO: 271743 - DNA, 50 bp, Artificial
  Synthetic oligonucleotide
aaacgcttgacgcaggagcgccaaggttggatgcggtgaagacggaatga

SEQ ID NO: 271744 - DNA, 50 bp, Artificial
  Synthetic oligonucleotide
aaactagtacccgaggcatccgcgagcgacggagtgagagccgtgctgct

SEQ ID NO: 271745 - DNA, 50 bp, Artificial
  Synthetic oligonucleotide
aaagactggccgccaggcaaaagtcgccttcagccaagcgtaagcctccc

SEQ ID NO: 271746 - DNA, 50 bp, Artificial
  Synthetic oligonucleotide
aaagattggatggagcagaggctttgtgcgcgctttagccgcagggggat

SEQ ID NO: 271747 - DNA, 50 bp, Artificial
  Synthetic oligonucleotide
aaagcaccgtggtcgtggagtgcaacacctctgcccgtcagccgcactcc

SEQ ID NO: 271748 - DNA, 50 bp, Artificial
  Synthetic oligonucleotide
aaagcgagtgctagagctgcggccaccctcgcatcccgttcgcaactggt

SEQ ID NO: 271749 - DNA, 50 bp, Artificial
  Synthetic oligonucleotide
aaagcgcgagtgcaggccatcttgtcaggtgtggagtggagagtgcgggc

SEQ ID NO: 271750 - DNA, 50 bp, Artificial
  Synthetic oligonucleotide
aaagcggagggaaagcatggacgtggaccacacccctacgacacccaagc

SEQ ID NO: 271751 - DNA, 50 bp, Artificial
  Synthetic oligonucleotide
aaagcggagtttgtggattgcccgcagatggggcgacccgttgtctcaag

SEQ ID NO: 271752 - DNA, 55 bp, Artificial
  Synthetic oligonucleotide
ctacaagagacggcgtaccacctacaaggagtgttttgagaaatttcggcagcgc

SEQ ID NO: 271753 - DNA, 50 bp, Artificial
  Synthetic oligonucleotide
cagcatgcaagtcgcgtgtgaagtcgcctcgggggcatgtgatgctccaa

SEQ ID NO: 271754 - DNA, 50 bp, Artificial
  Synthetic oligonucleotide
cagccacttcagctcacactgtaacgccgccgcgtaagaagccccggcta

SEQ ID NO: 271755 - DNA, 50 bp, Artificial
  Synthetic oligonucleotide
atggcggaaaaacgatagccgagccaccggcctaacccacttttgtcgcg

SEQ ID NO: 271756 - DNA, 50 bp, Artificial
  Synthetic oligonucleotide
agtggctggtccattgcgggtgttcaaggcgtctgcaacttggcgctctg

SEQ ID NO: 271757 - DNA, 50 bp, Artificial
  Synthetic oligonucleotide
ccaagctcgctaggccgggttcgtgacatgcgtcttgcgtcgggaccagt

SEQ ID NO: 271758 - DNA, 50 bp, Artificial
  Synthetic oligonucleotide
ccacccgtgctacacgcacctcaccgcgcactgctcgcccaagcctcaag

SEQ ID NO: 271759 - DNA, 50 bp, Artificial
  Synthetic oligonucleotide
ccagcactgcttcgtaaagcaaccttcgcatgcgctacaggctcgccgag

SEQ ID NO: 271760 - DNA, 50 bp, Artificial
  Synthetic oligonucleotide
agtcggcgaggcccgctagcctgcattgggaccgcaaatctagccgtacg

SEQ ID NO: 271761 - DNA, 50 bp, Artificial
  Synthetic oligonucleotide
aggtgggatagcggtagaacagaccgcatgttcggagtccggtgcctgct

SEQ ID NO: 271762 - DNA, 50 bp, Artificial
  Synthetic oligonucleotide
ccgagcctcacaaacgcccccacacatcaagagcggcatggcgtgcaaga

SEQ ID NO: 271763 - DNA, 60 bp, Artificial
  Synthetic oligonucleotide
tatgctgctatgctcctatgctgctccgctatgttgctgaatctgcagtgaagtgttttt

SEQ ID NO: 271764 - DNA, 55 bp, Artificial
  Synthetic oligonucleotide
ctgtatgctggaaactccagtattagtagtccactcgcatttattgcgttaggaa

SEQ ID NO: 271765 - DNA, 55 bp, Artificial
  Synthetic oligonucleotide
gccgggccaagcctatcctgtaggtcccgacccatacctctcctgtagctccctt

SEQ ID NO: 271766 - DNA, 55 bp, Artificial
  Synthetic oligonucleotide
gcctcggtgctacgctgctaggtgctaccctgactatgctcccggagaggaagga

SEQ ID NO: 271767 - DNA, 55 bp, Artificial
  Synthetic oligonucleotide
ggaagcgaatctcggaagtacataaattgatggtagatattcagactatccatgc

SEQ ID NO: 271768 - DNA, 54 bp, Artificial
  Synthetic oligonucleotide
ggcaggcaggttactaccctcccggtccttatccttggtccttcggatggacag

SEQ ID NO: 271769 - DNA, 52 bp, Artificial
  Synthetic oligonucleotide
ggctacactagtgtaatttacggttaatagtttctcgactaaagaccgtcgg

SEQ ID NO: 271770 - DNA, 55 bp, Artificial
  Synthetic oligonucleotide
gttcctgcttgacctcccattaccttgcctcggagggcgaaatctgatgaaagcg

SEQ ID NO: 271771 - DNA, 54 bp, Artificial
  Synthetic oligonucleotide
ttacaacttctgaccttaacgtctcggctttaccattatccttaccttcggata

SEQ ID NO: 271772 - DNA, 54 bp, Artificial
  Synthetic oligonucleotide
aaacctaaaggcagacaggccgcaggcagccttaaagtagggtaaacaagctcc

SEQ ID NO: 271773 - DNA, 55 bp, Artificial
  Synthetic oligonucleotide
actttctttaggtgcgagcgaagtaggcggagataattcagagtttgtattccaa

SEQ ID NO: 271774 - DNA, 51 bp, Artificial
  Synthetic oligonucleotide
attaccctcactttaccctaccctcttacccctatcctaaggctaaggagc

SEQ ID NO: 271775 - DNA, 55 bp, Artificial
  Synthetic oligonucleotide
aggcagggtcaggagagtagcatagcagaggagcggcggagagcaaaggaccggt

SEQ ID NO: 271776 - DNA, 53 bp, Artificial
  Synthetic oligonucleotide
aggttatcctacttttccataaggatagaaatagggaggatagggtaaagcga

SEQ ID NO: 271777 - DNA, 52 bp, Artificial
  Synthetic oligonucleotide
ataacttagataccccatttcatttacctttaggtggttaggtctaccacat

SEQ ID NO: 271778 - DNA, 55 bp, Artificial
  Synthetic oligonucleotide
caggttgggacctacagctccggcccagtgggaatcttattacaacttctgacct

SEQ ID NO: 271779 - DNA, 55 bp, Artificial
  Synthetic oligonucleotide
ccagctgcctgcctttatgttgtaaactcgggtgggactctagcaccggctcggc

SEQ ID NO: 271780 - DNA, 55 bp, Artificial
  Synthetic oligonucleotide
cctacaggagcggcctgcctgcctttaggtttggctcgggacctacagggaccta

SEQ ID NO: 271781 - DNA, 55 bp, Artificial
  Synthetic oligonucleotide
cctctatgtcaggagttagaggcaagagtagttactgaggtaaaacaaccttttg

SEQ ID NO: 271782 - DNA, 55 bp, Artificial
  Synthetic oligonucleotide
ctacaaaactgcgactagtctctcctccccttctctacgtcctaccttgccttcc

SEQ ID NO: 271783 - DNA, 55 bp, Artificial
  Synthetic oligonucleotide
ctacctacagctaagcttgtattcgtttacttctatcctgcgaagcctccgcttc

SEQ ID NO: 271784 - DNA, 55 bp, Artificial
  Synthetic oligonucleotide
ctacggctgctctgcctcggaggagtcagctcatttaggtaggctacgtaccctt

SEQ ID NO: 271785 - DNA, 57 bp, Artificial
  Synthetic oligonucleotide
gatctacaggacaggttgggacctacagctccggcccagtgggaatcttattacaac

SEQ ID NO: 271786 - DNA, 54 bp, Artificial
  Synthetic oligonucleotide
cccttattaaacactatatcgaatagacaatggaacgtatgtataccattagat

SEQ ID NO: 271787 - DNA, 52 bp, Artificial
  Synthetic oligonucleotide
cttactactgtttatttcctaaaaggaccttaattctgacctacgagcctag

SEQ ID NO: 271788 - DNA, 54 bp, Artificial
  Synthetic oligonucleotide
ctatccggagtaggttcagcataaggacgagttttaacactttcatctaaagat

SEQ ID NO: 271789 - DNA, 51 bp, Artificial
  Synthetic oligonucleotide
ccctactcgatgcgaggaagttcttctactcggaagtaattgctcatcgtt

SEQ ID NO: 271790 - DNA, 51 bp, Artificial
  Synthetic oligonucleotide
tcttcttatttgtcagacgctatcttataaatttttattcgttatgttaac

SEQ ID NO: 271791 - DNA, 51 bp, Artificial
  Synthetic oligonucleotide
aaaaggatggtggtaccatattcccaactggaaattggattggggtttatt

SEQ ID NO: 271792 - DNA, 50 bp, Artificial
  Synthetic oligonucleotide
tactgaactctaggaactgtaagtctccgtaagagtctgtagcatctggt

SEQ ID NO: 271793 - DNA, 52 bp, Artificial
  Synthetic oligonucleotide
agccgttggcgaagcagcgtacgggtcggactttcccttaaaggaggagaag

SEQ ID NO: 271794 - DNA, 51 bp, Artificial
  Synthetic oligonucleotide
aggtcccgagtttacaaaaacctaagggcagagggctaacccaaggcaggc

SEQ ID NO: 271795 - DNA, 55 bp, Artificial
  Synthetic oligonucleotide
ctacaacaacctttgttactagagaataggtaagtcgatagactatttgtggaaa

SEQ ID NO: 271796 - DNA, 53 bp, Artificial
  Synthetic oligonucleotide
ggtcctttaataggtaagattgctactcttaattctttttccgaaggtgcagt

SEQ ID NO: 271797 - DNA, 56 bp, Artificial
  Synthetic oligonucleotide
gatcaatatttatctgtattatctagtgtaatgtttaatcctataaaattacctat

SEQ ID NO: 271798 - DNA, 55 bp, Artificial
  Synthetic oligonucleotide
ctgcctgatactacctatttctaagagataaggtccaatcctccctctaaaatgg

SEQ ID NO: 271799 - DNA, 52 bp, Artificial
  Synthetic oligonucleotide
ttgtgttaaactagttacttgtaaaaatccattatagattcctaaacctaac

SEQ ID NO: 271800 - DNA, 60 bp, Artificial
  Synthetic oligonucleotide
ccttcacgttgtacatatgttgatacttgatttaatcgacctggactcgcatccactttg

SEQ ID NO: 271801 - DNA, 52 bp, Artificial
  Synthetic oligonucleotide
gaccttttaaagaaggatttcgacttgtagccacaagtaaattaccgaatac

SEQ ID NO: 271802 - DNA, 57 bp, Artificial
  Synthetic oligonucleotide
ccaaagtaagtaccttcatactcccttctaacataagttagatattcagtgctatac

SEQ ID NO: 271803 - DNA, 58 bp, Artificial
  Synthetic oligonucleotide
tagatccgtatattttaagcgctcccttcctgagatcattacactattacgtgtttat

SEQ ID NO: 271804 - DNA, 57 bp, Artificial
  Synthetic oligonucleotide
tgttctcgtaccattccattatgaatacgagggtcattatgccccacttacgtgtca

SEQ ID NO: 271805 - DNA, 57 bp, Artificial
  Synthetic oligonucleotide
gagactgtaaagactaaatgtgaagttacggcaaaagaatatggtatcatccctatg

SEQ ID NO: 271806 - DNA, 55 bp, Artificial
  Synthetic oligonucleotide
caaacatgaggtataagacccctatatcttttgcattcgttgagaataaccagcg

SEQ ID NO: 271807 - DNA, 55 bp, Artificial
  Synthetic oligonucleotide
cgccccacataaactgtctgttaatcaatgtcctgatatatcagtaagtcatcgc

SEQ ID NO: 271808 - DNA, 54 bp, Artificial
  Synthetic oligonucleotide
cgtagaccgtccgtgtagttgaatgtcgactactgaagtacggacttttggttc

SEQ ID NO: 271809 - DNA, 55 bp, Artificial
  Synthetic oligonucleotide
tcccacccgtagacctttcgctactatgcttgaatgtgaaccttcataactaccc

SEQ ID NO: 271810 - DNA, 55 bp, Artificial
  Synthetic oligonucleotide
ttagtagcctaaattggaattgaaccaacattttaacagtgaagttgttatgtcc

SEQ ID NO: 271811 - DNA, 54 bp, Artificial
  Synthetic oligonucleotide
gtactatatctggacgcacccctaaaagaattgttaaggctaacaagggtacta

SEQ ID NO: 271812 - DNA, 52 bp, Artificial
  Synthetic oligonucleotide
gtaaattaccgaatactaaaccgattccgactccagctccggctaaacctat

SEQ ID NO: 271813 - DNA, 55 bp, Artificial
  Synthetic oligonucleotide
ggtgctcaagtgtttaagatggttgtaataaaattcatcgccccaagcatggaac

SEQ ID NO: 271814 - DNA, 55 bp, Artificial
  Synthetic oligonucleotide
ggtaaaattgtaaaatgatggaatgcaggtggagactgaactgcccattctagag

SEQ ID NO: 271815 - DNA, 54 bp, Artificial
  Synthetic oligonucleotide
gccagtaatagactgtaaaccaattccaacaagttgtagacaaccttcgaaagg

SEQ ID NO: 271816 - DNA, 55 bp, Artificial
  Synthetic oligonucleotide
gatagcaagttctagtccagaaatggcaatgagtaatgctagaggtatcaatcct

SEQ ID NO: 271817 - DNA, 55 bp, Artificial
  Synthetic oligonucleotide
ctcttagaatgttaatgggtagattcctatttatactcacctgtacaccgtagga

SEQ ID NO: 271818 - DNA, 55 bp, Artificial
  Synthetic oligonucleotide
ccactacagataataaactacctgtaaataatattgccccatatggcgcatcctg

SEQ ID NO: 271819 - DNA, 55 bp, Artificial
  Synthetic oligonucleotide
ctaattcaaaatcacagattgttgccccaggcccataaggtattagaccccatcc

SEQ ID NO: 271820 - DNA, 52 bp, Artificial
  Synthetic oligonucleotide
gacagctgctgaagaatgactctcaattcctgagagaggtggatagaaagtc

SEQ ID NO: 271821 - DNA, 58 bp, Artificial
  Synthetic oligonucleotide
ttacttagaggtcgaaagacagatcctcgaattctagataaatctaagagaggtaata

SEQ ID NO: 271822 - DNA, 51 bp, Artificial
  Synthetic oligonucleotide
gtagggttccatatctaccaatagtaatataaggttcttctacatgttgag

SEQ ID NO: 271823 - DNA, 60 bp, Artificial
  Synthetic oligonucleotide
tggtagaagaggtatgcaataccaaatagaatgttgagcttcgaccaattgagtccaatt

SEQ ID NO: 271824 - DNA, 59 bp, Artificial
  Synthetic oligonucleotide
gattaagattgtttaggtaaaattgtaaaatgatggaatgcaggtggagactgaactgc

SEQ ID NO: 271825 - DNA, 57 bp, Artificial
  Synthetic oligonucleotide
ctcaatcactgctataattggtactataaagacaaaatatgagaagtaaagtagggt

SEQ ID NO: 271826 - DNA, 54 bp, Artificial
  Synthetic oligonucleotide
atactgttagagaccgcactcacttatggtagttaagctttaccataaaaccct

SEQ ID NO: 271827 - DNA, 55 bp, Artificial
  Synthetic oligonucleotide
catagttcttaaaccgtagaccgtccgtgtagttgaatgtcgactactgaagtac

SEQ ID NO: 271828 - DNA, 60 bp, Artificial
  Synthetic oligonucleotide
catcgcgtgtaaaacgattgctctaccgatgagctaatctcctgggattgagaatattaa

SEQ ID NO: 271829 - DNA, 55 bp, Artificial
  Synthetic oligonucleotide
gagccctgacagggtcctactaacgatggactaaagacgttaatgatggacggac

SEQ ID NO: 271830 - DNA, 55 bp, Artificial
  Synthetic oligonucleotide
ccagcccagagactgtagttcgttgagcctagcttggcgaaggtcggagtcgacg

SEQ ID NO: 271831 - DNA, 55 bp, Artificial
  Synthetic oligonucleotide
catcgttctctggtgggaggctggaaaccagaattaagaagccctcatccgacgg

SEQ ID NO: 271832 - DNA, 54 bp, Artificial
  Synthetic oligonucleotide
caggtaagcccgtaagcggtaccgttccttttcagcggtcggaagcttctgcca

SEQ ID NO: 271833 - DNA, 55 bp, Artificial
  Synthetic oligonucleotide
cacacaatcggaatcctccagtcaatatgcaaggtattcaccaccctagtcctca

SEQ ID NO: 271834 - DNA, 55 bp, Artificial
  Synthetic oligonucleotide
caagtgcccttcatcaacctacggtctgtttacgaaatccgggagcgacctagtc

SEQ ID NO: 271835 - DNA, 55 bp, Artificial
  Synthetic oligonucleotide
aggaaccagatttgaacgaatataggcgaccaaagcaagacgtgcgcgtaaaagg

SEQ ID NO: 271836 - DNA, 55 bp, Artificial
  Synthetic oligonucleotide
agacgagctcaatcggaggcctttcggagaagggcaggtaaagactgggaaatga

SEQ ID NO: 271837 - DNA, 53 bp, Artificial
  Synthetic oligonucleotide
agaacgacgagcgacgtggaggggtccgggttcgcattgggctaaggcttagg

SEQ ID NO: 271838 - DNA, 55 bp, Artificial
  Synthetic oligonucleotide
ttgaacggtcagatgaccctcacgcgtaacgaacgggagagagttgttcacgtgc

SEQ ID NO: 271839 - DNA, 55 bp, Artificial
  Synthetic oligonucleotide
tgtacagcagcaataaagagataattcgaagactaagagcggatgcccgtgagta

SEQ ID NO: 271840 - DNA, 55 bp, Artificial
  Synthetic oligonucleotide
gagcatgaagctctcctactttgtacatgctggatggactccggaatggattgag

SEQ ID NO: 271841 - DNA, 55 bp, Artificial
  Synthetic oligonucleotide
tagacttatttcgaacgtggatcctactggcatcgcctttctaatctagcttccc

SEQ ID NO: 271842 - DNA, 55 bp, Artificial
  Synthetic oligonucleotide
gtggcggcaaggtacaactcattccccttgtagtttcattcctccccactgtaca

SEQ ID NO: 271843 - DNA, 55 bp, Artificial
  Synthetic oligonucleotide
gtcctggtcgattctaagggtcaagaggtatgtgagatgcaccgggaagaaccta

SEQ ID NO: 271844 - DNA, 55 bp, Artificial
  Synthetic oligonucleotide
gtatccggtaaaaggctagctttatggcggtgaatgtccgcaactatccggtcgg

SEQ ID NO: 271845 - DNA, 55 bp, Artificial
  Synthetic oligonucleotide
ggtgtcttgcccgaggaggcatttaccaagtactcgaatgagcgtgtagaacggg

SEQ ID NO: 271846 - DNA, 55 bp, Artificial
  Synthetic oligonucleotide
ggctcaacaattgggagcttctcctctgggtcgctgtggggagcgaacttggcgc

SEQ ID NO: 271847 - DNA, 55 bp, Artificial
  Synthetic oligonucleotide
gcgatgttgacatcggtattgagtggacagattaccggaacgcagtagcccctca

SEQ ID NO: 271848 - DNA, 55 bp, Artificial
  Synthetic oligonucleotide
gcctgcagtcgttcatcaacacagttcgagattccaagccctgaaaacaacgcac

SEQ ID NO: 271849 - DNA, 55 bp, Artificial
  Synthetic oligonucleotide
gcctagctcagcaaccatgggcgctcaagccacgcattcacaagtcctgtcgtcg

SEQ ID NO: 271850 - DNA, 55 bp, Artificial
  Synthetic oligonucleotide
gccgtttaacggcccgcatcccactagtttctgcaatgtcgtcatggggaagtac

SEQ ID NO: 271851 - DNA, 55 bp, Artificial
  Synthetic oligonucleotide
ctaccgtgtcattatcacatagatagtacgccgaatccgaaaatccgaaccgggc

SEQ ID NO: 271852 - DNA, 54 bp, Artificial
  Synthetic oligonucleotide
gccggtcgagaaggctacgaggctgaacttacctgtatgggtttcacgggtctt

SEQ ID NO: 271853 - DNA, 55 bp, Artificial
  Synthetic oligonucleotide
gcagcgatgtgacatcagaagactctcaaatcacactcaacgtgtacgatcgtgc

SEQ ID NO: 271854 - DNA, 54 bp, Artificial
  Synthetic oligonucleotide
agagaatagtagcgcttgattcgtaggttgagcgggattgccacgcgactctgg

SEQ ID NO: 271855 - DNA, 54 bp, Artificial
  Synthetic oligonucleotide
acctcaaggacgacatgcacccttatcttagaacatgaagacaacatgaggcgt

SEQ ID NO: 271856 - DNA, 53 bp, Artificial
  Synthetic oligonucleotide
tcaatgtccaatagacggaagcgacggctggtatgattccgcgtgcggtggag

SEQ ID NO: 271857 - DNA, 52 bp, Artificial
  Synthetic oligonucleotide
gcattctcttttgctcggtgaagagtgcgattctgactaggtcgtttgcgcg

SEQ ID NO: 271858 - DNA, 51 bp, Artificial
  Synthetic oligonucleotide
cgccgattttcacaaatgtcctgatcagaaacggtgccgtctacaaactat

SEQ ID NO: 271859 - DNA, 51 bp, Artificial
  Synthetic oligonucleotide
tcacgtgatgcctgaatggggaacgagcccctatctacgggcgcttatcat

SEQ ID NO: 271860 - DNA, 51 bp, Artificial
  Synthetic oligonucleotide
acatgtacgtctatccatcataccgggaaagtttattgagcagccacccca

SEQ ID NO: 271861 - DNA, 50 bp, Artificial
  Synthetic oligonucleotide
gagcatgacaacacgcctaaccctacgatgaactcgaaacagcactagcc

SEQ ID NO: 271862 - DNA, 55 bp, Artificial
  Synthetic oligonucleotide
cgggcaaggtgagtcttcttacttagatcccagacatgatatgctgaactccccg

SEQ ID NO: 271863 - DNA, 50 bp, Artificial
  Synthetic oligonucleotide
aaagggcctggtacgttggcgtgttttgagtggcatgcgcagctagggtt

SEQ ID NO: 271864 - DNA, 50 bp, Artificial
  Synthetic oligonucleotide
aaaggcaccacacgggatgtccgacggctcactcccagtaccgtggaacc

SEQ ID NO: 271865 - DNA, 50 bp, Artificial
  Synthetic oligonucleotide
aaagcttgcggccccgcccaacggctcttggcttgtgaaagtgtctgtga

SEQ ID NO: 271866 - DNA, 50 bp, Artificial
  Synthetic oligonucleotide
aaagcttgcgacatcgggcgtcgtaggaccagcattacccagcgccaccg

SEQ ID NO: 271867 - DNA, 50 bp, Artificial
  Synthetic oligonucleotide
aaagcgcaatggacccgtccgccgagaacccatcgagactgagcacccca

SEQ ID NO: 271868 - DNA, 50 bp, Artificial
  Synthetic oligonucleotide
aaactgttcccaccgggatgtggtgagcgtagaggaagtcgacgcccgct

SEQ ID NO: 271869 - DNA, 50 bp, Artificial
  Synthetic oligonucleotide
aaacgggcggtgacatggcctcacgatcgtttcccgagagggtcttggcc

SEQ ID NO: 271870 - DNA, 50 bp, Artificial
  Synthetic oligonucleotide
aaacgcgggccacggagtagggtggagggtccaagttgtccaagtggtgt

SEQ ID NO: 271871 - DNA, 50 bp, Artificial
  Synthetic oligonucleotide
gcgtcgtgctcttacccagtgctaggtctgttgcacatgagtatacgcct

SEQ ID NO: 271872 - DNA, 50 bp, Artificial
  Synthetic oligonucleotide
aaacgcgaaacgctatactggacacggggtccgtgcgcctcccaaaaccg

SEQ ID NO: 271873 - DNA, 55 bp, Artificial
  Synthetic oligonucleotide
cgatggaccgaaatgcttcccgaatgcacaggggacatcgtcccaccatctacac

SEQ ID NO: 271874 - DNA, 50 bp, Artificial
  Synthetic oligonucleotide
aaacgccaggcaagaagcaccccgccacgtttgccgagatggggattcag

SEQ ID NO: 271875 - DNA, 50 bp, Artificial
  Synthetic oligonucleotide
aaacgcagttggacgtcgtataggagatgcgacccttcgacgcgcctgga

SEQ ID NO: 271876 - DNA, 50 bp, Artificial
  Synthetic oligonucleotide
aaacgcagcactggtactactcctcctctcgtgccgactcgccctcccgt

SEQ ID NO: 271877 - DNA, 50 bp, Artificial
  Synthetic oligonucleotide
aaacgaccggttacggcgctacagaccactcggctcaccacggtggaggt

SEQ ID NO: 271878 - DNA, 50 bp, Artificial
  Synthetic oligonucleotide
aaacccgggattcgcagagggggcctaaccatccagcagagcaccctcta

SEQ ID NO: 271879 - DNA, 50 bp, Artificial
  Synthetic oligonucleotide
aaacaaggcgactgaggcgggtgtgtactcctaggctcgctaccagccgg

SEQ ID NO: 271880 - DNA, 50 bp, Artificial
  Synthetic oligonucleotide
aaaaggccacaacgcagcctgccactgttaacaacgcctcccacccatcc

SEQ ID NO: 271881 - DNA, 50 bp, Artificial
  Synthetic oligonucleotide
aaaagcccctcttggatggccccacgtcctcctaccacctttacgacggg

SEQ ID NO: 271882 - DNA, 50 bp, Artificial
  Synthetic oligonucleotide
aaaacggggcgagtgcatggtggtaattgggaggcccgagggaaatggta

SEQ ID NO: 271883 - DNA, 50 bp, Artificial
  Synthetic oligonucleotide
aaattcagccatcggtaggtgcttgtcccagtcatcctgtcggcgagaga

SEQ ID NO: 271884 - DNA, 55 bp, Artificial
  Synthetic oligonucleotide
cgaaagggaggtatcaacagggactacataacatggtatcaacagagccactggc

SEQ ID NO: 271885 - DNA, 50 bp, Artificial
  Synthetic oligonucleotide
aaatgtgtccgcccctctggtcgcgttggaggagtttgggtgtcttcccg

SEQ ID NO: 271886 - DNA, 50 bp, Artificial
  Synthetic oligonucleotide
aaatgagctgcacagaggcagggcgtaggcgcacgaacaaagcaagaccg

SEQ ID NO: 271887 - DNA, 50 bp, Artificial
  Synthetic oligonucleotide
aaatgagcgcactatgagtccggcccccaggagaacctcccacgtatgcg

SEQ ID NO: 271888 - DNA, 50 bp, Artificial
  Synthetic oligonucleotide
aaatcgaggcgggaccaaacgagtccatggaattggggatgcgcgcagtg

SEQ ID NO: 271889 - DNA, 50 bp, Artificial
  Synthetic oligonucleotide
aaatcgaactgcgtcccgaaagtccggctcgctggatgactggcccaacg

SEQ ID NO: 271890 - DNA, 50 bp, Artificial
  Synthetic oligonucleotide
aaatccggactcggctcccacggtaaccatcgctgacccccgaacttcgt

SEQ ID NO: 271891 - DNA, 50 bp, Artificial
  Synthetic oligonucleotide
aaagttgcgcttggagagtgcccccatgcggacatccgagatacggtgga

SEQ ID NO: 271892 - DNA, 50 bp, Artificial
  Synthetic oligonucleotide
aaagtgtggctgccaccgctgtgttgttgggtcggcgcgaggccatttgt

SEQ ID NO: 271893 - DNA, 50 bp, Artificial
  Synthetic oligonucleotide
aaagtcggactcgccaccgttcccgttcaactcaaggtgtggggctcaga

SEQ ID NO: 271894 - DNA, 50 bp, Artificial
  Synthetic oligonucleotide
aaagtcgcgcaggccccatcgaccgtgtcatacgtcgctccgtagccggt

SEQ ID NO: 271895 - DNA, 55 bp, Artificial
  Synthetic oligonucleotide
ccgtttgagactccgacacacgtgacaggcgcgttgctcaatttggggctcgagc

SEQ ID NO: 271896 - DNA, 50 bp, Artificial
  Synthetic oligonucleotide
aaagtcccgtaccgccatgcacattcccttgcacccgctagatccggcta

SEQ ID NO: 271897 - DNA, 50 bp, Artificial
  Synthetic oligonucleotide
aaagtcccgcttgcggggttagcgagtggcccaggtcggtcacatccgca

SEQ ID NO: 271898 - DNA, 50 bp, Artificial
  Synthetic oligonucleotide
aaaggtggcttgcgaccccgaaagacgccacagggtggtccccaacttca

SEQ ID NO: 271899 - DNA, 50 bp, Artificial
  Synthetic oligonucleotide
aaaggtctcgttactgccgccataactcggcgcgtacccactgccgtagg

SEQ ID NO: 271900 - DNA, 50 bp, Artificial
  Synthetic oligonucleotide
aaaggtcgtccctaccgtgaaaggcgggaacctcactccggcgccagaac

SEQ ID NO: 271901 - DNA, 50 bp, Artificial
  Synthetic oligonucleotide
aaaggtatccgagtcagcaccagtccaccgcgacgcacaaacggggtacg

SEQ ID NO: 271902 - DNA, 50 bp, Artificial
  Synthetic oligonucleotide
aaagggttgggtctcggctgtgtggggatggtcgcgaagcatgcgcatgt

SEQ ID NO: 271903 - DNA, 50 bp, Artificial
  Synthetic oligonucleotide
aaagggtggtcaggacggaacgaacgcactcgtggcctgggggacgcacc

SEQ ID NO: 271904 - DNA, 50 bp, Artificial
  Synthetic oligonucleotide
aaagggtccctggacgcccctcgacacctcgccaatctatgcgcgaaaga

SEQ ID NO: 271905 - DNA, 50 bp, Artificial
  Synthetic oligonucleotide
aaaggggcgggcgtttaaatcaacaacccgggagcagcggcactcattgc

SEQ ID NO: 271906 - DNA, 55 bp, Artificial
  Synthetic oligonucleotide
cccaggcgtccacagactccgtcggtctgtgtcttcaggcagtgaatcggattcg

SEQ ID NO: 271907 - DNA, 55 bp, Artificial
  Synthetic oligonucleotide
ccataaactactggtaagtatctaacgagttggtgactgccaaacgcttgtcccc

SEQ ID NO: 271908 - DNA, 54 bp, Artificial
  Synthetic oligonucleotide
aagtgtctcacacaccctttaccggtgattacctttatggtattagtacgtgta

SEQ ID NO: 271909 - DNA, 60 bp, Artificial
  Synthetic oligonucleotide
ctcggttcttgttgtacatatgggctcaggcagggcttatctcgtgactttaaggcgatg

SEQ ID NO: 271910 - DNA, 60 bp, Artificial
  Synthetic oligonucleotide
gtgtcgcacgtctgaatgatgcttgttagtgacgctgatggttagttggggtagctcgtt

SEQ ID NO: 271911 - DNA, 59 bp, Artificial
  Synthetic oligonucleotide
tgcacacgaactctttagtacgaatcgcagtagtgaggctagatcattgtagtttagca

SEQ ID NO: 271912 - DNA, 58 bp, Artificial
  Synthetic oligonucleotide
acaccgtccgatcgttgaaggttctatgacccctgcccctagatgtccgctgctccga

SEQ ID NO: 271913 - DNA, 49 bp, Artificial
  Synthetic oligonucleotide
aactcttacccgtcttacccctattcttatcttactacccccctattct

SEQ ID NO: 271914 - DNA, 57 bp, Artificial
  Synthetic oligonucleotide
tcagctactacatcccttacacatccctcccccccccatagtctactacgcctccca

SEQ ID NO: 271915 - DNA, 57 bp, Artificial
  Synthetic oligonucleotide
tccatccccttgtcgtctcatcccctccgagctctggtgtaaacccttgcacactta

SEQ ID NO: 271916 - DNA, 57 bp, Artificial
  Synthetic oligonucleotide
cgctatactcctatccctcgatttatcggctatgatactaccccccccctatcgagc

SEQ ID NO: 271917 - DNA, 56 bp, Artificial
  Synthetic oligonucleotide
ccctatcgctcggcttgtgcacatgccccccaggttgtactgatgtactcagctag

SEQ ID NO: 271918 - DNA, 55 bp, Artificial
  Synthetic oligonucleotide
cgcaacacaacgttacacaaggcgacgcaacgtagcttggatgttaaagtgttgt

SEQ ID NO: 271919 - DNA, 60 bp, Artificial
  Synthetic oligonucleotide
gcacagtgatgaaactagtggaatgaaaatcgatgttatatacatcccccccctatattg

SEQ ID NO: 271920 - DNA, 55 bp, Artificial
  Synthetic oligonucleotide
cgatccgatacaaatacatgtctcgtatctgtggcaccgttgctcaacaggatca

SEQ ID NO: 271921 - DNA, 55 bp, Artificial
  Synthetic oligonucleotide
cctactcgttacatagcatggtttatcggaagttgtccccttatagccgatcgtc

SEQ ID NO: 271922 - DNA, 55 bp, Artificial
  Synthetic oligonucleotide
cggcagatactacaacatccgatgcttccgaagacgagagtactcaacaagagcc

SEQ ID NO: 271923 - DNA, 55 bp, Artificial
  Synthetic oligonucleotide
acatcccttatcctatctctgcctgttagcttagaccttcacctattatttaggt

SEQ ID NO: 271924 - DNA, 55 bp, Artificial
  Synthetic oligonucleotide
cacgtggaggaacggaggtaagtcgattgatgcaagtcgatcgttgagatgcgcg

SEQ ID NO: 271925 - DNA, 55 bp, Artificial
  Synthetic oligonucleotide
cactcgttcagactcttaatccacaaatctcgctcgtttatcctacatattacga

SEQ ID NO: 271926 - DNA, 55 bp, Artificial
  Synthetic oligonucleotide
caggagtcccgaagaacgtgtgccaaatccacgtgtctttagttgccaccgcttc

SEQ ID NO: 271927 - DNA, 55 bp, Artificial
  Synthetic oligonucleotide
ccatcttatgcgttttgggtcactagcaaggtggtgttttggccgcccaagcggt

SEQ ID NO: 271928 - DNA, 54 bp, Artificial
  Synthetic oligonucleotide
ccattttacaacagtggataggtaaagtgtaggacgtttgcctgtttctgggtg

SEQ ID NO: 271929 - DNA, 55 bp, Artificial
  Synthetic oligonucleotide
cccgacagaaaagagtcttatcattagacgacaacccctctcaagctttatcccg

SEQ ID NO: 271930 - DNA, 54 bp, Artificial
  Synthetic oligonucleotide
ctagtcgtactagctttaacttgttctaaacttagagctagtcgtggtcgttta

SEQ ID NO: 271931 - DNA, 55 bp, Artificial
  Synthetic oligonucleotide
cccgccaagcaaaagatgcaatccggagggctatatatgagctctcgtgcagcgg

SEQ ID NO: 271932 - DNA, 55 bp, Artificial
  Synthetic oligonucleotide
ccgctacgacgcttatatttctgtacctcgcagaacacctctacactacttagtc

SEQ ID NO: 271933 - DNA, 55 bp, Artificial
  Synthetic oligonucleotide
cgtaatacgcttgcttattgggcgccttttcaaccatggctatcttacttcggat

SEQ ID NO: 271934 - DNA, 55 bp, Artificial
  Synthetic oligonucleotide
ttgagtcaacgcttcgggagccgcgagcgaagatacttgagtcatctccctaagg

SEQ ID NO: 271935 - DNA, 55 bp, Artificial
  Synthetic oligonucleotide
ctggtgcgtaacgaaatgaacggtggcctactactctactcgccaattcgagcca

SEQ ID NO: 271936 - DNA, 55 bp, Artificial
  Synthetic oligonucleotide
ttcgtcgttctatccacgattctattataactgctgccgtctagtgtggcatccg

SEQ ID NO: 271937 - DNA, 55 bp, Artificial
  Synthetic oligonucleotide
gaccacacccaggatttggaacgaaggcagctttctccgtacgactgttggggac

SEQ ID NO: 271938 - DNA, 55 bp, Artificial
  Synthetic oligonucleotide
gacgagtcatatgctttgattaacgtgtcattatcgtgcatcacagtccgcgaca

SEQ ID NO: 271939 - DNA, 55 bp, Artificial
  Synthetic oligonucleotide
gccagtgcccgaaagtttagtcagaactccttcgactgagtatgctgatggccaa

SEQ ID NO: 271940 - DNA, 55 bp, Artificial
  Synthetic oligonucleotide
tgtcagtcggcggtaaactggcgtgtaagacggaagatcaaagcatcaatttccc

SEQ ID NO: 271941 - DNA, 60 bp, Artificial
  Synthetic oligonucleotide
tgcaaggctcttagcctatcacatgtgctcacatatgataacgtcttaacacctacgtta

SEQ ID NO: 271942 - DNA, 55 bp, Artificial
  Synthetic oligonucleotide
gccctactccttcagtcgatactgataacgggtccgatagccaaacatccgaacg

SEQ ID NO: 271943 - DNA, 55 bp, Artificial
  Synthetic oligonucleotide
tcatcgtaggtagtcgttgttctctcattcactaatgccgtgatattgatccaca

SEQ ID NO: 271944 - DNA, 55 bp, Artificial
  Synthetic oligonucleotide
gtttgtgagcgtagttgaactgatgggtgatcttctgtttgaaggtggcccatgg

SEQ ID NO: 271945 - DNA, 55 bp, Artificial
  Synthetic oligonucleotide
ggagttgtgtataagaattgaagcatgtcagggattctgccaggaagaacaatgc

SEQ ID NO: 271946 - DNA, 55 bp, Artificial
  Synthetic oligonucleotide
ggtattaccagggaagccggttggtctgtcaatcacaaaagggtgatcgaaggta

SEQ ID NO: 271947 - DNA, 53 bp, Artificial
  Synthetic oligonucleotide
gggttaatgttagtatggggtattaagatgatgagggaggttcacttaccggt

SEQ ID NO: 271948 - DNA, 54 bp, Artificial
  Synthetic oligonucleotide
caatctcggaccactctcgagcttaaccaagcctctcgaacggagggtcccgaa

SEQ ID NO: 271949 - DNA, 53 bp, Artificial
  Synthetic oligonucleotide
ccaagccacgcgtcgcctcacgatcctcatgcttccaccagaaatgtcaaacc

SEQ ID NO: 271950 - DNA, 53 bp, Artificial
  Synthetic oligonucleotide
caacccttaggccatcccatagttgttacatttgtcgacttactccccttagg

SEQ ID NO: 271951 - DNA, 52 bp, Artificial
  Synthetic oligonucleotide
acaaaatgctgtcaagtacctccttccctatttagttcggtttattaatact

SEQ ID NO: 271952 - DNA, 57 bp, Artificial
  Synthetic oligonucleotide
tgagtattcgtacttacagtggctaccccccctaccagatagtgagagggatactag

SEQ ID NO: 271953 - DNA, 53 bp, Artificial
  Synthetic oligonucleotide
ctaacaccgtcacctattactcagatcgctagagctagaggcgttataaactc

SEQ ID NO: 271954 - DNA, 52 bp, Artificial
  Synthetic oligonucleotide
agttgccactctcgccctcatgatgacgcgtatcttatgactttcgttatct

SEQ ID NO: 271955 - DNA, 52 bp, Artificial
  Synthetic oligonucleotide
agttatcatatcttagacgttcgctccgctggatcctacctatcaccccccc

SEQ ID NO: 271956 - DNA, 52 bp, Artificial
  Synthetic oligonucleotide
tacccttcccatcacttaccttccgcattatcccccctatccgcattagata

SEQ ID NO: 271957 - DNA, 52 bp, Artificial
  Synthetic oligonucleotide
gcctcaaatcggacttcacgagctgattagtgataccaagagcgaaagaacg

SEQ ID NO: 271958 - DNA, 52 bp, Artificial
  Synthetic oligonucleotide
gaaacactccctttcgtaacggcacaagactctatcccacatccagacacgc

SEQ ID NO: 271959 - DNA, 51 bp, Artificial
  Synthetic oligonucleotide
ggtttagtaggatgacatctacgatgtatcccctattattacaccttagtg

SEQ ID NO: 271960 - DNA, 51 bp, Artificial
  Synthetic oligonucleotide
ttgttagaggcttagatttctcctggagtgacacacagatggggagtatga

SEQ ID NO: 271961 - DNA, 50 bp, Artificial
  Synthetic oligonucleotide
aaagcttactgcgggaatccgggcactggcagacttcagggttcacggcc

SEQ ID NO: 271962 - DNA, 50 bp, Artificial
  Synthetic oligonucleotide
aaagcgtccgaagtttggggaccgagccacgctgatgggccgacttgact

SEQ ID NO: 271963 - DNA, 60 bp, Artificial
  Synthetic oligonucleotide
tgagtatactcttagtccgctacgacgcttatatttctgtacctcgcagaacacctctac

SEQ ID NO: 271964 - DNA, 50 bp, Artificial
  Synthetic oligonucleotide
aaagcgaacgctgtctgatgtggccgaaggcagtcgggcagtctccccga

SEQ ID NO: 271965 - DNA, 50 bp, Artificial
  Synthetic oligonucleotide
aaagccgaacccatccctcgtcgcgtcttggacatctggagccgaagcca

SEQ ID NO: 271966 - DNA, 50 bp, Artificial
  Synthetic oligonucleotide
aaagccaccgagccagctcaatcactcgccccaaagacgacggctccgga

SEQ ID NO: 271967 - DNA, 50 bp, Artificial
  Synthetic oligonucleotide
aaagaagctctcgacacccgactggtgggcaaccctccaagcgctcacag

SEQ ID NO: 271968 - DNA, 50 bp, Artificial
  Synthetic oligonucleotide
aaactaaggcatggtcccggggttcgggacagagtctgaggccagtcccg

SEQ ID NO: 271969 - DNA, 50 bp, Artificial
  Synthetic oligonucleotide
aaacgggcaccaggcccaattcgcccggcattcttcccccaatttcgtcg

SEQ ID NO: 271970 - DNA, 50 bp, Artificial
  Synthetic oligonucleotide
aaacggcgcgggtcttcccacaaggccccaaggtccaactgcccaggtaa

SEQ ID NO: 271971 - DNA, 50 bp, Artificial
  Synthetic oligonucleotide
tctcatacgtgtttaatctatgttagtcgaaatacgtcttatatctgtcg

SEQ ID NO: 271972 - DNA, 50 bp, Artificial
  Synthetic oligonucleotide
aaacgcctactcggatcgatcaaagggggctccccgggatcctggctttt

SEQ ID NO: 271973 - DNA, 50 bp, Artificial
  Synthetic oligonucleotide
aaacccttggctgctgaatgcactcctcaacggctgagagctgcctcccg

SEQ ID NO: 271974 - DNA, 59 bp, Artificial
  Synthetic oligonucleotide
tcccatacatatctctgtatctgggaatcttcccctgaactcggccaggttattaggct

SEQ ID NO: 271975 - DNA, 50 bp, Artificial
  Synthetic oligonucleotide
aaacccgttacctggcgcctcaatccaggatggtcggtaccttggcaggc

SEQ ID NO: 271976 - DNA, 50 bp, Artificial
  Synthetic oligonucleotide
aaaccagacggcccgaatgagaatccactggctcgatgggcagccggacc

SEQ ID NO: 271977 - DNA, 50 bp, Artificial
  Synthetic oligonucleotide
aaacaccctctgatgccacccggtgcctgtcataccccacgcttcctcat

SEQ ID NO: 271978 - DNA, 49 bp, Artificial
  Synthetic oligonucleotide
aaaaggtgttcaacccacaccggcaaccctcggacccggagggacccac

SEQ ID NO: 271979 - DNA, 50 bp, Artificial
  Synthetic oligonucleotide
aaaagctagtgacctcaggagggcaccgtaaacacccccgctacccgggc

SEQ ID NO: 271980 - DNA, 50 bp, Artificial
  Synthetic oligonucleotide
aaaacgttgtggccttctgtcctcgcccaacaatggcgtctcgactggta

SEQ ID NO: 271981 - DNA, 50 bp, Artificial
  Synthetic oligonucleotide
aacatgcggtcgattggtgcgacttgcgccccttggatccccattcgaat

SEQ ID NO: 271982 - DNA, 50 bp, Artificial
  Synthetic oligonucleotide
aacatcagaccggggaatgagacctggacagtggagtccctcgggtgcct

SEQ ID NO: 271983 - DNA, 50 bp, Artificial
  Synthetic oligonucleotide
aacagttacgtgttgggtgcaagctggggtcgtaacggcctgggttcgcc

SEQ ID NO: 271984 - DNA, 50 bp, Artificial
  Synthetic oligonucleotide
aacaggacttgctcgccaccactaccacaccgcacccctttcccgtgaag

SEQ ID NO: 271985 - DNA, 60 bp, Artificial
  Synthetic oligonucleotide
atccccgctcattgccttatacaaacaccccctcgtatcatcctcagtgctattacattg

SEQ ID NO: 271986 - DNA, 50 bp, Artificial
  Synthetic oligonucleotide
aacagcggtctcgcttaagtccgcatttgcaaggctgccggtcctgcaat

SEQ ID NO: 271987 - DNA, 50 bp, Artificial
  Synthetic oligonucleotide
aacacttgccgcggctgcgactcaacgatgatggtcaacgcttccacgca

SEQ ID NO: 271988 - DNA, 50 bp, Artificial
  Synthetic oligonucleotide
aacacgtcatctgggtcggataggtcgttgggtcgagaggccggaggggt

SEQ ID NO: 271989 - DNA, 50 bp, Artificial
  Synthetic oligonucleotide
aacacctgtgggcatgcctagaccccatacccacgcaatgcacctgtggg

SEQ ID NO: 271990 - DNA, 50 bp, Artificial
  Synthetic oligonucleotide
aacaccggttcccaagcctgaaagccctcgtagcgttgcccctccagcca

SEQ ID NO: 271991 - DNA, 50 bp, Artificial
  Synthetic oligonucleotide
aacacagcctgtggtagtcttgagcccccaaccaccaactggcgccccca

SEQ ID NO: 271992 - DNA, 50 bp, Artificial
  Synthetic oligonucleotide
aacaatggtgggccgctacgctgaactacgcgaaacgaccccctagcagc

SEQ ID NO: 271993 - DNA, 50 bp, Artificial
  Synthetic oligonucleotide
aaattcggcggatctcgcaaacggcgcgggtcttcccacaaggccccaag

SEQ ID NO: 271994 - DNA, 50 bp, Artificial
  Synthetic oligonucleotide
aaatgtagacccagagcaatcgcctcgcaaacaagacgcagccagcggcc

SEQ ID NO: 271995 - DNA, 50 bp, Artificial
  Synthetic oligonucleotide
aaatggccgtcgcaggtacacacagggctcgaagaccggcggatcaatcg

SEQ ID NO: 271996 - DNA, 48 bp, Artificial
  Synthetic oligonucleotide
cccccctacccctcgtatattacatcccttacttaccccccctacacc

SEQ ID NO: 271997 - DNA, 50 bp, Artificial
  Synthetic oligonucleotide
aaatgcaagtcgcatgatggatgctccttgcagggccaagcgcggatggc

SEQ ID NO: 271998 - DNA, 50 bp, Artificial
  Synthetic oligonucleotide
aaatcgaatggccggtggaggccccattccgcgttgacgagttacgcagt

SEQ ID NO: 271999 - DNA, 50 bp, Artificial
  Synthetic oligonucleotide
aaatcccgcagagaccgagcccccgcggcattgttataccctcccactaa

SEQ ID NO: 272000 - DNA, 50 bp, Artificial
  Synthetic oligonucleotide
aaagtacccacatgttccgcgtagcacccaggacgacactgtccggcgtc

SEQ ID NO: 272001 - DNA, 50 bp, Artificial
  Synthetic oligonucleotide
aaaggttgcgacgacaccggccttatgggatgttgctgtcgccacgatgc

SEQ ID NO: 272002 - DNA, 56 bp, Artificial
  Synthetic oligonucleotide
ttttcccaatgcatttctagggtcttcaaggtaagccacgtagaattccagactta

SEQ ID NO: 272003 - DNA, 56 bp, Artificial
  Synthetic oligonucleotide
cgcaattctttcttagggataattttaaatcgagcacttgatataaaggagatccc

SEQ ID NO: 272004 - DNA, 56 bp, Artificial
  Synthetic oligonucleotide
ccgaatactagtgatctagtcatcatcagatttatagatccaacttgtttgcgtag

SEQ ID NO: 272005 - DNA, 55 bp, Artificial
  Synthetic oligonucleotide
tagctttcagatggttggatgcaatctcgtaaaggttggaatccacgtatagcaa

SEQ ID NO: 272006 - DNA, 55 bp, Artificial
  Synthetic oligonucleotide
ggggattgaaagatccgccatgccaataatccttagcaatggccacagaatttca

SEQ ID NO: 272007 - DNA, 55 bp, Artificial
  Synthetic oligonucleotide
ggaaagtgagtctgaataggtagcgggtcatatgtccgaatatgcaggtgtaacc

SEQ ID NO: 272008 - DNA, 55 bp, Artificial
  Synthetic oligonucleotide
gctattaaataatcgctgtagtataacggttaatgcggcggccttttaagccgac

SEQ ID NO: 272009 - DNA, 55 bp, Artificial
  Synthetic oligonucleotide
caatggcctttaatgcttctgaacatatagtaagagacgtcaataatggctggtt

SEQ ID NO: 272010 - DNA, 55 bp, Artificial
  Synthetic oligonucleotide
cagctttatagcactcttcaacaatggtatctgttgcccctttaattcgtgagga

SEQ ID NO: 272011 - DNA, 55 bp, Artificial
  Synthetic oligonucleotide
cgactcgtcctatcctagagctgtaagtggttctaagggtgcagctgttctctgc

SEQ ID NO: 272012 - DNA, 55 bp, Artificial
  Synthetic oligonucleotide
ccttatatggtatttgaaactactatgattccttttttaaatgtatagaatgcta

SEQ ID NO: 272013 - DNA, 60 bp, Artificial
  Synthetic oligonucleotide
ttatgtatcgaatcctttcataatttgcaagattgatacattatattcccaatttacata

SEQ ID NO: 272014 - DNA, 55 bp, Artificial
  Synthetic oligonucleotide
ccggtatatcgtgtacatactagatcaaaagctcttcctagatcttctgttaagg

SEQ ID NO: 272015 - DNA, 52 bp, Artificial
  Synthetic oligonucleotide
tagatcggttaaacgaagaactacgtaaagtttgattccttttggatacgta

SEQ ID NO: 272016 - DNA, 54 bp, Artificial
  Synthetic oligonucleotide
gttttattgatctaacatcaatgtaattattttaagtgtcatgttgtcttacca

SEQ ID NO: 272017 - DNA, 53 bp, Artificial
  Synthetic oligonucleotide
ttcaatcacatggcttgttaatcaactacatcatttaagtgtgatcccatata

SEQ ID NO: 272018 - DNA, 51 bp, Artificial
  Synthetic oligonucleotide
ttgtgattacccgaaaggtggaaatctgggggtaacggaatttccgtagta

SEQ ID NO: 272019 - DNA, 53 bp, Artificial
  Synthetic oligonucleotide
tgaaagaactacgtgatatttgattccttttggatacgtaggcagcttatata

SEQ ID NO: 272020 - DNA, 53 bp, Artificial
  Synthetic oligonucleotide
gctatgtggtagtttgcacggatttatgcccatcggacttaaagctgtatcat

SEQ ID NO: 272021 - DNA, 50 bp, Artificial
  Synthetic oligonucleotide
acgtactggttcgggaaaggtttttagactaatgggataactggggtcta

SEQ ID NO: 272022 - DNA, 52 bp, Artificial
  Synthetic oligonucleotide
tcatacgagcataagcaaagaaagtgaattgctgaaaagtcttattaaactg

SEQ ID NO: 272023 - DNA, 52 bp, Artificial
  Synthetic oligonucleotide
aacctgctacatccaatacctataacaggtgatgatagaataactttaccag

SEQ ID NO: 272024 - DNA, 60 bp, Artificial
  Synthetic oligonucleotide
gtcctatcctagagctgtaagtggttctaagggtgcagctgttctctgcataaaagggca

SEQ ID NO: 272025 - DNA, 51 bp, Artificial
  Synthetic oligonucleotide
gggtaatattatttcggcgctcttattcgaaataatgtttgccaccttaaa

SEQ ID NO: 272026 - DNA, 50 bp, Artificial
  Synthetic oligonucleotide
cgcgggatgaagttgtagcatggtagctgttctggaaagagtagctcaat

SEQ ID NO: 272027 - DNA, 50 bp, Artificial
  Synthetic oligonucleotide
cctttgagagatagccatagttcgtttggtcagttaaagtaactgcttgg

SEQ ID NO: 272028 - DNA, 60 bp, Artificial
  Synthetic oligonucleotide
ggcctttaattgaggtccttgcatgaatagaaaaatgacagcgtcactgtcttaagaaga

SEQ ID NO: 272029 - DNA, 57 bp, Artificial
  Synthetic oligonucleotide
gaatcaaagttcgcaattctttcttagggataattttaaatcgagcacttgatataa

SEQ ID NO: 272030 - DNA, 60 bp, Artificial
  Synthetic oligonucleotide
ctctagtatagctgaagcaggaagatccataaatgtcaatcgagggactgctataaaagc

SEQ ID NO: 272031 - DNA, 56 bp, Artificial
  Synthetic oligonucleotide
cgtcaatttcacagagtaagatttacctaatctaactttgtaactctcaattgagt

SEQ ID NO: 272032 - DNA, 57 bp, Artificial
  Synthetic oligonucleotide
aatccgaattagataaattccctcatagataaagtatctaattataatagataggga

SEQ ID NO: 272033 - DNA, 58 bp, Artificial
  Synthetic oligonucleotide
ctattaatatgatcacaggccaccttctgcttaaagtcattttaggctttatttggag

SEQ ID NO: 272034 - DNA, 60 bp, Artificial
  Synthetic oligonucleotide
tgcccatacggcggccgaagtcagtcgagtgtttttcacctatcagcgaggcgcacctca

SEQ ID NO: 272035 - DNA, 60 bp, Artificial
  Synthetic oligonucleotide
cacccgctgtgagatatctgtagtggggtgcctgcgcacgcgtctgagggctccggcgaa

SEQ ID NO: 272036 - DNA, 60 bp, Artificial
  Synthetic oligonucleotide
ctcgagtcgccctctcttagtggcgacaattcggctagttggtccactgcagcggagatc

SEQ ID NO: 272037 - DNA, 55 bp, Artificial
  Synthetic oligonucleotide
cggcatgtgagctcgacgctattcttccgtccgattaccgtgacctgccagcgga

SEQ ID NO: 272038 - DNA, 55 bp, Artificial
  Synthetic oligonucleotide
cggcattacaattgcaattttgcgaatgcatgactacaatgtgatccctgatagt

SEQ ID NO: 272039 - DNA, 55 bp, Artificial
  Synthetic oligonucleotide
gtcgctgttatagatggctatgttattctgacttccaaagatgaacatggtgtcg

SEQ ID NO: 272040 - DNA, 55 bp, Artificial
  Synthetic oligonucleotide
cggcccctcagagcccgttactgcctacctcatatctgactacaccctcacgtat

SEQ ID NO: 272041 - DNA, 55 bp, Artificial
  Synthetic oligonucleotide
cggccctagtcgtcctaggggaacagtgttttagcagcaggcgctaaagttacca

SEQ ID NO: 272042 - DNA, 55 bp, Artificial
  Synthetic oligonucleotide
cggcctcggttctaagtgaagtttctggcaagtctggactgtacgcttacctact

SEQ ID NO: 272043 - DNA, 55 bp, Artificial
  Synthetic oligonucleotide
cggcctgtacatatgctatacatgcgtagggtacgctagatagacactttaacag

SEQ ID NO: 272044 - DNA, 55 bp, Artificial
  Synthetic oligonucleotide
cggctaaattaaggaatgacgggtcttgtagaaagcgagtgtatccactatgtcc

SEQ ID NO: 272045 - DNA, 55 bp, Artificial
  Synthetic oligonucleotide
cggctacgcagacaacgacctcagcggtctccttctagacaagtccgtcgtccta

SEQ ID NO: 272046 - DNA, 55 bp, Artificial
  Synthetic oligonucleotide
cggctactccgttaggcttgcatatttccgtactagtaatacaccacctcgaaaa

SEQ ID NO: 272047 - DNA, 59 bp, Artificial
  Synthetic oligonucleotide
ctctgtgatactgcttcgtttgtccacggaggtcggactaactctcaccacgcttccac

SEQ ID NO: 272048 - DNA, 55 bp, Artificial
  Synthetic oligonucleotide
gtcctgtattttcaagcacgcaaggctgaaataaacggttgtttgcttatgcgcg

SEQ ID NO: 272049 - DNA, 55 bp, Artificial
  Synthetic oligonucleotide
cgctagcagagcaaatatccacctcgaagagagaaagcccattgccggtagccgg

SEQ ID NO: 272050 - DNA, 55 bp, Artificial
  Synthetic oligonucleotide
cgctagccatatgtctaggagcgctgacataacttggacccattcttgcttgtgg

SEQ ID NO: 272051 - DNA, 55 bp, Artificial
  Synthetic oligonucleotide
gtctagtactatcagataaactggttgacaccaggtcggagtggagaacgttttc

SEQ ID NO: 272052 - DNA, 55 bp, Artificial
  Synthetic oligonucleotide
gtctactggagtacactgtacttgattgattggacccttatgcccaactagtgta

SEQ ID NO: 272053 - DNA, 55 bp, Artificial
  Synthetic oligonucleotide
cgctatacaagtagtaaccgttggtcgaacccatgctaagctccgagggaaaatg

SEQ ID NO: 272054 - DNA, 55 bp, Artificial
  Synthetic oligonucleotide
cgctcaattcctcagatctagctaaggcgtcccatgccactgacctcgaacggat

SEQ ID NO: 272055 - DNA, 55 bp, Artificial
  Synthetic oligonucleotide
cgctcacaacgccaagagagctttacatcaagacactaactctctagaatggtcc

SEQ ID NO: 272056 - DNA, 55 bp, Artificial
  Synthetic oligonucleotide
gtctaccagtgaacttggtatcaacccatgattcaccccagaaatcccacttagg

SEQ ID NO: 272057 - DNA, 55 bp, Artificial
  Synthetic oligonucleotide
gtctaatgtcgctatcgtctctgcacgatactctaattacacaaagatcgattcc

SEQ ID NO: 272058 - DNA, 56 bp, Artificial
  Synthetic oligonucleotide
ctctttcggatatccatcttctttgtaactcctctattcgtaaggtcagttcttta

SEQ ID NO: 272059 - DNA, 54 bp, Artificial
  Synthetic oligonucleotide
gtcgtttgataactggggaaccgtttggttcgcagaatagagattcccctcgga

SEQ ID NO: 272060 - DNA, 55 bp, Artificial
  Synthetic oligonucleotide
gtcgttcaacatagaattgtcagcgctaatatgtctggcactctttcgtacactg

SEQ ID NO: 272061 - DNA, 55 bp, Artificial
  Synthetic oligonucleotide
cgctggagtaaaacagccagtgcaaggtaagaactgttcgatggctaggttaacg

SEQ ID NO: 272062 - DNA, 55 bp, Artificial
  Synthetic oligonucleotide
gtcgttactgacttaatggtggtacttccctcttggtatttcgagatgatctcgc

SEQ ID NO: 272063 - DNA, 55 bp, Artificial
  Synthetic oligonucleotide
cgctggcccactgcgctcaaacccttcactagcatccgcaaattctaataaacct

SEQ ID NO: 272064 - DNA, 55 bp, Artificial
  Synthetic oligonucleotide
cgctgggagagcaccatcctatagtacgaaagtttgtaataactcgagcgtactg

SEQ ID NO: 272065 - DNA, 55 bp, Artificial
  Synthetic oligonucleotide
gtcggtctaagcaacgttatggttggtgattatagcgtctggaacatataagtag

SEQ ID NO: 272066 - DNA, 55 bp, Artificial
  Synthetic oligonucleotide
cgctgtgaatgtcgctgcagatgatcccgtgtgtatgtgccttggtagatctccg

SEQ ID NO: 272067 - DNA, 55 bp, Artificial
  Synthetic oligonucleotide
cggaaactcatcagaggtatagaacctgataaggttaactggtcgggaattgaca

SEQ ID NO: 272068 - DNA, 55 bp, Artificial
  Synthetic oligonucleotide
cggaaagtccgaactatatatcagcggcctgtattcctcagtcattagactaacc

SEQ ID NO: 272069 - DNA, 57 bp, Artificial
  Synthetic oligonucleotide
atatatagtctagcgctttacggaagacaatgtatgtatttcggttcctggagaaac

SEQ ID NO: 272070 - DNA, 55 bp, Artificial
  Synthetic oligonucleotide
cggaacacgaacccaaaacgttgatatccgtaggagattcatgaaaattctggat

SEQ ID NO: 272071 - DNA, 55 bp, Artificial
  Synthetic oligonucleotide
cggaatcgtctagatatggaacggatggggctctctgtaaattttggaaggggag

SEQ ID NO: 272072 - DNA, 55 bp, Artificial
  Synthetic oligonucleotide
gtcggtagaaaatatcgcctaggtaggaaaattggtgccggatcattcggtgaca

SEQ ID NO: 272073 - DNA, 55 bp, Artificial
  Synthetic oligonucleotide
cggacttgctagctcttgtcgtttattatagactagataggtctttaaacagctt

SEQ ID NO: 272074 - DNA, 55 bp, Artificial
  Synthetic oligonucleotide
cggagatctccggtatgcgagtgggaatatgcgtactaagacatgctaatatcta

SEQ ID NO: 272075 - DNA, 55 bp, Artificial
  Synthetic oligonucleotide
cggtgatgcttcgtgatatggtagcttaagcttttggacaatatctttacggata

SEQ ID NO: 272076 - DNA, 55 bp, Artificial
  Synthetic oligonucleotide
gtccatcactaacgttactagtatcagatagacagttctataagaggtgtccgga

SEQ ID NO: 272077 - DNA, 55 bp, Artificial
  Synthetic oligonucleotide
cggttcataaggcccggattataatatgccctcatgccggttataggtattgtgg

SEQ ID NO: 272078 - DNA, 55 bp, Artificial
  Synthetic oligonucleotide
cggttgaaaccactagttttggcgcttgactccactcgtgagtcatgtttggact

SEQ ID NO: 272079 - DNA, 55 bp, Artificial
  Synthetic oligonucleotide
gtccatattacaagactgggttcaaagctgttagattggaagctaccgattacgc

SEQ ID NO: 272080 - DNA, 54 bp, Artificial
  Synthetic oligonucleotide
tgtaactagacattttaattcggttatcttgacggtctaactacaaaagagtgt

SEQ ID NO: 272081 - DNA, 54 bp, Artificial
  Synthetic oligonucleotide
cggttgtagagaggacgttgccttgaaagtcacaaatcccctacaataataccg

SEQ ID NO: 272082 - DNA, 55 bp, Artificial
  Synthetic oligonucleotide
gtccagttatgagcgtccagttatgagggcaattgcggaatccgtttaggagagg

SEQ ID NO: 272083 - DNA, 55 bp, Artificial
  Synthetic oligonucleotide
gtccaggcagcgagactcagggtccacaaacaggttacgttggttaccagcatac

SEQ ID NO: 272084 - DNA, 55 bp, Artificial
  Synthetic oligonucleotide
cgtaaatccgctcaaaccaagacatatagaggaagcttggagagtattgcagaca

SEQ ID NO: 272085 - DNA, 55 bp, Artificial
  Synthetic oligonucleotide
cgtaaatggtagtacgttctgctttcgcaatgaataactaggtcacataagccct

SEQ ID NO: 272086 - DNA, 55 bp, Artificial
  Synthetic oligonucleotide
cgtaaatgttagtctgtccgtactgcaattgagccgttgggtacacccgcttctt

SEQ ID NO: 272087 - DNA, 55 bp, Artificial
  Synthetic oligonucleotide
gtccagaattgcgacacaggtgtcatcgcacgacgtttcgatgcttaaaacgcgg

SEQ ID NO: 272088 - DNA, 54 bp, Artificial
  Synthetic oligonucleotide
cgtaatcaccgaaattgggatttcaatttatgaccccagggaaaatatggtgcc

SEQ ID NO: 272089 - DNA, 55 bp, Artificial
  Synthetic oligonucleotide
cgtaatcggacttgtatgggaactgagccaccaccttgaagggcacttcgggttc

SEQ ID NO: 272090 - DNA, 55 bp, Artificial
  Synthetic oligonucleotide
cgtaatgcgcacagaacttgctactactcaacccattatgatcactaaacgattg

SEQ ID NO: 272091 - DNA, 60 bp, Artificial
  Synthetic oligonucleotide
ctctagaggaggctgttgtgttgatagcgcgtctggggcactcgaagaaccagctgtttc

SEQ ID NO: 272092 - DNA, 55 bp, Artificial
  Synthetic oligonucleotide
cgtacaagtaggtgcaccgaagaccttacgccatctgacgtttagagaaccgccc

SEQ ID NO: 272093 - DNA, 55 bp, Artificial
  Synthetic oligonucleotide
cgtacaccataggttggaagtgctgcataatacattgcttaatacaagcaagcag

SEQ ID NO: 272094 - DNA, 55 bp, Artificial
  Synthetic oligonucleotide
cgtacagaaggaaactcggtgttacaatcggctttatgcgagagtcaagaggaac

SEQ ID NO: 272095 - DNA, 55 bp, Artificial
  Synthetic oligonucleotide
cgtacccaagtgcatcatttcgacgatttaggatactaccatggtccattccatc

SEQ ID NO: 272096 - DNA, 55 bp, Artificial
  Synthetic oligonucleotide
cgtaccggcaggtaacgccgtatcatggcctctctctaaagccgcattctttggc

SEQ ID NO: 272097 - DNA, 55 bp, Artificial
  Synthetic oligonucleotide
cgtacctcattcagcaacgactgcgttatatgatatagggcctcctccaagtgca

SEQ ID NO: 272098 - DNA, 55 bp, Artificial
  Synthetic oligonucleotide
cgtactgtacgatggtaatgcgatgagttaggtcataatactaaaatgtgtacca

SEQ ID NO: 272099 - DNA, 55 bp, Artificial
  Synthetic oligonucleotide
cgtagaaggttctccatgattgccggtggctctgaggaactaccaccagagcctc

SEQ ID NO: 272100 - DNA, 55 bp, Artificial
  Synthetic oligonucleotide
gtcctggtcccggtcctgcgttagcttgattgactgggtatttctaatctgcgtg

SEQ ID NO: 272101 - DNA, 55 bp, Artificial
  Synthetic oligonucleotide
cgggatcgatgacatgtgtaccttccaattgattccctatcgttatccaccctgg

SEQ ID NO: 272102 - DNA, 59 bp, Artificial
  Synthetic oligonucleotide
gtaaactccgttagaatgagattcatcatcaacattcttcgctagtattaataaacgac

SEQ ID NO: 272103 - DNA, 55 bp, Artificial
  Synthetic oligonucleotide
gtccgtttggatcacagcgagcgtggtaatgagtcgatttatcgttgttggaggg

SEQ ID NO: 272104 - DNA, 55 bp, Artificial
  Synthetic oligonucleotide
cgggccacttgacacctttctcgtaaaggggtctcagccataatataaagccaac

SEQ ID NO: 272105 - DNA, 55 bp, Artificial
  Synthetic oligonucleotide
cgggcgactcttttagattccttttctcgcacataagcgtaaagaccactcaggg

SEQ ID NO: 272106 - DNA, 55 bp, Artificial
  Synthetic oligonucleotide
cggggaatggctgcctgtatcggagccaagcacgtagttaatgctccgggagatg

SEQ ID NO: 272107 - DNA, 55 bp, Artificial
  Synthetic oligonucleotide
cggggacgatcgagagtctaggcagataggcggtgaaagcgtctgttacaatgcg

SEQ ID NO: 272108 - DNA, 55 bp, Artificial
  Synthetic oligonucleotide
cggggagaagcatttgtcttcgagttgtcctcatgaacgtgcgaggcctagcagc

SEQ ID NO: 272109 - DNA, 55 bp, Artificial
  Synthetic oligonucleotide
gtccgtctacttcattagctgcttcgacgaacactgatttagcatcgacttggac

SEQ ID NO: 272110 - DNA, 55 bp, Artificial
  Synthetic oligonucleotide
gtccgtatgttaactggtgacttcccaggtactgccaaggcaattgctcaagagg

SEQ ID NO: 272111 - DNA, 55 bp, Artificial
  Synthetic oligonucleotide
gtccgctggccctatatatccgttcagtatgcgctgcagatttcgagctagcgcc

SEQ ID NO: 272112 - DNA, 55 bp, Artificial
  Synthetic oligonucleotide
cgggtcttcaccaaatcaaatggacacgtaacaactgcacccgccattcctccaa

SEQ ID NO: 272113 - DNA, 53 bp, Artificial
  Synthetic oligonucleotide
acctatgattagtgtaggtggagttaagtgttacatggttaggttaacgaact

SEQ ID NO: 272114 - DNA, 55 bp, Artificial
  Synthetic oligonucleotide
gtccctggacaaactgtggttggtgtcggctaatagagggatgtcgactgggcct

SEQ ID NO: 272115 - DNA, 55 bp, Artificial
  Synthetic oligonucleotide
cgggtttcacggatgtactcacttctagagacgttattgactctgatagccggtg

SEQ ID NO: 272116 - DNA, 55 bp, Artificial
  Synthetic oligonucleotide
cggtagctctcgttaaatggaatgacactatacaggagaataagatacaattacg

SEQ ID NO: 272117 - DNA, 55 bp, Artificial
  Synthetic oligonucleotide
cggtagtgccatctggtagtgtcacactaattggaagtgtaccccaggcaacggc

SEQ ID NO: 272118 - DNA, 55 bp, Artificial
  Synthetic oligonucleotide
cggtagttaggtcactgtgaacataagcggcgctgaactcttgtgagacctcggt

SEQ ID NO: 272119 - DNA, 55 bp, Artificial
  Synthetic oligonucleotide
gtcccgaatactttgttcccctggattcgttgtttgcttaacactgtcaactctc

SEQ ID NO: 272120 - DNA, 55 bp, Artificial
  Synthetic oligonucleotide
cggtcactatcgtcagtatgtctagtttatatacggcttatatcacgggtcgtag

SEQ ID NO: 272121 - DNA, 55 bp, Artificial
  Synthetic oligonucleotide
cggtctaccgttcggtaaaagattgcctggatctgacataacaacttcgggagca

SEQ ID NO: 272122 - DNA, 55 bp, Artificial
  Synthetic oligonucleotide
cggtctatggttcccattataaagaccctgtgaaaagcaaggaacacacagatcg

SEQ ID NO: 272123 - DNA, 55 bp, Artificial
  Synthetic oligonucleotide
cggtctcaccacggtatggccactctcttacctccagaagcatcttatccaacgt

SEQ ID NO: 272124 - DNA, 54 bp, Artificial
  Synthetic oligonucleotide
tggtttctgtggtttaactaaagattattgtgacaaaaagagtagtactactgg

SEQ ID NO: 272125 - DNA, 55 bp, Artificial
  Synthetic oligonucleotide
gtcccatggctccaaatttagcaactccatccaagaggggacatcgacataaaag

SEQ ID NO: 272126 - DNA, 55 bp, Artificial
  Synthetic oligonucleotide
ggtacaagtattctagctttgtcgtagagaagaatacattattgtgcgtcaagtc

SEQ ID NO: 272127 - DNA, 55 bp, Artificial
  Synthetic oligonucleotide
gctcgccatcgtgtttgtggttacagttggctttgtacaggaatacagatctgag

SEQ ID NO: 272128 - DNA, 55 bp, Artificial
  Synthetic oligonucleotide
gctcggtgggcgttgactggtggagatttgcgtccaccaaccagcgttgttgcgg

SEQ ID NO: 272129 - DNA, 55 bp, Artificial
  Synthetic oligonucleotide
gctcgtgcagtgagcgtagtactagtgtcctgacaccctcattgtggaagtgctc

SEQ ID NO: 272130 - DNA, 55 bp, Artificial
  Synthetic oligonucleotide
gctcgtgtctgttatagaagacgttgtaccaaactggatgtctagacctttacca

SEQ ID NO: 272131 - DNA, 55 bp, Artificial
  Synthetic oligonucleotide
gctctggttgagatcccatagagctcctcagaacattgaacagacgcattgggtg

SEQ ID NO: 272132 - DNA, 55 bp, Artificial
  Synthetic oligonucleotide
gctcttctgtatcgttaccaactctagacagcagtgaaccctgtcacatcgaagt

SEQ ID NO: 272133 - DNA, 55 bp, Artificial
  Synthetic oligonucleotide
gctcttgagcatcgtggccctcacccggtatatatgcagataccacgttcccgtt

SEQ ID NO: 272134 - DNA, 55 bp, Artificial
  Synthetic oligonucleotide
ggtaatacttcgtcatttccagctatggttcgttcaggttctcatggctcatcgc

SEQ ID NO: 272135 - DNA, 60 bp, Artificial
  Synthetic oligonucleotide
tacctctacatcagaatcggaaatcccaaacacctctagccagcaggatgtcatctcttc

SEQ ID NO: 272136 - DNA, 55 bp, Artificial
  Synthetic oligonucleotide
gctgacataggaggtccatcttctactgttgggacaacggaattcacgtccgtcc

SEQ ID NO: 272137 - DNA, 55 bp, Artificial
  Synthetic oligonucleotide
ggtaataaacccgactttatgtcatccgtcatatggacgacaccactaggactac

SEQ ID NO: 272138 - DNA, 55 bp, Artificial
  Synthetic oligonucleotide
gctgcaaggcccacttcttaaactctcgaagcttgctatcgggtgcggagctatg

SEQ ID NO: 272139 - DNA, 55 bp, Artificial
  Synthetic oligonucleotide
ggtaagtggcatctgagtcaaaactttcgagactgccacaagccataaactctgc

SEQ ID NO: 272140 - DNA, 55 bp, Artificial
  Synthetic oligonucleotide
ggtaaggataattattgggtcgaatatgacgccggcacggaccacgcttggagac

SEQ ID NO: 272141 - DNA, 55 bp, Artificial
  Synthetic oligonucleotide
gctgcgcagtactacgtcagagcaaacataagtctctaatccacagtaaccaacg

SEQ ID NO: 272142 - DNA, 55 bp, Artificial
  Synthetic oligonucleotide
gctgctatacctcgattcaagcggagtcgttcctaccaccattaattgggcggag

SEQ ID NO: 272143 - DNA, 55 bp, Artificial
  Synthetic oligonucleotide
ggtaactcagaaggttcacccagcgaaaagggtttgaaattggacgctgattgtg

SEQ ID NO: 272144 - DNA, 55 bp, Artificial
  Synthetic oligonucleotide
gctggatcgactgtcaaactggcgtatttatagattcggacgggtgttgaagttt

SEQ ID NO: 272145 - DNA, 55 bp, Artificial
  Synthetic oligonucleotide
ggtaaagatacgacttcgattttaataggtattgcggagtgtccagtaccacata

SEQ ID NO: 272146 - DNA, 59 bp, Artificial
  Synthetic oligonucleotide
gaattcagacggttcttgtaaaacatacaaggtatcatctggagagtcttgttcttcta

SEQ ID NO: 272147 - DNA, 59 bp, Artificial
  Synthetic oligonucleotide
tggttgatctctacaattaaaaggtagatatcttaataatatgtctagacttaatactc

SEQ ID NO: 272148 - DNA, 55 bp, Artificial
  Synthetic oligonucleotide
gctggggtaccggaggtagctggggtagtctcagaagtagctgggacggaaccag

SEQ ID NO: 272149 - DNA, 55 bp, Artificial
  Synthetic oligonucleotide
gctgggtttatgttccacacgcacttcgaactatgcttcaacgctcaggtaccaa

SEQ ID NO: 272150 - DNA, 55 bp, Artificial
  Synthetic oligonucleotide
gctaatcatagcatcacctgacgcgattccatcagtactggtggttgtgacagcg

SEQ ID NO: 272151 - DNA, 55 bp, Artificial
  Synthetic oligonucleotide
gctacccactgcataactttgctgtgcgcacgaggagtgcacattttaatgaccg

SEQ ID NO: 272152 - DNA, 55 bp, Artificial
  Synthetic oligonucleotide
ggtactggtgttccatgtcattactggtgtgtctacgatgaaaaccaattcggtt

SEQ ID NO: 272153 - DNA, 55 bp, Artificial
  Synthetic oligonucleotide
gctacggtgagcgatatccgtcctaccaacattgtaaggatcatttgcccgcacg

SEQ ID NO: 272154 - DNA, 55 bp, Artificial
  Synthetic oligonucleotide
gctactgagtgttggttcgacacacatggctcttactgcctggagcatttaccgc

SEQ ID NO: 272155 - DNA, 53 bp, Artificial
  Synthetic oligonucleotide
gctacttacgtttgaattacttctcgttgtaacgcacttttctacaacgtacc

SEQ ID NO: 272156 - DNA, 55 bp, Artificial
  Synthetic oligonucleotide
gctagacctcggttaacgatgggtcttgacacgtaggcgttgctctcctctccat

SEQ ID NO: 272157 - DNA, 55 bp, Artificial
  Synthetic oligonucleotide
gctagataagtacattgtgcaaatgcctctggtacttcgtaagacccatgctgcg

SEQ ID NO: 272158 - DNA, 60 bp, Artificial
  Synthetic oligonucleotide
cgctcaaaatgcccggactgcctaaggcggaatgaatcctgtctaaactgccaggctgca

SEQ ID NO: 272159 - DNA, 55 bp, Artificial
  Synthetic oligonucleotide
ggtacgttgaatccgtccctatgctacattaatgcaaactacagattcgtgctct

SEQ ID NO: 272160 - DNA, 55 bp, Artificial
  Synthetic oligonucleotide
gctagccaggtacaggcgagtaacaagtattacgtatatgtgaatctagaatcgg

SEQ ID NO: 272161 - DNA, 55 bp, Artificial
  Synthetic oligonucleotide
gctagccatctcgttctgtaattctgtctatctaacggactattttgcggacttc

SEQ ID NO: 272162 - DNA, 55 bp, Artificial
  Synthetic oligonucleotide
ggtacctcttctgatatcgagagtttggcccgcagagcccatgcaaaaggtgccc

SEQ ID NO: 272163 - DNA, 55 bp, Artificial
  Synthetic oligonucleotide
gctagcgaccttctgacctcagaactcttaatcactctttgtagtagtggaaacc

SEQ ID NO: 272164 - DNA, 54 bp, Artificial
  Synthetic oligonucleotide
ggtaccgtttccgagaccgcagacgagggtccaggtttgtacttcgctcactcg

SEQ ID NO: 272165 - DNA, 55 bp, Artificial
  Synthetic oligonucleotide
ggtacccgacatacacatgtcaagtattactgcattataaccatacgcccatcgc

SEQ ID NO: 272166 - DNA, 55 bp, Artificial
  Synthetic oligonucleotide
gctatctcatacgtagtgatccccagtgaccatatatcaacctttgtgtcgtaag

SEQ ID NO: 272167 - DNA, 55 bp, Artificial
  Synthetic oligonucleotide
gctatgatcatcgtcccattaatgaaagagatcggatcaaatctacctggtggag

SEQ ID NO: 272168 - DNA, 55 bp, Artificial
  Synthetic oligonucleotide
gctatttgagcagcacagcattagtcatagccacccgccagagacactcattaat

SEQ ID NO: 272169 - DNA, 54 bp, Artificial
  Synthetic oligonucleotide
gctcacccaaccctagggttgggtgatgccgcggggggaagataaatttagatc

SEQ ID NO: 272170 - DNA, 55 bp, Artificial
  Synthetic oligonucleotide
gctcaaccatatggcccaaggttattaccgcgtttcatacgaatctaaagagtct

SEQ ID NO: 272171 - DNA, 55 bp, Artificial
  Synthetic oligonucleotide
gctcagttactaatggcattacataagtgtcattatggtgtggaattaagtccac

SEQ ID NO: 272172 - DNA, 55 bp, Artificial
  Synthetic oligonucleotide
gctcatattggtcgacaactagggtggtatataaaccgtcaggacggtctgtacg

SEQ ID NO: 272173 - DNA, 55 bp, Artificial
  Synthetic oligonucleotide
gctccaaagctttgaattctccgagttacctgtagtatcaacacgtagaggggcc

SEQ ID NO: 272174 - DNA, 55 bp, Artificial
  Synthetic oligonucleotide
ggtaccaatgacgtgataagtgacacgacggtcgacgctactctaccgcacgggg

SEQ ID NO: 272175 - DNA, 55 bp, Artificial
  Synthetic oligonucleotide
ggaaatacgaacgtgcttgaatccgtttaatcaatggaataaatctcatgcggtg

SEQ ID NO: 272176 - DNA, 55 bp, Artificial
  Synthetic oligonucleotide
gggtggttttagataagcatgatgcccattataactggaaacgcttggctagtca

SEQ ID NO: 272177 - DNA, 55 bp, Artificial
  Synthetic oligonucleotide
ggaacgattctatgaaccttctcactggccactaacttaacaaacgcttttggag

SEQ ID NO: 272178 - DNA, 55 bp, Artificial
  Synthetic oligonucleotide
ggaacgccattcgacatcgttgatgtaagagccttgatagaactctctaattaaa

SEQ ID NO: 272179 - DNA, 55 bp, Artificial
  Synthetic oligonucleotide
ggaactaaatgcgatggggtaagggttcaatttctgggcaccgtccctctgacat

SEQ ID NO: 272180 - DNA, 60 bp, Artificial
  Synthetic oligonucleotide
tggttcacaatatttacatggtaattcacaattatttaatggtgcgcctctcagtgcgta

SEQ ID NO: 272181 - DNA, 55 bp, Artificial
  Synthetic oligonucleotide
ggaactcagatctacctgctgcaggggcattgtgttacgtataaatcttggaccc

SEQ ID NO: 272182 - DNA, 55 bp, Artificial
  Synthetic oligonucleotide
ggaagaaactctagagtaaagttcagaattcgcatcagcgctcttaccactggtg

SEQ ID NO: 272183 - DNA, 55 bp, Artificial
  Synthetic oligonucleotide
ggaagaacaaccatgcgttgatttgtgattggtcagctaaatcatcggaccagag

SEQ ID NO: 272184 - DNA, 55 bp, Artificial
  Synthetic oligonucleotide
ggaagcagtcaacttagcttgagcaaccaagttagatggagcatccataacaggc

SEQ ID NO: 272185 - DNA, 55 bp, Artificial
  Synthetic oligonucleotide
ggaaggcctcccttccatacaaatccttcgactcaaatgtgtttgtgcaggcttg

SEQ ID NO: 272186 - DNA, 55 bp, Artificial
  Synthetic oligonucleotide
ggaagggtacccactagatatcacccaagtggactccgtaacgccatacgagcct

SEQ ID NO: 272187 - DNA, 55 bp, Artificial
  Synthetic oligonucleotide
ggaagttgaagtgactacgggtgaccatgttgctaaatcaactgtcgacatggcg

SEQ ID NO: 272188 - DNA, 54 bp, Artificial
  Synthetic oligonucleotide
ggaataattacgaacctggtaaggcattaatgtcgtgtctggggaagggttgta

SEQ ID NO: 272189 - DNA, 55 bp, Artificial
  Synthetic oligonucleotide
ggaatacgttaaagtagagggtgagagtttcgaagtaatgaacatgaaggagagg

SEQ ID NO: 272190 - DNA, 55 bp, Artificial
  Synthetic oligonucleotide
ggaatactggatcctttctctatgttcaacgcaccacttactgaatggttgtagc

SEQ ID NO: 272191 - DNA, 60 bp, Artificial
  Synthetic oligonucleotide
tgtagcttaatagtaaagtcccatcttgtcacgatggttgatgtcagtgcaagtctgatt

SEQ ID NO: 272192 - DNA, 55 bp, Artificial
  Synthetic oligonucleotide
gggtggcagtactacctgagaattcgagaaactaccttgttgaatcaagtatgga

SEQ ID NO: 272193 - DNA, 55 bp, Artificial
  Synthetic oligonucleotide
ggaatcgtcgttctagctatgcgtggtgctccttcacttaaagtcactcctgaat

SEQ ID NO: 272194 - DNA, 55 bp, Artificial
  Synthetic oligonucleotide
ggaatctgtttcgtctagtgtgttagagccattgctcactacagttgaaagggcc

SEQ ID NO: 272195 - DNA, 55 bp, Artificial
  Synthetic oligonucleotide
ggacaaccccaacccaatcatcttgtagcgtagacaggctgaattgctttatact

SEQ ID NO: 272196 - DNA, 54 bp, Artificial
  Synthetic oligonucleotide
ggacaagaacggttaacaatcgtatacaccgtacaaatacctttatcgcttgag

SEQ ID NO: 272197 - DNA, 55 bp, Artificial
  Synthetic oligonucleotide
gggtgcttcttaggctggggtgtgttagcaccattggcgagatacaaaagatggg

SEQ ID NO: 272198 - DNA, 55 bp, Artificial
  Synthetic oligonucleotide
gggtgaattgaatcatgtgccaaggttttgtgtaatgaaacatcttcgatacccg

SEQ ID NO: 272199 - DNA, 55 bp, Artificial
  Synthetic oligonucleotide
gctggtctcatgttaacagcagcacgggatgctagagcaaaagttctcttagcgg

SEQ ID NO: 272200 - DNA, 55 bp, Artificial
  Synthetic oligonucleotide
gctggtgaatgcactttgccagtcagcactagtctttacgtttacgggagtatac

SEQ ID NO: 272201 - DNA, 55 bp, Artificial
  Synthetic oligonucleotide
gctgtagagtggcgctaactgtaccaatcaagatagaggttctattcggttgatg

SEQ ID NO: 272202 - DNA, 60 bp, Artificial
  Synthetic oligonucleotide
gctgcatttttacagaacagaaatgcaacgcgagagcgctattttaccaacaaagaatct

SEQ ID NO: 272203 - DNA, 54 bp, Artificial
  Synthetic oligonucleotide
ggtaaagacaggtcacggattggcggaggtaattctgtaaacaaatccacaggg

SEQ ID NO: 272204 - DNA, 55 bp, Artificial
  Synthetic oligonucleotide
gctgtcacatgcctgcctaaatgcgctttcggtccattgggtattttaaagatgc

SEQ ID NO: 272205 - DNA, 55 bp, Artificial
  Synthetic oligonucleotide
gctgtccaaatagagactgtattactacaagtatcgggccctgtcaccgatacgc

SEQ ID NO: 272206 - DNA, 55 bp, Artificial
  Synthetic oligonucleotide
gggttgttcaattagattgtcctgaggatgttgacacgtacatccacagagtagg

SEQ ID NO: 272207 - DNA, 55 bp, Artificial
  Synthetic oligonucleotide
gcttaacacaactcatcagatgatattgcaacatcaacctgttcgaccgtttccg

SEQ ID NO: 272208 - DNA, 54 bp, Artificial
  Synthetic oligonucleotide
gggttggtggtgacggtactcaattccaatccaattatttctcgaaggggagcg

SEQ ID NO: 272209 - DNA, 55 bp, Artificial
  Synthetic oligonucleotide
gcttaggggcacattgcagtagtcagtagcaataaccttagccacaggattgaga

SEQ ID NO: 272210 - DNA, 55 bp, Artificial
  Synthetic oligonucleotide
gcttatactcgtccctgacagttttgtcaagtgactccgatagatatccgtactt

SEQ ID NO: 272211 - DNA, 54 bp, Artificial
  Synthetic oligonucleotide
gcttattgcacgtttacggtacaaagagtctgaacttctacttttcgtaaaaga

SEQ ID NO: 272212 - DNA, 55 bp, Artificial
  Synthetic oligonucleotide
gcttcgctgcgtagcagtctgtctctttcgttcagttgggagtcaattcgacgcc

SEQ ID NO: 272213 - DNA, 57 bp, Artificial
  Synthetic oligonucleotide
ggtaccacaagaatgcgtaagcattaggggtgtgtaccctaactctctaaatgatag

SEQ ID NO: 272214 - DNA, 55 bp, Artificial
  Synthetic oligonucleotide
gcttcgtttgtccacggaggtcggactaactctcaccacgcttccacggcattcg

SEQ ID NO: 272215 - DNA, 55 bp, Artificial
  Synthetic oligonucleotide
gcttctgtggcatattcgactgtctccgtagttgtgttatttccgtgaagtgtgg

SEQ ID NO: 272216 - DNA, 55 bp, Artificial
  Synthetic oligonucleotide
gggttgggtgcagactcatacacggttagaaggggcacagcgttgttccctcgct

SEQ ID NO: 272217 - DNA, 55 bp, Artificial
  Synthetic oligonucleotide
gggttcggtctgatgagtccagttctaggaatgtgcacaagcatgtccatcggtt

SEQ ID NO: 272218 - DNA, 55 bp, Artificial
  Synthetic oligonucleotide
gcttgtgattctggtctaacagcgcatccctagttttgtccagttggaatgcctc

SEQ ID NO: 272219 - DNA, 55 bp, Artificial
  Synthetic oligonucleotide
gctttaaaagagtcccaaattagatggaactcgagctggcagtctgccatgcaag

SEQ ID NO: 272220 - DNA, 55 bp, Artificial
  Synthetic oligonucleotide
gggttccgtgtgctcattctgatcgctaaaatacattggctcttcgatgggctcc

SEQ ID NO: 272221 - DNA, 55 bp, Artificial
  Synthetic oligonucleotide
ggaaacctactaccgtggatccaatgatatctgcacgcataattaatgacgacgc

SEQ ID NO: 272222 - DNA, 55 bp, Artificial
  Synthetic oligonucleotide
gggttaaacatcttagtagacagtaatagtcccgtgggtccaagtattagagctc

SEQ ID NO: 272223 - DNA, 55 bp, Artificial
  Synthetic oligonucleotide
gccttagtgatagtgaacggcatcgtaagcttccacgggtaggtacgactctcag

SEQ ID NO: 272224 - DNA, 53 bp, Artificial
  Synthetic oligonucleotide
ccccacgacgaacgtcgtggaggagccgcggggcccttatataaatatgaccc

SEQ ID NO: 272225 - DNA, 55 bp, Artificial
  Synthetic oligonucleotide
gccttcagttcgctagtgagaacttctatcggttggtatgcgttcacttccgagg

SEQ ID NO: 272226 - DNA, 55 bp, Artificial
  Synthetic oligonucleotide
gccttctcagcaccaggcctacaacgaacaccccaaatggtagctgtatcaacac

SEQ ID NO: 272227 - DNA, 55 bp, Artificial
  Synthetic oligonucleotide
gccttggatctgtggattcgttttgaccgttgaagtgtctaattggacttcagtg

SEQ ID NO: 272228 - DNA, 55 bp, Artificial
  Synthetic oligonucleotide
gccttgtaccaaccttcatagccactagatagcacacttgttcgcgacaactcgc

SEQ ID NO: 272229 - DNA, 55 bp, Artificial
  Synthetic oligonucleotide
gcctttcgactttgcgatgagctaggaatactagttagaagaatgttaacttaag

SEQ ID NO: 272230 - DNA, 55 bp, Artificial
  Synthetic oligonucleotide
gcgaacacacttaacctgccgttacatccgcataagaagaagaacaaccactcat

SEQ ID NO: 272231 - DNA, 55 bp, Artificial
  Synthetic oligonucleotide
gcgaacatactcccgttagtgcttcccaaaatcttatcgtatggtcatatcccgc

SEQ ID NO: 272232 - DNA, 55 bp, Artificial
  Synthetic oligonucleotide
ggtcactataatcaccaaaaggttgacacacaacacaacgctgagattattggcg

SEQ ID NO: 272233 - DNA, 55 bp, Artificial
  Synthetic oligonucleotide
gcgacaaccactccagctctggccactttgctgcagagctccacatgccacgtac

SEQ ID NO: 272234 - DNA, 55 bp, Artificial
  Synthetic oligonucleotide
gcgacacctagaatggactacggtgttaacaattttatgtggtctccgagaatga

SEQ ID NO: 272235 - DNA, 60 bp, Artificial
  Synthetic oligonucleotide
cgctcgacgtcagtgcaacgtggtgtcacacgatcaaccatactgttgggagcagtcacc

SEQ ID NO: 272236 - DNA, 55 bp, Artificial
  Synthetic oligonucleotide
gcgacggttattttagagatatgcgggaagtgcatagaggcactctgaatctaac

SEQ ID NO: 272237 - DNA, 55 bp, Artificial
  Synthetic oligonucleotide
gcgagcgtgacctcatgggaccttcttggggcctactgctatgaggggaacacaa

SEQ ID NO: 272238 - DNA, 55 bp, Artificial
  Synthetic oligonucleotide
gcgaggaggaatatgacaatggatccaaatcatgtgccagggagtgaacccaact

SEQ ID NO: 272239 - DNA, 55 bp, Artificial
  Synthetic oligonucleotide
gcgaggatgacagatgtcgagcaatcagtaaaagagaggccacacgacacgacag

SEQ ID NO: 272240 - DNA, 55 bp, Artificial
  Synthetic oligonucleotide
gcgaggtgacaatagacatttacccaactgccatccggggaaggtagttcgtata

SEQ ID NO: 272241 - DNA, 55 bp, Artificial
  Synthetic oligonucleotide
gcgatatgatgtaactgcagctgttggtggcgaactttgcataagatcgacctcc

SEQ ID NO: 272242 - DNA, 55 bp, Artificial
  Synthetic oligonucleotide
ggtattgatcgggccgataaacctattttgctggacccttttaaatctgtgcacg

SEQ ID NO: 272243 - DNA, 55 bp, Artificial
  Synthetic oligonucleotide
gcgatcttgatagacgagcctctctaagcccactccgataatggtttattcctcg

SEQ ID NO: 272244 - DNA, 55 bp, Artificial
  Synthetic oligonucleotide
gcgcaaacccgtttgcaagccttctacgcacgctttggttttactcaagtgaccg

SEQ ID NO: 272245 - DNA, 55 bp, Artificial
  Synthetic oligonucleotide
gcgcaaccgataccttcacgtacttgttccttgattgggcacccgcagttgattc

SEQ ID NO: 272246 - DNA, 60 bp, Artificial
  Synthetic oligonucleotide
tgtcagacatactcgagcgtgaggtgccagtgtcagacatactcgagcgtgaggtgccag

SEQ ID NO: 272247 - DNA, 55 bp, Artificial
  Synthetic oligonucleotide
gcgcaatcaatactaccgtgcgcgcacacacgtaagcagttttgactatgctgga

SEQ ID NO: 272248 - DNA, 55 bp, Artificial
  Synthetic oligonucleotide
gccgcttgctgaatggattctgctcttgacattaccatttcgagaagccatagtc

SEQ ID NO: 272249 - DNA, 55 bp, Artificial
  Synthetic oligonucleotide
ggtcattaaccgattgattcgtaggtggaggagatgtctttctcaagggtgaaac

SEQ ID NO: 272250 - DNA, 55 bp, Artificial
  Synthetic oligonucleotide
ggtcatataattccctgtcgctcccttcggtcccagattccgcgtttggggatct

SEQ ID NO: 272251 - DNA, 55 bp, Artificial
  Synthetic oligonucleotide
gccggtcaattccctgctaatcgtaacactgagggtatgacttcaaagacaacag

SEQ ID NO: 272252 - DNA, 55 bp, Artificial
  Synthetic oligonucleotide
gccggttaccttgacaggctcagttactcctgtgatgctgagcttagtgtgccgt

SEQ ID NO: 272253 - DNA, 55 bp, Artificial
  Synthetic oligonucleotide
gccggttctgttcttgtagcctactcttcaattcgccaatcactacatcatgttt

SEQ ID NO: 272254 - DNA, 55 bp, Artificial
  Synthetic oligonucleotide
gccgtacaataaacatagagtccttgtacgtgttcttgtcagagcagaagttcga

SEQ ID NO: 272255 - DNA, 55 bp, Artificial
  Synthetic oligonucleotide
gccgtatgcacgtgtgtcaagtaggattcaaaccacttagacgaagcactttggc

SEQ ID NO: 272256 - DNA, 55 bp, Artificial
  Synthetic oligonucleotide
gccgtcagtacattcctcaaccttttaatacctaactcggtttgatatgctgaat

SEQ ID NO: 272257 - DNA, 53 bp, Artificial
  Synthetic oligonucleotide
gttacaggtagtgttaattataatacagtttttgctttaggtagttatttaga

SEQ ID NO: 272258 - DNA, 56 bp, Artificial
  Synthetic oligonucleotide
cgcgggaaagagataaattcccgcggatcctctactggtaataccagtagaggatc

SEQ ID NO: 272259 - DNA, 55 bp, Artificial
  Synthetic oligonucleotide
gccgttcacagcgatctgttttcgttaacacgtcaaatggaatctactatggccg

SEQ ID NO: 272260 - DNA, 55 bp, Artificial
  Synthetic oligonucleotide
gcctaaccacagcttgcttcgtggctccaccacgtttcctcctagcagacatcct

SEQ ID NO: 272261 - DNA, 55 bp, Artificial
  Synthetic oligonucleotide
gcctatacccgatttaggggccataggtggcgcggaatctacagagtgaacaact

SEQ ID NO: 272262 - DNA, 55 bp, Artificial
  Synthetic oligonucleotide
gcctcagaccaagacctgacgccttactagaggatacattaagcgaaccttttgg

SEQ ID NO: 272263 - DNA, 55 bp, Artificial
  Synthetic oligonucleotide
gcctcccatgcgggttcaagggttgtaatgagacaagtttctcatgagagtgagc

SEQ ID NO: 272264 - DNA, 55 bp, Artificial
  Synthetic oligonucleotide
gcctccttcacacgataccttctggctccattatgtcccgggtaacgaatctctg

SEQ ID NO: 272265 - DNA, 55 bp, Artificial
  Synthetic oligonucleotide
gcctctctcaagtgaacgttaaccgatgaacccagcgtcatgggcgtgtgctggc

SEQ ID NO: 272266 - DNA, 55 bp, Artificial
  Synthetic oligonucleotide
gcctctggagcatttaggttcccgtagacctgaggcgaagtcccttcaaagtcaa

SEQ ID NO: 272267 - DNA, 55 bp, Artificial
  Synthetic oligonucleotide
gcctgaccatgcgtcgccgattgaagctcctcccagaattagcggtgaaaccctt

SEQ ID NO: 272268 - DNA, 55 bp, Artificial
  Synthetic oligonucleotide
gcctgatcttgggagactccttctgcaagtcgaaaaccctcctgttaccactcga

SEQ ID NO: 272269 - DNA, 51 bp, Artificial
  Synthetic oligonucleotide
tatggagggcgggtccctcactttataatatttagtcccggggccccgacc

SEQ ID NO: 272270 - DNA, 55 bp, Artificial
  Synthetic oligonucleotide
gcctggttgtcactgatccctacgttattctacccctccttcattatacacatgc

SEQ ID NO: 272271 - DNA, 55 bp, Artificial
  Synthetic oligonucleotide
gcctgtactatcggaggaactctatgaacgtgtgtcatcgaaataacaaccaccg

SEQ ID NO: 272272 - DNA, 55 bp, Artificial
  Synthetic oligonucleotide
gcctgtgatgatgagactagattcccagacaacgtcaacctaggtagtgcactga

SEQ ID NO: 272273 - DNA, 55 bp, Artificial
  Synthetic oligonucleotide
gccttagcgtactcaagtgcagtagatgcatctaaacctctagtggcattgtccc

SEQ ID NO: 272274 - DNA, 55 bp, Artificial
  Synthetic oligonucleotide
gcggttaatggtatatctgaacgttagtgacacccagaactgtagcatcatgagc

SEQ ID NO: 272275 - DNA, 55 bp, Artificial
  Synthetic oligonucleotide
gcggttaatggtgcgacaactagtatatctgcccaacgacgtagttctatgtgta

SEQ ID NO: 272276 - DNA, 55 bp, Artificial
  Synthetic oligonucleotide
gcggttgtttattgatgacatacgcccctatagctggaacctccaaagtcatcac

SEQ ID NO: 272277 - DNA, 55 bp, Artificial
  Synthetic oligonucleotide
gcgtaaactgtcttcgaagcgtacggccatttattagtggacttcgggccgtggc

SEQ ID NO: 272278 - DNA, 55 bp, Artificial
  Synthetic oligonucleotide
gcgtacactgcagggttgttgtgatccgtcacgtgtatacaaaacgcgttagaga

SEQ ID NO: 272279 - DNA, 55 bp, Artificial
  Synthetic oligonucleotide
gcgtacccgacgcgtcgcacacttcctgtaacaatggcacgcttgaagtgagcat

SEQ ID NO: 272280 - DNA, 60 bp, Artificial
  Synthetic oligonucleotide
acgacgcctgcgtctgacatgcactcattctgaagaagattctgggcgcgtttcgttctc

SEQ ID NO: 272281 - DNA, 55 bp, Artificial
  Synthetic oligonucleotide
gcgtacgatggtctagccatgggtgtacacgcagaaaagtgtgcccgtgattggg

SEQ ID NO: 272282 - DNA, 55 bp, Artificial
  Synthetic oligonucleotide
gcgtagcgtatacagaagcacaattggtcgtatatgtgccaagcttgtaggaaat

SEQ ID NO: 272283 - DNA, 55 bp, Artificial
  Synthetic oligonucleotide
gcgtagggtaccatttaggactgcaagctctcgcagttgtccccgcttaagatcg

SEQ ID NO: 272284 - DNA, 55 bp, Artificial
  Synthetic oligonucleotide
gcgtatactgtcttactaacgtcgttactaccttaaggcccatcgccagtagtct

SEQ ID NO: 272285 - DNA, 55 bp, Artificial
  Synthetic oligonucleotide
gcgtcaagtaacatccagtctagaagtggtctctctggacagagcgctagttctg

SEQ ID NO: 272286 - DNA, 55 bp, Artificial
  Synthetic oligonucleotide
gcgtccacgactcccgcatgcgcgaattagctggctcctcataagctgaagcggc

SEQ ID NO: 272287 - DNA, 55 bp, Artificial
  Synthetic oligonucleotide
gcgtcggtctctatacatatctgaacacatatcagccgagcaccaaacaacctcc

SEQ ID NO: 272288 - DNA, 55 bp, Artificial
  Synthetic oligonucleotide
ggtagaaggcgtttcgtcaaaagaggtggtagtgtttgcgctaatgtcctttgcg

SEQ ID NO: 272289 - DNA, 54 bp, Artificial
  Synthetic oligonucleotide
gcgtgtgaggaagttttagagtaccggtagggcacttaatggcaatatttcggg

SEQ ID NO: 272290 - DNA, 55 bp, Artificial
  Synthetic oligonucleotide
gcgttacccgggtagatgtaaacgccgaccgaccgttgcatgcaactcctatctc

SEQ ID NO: 272291 - DNA, 60 bp, Artificial
  Synthetic oligonucleotide
acccgctgccgcccttacaactctatcatcgtaactcgacagatgcaatgctctataacc

SEQ ID NO: 272292 - DNA, 55 bp, Artificial
  Synthetic oligonucleotide
gcgttcatcccgttataatcatgctgttgacggtatgcgtaatttgcaccgggtt

SEQ ID NO: 272293 - DNA, 55 bp, Artificial
  Synthetic oligonucleotide
gcgttcgactgcaacgtaacatattggtagcttcttgtctgggctggtgtcagtc

SEQ ID NO: 272294 - DNA, 55 bp, Artificial
  Synthetic oligonucleotide
gcgtttgcagcatagcgcccatggaatacgacacataatctcttgagaaagactg

SEQ ID NO: 272295 - DNA, 55 bp, Artificial
  Synthetic oligonucleotide
gctaaactcgggtattgtctacaagaccggtgctgtgaccgtttccaatacggaa

SEQ ID NO: 272296 - DNA, 55 bp, Artificial
  Synthetic oligonucleotide
ggtagaacaacagtacagtgagtaggacatggtggatggtagggtaatagtaggg

SEQ ID NO: 272297 - DNA, 55 bp, Artificial
  Synthetic oligonucleotide
gcgcaggatagtcgtaagtgcagaagtgttcttaaggggactgcctctgctaacc

SEQ ID NO: 272298 - DNA, 55 bp, Artificial
  Synthetic oligonucleotide
ggtatatacattgatatcacaggacttagcgttagttccgatgcggctaagcagt

SEQ ID NO: 272299 - DNA, 55 bp, Artificial
  Synthetic oligonucleotide
gcgccttggtaaaatgaacgattgctgtgtcgtaagcagcaaattttggatgcac

SEQ ID NO: 272300 - DNA, 55 bp, Artificial
  Synthetic oligonucleotide
gcgcgcaaaaggggttttcaaggcacctcggcacccctataattggcattctcac

SEQ ID NO: 272301 - DNA, 55 bp, Artificial
  Synthetic oligonucleotide
ggtagtgcgtagtgtcagtacgtcttatcatacgccttctatttcagggttagcg

SEQ ID NO: 272302 - DNA, 60 bp, Artificial
  Synthetic oligonucleotide
atcgattgccagcaacagggttttgcgcgtatgtctcttgtggatactatgtaaacaaaa

SEQ ID NO: 272303 - DNA, 55 bp, Artificial
  Synthetic oligonucleotide
gcgcgccttgtctagcatcgtgagttaaggtccatgcaaatggtttgagtgcggt

SEQ ID NO: 272304 - DNA, 55 bp, Artificial
  Synthetic oligonucleotide
ggtaggtctaggcctgaagaacgactgactcttgttattacgacttgtgatagtg

SEQ ID NO: 272305 - DNA, 55 bp, Artificial
  Synthetic oligonucleotide
gcgctaatgaacgctttccctgtcgacgctctgacctccaatgtcctgccagtga

SEQ ID NO: 272306 - DNA, 55 bp, Artificial
  Synthetic oligonucleotide
ggtagagttattcatattgtacctatctgataccgagctgtcatttgagacagtc

SEQ ID NO: 272307 - DNA, 55 bp, Artificial
  Synthetic oligonucleotide
gcgctgctctcttacagttatcgaacgctctattgaacactgaccttcccagtga

SEQ ID NO: 272308 - DNA, 55 bp, Artificial
  Synthetic oligonucleotide
gcgctgttcagttgtcatggtatcatacgcctattgcctgtttagcggaggaaac

SEQ ID NO: 272309 - DNA, 53 bp, Artificial
  Synthetic oligonucleotide
gcggaaggtatatttgctgacgtttcgttttctcgtgtaccttgaaaggtaac

SEQ ID NO: 272310 - DNA, 55 bp, Artificial
  Synthetic oligonucleotide
gcggaccaattcggtgtcgctgttgtagtgacaaatcaagttgtagcacaggtgg

SEQ ID NO: 272311 - DNA, 55 bp, Artificial
  Synthetic oligonucleotide
gcggacccagacttaagcctaaccaggccaattcaacagactgtcggcaacttct

SEQ ID NO: 272312 - DNA, 55 bp, Artificial
  Synthetic oligonucleotide
gcggactggctgaatcgttgtttatacgtgcgtcgtttggcaaaatcgcattaga

SEQ ID NO: 272313 - DNA, 60 bp, Artificial
  Synthetic oligonucleotide
tgctcactaatgagaaggagttccaacgtgaaaggttcgcgtctctcctagcctacatga

SEQ ID NO: 272314 - DNA, 55 bp, Artificial
  Synthetic oligonucleotide
gcggctctcatcagtataataaagcacgagaggtgataaaattagtgaatgttac

SEQ ID NO: 272315 - DNA, 55 bp, Artificial
  Synthetic oligonucleotide
gcggctggttgtttctcgcatgaacaccgagagcctccccaataccgtatgtcag

SEQ ID NO: 272316 - DNA, 55 bp, Artificial
  Synthetic oligonucleotide
gcgggtgatgtctcatttcaatgaggtcagataactggtacagtttcgcctttaa

SEQ ID NO: 272317 - DNA, 55 bp, Artificial
  Synthetic oligonucleotide
gcgggttgtattggccaaaagacggtttatgacatcgaccagtccgttgtcagct

SEQ ID NO: 272318 - DNA, 55 bp, Artificial
  Synthetic oligonucleotide
gcggtcaggtctcgacaccataaatcgaagtactcgtacgctagttttctcgcac

SEQ ID NO: 272319 - DNA, 55 bp, Artificial
  Synthetic oligonucleotide
gcggtcggtgtgtcagacagaatcggtgctatgcctacagacgtacgaactctcg

SEQ ID NO: 272320 - DNA, 55 bp, Artificial
  Synthetic oligonucleotide
gcggtggctactgtgctattcctatgactagtataccggcggccaatttaagcta

SEQ ID NO: 272321 - DNA, 55 bp, Artificial
  Synthetic oligonucleotide
ggcgcgatctatagtgtcagacggcttgcatatatgctcacgcgttcggacgcgt

SEQ ID NO: 272322 - DNA, 55 bp, Artificial
  Synthetic oligonucleotide
ggcgctcaaaccgatggaccgtgttattatgttaagagccctgactgattggtgt

SEQ ID NO: 272323 - DNA, 55 bp, Artificial
  Synthetic oligonucleotide
ggcgcttgtgtcgaacccttatcagtcggtgtacactctaataaattggctgggg

SEQ ID NO: 272324 - DNA, 60 bp, Artificial
  Synthetic oligonucleotide
gacatgatattgtattcgatccaaatttacaattcagacccaaccttgatggaaatatcg

SEQ ID NO: 272325 - DNA, 55 bp, Artificial
  Synthetic oligonucleotide
ggcggatgagataacggtgaatgtatcgccagctaaactttgatcgaacaaacgg

SEQ ID NO: 272326 - DNA, 55 bp, Artificial
  Synthetic oligonucleotide
ggcggccactaaaatgacgtagcagtagaagtaattccacccagtggcgaagccc

SEQ ID NO: 272327 - DNA, 55 bp, Artificial
  Synthetic oligonucleotide
ggcgggatttcatttcgaccgtcccaaaggagctacggctgagtctgtggatcct

SEQ ID NO: 272328 - DNA, 55 bp, Artificial
  Synthetic oligonucleotide
ggcgtagaggacagatcgtaaggtccgtccgcaggctgtcgtagcgatgattcca

SEQ ID NO: 272329 - DNA, 55 bp, Artificial
  Synthetic oligonucleotide
ggcgtcattgaacttgacggggttgttgaggacctccttagagaccatctccctg

SEQ ID NO: 272330 - DNA, 55 bp, Artificial
  Synthetic oligonucleotide
ggcgtctttctgctgacgctaggttcaccgggtcttacggatgggtcgtactgca

SEQ ID NO: 272331 - DNA, 55 bp, Artificial
  Synthetic oligonucleotide
ggctaaataggcaaactatgttatatctaatagtgtaatgttgccttgcgagcac

SEQ ID NO: 272332 - DNA, 55 bp, Artificial
  Synthetic oligonucleotide
ggctaagcgaaactgagtcgaaattcatacttgatagcaaagacacgaagctact

SEQ ID NO: 272333 - DNA, 55 bp, Artificial
  Synthetic oligonucleotide
ggctaccgatcaccatttactatcggatagtgcatacgaagacctagtcaagtgc

SEQ ID NO: 272334 - DNA, 52 bp, Artificial
  Synthetic oligonucleotide
ggctacggtaccagactaagaccactaacactaacggtccccaaaccattag

SEQ ID NO: 272335 - DNA, 51 bp, Artificial
  Synthetic oligonucleotide
ccatcctttaataataccccctaccccccgtagtacttgtatatacaagta

SEQ ID NO: 272336 - DNA, 55 bp, Artificial
  Synthetic oligonucleotide
ggctagagccttcacatctttaagtgtactttgaggcatgaggtcagaaaatgcg

SEQ ID NO: 272337 - DNA, 55 bp, Artificial
  Synthetic oligonucleotide
ggctagattatggctggcccgatgggagtctaagaacggcaactacgagattgca

SEQ ID NO: 272338 - DNA, 55 bp, Artificial
  Synthetic oligonucleotide
ggctagcggagactgacggtgctaggaatgttcgcattcgctgatagcaattgtc

SEQ ID NO: 272339 - DNA, 55 bp, Artificial
  Synthetic oligonucleotide
ggctagctctctatgagcggttcaaggaactttcagtcgaaacgaacagaccatc

SEQ ID NO: 272340 - DNA, 55 bp, Artificial
  Synthetic oligonucleotide
ggctagtcgtacgtctctcggaattgcatgcactagttacacgattctttgaggg

SEQ ID NO: 272341 - DNA, 55 bp, Artificial
  Synthetic oligonucleotide
ggctattttctcattatttgctggttattattattgaagtcctcaaatgttagga

SEQ ID NO: 272342 - DNA, 55 bp, Artificial
  Synthetic oligonucleotide
ggctccagagacccgcccatcatgttattctaatgacaaactacgtgcaagtgac

SEQ ID NO: 272343 - DNA, 55 bp, Artificial
  Synthetic oligonucleotide
gggcttgtggccgcagcttccggaatacttggtgaggtaatcgaggacataaatc

SEQ ID NO: 272344 - DNA, 55 bp, Artificial
  Synthetic oligonucleotide
ggctctagagacatccgagtggtatgggaacggtgtagccaatcctaaggagaga

SEQ ID NO: 272345 - DNA, 55 bp, Artificial
  Synthetic oligonucleotide
ggccacagactacgaatgaacagtctgtcagctctaaaatgaacagtgctaccag

SEQ ID NO: 272346 - DNA, 60 bp, Artificial
  Synthetic oligonucleotide
ccatccgccagatcattcttagtgatctcaccgccgatccacccaagcgtctcgttcggg

SEQ ID NO: 272347 - DNA, 55 bp, Artificial
  Synthetic oligonucleotide
ggccacaggtggcccactagcagttatcatcggttggactattgcgggatctcag

SEQ ID NO: 272348 - DNA, 55 bp, Artificial
  Synthetic oligonucleotide
ggccatggactatgttctggatgacaggactgaggaaggccttgcactgttgagg

SEQ ID NO: 272349 - DNA, 55 bp, Artificial
  Synthetic oligonucleotide
ggcccacagatgcgtagttcgcatgcgtaccactagcactaaagattagcggtct

SEQ ID NO: 272350 - DNA, 55 bp, Artificial
  Synthetic oligonucleotide
ggggtcattaggggtgcaattgatcagtaccagttccccaactgatactttagtc

SEQ ID NO: 272351 - DNA, 55 bp, Artificial
  Synthetic oligonucleotide
ggccccgcgtggagccaatgcagcttcggcaacctttagtcgttcatggttgccc

SEQ ID NO: 272352 - DNA, 55 bp, Artificial
  Synthetic oligonucleotide
ggcccctcaaaccaccgacagaacataaaaggatgtttgaatcctctctattttc

SEQ ID NO: 272353 - DNA, 55 bp, Artificial
  Synthetic oligonucleotide
ggccgcttagtggtacgatcgtagaaaccgccgttataccgctgaggaggagtgg

SEQ ID NO: 272354 - DNA, 55 bp, Artificial
  Synthetic oligonucleotide
ggccggtcggctgagcaccttagctttcgtcttccaatcggaatattctgagagc

SEQ ID NO: 272355 - DNA, 55 bp, Artificial
  Synthetic oligonucleotide
ggccgtcattcatatctgtcaccagtagaggcacagtaccgatagtctacgagga

SEQ ID NO: 272356 - DNA, 55 bp, Artificial
  Synthetic oligonucleotide
ggccgtgtattacgtccaaggagtagagctatatatcaggcagttgactcacctc

SEQ ID NO: 272357 - DNA, 60 bp, Artificial
  Synthetic oligonucleotide
ataccttatataatccaatatatctcttataataccttatatctctattatctactataa

SEQ ID NO: 272358 - DNA, 55 bp, Artificial
  Synthetic oligonucleotide
ggcctaaaccagcgtttatttcatgccaaggaactgtcgtattgtcaaagccgcc

SEQ ID NO: 272359 - DNA, 55 bp, Artificial
  Synthetic oligonucleotide
ggcctcggagataagacgagcgagattttcatatgagctctatcgtaatgtgcgg

SEQ ID NO: 272360 - DNA, 55 bp, Artificial
  Synthetic oligonucleotide
ggcctgggttggtcctttccttgcgatatttggtctatcggctgtgttctagtag

SEQ ID NO: 272361 - DNA, 54 bp, Artificial
  Synthetic oligonucleotide
ggccttcttcttagttggagacttaccgcttgttacactactgaaaggattccc

SEQ ID NO: 272362 - DNA, 55 bp, Artificial
  Synthetic oligonucleotide
ggggcgatgacctggtaaacaattgtaacgaagcactagccgtatgcatggacct

SEQ ID NO: 272363 - DNA, 55 bp, Artificial
  Synthetic oligonucleotide
ggcgaactcggatgactttaataccgtttcgagagtgctcagctcaactaacggc

SEQ ID NO: 272364 - DNA, 55 bp, Artificial
  Synthetic oligonucleotide
ggcgacaacgttgaacttctaggagcagtttctcacaggctagtaatccatttgg

SEQ ID NO: 272365 - DNA, 55 bp, Artificial
  Synthetic oligonucleotide
ggggccatggatgatactaatgtcattaattaacgcgaatttaattgcctcccgt

SEQ ID NO: 272366 - DNA, 55 bp, Artificial
  Synthetic oligonucleotide
ggggatgagacgatattgtacctaatcttacctgagcctagcgtactctgccgct

SEQ ID NO: 272367 - DNA, 55 bp, Artificial
  Synthetic oligonucleotide
ggcgcaagacattcacgagactcagttgaagactattacctgggaggtgacttgt

SEQ ID NO: 272368 - DNA, 60 bp, Artificial
  Synthetic oligonucleotide
cagcgatggagccctggtatgcgagatcgttacaaagtgctgtcgtcagacccccaacga

SEQ ID NO: 272369 - DNA, 60 bp, Artificial
  Synthetic oligonucleotide
tgctactccatgcctatcccggaactgaccgtatctggtgcaaagttgtcgcacagcggc

SEQ ID NO: 272370 - DNA, 55 bp, Artificial
  Synthetic oligonucleotide
ggcgccaggggctctaaacctaaggcagtacttctcccgtgggactctgcagagc

SEQ ID NO: 272371 - DNA, 55 bp, Artificial
  Synthetic oligonucleotide
gggagacgtgacacgcgccgtttacgtcaggagagagttagagacagtggaatcc

SEQ ID NO: 272372 - DNA, 53 bp, Artificial
  Synthetic oligonucleotide
gggcgtcccacttagggtaacactccaagccggagttactctcccggcctctc

SEQ ID NO: 272373 - DNA, 51 bp, Artificial
  Synthetic oligonucleotide
gggagcattatttacctaaagggccttcaacttcctaaagaggcttaccgg

SEQ ID NO: 272374 - DNA, 55 bp, Artificial
  Synthetic oligonucleotide
gggaggtgtatgggtgtatttgacacatgtcgttatataaatgcgccacaaatta

SEQ ID NO: 272375 - DNA, 55 bp, Artificial
  Synthetic oligonucleotide
gggcgtaatcgcgtctccttcgaagcaggcacccaactacttctaccagtgggtc

SEQ ID NO: 272376 - DNA, 55 bp, Artificial
  Synthetic oligonucleotide
gggagtcgctgaaggcagacaagccaccgtaattgacataattgggttcatggga

SEQ ID NO: 272377 - DNA, 55 bp, Artificial
  Synthetic oligonucleotide
gggcgctaaatttgttacgactcacaggcgacaacggttcgatgacactgactcc

SEQ ID NO: 272378 - DNA, 55 bp, Artificial
  Synthetic oligonucleotide
gggatcaaggcttaatgatccattagatttcactacagcaccaagtaggaccgta

SEQ ID NO: 272379 - DNA, 55 bp, Artificial
  Synthetic oligonucleotide
gggatcgggctcacctcgatccaccgtcatctcatcaagattgcacataatctgc

SEQ ID NO: 272380 - DNA, 60 bp, Artificial
  Synthetic oligonucleotide
ccatcataatctactaatactcgataacccggatatcctgatcagatatccgggtggatt

SEQ ID NO: 272381 - DNA, 55 bp, Artificial
  Synthetic oligonucleotide
gggatgactgcatgaagggataccaacaccgcagagtgtccggtcttatagaacg

SEQ ID NO: 272382 - DNA, 55 bp, Artificial
  Synthetic oligonucleotide
gggcaatatttaagaatcgccgcagatatctcaaacagttcgtactgatgaagta

SEQ ID NO: 272383 - DNA, 55 bp, Artificial
  Synthetic oligonucleotide
gggcacaacctccatacctgagtatcccttcttactaccatagtaggccatcaag

SEQ ID NO: 272384 - DNA, 55 bp, Artificial
  Synthetic oligonucleotide
gggcacaaggcagcttcggggcctgaccagatcaaagaaagcatgtctaatgcga

SEQ ID NO: 272385 - DNA, 55 bp, Artificial
  Synthetic oligonucleotide
gggcacattccacgagtttgagtgtgtcgaattgaagatgggtaagcgcttggca

SEQ ID NO: 272386 - DNA, 55 bp, Artificial
  Synthetic oligonucleotide
gggcacctgtagtacccattcttgagacgacataaacgaaggagtcggccaactt

SEQ ID NO: 272387 - DNA, 55 bp, Artificial
  Synthetic oligonucleotide
gggcatgagttgcatgtaatagcctggattgttcgttgtcatcgtaatgattctc

SEQ ID NO: 272388 - DNA, 51 bp, Artificial
  Synthetic oligonucleotide
gggccaagggcagaagatcattaaacaccccggtttaaccgttaaatacga

SEQ ID NO: 272389 - DNA, 55 bp, Artificial
  Synthetic oligonucleotide
gggccaatttgttggagtccggatcatccaaatgcgctaatatcttcttcgtaaa

SEQ ID NO: 272390 - DNA, 55 bp, Artificial
  Synthetic oligonucleotide
gggccatataagcaacttgcaaatggaacaccatacaatccaaaccaaccgcagg

SEQ ID NO: 272391 - DNA, 59 bp, Artificial
  Synthetic oligonucleotide
gtctgtattcagtacatgtccaacaaatgcaaatgctaacgttttgtatttcttataat

SEQ ID NO: 272392 - DNA, 55 bp, Artificial
  Synthetic oligonucleotide
gggccatccatgattccggtgcttcccacctctggcgtattccgaaagtatggca

SEQ ID NO: 272393 - DNA, 55 bp, Artificial
  Synthetic oligonucleotide
gggccctcttttctgcgctgggtaacatttcagatggccgattataataggtcca

SEQ ID NO: 272394 - DNA, 55 bp, Artificial
  Synthetic oligonucleotide
gggccggccagagcattactagatcacaattagttgaagggctacagtcatggag

SEQ ID NO: 272395 - DNA, 55 bp, Artificial
  Synthetic oligonucleotide
gggcttgggaatttcaattcaccgtggtgctctctagcagtagtcaagataccct

SEQ ID NO: 272396 - DNA, 55 bp, Artificial
  Synthetic oligonucleotide
gggcttcttatgattggagccgcgaagctttcactttgagtccagaattgaccaa

SEQ ID NO: 272397 - DNA, 55 bp, Artificial
  Synthetic oligonucleotide
ggctgggaagtaagggctgggcggctaaacttgtctgtcatatttaaatgtaagc

SEQ ID NO: 272398 - DNA, 55 bp, Artificial
  Synthetic oligonucleotide
ggctgggtaaatcaaatggctttgtcgactgtctcgtagaacgcaaggtctcgcg

SEQ ID NO: 272399 - DNA, 55 bp, Artificial
  Synthetic oligonucleotide
gggctccggaacaagtgcttgctccaagtccgagcacaataaatattagtcacgt

SEQ ID NO: 272400 - DNA, 55 bp, Artificial
  Synthetic oligonucleotide
gggctaatagggcaggtactcgtggatttagagcaccggaggtattaatgaagtg

SEQ ID NO: 272401 - DNA, 55 bp, Artificial
  Synthetic oligonucleotide
gggctaactttacggggacaatagcatgtcataaaacacctatgattagtgtagg

SEQ ID NO: 272402 - DNA, 60 bp, Artificial
  Synthetic oligonucleotide
ggaatcatgcaatcaccttcggatcagtttcgctgccagcaaagtaccagcaatatcccc

SEQ ID NO: 272403 - DNA, 55 bp, Artificial
  Synthetic oligonucleotide
ggcttccgcattgtcaacagcaagaccccagacagacacagacgctgctcccagg

SEQ ID NO: 272404 - DNA, 55 bp, Artificial
  Synthetic oligonucleotide
gggctaaagacttatttaggacggcatctagaagggcggatacaactccgtttga

SEQ ID NO: 272405 - DNA, 55 bp, Artificial
  Synthetic oligonucleotide
gggaaattacatggcttagccccactgttcaagtgcctcaaccaactggagggcc

SEQ ID NO: 272406 - DNA, 55 bp, Artificial
  Synthetic oligonucleotide
gggaacatcctgaaacaagcatgacatcttgacatatagttacgtagtctcttga

SEQ ID NO: 272407 - DNA, 55 bp, Artificial
  Synthetic oligonucleotide
gggcgtgtggtaggtctaagggattctcacgaagctgctgatcgggtccatgcca

SEQ ID NO: 272408 - DNA, 54 bp, Artificial
  Synthetic oligonucleotide
gggaactaagcgccgaggttccgtattatccgttgaaaattgtacgagccctca

SEQ ID NO: 272409 - DNA, 51 bp, Artificial
  Synthetic oligonucleotide
gggaacttaagacgttccttgggtatgtaaattggacgagggtcgccaact

SEQ ID NO: 272410 - DNA, 55 bp, Artificial
  Synthetic oligonucleotide
gggaacttacacacactcctgcaacctactgaaatcgacaatccaccaatgacgt

SEQ ID NO: 272411 - DNA, 55 bp, Artificial
  Synthetic oligonucleotide
gggcgtctttcacttcacttgtgccatgttacaaagctccaaacgcacttctaac

SEQ ID NO: 272412 - DNA, 55 bp, Artificial
  Synthetic oligonucleotide
gggacacggatcttagcgttaccatgcttcttttgatagtcaccccataggcgca

SEQ ID NO: 272413 - DNA, 60 bp, Artificial
  Synthetic oligonucleotide
tatagcattcttagtatcgtctattgtactatctaattgtcctaattcgctaccacattt

SEQ ID NO: 272414 - DNA, 55 bp, Artificial
  Synthetic oligonucleotide
gggaccgatcgcaagaaccctgcatcctaagtgcacttggctaaagttgccggcc

SEQ ID NO: 272415 - DNA, 55 bp, Artificial
  Synthetic oligonucleotide
gggacgaggtaatgtatgattcagttcacaggatgaaaacccgaaatctaacggc

SEQ ID NO: 272416 - DNA, 55 bp, Artificial
  Synthetic oligonucleotide
gggacgttccttaagccctatgcgctgcatatgtccagctcttaacaattatacc

SEQ ID NO: 272417 - DNA, 55 bp, Artificial
  Synthetic oligonucleotide
gggagacgcaaggaaagtaagtcagatggatccgactgtatgtaacaagggttgc

SEQ ID NO: 272418 - DNA, 55 bp, Artificial
  Synthetic oligonucleotide
ggagcattacctggtgttcaaagatggatatgatggtgaatcatgtgttatggtc

SEQ ID NO: 272419 - DNA, 55 bp, Artificial
  Synthetic oligonucleotide
ggagcggattagtcgagtacctaagttgcggattcgtgcctcccacccacggcca

SEQ ID NO: 272420 - DNA, 55 bp, Artificial
  Synthetic oligonucleotide
ggagctgagcggacagggcagaaagagtagtatacaccgttaatcatcgtgcatt

SEQ ID NO: 272421 - DNA, 55 bp, Artificial
  Synthetic oligonucleotide
gggtattattaggaggattgtcgcggaggaagacatgtgcgaattggatccggcg

SEQ ID NO: 272422 - DNA, 55 bp, Artificial
  Synthetic oligonucleotide
ggaggagcggggtgtacggatttgattaggtatgtggtgtacggatttgattagg

SEQ ID NO: 272423 - DNA, 55 bp, Artificial
  Synthetic oligonucleotide
ggaggagctattagtactcctactgatataagatcatcttccttagatgcagact

SEQ ID NO: 272424 - DNA, 60 bp, Artificial
  Synthetic oligonucleotide
gtctgtgaactgccactacaggttgttacctaatgtacgactctatgcttattggaccgc

SEQ ID NO: 272425 - DNA, 55 bp, Artificial
  Synthetic oligonucleotide
ggaggatgatgagagactctccgcattatcaagggtaaacaccgtcagaaagctc

SEQ ID NO: 272426 - DNA, 55 bp, Artificial
  Synthetic oligonucleotide
ggaggattccaacaaacctgtggaggattccaacaaacctgtggaggattccaac

SEQ ID NO: 272427 - DNA, 55 bp, Artificial
  Synthetic oligonucleotide
ggaggcagccgctaccagtgccgaaggttattcgacacagctgcttgccactagc

SEQ ID NO: 272428 - DNA, 55 bp, Artificial
  Synthetic oligonucleotide
gggtagtgccctaaaattgaaccccgtaccattcattggaggccgatcccatctg

SEQ ID NO: 272429 - DNA, 55 bp, Artificial
  Synthetic oligonucleotide
ggagggtggtctacgtggtgcagttctattaggattcaaatcgctacccgttggt

SEQ ID NO: 272430 - DNA, 55 bp, Artificial
  Synthetic oligonucleotide
ggaggttaggtcaactgccatcccaactgggttagtatcgttatcggtgtcttgg

SEQ ID NO: 272431 - DNA, 55 bp, Artificial
  Synthetic oligonucleotide
ggagtaacggacgcaacacaagcatggttggaagtagtaatagctctagaagcag

SEQ ID NO: 272432 - DNA, 55 bp, Artificial
  Synthetic oligonucleotide
ggagtcacaccgagggagcctgaaagacatatcgggatcgcctacgggaaacttc

SEQ ID NO: 272433 - DNA, 55 bp, Artificial
  Synthetic oligonucleotide
ggagtctacctgcactggtaacgtatattgccaccatttccatcataagcgtctc

SEQ ID NO: 272434 - DNA, 55 bp, Artificial
  Synthetic oligonucleotide
ggagtgatggcaatagcattaacacgagggtgtactaacgacccacctgcactta

SEQ ID NO: 272435 - DNA, 47 bp, Artificial
  Synthetic oligonucleotide
cccggtccccttaaggggaccgggtggtataattattaaactaatac

SEQ ID NO: 272436 - DNA, 55 bp, Artificial
  Synthetic oligonucleotide
ggagtgcgcctgtgaatgtctatgtatagctgtatgggttcttcatgaatatgtg

SEQ ID NO: 272437 - DNA, 55 bp, Artificial
  Synthetic oligonucleotide
ggagtgtataggcctatagcaatggaagcgttgtcattgatttctcgccatcgag

SEQ ID NO: 272438 - DNA, 55 bp, Artificial
  Synthetic oligonucleotide
ggagttgttgacctctaaagaatgtgtaccctcgaacaaatcaaacctgggatct

SEQ ID NO: 272439 - DNA, 55 bp, Artificial
  Synthetic oligonucleotide
ggataacataagcgatgtaagacctaccttgaccttccgataatcttttcgcttc

SEQ ID NO: 272440 - DNA, 55 bp, Artificial
  Synthetic oligonucleotide
ggatacaaactacaatgtccggtatgtaggacaccgttaccaccaatttaatcag

SEQ ID NO: 272441 - DNA, 55 bp, Artificial
  Synthetic oligonucleotide
ggaccatatcacctcgcatttgagagttcacgtaccattgaaaccgttcggttgc

SEQ ID NO: 272442 - DNA, 55 bp, Artificial
  Synthetic oligonucleotide
ggaccattggccgtcaagtacacttctcaacacgaatggatcgctgcacacagtg

SEQ ID NO: 272443 - DNA, 52 bp, Artificial
  Synthetic oligonucleotide
ggaccccactacggacccaaaccttaccaagatcctaagtggtgcaaaagtc

SEQ ID NO: 272444 - DNA, 55 bp, Artificial
  Synthetic oligonucleotide
ggacgagagtacccgtgctcgtctcccacagatagaggtcatgggcagaagaccc

SEQ ID NO: 272445 - DNA, 55 bp, Artificial
  Synthetic oligonucleotide
gggtcgtagcaagtggcggagtatccaacaaccccacccgcagggcccgatagaa

SEQ ID NO: 272446 - DNA, 58 bp, Artificial
  Synthetic oligonucleotide
gtaggataaaagccatacatagcccacaatctatagcaattaattaacgttataattg

SEQ ID NO: 272447 - DNA, 55 bp, Artificial
  Synthetic oligonucleotide
ggacggtgtgttaactctcgtattccggtaactcatattcttggtaacttggcgc

SEQ ID NO: 272448 - DNA, 55 bp, Artificial
  Synthetic oligonucleotide
ggacgtaccagcgttcatgctgagagtcagtccaactacgtagagctatgttaaa

SEQ ID NO: 272449 - DNA, 55 bp, Artificial
  Synthetic oligonucleotide
ggacgtagaagtggtttgcgagagttgcactcgttggtgggttgacaggcccagc

SEQ ID NO: 272450 - DNA, 55 bp, Artificial
  Synthetic oligonucleotide
ggacgtcaatgcttgtgttatccacgatgctgggagaacccagatcgctgcaggt

SEQ ID NO: 272451 - DNA, 55 bp, Artificial
  Synthetic oligonucleotide
ggacgtggccaatacgacagtcacggtgacagaaggctcattagatgggtacatc

SEQ ID NO: 272452 - DNA, 55 bp, Artificial
  Synthetic oligonucleotide
ggacgtgtcagaccacttagtatgcaagtagagggttgcattgtattggacacta

SEQ ID NO: 272453 - DNA, 55 bp, Artificial
  Synthetic oligonucleotide
ggacttcgcctcaggtctacgggaacctaaatgctccagaggcaatcactaactc

SEQ ID NO: 272454 - DNA, 55 bp, Artificial
  Synthetic oligonucleotide
ggacttgcaggaccgttgcatggtctagcggcccaggaagtagttcggttcttag

SEQ ID NO: 272455 - DNA, 55 bp, Artificial
  Synthetic oligonucleotide
ggactttgggtgaaagctgaagcagacctctttcggtgcaatagattagcaccaa

SEQ ID NO: 272456 - DNA, 55 bp, Artificial
  Synthetic oligonucleotide
ggagaacctggcaatgatgcaacttgacagctattatccaagtcgcacggttcaa

SEQ ID NO: 272457 - DNA, 58 bp, Artificial
  Synthetic oligonucleotide
gttcatagtttactgctagaactactcgggtatcgaatccgtattgctactctagcct

SEQ ID NO: 272458 - DNA, 55 bp, Artificial
  Synthetic oligonucleotide
ggagaccatgtcggaggtaagatcggtttccaatttggtgaggtcggtcgagaac

SEQ ID NO: 272459 - DNA, 55 bp, Artificial
  Synthetic oligonucleotide
ggagagttcgttgaaagtttggagacgatatgttaagcctgtactgtattatgca

SEQ ID NO: 272460 - DNA, 55 bp, Artificial
  Synthetic oligonucleotide
ggagatctagggttaccagaaaatcggtcacgctcatatttcaaattcgtcaaga

SEQ ID NO: 272461 - DNA, 55 bp, Artificial
  Synthetic oligonucleotide
ggagcaccaagcgagtgttcaaatattctggggcctctaaagtttggtgacgaag

SEQ ID NO: 272462 - DNA, 55 bp, Artificial
  Synthetic oligonucleotide
ggagcacccgtgtgagtatgtgcttgttgacgttaacgaggatgaacaaacgaca

SEQ ID NO: 272463 - DNA, 55 bp, Artificial
  Synthetic oligonucleotide
ggagcagaagtgtatacaccctcacccacttgatcatatgacataacggtcacag

SEQ ID NO: 272464 - DNA, 55 bp, Artificial
  Synthetic oligonucleotide
ggagcatcttattcggtgcagtcgataaaagtaagtacgcagaagagctctgcac

SEQ ID NO: 272465 - DNA, 55 bp, Artificial
  Synthetic oligonucleotide
gggtcctgcggtaagtaggataaattgtctatgattattcccgatagtggtaggg

SEQ ID NO: 272466 - DNA, 55 bp, Artificial
  Synthetic oligonucleotide
ggcaccatgctatcaaatcctgcatacgctaattctcagtacactccatcgcaag

SEQ ID NO: 272467 - DNA, 55 bp, Artificial
  Synthetic oligonucleotide
ggcacctctgtttatctggtcgataaacgtatagatatgcttccaatgttactgg

SEQ ID NO: 272468 - DNA, 60 bp, Artificial
  Synthetic oligonucleotide
ataatcgataatgaaagttagaacgatcacgttgactctgaaatatagtcaatatctata

SEQ ID NO: 272469 - DNA, 55 bp, Artificial
  Synthetic oligonucleotide
ggcactagggaagaacaatcggaggcattagtcttggggtaactgtatttatgcc

SEQ ID NO: 272470 - DNA, 55 bp, Artificial
  Synthetic oligonucleotide
ggcactatcctaggcagttttgctgaaacgagtaataatgccgaaggaaggctct

SEQ ID NO: 272471 - DNA, 55 bp, Artificial
  Synthetic oligonucleotide
ggcactggcatacatgaatcgtggctaaatgaaaacctcacatcacagttattta

SEQ ID NO: 272472 - DNA, 55 bp, Artificial
  Synthetic oligonucleotide
ggcagagttcattaacgatactgttgagggcgtttaccatcatactatgagcttt

SEQ ID NO: 272473 - DNA, 55 bp, Artificial
  Synthetic oligonucleotide
ggcagcagttggagaggtacgttatatgtatgcccttattttgagcgtaggttga

SEQ ID NO: 272474 - DNA, 55 bp, Artificial
  Synthetic oligonucleotide
ggcagcatgcgtcgtttctaggtgctagccaggctgtgagaacgtaaaattagcc

SEQ ID NO: 272475 - DNA, 55 bp, Artificial
  Synthetic oligonucleotide
ggcagcgaagacgcaaatgggctaggcagaatggcattcaagttatggctactgg

SEQ ID NO: 272476 - DNA, 55 bp, Artificial
  Synthetic oligonucleotide
ggcaggagtaaggatgtgagaaatctagtaaccttcttcgggtgatacaatgcgt

SEQ ID NO: 272477 - DNA, 55 bp, Artificial
  Synthetic oligonucleotide
ggcaggcatcacttagtataaagtagtagtgaaagcagcacgtgccgccaacgta

SEQ ID NO: 272478 - DNA, 55 bp, Artificial
  Synthetic oligonucleotide
ggcaggggagggtgtacttggatcaagtatagtgagtgctatagtaatggcctga

SEQ ID NO: 272479 - DNA, 60 bp, Artificial
  Synthetic oligonucleotide
cagcgcatagggagcagtgtagctgatgagcctgggattcactggcgatggataaggcag

SEQ ID NO: 272480 - DNA, 60 bp, Artificial
  Synthetic oligonucleotide
gttcaaggtttggagcatactcatcgaagaggctccttagtcaaaagagcagtatgttat

SEQ ID NO: 272481 - DNA, 55 bp, Artificial
  Synthetic oligonucleotide
ggcagtagaccagcggacttcacaggtgcggtttgcaaaggtacgaacaacagac

SEQ ID NO: 272482 - DNA, 55 bp, Artificial
  Synthetic oligonucleotide
ggcagtcataatgatggactttcaacaagaggtagtatacactccgcaagttcac

SEQ ID NO: 272483 - DNA, 55 bp, Artificial
  Synthetic oligonucleotide
ggggtgccacattggatccactgatcgaccgaccgtgttgttgataacttaatct

SEQ ID NO: 272484 - DNA, 55 bp, Artificial
  Synthetic oligonucleotide
ggcataatacagaccattgcgagctatcatagggaccaactgttcaaccatgagc

SEQ ID NO: 272485 - DNA, 55 bp, Artificial
  Synthetic oligonucleotide
ggcataggcatacgcccacaaagtccgatgagagcatttatgcttccaggatcta

SEQ ID NO: 272486 - DNA, 55 bp, Artificial
  Synthetic oligonucleotide
ggcatatgactattggatagatactctaccagactactacaatagcgccgaaatc

SEQ ID NO: 272487 - DNA, 55 bp, Artificial
  Synthetic oligonucleotide
ggcatcacacgtactgctaccgatggtccctgggagtacttatttcctgtggagt

SEQ ID NO: 272488 - DNA, 55 bp, Artificial
  Synthetic oligonucleotide
ggcatgctttgatcatgaggagattggctcatcctccgcccaaggggcagattct

SEQ ID NO: 272489 - DNA, 55 bp, Artificial
  Synthetic oligonucleotide
ggggtgatatagaggtgtatttacgggtaataacatgtgagatgtcgcgggatgg

SEQ ID NO: 272490 - DNA, 55 bp, Artificial
  Synthetic oligonucleotide
ggccaaagtaccttcagggaacacaaattcgacagtttgtttgtcatggtcaaac

SEQ ID NO: 272491 - DNA, 60 bp, Artificial
  Synthetic oligonucleotide
cgggaatgcacctgttgtcgtgctacatggtgaagctaaagttgcagcggacaaggtggg

SEQ ID NO: 272492 - DNA, 55 bp, Artificial
  Synthetic oligonucleotide
ggggtgacactgtaccactggacctgaacctttgccgtctgcgctgttgccagtg

SEQ ID NO: 272493 - DNA, 55 bp, Artificial
  Synthetic oligonucleotide
ggatacacccgatcgatataccaccacctgtctttagtgccgctgtagaaccgag

SEQ ID NO: 272494 - DNA, 55 bp, Artificial
  Synthetic oligonucleotide
ggatacggagttggctcctgtgaatgaacgtactgggatggataagtactgggct

SEQ ID NO: 272495 - DNA, 53 bp, Artificial
  Synthetic oligonucleotide
ggatcacattgacgttttaaaaccgggaaacactggggatattttgagattta

SEQ ID NO: 272496 - DNA, 55 bp, Artificial
  Synthetic oligonucleotide
gggtagcttcacgttctgatgtcagtcctaatcttctacattcgtcgtaaggctt

SEQ ID NO: 272497 - DNA, 55 bp, Artificial
  Synthetic oligonucleotide
ggatccttaacgattcgcacgtacgctgtgacgtttagtcttcccttgttcaata

SEQ ID NO: 272498 - DNA, 55 bp, Artificial
  Synthetic oligonucleotide
ggatcgtagcttgagtacgagcatatgatacaatctcagcagcgttaggatcctc

SEQ ID NO: 272499 - DNA, 55 bp, Artificial
  Synthetic oligonucleotide
ggatctgactacgcttcaactgataattacgagctcacggcaacgtccaatgggc

SEQ ID NO: 272500 - DNA, 55 bp, Artificial
  Synthetic oligonucleotide
ggatggagtttaggagcatgcgcaggatccacatactacttcattattggagtgt

SEQ ID NO: 272501 - DNA, 55 bp, Artificial
  Synthetic oligonucleotide
ggatgtagggcaatatcgcaaacacctactccttgcaatttgcaggacctagccc

SEQ ID NO: 272502 - DNA, 56 bp, Artificial
  Synthetic oligonucleotide
ttaaaactctaggctcaaaaccctaggcagagacctgtcaccgccggccagttagc

SEQ ID NO: 272503 - DNA, 55 bp, Artificial
  Synthetic oligonucleotide
ggatgtcgtaacaaagcctggccttgccattagcaaatatagcgaacatgccact

SEQ ID NO: 272504 - DNA, 55 bp, Artificial
  Synthetic oligonucleotide
ggattcaataattgtcggatccattgaacatcttgaatagaactacgtctcgtgt

SEQ ID NO: 272505 - DNA, 55 bp, Artificial
  Synthetic oligonucleotide
ggatttataccaaaccttcgccagaactgtcgaatcttgtaacgttatcatctcc

SEQ ID NO: 272506 - DNA, 54 bp, Artificial
  Synthetic oligonucleotide
ggggttgtgtcgggccagtggaaaagaccgggctggactgggcaaacgatcaaa

SEQ ID NO: 272507 - DNA, 55 bp, Artificial
  Synthetic oligonucleotide
ggggttggacaaacgatttgctcgtcatacatgtttacgtcaatatctgtcacac

SEQ ID NO: 272508 - DNA, 55 bp, Artificial
  Synthetic oligonucleotide
ggcaagagaacgcaaatagagtcaaagaacctaatcagcactgtacagacattat

SEQ ID NO: 272509 - DNA, 55 bp, Artificial
  Synthetic oligonucleotide
ggggttcctccataccaccgtctgctgcaccctttagtatgcatgatagctctag

SEQ ID NO: 272510 - DNA, 55 bp, Artificial
  Synthetic oligonucleotide
ggcaagtcatgtagcatgtgcgctaacatcgtttatcgttttctgtgacgtggct

SEQ ID NO: 272511 - DNA, 50 bp, Artificial
  Synthetic oligonucleotide
ggggttagccgtagggagtgtcttaagttacttggtggttctatttacgg

SEQ ID NO: 272512 - DNA, 55 bp, Artificial
  Synthetic oligonucleotide
ggcaatgctgactctttacagatcattgtcccacaaagtcaagtcggtagaaaga

SEQ ID NO: 272513 - DNA, 55 bp, Artificial
  Synthetic oligonucleotide
actaactcagtaggggctaactttacggggacaatagcatgtcataaaacaccta

SEQ ID NO: 272514 - DNA, 55 bp, Artificial
  Synthetic oligonucleotide
ggcacaatggctcgtattcatgcaatattgcagttactaacttgttctttgcgac

SEQ ID NO: 272515 - DNA, 55 bp, Artificial
  Synthetic oligonucleotide
ggcacagggtatagaccgctgaggcaagtgccgtgcataatgatgtgagtgtatc

SEQ ID NO: 272516 - DNA, 55 bp, Artificial
  Synthetic oligonucleotide
gtaacacttctacggagcccgccggcataaacagggcaaagagcacggtagtgca

SEQ ID NO: 272517 - DNA, 55 bp, Artificial
  Synthetic oligonucleotide
gacctgtaacgtcaaatgatcacattcgttaaatagaatcagcacgcacgtttgg

SEQ ID NO: 272518 - DNA, 55 bp, Artificial
  Synthetic oligonucleotide
gacgaaagtattgcaagcatcttaagaggcgatccaatttggggcagtaattgca

SEQ ID NO: 272519 - DNA, 55 bp, Artificial
  Synthetic oligonucleotide
gacgaccacacttatctgattatgcgttctgccgaaaatcattccgagcttgtca

SEQ ID NO: 272520 - DNA, 55 bp, Artificial
  Synthetic oligonucleotide
gacgagaccgtaaaggtcccatcgtatcatcatgatcataacttccctctcgaga

SEQ ID NO: 272521 - DNA, 55 bp, Artificial
  Synthetic oligonucleotide
gacgcaaaagtggatgctccctgctgttgtccaaacagtcctcctgcaggtttgc

SEQ ID NO: 272522 - DNA, 55 bp, Artificial
  Synthetic oligonucleotide
gtaaacctacccatacatctcacgcccgtacaaccacctctacaccatgtgaccc

SEQ ID NO: 272523 - DNA, 55 bp, Artificial
  Synthetic oligonucleotide
gacgcctgaagagtttaacgttttgatctatgtaagtgcttgaccacgactgtta

SEQ ID NO: 272524 - DNA, 60 bp, Artificial
  Synthetic oligonucleotide
cacctactttcatcgtacaccataggttggaagtgctgcataatacattgcttaatacaa

SEQ ID NO: 272525 - DNA, 55 bp, Artificial
  Synthetic oligonucleotide
gacggacatatcgggaggctcgaaagtaacaaagggtccatattagaagttgtcc

SEQ ID NO: 272526 - DNA, 55 bp, Artificial
  Synthetic oligonucleotide
gacggtaccaatacatgctacgctctttgggatgtgttgtgttgttgcaccggca

SEQ ID NO: 272527 - DNA, 55 bp, Artificial
  Synthetic oligonucleotide
gacggtgtaatgcgaaaggtcattggtacggacgactggaaattggctagacaag

SEQ ID NO: 272528 - DNA, 55 bp, Artificial
  Synthetic oligonucleotide
gacgtctgtgagctcgtcaacgtggaatgtagttaggctgagggaagctgcctac

SEQ ID NO: 272529 - DNA, 55 bp, Artificial
  Synthetic oligonucleotide
gacgtcttaaaccactggactattggaccattgggacgttagagagtaatacgcc

SEQ ID NO: 272530 - DNA, 55 bp, Artificial
  Synthetic oligonucleotide
ggtttgggactactctaccagaattcgcgacacaagcgaatgagtgatctattgt

SEQ ID NO: 272531 - DNA, 55 bp, Artificial
  Synthetic oligonucleotide
gactacaatacgatctccggctttacagttttccttcatgtatcttcccgtcaac

SEQ ID NO: 272532 - DNA, 55 bp, Artificial
  Synthetic oligonucleotide
gactagactaggagttatgcagtatgagctgcagctccgcaactacaactagatt

SEQ ID NO: 272533 - DNA, 55 bp, Artificial
  Synthetic oligonucleotide
gactatcatgggcacatcttcaggtggcgttaatggtatcttcgaaaaggttatc

SEQ ID NO: 272534 - DNA, 55 bp, Artificial
  Synthetic oligonucleotide
gactcacaagtacgtacgtaatcttgctttatgaagagcctttacatgatcaagg

SEQ ID NO: 272535 - DNA, 60 bp, Artificial
  Synthetic oligonucleotide
atgcacggcacttgcctcagcggtctataccctgtgccatttacccataacgcccacgat

SEQ ID NO: 272536 - DNA, 55 bp, Artificial
  Synthetic oligonucleotide
gactcattgtgagtagatattaaaccttttgggatcgaatttctagatgggtcta

SEQ ID NO: 272537 - DNA, 55 bp, Artificial
  Synthetic oligonucleotide
gactcgaccgtgcttatatcagctgtcccttcattcgtgccactatgagcctgaa

SEQ ID NO: 272538 - DNA, 55 bp, Artificial
  Synthetic oligonucleotide
gactctctcgataacgtcgtgcgaccatagcacatcgagatgtgaatactcatcg

SEQ ID NO: 272539 - DNA, 55 bp, Artificial
  Synthetic oligonucleotide
gacatatgcggccagtccccattatcgtagttatgatagtcgtattaccaggatc

SEQ ID NO: 272540 - DNA, 55 bp, Artificial
  Synthetic oligonucleotide
gacatgagattttccgtcagtgaaagtaccgtttgcggcggtctgccataacggt

SEQ ID NO: 272541 - DNA, 55 bp, Artificial
  Synthetic oligonucleotide
gacattccatctaagacgaagcgtttcagtgttcatcgtggattgtaaagcgcac

SEQ ID NO: 272542 - DNA, 55 bp, Artificial
  Synthetic oligonucleotide
gaccaaagtaaaggaccttgttattctgattccacaaataagcagactgataacg

SEQ ID NO: 272543 - DNA, 55 bp, Artificial
  Synthetic oligonucleotide
gaccaagcgcggacttgacggtgggctgagtggtgggctaccaaggctgttaccc

SEQ ID NO: 272544 - DNA, 55 bp, Artificial
  Synthetic oligonucleotide
gaccaattcttttgcggcgtcagcatctctcttcggcggagactgtggctggcat

SEQ ID NO: 272545 - DNA, 55 bp, Artificial
  Synthetic oligonucleotide
gaccagctcatttgagtcagggatgctgacacttcactaatcgggtgccccagtt

SEQ ID NO: 272546 - DNA, 57 bp, Artificial
  Synthetic oligonucleotide
tggcaagccgaccagtccctcctttgcctagtgatatccctccgttgcctaaactac

SEQ ID NO: 272547 - DNA, 55 bp, Artificial
  Synthetic oligonucleotide
gaccagtactaccctctacgagttgtgattgccgcgatatcacagcacgctttgc

SEQ ID NO: 272548 - DNA, 55 bp, Artificial
  Synthetic oligonucleotide
gtaagattaaccgtatcgcacagcgataatatttatggaaccacctcacagaggc

SEQ ID NO: 272549 - DNA, 55 bp, Artificial
  Synthetic oligonucleotide
gacccctaccaatgacctcagtccgtttgaacagcttactgacaactgcgtcctc

SEQ ID NO: 272550 - DNA, 55 bp, Artificial
  Synthetic oligonucleotide
gaccctataacattgcttacaagcatacatttggcacgtgtaatccatctcaacc

SEQ ID NO: 272551 - DNA, 55 bp, Artificial
  Synthetic oligonucleotide
gtaagagtgcaaatgatgatcttggattcaaaacagcctcacgaggaactttggc

SEQ ID NO: 272552 - DNA, 55 bp, Artificial
  Synthetic oligonucleotide
gaccctatttataccttttccgaagtgcacatctcccgttaatccacgctaccac

SEQ ID NO: 272553 - DNA, 55 bp, Artificial
  Synthetic oligonucleotide
gtaacgtctaaaacaccaatcatactgatacatttggcgcacttctcgcataggt

SEQ ID NO: 272554 - DNA, 55 bp, Artificial
  Synthetic oligonucleotide
gaccctgatccaactacaaccgactctactgatacatctccacaggctaagaacg

SEQ ID NO: 272555 - DNA, 55 bp, Artificial
  Synthetic oligonucleotide
gtaaccgatgagatcttccgaattatatacacaaacgtctcgcacaatcccaggt

SEQ ID NO: 272556 - DNA, 55 bp, Artificial
  Synthetic oligonucleotide
gaccgcacaacgactatagaaacatgcaatgacataaaaccgtacattgagatac

SEQ ID NO: 272557 - DNA, 60 bp, Artificial
  Synthetic oligonucleotide
gcttctctgtcatattgtactgattgtcttatctcccgcgagtacttgatgaatgtgcta

SEQ ID NO: 272558 - DNA, 55 bp, Artificial
  Synthetic oligonucleotide
gaccgtcaagcgtgcttctaaggctttgattgaacgttactatccaaagttgact

SEQ ID NO: 272559 - DNA, 53 bp, Artificial
  Synthetic oligonucleotide
gaccgttccccaaaaggatacgctaactatatcgccaacttggaccgtttgag

SEQ ID NO: 272560 - DNA, 55 bp, Artificial
  Synthetic oligonucleotide
gacctagatgacacattcgatgtccacgcaagcctaattgatgtagttcagccgt

SEQ ID NO: 272561 - DNA, 54 bp, Artificial
  Synthetic oligonucleotide
gacctcactaaaactccgcggtatgatgcgtttgcgggtttagggtaaggcaac

SEQ ID NO: 272562 - DNA, 54 bp, Artificial
  Synthetic oligonucleotide
gtaaccaataagtagtccagctggacccgcatgaaccaacgcggtaccgttacc

SEQ ID NO: 272563 - DNA, 55 bp, Artificial
  Synthetic oligonucleotide
gacctcgtgatcaacagggaataatgatgcgttaatttgtagaacgttctcatag

SEQ ID NO: 272564 - DNA, 55 bp, Artificial
  Synthetic oligonucleotide
ggttgccaacacgaggaacaggtcgcatgattctcagaaagtgatggatttcttg

SEQ ID NO: 272565 - DNA, 55 bp, Artificial
  Synthetic oligonucleotide
gagcatactcatcgaagaggctccttagtcaaaagagcagtatgttatgacactg

SEQ ID NO: 272566 - DNA, 55 bp, Artificial
  Synthetic oligonucleotide
gagccaagacaatgcattctaaggattcgaagaaagtagatggatgttgtgtctt

SEQ ID NO: 272567 - DNA, 55 bp, Artificial
  Synthetic oligonucleotide
gagccatctgtgatgcactacaacaatacacgccatgcacgatcacaaatatggc

SEQ ID NO: 272568 - DNA, 47 bp, Artificial
  Synthetic oligonucleotide
atatactcctagcggggtcccgggcccccccggggggcccgggactc

SEQ ID NO: 272569 - DNA, 52 bp, Artificial
  Synthetic oligonucleotide
ggttgaccttaacaacagaaaccaccgaaaccgttccaactttcatatctcc

SEQ ID NO: 272570 - DNA, 55 bp, Artificial
  Synthetic oligonucleotide
gagccctttgggtattcctgaccctctctagaatatgtgatcaactcaatccagt

SEQ ID NO: 272571 - DNA, 55 bp, Artificial
  Synthetic oligonucleotide
gagcctgagaattgactggctgagagttttgtctctgtaagctccctggtcctgg

SEQ ID NO: 272572 - DNA, 55 bp, Artificial
  Synthetic oligonucleotide
gagcgatgctcgtaaattttatgggctcattcatgcccgttacattattaccgtg

SEQ ID NO: 272573 - DNA, 55 bp, Artificial
  Synthetic oligonucleotide
gagcggtgacaactttgggagccgacgattcagttagagtcgaactctgctccgg

SEQ ID NO: 272574 - DNA, 55 bp, Artificial
  Synthetic oligonucleotide
gagcgtcatcaaccgtgatatctgcactagatacgctaatggagttgacctgctt

SEQ ID NO: 272575 - DNA, 55 bp, Artificial
  Synthetic oligonucleotide
gagcgtgaaggacgcatgtcagtggggtagtagtgccaatccacagggcaattgg

SEQ ID NO: 272576 - DNA, 55 bp, Artificial
  Synthetic oligonucleotide
gagctcaccaagactagctttctccgtccgtttcttagtgactcgcgcttgtaag

SEQ ID NO: 272577 - DNA, 55 bp, Artificial
  Synthetic oligonucleotide
gagctcccacttatgtttgtagtgcaacttgtatttgaatttagccagccttgtc

SEQ ID NO: 272578 - DNA, 55 bp, Artificial
  Synthetic oligonucleotide
ggttgacctgctgtggctagttcttgtattaacggcgaagaagcttagacacacg

SEQ ID NO: 272579 - DNA, 53 bp, Artificial
  Synthetic oligonucleotide
ggtttcgtatagaaaacgttgaattccaagattataaaccagattcaactaac

SEQ ID NO: 272580 - DNA, 55 bp, Artificial
  Synthetic oligonucleotide
gagctctctcgtcctaccaaatccaatcgtcaatgataacttctcctagatggtg

SEQ ID NO: 272581 - DNA, 55 bp, Artificial
  Synthetic oligonucleotide
gagctctgatatctgagacgtagacacctaattcgaccaggttaactctttcgtc

SEQ ID NO: 272582 - DNA, 55 bp, Artificial
  Synthetic oligonucleotide
gagcttcctgccgaggagttattatacgtggtaaaggaattagcagcattgtatc

SEQ ID NO: 272583 - DNA, 55 bp, Artificial
  Synthetic oligonucleotide
gagctttagaatccgggtaagaggcaggatatgagacccgttatgaggaggacag

SEQ ID NO: 272584 - DNA, 55 bp, Artificial
  Synthetic oligonucleotide
gaggaaccatcaattctgctctaggcgttagattaccgttgctcactaccgaatg

SEQ ID NO: 272585 - DNA, 55 bp, Artificial
  Synthetic oligonucleotide
gaggaatactgccctcactttactaagcttcgcattcccacttcgcacggtaaac

SEQ ID NO: 272586 - DNA, 55 bp, Artificial
  Synthetic oligonucleotide
gaggaattaggagttcaattcgataatgcaaaggtcactaacaagcagggacgcg

SEQ ID NO: 272587 - DNA, 55 bp, Artificial
  Synthetic oligonucleotide
gactgaaaggcgaaaagcatacactgcacacggtgaacaaatgttgattagtgag

SEQ ID NO: 272588 - DNA, 55 bp, Artificial
  Synthetic oligonucleotide
gactgcgagcttatataccctactctggcgatgttgctctttgcaagtgaagtgt

SEQ ID NO: 272589 - DNA, 55 bp, Artificial
  Synthetic oligonucleotide
gactgctgtctgtttcaaacgtactacagtatgggctaaagcctggctacccaat

SEQ ID NO: 272590 - DNA, 60 bp, Artificial
  Synthetic oligonucleotide
aatgcaagatagtgtaattggtaacatataaggctcatgtccttttgatatacgttcaac

SEQ ID NO: 272591 - DNA, 60 bp, Artificial
  Synthetic oligonucleotide
atagcttaatagtaaagtcctattttgtcataatagaggatgtcagtgcaaatctgattg

SEQ ID NO: 272592 - DNA, 55 bp, Artificial
  Synthetic oligonucleotide
gactggtctaacaaggatctacaggactggctagaccactacaagatcaagtatg

SEQ ID NO: 272593 - DNA, 55 bp, Artificial
  Synthetic oligonucleotide
gacttacagaagcaacgcacttggagaagaaataccagaccacttcgagaggaac

SEQ ID NO: 272594 - DNA, 55 bp, Artificial
  Synthetic oligonucleotide
gacttgttgtacacctttctgctcttcgggactgagatcggatagcaatggagca

SEQ ID NO: 272595 - DNA, 54 bp, Artificial
  Synthetic oligonucleotide
ggtttcgccttggtttacgttttctgtgttagcgtctatcaaatctttgcgtag

SEQ ID NO: 272596 - DNA, 55 bp, Artificial
  Synthetic oligonucleotide
gagaaacaagcgtggaaccagcaacaggttcaatcgtgttgacgttaactgggtg

SEQ ID NO: 272597 - DNA, 55 bp, Artificial
  Synthetic oligonucleotide
gagaaacgtcagaactacctctgttcaaattaaagccgcgaggtgggccaacctg

SEQ ID NO: 272598 - DNA, 55 bp, Artificial
  Synthetic oligonucleotide
gagaagcccattaagttgattctctgcttcggaacgcttgtttgcatccgtagcc

SEQ ID NO: 272599 - DNA, 55 bp, Artificial
  Synthetic oligonucleotide
gagaagcgcgggaacaacgttcgagcagcgattggacaggagtaagaaacgcacg

SEQ ID NO: 272600 - DNA, 54 bp, Artificial
  Synthetic oligonucleotide
gagagaaaactggtaacgtttggcaaaacagttagtgcttggtaacgtactaga

SEQ ID NO: 272601 - DNA, 55 bp, Artificial
  Synthetic oligonucleotide
gagagcgattcgtagcgaaactctttcttagaggggactcagtgattatagtggt

SEQ ID NO: 272602 - DNA, 60 bp, Artificial
  Synthetic oligonucleotide
cggatgatgtaggatttgaacccacgtagccaataaagactaatgatagctcaaatatca

SEQ ID NO: 272603 - DNA, 55 bp, Artificial
  Synthetic oligonucleotide
gagaggaagattgttcgacaccataggaggagtattcagaaacagcattggattg

SEQ ID NO: 272604 - DNA, 55 bp, Artificial
  Synthetic oligonucleotide
gagagtacccacccggagaaacttagtactcccaggcaccatcagtagcagtacg

SEQ ID NO: 272605 - DNA, 55 bp, Artificial
  Synthetic oligonucleotide
gagagtactcgagatgaataagctccactgaatcaggaatgtctgggtcgctctc

SEQ ID NO: 272606 - DNA, 55 bp, Artificial
  Synthetic oligonucleotide
ggttgttagcaatatgttattcagtcgagatactcgagattcgtttagatcttgc

SEQ ID NO: 272607 - DNA, 55 bp, Artificial
  Synthetic oligonucleotide
ggttgtccctccatacagagaaaccaaaccgttatggcagaccgccgtatcattg

SEQ ID NO: 272608 - DNA, 55 bp, Artificial
  Synthetic oligonucleotide
gagcaaaacgtatcacaggaggagcagcgaataccgaagcaagtgctctaactgg

SEQ ID NO: 272609 - DNA, 55 bp, Artificial
  Synthetic oligonucleotide
gagcaaacgtcagaaagttcaactcgctgtgagtgcgttaaaacgattgtacccc

SEQ ID NO: 272610 - DNA, 55 bp, Artificial
  Synthetic oligonucleotide
gagcaatctggcgggatgtaatgatttaagggaatctagtttcaagatttcacat

SEQ ID NO: 272611 - DNA, 55 bp, Artificial
  Synthetic oligonucleotide
ggttgggatcggccaattgttttgacgaggttatatattgtagtagatcatccac

SEQ ID NO: 272612 - DNA, 55 bp, Artificial
  Synthetic oligonucleotide
ggttgggagcataagcactgaattgaactaacttatcgccaaacaagcatcgtat

SEQ ID NO: 272613 - DNA, 60 bp, Artificial
  Synthetic oligonucleotide
tggaatctaatcatggcttattagacgttgactatgtggctaacctgctcgaaaatttat

SEQ ID NO: 272614 - DNA, 55 bp, Artificial
  Synthetic oligonucleotide
cttgtctgcttaccagtaattaatcgcaaggacctgaaaagcattcgtttcctag

SEQ ID NO: 272615 - DNA, 55 bp, Artificial
  Synthetic oligonucleotide
ctttacgtttacgggagtatactgcaatgcgatcaagagcagttacgctgtcgag

SEQ ID NO: 272616 - DNA, 55 bp, Artificial
  Synthetic oligonucleotide
ctttagagttggcagtatcttcccattctggtctaatgtcaccacggaaaacatg

SEQ ID NO: 272617 - DNA, 55 bp, Artificial
  Synthetic oligonucleotide
ctttagtcctagcagctgggcttatagctaatgtaacgatgtcagatgtcaaacc

SEQ ID NO: 272618 - DNA, 55 bp, Artificial
  Synthetic oligonucleotide
ctttatgtttacgacaagttgaaacggatctgctatcaggttcttcgccgatatg

SEQ ID NO: 272619 - DNA, 55 bp, Artificial
  Synthetic oligonucleotide
gtacacagttaaagccaaattgtcgtcgtctctgttttggaactggtctagtaac

SEQ ID NO: 272620 - DNA, 55 bp, Artificial
  Synthetic oligonucleotide
ctttcgggtttcatttcgtcctcaacaactaagtttctctcttgcaacgcttgtg

SEQ ID NO: 272621 - DNA, 55 bp, Artificial
  Synthetic oligonucleotide
cttttagcaccgtcgaccgcccgtatctccgtctaagaccgccggcgcatgcgtt

SEQ ID NO: 272622 - DNA, 55 bp, Artificial
  Synthetic oligonucleotide
cttttgccacgataaacggtctatagctactaggtctgaaaggtccaattaggtg

SEQ ID NO: 272623 - DNA, 55 bp, Artificial
  Synthetic oligonucleotide
cttttgcgggagatgacctcttagagaattacttcgggaacactgttgctagtca

SEQ ID NO: 272624 - DNA, 58 bp, Artificial
  Synthetic oligonucleotide
cccgaaagcaaacgatctaactatgataagatggataaacgatcgaacaggttgatgt

SEQ ID NO: 272625 - DNA, 55 bp, Artificial
  Synthetic oligonucleotide
cttttggaacccgtccatccggcgctcaaggtccgaaaatgcgtctatgctggcc

SEQ ID NO: 272626 - DNA, 55 bp, Artificial
  Synthetic oligonucleotide
gaaaactttcctgcctagtgtatttcgtcagggcgaaccttcggataggcaccga

SEQ ID NO: 272627 - DNA, 55 bp, Artificial
  Synthetic oligonucleotide
gtacaacaaactgacaatactccactggaggaacaccgtgaggttcagtcacctg

SEQ ID NO: 272628 - DNA, 55 bp, Artificial
  Synthetic oligonucleotide
gaaagataaatcacgtgagtaatatatcggtccattgcctaggttccctcccttc

SEQ ID NO: 272629 - DNA, 55 bp, Artificial
  Synthetic oligonucleotide
gaaagtgctctttacctacgttgtcaaaggatgatcccagctccacttgacgctt

SEQ ID NO: 272630 - DNA, 55 bp, Artificial
  Synthetic oligonucleotide
gaaatcggacccgtgaaaacgttactaatgtctgttctctgccattcaaatgttt

SEQ ID NO: 272631 - DNA, 55 bp, Artificial
  Synthetic oligonucleotide
gaaatctaatgccagtctcaggatctaaagttgtgctttgccaaaacatcgacga

SEQ ID NO: 272632 - DNA, 55 bp, Artificial
  Synthetic oligonucleotide
gaacacgatattaccttgtcatcgcccacccacgacgcggatacaatgctttgtg

SEQ ID NO: 272633 - DNA, 55 bp, Artificial
  Synthetic oligonucleotide
gaacactatgggagcctttcgatgggatcaatgcaaatcctgttataccgcgagg

SEQ ID NO: 272634 - DNA, 55 bp, Artificial
  Synthetic oligonucleotide
gaacagtgctaccggtgagacaacaaccaatactttagctgctgaaacgactacc

SEQ ID NO: 272635 - DNA, 51 bp, Artificial
  Synthetic oligonucleotide
tattaactccccggatatctagatatccggggggtctgggttgggggggat

SEQ ID NO: 272636 - DNA, 55 bp, Artificial
  Synthetic oligonucleotide
gaacatgtcccttttagcgcttctcatcgattacgaaatgtggaactgccataag

SEQ ID NO: 272637 - DNA, 55 bp, Artificial
  Synthetic oligonucleotide
gaacccaataacgaggcgtacctcagagatcagggcctagcctaaatgctccttc

SEQ ID NO: 272638 - DNA, 55 bp, Artificial
  Synthetic oligonucleotide
cttctagtccagtcatcaatgcaaggtagtgctgtgattatagtacccgttttcc

SEQ ID NO: 272639 - DNA, 55 bp, Artificial
  Synthetic oligonucleotide
cttctcgagcaagaaaattatcgataacccaatgttgagggttccaccttaatgc

SEQ ID NO: 272640 - DNA, 55 bp, Artificial
  Synthetic oligonucleotide
cttctctatgagtttcaaatgccaaacggacacggattaggtccaatgggtaagt

SEQ ID NO: 272641 - DNA, 55 bp, Artificial
  Synthetic oligonucleotide
cttctgcaggatagttagagaaagtttcccctcaagcgtgttcagcaagtcgtac

SEQ ID NO: 272642 - DNA, 55 bp, Artificial
  Synthetic oligonucleotide
cttcttaagtatggcaagctcgcacataggatcatgcggcttcactaccgtttcg

SEQ ID NO: 272643 - DNA, 55 bp, Artificial
  Synthetic oligonucleotide
gtacagttggtcgaccctatcgaatgggttggttgcgatcagaactatacccgag

SEQ ID NO: 272644 - DNA, 54 bp, Artificial
  Synthetic oligonucleotide
cttgaacctagtttcacgctactacttgtaattcgtctttacaactaagggatc

SEQ ID NO: 272645 - DNA, 55 bp, Artificial
  Synthetic oligonucleotide
cttgaattaatctcgggtgcgcaactctaatcaacacaataggaaggaagcctca

SEQ ID NO: 272646 - DNA, 58 bp, Artificial
  Synthetic oligonucleotide
cgccctagaatacgccaagcgaggagccaacctagtcatcaacgatctaggtgggacc

SEQ ID NO: 272647 - DNA, 55 bp, Artificial
  Synthetic oligonucleotide
cttgacgttgggtagagtcattaattcactcgcagataagagtccacatgtaccc

SEQ ID NO: 272648 - DNA, 55 bp, Artificial
  Synthetic oligonucleotide
gtacaccggcacgctcatgtattgagcttcgcgtgaactgtaacccaaccccaac

SEQ ID NO: 272649 - DNA, 55 bp, Artificial
  Synthetic oligonucleotide
cttgagatcatccctctgtaatccttggggcgtggttctggatgagatacgaagc

SEQ ID NO: 272650 - DNA, 55 bp, Artificial
  Synthetic oligonucleotide
cttgagttctatcacttccgtctcgtcagctagtgcaagtgccaccgcttccgac

SEQ ID NO: 272651 - DNA, 55 bp, Artificial
  Synthetic oligonucleotide
cttgatatagggttaattgagtagagttggttgcgggagacctctcactcgatgg

SEQ ID NO: 272652 - DNA, 55 bp, Artificial
  Synthetic oligonucleotide
cttgctcaatctcgaaattcgtgtcatcttccagtcgcttcggtaagtcgaacgc

SEQ ID NO: 272653 - DNA, 55 bp, Artificial
  Synthetic oligonucleotide
cttggacttggttcattttctgcatcggttggtttccatcctggatattagtcgc

SEQ ID NO: 272654 - DNA, 55 bp, Artificial
  Synthetic oligonucleotide
cttggcggggaatgggctgctttcaacgaggtcacaagtgtgccacgattggtgg

SEQ ID NO: 272655 - DNA, 55 bp, Artificial
  Synthetic oligonucleotide
gtacaccaggcattataactgagagataggtgtactcaccatagtcgtcagtaac

SEQ ID NO: 272656 - DNA, 55 bp, Artificial
  Synthetic oligonucleotide
cttgggcaccacagaattcggtgaggccatttcgcagtacacaccggggttcagc

SEQ ID NO: 272657 - DNA, 60 bp, Artificial
  Synthetic oligonucleotide
atgacccaggtctagaagcagcgcctcaatcaacccaagcagattttccaaccgctgcta

SEQ ID NO: 272658 - DNA, 55 bp, Artificial
  Synthetic oligonucleotide
cttggggtaccaacctcggtaagagggcctgaagcggctacatccgacgtgtgga

SEQ ID NO: 272659 - DNA, 55 bp, Artificial
  Synthetic oligonucleotide
cttgggtttgttatggctaatcctgcgtaaacatgccacttgttcgaatagattc

SEQ ID NO: 272660 - DNA, 55 bp, Artificial
  Synthetic oligonucleotide
cttgtagtggtggtctagctgataagttcggccgtagacctgttctacttatcgg

SEQ ID NO: 272661 - DNA, 55 bp, Artificial
  Synthetic oligonucleotide
cttgtccgagatacttctgccatggtatgcagttattgccatgcggtctgagtga

SEQ ID NO: 272662 - DNA, 55 bp, Artificial
  Synthetic oligonucleotide
cttgtcgtcgtacaccaggacctcgcacagcgatctgatatttgacggggtcaac

SEQ ID NO: 272663 - DNA, 55 bp, Artificial
  Synthetic oligonucleotide
gtaaggaactctgtggatttacgttgactcttgataccatcatggcgcattcgcg

SEQ ID NO: 272664 - DNA, 55 bp, Artificial
  Synthetic oligonucleotide
gaatctgcaatcgcagttggtcgatggaacaaagcaactatccaagtcgcaactg

SEQ ID NO: 272665 - DNA, 55 bp, Artificial
  Synthetic oligonucleotide
gaatcttgtgtcatattcgaataaatagatgtgtttggtagggatctcggagtcg

SEQ ID NO: 272666 - DNA, 55 bp, Artificial
  Synthetic oligonucleotide
gaatgcagggtcggagtcacacagaaacaatcgtagaccgtggggaaggagtggg

SEQ ID NO: 272667 - DNA, 55 bp, Artificial
  Synthetic oligonucleotide
gaatgtagaatgcacgtaaggattcaaatggtttaggatggggtaaccaaggacg

SEQ ID NO: 272668 - DNA, 59 bp, Artificial
  Synthetic oligonucleotide
cccgcccgctacgctccgctacgctccgctacgctccgctacgctccgctacgctccgc

SEQ ID NO: 272669 - DNA, 55 bp, Artificial
  Synthetic oligonucleotide
gaatgtagagaagtttaaagtcatggggacgttaatcatccaccccacaagaacc

SEQ ID NO: 272670 - DNA, 55 bp, Artificial
  Synthetic oligonucleotide
gaattacaagagaagctcaacttgcaagcgaaactccagtctactttcagtaaca

SEQ ID NO: 272671 - DNA, 55 bp, Artificial
  Synthetic oligonucleotide
gtaagcgcgatccattcgaagcgtacagtacatcaaccacgatccatacagaagt

SEQ ID NO: 272672 - DNA, 55 bp, Artificial
  Synthetic oligonucleotide
gaattcgggtatcaacatggcattgaatcattccgattcctctgcctctacgatg

SEQ ID NO: 272673 - DNA, 55 bp, Artificial
  Synthetic oligonucleotide
gaattgtgcattggatgacttatttatgtagggtgctatgtcccagctgacggag

SEQ ID NO: 272674 - DNA, 55 bp, Artificial
  Synthetic oligonucleotide
gaatttactttattcgagataaaatagtttacgcgtcatcttgaagcagcacgcg

SEQ ID NO: 272675 - DNA, 55 bp, Artificial
  Synthetic oligonucleotide
gacaaaccgtggtacaaggccatgctagaataatgcgtttgaagtgagacgctcc

SEQ ID NO: 272676 - DNA, 55 bp, Artificial
  Synthetic oligonucleotide
gacaaagctagtacaattactcatgagctatctagaacattggttcgtaacatgg

SEQ ID NO: 272677 - DNA, 55 bp, Artificial
  Synthetic oligonucleotide
gacaagggacgtgtgtgcagaatgaagtagtaaaggaacgccctcctgcgttgta

SEQ ID NO: 272678 - DNA, 55 bp, Artificial
  Synthetic oligonucleotide
gacaataattgagtgcacaagagacgacaatcaaactcttcctgtcgctagctta

SEQ ID NO: 272679 - DNA, 60 bp, Artificial
  Synthetic oligonucleotide
tgtgtatgaaggatagttaaatggacaggggaagatggattgatgatcgagtggtttatg

SEQ ID NO: 272680 - DNA, 55 bp, Artificial
  Synthetic oligonucleotide
gacacatattagcaaggattacacatcagaaggtacgtggtccagttcagtgacc

SEQ ID NO: 272681 - DNA, 55 bp, Artificial
  Synthetic oligonucleotide
gacaccctttggaatgtcaaccattgcttgacggacagcatgatgtggttcttgt

SEQ ID NO: 272682 - DNA, 55 bp, Artificial
  Synthetic oligonucleotide
gacactctacaatgacaaaacacacagagccataacaactcctacaggacgtgga

SEQ ID NO: 272683 - DNA, 55 bp, Artificial
  Synthetic oligonucleotide
gacagcacgtatgtaggcgaaaactagggtgcaatgtatatgacgttcccaatag

SEQ ID NO: 272684 - DNA, 55 bp, Artificial
  Synthetic oligonucleotide
gacagcgtgaaatagctcagtgtgaaccccatgaactgggagtgcgctgaaggca

SEQ ID NO: 272685 - DNA, 55 bp, Artificial
  Synthetic oligonucleotide
gacaggatagctactttgtatgcaaataggtgattagtttgctctgtggaggctc

SEQ ID NO: 272686 - DNA, 55 bp, Artificial
  Synthetic oligonucleotide
gacagtgtatggtgaattgaccactcatcgtagtggtgaggtaatgcggtaccac

SEQ ID NO: 272687 - DNA, 55 bp, Artificial
  Synthetic oligonucleotide
gacataacggaacgacccattatagtgcggtacgcagaaggtgccacgcgggaag

SEQ ID NO: 272688 - DNA, 55 bp, Artificial
  Synthetic oligonucleotide
gaacctagtgactggtgcgtttgctagaggtactgtgggttacataacaatgccc

SEQ ID NO: 272689 - DNA, 55 bp, Artificial
  Synthetic oligonucleotide
gaacctttaccaatctcgtatgcaaatctctccaagttaggtctcgtatcaccag

SEQ ID NO: 272690 - DNA, 54 bp, Artificial
  Synthetic oligonucleotide
atagcccctctccgaggggctataagtccactcttatgcccccctaggggggca

SEQ ID NO: 272691 - DNA, 55 bp, Artificial
  Synthetic oligonucleotide
gaacgaaaatccaagaagtctcgcagtataactagctcatcacgaccccatagag

SEQ ID NO: 272692 - DNA, 55 bp, Artificial
  Synthetic oligonucleotide
gaactaagggtttacgacactttgagtccagaaccaattgatcacttactaatgg

SEQ ID NO: 272693 - DNA, 55 bp, Artificial
  Synthetic oligonucleotide
gaactacacgggtatcgaatccgttttgatactctagttttcattcctcaatgtc

SEQ ID NO: 272694 - DNA, 55 bp, Artificial
  Synthetic oligonucleotide
gaactacgggacactacgaacacaagttatataatgctgcatcgagccttctcga

SEQ ID NO: 272695 - DNA, 55 bp, Artificial
  Synthetic oligonucleotide
gaactcgacggatctggaccgtcagatcactaaagtaacataccaattggagtcc

SEQ ID NO: 272696 - DNA, 55 bp, Artificial
  Synthetic oligonucleotide
gaactgtatgtgtgcgagtaaatgtgtgagtctctgagaatcctacgtatgaggg

SEQ ID NO: 272697 - DNA, 55 bp, Artificial
  Synthetic oligonucleotide
gaagcactaccactcgaagcaagatgctgttagatttgttggaagatggtggttc

SEQ ID NO: 272698 - DNA, 55 bp, Artificial
  Synthetic oligonucleotide
gaagcattccagtgtagtgtttaaggtacccgaagatcgttcgtattattagtgg

SEQ ID NO: 272699 - DNA, 55 bp, Artificial
  Synthetic oligonucleotide
gaagcattgcctcgataggggcctccatgctgtcatgttgaaatatggtggttcg

SEQ ID NO: 272700 - DNA, 55 bp, Artificial
  Synthetic oligonucleotide
gaagcctactttgactagaactaacgatgttaaagtagatccaaccagaaatccg

SEQ ID NO: 272701 - DNA, 59 bp, Artificial
  Synthetic oligonucleotide
aatgattcttatcaatagaagcaacattccatacaatattaaatatggtaaaaggacaa

SEQ ID NO: 272702 - DNA, 60 bp, Artificial
  Synthetic oligonucleotide
tattatgtattatgcactaccgtgctctttgccctgtttatgccggcgggctccgtagaa

SEQ ID NO: 272703 - DNA, 52 bp, Artificial
  Synthetic oligonucleotide
gaagccttagtattaatgagccaccgggtttgtctctcgtaaggaaaagggt

SEQ ID NO: 272704 - DNA, 55 bp, Artificial
  Synthetic oligonucleotide
gaaggtgaaaccaatgccttgatccctctggggcgggaaagtaaatctcgaggcc

SEQ ID NO: 272705 - DNA, 55 bp, Artificial
  Synthetic oligonucleotide
gaagtaatggggtggccgaaaggactaatctgctcttacttaacgactgccgaac

SEQ ID NO: 272706 - DNA, 55 bp, Artificial
  Synthetic oligonucleotide
gaagtactagtaatattccctctcggatcataaaagtgaaatatcgtgcttcacg

SEQ ID NO: 272707 - DNA, 55 bp, Artificial
  Synthetic oligonucleotide
gaagtcgattggtacctgaatagtcctttccgattgtccattagtctgtggatgg

SEQ ID NO: 272708 - DNA, 55 bp, Artificial
  Synthetic oligonucleotide
gaatagggtcaattggcgatttatacctcattagcgagtgaggtcgagttagagc

SEQ ID NO: 272709 - DNA, 55 bp, Artificial
  Synthetic oligonucleotide
gaatatcaggatgttctggggtattggggaagtatattctgatatgtaactaagg

SEQ ID NO: 272710 - DNA, 55 bp, Artificial
  Synthetic oligonucleotide
gaatatcatcgtaccatgtaatatgagtgacccaatcttttgagccaacgtcact

SEQ ID NO: 272711 - DNA, 55 bp, Artificial
  Synthetic oligonucleotide
gaatattcaagatcacagctccaccttagtttcgaggttgctctcaatggtctag

SEQ ID NO: 272712 - DNA, 55 bp, Artificial
  Synthetic oligonucleotide
gtaaggtcgacatggagtctacaaatcgggacaagggttccggtgtgtagctata

SEQ ID NO: 272713 - DNA, 58 bp, Artificial
  Synthetic oligonucleotide
tattcttgtcttgttcacaagggttgctatttggatcaaccaactcacacgccctttc

SEQ ID NO: 272714 - DNA, 55 bp, Artificial
  Synthetic oligonucleotide
gaatcgccactgaatagattctattttcgtgattgctatgaggaggacccaatat

SEQ ID NO: 272715 - DNA, 55 bp, Artificial
  Synthetic oligonucleotide
ggtgatttaacgctacactaactgcaagtatatgttaaccttccccgagactttg

SEQ ID NO: 272716 - DNA, 55 bp, Artificial
  Synthetic oligonucleotide
gcatcaaatagattagttaccgttgatgcatcattaataccgacgcatgctaacg

SEQ ID NO: 272717 - DNA, 55 bp, Artificial
  Synthetic oligonucleotide
ggtgatactatgtgcgagaaaactggcgtacgagtacttcgatttatggtgtcga

SEQ ID NO: 272718 - DNA, 55 bp, Artificial
  Synthetic oligonucleotide
gcatctcatgtcggttcaattccggctattcctaaactctcttagcttaatggtt

SEQ ID NO: 272719 - DNA, 55 bp, Artificial
  Synthetic oligonucleotide
ggtgactccgccatatggtatcgacatatacactaatgtaccaacttttgaccga

SEQ ID NO: 272720 - DNA, 55 bp, Artificial
  Synthetic oligonucleotide
gcatgaatgtctacgaggacggttgttctaataagaccatagcaaacgccaccca

SEQ ID NO: 272721 - DNA, 55 bp, Artificial
  Synthetic oligonucleotide
gcatgcccataggttccctcctgtgcacagaaaggtatagtttgttaaacttcca

SEQ ID NO: 272722 - DNA, 55 bp, Artificial
  Synthetic oligonucleotide
gcatggaactctaccatctcgtaagaactcgcgccatgtccgaggtttatcgcaa

SEQ ID NO: 272723 - DNA, 54 bp, Artificial
  Synthetic oligonucleotide
ggtgactactcaagtggtaccaaccacaccttaccaacttacggttacgccaga

SEQ ID NO: 272724 - DNA, 54 bp, Artificial
  Synthetic oligonucleotide
atagatttggtgatgctttattagtattaggtttaagttatttagtactagtta

SEQ ID NO: 272725 - DNA, 55 bp, Artificial
  Synthetic oligonucleotide
gcatgtatcgagccttagccacacggctaacaccttcttcccgcgcggcagacca

SEQ ID NO: 272726 - DNA, 55 bp, Artificial
  Synthetic oligonucleotide
gcatgttaagatccatactagttacccggttacatatctaagttatcgagccgtt

SEQ ID NO: 272727 - DNA, 55 bp, Artificial
  Synthetic oligonucleotide
gcattctacaaaacaagttaacaatgaagcccctttagtgcaatggttagcatgt

SEQ ID NO: 272728 - DNA, 55 bp, Artificial
  Synthetic oligonucleotide
gcattctaccagtaccggtggtgtgtcttctcttagccttggaaccccagttgta

SEQ ID NO: 272729 - DNA, 55 bp, Artificial
  Synthetic oligonucleotide
gcattctggtacttttgtactattatgcacactgtcgtgtgggaaaataccaacg

SEQ ID NO: 272730 - DNA, 55 bp, Artificial
  Synthetic oligonucleotide
gcatttacctaagcctgcgaggctaagagacaatgtataattcaaggtacggttc

SEQ ID NO: 272731 - DNA, 55 bp, Artificial
  Synthetic oligonucleotide
gcatttcaccagagcggaaataagccaccggagatctgctatttccgtcgcagca

SEQ ID NO: 272732 - DNA, 55 bp, Artificial
  Synthetic oligonucleotide
gccaaacgtatagttccacatcgcaccatgtaaacccaaaaggtgtatcaggggt

SEQ ID NO: 272733 - DNA, 55 bp, Artificial
  Synthetic oligonucleotide
gccaaatgccgaggataatcgctcaagtccagaaggttgaggacgagcatgacca

SEQ ID NO: 272734 - DNA, 55 bp, Artificial
  Synthetic oligonucleotide
gccaaccaaacaactgcgtgaatccatagaattcttcgaaagtccctacgagggg

SEQ ID NO: 272735 - DNA, 60 bp, Artificial
  Synthetic oligonucleotide
atagattagataagggatataacaccaccatctcaccaaggggagaggatgtatgaattg

SEQ ID NO: 272736 - DNA, 55 bp, Artificial
  Synthetic oligonucleotide
gccaaccttatcccaactgtaactacgtcgcggaagtctgattcggctagcaccg

SEQ ID NO: 272737 - DNA, 55 bp, Artificial
  Synthetic oligonucleotide
ggtgaatcccatgactaattcctctcagtggacatctagtggccctgctatccct

SEQ ID NO: 272738 - DNA, 55 bp, Artificial
  Synthetic oligonucleotide
gccaagtctaataccacaatggccatattgatgagcccgatacatagcgtgatag

SEQ ID NO: 272739 - DNA, 55 bp, Artificial
  Synthetic oligonucleotide
gcactgcgctattaacaccgtcttgaaagaacgagaaaatcgggaatgaggcgga

SEQ ID NO: 272740 - DNA, 55 bp, Artificial
  Synthetic oligonucleotide
ggtgctatcatcggggaatggtcaggtgctataactgattgtgccacatggttga

SEQ ID NO: 272741 - DNA, 55 bp, Artificial
  Synthetic oligonucleotide
gcagaagacactacagaaaagtaagtctcggaaactggagcgctggagcttgggt

SEQ ID NO: 272742 - DNA, 55 bp, Artificial
  Synthetic oligonucleotide
gcagaatgtgcgacgtcagagagcttaaacgtaggcttgacagcgggttccgaaa

SEQ ID NO: 272743 - DNA, 55 bp, Artificial
  Synthetic oligonucleotide
ggtgctaacagtaacaagcgtgctcgtagcattgaatatctgggtcgtaacctgt

SEQ ID NO: 272744 - DNA, 54 bp, Artificial
  Synthetic oligonucleotide
ggtgcggggttcacggctcgccaaaggtataaaagggtcctcgcccatgcgaag

SEQ ID NO: 272745 - DNA, 55 bp, Artificial
  Synthetic oligonucleotide
gcagatcgtggcaagtgcaggatatatcaacgaattgataacatctgaaggaata

SEQ ID NO: 272746 - DNA, 60 bp, Artificial
  Synthetic oligonucleotide
tgtgtcgagatgaactgtacagggagtggataacactaattcgtatgcttacactagtgt

SEQ ID NO: 272747 - DNA, 55 bp, Artificial
  Synthetic oligonucleotide
gcagcagccaagaatcgacaaataggctcttcgaatgaccatgtcaatgtgcaac

SEQ ID NO: 272748 - DNA, 55 bp, Artificial
  Synthetic oligonucleotide
gcagcctcgctcctagatgccgtctaaatgtatgagtcaaatcgggctcttctgc

SEQ ID NO: 272749 - DNA, 55 bp, Artificial
  Synthetic oligonucleotide
ggtgcaggtgatggacattacggattctggttagatgatcgattgttaaatggtg

SEQ ID NO: 272750 - DNA, 55 bp, Artificial
  Synthetic oligonucleotide
gcaggacgtatgccatgctcttaggcggcaaaacaagcacccacagatcggagat

SEQ ID NO: 272751 - DNA, 55 bp, Artificial
  Synthetic oligonucleotide
gcaggactctgattactcctgggacttaaattaggactctgtgaggctataacgc

SEQ ID NO: 272752 - DNA, 55 bp, Artificial
  Synthetic oligonucleotide
gcaggctaaagtaagatatggtggaggcgtgttgatgctaactgtagaataggtc

SEQ ID NO: 272753 - DNA, 55 bp, Artificial
  Synthetic oligonucleotide
gcagtaatctggtaggagtttggcccgttaatcatcattgttgcgttgagggcta

SEQ ID NO: 272754 - DNA, 55 bp, Artificial
  Synthetic oligonucleotide
gcagtacgaacgttatagaaagaaatgtaccctacgacaccctcctggtaatgaa

SEQ ID NO: 272755 - DNA, 55 bp, Artificial
  Synthetic oligonucleotide
gcagtagtgttgcctacaagtctcactgttcgttggttaaccctgttcatcatag

SEQ ID NO: 272756 - DNA, 55 bp, Artificial
  Synthetic oligonucleotide
gcagtatacttgttactatcaattacgtttacctccatggtgtgtcgtacttgcc

SEQ ID NO: 272757 - DNA, 51 bp, Artificial
  Synthetic oligonucleotide
ctcctaccacccccgggacccaccgccagaggcagtggtgggtcccgggta

SEQ ID NO: 272758 - DNA, 55 bp, Artificial
  Synthetic oligonucleotide
gcagtcaagaaccttagtctctttgcttaagtaagggaatcttgaaggagtatcg

SEQ ID NO: 272759 - DNA, 55 bp, Artificial
  Synthetic oligonucleotide
gcagttccaagatgggtagttaagcgatatggagacacagttggtttggagttac

SEQ ID NO: 272760 - DNA, 55 bp, Artificial
  Synthetic oligonucleotide
gcataaacatgccatgacgtataggtaccagtccacgttacaaatttgaccgtgt

SEQ ID NO: 272761 - DNA, 55 bp, Artificial
  Synthetic oligonucleotide
ggtgcaccaaataacgcatatgccaaaggtgtaagctctattgaaagagttatgc

SEQ ID NO: 272762 - DNA, 55 bp, Artificial
  Synthetic oligonucleotide
gcatagcagtaaatcggacgttttggaaatgaggtgtgtgtgcggtcaggtgaga

SEQ ID NO: 272763 - DNA, 55 bp, Artificial
  Synthetic oligonucleotide
gcatataagaaggcgaatagatcgactgagtaagtttcgattgtcagcagctggc

SEQ ID NO: 272764 - DNA, 55 bp, Artificial
  Synthetic oligonucleotide
ggtctatgagtctgattcgcaagtgagattcctgtgagtcgtttattatttgaga

SEQ ID NO: 272765 - DNA, 55 bp, Artificial
  Synthetic oligonucleotide
ggtcgttgcaaaactgacgctacaagaaagactaggtgaatcgcgacaaaagagg

SEQ ID NO: 272766 - DNA, 55 bp, Artificial
  Synthetic oligonucleotide
gccccacaggtggctggatataactgcgaatcactttggaattggggtcggtagg

SEQ ID NO: 272767 - DNA, 55 bp, Artificial
  Synthetic oligonucleotide
gcccctttgaccctctcgttgcccaacatcacatttgccagcccgactctcaagt

SEQ ID NO: 272768 - DNA, 57 bp, Artificial
  Synthetic oligonucleotide
ggaagtggctttgcgctctgcgcttagtgttataacccgcgttaatggaggcacccg

SEQ ID NO: 272769 - DNA, 55 bp, Artificial
  Synthetic oligonucleotide
ggtcgtgcatgtgcgaaacaaggtctgtctcgaagtccaccgttggcccttgtcg

SEQ ID NO: 272770 - DNA, 55 bp, Artificial
  Synthetic oligonucleotide
ggtcggcgttacagtctgcgtgtccgtaatatagacttcaatcgtattcccgagc

SEQ ID NO: 272771 - DNA, 55 bp, Artificial
  Synthetic oligonucleotide
gcccgctaaatcactatgaatcattgcgtctgaatcgaagttacttatcagtctc

SEQ ID NO: 272772 - DNA, 55 bp, Artificial
  Synthetic oligonucleotide
gccctactactcaaatgtctcgattttatggcctacctctgcgtaacacggacct

SEQ ID NO: 272773 - DNA, 55 bp, Artificial
  Synthetic oligonucleotide
gccctccaattgcatgtaccgttcgaacacgtgctcgtatattgtttcctcatcc

SEQ ID NO: 272774 - DNA, 55 bp, Artificial
  Synthetic oligonucleotide
gccctccgctgactttatcgatacagagtcccaagggtttaacgatgtctcgtgg

SEQ ID NO: 272775 - DNA, 55 bp, Artificial
  Synthetic oligonucleotide
ggtcgattttaggaccacaaagaagttagctttcgacatatcaggttcggaactc

SEQ ID NO: 272776 - DNA, 55 bp, Artificial
  Synthetic oligonucleotide
gccctggctacaggcaattattctgtgactatggaacaatgtctgaacactcaac

SEQ ID NO: 272777 - DNA, 55 bp, Artificial
  Synthetic oligonucleotide
gcccttatctttaggcactgttaggtccagtttaacaatcacaccacgatggtcc

SEQ ID NO: 272778 - DNA, 55 bp, Artificial
  Synthetic oligonucleotide
gccgaaaagattggtctgtccgttcaagacagggagagttcagttatgacaggtg

SEQ ID NO: 272779 - DNA, 56 bp, Artificial
  Synthetic oligonucleotide
caaatacagttacataggatagaatgcacaaggggggaaatataaaaggtatgagg

SEQ ID NO: 272780 - DNA, 55 bp, Artificial
  Synthetic oligonucleotide
ggtccttgagagcttgttctgataggggtacgacattcgtaacaagatcgtgcac

SEQ ID NO: 272781 - DNA, 55 bp, Artificial
  Synthetic oligonucleotide
gccgaagatgtgttggggatgtactctgtggcaattgtcaacccattaggaagtt

SEQ ID NO: 272782 - DNA, 55 bp, Artificial
  Synthetic oligonucleotide
gccgatcaaggtagcaccattttcaatgatacatcgaagaaaacctcacgctagc

SEQ ID NO: 272783 - DNA, 55 bp, Artificial
  Synthetic oligonucleotide
ggtccattaccgaaattaatctcgttggctgttacgatcggggcaagtaggaatg

SEQ ID NO: 272784 - DNA, 55 bp, Artificial
  Synthetic oligonucleotide
gccgcctcaacctggattctatggtatgcaacctccgcagaaccctggctacggc

SEQ ID NO: 272785 - DNA, 55 bp, Artificial
  Synthetic oligonucleotide
gccgctggagtgcacggtttcccgccttgtttccgaaagcgcaaatattcgcgag

SEQ ID NO: 272786 - DNA, 55 bp, Artificial
  Synthetic oligonucleotide
ggtccaacaggataagtgaaagctcctctagtaatgaaccgcagctaaaccacac

SEQ ID NO: 272787 - DNA, 55 bp, Artificial
  Synthetic oligonucleotide
ggtctggcccacatacggtaccaacgaggactgttttgagctaattgacaagact

SEQ ID NO: 272788 - DNA, 55 bp, Artificial
  Synthetic oligonucleotide
gccaattgggcctgaatgggttgtggggcgccattgtatagctcatcgcgttacc

SEQ ID NO: 272789 - DNA, 55 bp, Artificial
  Synthetic oligonucleotide
gccaccactaccttcgcaaggtttatagaccctacggtcaaactatggggtgctc

SEQ ID NO: 272790 - DNA, 54 bp, Artificial
  Synthetic oligonucleotide
agcgggaaagatattctgggagtcactagggacgagtttcattagggaattagt

SEQ ID NO: 272791 - DNA, 55 bp, Artificial
  Synthetic oligonucleotide
ggtctctctgacctccatacgtaccgcctgaagatccatgctgtgtatctgtctg

SEQ ID NO: 272792 - DNA, 55 bp, Artificial
  Synthetic oligonucleotide
gccacgcggatagttgcaacaaactccaaccacctgggtattcaattgcagtacc

SEQ ID NO: 272793 - DNA, 55 bp, Artificial
  Synthetic oligonucleotide
gccacggatgagcaatccaagaagtatcctctacaagttctacaaagcgtggcca

SEQ ID NO: 272794 - DNA, 55 bp, Artificial
  Synthetic oligonucleotide
gccactgagtaaaacgttgcggtcgctgggatggaacctaatatccgtcacgtcg

SEQ ID NO: 272795 - DNA, 55 bp, Artificial
  Synthetic oligonucleotide
gccagacgataaaagggatagttcgcacacttggtatagaataccctttgtttgc

SEQ ID NO: 272796 - DNA, 55 bp, Artificial
  Synthetic oligonucleotide
ggtctcatataggtatctcgaacactgaggattgtgttacctctacgtttgcccc

SEQ ID NO: 272797 - DNA, 55 bp, Artificial
  Synthetic oligonucleotide
gccaggacccaattgaatacgccctgggaccgtgctaagtgcaattggctggacc

SEQ ID NO: 272798 - DNA, 55 bp, Artificial
  Synthetic oligonucleotide
gccaggtttactgaattaggactaagtcactgtgataagtgtaatcattgagatg

SEQ ID NO: 272799 - DNA, 55 bp, Artificial
  Synthetic oligonucleotide
gccatatgtgggcaaaggttatacctcccttctttggtctcatcagagtaacggc

SEQ ID NO: 272800 - DNA, 55 bp, Artificial
  Synthetic oligonucleotide
gccatccaatataactgacgatgacttacaaagcagccattcaagcgccgttcac

SEQ ID NO: 272801 - DNA, 60 bp, Artificial
  Synthetic oligonucleotide
ggtgcgcctcgctgataggtgaaaaacactcgactgacttcggccgccgtatgggcactc

SEQ ID NO: 272802 - DNA, 55 bp, Artificial
  Synthetic oligonucleotide
gccatcttccaacgatccgcaaacagttggcagtcagaaacgaagtgcttaaccg

SEQ ID NO: 272803 - DNA, 55 bp, Artificial
  Synthetic oligonucleotide
gccatgcatagccagatagacgcatcttgtcttgatctaacctaagtagcactac

SEQ ID NO: 272804 - DNA, 55 bp, Artificial
  Synthetic oligonucleotide
gccatgctagacagcagacaaatcctacaccatcatatagggttcttcaacctct

SEQ ID NO: 272805 - DNA, 55 bp, Artificial
  Synthetic oligonucleotide
gccattaccctaccatccaccatgtcctactcactgtactgttgttctaccctcc

SEQ ID NO: 272806 - DNA, 55 bp, Artificial
  Synthetic oligonucleotide
ggtctcacattttactactggaaccgactcacccaagattgcgccaacataatcc

SEQ ID NO: 272807 - DNA, 55 bp, Artificial
  Synthetic oligonucleotide
gcccaaagcgtcacagtcgaaaattacctcttttggtacacttcagcgtccttcc

SEQ ID NO: 272808 - DNA, 55 bp, Artificial
  Synthetic oligonucleotide
gcccaagtgctcactagactgacatctgttacctctatacgcatagtaacacggg

SEQ ID NO: 272809 - DNA, 55 bp, Artificial
  Synthetic oligonucleotide
gcccagaggtcgcagtgcgctttactatttatagaccacaaccagaaacacgacc

SEQ ID NO: 272810 - DNA, 55 bp, Artificial
  Synthetic oligonucleotide
gcccataaagagtaatgacactgtcaaacatattcccgacttggtctgttaacag

SEQ ID NO: 272811 - DNA, 55 bp, Artificial
  Synthetic oligonucleotide
gcccattcactagaaccaaaccgttatccaaaggcacttgtcccgcagcattacc

SEQ ID NO: 272812 - DNA, 60 bp, Artificial
  Synthetic oligonucleotide
agttgaaactagatatcaattgcacacaagatcggcgctaagcatgccacaatttggtat

SEQ ID NO: 272813 - DNA, 56 bp, Artificial
  Synthetic oligonucleotide
agggtcaatgggtacacgagagggtgacactaggcgtagaaagtcattagtataaa

SEQ ID NO: 272814 - DNA, 55 bp, Artificial
  Synthetic oligonucleotide
gagttgaattatgctgggtccactgaattgatggagcaacgtttgaacgcaatga

SEQ ID NO: 272815 - DNA, 54 bp, Artificial
  Synthetic oligonucleotide
gataaagtcaatgaacactggcctgtacgtaagtcccaaatacgaacggtacgg

SEQ ID NO: 272816 - DNA, 55 bp, Artificial
  Synthetic oligonucleotide
gataagagaccctcttgtctcagaatgttgagccccatcctaatgaagcttgctc

SEQ ID NO: 272817 - DNA, 55 bp, Artificial
  Synthetic oligonucleotide
gatacctcgaagatatttattgtaccacagatgagtagcggcggatatcgagagg

SEQ ID NO: 272818 - DNA, 54 bp, Artificial
  Synthetic oligonucleotide
ggttaccccaaggagtatagaatttgaaagaagcacctcttggatctctaacgg

SEQ ID NO: 272819 - DNA, 55 bp, Artificial
  Synthetic oligonucleotide
gatacgataacatttacaaaacgcctaaaatactggtcgctatcatcgttggctc

SEQ ID NO: 272820 - DNA, 55 bp, Artificial
  Synthetic oligonucleotide
gatactcgttttgcgtgcgtgtttaaatgatgcgtagtggttcttcttaacatgg

SEQ ID NO: 272821 - DNA, 55 bp, Artificial
  Synthetic oligonucleotide
gatagagacgtgcgtcccggaattcgggcacaagcgccagcctactcagcagtcc

SEQ ID NO: 272822 - DNA, 55 bp, Artificial
  Synthetic oligonucleotide
gatagcttgttgtgcccttgcagatagtgttcaagaatagactgaggtagccacg

SEQ ID NO: 272823 - DNA, 55 bp, Artificial
  Synthetic oligonucleotide
gatagtgtggaggaacatcgttattcacattatgtacgtttataattggcggccc

SEQ ID NO: 272824 - DNA, 52 bp, Artificial
  Synthetic oligonucleotide
cgttatacctccgttaggagattatatcaaccccgcggaatactccccttta

SEQ ID NO: 272825 - DNA, 54 bp, Artificial
  Synthetic oligonucleotide
gatagttcacccggtaaaagaattcgggatcttacacaggacgaacaggttgac

SEQ ID NO: 272826 - DNA, 55 bp, Artificial
  Synthetic oligonucleotide
gatatcttcgttataggaaccacccaacttgtgagcgattcccttcgctagtgcg

SEQ ID NO: 272827 - DNA, 55 bp, Artificial
  Synthetic oligonucleotide
gatattctgtgacacgtcttggatgtccgtatgggagtgtagcgatccgccattt

SEQ ID NO: 272828 - DNA, 55 bp, Artificial
  Synthetic oligonucleotide
gatcaaacttgatagtttgtggtgttgacgtcatgctcatctgtcgttgtgtaac

SEQ ID NO: 272829 - DNA, 55 bp, Artificial
  Synthetic oligonucleotide
gatccaacttggctcagttctggtccaaacgcctagtttcttcgtccaggaaaac

SEQ ID NO: 272830 - DNA, 55 bp, Artificial
  Synthetic oligonucleotide
gatcctcccgtacagccgctagtcttgtcgaggaaagctcctttccgttcagata

SEQ ID NO: 272831 - DNA, 55 bp, Artificial
  Synthetic oligonucleotide
gatcggattgaaggtcttgaggtataaggtcaaagaaggtagaagagtacagctc

SEQ ID NO: 272832 - DNA, 55 bp, Artificial
  Synthetic oligonucleotide
ggtgttatagtttaggaatgcaggaatagcgcccaggttccaacttgccaaccat

SEQ ID NO: 272833 - DNA, 55 bp, Artificial
  Synthetic oligonucleotide
gatctatatcatagtcggattcagtacctgatgttggcgatatatctgaatactg

SEQ ID NO: 272834 - DNA, 55 bp, Artificial
  Synthetic oligonucleotide
gatctatcctatatatgaattgttgatggcatgccccaagttatcgcacttatcg

SEQ ID NO: 272835 - DNA, 60 bp, Artificial
  Synthetic oligonucleotide
tccggcggtattctgcaatgaattggagaacctcgtctgagataattccatgccattgtt

SEQ ID NO: 272836 - DNA, 55 bp, Artificial
  Synthetic oligonucleotide
gatgacaccaatggaccatatgtcgcatggtttcccatgcccatctaccgttagt

SEQ ID NO: 272837 - DNA, 55 bp, Artificial
  Synthetic oligonucleotide
ggttcttgaacgggcctcaacacagtgctattatggaaggggatgttgtatgggt

SEQ ID NO: 272838 - DNA, 55 bp, Artificial
  Synthetic oligonucleotide
gaggagtgaagcgttggtgctgtatcgacttaaggaggttgcggtcctagaggcc

SEQ ID NO: 272839 - DNA, 55 bp, Artificial
  Synthetic oligonucleotide
ggttcgtgttaggcgatcttagccacccctctacctaggagctatacaacgagca

SEQ ID NO: 272840 - DNA, 55 bp, Artificial
  Synthetic oligonucleotide
gaggcaatgattgcatactcgcaattatgaggtaccacatggttggaagacatac

SEQ ID NO: 272841 - DNA, 55 bp, Artificial
  Synthetic oligonucleotide
ggttcgtgcatgaccagacgaactttgacgaaggcaccttggctttgggccttgt

SEQ ID NO: 272842 - DNA, 55 bp, Artificial
  Synthetic oligonucleotide
gaggctgtgacttcgcctgagacaactgctgtcattgggcgcttggatgggaaca

SEQ ID NO: 272843 - DNA, 55 bp, Artificial
  Synthetic oligonucleotide
gaggcttatggctgaggttccatacggtgttctattatccggtggtctagactct

SEQ ID NO: 272844 - DNA, 55 bp, Artificial
  Synthetic oligonucleotide
gagggtatagtttaaagctgtaactgtcgccatgttttcatgagagacggcagat

SEQ ID NO: 272845 - DNA, 55 bp, Artificial
  Synthetic oligonucleotide
ggttcgatcatcaaacgccccgacagtaatcgcggatagcgaggacgcaggactg

SEQ ID NO: 272846 - DNA, 60 bp, Artificial
  Synthetic oligonucleotide
catgccataaaagcgctggagtaaaacagccagtgcaaggtaagaactgttcgatggcta

SEQ ID NO: 272847 - DNA, 55 bp, Artificial
  Synthetic oligonucleotide
gaggtagcaactgttgaggcatgactttcggttggatatgtagagctcgtaaaag

SEQ ID NO: 272848 - DNA, 55 bp, Artificial
  Synthetic oligonucleotide
gaggtgataccggtccccagctctatcagtagcaaaatatcatatcatgtgaccg

SEQ ID NO: 272849 - DNA, 55 bp, Artificial
  Synthetic oligonucleotide
gaggtgctaagggccgacagttcgcacggatacgcctacacgccacttgtctcgc

SEQ ID NO: 272850 - DNA, 55 bp, Artificial
  Synthetic oligonucleotide
gaggttaggattaaccgagcagagcgaaaggttcttagctgaggtcttatctacg

SEQ ID NO: 272851 - DNA, 55 bp, Artificial
  Synthetic oligonucleotide
gagtaataggtcaagcctgtataattccaagtacaaatcacccaccaaaggtgta

SEQ ID NO: 272852 - DNA, 55 bp, Artificial
  Synthetic oligonucleotide
gagtaattgagtcgctagccaatgtcacagccaaattaccaacttctgagcgcct

SEQ ID NO: 272853 - DNA, 55 bp, Artificial
  Synthetic oligonucleotide
gagtactgttttatggcactcatgtgtattcgtatgcgcagaatgtgagaatgcc

SEQ ID NO: 272854 - DNA, 55 bp, Artificial
  Synthetic oligonucleotide
gagtattgctagctagtgcgagtttgatctatacttcacagacttttaacacccc

SEQ ID NO: 272855 - DNA, 55 bp, Artificial
  Synthetic oligonucleotide
gagtcaattgacacaggacaccgataatcgatcaatgctctccaatcacatctca

SEQ ID NO: 272856 - DNA, 55 bp, Artificial
  Synthetic oligonucleotide
ggttattgaacatggcgcaaggaattcagccgaaagcctatgtgtgaacggacct

SEQ ID NO: 272857 - DNA, 59 bp, Artificial
  Synthetic oligonucleotide
tccggtggaggtcccaaattcgcactttttcatccgtctttgtgcgtgtctctctgcgc

SEQ ID NO: 272858 - DNA, 55 bp, Artificial
  Synthetic oligonucleotide
ggttagcgtagttctgctatatcttgcgaggagaagaaagatggagctcgggttc

SEQ ID NO: 272859 - DNA, 55 bp, Artificial
  Synthetic oligonucleotide
gagtgacttgaccttaactgaagttttcgtctctgtgatagtcttatattgtacc

SEQ ID NO: 272860 - DNA, 55 bp, Artificial
  Synthetic oligonucleotide
gagtgaggtgtatccccacttcagtactacagtgtaacacatttctcaactcccc

SEQ ID NO: 272861 - DNA, 55 bp, Artificial
  Synthetic oligonucleotide
gagtgcaattagagcacatggcccgttgtcgctctgaagaacaattcgataaggg

SEQ ID NO: 272862 - DNA, 55 bp, Artificial
  Synthetic oligonucleotide
gcaaataacctcgaactttcttgcttatcgcctttcaattcagataccaatgcca

SEQ ID NO: 272863 - DNA, 55 bp, Artificial
  Synthetic oligonucleotide
gcaaccttctgatatgtcgacacaacctatatctacgtttagagaagtatgcgat

SEQ ID NO: 272864 - DNA, 55 bp, Artificial
  Synthetic oligonucleotide
ggtggtcagagtgtgcaattagtcgaaacacctcgagacctagaaatccttcgcc

SEQ ID NO: 272865 - DNA, 55 bp, Artificial
  Synthetic oligonucleotide
gcaagagaccagtgctctccaacgctctgttctggttcgagatgtgcacagggcc

SEQ ID NO: 272866 - DNA, 55 bp, Artificial
  Synthetic oligonucleotide
gcaagagaggtggtcactcggctagagattgtcgtgcccctcaggcgagcaatcc

SEQ ID NO: 272867 - DNA, 52 bp, Artificial
  Synthetic oligonucleotide
ggtggggttgacttaggtccgtccgtgaattcctacaggaccgaaagttcaa

SEQ ID NO: 272868 - DNA, 60 bp, Artificial
  Synthetic oligonucleotide
tactgagtcctcgtcatcatctgggcgcatccccgtagcacaaacaagctatgtgcagcc

SEQ ID NO: 272869 - DNA, 55 bp, Artificial
  Synthetic oligonucleotide
gcaagtgtaagtggcaccttcgaggaccgctagtctttctttggggacgcctagc

SEQ ID NO: 272870 - DNA, 55 bp, Artificial
  Synthetic oligonucleotide
gcaagttgtccagtacggggacagcataacagaggacgtaatattcgcccagtcc

SEQ ID NO: 272871 - DNA, 55 bp, Artificial
  Synthetic oligonucleotide
gcaatagatacccttactctcacactgtaacaaatctcccgtatttagccgccaa

SEQ ID NO: 272872 - DNA, 55 bp, Artificial
  Synthetic oligonucleotide
gcaatcactgtatgatgatgacaccgaagttgaagatttctcaccaaccacgaga

SEQ ID NO: 272873 - DNA, 55 bp, Artificial
  Synthetic oligonucleotide
gcaatccatcgacatgtctcatgtcatctcactcgaaccaagtgcaacatgctat

SEQ ID NO: 272874 - DNA, 55 bp, Artificial
  Synthetic oligonucleotide
gcaatcccttatttgcgaccccttgttccgagactaacaaacttccatgcggttc

SEQ ID NO: 272875 - DNA, 55 bp, Artificial
  Synthetic oligonucleotide
gcaatggtattgacttttccaacgcttgtaaccagctaaacctttcagcgatcgg

SEQ ID NO: 272876 - DNA, 55 bp, Artificial
  Synthetic oligonucleotide
gcaatgttgccatccctcattcaaatagcatgctaaatgggaaccgaagtaccca

SEQ ID NO: 272877 - DNA, 53 bp, Artificial
  Synthetic oligonucleotide
ggtggcactagacttcgacctaattacggggcatgaacgtttacctttcttgt

SEQ ID NO: 272878 - DNA, 55 bp, Artificial
  Synthetic oligonucleotide
gcacagatacattctaaagttatcctatgtcgcaggacagcgtctgaaaacgtca

SEQ ID NO: 272879 - DNA, 53 bp, Artificial
  Synthetic oligonucleotide
gatccccgaccaaaggatggccccacggagtaaccccattgttgtgaaggtcc

SEQ ID NO: 272880 - DNA, 55 bp, Artificial
  Synthetic oligonucleotide
gcaccacggcactcagtatatacgccatcgagaactcttatcgaattgctgtgag

SEQ ID NO: 272881 - DNA, 55 bp, Artificial
  Synthetic oligonucleotide
gcacccttgagcgtatacttcatcagcgacggagaccaacccagtatctttatcc

SEQ ID NO: 272882 - DNA, 55 bp, Artificial
  Synthetic oligonucleotide
gcacctaattgaccagcggaagcattggattcgtatgaacctagagcaatttgag

SEQ ID NO: 272883 - DNA, 55 bp, Artificial
  Synthetic oligonucleotide
gcacggccaacatacatttcaacgaggtcattttaagcgcaaattccaccgggaa

SEQ ID NO: 272884 - DNA, 55 bp, Artificial
  Synthetic oligonucleotide
gcactcgattgtatgtgtgcatcgacacccgtgtacctgggcacatcaggcgtgc

SEQ ID NO: 272885 - DNA, 55 bp, Artificial
  Synthetic oligonucleotide
gcactgaacatcaatttattcgagaccatacccaatcctgcaggaccgtgtgtcg

SEQ ID NO: 272886 - DNA, 55 bp, Artificial
  Synthetic oligonucleotide
gcactgcatctttcataccactagacacaattgagacagagttacctacattatc

SEQ ID NO: 272887 - DNA, 55 bp, Artificial
  Synthetic oligonucleotide
gatgcaagattcaccagcctctaatgaggacgacttaaccgtaaaactgacggaa

SEQ ID NO: 272888 - DNA, 55 bp, Artificial
  Synthetic oligonucleotide
gatgctattcgctgagcgcgccgtttggaaataatttgtcagacgggaagaaagg

SEQ ID NO: 272889 - DNA, 55 bp, Artificial
  Synthetic oligonucleotide
ggtgtctctcaagaataccttagctagtccacctagcgtatcacggagcgaatcc

SEQ ID NO: 272890 - DNA, 54 bp, Artificial
  Synthetic oligonucleotide
cctggtgtagtctttcttgtccccgcaatggtccccttgtaaccagtcgaacgc

SEQ ID NO: 272891 - DNA, 55 bp, Artificial
  Synthetic oligonucleotide
gatggccaaacggtacagcaagctgactgagaccatcagtgagctagtcagcgat

SEQ ID NO: 272892 - DNA, 55 bp, Artificial
  Synthetic oligonucleotide
ggtgtcgcataacaagaagcaagggactaaacaggacaaatacgatatcgacgaa

SEQ ID NO: 272893 - DNA, 55 bp, Artificial
  Synthetic oligonucleotide
gatgggcgagatgcgtaatccactgttaccgaaacgaacttgcttgactagtccc

SEQ ID NO: 272894 - DNA, 55 bp, Artificial
  Synthetic oligonucleotide
gatgtaattaggaaacatattaggctcatgacctttttatatacgttcaactcgt

SEQ ID NO: 272895 - DNA, 55 bp, Artificial
  Synthetic oligonucleotide
gatgttgtatgccaggacgtggacatccggactgtaagtggtgagttcagtaaat

SEQ ID NO: 272896 - DNA, 55 bp, Artificial
  Synthetic oligonucleotide
ggtgtcaagtgtcgtcgtctgggcagcatatctaccacatgaaccatggtccact

SEQ ID NO: 272897 - DNA, 55 bp, Artificial
  Synthetic oligonucleotide
gattagaggatgtgtcgattactcatatgacatttggtcctgagtttactaaagc

SEQ ID NO: 272898 - DNA, 55 bp, Artificial
  Synthetic oligonucleotide
gattagccctttgtggagactctagtctatctctcattggagaacgtggcctcaa

SEQ ID NO: 272899 - DNA, 55 bp, Artificial
  Synthetic oligonucleotide
gattcaaaactactcgtatcggctcagtctctttgtattgttggaaaggagaatc

SEQ ID NO: 272900 - DNA, 55 bp, Artificial
  Synthetic oligonucleotide
gattcaactgtcataaatgagttcatgcaacattcaacgcgcttgcccaaggctc

SEQ ID NO: 272901 - DNA, 56 bp, Artificial
  Synthetic oligonucleotide
ggtggcaccgtgagttgggctttgggagggccgagggagggatgacacactcttag

SEQ ID NO: 272902 - DNA, 55 bp, Artificial
  Synthetic oligonucleotide
gattcatgctcgctcgctcttcggacagacgaaatgggtaaagcgttcttgcggg

SEQ ID NO: 272903 - DNA, 55 bp, Artificial
  Synthetic oligonucleotide
gattcccacgagaggcttgcttttgtacatagaccctccagaaaacatagtgctg

SEQ ID NO: 272904 - DNA, 55 bp, Artificial
  Synthetic oligonucleotide
ggtgtagcgaggaaccccaatgacgtggaagaacgacgaacatggttatacggtg

SEQ ID NO: 272905 - DNA, 55 bp, Artificial
  Synthetic oligonucleotide
ggtgtactcaatttagcaataacattacagtggtgccacttggtcctcctcgaat

SEQ ID NO: 272906 - DNA, 55 bp, Artificial
  Synthetic oligonucleotide
gattgggtataataggatagtactaagcaaggtctctataatcataagggcagca

SEQ ID NO: 272907 - DNA, 55 bp, Artificial
  Synthetic oligonucleotide
gatttagcccaagctactaatcaagattctaggagtatcacaggacgtctgaaaa

SEQ ID NO: 272908 - DNA, 55 bp, Artificial
  Synthetic oligonucleotide
gatttcaagagtcctcgatagtgaatccggaacagaggcacatataccaacgatg

SEQ ID NO: 272909 - DNA, 55 bp, Artificial
  Synthetic oligonucleotide
ggtggtccattaagtaaggctccaggaactaccattcaagaagatttgacccgtg

SEQ ID NO: 272910 - DNA, 55 bp, Artificial
  Synthetic oligonucleotide
gcaaagtaattcgaccatggatacaggggagcaagataaccaaggtcacttagag

SEQ ID NO: 272911 - DNA, 55 bp, Artificial
  Synthetic oligonucleotide
tcaatcactaggcgcatgctcaatgggttggactccgatcactgccacagcctgt

SEQ ID NO: 272912 - DNA, 60 bp, Artificial
  Synthetic oligonucleotide
catgaacggcttgtttgcgaaccagggcattagcacgtcatcgattcgtttctgatctgc

SEQ ID NO: 272913 - DNA, 55 bp, Artificial
  Synthetic oligonucleotide
tcaagggagcgccgataacattagctagacccaacaggtagaaggtcaaaccggc

SEQ ID NO: 272914 - DNA, 55 bp, Artificial
  Synthetic oligonucleotide
agtttagtggagtattcctcgtattgtgctccttatggtactcccaatagccaag

SEQ ID NO: 272915 - DNA, 55 bp, Artificial
  Synthetic oligonucleotide
tcaacggatgactcagactcgcatcagtatatccgacactagccaacaaacttgg

SEQ ID NO: 272916 - DNA, 55 bp, Artificial
  Synthetic oligonucleotide
tcaacaatgggtggtccggtatacttagactgaacgaagcactattcgaccccgc

SEQ ID NO: 272917 - DNA, 52 bp, Artificial
  Synthetic oligonucleotide
atacaatttgttggggaggggtaaggcttataaattctactatcttccttta

SEQ ID NO: 272918 - DNA, 55 bp, Artificial
  Synthetic oligonucleotide
ataccgacggtagcactttaagtggtagcaatttgagacgatcacaagtaaggag

SEQ ID NO: 272919 - DNA, 55 bp, Artificial
  Synthetic oligonucleotide
tcaaagcgacaagttcaagtagctagagaactatgtaaactggatcccctgattg

SEQ ID NO: 272920 - DNA, 55 bp, Artificial
  Synthetic oligonucleotide
ataccgttacagaggtggaacacaatgttccgtcatgagagctcgcgcattcgct

SEQ ID NO: 272921 - DNA, 55 bp, Artificial
  Synthetic oligonucleotide
tattttacgccccaaggctccatgccctcattgaaactgctaaactgctccttgg

SEQ ID NO: 272922 - DNA, 55 bp, Artificial
  Synthetic oligonucleotide
tatttgctcctctcaacggttgtgtagttgacgtatagttggttgtcgtggcccc

SEQ ID NO: 272923 - DNA, 56 bp, Artificial
  Synthetic oligonucleotide
cgatacgaataaattcaaaatttcttggtgcaaaatatacgaagataaagctatag

SEQ ID NO: 272924 - DNA, 60 bp, Artificial
  Synthetic oligonucleotide
gcaattaatggtattttgcgatatgctggaggaacctttgcttgtccacgtcctaatatc

SEQ ID NO: 272925 - DNA, 55 bp, Artificial
  Synthetic oligonucleotide
atactagcttaatcgctatgcatatacttgatgcgacatctgccgtcttgcaggt

SEQ ID NO: 272926 - DNA, 55 bp, Artificial
  Synthetic oligonucleotide
atacttctaatgacaatgcatggatccactggactaagtgtgatactggttcttg

SEQ ID NO: 272927 - DNA, 55 bp, Artificial
  Synthetic oligonucleotide
tatttgaataacaacgatgagattgtagacccgtacaatcgtcctctctcagatg

SEQ ID NO: 272928 - DNA, 55 bp, Artificial
  Synthetic oligonucleotide
tatgtgcctctgacgttctagtacggaagtatgtgtattattagggttgcaccga

SEQ ID NO: 272929 - DNA, 55 bp, Artificial
  Synthetic oligonucleotide
tatgtataggccagccaagggaacccgtactgtcagcccccacgagcctaggaag

SEQ ID NO: 272930 - DNA, 55 bp, Artificial
  Synthetic oligonucleotide
atatcccaaaccaagaggaccatagccttgtttctaccaataccacggacaatag

SEQ ID NO: 272931 - DNA, 55 bp, Artificial
  Synthetic oligonucleotide
atatccgcgaagcgcagtgatccaacctccttatcattccatatggcctctatca

SEQ ID NO: 272932 - DNA, 55 bp, Artificial
  Synthetic oligonucleotide
tccacaaacaatagcgttatgtcaaatgcatggggccaatctttgtgcgacaagg

SEQ ID NO: 272933 - DNA, 55 bp, Artificial
  Synthetic oligonucleotide
tccaaactcgtaatccaatgcatagagcccacagggagttgactgtgagagccgc

SEQ ID NO: 272934 - DNA, 55 bp, Artificial
  Synthetic oligonucleotide
tcatggggctcttgtggatggaaggcgtattcaggtggtgatcgcatccgacgaa

SEQ ID NO: 272935 - DNA, 60 bp, Artificial
  Synthetic oligonucleotide
ttgttttcgcttctgctgcgcatacgtgtagagatacagcagtgcgtcttttggtatcac

SEQ ID NO: 272936 - DNA, 55 bp, Artificial
  Synthetic oligonucleotide
tcatgcattcataatggacccatggtggtcacctagtatggaagatcaagcggtg

SEQ ID NO: 272937 - DNA, 55 bp, Artificial
  Synthetic oligonucleotide
agtcgaagcaagagtctcgagttcgaacgcccattgatgatcttttacatccttc

SEQ ID NO: 272938 - DNA, 55 bp, Artificial
  Synthetic oligonucleotide
tcagtttctgttaccgtgtcgcgtaaagcaatcgcattgatcgatgaaagcactg

SEQ ID NO: 272939 - DNA, 55 bp, Artificial
  Synthetic oligonucleotide
agtcttttggatccgttgttagctcaactatccgaatccttccactaccatgcag

SEQ ID NO: 272940 - DNA, 55 bp, Artificial
  Synthetic oligonucleotide
tcagttcgaatctaatgaacgcgtcgtgaaatacggcgcaacaactaagccctgc

SEQ ID NO: 272941 - DNA, 55 bp, Artificial
  Synthetic oligonucleotide
agtgccaggagtgaccacagaagttgccttggttggattccttatgtaatacacg

SEQ ID NO: 272942 - DNA, 54 bp, Artificial
  Synthetic oligonucleotide
tcagtaaactcgctagtggtttccccgtcgtttgatccaacaatgacgcggggt

SEQ ID NO: 272943 - DNA, 55 bp, Artificial
  Synthetic oligonucleotide
agtggcgccctaagcattctgccggcagtagtcgcctgtaggaaaccctgcccca

SEQ ID NO: 272944 - DNA, 55 bp, Artificial
  Synthetic oligonucleotide
tcagctcggttcagttaatacgcacgcaaagccagtgactacgtccgatggtggg

SEQ ID NO: 272945 - DNA, 55 bp, Artificial
  Synthetic oligonucleotide
tcagcataaacggtagatgcatattgggcacaaataccaacaacgtatgaagcag

SEQ ID NO: 272946 - DNA, 58 bp, Artificial
  Synthetic oligonucleotide
cgttgggtggactagcggagtgaattggtcgactgtttgttaggagtctggtgtgcgc

SEQ ID NO: 272947 - DNA, 55 bp, Artificial
  Synthetic oligonucleotide
tcagatttccttggggttgtttacttgtattctctcgctaacgcaatgttctgaa

SEQ ID NO: 272948 - DNA, 55 bp, Artificial
  Synthetic oligonucleotide
tcacttctagcgggtctggcaccgaagatgtcagtaccgattctaacttccgagg

SEQ ID NO: 272949 - DNA, 55 bp, Artificial
  Synthetic oligonucleotide
tcacttccagagtcaattaagcagctagagactggttgagagtttaggtgcacgt

SEQ ID NO: 272950 - DNA, 55 bp, Artificial
  Synthetic oligonucleotide
tcactcctatatcacgtgggtgtttgagtatcgcaatgtacgtcgcatcacatgc

SEQ ID NO: 272951 - DNA, 55 bp, Artificial
  Synthetic oligonucleotide
agttcgtagatgctcgagggaagaagaatgcgattaacagacgtgcccgttatgc

SEQ ID NO: 272952 - DNA, 51 bp, Artificial
  Synthetic oligonucleotide
agttggagtcccgggcttgccgtaaggcgtgaaaagcgttctttacaaggg

SEQ ID NO: 272953 - DNA, 55 bp, Artificial
  Synthetic oligonucleotide
tatcatcaggatcgctccataataagtcacacattggcccttcatgtggtacctc

SEQ ID NO: 272954 - DNA, 55 bp, Artificial
  Synthetic oligonucleotide
atctcaacaaacagctacatcaggaatgacaataccactaccgtctcgacaaccc

SEQ ID NO: 272955 - DNA, 55 bp, Artificial
  Synthetic oligonucleotide
atctcatggtccccaacttcgagacaatttggtgtcatatccggttacatgccag

SEQ ID NO: 272956 - DNA, 55 bp, Artificial
  Synthetic oligonucleotide
tatcacgaaattgcttgggtaattaacagatttgctcatgtggctaggaaacaca

SEQ ID NO: 272957 - DNA, 56 bp, Artificial
  Synthetic oligonucleotide
cataaacttatattaggtttacctcaaggatcattaattagtcctatcttatgtaa

SEQ ID NO: 272958 - DNA, 55 bp, Artificial
  Synthetic oligonucleotide
tatattgcgtcgcctagcattcttagatcaagtgaccttatgttgtcatcgtacg

SEQ ID NO: 272959 - DNA, 55 bp, Artificial
  Synthetic oligonucleotide
tatatgagcggtatgaattagtgtttctcatcgaatgtaacggaggagttaatgc

SEQ ID NO: 272960 - DNA, 55 bp, Artificial
  Synthetic oligonucleotide
atctggtaagctgttaacattgctagaatgttcattgacaggtacgttgtatgtc

SEQ ID NO: 272961 - DNA, 55 bp, Artificial
  Synthetic oligonucleotide
atgaagaaacgcaagagttccaactgctcagcgataacgctaacataaaccaggc

SEQ ID NO: 272962 - DNA, 52 bp, Artificial
  Synthetic oligonucleotide
atgaagttgccccaggggttttaactaagcatggtaaaactaagaacccatg

SEQ ID NO: 272963 - DNA, 55 bp, Artificial
  Synthetic oligonucleotide
atgacgcagtcgacgtcagagtgtcggctggagattagtagttctaacgaggtac

SEQ ID NO: 272964 - DNA, 55 bp, Artificial
  Synthetic oligonucleotide
atgactccaagccgcttattgaccagttgtggcctggtcagctagttgttccgga

SEQ ID NO: 272965 - DNA, 55 bp, Artificial
  Synthetic oligonucleotide
tatagcattgctacctttcggaggcacaaatgaaacgaaggaaggacggtggatg

SEQ ID NO: 272966 - DNA, 55 bp, Artificial
  Synthetic oligonucleotide
atgatattgtacaaacactgcaatacctagattgcatcgatgcagcgggaaacat

SEQ ID NO: 272967 - DNA, 55 bp, Artificial
  Synthetic oligonucleotide
tataagtgactatacgataccagtgtggagtaacaagcttatgttgggtagttcc

SEQ ID NO: 272968 - DNA, 53 bp, Artificial
  Synthetic oligonucleotide
gggcgttctttcgcccttcccccactactgtctgtcgcccttccaattagacg

SEQ ID NO: 272969 - DNA, 55 bp, Artificial
  Synthetic oligonucleotide
tagtttccatttggtcacgtcgtcagattcgtcgctgtcccttttgtccagaccg

SEQ ID NO: 272970 - DNA, 55 bp, Artificial
  Synthetic oligonucleotide
tagttctttcttgtggacccaacttccacaaattcactactattgcgatgagctc

SEQ ID NO: 272971 - DNA, 55 bp, Artificial
  Synthetic oligonucleotide
tagttcaagtttgccaatatacgaatcagcaacagcggatcacacctttgatgag

SEQ ID NO: 272972 - DNA, 55 bp, Artificial
  Synthetic oligonucleotide
tagtgtatgtccttactctgtattggcgagctattatgtacagtggcaactctgt

SEQ ID NO: 272973 - DNA, 55 bp, Artificial
  Synthetic oligonucleotide
atatctgtagtggggtgcctgcgcacgcgtctgagggctccggcgaagcaccaac

SEQ ID NO: 272974 - DNA, 55 bp, Artificial
  Synthetic oligonucleotide
atatctttccccgtaacccaattatcgctgagttttagtctcctgtacaagtaga

SEQ ID NO: 272975 - DNA, 53 bp, Artificial
  Synthetic oligonucleotide
atatttcaggtaggcgaactcccacggaagacttttcaatacccacggaagac

SEQ ID NO: 272976 - DNA, 55 bp, Artificial
  Synthetic oligonucleotide
atcagtagcgcttggctcaacttgatgagtctaagtttaggttggaccccgctgg

SEQ ID NO: 272977 - DNA, 55 bp, Artificial
  Synthetic oligonucleotide
atcagtgtcgctctgttccggttacacagcggtttcaagcaacggtgcagcaggg

SEQ ID NO: 272978 - DNA, 55 bp, Artificial
  Synthetic oligonucleotide
atcatctgtaacaaactaaggtctcagcgaaatgggtaagcaacaagttcacaac

SEQ ID NO: 272979 - DNA, 56 bp, Artificial
  Synthetic oligonucleotide
ggtgttcgattctccttagacttatatagaaatataaccctggtattacactctgg

SEQ ID NO: 272980 - DNA, 55 bp, Artificial
  Synthetic oligonucleotide
atcatggtgcacttgcgattgatttatcacaatggccaaattctttagacagttc

SEQ ID NO: 272981 - DNA, 55 bp, Artificial
  Synthetic oligonucleotide
atcattttcaacagcgtagtagatattggcgtctgtcaaattgtggtagggtgga

SEQ ID NO: 272982 - DNA, 55 bp, Artificial
  Synthetic oligonucleotide
tatgagtagtgtcgtactgcatttattagatttcgaacacacctctatgcccgat

SEQ ID NO: 272983 - DNA, 55 bp, Artificial
  Synthetic oligonucleotide
tatctcggaaacctttcaactgaatgaactattgttaattgtatggcgtgtggcc

SEQ ID NO: 272984 - DNA, 55 bp, Artificial
  Synthetic oligonucleotide
atcccgcgtccattactagtaatggacgcgggtagggtagaagatggatacgcgg

SEQ ID NO: 272985 - DNA, 55 bp, Artificial
  Synthetic oligonucleotide
tatcgataccgaaggtactttcaggccggtaagattggtatccatagctcagcgg

SEQ ID NO: 272986 - DNA, 55 bp, Artificial
  Synthetic oligonucleotide
tatcgagcctaaccacagcttgcttcgtggctccaccacgtttcctcctagcaga

SEQ ID NO: 272987 - DNA, 55 bp, Artificial
  Synthetic oligonucleotide
atcgaacttcagacctcttcttaggtcataccattcctttagcacacggggttgc

SEQ ID NO: 272988 - DNA, 55 bp, Artificial
  Synthetic oligonucleotide
atcgcggggcatcacgtggaggctattattctacacatcgaagatcgatctaaaa

SEQ ID NO: 272989 - DNA, 55 bp, Artificial
  Synthetic oligonucleotide
tatccgctttgaacggtattgctggttcttacgctgaacacgttggtgtcttaca

SEQ ID NO: 272990 - DNA, 55 bp, Artificial
  Synthetic oligonucleotide
catcgttgcttttagttcgtactttatggtgttagattaagttcgctaacgaaca

SEQ ID NO: 272991 - DNA, 55 bp, Artificial
  Synthetic oligonucleotide
atcgtcaataccttggatggtttatcagcgaaatcggtgctgtagatgttgccct

SEQ ID NO: 272992 - DNA, 55 bp, Artificial
  Synthetic oligonucleotide
atcgttcatcattctcagctctctatcgggtctggagtccctagcatcctgacta

SEQ ID NO: 272993 - DNA, 55 bp, Artificial
  Synthetic oligonucleotide
atctacagtaattgatattgtaaccctcggaggaaacgcgcgtaccactctccca

SEQ ID NO: 272994 - DNA, 55 bp, Artificial
  Synthetic oligonucleotide
tcgtggtttcatccaagtgacgcggtagaggtagttgaattagcaacccatggat

SEQ ID NO: 272995 - DNA, 55 bp, Artificial
  Synthetic oligonucleotide
tcgtgggctttatgggtaaatggcacagggtataaaccgctgaggcaagtgccgt

SEQ ID NO: 272996 - DNA, 55 bp, Artificial
  Synthetic oligonucleotide
agcgttgattccattagcgaaggcgaactttagcatatcaacaacgggaatcgag

SEQ ID NO: 272997 - DNA, 55 bp, Artificial
  Synthetic oligonucleotide
agctaaatcagttgacctcttacattcggaaactcccaagataagcgcatccatg

SEQ ID NO: 272998 - DNA, 55 bp, Artificial
  Synthetic oligonucleotide
tcgtattccgcgaatcatgaagtcatgcaattacctctgaagagctgactgtccc

SEQ ID NO: 272999 - DNA, 55 bp, Artificial
  Synthetic oligonucleotide
tcgtatgtgcagaatgtgagaatgccaataataggggtgctgaggtgccttgaaa

SEQ ID NO: 273000 - DNA, 55 bp, Artificial
  Synthetic oligonucleotide
tcgtatcagagacgcctgcgtcggtactaataaggaataggattcattatatgcg

SEQ ID NO: 273001 - DNA, 56 bp, Artificial
  Synthetic oligonucleotide
cattgtaaaaattatatgcaacactgtaattgatttattaaggtagacttaaataa

SEQ ID NO: 273002 - DNA, 55 bp, Artificial
  Synthetic oligonucleotide
agctcagtgtgaaccccatgaactgggagtgcgctgaaggcataccgtaaccgga

SEQ ID NO: 273003 - DNA, 55 bp, Artificial
  Synthetic oligonucleotide
agctcctcataaatatatagccgtgctaccccatcaggatgcattacgatgtcag

SEQ ID NO: 273004 - DNA, 55 bp, Artificial
  Synthetic oligonucleotide
agctcgctgtgggatctcgtaggaaacacacgtcgctctcttgccctctcgctct

SEQ ID NO: 273005 - DNA, 55 bp, Artificial
  Synthetic oligonucleotide
agctcggggagtgcactacaggtactattgcgcatcgggcttagccaagggtctc

SEQ ID NO: 273006 - DNA, 55 bp, Artificial
  Synthetic oligonucleotide
tcggttgggcctgcacgcagcttattggtatttcgaaccggagagtccagtacta

SEQ ID NO: 273007 - DNA, 55 bp, Artificial
  Synthetic oligonucleotide
tcgggtaacagaataaatgatcgcaacggaatcttcatgtgcaattcgccaaatg

SEQ ID NO: 273008 - DNA, 55 bp, Artificial
  Synthetic oligonucleotide
tcggcatctgatgccttagttgtgctactcagaagaatatgttccccatatgcga

SEQ ID NO: 273009 - DNA, 55 bp, Artificial
  Synthetic oligonucleotide
tcgctagacgaaatgccgcttagagaacgtggaagaagagtgtgatgtggaagat

SEQ ID NO: 273010 - DNA, 55 bp, Artificial
  Synthetic oligonucleotide
tcgccctatctatactacatctatgccacgctactgtattctagccgaggatttt

SEQ ID NO: 273011 - DNA, 55 bp, Artificial
  Synthetic oligonucleotide
tcgcattatggggttgtgtcgggccagtggaaaagaccgggctggactgggcaaa

SEQ ID NO: 273012 - DNA, 54 bp, Artificial
  Synthetic oligonucleotide
gataaactgagagctcccaaactttattcgggaatactaactcatccgaaaggg

SEQ ID NO: 273013 - DNA, 55 bp, Artificial
  Synthetic oligonucleotide
aggaattcacagccacatgcaatgcaacggtttgatataccatcacgtatccgtg

SEQ ID NO: 273014 - DNA, 54 bp, Artificial
  Synthetic oligonucleotide
tctggtacgttggggtgggacatatttgcctcgaactttattctttcgaaggcc

SEQ ID NO: 273015 - DNA, 55 bp, Artificial
  Synthetic oligonucleotide
tctgcttaggagacacgaagtcacctaatagatcgcgcctgttatacatctcaaa

SEQ ID NO: 273016 - DNA, 51 bp, Artificial
  Synthetic oligonucleotide
agcctaggaagatggtcccgcccctccgttttctgcccccgtcggaggccc

SEQ ID NO: 273017 - DNA, 55 bp, Artificial
  Synthetic oligonucleotide
agcctctggcttaaatccgctgacaaagttcatttcgcacgtgtatatttgggct

SEQ ID NO: 273018 - DNA, 55 bp, Artificial
  Synthetic oligonucleotide
agcctgacccgtaggtccacctccagatgtcatcgcgaaaatattatactttccg

SEQ ID NO: 273019 - DNA, 52 bp, Artificial
  Synthetic oligonucleotide
agccttacaaaatacccctattaggaaattcccgtaatcccagagggttgca

SEQ ID NO: 273020 - DNA, 55 bp, Artificial
  Synthetic oligonucleotide
tctgcgttacttatactatgttgtcttcgtccacgcattactaagggccatccac

SEQ ID NO: 273021 - DNA, 55 bp, Artificial
  Synthetic oligonucleotide
tctgcgtgccaatgccccggcgcctagttgtccggagtgtgctgtcccagagtgt

SEQ ID NO: 273022 - DNA, 55 bp, Artificial
  Synthetic oligonucleotide
tctgcatgaggagcaaatgcgcgggctctcataatggcacacttggtgccacctt

SEQ ID NO: 273023 - DNA, 59 bp, Artificial
  Synthetic oligonucleotide
aacgatcttgccgccattatactacaataacggcagcacggtaagccaaggtgccaaca

SEQ ID NO: 273024 - DNA, 55 bp, Artificial
  Synthetic oligonucleotide
agcgacagcgttcatggtttcaccatttggaccgatagtaactcttagggtgacc

SEQ ID NO: 273025 - DNA, 55 bp, Artificial
  Synthetic oligonucleotide
agcgagtcgctaccatcctctggtctgtctaatggtcccacaaattccactaggt

SEQ ID NO: 273026 - DNA, 55 bp, Artificial
  Synthetic oligonucleotide
tctcatggcgttaacaactctaccgctaagtgttctttcgcaggagttggttccg

SEQ ID NO: 273027 - DNA, 55 bp, Artificial
  Synthetic oligonucleotide
tctatggaccttgcaaatgggtaacatcaatgtgggttacgttagtgcccatcac

SEQ ID NO: 273028 - DNA, 55 bp, Artificial
  Synthetic oligonucleotide
tctaggctgatctgctaatactggcgatgaaggagcactttgagacttcgtccgt

SEQ ID NO: 273029 - DNA, 55 bp, Artificial
  Synthetic oligonucleotide
tctagcagaaatcttgaagaccttgggtcaggatgtgacttggtcagccactccc

SEQ ID NO: 273030 - DNA, 55 bp, Artificial
  Synthetic oligonucleotide
agcggcatatggaagatcgaagttgttcataacctctggatgtaatacacctagt

SEQ ID NO: 273031 - DNA, 55 bp, Artificial
  Synthetic oligonucleotide
tcgttgtgatagtacatgcgattttaacctcatttggtttgatcgtaattgccct

SEQ ID NO: 273032 - DNA, 55 bp, Artificial
  Synthetic oligonucleotide
tcgttctcagcttgaatcatgcgcagatacaaatctggagttgcagtgagggcac

SEQ ID NO: 273033 - DNA, 55 bp, Artificial
  Synthetic oligonucleotide
tcgttatgtagttcaagcaatgtatatgataccgagtttacccctgtaagctggc

SEQ ID NO: 273034 - DNA, 55 bp, Artificial
  Synthetic oligonucleotide
ccagcagttcaatcttaattaatattcttactcgttacttatttatactccctcc

SEQ ID NO: 273035 - DNA, 54 bp, Artificial
  Synthetic oligonucleotide
gtttgacttttaatcaatttatgcgtggttcaattccggcttttcctattataa

SEQ ID NO: 273036 - DNA, 55 bp, Artificial
  Synthetic oligonucleotide
tcctaacttgaagtttcggcccttatcgattttaagtcattcgtagtcaatggtg

SEQ ID NO: 273037 - DNA, 55 bp, Artificial
  Synthetic oligonucleotide
tcctaacaccgtttctttgtggtggaatgacacaactgttatggttacgtacatc

SEQ ID NO: 273038 - DNA, 55 bp, Artificial
  Synthetic oligonucleotide
tccgtgcattgtttgccgataaggatgttatgcgtgaattaagactgcacatagg

SEQ ID NO: 273039 - DNA, 55 bp, Artificial
  Synthetic oligonucleotide
tccgtacaccacatacctaatcaaatccgtacaccacatacctaatcaaatccgt

SEQ ID NO: 273040 - DNA, 55 bp, Artificial
  Synthetic oligonucleotide
tccgcttcggcgatggctacagcggtagctagaccttgtgaatgaccggtagcac

SEQ ID NO: 273041 - DNA, 55 bp, Artificial
  Synthetic oligonucleotide
aggggtatcgttatgctcaatcctacggtgacggttaaaggactcgttagtagca

SEQ ID NO: 273042 - DNA, 55 bp, Artificial
  Synthetic oligonucleotide
tccgataaggacgattaagaagaacctgtaacggggcatcgtccaaccatttgcg

SEQ ID NO: 273043 - DNA, 55 bp, Artificial
  Synthetic oligonucleotide
aggtaaagtactcctgcgggttgcgtacgatcactcagagggttgcggtaactgc

SEQ ID NO: 273044 - DNA, 55 bp, Artificial
  Synthetic oligonucleotide
tcccgcatataagtcgccatctaaacattgtagttgagaaacggacctccaatca

SEQ ID NO: 273045 - DNA, 55 bp, Artificial
  Synthetic oligonucleotide
aggtctggcagaaccaatgtgatcagtctcatgtagggaatatggttcgtcgcag

SEQ ID NO: 273046 - DNA, 58 bp, Artificial
  Synthetic oligonucleotide
ggcgtcctcatgtcgtaatccttgttcgctcgattttttttctgcgaacccgtgcgca

SEQ ID NO: 273047 - DNA, 55 bp, Artificial
  Synthetic oligonucleotide
aggtggtgaaatagcacactcggcaacacctgtagctttaccttatggtgcatgg

SEQ ID NO: 273048 - DNA, 55 bp, Artificial
  Synthetic oligonucleotide
tccccaccgctccagacactggcgcccacaatagcaggccgtctgagaaggtact

SEQ ID NO: 273049 - DNA, 55 bp, Artificial
  Synthetic oligonucleotide
agtaaagtcccatcttgtcatgatggtttatgtcagtgcaactctgattagattc

SEQ ID NO: 273050 - DNA, 55 bp, Artificial
  Synthetic oligonucleotide
agtaatgagcttacggaatgttcgtcccactgggagggagtggcaataccgtcta

SEQ ID NO: 273051 - DNA, 55 bp, Artificial
  Synthetic oligonucleotide
agtacaagctcaaccattggcgattcgagcatgcccgcaaacggccacagaccga

SEQ ID NO: 273052 - DNA, 50 bp, Artificial
  Synthetic oligonucleotide
agtaccgatacgacccaagttacgaccaccagtaacgtaaaccaacttac

SEQ ID NO: 273053 - DNA, 55 bp, Artificial
  Synthetic oligonucleotide
tccattgcaatcccacctggagtaaacggcaattgagaagtagaacctctgatag

SEQ ID NO: 273054 - DNA, 55 bp, Artificial
  Synthetic oligonucleotide
tccatacaaacggaatccagtaccgaagaaaacaccagtaccctgcaatagaggt

SEQ ID NO: 273055 - DNA, 55 bp, Artificial
  Synthetic oligonucleotide
tccaggaagaaaagctgtgctttcccgatcagtagcagcctgcagcacacgacct

SEQ ID NO: 273056 - DNA, 55 bp, Artificial
  Synthetic oligonucleotide
aggacgacgggtatatgctcattaagaagagcgttcgattatactttaccgtcac

SEQ ID NO: 273057 - DNA, 58 bp, Artificial
  Synthetic oligonucleotide
gaaaatgatcattacccggtatcctaatattatgaagaagggcatctcaatttaactc

SEQ ID NO: 273058 - DNA, 55 bp, Artificial
  Synthetic oligonucleotide
aggatacggggatatgggacgtatacgactggtagcaggatgtgtgaatgctcct

SEQ ID NO: 273059 - DNA, 55 bp, Artificial
  Synthetic oligonucleotide
aggatagcgacgacttgaatgaccccgtagatctcacagatttgaggtactgcag

SEQ ID NO: 273060 - DNA, 55 bp, Artificial
  Synthetic oligonucleotide
tcgatgttattgagtcgccattctggcacagatctatcgtggatctgagacccga

SEQ ID NO: 273061 - DNA, 55 bp, Artificial
  Synthetic oligonucleotide
aggatgcccttagtgcaagaagactcgctgaggatccagagaggttgagtcggat

SEQ ID NO: 273062 - DNA, 55 bp, Artificial
  Synthetic oligonucleotide
aggattgtttctccgagcgactttgtattcaacccgttgttagtggtcattgtgc

SEQ ID NO: 273063 - DNA, 55 bp, Artificial
  Synthetic oligonucleotide
aggcacacctccgtaacctaattccaagcttgcttagtgaagatattgcacgaac

SEQ ID NO: 273064 - DNA, 55 bp, Artificial
  Synthetic oligonucleotide
tcgatattactctcgtctgtcaacgatactaggcccgttagctcttccagttggc

SEQ ID NO: 273065 - DNA, 55 bp, Artificial
  Synthetic oligonucleotide
tcgatatgggtaatgacgatctttcctttgtggatgatcttttgtcgagacagcg

SEQ ID NO: 273066 - DNA, 55 bp, Artificial
  Synthetic oligonucleotide
tcgagtgcatataacggtgataggtcgtctatttctcctggccatattgtctctg

SEQ ID NO: 273067 - DNA, 51 bp, Artificial
  Synthetic oligonucleotide
tcgacattcttcccgggccttaacggcttcttaactaatattaccctaaac

SEQ ID NO: 273068 - DNA, 58 bp, Artificial
  Synthetic oligonucleotide
caaaaatagtgccagcagttgcggttacactatgaaggctaacgttaatcattaaggc

SEQ ID NO: 273069 - DNA, 55 bp, Artificial
  Synthetic oligonucleotide
tcgaatgacactattgacgtgctttgagcctaacaggcagtcgcagtttggttcc

SEQ ID NO: 273070 - DNA, 55 bp, Artificial
  Synthetic oligonucleotide
aggccgggctactctattgtctctatggagcgcagcgggctagcaggggattccc

SEQ ID NO: 273071 - DNA, 55 bp, Artificial
  Synthetic oligonucleotide
tcgaactgtgacccctcactggtaatctcatcgaaatgttcgttaatatggtcca

SEQ ID NO: 273072 - DNA, 55 bp, Artificial
  Synthetic oligonucleotide
tccttctagatttactgacgctccgtctatgatcatgtgatgctccttctagcgc

SEQ ID NO: 273073 - DNA, 54 bp, Artificial
  Synthetic oligonucleotide
tcctgaactgacctccaagggtgggaaaactaagggttatctgcttttcgctgg

SEQ ID NO: 273074 - DNA, 55 bp, Artificial
  Synthetic oligonucleotide
tcctatgcatggcatcccgcgcagtcaaagatgcattaagactagtccatttacc

SEQ ID NO: 273075 - DNA, 55 bp, Artificial
  Synthetic oligonucleotide
tcctatccaatccttagtatcataaacttccgagggtaattgccaactgactagg

SEQ ID NO: 273076 - DNA, 55 bp, Artificial
  Synthetic oligonucleotide
cacaaccttacaccatgtcggaactatcgggtggctgcgaattatcctaatacgg

SEQ ID NO: 273077 - DNA, 55 bp, Artificial
  Synthetic oligonucleotide
cacaaggagaggcaacgtccggtatgtgtcttcatgtggatgtcgaagtaacttg

SEQ ID NO: 273078 - DNA, 55 bp, Artificial
  Synthetic oligonucleotide
cacaagggaatattctatgtaatgcatgtgggttgttccaaaagttgcatgggac

SEQ ID NO: 273079 - DNA, 50 bp, Artificial
  Synthetic oligonucleotide
tccccttaaattatctgagggaaggaggggacaaatttattcccccccca

SEQ ID NO: 273080 - DNA, 55 bp, Artificial
  Synthetic oligonucleotide
cacaagtcaataccatactaaaacggcataaaataccactatgggatgacctgtc

SEQ ID NO: 273081 - DNA, 55 bp, Artificial
  Synthetic oligonucleotide
cacacagcctattaactaccgtgtgatttactgagcgaccgcctccactcgcgga

SEQ ID NO: 273082 - DNA, 55 bp, Artificial
  Synthetic oligonucleotide
cacacatcgaacacacctcactctccacacatcgaacacacctcactctccacac

SEQ ID NO: 273083 - DNA, 55 bp, Artificial
  Synthetic oligonucleotide
cacacgagcaaggggatgagctttcgagagagcttggtataccttttgtcgaggc

SEQ ID NO: 273084 - DNA, 55 bp, Artificial
  Synthetic oligonucleotide
cacacgtgacagaacagaggctagctgttctttggacattacgaataagcttctg

SEQ ID NO: 273085 - DNA, 55 bp, Artificial
  Synthetic oligonucleotide
tactacacgacgtggtgtcatcattgtaagaggctaggtcccatctatgaagaat

SEQ ID NO: 273086 - DNA, 55 bp, Artificial
  Synthetic oligonucleotide
cacacgttgataagacgggagtaagatcacacacatcatacttcccttaagtacg

SEQ ID NO: 273087 - DNA, 55 bp, Artificial
  Synthetic oligonucleotide
cacaggcgcaggatagttttgttcctcggtactagaccgaaggttcccatgcgag

SEQ ID NO: 273088 - DNA, 52 bp, Artificial
  Synthetic oligonucleotide
tactaaacgagcccacttcgttgcctgtaagaaagttaacggttctaccggc

SEQ ID NO: 273089 - DNA, 55 bp, Artificial
  Synthetic oligonucleotide
cacatttggacgtataccagaagcaatgttccgctccattaacaatcttttagag

SEQ ID NO: 273090 - DNA, 60 bp, Artificial
  Synthetic oligonucleotide
gcagtgatcatttcacctgacgccggtggtgccaagagagctaccgctatagctgacgca

SEQ ID NO: 273091 - DNA, 55 bp, Artificial
  Synthetic oligonucleotide
caccaaggaccactggataccagatagtaagagaaactcgtgtcgctactgccac

SEQ ID NO: 273092 - DNA, 55 bp, Artificial
  Synthetic oligonucleotide
tacgttaagttaacggatactcgaccttcccctattggaagcatctaaagatgag

SEQ ID NO: 273093 - DNA, 55 bp, Artificial
  Synthetic oligonucleotide
tacgtcggttgtttcgctaaaggtactcaagtgctcatggctgatggttccaacc

SEQ ID NO: 273094 - DNA, 55 bp, Artificial
  Synthetic oligonucleotide
caccacagaacttgcatgttacgttgactcccaatattccattcgcctcggaagc

SEQ ID NO: 273095 - DNA, 55 bp, Artificial
  Synthetic oligonucleotide
caccagactggatagggcatggcaacttggcatgtaacttgaaaccctccgtgtc

SEQ ID NO: 273096 - DNA, 54 bp, Artificial
  Synthetic oligonucleotide
caagtcaaaggcacctcttgcggtaaagaaaggttgtgtgaacgtggtgtttaa

SEQ ID NO: 273097 - DNA, 55 bp, Artificial
  Synthetic oligonucleotide
caagtctagtctcccttgaaagtgcatgacgagatttgatttgcagctctctctg

SEQ ID NO: 273098 - DNA, 55 bp, Artificial
  Synthetic oligonucleotide
caatacctcctcgcttctgatcgatgttcaaaagtataacaagacagccaaacga

SEQ ID NO: 273099 - DNA, 55 bp, Artificial
  Synthetic oligonucleotide
caatagcccatgacagataaccgaaaattgactgcatgaatatcagacctggaat

SEQ ID NO: 273100 - DNA, 55 bp, Artificial
  Synthetic oligonucleotide
caatatggagggtagaacaacagtacagtgagtaggacatggtggatggtagggt

SEQ ID NO: 273101 - DNA, 59 bp, Artificial
  Synthetic oligonucleotide
tagatcttatcgtctaatggttacgacatcaacttttcatgttgaaaatgttggttcaa

SEQ ID NO: 273102 - DNA, 55 bp, Artificial
  Synthetic oligonucleotide
caatcaacactaacgctgcgacagcagctgctaatgccagaaatgctactttcac

SEQ ID NO: 273103 - DNA, 55 bp, Artificial
  Synthetic oligonucleotide
caatcatagttgtcagcatagtcttgagcgtaggaggccaaagtatcggaccagg

SEQ ID NO: 273104 - DNA, 55 bp, Artificial
  Synthetic oligonucleotide
caatgaatataacaccactgccggtaatgccagtgtaaagtcccaatctgctact

SEQ ID NO: 273105 - DNA, 55 bp, Artificial
  Synthetic oligonucleotide
caatgagggtgtcaggacactagtactacgctcactgcacgagctctacagctcc

SEQ ID NO: 273106 - DNA, 55 bp, Artificial
  Synthetic oligonucleotide
caatgccctatgaaggaatttgtaacatcgggtaatctgtgccgattagcagtga

SEQ ID NO: 273107 - DNA, 55 bp, Artificial
  Synthetic oligonucleotide
caatggccttgaactacacggcatgaactgcggttacgaatgacgagtcctagcg

SEQ ID NO: 273108 - DNA, 55 bp, Artificial
  Synthetic oligonucleotide
caatgtcacccatgggctccgcgactgacacacggcgattcctcagaataccaca

SEQ ID NO: 273109 - DNA, 55 bp, Artificial
  Synthetic oligonucleotide
caatgtcgtaccggtgagtcaacctctaagcacgcatacctttgactccagtgtg

SEQ ID NO: 273110 - DNA, 55 bp, Artificial
  Synthetic oligonucleotide
caattcaactagcactacgaatacgggacttttcggtgcaaagcctgattctcag

SEQ ID NO: 273111 - DNA, 55 bp, Artificial
  Synthetic oligonucleotide
caattcacccagggatgctaagatagcaccagtgagaactttggtaagcaatggc

SEQ ID NO: 273112 - DNA, 54 bp, Artificial
  Synthetic oligonucleotide
aacgaaggctaaagtagcaaatcggattcgatacccgagtagttttagcagtaa

SEQ ID NO: 273113 - DNA, 53 bp, Artificial
  Synthetic oligonucleotide
caattccaggttagtggggcgcttctacggtctcttctaaccaattgttcccc

SEQ ID NO: 273114 - DNA, 55 bp, Artificial
  Synthetic oligonucleotide
caattggaccccaactgtgtggtttcattcgagtactcaaagaagaatgaggacc

SEQ ID NO: 273115 - DNA, 55 bp, Artificial
  Synthetic oligonucleotide
cacaaactcgcaaaactacgacaatttctctgagaactaccgtagagtccaagat

SEQ ID NO: 273116 - DNA, 55 bp, Artificial
  Synthetic oligonucleotide
tacgatgtgcagccgctgtcttttgcggggttttaaagcgcgtcttgaagctacg

SEQ ID NO: 273117 - DNA, 49 bp, Artificial
  Synthetic oligonucleotide
cacggtatcccgccctagggggggggggacgggactatttatattaaga

SEQ ID NO: 273118 - DNA, 55 bp, Artificial
  Synthetic oligonucleotide
cacgtaatccgtatctatcagtgaacatatctccgatgacagctgggctagcact

SEQ ID NO: 273119 - DNA, 53 bp, Artificial
  Synthetic oligonucleotide
cacgtcccatacgtccaaacaaacccggatggctctgtaagaaacgagtaact

SEQ ID NO: 273120 - DNA, 55 bp, Artificial
  Synthetic oligonucleotide
tacgactacattttcctaacaaacgtgctcgccgtatcgtttccaaactcagagg

SEQ ID NO: 273121 - DNA, 55 bp, Artificial
  Synthetic oligonucleotide
tacgacccatcaagcatgtgaacgtttccagtatggaaccgaaaccatggtaggg

SEQ ID NO: 273122 - DNA, 55 bp, Artificial
  Synthetic oligonucleotide
tacgaatagtcgacgcaatgagacacttgtaacactcactctctagcagacattg

SEQ ID NO: 273123 - DNA, 54 bp, Artificial
  Synthetic oligonucleotide
tagatcccggttcgattccggtttactccataggttctatagcttaatagtaaa

SEQ ID NO: 273124 - DNA, 54 bp, Artificial
  Synthetic oligonucleotide
cacgttttgagtctctaaccctcaagttcgagtaccgtgggtatgaaagcggac

SEQ ID NO: 273125 - DNA, 55 bp, Artificial
  Synthetic oligonucleotide
cactaaaccctgggtcatataattgccttgcgacaaatctcgtttggtcattcga

SEQ ID NO: 273126 - DNA, 55 bp, Artificial
  Synthetic oligonucleotide
cactaattacaaggcgtctgagcgcgtgacttgagcgcgtgacgtaatcgcgagc

SEQ ID NO: 273127 - DNA, 55 bp, Artificial
  Synthetic oligonucleotide
cactaccatggatgagtcgatttcttgggcacttcgaaatttaccagggtgcttg

SEQ ID NO: 273128 - DNA, 55 bp, Artificial
  Synthetic oligonucleotide
cactacccgaagacccaagattggctatcggtgaagtcccattccaattcggtgt

SEQ ID NO: 273129 - DNA, 55 bp, Artificial
  Synthetic oligonucleotide
cactagaccagatattttgcatccctgtgacgttttagaggatgcagctgtcggt

SEQ ID NO: 273130 - DNA, 55 bp, Artificial
  Synthetic oligonucleotide
cactagacccatttcgactgtaacattctgtaataacgggaactatgtggccagc

SEQ ID NO: 273131 - DNA, 55 bp, Artificial
  Synthetic oligonucleotide
cactagggtttccagcaggctacgaaataagaagtagccactgcgttatataggg

SEQ ID NO: 273132 - DNA, 55 bp, Artificial
  Synthetic oligonucleotide
cactagtgatcattgactaccccgaatcattgagctcgttaatacccgtacgcat

SEQ ID NO: 273133 - DNA, 55 bp, Artificial
  Synthetic oligonucleotide
cactatagagatagaagaactcatgcatacacacgcaagatgaacggaattcaag

SEQ ID NO: 273134 - DNA, 59 bp, Artificial
  Synthetic oligonucleotide
tcccggatggggtgaacgatagcgatgtgtcaacaaaagtagcccgtgccctctcttga

SEQ ID NO: 273135 - DNA, 55 bp, Artificial
  Synthetic oligonucleotide
cactcaatggagagggtaccattggagacaaaaccttctgatgaacttgccgtat

SEQ ID NO: 273136 - DNA, 55 bp, Artificial
  Synthetic oligonucleotide
cactccatgttgtgtatctcgtcttagtgacaactggaatcttaggacataacgc

SEQ ID NO: 273137 - DNA, 55 bp, Artificial
  Synthetic oligonucleotide
caccatatgcgtgatgggaacgtctttggcagggttgagtatcaagtagtgcgtc

SEQ ID NO: 273138 - DNA, 55 bp, Artificial
  Synthetic oligonucleotide
caccatcggtctctgtagcttcgggctctatagctatgggttcggagtccgtgag

SEQ ID NO: 273139 - DNA, 55 bp, Artificial
  Synthetic oligonucleotide
cacccagctgtcatgcccaaatgaggctgttttcaataagctttactgcctcgtc

SEQ ID NO: 273140 - DNA, 52 bp, Artificial
  Synthetic oligonucleotide
caccgccagaggcagtggtgggtcccgggtagggtctggtaagggtaaggta

SEQ ID NO: 273141 - DNA, 55 bp, Artificial
  Synthetic oligonucleotide
caccgcggggcttcatgttctgcaaagtgatagtggagccgatggacacgtcacg

SEQ ID NO: 273142 - DNA, 55 bp, Artificial
  Synthetic oligonucleotide
caccgctaaaccctgcttttatgataccagacccattatccaatacgacaggttg

SEQ ID NO: 273143 - DNA, 55 bp, Artificial
  Synthetic oligonucleotide
caccgctcccaaagtcctttcgactaggtgctccgcaggacactctaaatacgtg

SEQ ID NO: 273144 - DNA, 55 bp, Artificial
  Synthetic oligonucleotide
tacggtaactcaaacgcatagctccgatatgtttgatgctacgctcaaaccgacc

SEQ ID NO: 273145 - DNA, 60 bp, Artificial
  Synthetic oligonucleotide
aattatttaatggtgcgcctctcagtgcgtatatttcgttgatgcgtctagcattagtat

SEQ ID NO: 273146 - DNA, 60 bp, Artificial
  Synthetic oligonucleotide
ggagggaatataatagatgctattccttgtattgttatataatataatgagactatttag

SEQ ID NO: 273147 - DNA, 60 bp, Artificial
  Synthetic oligonucleotide
gtgccaacagtcggagcatgaatgtctacgaggacggttgttctaataagaccatagcaa

SEQ ID NO: 273148 - DNA, 55 bp, Artificial
  Synthetic oligonucleotide
caccgtataacccgataatggtgatagctgagcgacaactgatgaaggtacactt

SEQ ID NO: 273149 - DNA, 55 bp, Artificial
  Synthetic oligonucleotide
cacctactaatgaagcgcaaccctggtttatttctgaagatctctcgaaaggccc

SEQ ID NO: 273150 - DNA, 55 bp, Artificial
  Synthetic oligonucleotide
cacgacctggtgagttcactccgagagaatgcgtagaagatatcttacaaggtgg

SEQ ID NO: 273151 - DNA, 55 bp, Artificial
  Synthetic oligonucleotide
tacggagtggagtatagagtttcgaagcatcccaactattataagacttcgaaac

SEQ ID NO: 273152 - DNA, 54 bp, Artificial
  Synthetic oligonucleotide
cacgcacctgaggaaggttcgtcgggacctcttaccgaggtcggtactccaaga

SEQ ID NO: 273153 - DNA, 55 bp, Artificial
  Synthetic oligonucleotide
cacgcatgtcgtatcgatccagcgacaggacaaggtctgaggacttggtgcgacg

SEQ ID NO: 273154 - DNA, 55 bp, Artificial
  Synthetic oligonucleotide
tacgctccgctacgctccgctacgctccgctacgctccgctccgcggacggacac

SEQ ID NO: 273155 - DNA, 55 bp, Artificial
  Synthetic oligonucleotide
cacgcgcgattagggcagcctgtcctctctcggcggcaagcacgtgacctgtatt

SEQ ID NO: 273156 - DNA, 55 bp, Artificial
  Synthetic oligonucleotide
cacgctcgggagaggatccgggttcgaagtgtcactcagcaacatcggggctact

SEQ ID NO: 273157 - DNA, 55 bp, Artificial
  Synthetic oligonucleotide
cacggaatgtcgcgttcggttccgaagtaactatccgatctcatggtctcagtcc

SEQ ID NO: 273158 - DNA, 53 bp, Artificial
  Synthetic oligonucleotide
tctatatacttattactccttatggggtcccggttggaccgagactcctccct

SEQ ID NO: 273159 - DNA, 55 bp, Artificial
  Synthetic oligonucleotide
cacggatcttaaagtgggagaaatctcctcagatatgacagtttgctcgtattgt

SEQ ID NO: 273160 - DNA, 55 bp, Artificial
  Synthetic oligonucleotide
attacaaatggcagtaacgccggcactatgtcttcccgtaaattccatcacgggc

SEQ ID NO: 273161 - DNA, 55 bp, Artificial
  Synthetic oligonucleotide
attacgaagcaatggataggcactacgtaacgaacgacaaatagtctctgagccc

SEQ ID NO: 273162 - DNA, 55 bp, Artificial
  Synthetic oligonucleotide
attagtctgggactcgttcgatacctttattgtgttgaacaacttgggctacttg

SEQ ID NO: 273163 - DNA, 55 bp, Artificial
  Synthetic oligonucleotide
attccgtgagctagtaggaacattcacctcgctagtttcacacagtcaacgcaac

SEQ ID NO: 273164 - DNA, 55 bp, Artificial
  Synthetic oligonucleotide
tagccggtggccctgaatcattttacgcaacgttgtaaagacgtactgtcgtagt

SEQ ID NO: 273165 - DNA, 55 bp, Artificial
  Synthetic oligonucleotide
tagccggggatcatctgtgtagccgttaatctcttatccgctaattatgtaatcc

SEQ ID NO: 273166 - DNA, 55 bp, Artificial
  Synthetic oligonucleotide
tagccctaccctatcaacttgcgattgctacgggtactgcgaacctggcaggtcg

SEQ ID NO: 273167 - DNA, 55 bp, Artificial
  Synthetic oligonucleotide
attctgatctagcacaccatcggtctctgtagcttcgggctctatagctatgggt

SEQ ID NO: 273168 - DNA, 55 bp, Artificial
  Synthetic oligonucleotide
attgaaacccgtgacagccaccgctctccacaagcacacgcaacacctcttggga

SEQ ID NO: 273169 - DNA, 51 bp, Artificial
  Synthetic oligonucleotide
ttgtaggacacccccctataggattacaaccgactccacccctaagtaggg

SEQ ID NO: 273170 - DNA, 55 bp, Artificial
  Synthetic oligonucleotide
attgagaaagctcgtcccaaaaggctgcatggtctataggtggtcccgaacccga

SEQ ID NO: 273171 - DNA, 55 bp, Artificial
  Synthetic oligonucleotide
attgagcacagccctatcttcttgtaggttggttatcactccgctgccttcattg

SEQ ID NO: 273172 - DNA, 55 bp, Artificial
  Synthetic oligonucleotide
attgatagaaggctcagggaaggtgcccgtgttattactagaagaatcccaactg

SEQ ID NO: 273173 - DNA, 55 bp, Artificial
  Synthetic oligonucleotide
tagcccacatagatgatgcaccaatgtatctaactgaaccttccacaatgacatc

SEQ ID NO: 273174 - DNA, 55 bp, Artificial
  Synthetic oligonucleotide
attgcgtcattctgatcccgtgtctcattcctcactgtctgattgttatgctagc

SEQ ID NO: 273175 - DNA, 55 bp, Artificial
  Synthetic oligonucleotide
attggcgattcgagcatgcccgcaaacggccacagaccgatgtagttgctgccac

SEQ ID NO: 273176 - DNA, 53 bp, Artificial
  Synthetic oligonucleotide
attggggttcccttttagtttgttagacaatccctcatacgaaagatctccta

SEQ ID NO: 273177 - DNA, 55 bp, Artificial
  Synthetic oligonucleotide
attgggttgaatttagaaggcggcccagcaatgttcggttcaaatataagcctac

SEQ ID NO: 273178 - DNA, 55 bp, Artificial
  Synthetic oligonucleotide
atttccggatttccgttgatatagtcgaaagccgaggtagcagcagagaagcgca

SEQ ID NO: 273179 - DNA, 55 bp, Artificial
  Synthetic oligonucleotide
tagtgcatcttcatcgatacatgctcctctgccgacgttgataattcttacgcca

SEQ ID NO: 273180 - DNA, 54 bp, Artificial
  Synthetic oligonucleotide
ccgtatttcctataatggggatataggttaaataatatatacccggatcctatg

SEQ ID NO: 273181 - DNA, 55 bp, Artificial
  Synthetic oligonucleotide
tagtgataggaactccaagtccgtcatcctagatcttcacgattctggggataac

SEQ ID NO: 273182 - DNA, 55 bp, Artificial
  Synthetic oligonucleotide
atgcgtggttcaattccggcttttcctattataaccgccagatgtattttgtttg

SEQ ID NO: 273183 - DNA, 55 bp, Artificial
  Synthetic oligonucleotide
atgcgttttacccaaagaaggttctgacggtgtcaaattggctatattaacgtgc

SEQ ID NO: 273184 - DNA, 55 bp, Artificial
  Synthetic oligonucleotide
atgctaaatttccagctgctcccaaggcaccctttgagatctagatatagccgag

SEQ ID NO: 273185 - DNA, 55 bp, Artificial
  Synthetic oligonucleotide
atgctatctcgtggctaaactatattacgcagaacaaccttgagaatgcgagggc

SEQ ID NO: 273186 - DNA, 55 bp, Artificial
  Synthetic oligonucleotide
atgctccggagtgcttgtatgaactatactgttgatgttgcttattagggcttga

SEQ ID NO: 273187 - DNA, 55 bp, Artificial
  Synthetic oligonucleotide
tagtccagatcggacgatggtggctaaggtatgaaggaaagtggtacccttagca

SEQ ID NO: 273188 - DNA, 55 bp, Artificial
  Synthetic oligonucleotide
atggataggaagaatagcatcgagtacactttgctgtcgagatgctacaatccag

SEQ ID NO: 273189 - DNA, 55 bp, Artificial
  Synthetic oligonucleotide
atggattcacaggccgtcttataggtattcgtgtataggattgaagcatcgtatc

SEQ ID NO: 273190 - DNA, 55 bp, Artificial
  Synthetic oligonucleotide
taggttggctgccttaccaaagttaaccgcttgtagaccacctagagaagaggcc

SEQ ID NO: 273191 - DNA, 60 bp, Artificial
  Synthetic oligonucleotide
tctacttttgaagagctcaaaaagcgaagactcgcggcaaaaaatgatgtatatggctac

SEQ ID NO: 273192 - DNA, 55 bp, Artificial
  Synthetic oligonucleotide
atggtcacttttgttagaagtgagccgcataaaatggcatgtcggcacagcctac

SEQ ID NO: 273193 - DNA, 55 bp, Artificial
  Synthetic oligonucleotide
atggtgatcgtgggttatcacccatgcagatccagaatagagaatggctagacat

SEQ ID NO: 273194 - DNA, 55 bp, Artificial
  Synthetic oligonucleotide
atggtgcgcggtgcctatgtcgggaagctatacccggggagaactgtcgctgatg

SEQ ID NO: 273195 - DNA, 55 bp, Artificial
  Synthetic oligonucleotide
taggaggggaccgatatgagttagaagcaagacgacagacatgcgcttaaaaccc

SEQ ID NO: 273196 - DNA, 55 bp, Artificial
  Synthetic oligonucleotide
atgtctaacagctgggtattggacagcgaaagagtgcaaactaccatcgtgcccc

SEQ ID NO: 273197 - DNA, 55 bp, Artificial
  Synthetic oligonucleotide
atgtggagtattgttttatggcactcatgtgtattcgtatgcgcagaatgtggga

SEQ ID NO: 273198 - DNA, 55 bp, Artificial
  Synthetic oligonucleotide
atgtttatatgctacaggagctgtctaaccagagcactctgtaagtcgcgagctt

SEQ ID NO: 273199 - DNA, 55 bp, Artificial
  Synthetic oligonucleotide
tagaacccttacacaaagtctcgttcttaaagagggcgcatcttgcatacccatc

SEQ ID NO: 273200 - DNA, 55 bp, Artificial
  Synthetic oligonucleotide
caacgctccaacacacattttgaaaggtgtcgaaaacgttaatgtgtccaacgat

SEQ ID NO: 273201 - DNA, 54 bp, Artificial
  Synthetic oligonucleotide
caacgtaacccgtctgagcagttggtccggaatcccggtcatactttattacga

SEQ ID NO: 273202 - DNA, 59 bp, Artificial
  Synthetic oligonucleotide
ggctcgaagaccagtttcccagagagttagcccaagaatcaagttcattcttgtgcaaa

SEQ ID NO: 273203 - DNA, 55 bp, Artificial
  Synthetic oligonucleotide
caacgtagacatcagcatttttgtttgcaaatagtttatggtcctggaaacgctt

SEQ ID NO: 273204 - DNA, 55 bp, Artificial
  Synthetic oligonucleotide
caacgtatgcaggccttgcatgtctagggtccactacgctgatttactagcgagg

SEQ ID NO: 273205 - DNA, 55 bp, Artificial
  Synthetic oligonucleotide
caacgttctctaggtcgacgtctatgaacaacttatcgtcaggaacctctgcaaa

SEQ ID NO: 273206 - DNA, 55 bp, Artificial
  Synthetic oligonucleotide
caactacctctaccgcgtcacttggatgaaaccacgattacaaacgctgtggact

SEQ ID NO: 273207 - DNA, 55 bp, Artificial
  Synthetic oligonucleotide
caactggaaatcaatcgaacctatggtccatggagtagattggttaacaaggatg

SEQ ID NO: 273208 - DNA, 54 bp, Artificial
  Synthetic oligonucleotide
caacttgcttccacgaccaagggtctaatgaacggttacttaacgacaagcctc

SEQ ID NO: 273209 - DNA, 55 bp, Artificial
  Synthetic oligonucleotide
caagaacaatagtcaacagacacccaattcccagtccacatctgggtccctgctc

SEQ ID NO: 273210 - DNA, 55 bp, Artificial
  Synthetic oligonucleotide
caagaatcgttgggttggagatctgccagaagtgatgtttgtgtaaaggaaggtg

SEQ ID NO: 273211 - DNA, 55 bp, Artificial
  Synthetic oligonucleotide
caagacctcatcatttgttcgttgtgcgttataacgattgttagtagagcaggcg

SEQ ID NO: 273212 - DNA, 55 bp, Artificial
  Synthetic oligonucleotide
caagactagcgttggcttataagtgccatcgcttaatggttcccaaacgtaagca

SEQ ID NO: 273213 - DNA, 60 bp, Artificial
  Synthetic oligonucleotide
agcggaggtgacatcagaagactcaatggacgactcttcagacgtctcgcctgacgtggt

SEQ ID NO: 273214 - DNA, 55 bp, Artificial
  Synthetic oligonucleotide
caagagccagctcgctattcattagaagataccctaatgatcagaatgacagcgc

SEQ ID NO: 273215 - DNA, 55 bp, Artificial
  Synthetic oligonucleotide
caagctagtaaggtgcttcgggtcataattacatgggtcttgaacgtactctgcg

SEQ ID NO: 273216 - DNA, 55 bp, Artificial
  Synthetic oligonucleotide
caagggagagagcgtcggctcttacgtgcaaatgtgaagcgctacttttggaccc

SEQ ID NO: 273217 - DNA, 55 bp, Artificial
  Synthetic oligonucleotide
caagtaggatagtccaaaagggaggatgcaaattctttgttttccacgcagtaag

SEQ ID NO: 273218 - DNA, 55 bp, Artificial
  Synthetic oligonucleotide
caagtagtagagcagtggttgaattcgaaagtaccggaaccaaactggtcaactc

SEQ ID NO: 273219 - DNA, 55 bp, Artificial
  Synthetic oligonucleotide
atttgtccaacgatcccgtacatgctaggatagagagtaattttactattaccca

SEQ ID NO: 273220 - DNA, 55 bp, Artificial
  Synthetic oligonucleotide
tagatggtaaagcaccggtagaaggttgagggcacgatgttagtgaaagggtcaa

SEQ ID NO: 273221 - DNA, 55 bp, Artificial
  Synthetic oligonucleotide
caaaacatacatcagggactcctggccatacatctagtatagtttgatccagcta

SEQ ID NO: 273222 - DNA, 55 bp, Artificial
  Synthetic oligonucleotide
caaacgtgttaagcttactgtttaggtgtgtggtacaagcgttgctcatatcgcc

SEQ ID NO: 273223 - DNA, 55 bp, Artificial
  Synthetic oligonucleotide
caaactgggcattgatatgtcgttttgttgaacgttagcgtaggagatggcggac

SEQ ID NO: 273224 - DNA, 56 bp, Artificial
  Synthetic oligonucleotide
agcggattacgatggttccggcgtcacgttagtggacttcccaggccatgtcaagt

SEQ ID NO: 273225 - DNA, 55 bp, Artificial
  Synthetic oligonucleotide
tagagagttagggttcacccccctaatgcttatcagcattatgaggtaccactct

SEQ ID NO: 273226 - DNA, 55 bp, Artificial
  Synthetic oligonucleotide
caaagcccatttacactatcatggctctagatattgtagaaatcccaactaagcc

SEQ ID NO: 273227 - DNA, 55 bp, Artificial
  Synthetic oligonucleotide
caaaggatgtgatcttagattgcgttaccttagattttgtatgtgcagccagacc

SEQ ID NO: 273228 - DNA, 55 bp, Artificial
  Synthetic oligonucleotide
caaatgggagacttcatgacttatagaggataatgggttagaatcgttgatatcc

SEQ ID NO: 273229 - DNA, 55 bp, Artificial
  Synthetic oligonucleotide
caacaaatccgcgtcttgaagagcctcatatgtcgcaattgttgcaaacttagag

SEQ ID NO: 273230 - DNA, 55 bp, Artificial
  Synthetic oligonucleotide
caacaatagcacgccgcggttgcatagcaacaactgggatggctccaggtcagcg

SEQ ID NO: 273231 - DNA, 55 bp, Artificial
  Synthetic oligonucleotide
caacagtatagtgggatactatcacgacaatgacagctgctgtaacatcctccaa

SEQ ID NO: 273232 - DNA, 55 bp, Artificial
  Synthetic oligonucleotide
caacagtcagactgacaaaatattaacagtaggagctgggtgtttctggggtact

SEQ ID NO: 273233 - DNA, 55 bp, Artificial
  Synthetic oligonucleotide
caacatggctatgcatttgtagagggtttaacattatctaccaacctcttcgttt

SEQ ID NO: 273234 - DNA, 55 bp, Artificial
  Synthetic oligonucleotide
caaccccaggtatagaattttgcatcgctcgaccttttctcgtataattcatgcc

SEQ ID NO: 273235 - DNA, 56 bp, Artificial
  Synthetic oligonucleotide
agggaccatagtactatgtactatggtcctgtataattaacctatatatttaagta

SEQ ID NO: 273236 - DNA, 55 bp, Artificial
  Synthetic oligonucleotide
caaccctacactatatatatcgatcaccatagtggatagttagccgtcgcaagag

SEQ ID NO: 273237 - DNA, 55 bp, Artificial
  Synthetic oligonucleotide
caaccctgtgaaaccttccctagatgttagtgagaaagtcagtactccttcatcg

SEQ ID NO: 273238 - DNA, 55 bp, Artificial
  Synthetic oligonucleotide
caacctgcaatacatgttcgtttaggaccgcatagcttacacacataagcacgac

SEQ ID NO: 273239 - DNA, 55 bp, Artificial
  Synthetic oligonucleotide
caacgaggcggataattccttaaccaggggccaggaatttagagcatccaacaaa

SEQ ID NO: 273240 - DNA, 55 bp, Artificial
  Synthetic oligonucleotide
ttagtgattagccactagatatacagcaatccacccacgtctcgtctaagagcaa

SEQ ID NO: 273241 - DNA, 55 bp, Artificial
  Synthetic oligonucleotide
ttaggtgagtgcaagactgaaaattccgtcgagagaagtagtgagcctactgacg

SEQ ID NO: 273242 - DNA, 55 bp, Artificial
  Synthetic oligonucleotide
aatatcgatacttgatatccgaacagtaaacgtttgtccgtagtcatcgtgactg

SEQ ID NO: 273243 - DNA, 55 bp, Artificial
  Synthetic oligonucleotide
aatatcgcccatattcacaccctgttcttgaccgtctactaaggtgccttagggg

SEQ ID NO: 273244 - DNA, 55 bp, Artificial
  Synthetic oligonucleotide
aatcatctttcagaacgagcttgaataacccaacaggtactagtggttggagagc

SEQ ID NO: 273245 - DNA, 55 bp, Artificial
  Synthetic oligonucleotide
ttagcttaattggtgaagcattcgttttgtaatcgaaagatttaaggttcaagtc

SEQ ID NO: 273246 - DNA, 56 bp, Artificial
  Synthetic oligonucleotide
cctagggaacgcacctcgaagacgggacacgaggacgataaggcaacgatggtcac

SEQ ID NO: 273247 - DNA, 55 bp, Artificial
  Synthetic oligonucleotide
aatccgatgcaatgagcgagttctcaggagcatcaaacgaaacagaagagcctac

SEQ ID NO: 273248 - DNA, 55 bp, Artificial
  Synthetic oligonucleotide
ttagcccatggccttttcccggtaatcatttccaagacgacacatcctaaagccc

SEQ ID NO: 273249 - DNA, 55 bp, Artificial
  Synthetic oligonucleotide
ttagatgccacccaattgttttcacatcccaggcgaaggttcgcataccgcccac

SEQ ID NO: 273250 - DNA, 55 bp, Artificial
  Synthetic oligonucleotide
aatcgtcaaggaaactctgattaaagttggtgagcaaattgggctccttcactgg

SEQ ID NO: 273251 - DNA, 55 bp, Artificial
  Synthetic oligonucleotide
ttagactttataacccctcaggatacatcaaatcgttcactgaaacaccgaggac

SEQ ID NO: 273252 - DNA, 55 bp, Artificial
  Synthetic oligonucleotide
aatctgtagacagtgacttgtctcgtttgacccagtctatgagctctatccattg

SEQ ID NO: 273253 - DNA, 54 bp, Artificial
  Synthetic oligonucleotide
ttagacacctcgaagtaacgtaaacggaggaattatcaacagatagtacggaac

SEQ ID NO: 273254 - DNA, 55 bp, Artificial
  Synthetic oligonucleotide
aatgatgtggaacaagctcggcacaataaacgctactgacaatttagggtccccg

SEQ ID NO: 273255 - DNA, 55 bp, Artificial
  Synthetic oligonucleotide
aatgcgaagtctgatatacgacttatagtcaacattcataggagatttgtgtcgc

SEQ ID NO: 273256 - DNA, 55 bp, Artificial
  Synthetic oligonucleotide
ttactcaggtattgctactacaattcgaatagccttagcggcggaacacatcaac

SEQ ID NO: 273257 - DNA, 60 bp, Artificial
  Synthetic oligonucleotide
gtcctgagttgaaacggtcgtttcaacctccgtgtacagaaagatacatagcatatggca

SEQ ID NO: 273258 - DNA, 60 bp, Artificial
  Synthetic oligonucleotide
tcgcagtagttgatttgctgataattctagattagtttgtctgacgaagcgttcagcaga

SEQ ID NO: 273259 - DNA, 55 bp, Artificial
  Synthetic oligonucleotide
ttaccgttatactcagtaacaggccagtgtagaccgatgtcaatttgccattcgc

SEQ ID NO: 273260 - DNA, 55 bp, Artificial
  Synthetic oligonucleotide
aagagacgggtaaatgagcccctggaacactccaaagtgacacagcatcgaagga

SEQ ID NO: 273261 - DNA, 55 bp, Artificial
  Synthetic oligonucleotide
ttcgtagttcccgtacatcatgctcgtgatcacatgatcatatcgctacatacgc

SEQ ID NO: 273262 - DNA, 55 bp, Artificial
  Synthetic oligonucleotide
ttcgtaaaccataaagctccgggttatttgaagcttgctctatcgttgattcccg

SEQ ID NO: 273263 - DNA, 55 bp, Artificial
  Synthetic oligonucleotide
ttcgtaaaagcacgaacccgaaagtgtccattccgtaggtggtcgtgatgctcag

SEQ ID NO: 273264 - DNA, 55 bp, Artificial
  Synthetic oligonucleotide
ttcggtttctaaagttggaactgagacaccagaaactcagcttaacggtgataca

SEQ ID NO: 273265 - DNA, 55 bp, Artificial
  Synthetic oligonucleotide
aagcacccttaccctgtaggacagatgctgtttgcgtgctgctgaatccactgcc

SEQ ID NO: 273266 - DNA, 54 bp, Artificial
  Synthetic oligonucleotide
aagcgcctcgtctaagggtgcaaatcctgtaccaaaccgttttacaccacgcac

SEQ ID NO: 273267 - DNA, 55 bp, Artificial
  Synthetic oligonucleotide
ttcggtctcacctccgacagagacagtggaaatggtagttgtacctgtcccggtg

SEQ ID NO: 273268 - DNA, 55 bp, Artificial
  Synthetic oligonucleotide
ttcgccggagccctcagacgcgtgcgcaggcaccccactacagatatctcacagc

SEQ ID NO: 273269 - DNA, 60 bp, Artificial
  Synthetic oligonucleotide
tcgcaagccccatcatgccaccaccgtccgctgtgatcgcaactcatgtttccggcggta

SEQ ID NO: 273270 - DNA, 55 bp, Artificial
  Synthetic oligonucleotide
aagctgctgggcagttacagccctcatattatagagttctgagttgtgtagctcc

SEQ ID NO: 273271 - DNA, 51 bp, Artificial
  Synthetic oligonucleotide
aaggaaccggtgtgtccgaagctttgttgtccgaaattatccggtacgaac

SEQ ID NO: 273272 - DNA, 55 bp, Artificial
  Synthetic oligonucleotide
aaggacactgatttcacacacacaatattgtcgtaacgtccggtagatatgccga

SEQ ID NO: 273273 - DNA, 55 bp, Artificial
  Synthetic oligonucleotide
ttcgaagttctttggcctctcttccgtgtcattcgtatagctattgcaacgtgtg

SEQ ID NO: 273274 - DNA, 55 bp, Artificial
  Synthetic oligonucleotide
ttccttaaatatcatacacaagtacgactggacctacactacgcggtataagggc

SEQ ID NO: 273275 - DNA, 55 bp, Artificial
  Synthetic oligonucleotide
ttccacaacgctatagttcaattcgactctggccattctatcaacacgttgttgg

SEQ ID NO: 273276 - DNA, 55 bp, Artificial
  Synthetic oligonucleotide
aagtatacactatagctgcttaagctgtcgttattgtccattgtcgagtaaacgc

SEQ ID NO: 273277 - DNA, 55 bp, Artificial
  Synthetic oligonucleotide
ttcaatccatcacgataggcccaacgatgcactgacagcgtttatcattggatgc

SEQ ID NO: 273278 - DNA, 55 bp, Artificial
  Synthetic oligonucleotide
aagtgtcacatcgttgcatttactgtccctttggtgtaacacggcgctaccacac

SEQ ID NO: 273279 - DNA, 54 bp, Artificial
  Synthetic oligonucleotide
aataacgtcctttaaattgggctcgctaggatccaattcggctattaatctaac

SEQ ID NO: 273280 - DNA, 60 bp, Artificial
  Synthetic oligonucleotide
gatgaggatgacgtagtgcaagtgcccgagacgtcctctcccaccaaggtagcatcgtcg

SEQ ID NO: 273281 - DNA, 55 bp, Artificial
  Synthetic oligonucleotide
tgttgagtagcgttaccccagaaagagccctctgattgacatactacggttctgg

SEQ ID NO: 273282 - DNA, 55 bp, Artificial
  Synthetic oligonucleotide
acacaattgtccgcaccaaccttccctatcacgtcccgttcctctgaaacctgcg

SEQ ID NO: 273283 - DNA, 55 bp, Artificial
  Synthetic oligonucleotide
acacatgcagatcgttattgcactgatagagttgcccttgttggggacgcagcac

SEQ ID NO: 273284 - DNA, 55 bp, Artificial
  Synthetic oligonucleotide
tgttcgaatagcccaggatcacgaggaggtcctacaaacggatacggtacagtct

SEQ ID NO: 273285 - DNA, 55 bp, Artificial
  Synthetic oligonucleotide
acaccatctggagaggtcatggattccttagacttagccaatgaactctcaacca

SEQ ID NO: 273286 - DNA, 55 bp, Artificial
  Synthetic oligonucleotide
acacgaaggttcagtgcttaatattgacggccatcgaagagtggtaccagacgct

SEQ ID NO: 273287 - DNA, 55 bp, Artificial
  Synthetic oligonucleotide
acacgcagctcctccggtactgtttgtagtaccgctaaggcgaatgcacttcgag

SEQ ID NO: 273288 - DNA, 55 bp, Artificial
  Synthetic oligonucleotide
tgttccgaagacggcgtccctttagctcatcgcagcaagtttcttttaccggttg

SEQ ID NO: 273289 - DNA, 55 bp, Artificial
  Synthetic oligonucleotide
acacggaatcgccgcacgcttctctcacagatgccactccttggcgcaggaccct

SEQ ID NO: 273290 - DNA, 55 bp, Artificial
  Synthetic oligonucleotide
acacggtctgtgacaccagtggagtcatgccctctctttggcgcaatagaatcga

SEQ ID NO: 273291 - DNA, 56 bp, Artificial
  Synthetic oligonucleotide
aggagggtacctcatattgctgactagcaataggggggtgaaccctacgcacctaa

SEQ ID NO: 273292 - DNA, 55 bp, Artificial
  Synthetic oligonucleotide
tgttcaatgctacgcgtgactacaacttgcctgaggctcctcacacgtcgttcgg

SEQ ID NO: 273293 - DNA, 55 bp, Artificial
  Synthetic oligonucleotide
tgttacttaccggcagtagcgaacctcagagcagtatttacacagtgaacatgcc

SEQ ID NO: 273294 - DNA, 55 bp, Artificial
  Synthetic oligonucleotide
tgtgtgcatattataatgcagggtggcggagagtcaggtgaggatgcgtcccacg

SEQ ID NO: 273295 - DNA, 55 bp, Artificial
  Synthetic oligonucleotide
acagcgcaagctagtgggttccccataaacgtggggccatgcatcatacatcccc

SEQ ID NO: 273296 - DNA, 55 bp, Artificial
  Synthetic oligonucleotide
tgtgtattccaagacccaagaagtattggacctgatgaggagaacgtagcagaga

SEQ ID NO: 273297 - DNA, 55 bp, Artificial
  Synthetic oligonucleotide
acagcgtggtcgaccaacttgttgctgtctctgattccgcaactcgcatactggg

SEQ ID NO: 273298 - DNA, 55 bp, Artificial
  Synthetic oligonucleotide
acagcttggatccctttgaggatattagtcgtctttgtaacagtgacgttttcac

SEQ ID NO: 273299 - DNA, 55 bp, Artificial
  Synthetic oligonucleotide
tgtgtaacatctgcactacggccggtaagtggcacgccttcattcccgcttgttc

SEQ ID NO: 273300 - DNA, 52 bp, Artificial
  Synthetic oligonucleotide
aatggctccttaggtggtacttcggttagggtcccactatctaaagaaggtc

SEQ ID NO: 273301 - DNA, 55 bp, Artificial
  Synthetic oligonucleotide
aatggggatctacggcaaaggccattggtaactgggcaccttatgtggccggtgc

SEQ ID NO: 273302 - DNA, 57 bp, Artificial
  Synthetic oligonucleotide
aggaggtgtggatagaccgtcaaccactgtgctttctacaccaacactacacggccc

SEQ ID NO: 273303 - DNA, 55 bp, Artificial
  Synthetic oligonucleotide
aatggttaacacggtggagggcgttcgtccatagtacatgaaccagagttcttct

SEQ ID NO: 273304 - DNA, 55 bp, Artificial
  Synthetic oligonucleotide
aatgtacagtcaaagggatggcctacaagatcccagttcggagctagatacatct

SEQ ID NO: 273305 - DNA, 55 bp, Artificial
  Synthetic oligonucleotide
ttaatgtcggactcataacagccgatgctgcagtactagctctagcacgagtgct

SEQ ID NO: 273306 - DNA, 55 bp, Artificial
  Synthetic oligonucleotide
aattagatcttcgacacactacaacgcacgtcatgattatttcaccagggtctgg

SEQ ID NO: 273307 - DNA, 55 bp, Artificial
  Synthetic oligonucleotide
aattcagggaccctccgtgcagagtgacgcgcttttacaaactttcgcgccgtct

SEQ ID NO: 273308 - DNA, 52 bp, Artificial
  Synthetic oligonucleotide
aattctcgtcgatactatccaacgaccccaaaagttccaggaatccaccctt

SEQ ID NO: 273309 - DNA, 55 bp, Artificial
  Synthetic oligonucleotide
aattggactgtaaggactccattgttccaaggggccccacatatgataacgtctc

SEQ ID NO: 273310 - DNA, 55 bp, Artificial
  Synthetic oligonucleotide
ttaataaatatgacgtttgaccgaacgaccttgctctatcgactggcaagctcgc

SEQ ID NO: 273311 - DNA, 55 bp, Artificial
  Synthetic oligonucleotide
aattgtgaagcgtggatattggcatagcggatttgtagaacggtgtgtcgtcaac

SEQ ID NO: 273312 - DNA, 55 bp, Artificial
  Synthetic oligonucleotide
aatttagtctggtctcatttatgcgaaagtctccttagcaaggactccctagaca

SEQ ID NO: 273313 - DNA, 53 bp, Artificial
  Synthetic oligonucleotide
gatttagatcccggcacgaaacaacttgttaaggtacgtttcgagaataaaga

SEQ ID NO: 273314 - DNA, 55 bp, Artificial
  Synthetic oligonucleotide
aatttggacgtattgtatcagacgttatctcgtatgtctgctgcctgcctaatgg

SEQ ID NO: 273315 - DNA, 55 bp, Artificial
  Synthetic oligonucleotide
ttaagcctgctgtatccgtgggtctcggttctgcaacagacgcaagaattgaatc

SEQ ID NO: 273316 - DNA, 55 bp, Artificial
  Synthetic oligonucleotide
acaaatcgctacagtctaggcagtttcttagactcgattcaagattcaaacaacc

SEQ ID NO: 273317 - DNA, 55 bp, Artificial
  Synthetic oligonucleotide
acaacaagcggggctacaaagcaacctcatctcaagtaactttgccatggacaag

SEQ ID NO: 273318 - DNA, 54 bp, Artificial
  Synthetic oligonucleotide
acaacccaggatggttatctcgtttcttcgaatttccgcagcaaagaggaccct

SEQ ID NO: 273319 - DNA, 55 bp, Artificial
  Synthetic oligonucleotide
acaagttcccatcggttatcaagaacagtgcgttcgaagaaggtatagaggagag

SEQ ID NO: 273320 - DNA, 55 bp, Artificial
  Synthetic oligonucleotide
tgttgatctatcgatcagaacgaaatgcgaagtgctattgtccgtgtccgttgtg

SEQ ID NO: 273321 - DNA, 55 bp, Artificial
  Synthetic oligonucleotide
aaatactgttcgggaaggtttgtgttaagtgacgacgcacatgcactctctcaga

SEQ ID NO: 273322 - DNA, 51 bp, Artificial
  Synthetic oligonucleotide
aaatagttatccttcggtactggttccttttacgtgggaccaataaatgaa

SEQ ID NO: 273323 - DNA, 55 bp, Artificial
  Synthetic oligonucleotide
aaatcgtctattgctgcgcagttcacgcatccaaacttcattatcaggtctccga

SEQ ID NO: 273324 - DNA, 58 bp, Artificial
  Synthetic oligonucleotide
taaccgtaacgtaagaagcataactgtcaatactgaagtcatcccagtttattggtgc

SEQ ID NO: 273325 - DNA, 55 bp, Artificial
  Synthetic oligonucleotide
tttagaaggataaggtacacacccctaatgcttacgcattcttgtggtacccatc

SEQ ID NO: 273326 - DNA, 54 bp, Artificial
  Synthetic oligonucleotide
aaattgactccaaagagaggtgattataaaccagtcgttaccatcccaggtaaa

SEQ ID NO: 273327 - DNA, 55 bp, Artificial
  Synthetic oligonucleotide
aacacagatccatcaacgttcaacagctactatcgttaaccgcctcgtcactctg

SEQ ID NO: 273328 - DNA, 55 bp, Artificial
  Synthetic oligonucleotide
aacagagtacagttgtttagagataatcgggtgatatgtgctcccctcagcaagg

SEQ ID NO: 273329 - DNA, 55 bp, Artificial
  Synthetic oligonucleotide
ttgttggtcagactgttggcacgtgagttccaggcatccgtgtcggttggcgaca

SEQ ID NO: 273330 - DNA, 55 bp, Artificial
  Synthetic oligonucleotide
aaccaacaactagaacagaacttgatctattgtgctcatgggtcggagaagctcg

SEQ ID NO: 273331 - DNA, 55 bp, Artificial
  Synthetic oligonucleotide
ttgttgcgcaatatgcttatatatcgcgtgttgcataaacccatcaagtgatcgc

SEQ ID NO: 273332 - DNA, 55 bp, Artificial
  Synthetic oligonucleotide
aaccatatatgagaaatggtaccgcctaggaatcttgcaatggtgaagctaggtg

SEQ ID NO: 273333 - DNA, 55 bp, Artificial
  Synthetic oligonucleotide
aaccattctacatccaataaccaaaatgcccatgtacctctcagcgaagtccaac

SEQ ID NO: 273334 - DNA, 55 bp, Artificial
  Synthetic oligonucleotide
aaccattgactcttagaccagcgagctctcttcatcggagctttagattcgcccc

SEQ ID NO: 273335 - DNA, 53 bp, Artificial
  Synthetic oligonucleotide
cttcttacgccagttcttttgtgaaccaaaactagggcctctaaataatgtct

SEQ ID NO: 273336 - DNA, 55 bp, Artificial
  Synthetic oligonucleotide
aacccaccgctgattcctcaacgataactgtatttcaacttctcaccagtcagcg

SEQ ID NO: 273337 - DNA, 55 bp, Artificial
  Synthetic oligonucleotide
aaccctagtttccacgctaatattgataggcttgtagtcaggacctagagcccag

SEQ ID NO: 273338 - DNA, 55 bp, Artificial
  Synthetic oligonucleotide
ttgtccgtaaaatcataagtaagttcggaaatgtctgctactgccgcggaacgct

SEQ ID NO: 273339 - DNA, 55 bp, Artificial
  Synthetic oligonucleotide
ttgtcaattgggtcctgttcaactgactatgttgatgtgcaacctaagccactca

SEQ ID NO: 273340 - DNA, 55 bp, Artificial
  Synthetic oligonucleotide
ttttgttcctccgaattgtgcatcaccctgtcacatccgtacaccatcggaacac

SEQ ID NO: 273341 - DNA, 55 bp, Artificial
  Synthetic oligonucleotide
ttttgtatcaactatatcgatgtgctttgacggaagttctaatatcggttcccca

SEQ ID NO: 273342 - DNA, 55 bp, Artificial
  Synthetic oligonucleotide
ttttgtagtgtctacgcagtgttcgtagccccaatactaaacatgtcttccctgg

SEQ ID NO: 273343 - DNA, 55 bp, Artificial
  Synthetic oligonucleotide
aaaagcggggcggttctgtaagagccactgtagcacacgtgtagagagttaaagt

SEQ ID NO: 273344 - DNA, 55 bp, Artificial
  Synthetic oligonucleotide
aaaagctagcgttggtcgctcacttgatagatgcttaacccatgcggcctggtgc

SEQ ID NO: 273345 - DNA, 55 bp, Artificial
  Synthetic oligonucleotide
ttttccagcgccatgttagacacaggaaccgatagcgtcatcgaatattcaatag

SEQ ID NO: 273346 - DNA, 58 bp, Artificial
  Synthetic oligonucleotide
cctcaagttctgatgaagacgacctaattgaccctataattcatcccaaatcgttcta

SEQ ID NO: 273347 - DNA, 54 bp, Artificial
  Synthetic oligonucleotide
aaacaaggtggttgactactataagatagccgccaaggtcaatggtacggggtc

SEQ ID NO: 273348 - DNA, 55 bp, Artificial
  Synthetic oligonucleotide
tttgtagtacggtggagaagatgtgttctgtactgttaagggcacaactagccgc

SEQ ID NO: 273349 - DNA, 55 bp, Artificial
  Synthetic oligonucleotide
tttggcaatgaagcgtcttagccattgtctttatctcgcgtcggtattcgtcgaa

SEQ ID NO: 273350 - DNA, 55 bp, Artificial
  Synthetic oligonucleotide
tttgctgaccgttcttaataccttccttagccgtcgtttcacaattcctcaaatc

SEQ ID NO: 273351 - DNA, 55 bp, Artificial
  Synthetic oligonucleotide
aaacctccttgtcgtggggtcatcctatagtgtagcctaagaccgattttcgagc

SEQ ID NO: 273352 - DNA, 55 bp, Artificial
  Synthetic oligonucleotide
aaacctgttaaggaacccgattgggaaatgatagatgaggatacgttgagagtcg

SEQ ID NO: 273353 - DNA, 55 bp, Artificial
  Synthetic oligonucleotide
tttcttccatggtagtgccgtctctcaagacaccgtgctcatgcacagacaaccc

SEQ ID NO: 273354 - DNA, 55 bp, Artificial
  Synthetic oligonucleotide
aaacgctggtattcatgtagagcaccaacctgactgtgaatgcgtaagctgaaac

SEQ ID NO: 273355 - DNA, 55 bp, Artificial
  Synthetic oligonucleotide
tttcgcataagggcatctcggtggagttattaattggtcgatgctgactagctgg

SEQ ID NO: 273356 - DNA, 55 bp, Artificial
  Synthetic oligonucleotide
tttcagtttagtttacgccactgcttcaaatacggattcacagtacaagctattg

SEQ ID NO: 273357 - DNA, 60 bp, Artificial
  Synthetic oligonucleotide
aggcggagccgcacccaatgctagacacgctactattccagtgttccacctagcaggtct

SEQ ID NO: 273358 - DNA, 55 bp, Artificial
  Synthetic oligonucleotide
tttcaatagtcctgagtttctgcgaagagatttcagaaaccgttacagcttttct

SEQ ID NO: 273359 - DNA, 55 bp, Artificial
  Synthetic oligonucleotide
aaagtctatcgttatctgttcagaggtgtcccgatcaacttatctgagttgttag

SEQ ID NO: 273360 - DNA, 55 bp, Artificial
  Synthetic oligonucleotide
aaagttacgccgcgggagtggaggtctgacatgtatgcctcgggtatgacgtctg

SEQ ID NO: 273361 - DNA, 55 bp, Artificial
  Synthetic oligonucleotide
aacgtcacggaatgtgactatcttccacgctgccttgtctgtatgctattggcgc

SEQ ID NO: 273362 - DNA, 55 bp, Artificial
  Synthetic oligonucleotide
aacgtgcgcaagtccctcttgtaagacaaccgcagcagtgtccgccctgcttgct

SEQ ID NO: 273363 - DNA, 55 bp, Artificial
  Synthetic oligonucleotide
aacgtgcgttagtagcactgtacactttctccgacgtgactgtcttcacgacagt

SEQ ID NO: 273364 - DNA, 55 bp, Artificial
  Synthetic oligonucleotide
aacgttcatctgcgatgacaccgactgcagcgtgccccataccgtggttccattc

SEQ ID NO: 273365 - DNA, 55 bp, Artificial
  Synthetic oligonucleotide
ttcttccgtcctaagatcatcgttatctcgtgtgtcattcactagtggttcatcg

SEQ ID NO: 273366 - DNA, 55 bp, Artificial
  Synthetic oligonucleotide
aacgttcttaatatacgaccataatcctgttgcggtctcatatcacccaatgcga

SEQ ID NO: 273367 - DNA, 55 bp, Artificial
  Synthetic oligonucleotide
aacgtttatccaacgatgcatggtcaagatgttggtccgtagtacctcgttctgc

SEQ ID NO: 273368 - DNA, 57 bp, Artificial
  Synthetic oligonucleotide
cgggatccaaaacggaaaccgcgagatctgggtcaggagtgtccgagatcttcgcat

SEQ ID NO: 273369 - DNA, 55 bp, Artificial
  Synthetic oligonucleotide
tcgatggctaggttaacgaactccttacaagaatgtttagggttctcattaactc

SEQ ID NO: 273370 - DNA, 55 bp, Artificial
  Synthetic oligonucleotide
aactcaaggtagcaataccagtcgaggcgtcatatgatacagcaggagtagcttc

SEQ ID NO: 273371 - DNA, 55 bp, Artificial
  Synthetic oligonucleotide
aactccaatagaatgtcagacgtacgacatcaggtgttatcaagaaggaagtacg

SEQ ID NO: 273372 - DNA, 55 bp, Artificial
  Synthetic oligonucleotide
aactccgaattctcattcaattgagggtacaattctatggcacgatcaacaaacg

SEQ ID NO: 273373 - DNA, 55 bp, Artificial
  Synthetic oligonucleotide
ttctgagccgcgatccgttgacagtgcccttatacggttctctccgccagatcta

SEQ ID NO: 273374 - DNA, 55 bp, Artificial
  Synthetic oligonucleotide
aactctaaccacacgttggtgttgaagactgaacaaaacgtcctattggccggca

SEQ ID NO: 273375 - DNA, 55 bp, Artificial
  Synthetic oligonucleotide
ttctcgcttaaaggctgctttacgttggccagtccatcgaagagtattgtgtgcg

SEQ ID NO: 273376 - DNA, 55 bp, Artificial
  Synthetic oligonucleotide
ttctcaagctttagccaacaactaactgcctacgtctacacaaagaaccacatgg

SEQ ID NO: 273377 - DNA, 55 bp, Artificial
  Synthetic oligonucleotide
aacttttgaagaccactgttactacagtagcgtcattacggagccttgctgtgct

SEQ ID NO: 273378 - DNA, 55 bp, Artificial
  Synthetic oligonucleotide
aagaacccggggatagaaagcggatatgttttgtgcgaatgacagaccccacgat

SEQ ID NO: 273379 - DNA, 55 bp, Artificial
  Synthetic oligonucleotide
aagacacacctagttccattattcgacacattgagagacgttctactgaccactg

SEQ ID NO: 273380 - DNA, 60 bp, Artificial
  Synthetic oligonucleotide
catatttccattccgcaatgagtcctgatgttctattaggtgcttgttgacctccagtag

SEQ ID NO: 273381 - DNA, 55 bp, Artificial
  Synthetic oligonucleotide
ttcgtttcatgttcttatgagcgtgtctatttatcaactcatttgttcgctcggt

SEQ ID NO: 273382 - DNA, 55 bp, Artificial
  Synthetic oligonucleotide
aagagaactctcgtttccagccaccaacaagattgtgtataggtaaccagctgcc

SEQ ID NO: 273383 - DNA, 55 bp, Artificial
  Synthetic oligonucleotide
ttgtatcatccaagggtctatcagtagttccacagcagtagccctcatagtgggg

SEQ ID NO: 273384 - DNA, 55 bp, Artificial
  Synthetic oligonucleotide
aaccgaggatttgtattctctatgtgaaggaaaggattgtggacccttttgtcga

SEQ ID NO: 273385 - DNA, 55 bp, Artificial
  Synthetic oligonucleotide
ttgtaccgacaataactttaccgactcttgacattagcgcaaaggtagcagagtc

SEQ ID NO: 273386 - DNA, 55 bp, Artificial
  Synthetic oligonucleotide
ttggttaagtacgggaaataactcgaacagcctcctgtgctaattgggactcaat

SEQ ID NO: 273387 - DNA, 55 bp, Artificial
  Synthetic oligonucleotide
ttggtatcactttcgcatttttcccgtaccgccgacagatcaatttctcgttcgt

SEQ ID NO: 273388 - DNA, 55 bp, Artificial
  Synthetic oligonucleotide
aacgacaatagcctctgtttactaggaaaccgtgttgcacgatcgtttctcggct

SEQ ID NO: 273389 - DNA, 55 bp, Artificial
  Synthetic oligonucleotide
ttgggaataggatctgtccattggaggtatgaatctagtgccaacagcgggtcgc

SEQ ID NO: 273390 - DNA, 55 bp, Artificial
  Synthetic oligonucleotide
aacgaggctcagctaggtcgcgtggctttcacgtggtgtggcggaaatactacga

SEQ ID NO: 273391 - DNA, 56 bp, Artificial
  Synthetic oligonucleotide
aaaagtgaacctagccaacgatccataatcgataatgaaagttagaacgatcacgt

SEQ ID NO: 273392 - DNA, 55 bp, Artificial
  Synthetic oligonucleotide
aacgatcgcgttagagaaccgtttcacccggagtaatgatcagaatgattaaagc

SEQ ID NO: 273393 - DNA, 55 bp, Artificial
  Synthetic oligonucleotide
aacgatgctgctgttatggaacatcttattccagcatctggattagctgctgtcg

SEQ ID NO: 273394 - DNA, 55 bp, Artificial
  Synthetic oligonucleotide
ttggaagctcaaacgcacttaagaattgaggtgaatttggcattcctagttgacc

SEQ ID NO: 273395 - DNA, 55 bp, Artificial
  Synthetic oligonucleotide
ttgcttcgcgaagaaagatctatctaacgtcttcatgtctctattcactggcgga

SEQ ID NO: 273396 - DNA, 53 bp, Artificial
  Synthetic oligonucleotide
ttgcaaggtttaacagttggttagggtccgaaaagctactcgataatacaccg

SEQ ID NO: 273397 - DNA, 55 bp, Artificial
  Synthetic oligonucleotide
ttgagtctaccagaccaagaatcaaagacacttatatgggatgcgtttctctccg

SEQ ID NO: 273398 - DNA, 55 bp, Artificial
  Synthetic oligonucleotide
ttgacgccgcaaaccagggccaatagtggaacgtcgaattagaacgcccagggta

SEQ ID NO: 273399 - DNA, 55 bp, Artificial
  Synthetic oligonucleotide
ttgacgagaaatgtcacctgccaaaggttgaaattgggaagccgggcggtcgtag

SEQ ID NO: 273400 - DNA, 55 bp, Artificial
  Synthetic oligonucleotide
ttgacaatgtccactactgtttgcgttgacttgttccctagtatttccacaaccg

SEQ ID NO: 273401 - DNA, 55 bp, Artificial
  Synthetic oligonucleotide
actttgctcatagtgatacacccgggatactaaccaatcttagagctcacagacg

SEQ ID NO: 273402 - DNA, 60 bp, Artificial
  Synthetic oligonucleotide
gggccaactcaacggggacaatagcatgccataaaagcgctggagtaaaacagccagcgc

SEQ ID NO: 273403 - DNA, 55 bp, Artificial
  Synthetic oligonucleotide
actttgctctgtcgtcttatgtaactcgccttgtttctacacgttgttgcagtcc

SEQ ID NO: 273404 - DNA, 55 bp, Artificial
  Synthetic oligonucleotide
acttttgcacggcaggtacgagcgtgcgggtaacattgcgtctcctaggtaccgc

SEQ ID NO: 273405 - DNA, 55 bp, Artificial
  Synthetic oligonucleotide
agaaacggcgagggcttgtgctggtgtgttagggctgggagcgtttggcgggtag

SEQ ID NO: 273406 - DNA, 55 bp, Artificial
  Synthetic oligonucleotide
agaaagctactgcgacccgtgttttatgaatcatggaatcaatacaatgccccgg

SEQ ID NO: 273407 - DNA, 55 bp, Artificial
  Synthetic oligonucleotide
agaagacaatgataaggaccaattactgcgaacaaatgcaataacgacaacgcca

SEQ ID NO: 273408 - DNA, 55 bp, Artificial
  Synthetic oligonucleotide
tgatcattagacgtctgtgtagtcatattgagagtgtgctatctatcttgaacca

SEQ ID NO: 273409 - DNA, 55 bp, Artificial
  Synthetic oligonucleotide
tgatatcagagacgtagacacccaattcaaccaggttgactctttcgtcagatgg

SEQ ID NO: 273410 - DNA, 53 bp, Artificial
  Synthetic oligonucleotide
agaagttgttaccaactactacaatccgcgaagctacccttgaagtacaaaac

SEQ ID NO: 273411 - DNA, 55 bp, Artificial
  Synthetic oligonucleotide
tgatatataatgtcgcgtcattgcatttccgtacgctgtcgggctgtacaacctg

SEQ ID NO: 273412 - DNA, 55 bp, Artificial
  Synthetic oligonucleotide
agaatgtccccgcctacatgagtcaaagatatccttccagcacgtcaacctaagg

SEQ ID NO: 273413 - DNA, 56 bp, Artificial
  Synthetic oligonucleotide
tccttcgcttactgaacatttgccacctttacattcgaacactgccggtggtgttt

SEQ ID NO: 273414 - DNA, 55 bp, Artificial
  Synthetic oligonucleotide
agacaagataagtaactacaggcgccttattcaacacgttgatagccaactgccc

SEQ ID NO: 273415 - DNA, 55 bp, Artificial
  Synthetic oligonucleotide
tgagtcacgtccccgtatcacatttatcaattggtctcatccgatctacccaatc

SEQ ID NO: 273416 - DNA, 55 bp, Artificial
  Synthetic oligonucleotide
tgagtatctctatccacaacggttgtatccttgtgttgtggcactgagtttattt

SEQ ID NO: 273417 - DNA, 55 bp, Artificial
  Synthetic oligonucleotide
agacagtcccgaaattactgtagaactccacggttgttagattggcgaacctatg

SEQ ID NO: 273418 - DNA, 55 bp, Artificial
  Synthetic oligonucleotide
agaccaatctatttggacatgcaggcaaccactcctaccgaccctagagtgcttg

SEQ ID NO: 273419 - DNA, 55 bp, Artificial
  Synthetic oligonucleotide
actactatcctgcgtaatgagaacgtgatgggcctatactctgggttgagtgcgg

SEQ ID NO: 273420 - DNA, 55 bp, Artificial
  Synthetic oligonucleotide
actacttgatccttgacggtgaatcaaactggctcgaaggtgttatgtctgtggc

SEQ ID NO: 273421 - DNA, 55 bp, Artificial
  Synthetic oligonucleotide
actaggcttgcggttccaagcccatgtttggagggagattcatcggaacgcgagc

SEQ ID NO: 273422 - DNA, 55 bp, Artificial
  Synthetic oligonucleotide
tgcccggtttcgaacccctaacttctaagagcctgtcaataacagagtcgaggtc

SEQ ID NO: 273423 - DNA, 55 bp, Artificial
  Synthetic oligonucleotide
actccaccatatgtcatcaatctagatcctgccgtattgagagtcccttatggta

SEQ ID NO: 273424 - DNA, 59 bp, Artificial
  Synthetic oligonucleotide
gattacatgaaaaagcccacgaagtccactgcaaaagtactcagaggagtaggtgtgat

SEQ ID NO: 273425 - DNA, 55 bp, Artificial
  Synthetic oligonucleotide
actccatggactggtgccgacttttcaacctactctacggatgtcactactgcta

SEQ ID NO: 273426 - DNA, 55 bp, Artificial
  Synthetic oligonucleotide
actccgcttggtagcggtagaagccgtcactccatctagctttggttttccagct

SEQ ID NO: 273427 - DNA, 55 bp, Artificial
  Synthetic oligonucleotide
tgccagcttaacggcgtcacagctacagcttgactcgtctcggttagcctatggc

SEQ ID NO: 273428 - DNA, 55 bp, Artificial
  Synthetic oligonucleotide
tgccacctttacattcgaacactgccggtggtgttttcaaccgccaatcacagta

SEQ ID NO: 273429 - DNA, 55 bp, Artificial
  Synthetic oligonucleotide
tgcattggtgtatggttatcgacgtcggaccagtacctgctatcatctatagaat

SEQ ID NO: 273430 - DNA, 55 bp, Artificial
  Synthetic oligonucleotide
actgaatacgtgagtgtgtagtcagatctgaggtaggcagtaatgggtcctgggg

SEQ ID NO: 273431 - DNA, 55 bp, Artificial
  Synthetic oligonucleotide
actgcgccagagatgcacactctgacacagatactggcacacttgatgcaaagtg

SEQ ID NO: 273432 - DNA, 55 bp, Artificial
  Synthetic oligonucleotide
tgatcttggatgcatacctgagaattaattcacgcacttctataagacggctttc

SEQ ID NO: 273433 - DNA, 55 bp, Artificial
  Synthetic oligonucleotide
actgctctctgaagactcgaaaacatcactaatgacagttagccttgcattgacg

SEQ ID NO: 273434 - DNA, 55 bp, Artificial
  Synthetic oligonucleotide
actgtgctgcatcaagaccgcgggttgtagttgagcaaggttcggtgtaccgaac

SEQ ID NO: 273435 - DNA, 60 bp, Artificial
  Synthetic oligonucleotide
tacttgtcatcaagatgttccgatgcggagcgcataacattagaaaaagttctgtaaaca

SEQ ID NO: 273436 - DNA, 55 bp, Artificial
  Synthetic oligonucleotide
actgtgtgtaatgcgtagaggtatgctgcctcgtactgttagttcaaattcaggc

SEQ ID NO: 273437 - DNA, 55 bp, Artificial
  Synthetic oligonucleotide
acttctattgctcgtggtagaataactgtatgtagactcgggtgggatatcatcg

SEQ ID NO: 273438 - DNA, 55 bp, Artificial
  Synthetic oligonucleotide
acttcttgtcgattgtgaattcggatagccgctagaacgccaatcattgcggagg

SEQ ID NO: 273439 - DNA, 55 bp, Artificial
  Synthetic oligonucleotide
acttgctggcgtagctctttcttcgtgtcgcctagtttcaaatggctcaggcggt

SEQ ID NO: 273440 - DNA, 55 bp, Artificial
  Synthetic oligonucleotide
tgaaaagaaacgaaacctatggcacctgtcacacacgcccaccgagtttccagag

SEQ ID NO: 273441 - DNA, 55 bp, Artificial
  Synthetic oligonucleotide
tctttggcgggatcctaggtgatcacccacctagagaccgtactactgagatcaa

SEQ ID NO: 273442 - DNA, 55 bp, Artificial
  Synthetic oligonucleotide
agcacgcgctaactgcttcgagtgctacgggcggcgagcaccattacccatttcc

SEQ ID NO: 273443 - DNA, 55 bp, Artificial
  Synthetic oligonucleotide
tcttgggaaccacttataacatgtatgcgattacacctgcgatgatagtaccggc

SEQ ID NO: 273444 - DNA, 55 bp, Artificial
  Synthetic oligonucleotide
tcttgcacgatatgggtgcttacctgtgagcattgagagatggaatgaggattac

SEQ ID NO: 273445 - DNA, 55 bp, Artificial
  Synthetic oligonucleotide
agcagtgacgcccctacagatgtcacggagagcacaggtgtggactacgataagt

SEQ ID NO: 273446 - DNA, 53 bp, Artificial
  Synthetic oligonucleotide
aaaacggcttcagcaacttcgactgggtaggtttcagttgggtgggcggcttg

SEQ ID NO: 273447 - DNA, 55 bp, Artificial
  Synthetic oligonucleotide
agcagtggttgagcattgtgacgaacagttagcgcggtgacggatgagatgtggc

SEQ ID NO: 273448 - DNA, 55 bp, Artificial
  Synthetic oligonucleotide
agcatccactaacaatatccttaaacgcgtcagtgacgataatataatccatccg

SEQ ID NO: 273449 - DNA, 55 bp, Artificial
  Synthetic oligonucleotide
tcttgagcccagacggcccatgctaatcgccttcgtagtccacgttcccagcgag

SEQ ID NO: 273450 - DNA, 55 bp, Artificial
  Synthetic oligonucleotide
agccacgcctgcttacgagctgcccaatttgttgaacagcactgccccgctcctc

SEQ ID NO: 273451 - DNA, 55 bp, Artificial
  Synthetic oligonucleotide
tcttcgagacgcacacgtaaagtgacgcacagaaagtttgttccttgactccgca

SEQ ID NO: 273452 - DNA, 55 bp, Artificial
  Synthetic oligonucleotide
agcccacttctttccgggatagcttctgcctccattaccgcaagtgaaagatgaa

SEQ ID NO: 273453 - DNA, 55 bp, Artificial
  Synthetic oligonucleotide
agcccagaaccacagtaacagtcaactagatatcttggagccgactcgccattaa

SEQ ID NO: 273454 - DNA, 55 bp, Artificial
  Synthetic oligonucleotide
tcttagacaccatagtcattaggtcaaagagatgacgaggcagttactgctcccg

SEQ ID NO: 273455 - DNA, 55 bp, Artificial
  Synthetic oligonucleotide
tctgtgtgatcgtatcaaattcggccttcccaagagaaatggccgctctctcttg

SEQ ID NO: 273456 - DNA, 55 bp, Artificial
  Synthetic oligonucleotide
tctgtagtcccgggttccagtgtcttgtcccctcaggttgcaccgagcgccccat

SEQ ID NO: 273457 - DNA, 60 bp, Artificial
  Synthetic oligonucleotide
caacccagtcagccagtgagatatcaacgcaaggccttggtgcttaggaccaccagaggg

SEQ ID NO: 273458 - DNA, 55 bp, Artificial
  Synthetic oligonucleotide
tctgtacttattaggaactcgctcgatataattgcgtacagcgagttaggtgtct

SEQ ID NO: 273459 - DNA, 55 bp, Artificial
  Synthetic oligonucleotide
agccgctttcattttcgcttccttctgacacccttgaaggttctgaagtaggaaa

SEQ ID NO: 273460 - DNA, 55 bp, Artificial
  Synthetic oligonucleotide
agacctgatcaaccaaccaagaactatgtagtgagggttaaagagaacagacgtg

SEQ ID NO: 273461 - DNA, 55 bp, Artificial
  Synthetic oligonucleotide
tgaggagttatgttgtatgatattatggagcagagagcggcggttctatagcata

SEQ ID NO: 273462 - DNA, 55 bp, Artificial
  Synthetic oligonucleotide
agacttaatcgctggtatcacagtcggctgtgtccttgtgcctcaatcaatgtcc

SEQ ID NO: 273463 - DNA, 55 bp, Artificial
  Synthetic oligonucleotide
agagagcagtatatcgtctaacagatagcgtagaccctcccttttcgcctttccg

SEQ ID NO: 273464 - DNA, 55 bp, Artificial
  Synthetic oligonucleotide
tgagatgctcggtgtgttaatgatacgttggatgaaacattgtacgctgtaaggc

SEQ ID NO: 273465 - DNA, 55 bp, Artificial
  Synthetic oligonucleotide
agagcaaggggctcttggacgtccattcccaggaatttcgcggtcaggtgtcagc

SEQ ID NO: 273466 - DNA, 55 bp, Artificial
  Synthetic oligonucleotide
agagcaccaacgagcctgtatttgagcaagttacgtcaatgcttgaaatagagtc

SEQ ID NO: 273467 - DNA, 55 bp, Artificial
  Synthetic oligonucleotide
tgagacagggtaacttgtggggaggtagggtaatggagggtaagttgagagacag

SEQ ID NO: 273468 - DNA, 60 bp, Artificial
  Synthetic oligonucleotide
aaattgcaataagtatacactaattacaaggcgtctgagcgcgtgacttgagcgcgtgac

SEQ ID NO: 273469 - DNA, 55 bp, Artificial
  Synthetic oligonucleotide
agaggacattgatttacagacacacaatattgccgtaaggtacggtagatatgcc

SEQ ID NO: 273470 - DNA, 55 bp, Artificial
  Synthetic oligonucleotide
tgaccattaaagggtgcatatatcacttaaggcgtcaataggcgttcacgcgtag

SEQ ID NO: 273471 - DNA, 55 bp, Artificial
  Synthetic oligonucleotide
tgaccatatcttcctagcggcctaataccttttggacttgggatagtccatttcg

SEQ ID NO: 273472 - DNA, 55 bp, Artificial
  Synthetic oligonucleotide
tgacagagacaaagacaagcgttagtaggcacatatacttctttagcgcaagggg

SEQ ID NO: 273473 - DNA, 55 bp, Artificial
  Synthetic oligonucleotide
tgacaccttcgtgaactctaatatctcctatggtgtaagcacgataagcacgacg

SEQ ID NO: 273474 - DNA, 55 bp, Artificial
  Synthetic oligonucleotide
agatccaaatgttaaacctcgtagcacaaataacgaatcacctgaagtggcgccg

SEQ ID NO: 273475 - DNA, 55 bp, Artificial
  Synthetic oligonucleotide
agatctcccaaccacacttggactcagacacgcgcagggagagggaaccttgccc

SEQ ID NO: 273476 - DNA, 55 bp, Artificial
  Synthetic oligonucleotide
agattgaactcgtcagatggtgcaacatgattgttctgatcgggaccattcgatg

SEQ ID NO: 273477 - DNA, 55 bp, Artificial
  Synthetic oligonucleotide
agcaaaattcctctcccttcgatgcctcggaagtaacggagcaacctgtgcaacc

SEQ ID NO: 273478 - DNA, 55 bp, Artificial
  Synthetic oligonucleotide
tgaaattagtttaggtacatggcgttcccttggtgccacagatgggtacgactcc

SEQ ID NO: 273479 - DNA, 50 bp, Artificial
  Synthetic oligonucleotide
tagtttttgggaagcgggaatcccgtaaggagtgagggacccctccctaa

SEQ ID NO: 273480 - DNA, 54 bp, Artificial
  Synthetic oligonucleotide
agcttaattggtatagcattcgttttacacacgaaagattataggttcgaaccc

SEQ ID NO: 273481 - DNA, 54 bp, Artificial
  Synthetic oligonucleotide
tgtcagcccccacgagcctaggaagatggtcccgcccctccgttttctgccccc

SEQ ID NO: 273482 - DNA, 55 bp, Artificial
  Synthetic oligonucleotide
acccgttaggtatcccaaacaatctactgccatacatggctcaagtcgctgttgg

SEQ ID NO: 273483 - DNA, 55 bp, Artificial
  Synthetic oligonucleotide
tgtattgaataagcgaaaagccctgtaccatacatcatcacgccttagtcatacc

SEQ ID NO: 273484 - DNA, 55 bp, Artificial
  Synthetic oligonucleotide
tgtattacgttcagtatacaggcaggctagcgtatatccagtctcggtcagcaca

SEQ ID NO: 273485 - DNA, 55 bp, Artificial
  Synthetic oligonucleotide
accgatgatcctccaagtgtacggtcttcatgtagttctgcataaagtacaaccc

SEQ ID NO: 273486 - DNA, 55 bp, Artificial
  Synthetic oligonucleotide
tgtacgctcactttgtctaaatgggccataagcttcagaattaacattaggacct

SEQ ID NO: 273487 - DNA, 55 bp, Artificial
  Synthetic oligonucleotide
accgcttttactctgctggtaattagcagcgtccaagtgttgacgcaacatttct

SEQ ID NO: 273488 - DNA, 55 bp, Artificial
  Synthetic oligonucleotide
tgtaccaatgtcgtcatttacttcacattccagtggcggaacaaatattgtttcc

SEQ ID NO: 273489 - DNA, 55 bp, Artificial
  Synthetic oligonucleotide
tgtacacacaatggtcttctggccatcgcaagtcagatcaaagttcgatcgtaag

SEQ ID NO: 273490 - DNA, 55 bp, Artificial
  Synthetic oligonucleotide
tgtaatcgtcaaagtcctcgataggacaggaaaaccctggacctgaggtgcaacc

SEQ ID NO: 273491 - DNA, 60 bp, Artificial
  Synthetic oligonucleotide
gtgctgctgaactaacctatttatgttggatgattacacataacggaacagcaatcaaga

SEQ ID NO: 273492 - DNA, 55 bp, Artificial
  Synthetic oligonucleotide
accgtaacatgaggcgcaaagcctatgctcactcgtgagatcccatgacactttg

SEQ ID NO: 273493 - DNA, 55 bp, Artificial
  Synthetic oligonucleotide
accgtagacgccagaaggtagcctaacgaggaacgcacggagagttgcgcgtggc

SEQ ID NO: 273494 - DNA, 55 bp, Artificial
  Synthetic oligonucleotide
accgtcagaatcctactgccgagagatgaagaccgctctcaaatacttggtacca

SEQ ID NO: 273495 - DNA, 55 bp, Artificial
  Synthetic oligonucleotide
acctcccgtcggatcattcctagaatcctcaaaggtcccaacgcagttagaacag

SEQ ID NO: 273496 - DNA, 55 bp, Artificial
  Synthetic oligonucleotide
tggtttccgataaggatgtggttggaccaagaagttactcgagccgcttgtctct

SEQ ID NO: 273497 - DNA, 54 bp, Artificial
  Synthetic oligonucleotide
acctgcattttacgcgttttaatagcgcgtccaagcccgttttagaccgctcac

SEQ ID NO: 273498 - DNA, 55 bp, Artificial
  Synthetic oligonucleotide
acctgggtgcacagggcaaaattgcttccaacccatgctgcacacatcgaagttg

SEQ ID NO: 273499 - DNA, 55 bp, Artificial
  Synthetic oligonucleotide
tggttgacactagcaaccgtgttaatgacagtatgcttcttactcaaatcgtccg

SEQ ID NO: 273500 - DNA, 55 bp, Artificial
  Synthetic oligonucleotide
tgtggtgaacaaagtacatggcccgttctatccttaattaagacacgttgcacag

SEQ ID NO: 273501 - DNA, 54 bp, Artificial
  Synthetic oligonucleotide
acagtactagaagggttcgacaagccaagttgtcaagtaaacgctacggtcgtc

SEQ ID NO: 273502 - DNA, 54 bp, Artificial
  Synthetic oligonucleotide
cgtttaggttttcgtgattggtcggtctcggatgagcgggcgggtaagttgtgc

SEQ ID NO: 273503 - DNA, 55 bp, Artificial
  Synthetic oligonucleotide
tgtggggatactacttgaattggcacgacacatatctctttccgtacgctaaaga

SEQ ID NO: 273504 - DNA, 55 bp, Artificial
  Synthetic oligonucleotide
tgtggctccatttctaatgcgaacccttaaacataaggatgtgtgcaagcttacc

SEQ ID NO: 273505 - DNA, 55 bp, Artificial
  Synthetic oligonucleotide
acatacgcccaagttatcctagtacaagaccgccatattgtgctcataatcggga

SEQ ID NO: 273506 - DNA, 55 bp, Artificial
  Synthetic oligonucleotide
tgtggagtaagatgtggtgtaagatgtggtgtaagatgtggtgtaagatgtggag

SEQ ID NO: 273507 - DNA, 55 bp, Artificial
  Synthetic oligonucleotide
acatcttataaattagcctggccactaactgtcttacctcttatgccttattgcg

SEQ ID NO: 273508 - DNA, 55 bp, Artificial
  Synthetic oligonucleotide
acatgctaggaagggcattgcgacctgggtggctgggcattactaggacggtggt

SEQ ID NO: 273509 - DNA, 55 bp, Artificial
  Synthetic oligonucleotide
acatggccacacttaagcgcctaaagatggcggacgaccggacacgtgatatgac

SEQ ID NO: 273510 - DNA, 55 bp, Artificial
  Synthetic oligonucleotide
acatgtctcaatgcactatccactgatttgggacgagtaataccgttgaaaccga

SEQ ID NO: 273511 - DNA, 51 bp, Artificial
  Synthetic oligonucleotide
acattatctacgaagtacccggtaacgttcttccacggaacgcggggagga

SEQ ID NO: 273512 - DNA, 55 bp, Artificial
  Synthetic oligonucleotide
accaaatttatcaggtcgtttaaatatgatctggtttcaagctcccactgacgct

SEQ ID NO: 273513 - DNA, 60 bp, Artificial
  Synthetic oligonucleotide
cttagtttgatcacatcatatgtatgtagtaggtttagattgtgatcttagagcttattt

SEQ ID NO: 273514 - DNA, 55 bp, Artificial
  Synthetic oligonucleotide
tgtgacattaccttgtccatgctgaacctgagaaacatcaaggcgctatcacatt

SEQ ID NO: 273515 - DNA, 55 bp, Artificial
  Synthetic oligonucleotide
tgtgaacctctgtggcaaccgcagattacttgtaactgctggggtcggaaagatc

SEQ ID NO: 273516 - DNA, 55 bp, Artificial
  Synthetic oligonucleotide
accaatgatcgatggaacaccagcaaaactatcgtggtaagtctctggaccacca

SEQ ID NO: 273517 - DNA, 55 bp, Artificial
  Synthetic oligonucleotide
tgtctgttgtgggcactccaaaccattttgggcccttctgtcggaaggccggagg

SEQ ID NO: 273518 - DNA, 55 bp, Artificial
  Synthetic oligonucleotide
tgtcgtatgttgtttggcatcgtttattctacaagtttctacgtacgtatgctgc

SEQ ID NO: 273519 - DNA, 55 bp, Artificial
  Synthetic oligonucleotide
accagacctgtgaagacgctagcactaatagtcagaatcaccgatttctgcgtat

SEQ ID NO: 273520 - DNA, 55 bp, Artificial
  Synthetic oligonucleotide
accccaagcgttgccctctggtgtctacattcgttgatagaagattctgtccaat

SEQ ID NO: 273521 - DNA, 55 bp, Artificial
  Synthetic oligonucleotide
tggaccgaaaaccgatatatagtatgtgtcgacctcacaaggaataccgttgcat

SEQ ID NO: 273522 - DNA, 55 bp, Artificial
  Synthetic oligonucleotide
tgcttaccagcgcatataagcgtttggttgtctattgtttgcacacaatgccatc

SEQ ID NO: 273523 - DNA, 55 bp, Artificial
  Synthetic oligonucleotide
tgctgctaaacgacctaagatccgcagtcacctatcgtttaaagtacgcagtcac

SEQ ID NO: 273524 - DNA, 59 bp, Artificial
  Synthetic oligonucleotide
aaatatcgaaaccttcacttttagctattatcaggtcgtatgtatgataccatccttca

SEQ ID NO: 273525 - DNA, 55 bp, Artificial
  Synthetic oligonucleotide
tgctgaatggtatctccagatcgtacccactaccactggaatcaacagtacttac

SEQ ID NO: 273526 - DNA, 55 bp, Artificial
  Synthetic oligonucleotide
acggtgaatgtatcgccagctaaactttgatcgaacaaacggaaattcggaatgg

SEQ ID NO: 273527 - DNA, 55 bp, Artificial
  Synthetic oligonucleotide
acggtggctatgttatggaataacgatgactctagcggtttgtcttcccgctacg

SEQ ID NO: 273528 - DNA, 55 bp, Artificial
  Synthetic oligonucleotide
tgctccccaagttgttataccagggccgacataaagtataccatgccaagtccca

SEQ ID NO: 273529 - DNA, 55 bp, Artificial
  Synthetic oligonucleotide
acgtacagttggttgtcgatggctctcgatctagctaacagatgccaatgcatag

SEQ ID NO: 273530 - DNA, 55 bp, Artificial
  Synthetic oligonucleotide
acgtagaaggtagctcaacgattgctcgagaggttgagtgttaagcaccgtctgg

SEQ ID NO: 273531 - DNA, 55 bp, Artificial
  Synthetic oligonucleotide
acgtcactcagggacaattgattacatgctatcggccacataccgtgatttgaac

SEQ ID NO: 273532 - DNA, 55 bp, Artificial
  Synthetic oligonucleotide
acgtcaggcagggcaaacgaatgttaggtctacgttatagttctccaacaagtaa

SEQ ID NO: 273533 - DNA, 55 bp, Artificial
  Synthetic oligonucleotide
tgctagatggactatccttcaagttgaccctgttatccattgtatcacatctggt

SEQ ID NO: 273534 - DNA, 55 bp, Artificial
  Synthetic oligonucleotide
acgtgtgttgggagtcgtatattgttggcgtctgcaaattcgtgaattctccgcg

SEQ ID NO: 273535 - DNA, 60 bp, Artificial
  Synthetic oligonucleotide
taacagactgttcctgagaagctggtaatcatagcgtgcatcctcatcagtagttcgagt

SEQ ID NO: 273536 - DNA, 55 bp, Artificial
  Synthetic oligonucleotide
tgcgatagatcagaggactcatctccagtgttatattgagattccgtgtctgcgg

SEQ ID NO: 273537 - DNA, 55 bp, Artificial
  Synthetic oligonucleotide
actaaaagaattgagggttgcgcctagctgaaatcttagtccactttggcacctt

SEQ ID NO: 273538 - DNA, 55 bp, Artificial
  Synthetic oligonucleotide
actaaaccgtcagcgttgccgcacctacgaacgtctctctagaggtcgtctctcc

SEQ ID NO: 273539 - DNA, 55 bp, Artificial
  Synthetic oligonucleotide
actacaaagctgttatcgttcctagcgaaggaccaataggtttcgaaaagctgtc

SEQ ID NO: 273540 - DNA, 55 bp, Artificial
  Synthetic oligonucleotide
actacagccatgttacccctggctaatgatttcaacatatgtgtcatatgaccat

SEQ ID NO: 273541 - DNA, 55 bp, Artificial
  Synthetic oligonucleotide
acctgttggcagcgttagctctttggtgcattcgcggtattattatcgcacgcga

SEQ ID NO: 273542 - DNA, 55 bp, Artificial
  Synthetic oligonucleotide
acctttagcaggtattttagctatagtagctttagaatttgctattgctatgatt

SEQ ID NO: 273543 - DNA, 55 bp, Artificial
  Synthetic oligonucleotide
acgaagaataggaagtcactgtttacgaaccggagcgatcacgagggacgactgg

SEQ ID NO: 273544 - DNA, 55 bp, Artificial
  Synthetic oligonucleotide
tggtggcgacaatacaaactggggcattgcttcagtcgatctgaacaaaggttgc

SEQ ID NO: 273545 - DNA, 53 bp, Artificial
  Synthetic oligonucleotide
acgaattaatacagggaacccaactttagcggcaaagacgttagcttcctcaa

SEQ ID NO: 273546 - DNA, 56 bp, Artificial
  Synthetic oligonucleotide
agcttttggaaatatcctcctgcgttgaaaggttgttgataaaggtagtgggctgc

SEQ ID NO: 273547 - DNA, 51 bp, Artificial
  Synthetic oligonucleotide
acgacttcatgcttacttttaaaacgcggagttaaataaagttgaactcct

SEQ ID NO: 273548 - DNA, 55 bp, Artificial
  Synthetic oligonucleotide
tggtcggcggtgctcaacaattcgtacatagccttcaagactggctcgtagattg

SEQ ID NO: 273549 - DNA, 55 bp, Artificial
  Synthetic oligonucleotide
tggtagcggagtctatcgttggtttagattcgccatcatgaagcgcttacaggcc

SEQ ID NO: 273550 - DNA, 55 bp, Artificial
  Synthetic oligonucleotide
tgggtttgggaaattggcaccttcagacacaataccttctcttgtacagatagtg

SEQ ID NO: 273551 - DNA, 55 bp, Artificial
  Synthetic oligonucleotide
tgggcttgaaactccccactatagtcctccgaggtggtgggaaacatgctagcgt

SEQ ID NO: 273552 - DNA, 55 bp, Artificial
  Synthetic oligonucleotide
acgcctccgttggcgtcacaagactatatccgaacggtaaaagtcaaccatcatc

SEQ ID NO: 273553 - DNA, 55 bp, Artificial
  Synthetic oligonucleotide
tgggccctcgggcgatattgaccgtgtgctggagacatatcgtttgatggctaac

SEQ ID NO: 273554 - DNA, 55 bp, Artificial
  Synthetic oligonucleotide
tggccgggtaagtataatgatgatcgcggttaaagaggagccatatgagagcggc

SEQ ID NO: 273555 - DNA, 55 bp, Artificial
  Synthetic oligonucleotide
tggccattgcagttctaataccagttatctctttcgcatccaatacacctcgaag

SEQ ID NO: 273556 - DNA, 55 bp, Artificial
  Synthetic oligonucleotide
tggccatagccgggttagcaacatgcgttgtatggttgagtatcaacgtatcaca

SEQ ID NO: 273557 - DNA, 60 bp, Artificial
  Synthetic oligonucleotide
gatctatagcttaatagtaaagtcctattttgtcataatagaggatatcagtgcaaatct

SEQ ID NO: 273558 - DNA, 55 bp, Artificial
  Synthetic oligonucleotide
tggcagtacaaatcgcagacagctctaactggcctcagatgaaagcttgtgtcct

SEQ ID NO: 273559 - DNA, 55 bp, Artificial
  Synthetic oligonucleotide
acggaacctttcgatgtaccgtctcctttcatagtagtacgagcgatagtgccca

SEQ ID NO: 273560 - DNA, 55 bp, Artificial
  Synthetic oligonucleotide
acggatgatacgctactgtaactgctactagtctgtgtttgcataacatccagcg

SEQ ID NO: 273561 - DNA, 55 bp, Artificial
  Synthetic oligonucleotide
tggatcattagcaggtcctctcactggaggtggtcattccactgtttataatgag

SEQ ID NO: 273562 - DNA, 55 bp, Artificial
  Synthetic oligonucleotide
gtttatattggtatcgtcactctcccgcttgtgtacctccttccatacgcacctc

SEQ ID NO: 273563 - DNA, 55 bp, Artificial
  Synthetic oligonucleotide
ccctatccatacgatatcttcttccgagtccattagataaggcaacgctagattt

SEQ ID NO: 273564 - DNA, 55 bp, Artificial
  Synthetic oligonucleotide
ccctattatcgccaactgtttcgtgattttccccgcattatcacctcaaacgaga

SEQ ID NO: 273565 - DNA, 55 bp, Artificial
  Synthetic oligonucleotide
gtttcaacataccgcagcgcgtcaaaagtgagattgatcgacgatctctagggat

SEQ ID NO: 273566 - DNA, 55 bp, Artificial
  Synthetic oligonucleotide
gttatgaggaaaagtatcctgtgtcgttctaggtaatatcggaggcgtcacttcc

SEQ ID NO: 273567 - DNA, 52 bp, Artificial
  Synthetic oligonucleotide
ccctcagggtttatacgtgcctttccctttacgtataaaaggtgccagagac

SEQ ID NO: 273568 - DNA, 60 bp, Artificial
  Synthetic oligonucleotide
tcgctgagtttcgatattgtcaataaatcactccagtttaaatacaagacgcaaaaagca

SEQ ID NO: 273569 - DNA, 55 bp, Artificial
  Synthetic oligonucleotide
ccacatgaggctagaatacacccgttaccgtataattgatcattagtggaacggg

SEQ ID NO: 273570 - DNA, 55 bp, Artificial
  Synthetic oligonucleotide
ccctccaacgacagtatagcacatgacaccgaatggaatcaacatagttgaagcg

SEQ ID NO: 273571 - DNA, 55 bp, Artificial
  Synthetic oligonucleotide
ccacatatcgaatactcataggtttaatgattcatcgctgcaaagtttactgacc

SEQ ID NO: 273572 - DNA, 55 bp, Artificial
  Synthetic oligonucleotide
ccacatagtgagagtatacagctcatcgactgcgtcttcgttgtagcccttgagg

SEQ ID NO: 273573 - DNA, 55 bp, Artificial
  Synthetic oligonucleotide
gttagtagatacgcactaacgtttcaacactgtctggagaacccaccggttgagc

SEQ ID NO: 273574 - DNA, 55 bp, Artificial
  Synthetic oligonucleotide
ccacagttgctaggctgtaatggctttctggtggaatgggatacgttgagaattt

SEQ ID NO: 273575 - DNA, 55 bp, Artificial
  Synthetic oligonucleotide
ccacagtagcgaatagcagtcccacaagtacgtaagcgtacagtccagacttgcc

SEQ ID NO: 273576 - DNA, 55 bp, Artificial
  Synthetic oligonucleotide
ccctcgtcgtgggctttgggatgtatgtcttgatatgactctggtgcctaactcc

SEQ ID NO: 273577 - DNA, 55 bp, Artificial
  Synthetic oligonucleotide
gttagctgcatactaaactaaagtacagtagggaaccctgtaagtacttcatccc

SEQ ID NO: 273578 - DNA, 55 bp, Artificial
  Synthetic oligonucleotide
ccctctgcaactggtatttgtgcacctgtaaattatcaaccggtcgagagagacg

SEQ ID NO: 273579 - DNA, 60 bp, Artificial
  Synthetic oligonucleotide
gggactctagtttgcgatagtgtagataccgtctacggatagagcactagagatagctgg

SEQ ID NO: 273580 - DNA, 55 bp, Artificial
  Synthetic oligonucleotide
ccctgagggtggtagtgatgagacgtcagaagaagagcatacgctgacgttcgag

SEQ ID NO: 273581 - DNA, 54 bp, Artificial
  Synthetic oligonucleotide
ccctgatgaacgtgtctctcaacttaccctccattaccctacctccccactcgt

SEQ ID NO: 273582 - DNA, 55 bp, Artificial
  Synthetic oligonucleotide
ccacagagccctctggtaaattgaaatcgagcgcttgttgattccatagacccac

SEQ ID NO: 273583 - DNA, 55 bp, Artificial
  Synthetic oligonucleotide
ccacactggagagtgaagttcacggattgttatgatccacaatggtactagcaca

SEQ ID NO: 273584 - DNA, 55 bp, Artificial
  Synthetic oligonucleotide
ccacaccacctaccagctgattcgaaggcggtagaatatctgttgtgcgatctag

SEQ ID NO: 273585 - DNA, 55 bp, Artificial
  Synthetic oligonucleotide
ccacaagtcaatggtgtcagatccaacgttaaagatataggatggggtccaaaag

SEQ ID NO: 273586 - DNA, 55 bp, Artificial
  Synthetic oligonucleotide
ccaattctaggtgaaggacatgacagacttgccatcacgggccttcgcaactggg

SEQ ID NO: 273587 - DNA, 55 bp, Artificial
  Synthetic oligonucleotide
ccctgggtctcatgggccaggacgagatatacctgacggtcatcaacacttccgg

SEQ ID NO: 273588 - DNA, 55 bp, Artificial
  Synthetic oligonucleotide
ccaatgtacgctcgtctttactaaggcttgatacgaagttagctgctttccgatg

SEQ ID NO: 273589 - DNA, 55 bp, Artificial
  Synthetic oligonucleotide
ccctggtaacggctggtccgtgctagtgggtgtcttggtatgggagggcatggta

SEQ ID NO: 273590 - DNA, 57 bp, Artificial
  Synthetic oligonucleotide
atgcatgattaacttcgagaagggattaaggctaatttcactagtatgtttcaaaaa

SEQ ID NO: 273591 - DNA, 52 bp, Artificial
  Synthetic oligonucleotide
aaagggaaggaactcggcaaaaatagctctaacgttagtcaataaagagaac

SEQ ID NO: 273592 - DNA, 55 bp, Artificial
  Synthetic oligonucleotide
ccctggtcttagcatcgctgggtctatcatatctggtctattcgtcgcgcctaca

SEQ ID NO: 273593 - DNA, 53 bp, Artificial
  Synthetic oligonucleotide
gttacggaaatttgatttaccctgcttaacgctaatccagcgggaaagttgcg

SEQ ID NO: 273594 - DNA, 55 bp, Artificial
  Synthetic oligonucleotide
ccaatgggacttaactttgaagcgccgacagtttacctctttctcgaccagaatg

SEQ ID NO: 273595 - DNA, 55 bp, Artificial
  Synthetic oligonucleotide
ccaatgatactcctgcattaccttagaagtgtcttcgtcttgtcctctcgtaaac

SEQ ID NO: 273596 - DNA, 55 bp, Artificial
  Synthetic oligonucleotide
ccaatcttccatatcagaagttttacagctggcacccttgaatgcatcggagaaa

SEQ ID NO: 273597 - DNA, 55 bp, Artificial
  Synthetic oligonucleotide
ccactagtgacgtagcggaaatgtagctcttccgagactcttccgccgagggcca

SEQ ID NO: 273598 - DNA, 55 bp, Artificial
  Synthetic oligonucleotide
ccactactacgagcgaaaacaaaggggtctgactcggcttcccctcaactcgcca

SEQ ID NO: 273599 - DNA, 55 bp, Artificial
  Synthetic oligonucleotide
cccgggagtatattctaagagagaggagcccgcgtactggagataaggacaacgt

SEQ ID NO: 273600 - DNA, 55 bp, Artificial
  Synthetic oligonucleotide
ccactacccgtcaccggtgtaccttgaagggtcttgtctagatgatgtagatccg

SEQ ID NO: 273601 - DNA, 55 bp, Artificial
  Synthetic oligonucleotide
gttcatgcaatagccaatagcagtccctataaaacgacttattatgagcgatctc

SEQ ID NO: 273602 - DNA, 60 bp, Artificial
  Synthetic oligonucleotide
tttaggagttcagatgcaacgcgtagtgcaaatggaggattcaagttgcagtaacaataa

SEQ ID NO: 273603 - DNA, 55 bp, Artificial
  Synthetic oligonucleotide
ccacgtcttccccatgtagaaagcgcccggtctgaacaggtccttgcccgtagtc

SEQ ID NO: 273604 - DNA, 52 bp, Artificial
  Synthetic oligonucleotide
cccggtaaaagaattcgggatcttacacaggacgaacaggttgacgtttgga

SEQ ID NO: 273605 - DNA, 55 bp, Artificial
  Synthetic oligonucleotide
gttcagccgacgttattgagcttggtagtgtgcaatgtagtgagttgtagtcctc

SEQ ID NO: 273606 - DNA, 55 bp, Artificial
  Synthetic oligonucleotide
cccgtggctaccaccagctccgctgtaagataatctgccttgttgctttaaaact

SEQ ID NO: 273607 - DNA, 52 bp, Artificial
  Synthetic oligonucleotide
ccacggtttactgacgtcaaaattcgtaggtccaacggagtttctcctacca

SEQ ID NO: 273608 - DNA, 55 bp, Artificial
  Synthetic oligonucleotide
cccgtgtggcatttgtattaaggcgttatgtctccaacgaatcgttagtaaggcg

SEQ ID NO: 273609 - DNA, 55 bp, Artificial
  Synthetic oligonucleotide
gtttaatttctgtagcaaccgcctgcgcaggctcccttctgcgcggtacgggttg

SEQ ID NO: 273610 - DNA, 55 bp, Artificial
  Synthetic oligonucleotide
ccacgaggagtcaaatgggaatttccgcctatacggccactaacattatcttcgc

SEQ ID NO: 273611 - DNA, 55 bp, Artificial
  Synthetic oligonucleotide
ccacgagagatttcgtaagacacctcttccaggctccactattccatcatattcg

SEQ ID NO: 273612 - DNA, 53 bp, Artificial
  Synthetic oligonucleotide
cccgtttaggaaagatccgaatattttgacagtagtacgtaatgaataaccac

SEQ ID NO: 273613 - DNA, 60 bp, Artificial
  Synthetic oligonucleotide
tcgcggctgacggtcctcagagaccgggacctcgtatgtagtcatagtgtgctcaccgag

SEQ ID NO: 273614 - DNA, 55 bp, Artificial
  Synthetic oligonucleotide
ccacgaagtccaggcgaatataaacagcccagtaggcattaaccatgcgaacatc

SEQ ID NO: 273615 - DNA, 55 bp, Artificial
  Synthetic oligonucleotide
cccgttttaggtatcgcactttagccgccaagcaaataagcaggatcacgtggca

SEQ ID NO: 273616 - DNA, 55 bp, Artificial
  Synthetic oligonucleotide
gttcaaccaccgcccacttagtagagccttgtgctgtttgacaggcactatgact

SEQ ID NO: 273617 - DNA, 55 bp, Artificial
  Synthetic oligonucleotide
ccacctttgacagtgacggccactactgcgtctaacttacatcgagtcggactgg

SEQ ID NO: 273618 - DNA, 53 bp, Artificial
  Synthetic oligonucleotide
ccacctattgaacctgagtttagggagctgtaaaggttttatacgggcctcac

SEQ ID NO: 273619 - DNA, 55 bp, Artificial
  Synthetic oligonucleotide
ccctaacgcaaatggcctgagttgcttaagataccttcctctgatcattgaaccg

SEQ ID NO: 273620 - DNA, 55 bp, Artificial
  Synthetic oligonucleotide
ccaccgttttatacgagatatatggcggctactcggtaaactgtgcagacggtgc

SEQ ID NO: 273621 - DNA, 55 bp, Artificial
  Synthetic oligonucleotide
ccaccgtctcttacaaaccaatatctgaatcaggggactgctacgaggcaacctc

SEQ ID NO: 273622 - DNA, 55 bp, Artificial
  Synthetic oligonucleotide
ccctacctacttggccttgctcgaagcaatcccggccttacagtgattaagcacg

SEQ ID NO: 273623 - DNA, 54 bp, Artificial
  Synthetic oligonucleotide
ccctactatcgtggtcagggtttaaagattggacggccaccataacttgctccc

SEQ ID NO: 273624 - DNA, 60 bp, Artificial
  Synthetic oligonucleotide
cttgatcttgaccaggagatgcagattgtgagttctgtacttccacagaactgccctcat

SEQ ID NO: 273625 - DNA, 55 bp, Artificial
  Synthetic oligonucleotide
ccaccgtatctactagtggtaaatctcaaaatatccccagtgttgccacggttca

SEQ ID NO: 273626 - DNA, 55 bp, Artificial
  Synthetic oligonucleotide
ccaccgaaggtactggtatcggatgtgacaacgtcagcatcgtagtcgtcgcact

SEQ ID NO: 273627 - DNA, 55 bp, Artificial
  Synthetic oligonucleotide
ccacccgtcaataatggtcaacctccagtcatatcttctgtgaacgccacacctt

SEQ ID NO: 273628 - DNA, 55 bp, Artificial
  Synthetic oligonucleotide
ccaccccgcaactccccattatcgcattaagaatccagacatttcacagcggctc

SEQ ID NO: 273629 - DNA, 55 bp, Artificial
  Synthetic oligonucleotide
ccctaggtcctctatcagttccagctgcttacacaaccgaagtagtatcaggatc

SEQ ID NO: 273630 - DNA, 52 bp, Artificial
  Synthetic oligonucleotide
ccctagtcgggccatagttttattgggttaaagaactatcgaacgtgaatcc

SEQ ID NO: 273631 - DNA, 54 bp, Artificial
  Synthetic oligonucleotide
catttaaatgtgtccctaatggcgaccaaattagatacaaacccagtaacccca

SEQ ID NO: 273632 - DNA, 55 bp, Artificial
  Synthetic oligonucleotide
gtgtgcagcatgggttggaagcaattttgccctgtgcacccaggtaacatacaga

SEQ ID NO: 273633 - DNA, 54 bp, Artificial
  Synthetic oligonucleotide
cattggccctttgtaagggttcaccgttaatttgcgcctcctgaggtaagccaa

SEQ ID NO: 273634 - DNA, 55 bp, Artificial
  Synthetic oligonucleotide
cattgcttggatataagcgcttgcagggttgaatagtcttccatagcacgctcga

SEQ ID NO: 273635 - DNA, 60 bp, Artificial
  Synthetic oligonucleotide
tttcagtaatctagctatatttttacaatcagtatttggttcatcaaagtccgatatcag

SEQ ID NO: 273636 - DNA, 55 bp, Artificial
  Synthetic oligonucleotide
gtgtgcacgaaaggtttatctctaaggattctcctccccgtggggtcttgaagca

SEQ ID NO: 273637 - DNA, 55 bp, Artificial
  Synthetic oligonucleotide
cattgatttacagacacacaatattgtcgtaatgtacggtagatatgccgaggca

SEQ ID NO: 273638 - DNA, 55 bp, Artificial
  Synthetic oligonucleotide
gtgtcgctatcgatagagggttaccatttatacatattgagctgccaaggttttc

SEQ ID NO: 273639 - DNA, 55 bp, Artificial
  Synthetic oligonucleotide
gtgtccgaatcattgcagtgtatgtgacagaactaagcgtctatgacacttagag

SEQ ID NO: 273640 - DNA, 55 bp, Artificial
  Synthetic oligonucleotide
ccgagtgccatgaccatccaaatgtggtgataatagcgattagataaggtggtgc

SEQ ID NO: 273641 - DNA, 55 bp, Artificial
  Synthetic oligonucleotide
ccgatatggggagcgccaattcaacatgaggaccaaaagggtaattccttgtgcg

SEQ ID NO: 273642 - DNA, 55 bp, Artificial
  Synthetic oligonucleotide
cattgatcaatgcgaggggaagaggtcagtgactactattgcggacactctttac

SEQ ID NO: 273643 - DNA, 55 bp, Artificial
  Synthetic oligonucleotide
gtgtccaattgaagtgagtgtcacgtgcacagcgacggtagtcgttggatgtgct

SEQ ID NO: 273644 - DNA, 55 bp, Artificial
  Synthetic oligonucleotide
gtttgaacacacaacatagctgcggaagtacgtccgtacgttgtatgtcccattc

SEQ ID NO: 273645 - DNA, 55 bp, Artificial
  Synthetic oligonucleotide
ccgatcaacaatcatctgcttccgcggatcttcaaatcgaatatactgcgtacgg

SEQ ID NO: 273646 - DNA, 60 bp, Artificial
  Synthetic oligonucleotide
caagggtgtcgatgagcctgtcgattgaggagttaagaagggatgcgctggtgattcact

SEQ ID NO: 273647 - DNA, 55 bp, Artificial
  Synthetic oligonucleotide
cattcggaattacaccacaaaacgatgccaacaaagtctcgcaatcgaacccttc

SEQ ID NO: 273648 - DNA, 55 bp, Artificial
  Synthetic oligonucleotide
ccgatcacatgttgaccattgaatggacctctactgaaggttggggaaaccctca

SEQ ID NO: 273649 - DNA, 55 bp, Artificial
  Synthetic oligonucleotide
ccgatgtcctgtccacaacgatcaagtcctccttaatgaagctttgctctaaccc

SEQ ID NO: 273650 - DNA, 54 bp, Artificial
  Synthetic oligonucleotide
ccgattaatagggaatattacaacctccggactgtgactactcgcgggtattag

SEQ ID NO: 273651 - DNA, 55 bp, Artificial
  Synthetic oligonucleotide
cattatgaccatcaagcggctatgatcttcaagagtctctcaaacgttgttctgc

SEQ ID NO: 273652 - DNA, 55 bp, Artificial
  Synthetic oligonucleotide
ccgattgagtgttatgctatcggctttgcttggcaacatggaaccgggaaggagg

SEQ ID NO: 273653 - DNA, 55 bp, Artificial
  Synthetic oligonucleotide
gtgtcaggctgaacgcaagcgtgtgcctagttacgatctatataacctggaactc

SEQ ID NO: 273654 - DNA, 55 bp, Artificial
  Synthetic oligonucleotide
cattaaatccgtgtacctcgaagcaacgatagacaatccggtgatcagtttcgtg

SEQ ID NO: 273655 - DNA, 55 bp, Artificial
  Synthetic oligonucleotide
catgttaccagctttactaaacaatgtgacagaagcagttacctatggtctaccc

SEQ ID NO: 273656 - DNA, 55 bp, Artificial
  Synthetic oligonucleotide
catgtgtagtcataaatggctacaaccctacatgcagctacagagacgcttttca

SEQ ID NO: 273657 - DNA, 56 bp, Artificial
  Synthetic oligonucleotide
cttatggttttatatgagttagagctagtttcccacgtttaagatatgatttatta

SEQ ID NO: 273658 - DNA, 55 bp, Artificial
  Synthetic oligonucleotide
ccgcacgtgctgtcttggtatcgtaatgacgataagaccagatctcctcacaggt

SEQ ID NO: 273659 - DNA, 55 bp, Artificial
  Synthetic oligonucleotide
gtttgcctaagcacctgattgcaggtaagcgtggtaacggtaagactgaccgccg

SEQ ID NO: 273660 - DNA, 55 bp, Artificial
  Synthetic oligonucleotide
catgtagtgggtagactgattgataggatcttacgcgtggggcacaacttagcgc

SEQ ID NO: 273661 - DNA, 55 bp, Artificial
  Synthetic oligonucleotide
gttttgtaggatttcaatcgtaggctgcaccgtttgataaatttgcaacgtggta

SEQ ID NO: 273662 - DNA, 55 bp, Artificial
  Synthetic oligonucleotide
ccgcataattctttactatacactatgcgtcagcggcctaacatttcgaacagtg

SEQ ID NO: 273663 - DNA, 54 bp, Artificial
  Synthetic oligonucleotide
gtgtcaggataaattatctgttcgcggaacgttgaaccgttacccatataaggt

SEQ ID NO: 273664 - DNA, 55 bp, Artificial
  Synthetic oligonucleotide
catggtagcttatatacgttagcataagacagagtgtccaatacaatgcaacccc

SEQ ID NO: 273665 - DNA, 55 bp, Artificial
  Synthetic oligonucleotide
ccctgtgacgctgggccaggcactatttagcattacttcgaaaagacgcaagtat

SEQ ID NO: 273666 - DNA, 55 bp, Artificial
  Synthetic oligonucleotide
ccctgtgcggagtatctcgaacttccagtatattactctcaagtacatgacgcgt

SEQ ID NO: 273667 - DNA, 55 bp, Artificial
  Synthetic oligonucleotide
ccaatcggcggtctattgattgatagaatcgggtggagagctctattcgcgtttc

SEQ ID NO: 273668 - DNA, 60 bp, Artificial
  Synthetic oligonucleotide
cctgagtggccacgcctctttggaacacagcgacgggagcaacgtcactcgtcgatctat

SEQ ID NO: 273669 - DNA, 55 bp, Artificial
  Synthetic oligonucleotide
gttaaacacattccgaatggctgactggaccatttgacaggactagctcactatg

SEQ ID NO: 273670 - DNA, 55 bp, Artificial
  Synthetic oligonucleotide
cccttccccagacacgacattaatgccttaccaggttagtaattattccattcag

SEQ ID NO: 273671 - DNA, 55 bp, Artificial
  Synthetic oligonucleotide
gtgttacgaggcaatttccttctccgattatccttcagttgactagaactattac

SEQ ID NO: 273672 - DNA, 55 bp, Artificial
  Synthetic oligonucleotide
ccaatactcgttgtctactcacgggacatacccttacttgcgtggtaattattgg

SEQ ID NO: 273673 - DNA, 55 bp, Artificial
  Synthetic oligonucleotide
ccaataaggaccgccaaagggctagatcgacctatagagatgaggagagatcatg

SEQ ID NO: 273674 - DNA, 55 bp, Artificial
  Synthetic oligonucleotide
ccctttaggccttggccaatctgataatctagtgatgacgttataggcggaactc

SEQ ID NO: 273675 - DNA, 55 bp, Artificial
  Synthetic oligonucleotide
gtgtgtacctcagtgcgatcgtcttacgtgaatggttacaatgaggtctgtaagt

SEQ ID NO: 273676 - DNA, 55 bp, Artificial
  Synthetic oligonucleotide
ccgaaaggctacgttacataatggtaccgccgatataatctggaatcgagttcga

SEQ ID NO: 273677 - DNA, 55 bp, Artificial
  Synthetic oligonucleotide
ccaaggttccagcgacatcgttggcgttctccgactcaggcaacccagccgtagg

SEQ ID NO: 273678 - DNA, 55 bp, Artificial
  Synthetic oligonucleotide
ccaagcgcgttgcatgctattttcacaaagcgtgaggttggaggataccgctatt

SEQ ID NO: 273679 - DNA, 50 bp, Artificial
  Synthetic oligonucleotide
tttcgtcgcccgtgagattttcccatttcccgttccttaccatttttcgt

SEQ ID NO: 273680 - DNA, 53 bp, Artificial
  Synthetic oligonucleotide
ccaagaggtacaggtatcgtgactagaagaccgttggttttacaactaaataa

SEQ ID NO: 273681 - DNA, 55 bp, Artificial
  Synthetic oligonucleotide
ccaagactatcacgaagagttacttcatggctgttcagagaattcccattgtccg

SEQ ID NO: 273682 - DNA, 55 bp, Artificial
  Synthetic oligonucleotide
ccgaaagtggcaaaatagatgaatcggataccactgggaattcgaaagtggaccc

SEQ ID NO: 273683 - DNA, 55 bp, Artificial
  Synthetic oligonucleotide
ccgaaccaccccacatcgatctaacaaatgtcttagcagctagacctgatgcagc

SEQ ID NO: 273684 - DNA, 55 bp, Artificial
  Synthetic oligonucleotide
ccaacgtgctagcaatttgtggtaagttcatggaacataattgtttaactagtcc

SEQ ID NO: 273685 - DNA, 53 bp, Artificial
  Synthetic oligonucleotide
ccaacggccgacaaagttgtcctaaccaccactaaaggcccaataacgctgtg

SEQ ID NO: 273686 - DNA, 55 bp, Artificial
  Synthetic oligonucleotide
gtttccagtcaataaagcctgacggataaagtgcgattgccatacgagacaggtc

SEQ ID NO: 273687 - DNA, 54 bp, Artificial
  Synthetic oligonucleotide
ccaacgagactccagaatcttacgaagcacccaaccccgcggtagacctttata

SEQ ID NO: 273688 - DNA, 55 bp, Artificial
  Synthetic oligonucleotide
ccgaagttaattgtatgtactctcgaccttttagtgcccttccagcatacttcac

SEQ ID NO: 273689 - DNA, 52 bp, Artificial
  Synthetic oligonucleotide
ccgacccactaattttgtacgggtagtttcgtcaatttagagaagacgacgc

SEQ ID NO: 273690 - DNA, 59 bp, Artificial
  Synthetic oligonucleotide
ggcattacattgttgtctttagttcgtgctgcaaagtcttagattaagttcattaacga

SEQ ID NO: 273691 - DNA, 54 bp, Artificial
  Synthetic oligonucleotide
ccaaccatacggttgggtgatgccgcggggaggatattaccaattattcctccc

SEQ ID NO: 273692 - DNA, 55 bp, Artificial
  Synthetic oligonucleotide
ccgagaggaagcttgcgtgtggagcgatttcccagtcaactcggtgtgccgtggg

SEQ ID NO: 273693 - DNA, 51 bp, Artificial
  Synthetic oligonucleotide
ccgagagggtctcttgtaacaagtcttttggtaactcgaaggtaaaccaaa

SEQ ID NO: 273694 - DNA, 55 bp, Artificial
  Synthetic oligonucleotide
ccaacaggattcaaataatttacccctttcaacaccctaggcatgtgtagcgaca

SEQ ID NO: 273695 - DNA, 55 bp, Artificial
  Synthetic oligonucleotide
ccgagatatctgagcaagccgcaactaccaaatgttacctgtgatttaaatcaga

SEQ ID NO: 273696 - DNA, 55 bp, Artificial
  Synthetic oligonucleotide
ccgagatatgatttgaatttatggtccctgttgcaagtccccgtaaaaggtatga

SEQ ID NO: 273697 - DNA, 55 bp, Artificial
  Synthetic oligonucleotide
ccaaacgttgtcgttgcagcgttaccacagtttgcaacgattagttcgggcgccg

SEQ ID NO: 273698 - DNA, 55 bp, Artificial
  Synthetic oligonucleotide
catttcgccttctcgcatttgtgtttcgtctaatggacactaacggctttgcttt

SEQ ID NO: 273699 - DNA, 55 bp, Artificial
  Synthetic oligonucleotide
catttcgccaagctactctaggtcccgagtactccattaaacgtaacagaagaaa

SEQ ID NO: 273700 - DNA, 55 bp, Artificial
  Synthetic oligonucleotide
cccatatcgttcgacttggagcctctattaagcagggcgtcggattcttcagaca

SEQ ID NO: 273701 - DNA, 59 bp, Artificial
  Synthetic oligonucleotide
gcgcatcatcaattgggaagctttactgtaaaactgtacagagaggacaatttttacac

SEQ ID NO: 273702 - DNA, 60 bp, Artificial
  Synthetic oligonucleotide
ttctacatctagtcatcatgtaggattcgaaactactattatctacggacatgtattaga

SEQ ID NO: 273703 - DNA, 55 bp, Artificial
  Synthetic oligonucleotide
cccatgccatgacgacagaccaattatggcaacctgttcttaaaagccgttagtc

SEQ ID NO: 273704 - DNA, 55 bp, Artificial
  Synthetic oligonucleotide
cccatgttctgatgtggatttggatggacggttctgtgttattaagttccgcaag

SEQ ID NO: 273705 - DNA, 55 bp, Artificial
  Synthetic oligonucleotide
gttgcattaaccaacgacaccgtcggaacgtacctatcgcattgctacacgtccg

SEQ ID NO: 273706 - DNA, 55 bp, Artificial
  Synthetic oligonucleotide
ccatggttgggtagtggtcacgtacgtttcacagtttgtatctcctggacagcag

SEQ ID NO: 273707 - DNA, 55 bp, Artificial
  Synthetic oligonucleotide
cccattaagtggtctaccgtgggagcgtctttacttacaacattatagagagcac

SEQ ID NO: 273708 - DNA, 55 bp, Artificial
  Synthetic oligonucleotide
cccattgctagcggaactatcaccgccaattgaactattcgattgtatactcgca

SEQ ID NO: 273709 - DNA, 55 bp, Artificial
  Synthetic oligonucleotide
ccatggcccattctagccccgttcttcttacagaacgcaacgccgggcatcagga

SEQ ID NO: 273710 - DNA, 55 bp, Artificial
  Synthetic oligonucleotide
ccatgcgatgcggtgcacactaaagaggctcactaatcaacgcgaaccgctgctc

SEQ ID NO: 273711 - DNA, 55 bp, Artificial
  Synthetic oligonucleotide
ccccaaataggaatgcgatgcccctcactaacctgtccggcttggaccggagcat

SEQ ID NO: 273712 - DNA, 55 bp, Artificial
  Synthetic oligonucleotide
ccatgcacagttggttgctcgatgatagagctagatacgatctagcagtacgagc

SEQ ID NO: 273713 - DNA, 54 bp, Artificial
  Synthetic oligonucleotide
ccgctactcctacgttcggctcccggggcgtgctccccgatactgctttcgcgt

SEQ ID NO: 273714 - DNA, 55 bp, Artificial
  Synthetic oligonucleotide
ccatgaggcgtagtcagtcaagcgtgtcatagatggctagcactgtagaaggtat

SEQ ID NO: 273715 - DNA, 55 bp, Artificial
  Synthetic oligonucleotide
gttgccacttgcttcgagccgacacatcgtcccggcaagtagacctacgaaaggg

SEQ ID NO: 273716 - DNA, 55 bp, Artificial
  Synthetic oligonucleotide
ccatccaccatgtcctactcactgtactgttgttctaccctccatattgaaacgt

SEQ ID NO: 273717 - DNA, 55 bp, Artificial
  Synthetic oligonucleotide
gttctcgaacattgactcgtttggaacagctgcctaccatgtggggagcactccg

SEQ ID NO: 273718 - DNA, 55 bp, Artificial
  Synthetic oligonucleotide
ccatcagacatcatggagttgtcgcgcgctcagggtacaatagacaggtcccctc

SEQ ID NO: 273719 - DNA, 55 bp, Artificial
  Synthetic oligonucleotide
ccatcaaagtgcacgattctcctcccctgttagacaatcgtaacgtaatatcgac

SEQ ID NO: 273720 - DNA, 55 bp, Artificial
  Synthetic oligonucleotide
ccatattcgagcttggtcaactgtactttaaggcaattttaggcctcgccttact

SEQ ID NO: 273721 - DNA, 55 bp, Artificial
  Synthetic oligonucleotide
ccataggcattgtattgtgcgcttattagtctgccttgctattcttcgcagtacg

SEQ ID NO: 273722 - DNA, 54 bp, Artificial
  Synthetic oligonucleotide
ccccaacagaacgacgacccagtgaaattactggacggctttcgaaatgcctgg

SEQ ID NO: 273723 - DNA, 55 bp, Artificial
  Synthetic oligonucleotide
ccccaactacatctgcctcgactcctcatagaatatttagcgtggacgatgatcc

SEQ ID NO: 273724 - DNA, 59 bp, Artificial
  Synthetic oligonucleotide
gccatgatgggccgcctctatgaccctgatttacgaagaggaggaaattcgtccacggc

SEQ ID NO: 273725 - DNA, 55 bp, Artificial
  Synthetic oligonucleotide
ccccaactttaggatcgctgtgagaaatgtactgaagccgtagaggataatgtcc

SEQ ID NO: 273726 - DNA, 55 bp, Artificial
  Synthetic oligonucleotide
ccccacagagatatttgtcgattgcaagagatcgctagtatggcaagattagtgc

SEQ ID NO: 273727 - DNA, 55 bp, Artificial
  Synthetic oligonucleotide
ccataccaatagctgggcgtcagactagaaagaaatctattagtcgttcgggtgc

SEQ ID NO: 273728 - DNA, 55 bp, Artificial
  Synthetic oligonucleotide
ccagtcttttgggcagtcaatggcatagtagcactgaaattggatggtggcaaaa

SEQ ID NO: 273729 - DNA, 55 bp, Artificial
  Synthetic oligonucleotide
ccccacagcataccaaggtcccgaacaggttatcatcgaccatggcatacccact

SEQ ID NO: 273730 - DNA, 55 bp, Artificial
  Synthetic oligonucleotide
ccccacagttttcgataattatgcagtcacggtgatgatcggagatgtaccatac

SEQ ID NO: 273731 - DNA, 55 bp, Artificial
  Synthetic oligonucleotide
ccccaccccatttgctttgattggcacagtgatctgccactagataggagctaca

SEQ ID NO: 273732 - DNA, 54 bp, Artificial
  Synthetic oligonucleotide
ccagtcgaccgaagacaccggtctaaaggtttgggcagatgggtctgaaagcgt

SEQ ID NO: 273733 - DNA, 55 bp, Artificial
  Synthetic oligonucleotide
ccagtagtcggcagtccgatgaccacgcaacctggtatacgctggctacatgccc

SEQ ID NO: 273734 - DNA, 55 bp, Artificial
  Synthetic oligonucleotide
gttctacagtctaaaagcagttgtagtggagaaaactaaacgtgctttccaagta

SEQ ID NO: 273735 - DNA, 59 bp, Artificial
  Synthetic oligonucleotide
gtttagcaagcacagtaacacttctacggagcccgccggcataaacagggcaaagagca

SEQ ID NO: 273736 - DNA, 55 bp, Artificial
  Synthetic oligonucleotide
cccaatcgcctataaaccaattcaacccacaggtgtgtccatcagtaccacctga

SEQ ID NO: 273737 - DNA, 55 bp, Artificial
  Synthetic oligonucleotide
cccaatgggatggctaccagatggtacacaacaaggttcactatgcttccgatgt

SEQ ID NO: 273738 - DNA, 55 bp, Artificial
  Synthetic oligonucleotide
gttgacgagtcgatactaatacttcgttcaggagaatatgatcttgtggagaatg

SEQ ID NO: 273739 - DNA, 55 bp, Artificial
  Synthetic oligonucleotide
cccacatgctattcgttacttggcaatctactttgctttaggtgtagggtccgca

SEQ ID NO: 273740 - DNA, 53 bp, Artificial
  Synthetic oligonucleotide
cccacgtacgggcgtacatacgtagaaccaatcttactcaactacggtacgaa

SEQ ID NO: 273741 - DNA, 55 bp, Artificial
  Synthetic oligonucleotide
cccaactgcttgtgtgttggaaatgacactggtcgcataagtgactatacgatac

SEQ ID NO: 273742 - DNA, 55 bp, Artificial
  Synthetic oligonucleotide
cccactagcaatgtttagagctgtcggtagaagaaacctggctacagttagtcga

SEQ ID NO: 273743 - DNA, 55 bp, Artificial
  Synthetic oligonucleotide
gttgacaatttgagttccaatagggcattcttcgatatcgaggatagatgcattg

SEQ ID NO: 273744 - DNA, 55 bp, Artificial
  Synthetic oligonucleotide
gttgcacagggtcttgttgaatgtacgtacgtcacgtcctttacggaccgagcac

SEQ ID NO: 273745 - DNA, 55 bp, Artificial
  Synthetic oligonucleotide
cccaaattatgaaatgcacgtatatgatcgtctttatagcggttctttcactcgc

SEQ ID NO: 273746 - DNA, 54 bp, Artificial
  Synthetic oligonucleotide
aagaacgttgatccgaaatcatttaaattagtccaaaataagtatctgggagta

SEQ ID NO: 273747 - DNA, 55 bp, Artificial
  Synthetic oligonucleotide
cccagaaggctggagaccaagagtcattgtaatctgcccagtgacggtctactgt

SEQ ID NO: 273748 - DNA, 55 bp, Artificial
  Synthetic oligonucleotide
cccaaatgttgagcggtctttgcacctgcgtaaggattggaagggtctacatcgg

SEQ ID NO: 273749 - DNA, 55 bp, Artificial
  Synthetic oligonucleotide
cccagactcggttcatccgtatggtacatatcgtaacccatcacggtggacttgc

SEQ ID NO: 273750 - DNA, 53 bp, Artificial
  Synthetic oligonucleotide
cccaaatgaggccaacttcccaaagagtccggttgacgagcaaccccgtagaa

SEQ ID NO: 273751 - DNA, 53 bp, Artificial
  Synthetic oligonucleotide
gttgaatcttaatggaaagtcccttaacggtttctattctccccgtactgata

SEQ ID NO: 273752 - DNA, 55 bp, Artificial
  Synthetic oligonucleotide
gttcttgtatccatcaggtttgctatgggccaaatatgttccttgctggggcatc

SEQ ID NO: 273753 - DNA, 55 bp, Artificial
  Synthetic oligonucleotide
cccaaagtagatggcacgctagcaaacgacatgtatcgttttacgctaatctccc

SEQ ID NO: 273754 - DNA, 55 bp, Artificial
  Synthetic oligonucleotide
cccaaacgcatacacacaactcatcgatacaagcctgttatagcctttaatgatc

SEQ ID NO: 273755 - DNA, 55 bp, Artificial
  Synthetic oligonucleotide
cccaaacatgtaccatcaacctcgtcttaccgtttgtcaacggtctaatgcttgg

SEQ ID NO: 273756 - DNA, 55 bp, Artificial
  Synthetic oligonucleotide
ccatttgctgtagcgtttgggtaccaatcttggccacacatctttccaacgtacg

SEQ ID NO: 273757 - DNA, 60 bp, Artificial
  Synthetic oligonucleotide
cgacatggcggctgaacggcctgctggcaaatggaagaaccgccttcggagcacgcaata

SEQ ID NO: 273758 - DNA, 55 bp, Artificial
  Synthetic oligonucleotide
ccattgccgcagactaatcatgtcttcgctgtgtgggtcactaaatggcgcttcc

SEQ ID NO: 273759 - DNA, 53 bp, Artificial
  Synthetic oligonucleotide
cccaggtcccaaattttcgtattctggggtgggatcctctaaccaatcgacac

SEQ ID NO: 273760 - DNA, 55 bp, Artificial
  Synthetic oligonucleotide
cccagtaacgttggcaaatgctatatccagtacactattatggtcgttaaagcgt

SEQ ID NO: 273761 - DNA, 55 bp, Artificial
  Synthetic oligonucleotide
cccagtacgcccaattactatctcaacataaccacaaccgctcacgtcgctacca

SEQ ID NO: 273762 - DNA, 55 bp, Artificial
  Synthetic oligonucleotide
cccagtgttaaaagtgttcatcatctgtggttgttgcataattccaccggtgttg

SEQ ID NO: 273763 - DNA, 55 bp, Artificial
  Synthetic oligonucleotide
ccattccaattcattcataccgatctcttcggtccaatacaggttacggccgttg

SEQ ID NO: 273764 - DNA, 55 bp, Artificial
  Synthetic oligonucleotide
cccataagttaccgtatctgacattctccgtaatggagattcctgtagttttaca

SEQ ID NO: 273765 - DNA, 55 bp, Artificial
  Synthetic oligonucleotide
ccattattaaaaggcttgtgtttccgagagactgtgacatactactgagtacgcc

SEQ ID NO: 273766 - DNA, 55 bp, Artificial
  Synthetic oligonucleotide
cccataatagtgatcaacgcgtgttcctttaagttgaatggaccagggttcaaag

SEQ ID NO: 273767 - DNA, 55 bp, Artificial
  Synthetic oligonucleotide
ccatgttactgtctcattgttagcaaagtagtacaagagaacgcaattgtaagcc

SEQ ID NO: 273768 - DNA, 59 bp, Artificial
  Synthetic oligonucleotide
tgacttcatgttgtacattgtttagttcacgagaagggtcctcttcaggcggtagctcc

SEQ ID NO: 273769 - DNA, 55 bp, Artificial
  Synthetic oligonucleotide
gttgtacaatggagtctatggatccctccttagaagtcgtttgaacagttcgact

SEQ ID NO: 273770 - DNA, 54 bp, Artificial
  Synthetic oligonucleotide
cccctagggccgggattaaagtcttggcgcgcagtccgattttatcgaagagtc

SEQ ID NO: 273771 - DNA, 55 bp, Artificial
  Synthetic oligonucleotide
cccctgaacgaagatggtcctaaaggggtagcttctgcagtgtcacaaggctccg

SEQ ID NO: 273772 - DNA, 55 bp, Artificial
  Synthetic oligonucleotide
cccctgtttatacaactacgtttcgctacgcagctacgacattcactgaagtgat

SEQ ID NO: 273773 - DNA, 55 bp, Artificial
  Synthetic oligonucleotide
gttgtagggccccatttctacgttgtgtatggcaaatcccaccgtcggcgacaca

SEQ ID NO: 273774 - DNA, 55 bp, Artificial
  Synthetic oligonucleotide
gttgtccgtcttgtcaccagctaatctggtacagtgtatacgcgattgttggccg

SEQ ID NO: 273775 - DNA, 55 bp, Artificial
  Synthetic oligonucleotide
gttgtcttgtaacaataccgcatgtagtatcatcacactgtaaccatccggcgta

SEQ ID NO: 273776 - DNA, 55 bp, Artificial
  Synthetic oligonucleotide
gttgtgatgttggagacaccgagaaatagcaacccagcggaacttaaagcttagc

SEQ ID NO: 273777 - DNA, 55 bp, Artificial
  Synthetic oligonucleotide
ccccttgagtcggagtcttgggccttctcgtcttgttctgccctcttcaatcgct

SEQ ID NO: 273778 - DNA, 55 bp, Artificial
  Synthetic oligonucleotide
ccagacaaagattggaatcctacgttgcttctattgaacaaaccgttactgaccc

SEQ ID NO: 273779 - DNA, 60 bp, Artificial
  Synthetic oligonucleotide
ggggtgcgtgggtgcggaacactaacagaggtagagccatcaatgcgagtgccaaatagc

SEQ ID NO: 273780 - DNA, 55 bp, Artificial
  Synthetic oligonucleotide
ccagaagacctttcttcacaatcttattacgaaactgaatcctcctacgaaactg

SEQ ID NO: 273781 - DNA, 55 bp, Artificial
  Synthetic oligonucleotide
gttccgggtagtaggccaagcgtagtcctagaagtcgagatatctagttgcgaaa

SEQ ID NO: 273782 - DNA, 55 bp, Artificial
  Synthetic oligonucleotide
ccacttgacacaatcagaagcgacacagcaatctatcacataacaaacttgtccc

SEQ ID NO: 273783 - DNA, 55 bp, Artificial
  Synthetic oligonucleotide
cccgagagcttcgaagtcttaccatgtcatcgaactcccactataatttatggct

SEQ ID NO: 273784 - DNA, 55 bp, Artificial
  Synthetic oligonucleotide
ccactgtccctattacggttgggtaattggttgtcagaatgctgtgcagaatctg

SEQ ID NO: 273785 - DNA, 55 bp, Artificial
  Synthetic oligonucleotide
ccactgcgtgatcagttacatccagctgagttggtcctagcacagattctacgat

SEQ ID NO: 273786 - DNA, 55 bp, Artificial
  Synthetic oligonucleotide
gttccccgtcatctacgtcgcctaaggaagaagcgtcgtcatcaaaagaagaccg

SEQ ID NO: 273787 - DNA, 55 bp, Artificial
  Synthetic oligonucleotide
ccactgcgccaattgtcttgcctggatacttccgacgaatgattatctgaatcca

SEQ ID NO: 273788 - DNA, 55 bp, Artificial
  Synthetic oligonucleotide
gttgttagacgatggtccagttactccaggtgagactagacctacttacgacgga

SEQ ID NO: 273789 - DNA, 55 bp, Artificial
  Synthetic oligonucleotide
ccactcgtggttgagttctcttagcctcacgatcagccttatgatccgtcacagg

SEQ ID NO: 273790 - DNA, 60 bp, Artificial
  Synthetic oligonucleotide
agcagcgtctgtgtctgtctggggtcttgctgttgacaatgcggaagccgtctggggtgg

SEQ ID NO: 273791 - DNA, 55 bp, Artificial
  Synthetic oligonucleotide
cccgcccgtcaaggagagtactcggcgcaggttcgtcagagattcgattcgctgc

SEQ ID NO: 273792 - DNA, 55 bp, Artificial
  Synthetic oligonucleotide
ccactattggaggttgattttcaccaagtagattatacaactctctctgcatccc

SEQ ID NO: 273793 - DNA, 55 bp, Artificial
  Synthetic oligonucleotide
cccgcctcggtaaggatggtagtatgccgccgagtcaccataccgaccaccatgg

SEQ ID NO: 273794 - DNA, 55 bp, Artificial
  Synthetic oligonucleotide
gttcccacggttacttcttaggcactgttagcaagttcgccgtcaagtgatcggg

SEQ ID NO: 273795 - DNA, 55 bp, Artificial
  Synthetic oligonucleotide
gttccattgaactgggccaagaatacatcccatgggaaccaaatatggctagctt

SEQ ID NO: 273796 - DNA, 55 bp, Artificial
  Synthetic oligonucleotide
gttccacttatctagttacccaattcccatccaattcccgtccaatccttgtcca

SEQ ID NO: 273797 - DNA, 55 bp, Artificial
  Synthetic oligonucleotide
cccgctaggggatgcaatttgttcacatcaagggcaccaggtgtttgaatgacgt

SEQ ID NO: 273798 - DNA, 54 bp, Artificial
  Synthetic oligonucleotide
gttccaaaatgtccacaactgattcggggttcgtactttaccactatacgccaa

SEQ ID NO: 273799 - DNA, 55 bp, Artificial
  Synthetic oligonucleotide
ccactattcaaagggctgttgactccactggcggtaggcgtggctgcgttagcta

SEQ ID NO: 273800 - DNA, 55 bp, Artificial
  Synthetic oligonucleotide
ccactatgttaagagctgttcccaaacaatctcgttgtttagtacaggagagacc

SEQ ID NO: 273801 - DNA, 60 bp, Artificial
  Synthetic oligonucleotide
aactgtctcaaccatatatccagcgaaattggattagcagtgaagatactgctaaacttc

SEQ ID NO: 273802 - DNA, 55 bp, Artificial
  Synthetic oligonucleotide
ccagtacgctatctagtaacgccaagtagggaccaatagattcgtatttcctgtg

SEQ ID NO: 273803 - DNA, 55 bp, Artificial
  Synthetic oligonucleotide
gttgcgtgacatcgcaagtacatagtggaactgtctcggtggtgggaagcaaacc

SEQ ID NO: 273804 - DNA, 55 bp, Artificial
  Synthetic oligonucleotide
ccagtaataccctcgattgtatcggcaattggtagtacggaaattctagtggcgt

SEQ ID NO: 273805 - DNA, 55 bp, Artificial
  Synthetic oligonucleotide
ccagtaataacgtcctttagattgggctcgctaggatccaattcggctatcaatc

SEQ ID NO: 273806 - DNA, 53 bp, Artificial
  Synthetic oligonucleotide
ccaggttcttggtgttcactggggtacttttgttcttagtggtgaatacttcc

SEQ ID NO: 273807 - DNA, 55 bp, Artificial
  Synthetic oligonucleotide
gttgctgtccgtcttatctttagtgtgcgtgcattctgactcatcgacaatcggg

SEQ ID NO: 273808 - DNA, 55 bp, Artificial
  Synthetic oligonucleotide
ccccacggttagctttcccaatccggaggagcggggagcactagatatggcgatg

SEQ ID NO: 273809 - DNA, 55 bp, Artificial
  Synthetic oligonucleotide
ccccagagtggcttgcgaaagtgcgtcgtagtgtatatttgctattgcagcttcc

SEQ ID NO: 273810 - DNA, 55 bp, Artificial
  Synthetic oligonucleotide
ccccagcagttacaagtaatctgcggttgccacagaggttcacaaagctaacctg

SEQ ID NO: 273811 - DNA, 55 bp, Artificial
  Synthetic oligonucleotide
gttgcttaaatctgtcacgtaatgcggatcaggtttagaagaatcgggtctaccg

SEQ ID NO: 273812 - DNA, 60 bp, Artificial
  Synthetic oligonucleotide
acaaattcaccttgaccattaactacatcattagcattaatgtcattagcattaacatta

SEQ ID NO: 273813 - DNA, 58 bp, Artificial
  Synthetic oligonucleotide
tccactacacgatatgttaagtttgatcgatgtcttgttaacaaacgctaaactcaag

SEQ ID NO: 273814 - DNA, 55 bp, Artificial
  Synthetic oligonucleotide
gttggctggttgttcctgtcgaaggtagtttcctttgcccgtagctctaaccatg

SEQ ID NO: 273815 - DNA, 55 bp, Artificial
  Synthetic oligonucleotide
ccaggcccatttgtccttggattaagaccctcggctaagttcacggcgcacagac

SEQ ID NO: 273816 - DNA, 55 bp, Artificial
  Synthetic oligonucleotide
ccccagctacttctggttccgtcccagctacttctgagactaccctagctacttc

SEQ ID NO: 273817 - DNA, 55 bp, Artificial
  Synthetic oligonucleotide
ccccaggcggcaatgtgtgcattaatcgagtaacgtgactccgtacaaactcgcg

SEQ ID NO: 273818 - DNA, 55 bp, Artificial
  Synthetic oligonucleotide
ccccaggtgccgttctcgcacatgccggctagtccatacgaaatacagcacttca

SEQ ID NO: 273819 - DNA, 55 bp, Artificial
  Synthetic oligonucleotide
ccccagtcagttcggtccaggaatcctctagattagcaatggttggcgaaccggc

SEQ ID NO: 273820 - DNA, 55 bp, Artificial
  Synthetic oligonucleotide
ccaggcacactagcttaaaagactcactcattccggcttttgcagtccgctctac

SEQ ID NO: 273821 - DNA, 52 bp, Artificial
  Synthetic oligonucleotide
ccaggaacagggtagaacgttttgttagtatacggataggagacgttttgag

SEQ ID NO: 273822 - DNA, 55 bp, Artificial
  Synthetic oligonucleotide
ccagctatcatggcgacatgcccaggcctagattcggtcggcattctagtatgtg

SEQ ID NO: 273823 - DNA, 55 bp, Artificial
  Synthetic oligonucleotide
gttcggagttctcttgaacggtgagacagtttctcacggcgtgtatttaacgaca

SEQ ID NO: 273824 - DNA, 55 bp, Artificial
  Synthetic oligonucleotide
tcttgaggcaatgtcgacgttcgtaccctcttcctacgggtcacgggttcgtctg

SEQ ID NO: 273825 - DNA, 55 bp, Artificial
  Synthetic oligonucleotide
gttcgactcacgttcgttacttgcactattttgctcttcagccgtcttcagtggt

SEQ ID NO: 273826 - DNA, 55 bp, Artificial
  Synthetic oligonucleotide
gttcctctgtggtcgattgtgtttatagattgggagctcttttcgtgtttcgcac

SEQ ID NO: 273827 - DNA, 55 bp, Artificial
  Synthetic oligonucleotide
gttcctcgcgaggctgttttgaatccaagatcatcatttgcactcttgcgtagtc

SEQ ID NO: 273828 - DNA, 55 bp, Artificial
  Synthetic oligonucleotide
ccagcgctccagtttccgagacttacttttctgtagtgtcttctgctccaagtcc

SEQ ID NO: 273829 - DNA, 55 bp, Artificial
  Synthetic oligonucleotide
ccccggagactggtctcgaggacgcaacttgagatccccacagctcatatttaga

SEQ ID NO: 273830 - DNA, 55 bp, Artificial
  Synthetic oligonucleotide
gttggtgatgacgcacaagagccagagtattttgactcgagcaaagtcaactggg

SEQ ID NO: 273831 - DNA, 55 bp, Artificial
  Synthetic oligonucleotide
gttccgtttgtgatgtcgactgcgttaatctggtatgctgtgtctgattcgtatc

SEQ ID NO: 273832 - DNA, 55 bp, Artificial
  Synthetic oligonucleotide
gttgtaacctgatcaagtagatttattaccctcatatgcggaatagagagcttgc

SEQ ID NO: 273833 - DNA, 55 bp, Artificial
  Synthetic oligonucleotide
gttccgtgtcggtggagggtcaactaattgtattatctagtacgttaccaagcac

SEQ ID NO: 273834 - DNA, 55 bp, Artificial
  Synthetic oligonucleotide
ccagcatgcgctgttacggggacaatcatctcaggttcggtgataccacggtgct

SEQ ID NO: 273835 - DNA, 54 bp, Artificial
  Synthetic oligonucleotide
attgacggggaaaaagtatatgtatcgtggctttcgggttttagtctcgcacac

SEQ ID NO: 273836 - DNA, 55 bp, Artificial
  Synthetic oligonucleotide
cccctacaaaacgcccagtaatattggataggatccaacatatatccgtaaatag

SEQ ID NO: 273837 - DNA, 55 bp, Artificial
  Synthetic oligonucleotide
ccgtagggatcatcaatcgttacaaggaatgtgcagaaggcaattattcggtgtt

SEQ ID NO: 273838 - DNA, 55 bp, Artificial
  Synthetic oligonucleotide
cagtactcatccatcttcatgctacgtgcatccatcgttccttcttagttcggta

SEQ ID NO: 273839 - DNA, 55 bp, Artificial
  Synthetic oligonucleotide
cagtacgtgaccgggaagatatctaatggcctgaagaacctctcatctaacggta

SEQ ID NO: 273840 - DNA, 55 bp, Artificial
  Synthetic oligonucleotide
cagtaacatatagagtaatgtctttgaacacgtcaacaactccgcgagagcccaa

SEQ ID NO: 273841 - DNA, 55 bp, Artificial
  Synthetic oligonucleotide
gtggattcacgcggaaatacaacagtatgacacatccagtcgcaatttacagaac

SEQ ID NO: 273842 - DNA, 55 bp, Artificial
  Synthetic oligonucleotide
ccgtcaactgtctagacatgtaatttattcgtctgaacagggagtcttgggacct

SEQ ID NO: 273843 - DNA, 55 bp, Artificial
  Synthetic oligonucleotide
caggtggatagcggggatgacccacttaccacaactgcacctagatcctttccag

SEQ ID NO: 273844 - DNA, 55 bp, Artificial
  Synthetic oligonucleotide
ccgtcaatgctctcctctccaagctttcgtgctagtgcaaccgtggagatgcctt

SEQ ID NO: 273845 - DNA, 55 bp, Artificial
  Synthetic oligonucleotide
gtggatggggagcggagacctagatgtataggacgagcgaactttgaagagtcta

SEQ ID NO: 273846 - DNA, 53 bp, Artificial
  Synthetic oligonucleotide
aactgaaagcgttccaaagggaccaaagagaccgaatactacgcaaaatggat

SEQ ID NO: 273847 - DNA, 54 bp, Artificial
  Synthetic oligonucleotide
caggtcgatgagcttaaccttttcgggacctccttgtaactcgcgaaagacctg

SEQ ID NO: 273848 - DNA, 55 bp, Artificial
  Synthetic oligonucleotide
ccgtccaccaagtaccatgtttctcggcgtagaatggaaatttcgaagcgccatc

SEQ ID NO: 273849 - DNA, 55 bp, Artificial
  Synthetic oligonucleotide
caggtaccttatttgccctcattgctgtacaagattaatgtaagtgggcgtcttg

SEQ ID NO: 273850 - DNA, 55 bp, Artificial
  Synthetic oligonucleotide
ccgtcccagaaggtactatcatttccaacgttgaagaaagaccaggtgacagagg

SEQ ID NO: 273851 - DNA, 55 bp, Artificial
  Synthetic oligonucleotide
cagggttgacagcccgggtaacgcacggcggagtcccgtaagagtgaggccatta

SEQ ID NO: 273852 - DNA, 55 bp, Artificial
  Synthetic oligonucleotide
ccgtccccgagaacaactctcgcctttctgtctcgaaaatcttagccctcgcacc

SEQ ID NO: 273853 - DNA, 55 bp, Artificial
  Synthetic oligonucleotide
taatgcaagtccgaaagagattaacagaccttgtgtaagataaatctgccacaac

SEQ ID NO: 273854 - DNA, 55 bp, Artificial
  Synthetic oligonucleotide
cagggtacttaaggctgaccggagattgcaaacgatacagtcagaccctcagcga

SEQ ID NO: 273855 - DNA, 53 bp, Artificial
  Synthetic oligonucleotide
caggggagtttctacgaggcaaagtatccaacagaccttttggtatcgggttg

SEQ ID NO: 273856 - DNA, 55 bp, Artificial
  Synthetic oligonucleotide
cagggatgttaagaccatctcggagaagaataagaacgaacaggagacatgcatc

SEQ ID NO: 273857 - DNA, 60 bp, Artificial
  Synthetic oligonucleotide
ttctcgtatacaaaatgcagtttgtttcgtatacagcaaagcatagaatacactgtacac

SEQ ID NO: 273858 - DNA, 55 bp, Artificial
  Synthetic oligonucleotide
cagggatgaataataggcggaatcaatagcaatggaggcgcttagaactaggacg

SEQ ID NO: 273859 - DNA, 55 bp, Artificial
  Synthetic oligonucleotide
gtggagcatcatatggatgatgaggtagtttatgatctagaccatcgtgtggagc

SEQ ID NO: 273860 - DNA, 52 bp, Artificial
  Synthetic oligonucleotide
ccgtgagcgttgccgggtccagtggttggtgttttacgttcttcggctactt

SEQ ID NO: 273861 - DNA, 55 bp, Artificial
  Synthetic oligonucleotide
gtggagacaatggtctcaagttggcgcatacatcagtttgccacagcgacagaag

SEQ ID NO: 273862 - DNA, 55 bp, Artificial
  Synthetic oligonucleotide
caggcgggcctctcaaacctgcatgcctacctaagcgggtggcctctttaccaca

SEQ ID NO: 273863 - DNA, 55 bp, Artificial
  Synthetic oligonucleotide
tacaacacctacaattctttcaagacgtttgcaacactgcgacaaaagtgtgacc

SEQ ID NO: 273864 - DNA, 55 bp, Artificial
  Synthetic oligonucleotide
tacaatgcgaagaggacgcgagacttgtatgctatgacgcagtaagcgacgtgtc

SEQ ID NO: 273865 - DNA, 55 bp, Artificial
  Synthetic oligonucleotide
tacacaacccaccaaaggtcaaagatggatcaatccaagccgatatgtatggatc

SEQ ID NO: 273866 - DNA, 54 bp, Artificial
  Synthetic oligonucleotide
ccgtgcccttggaagatcgtcggtagaccaggatacaagaactccgggaggccg

SEQ ID NO: 273867 - DNA, 55 bp, Artificial
  Synthetic oligonucleotide
ccgtgcttatcactatactgcaggtaccctgaagtggcaaaacgttagctacctg

SEQ ID NO: 273868 - DNA, 52 bp, Artificial
  Synthetic oligonucleotide
ggggtccctcactccttatggggtcccggttggaccgagactcctcccttgc

SEQ ID NO: 273869 - DNA, 55 bp, Artificial
  Synthetic oligonucleotide
caggagcttatcattcccctggcgaagtatacatgtttgtctctatactccagcg

SEQ ID NO: 273870 - DNA, 55 bp, Artificial
  Synthetic oligonucleotide
cataacgacacaaccgagtctcgatacgttcagtatactagtcattgcctcttgg

SEQ ID NO: 273871 - DNA, 55 bp, Artificial
  Synthetic oligonucleotide
ccggggttcttaacaaacctagctgttgtggatcccttatatgaactattgttgc

SEQ ID NO: 273872 - DNA, 55 bp, Artificial
  Synthetic oligonucleotide
cagttgtgcaaagggtagcacagatggtcaaacaggagaccttctagaagaccca

SEQ ID NO: 273873 - DNA, 55 bp, Artificial
  Synthetic oligonucleotide
cagttctgaactccaggactagtgtacttgcagccgctaacccaatttatggtag

SEQ ID NO: 273874 - DNA, 55 bp, Artificial
  Synthetic oligonucleotide
ccgggtgcgtctatgtatgataaatcgtagctgagacctgcacagccacggtgtt

SEQ ID NO: 273875 - DNA, 51 bp, Artificial
  Synthetic oligonucleotide
ccggtaataaaggggcgggactgtgtagttttacgtaacatagtaaacatc

SEQ ID NO: 273876 - DNA, 55 bp, Artificial
  Synthetic oligonucleotide
taagtacgaagacatcaagtgccgccccaaatgggacttggggccatgcttgata

SEQ ID NO: 273877 - DNA, 55 bp, Artificial
  Synthetic oligonucleotide
cagttcgagattaattccgatggggaggaataatgaaatgtcaaaggcttcgcta

SEQ ID NO: 273878 - DNA, 55 bp, Artificial
  Synthetic oligonucleotide
cagttcctactagacaacattccttgagacaattatgatagccatcatggtcggt

SEQ ID NO: 273879 - DNA, 58 bp, Artificial
  Synthetic oligonucleotide
gtaatagtaggattacctactgaaaaaccacctcataatcattgtacaatatcttgtc

SEQ ID NO: 273880 - DNA, 55 bp, Artificial
  Synthetic oligonucleotide
ccggtacttccttaatatttctggtagcgccatccttatcgtggatacggagtat

SEQ ID NO: 273881 - DNA, 55 bp, Artificial
  Synthetic oligonucleotide
ccggtatgtgctggtttaacacggttgcatctggattatgagtcgttggctccca

SEQ ID NO: 273882 - DNA, 55 bp, Artificial
  Synthetic oligonucleotide
ccggtgacatgctctgctcattcggggtaccaattacagcagatcggagtaacgc

SEQ ID NO: 273883 - DNA, 55 bp, Artificial
  Synthetic oligonucleotide
ccggtggctctgagtcatccaactcatctaacacgtcttgttcgtatatatcccc

SEQ ID NO: 273884 - DNA, 55 bp, Artificial
  Synthetic oligonucleotide
cagtgtagtatgggcattaatctatctaaaagtggcatgccaaatcagagttggc

SEQ ID NO: 273885 - DNA, 55 bp, Artificial
  Synthetic oligonucleotide
cagtgggctaaccaggcaaagcctatcccacctttcttgctagatctcgacgctg

SEQ ID NO: 273886 - DNA, 55 bp, Artificial
  Synthetic oligonucleotide
cagtggcagggacgatgaggagtcctggaagcgagcagctgaggtcactcgaaag

SEQ ID NO: 273887 - DNA, 55 bp, Artificial
  Synthetic oligonucleotide
taagtagtagtggtaacaagcttccatgctttacgttccctgatccaataacccc

SEQ ID NO: 273888 - DNA, 55 bp, Artificial
  Synthetic oligonucleotide
cagtggacgcctggtgtattttattacgatcgcttttgagccgctttatgctcat

SEQ ID NO: 273889 - DNA, 55 bp, Artificial
  Synthetic oligonucleotide
ccgtaagctgtgttgccgaccgcgctaggaaagacttgatgtacgtcgcgtcctc

SEQ ID NO: 273890 - DNA, 55 bp, Artificial
  Synthetic oligonucleotide
tcatcgtttactactagaactacacgggtatcgaatccgttttgatactctagtt

SEQ ID NO: 273891 - DNA, 55 bp, Artificial
  Synthetic oligonucleotide
ccgtacggtggtcccagttagcttgattatcacatcttgaggggtgaaacctgcg

SEQ ID NO: 273892 - DNA, 55 bp, Artificial
  Synthetic oligonucleotide
cagtgacaagcaatgatgtgtactgcgaaaattctgaatacgaggttcagctgac

SEQ ID NO: 273893 - DNA, 54 bp, Artificial
  Synthetic oligonucleotide
taagtgggcgtttctcttcaactcaactacttatacggatgggttaccctgggc

SEQ ID NO: 273894 - DNA, 55 bp, Artificial
  Synthetic oligonucleotide
cagtcacggcaactacgtgactgtgcacccatacctcctgtgactatttccgatg

SEQ ID NO: 273895 - DNA, 55 bp, Artificial
  Synthetic oligonucleotide
taagttcgagagtgcgtaaagagcctttactctgacattaaaatgctgatggttc

SEQ ID NO: 273896 - DNA, 55 bp, Artificial
  Synthetic oligonucleotide
taatcaaatgcgcatagccgcccggcgttaatcacatatggcccaattgggtgct

SEQ ID NO: 273897 - DNA, 55 bp, Artificial
  Synthetic oligonucleotide
cagtataatagtacctccagagaactagacgaccttcgaaaaggggtgccgcaac

SEQ ID NO: 273898 - DNA, 55 bp, Artificial
  Synthetic oligonucleotide
gtggcacctatagcagcgtgcaaaacatctgctagcggcgataatagcttctcaa

SEQ ID NO: 273899 - DNA, 55 bp, Artificial
  Synthetic oligonucleotide
cagtagaatcatctgatgggttttgaataccagaccaaccgccaaatgatagcca

SEQ ID NO: 273900 - DNA, 50 bp, Artificial
  Synthetic oligonucleotide
ccgtagcttttacgtaacgtttctgtaagggatcttcggggactctaaag

SEQ ID NO: 273901 - DNA, 60 bp, Artificial
  Synthetic oligonucleotide
ggcagcgagtctcgcaagggctctcatcccatcacatgaccgtaaaccgtctgtgattgg

SEQ ID NO: 273902 - DNA, 55 bp, Artificial
  Synthetic oligonucleotide
cagagacgataagctttacaagacgtgtccaggttcatttcattaatcgatcttt

SEQ ID NO: 273903 - DNA, 55 bp, Artificial
  Synthetic oligonucleotide
cagactgtgtatgttgagtacaactcgaagaggtatattccctctgtgggtgacc

SEQ ID NO: 273904 - DNA, 55 bp, Artificial
  Synthetic oligonucleotide
cctatgctgctaggcctcgcacgttcatgaggacaactcgaagacaaatgattct

SEQ ID NO: 273905 - DNA, 55 bp, Artificial
  Synthetic oligonucleotide
cctatggggaacaagtacggctaataggacagtctgcaccagcttagataacaga

SEQ ID NO: 273906 - DNA, 55 bp, Artificial
  Synthetic oligonucleotide
cctatgtgtacgcattcccataagactacacgcacttttcttcaatagtggacgt

SEQ ID NO: 273907 - DNA, 54 bp, Artificial
  Synthetic oligonucleotide
cagacggcaccaaaattttgttagactgttacccgggtgtttcgagtggcaaca

SEQ ID NO: 273908 - DNA, 55 bp, Artificial
  Synthetic oligonucleotide
taccatacatagggtgcgatttatatcagggtcatgaacgttataagcccttgcc

SEQ ID NO: 273909 - DNA, 55 bp, Artificial
  Synthetic oligonucleotide
cctcaagtaccacatcttcggtggatcaactaatacctccatggaataccgatcc

SEQ ID NO: 273910 - DNA, 55 bp, Artificial
  Synthetic oligonucleotide
cctcagtcaataacacgattgatatcacagcgccgtacgctagaaattcctctgc

SEQ ID NO: 273911 - DNA, 55 bp, Artificial
  Synthetic oligonucleotide
cctcatggtatgtgacgttcatactcattcttaatgtgtttaactccaatagggc

SEQ ID NO: 273912 - DNA, 59 bp, Artificial
  Synthetic oligonucleotide
gtgtacgtacctactatccgtgcggcgcaggtgatctctcgagtatcggccctccctcc

SEQ ID NO: 273913 - DNA, 55 bp, Artificial
  Synthetic oligonucleotide
cagacactaatggctcccacaatgctacaatctctgagtgcatatgaagtcattg

SEQ ID NO: 273914 - DNA, 55 bp, Artificial
  Synthetic oligonucleotide
cctccaaaaggatgagcacgaagagaaccatactgaggagagtgattccgagacg

SEQ ID NO: 273915 - DNA, 55 bp, Artificial
  Synthetic oligonucleotide
cagaatgacgagcttatataacgccatgtgggagcatttgaagagtaggaggttg

SEQ ID NO: 273916 - DNA, 55 bp, Artificial
  Synthetic oligonucleotide
taccctacatctgatcggtatcttaatcctagtggtttacagaccgtttgtgtac

SEQ ID NO: 273917 - DNA, 55 bp, Artificial
  Synthetic oligonucleotide
cagaacagaaatgcaacgcgagagcgctattttaccaacaaagaatctatacttc

SEQ ID NO: 273918 - DNA, 55 bp, Artificial
  Synthetic oligonucleotide
cagaaataacggattcgaccgtgtgctcttaaaggattatgggaattcgacggta

SEQ ID NO: 273919 - DNA, 55 bp, Artificial
  Synthetic oligonucleotide
cactttgagctcatccaacacgccaatgttcaaaagttgtagtattggtaccacg

SEQ ID NO: 273920 - DNA, 55 bp, Artificial
  Synthetic oligonucleotide
cctccactgctcgacgaatgtgaatgccacgaaatacttgagatgggttgcggtg

SEQ ID NO: 273921 - DNA, 55 bp, Artificial
  Synthetic oligonucleotide
tacctatcaccgacgcccatttggtataggcttgttctcagttggggtccgaggt

SEQ ID NO: 273922 - DNA, 55 bp, Artificial
  Synthetic oligonucleotide
gtgctcggaggacaagcctgtatgccgggactgtcgtcgcttgagtttcccctgc

SEQ ID NO: 273923 - DNA, 51 bp, Artificial
  Synthetic oligonucleotide
ggacgtccgaccctttatgagggtcgacgcgggttgttataatttcccgcg

SEQ ID NO: 273924 - DNA, 53 bp, Artificial
  Synthetic oligonucleotide
cgtatcatttaggtgtgtagggttcaccccccaatacctatcggtatttgttg

SEQ ID NO: 273925 - DNA, 55 bp, Artificial
  Synthetic oligonucleotide
tacctcccatcatcactgtcttacgccttgtttaactttaaggtcacgtgccgtc

SEQ ID NO: 273926 - DNA, 55 bp, Artificial
  Synthetic oligonucleotide
cctcccagcggttcctgaacagttgtcgcaccaagtatattcgtcgcatacagga

SEQ ID NO: 273927 - DNA, 55 bp, Artificial
  Synthetic oligonucleotide
cactgttgaaatgcggctctgatactttagcccttagtacctgacggtgcctaaa

SEQ ID NO: 273928 - DNA, 55 bp, Artificial
  Synthetic oligonucleotide
cactgccgacgcagaaaacgacgtagaaactcacacttcgttcttccgcttatgg

SEQ ID NO: 273929 - DNA, 55 bp, Artificial
  Synthetic oligonucleotide
cactgattataaccactgatctgagactaaatactcctagatacgtcggtttgcc

SEQ ID NO: 273930 - DNA, 55 bp, Artificial
  Synthetic oligonucleotide
cctccccgcgggacagtttcatgcaggagaaactcgaagtgtcaaaatgataacg

SEQ ID NO: 273931 - DNA, 55 bp, Artificial
  Synthetic oligonucleotide
cctcgagagttgactggcctaatataattggatgtgtcgaaacgactcttgaaag

SEQ ID NO: 273932 - DNA, 55 bp, Artificial
  Synthetic oligonucleotide
cactgatcgcattcaaagagtcgaatatctccactataccgaccaacggtaacag

SEQ ID NO: 273933 - DNA, 55 bp, Artificial
  Synthetic oligonucleotide
cactgactacgtatttgggaggcctacttgcagcactagtcactcttggcgtcta

SEQ ID NO: 273934 - DNA, 55 bp, Artificial
  Synthetic oligonucleotide
cactccggggtcctgctcacgcactacggactagaccagcccagcttctacacag

SEQ ID NO: 273935 - DNA, 59 bp, Artificial
  Synthetic oligonucleotide
tcatcccaatgctgctcgtaccccttatagcaaccctcgtttccccaatcctcgtgcac

SEQ ID NO: 273936 - DNA, 55 bp, Artificial
  Synthetic oligonucleotide
tacactacccctatggtgactaagtcgtcgggatcctggataggtgcactttcac

SEQ ID NO: 273937 - DNA, 55 bp, Artificial
  Synthetic oligonucleotide
tacactgtattgctgcgaaccaatagaaagcatccgtacacagccgtctgtgtgc

SEQ ID NO: 273938 - DNA, 55 bp, Artificial
  Synthetic oligonucleotide
ccgtgggcactatagtcaccggagtgtgaatggtgtgagtgcatgacctcgagga

SEQ ID NO: 273939 - DNA, 55 bp, Artificial
  Synthetic oligonucleotide
tacagctgcaaggtcgactgagagccatacaaatgagaattcgtccttctcagaa

SEQ ID NO: 273940 - DNA, 55 bp, Artificial
  Synthetic oligonucleotide
tacaggcggtgcccagtgcgataatatcgggtggtatcgagttcgcagtagcgta

SEQ ID NO: 273941 - DNA, 55 bp, Artificial
  Synthetic oligonucleotide
gtggaatctttaccacaagtaaccgcatgtagggtatgtgtgacgtagcgatgag

SEQ ID NO: 273942 - DNA, 55 bp, Artificial
  Synthetic oligonucleotide
gtggaaagcagagaggcaattgcgtgattaattcggaatattagcaacgcttctc

SEQ ID NO: 273943 - DNA, 55 bp, Artificial
  Synthetic oligonucleotide
cagcgcctctaaattatccttcttcgcaattactattccagatccggtcacgtgg

SEQ ID NO: 273944 - DNA, 55 bp, Artificial
  Synthetic oligonucleotide
cagccgaagaccacgtattcgttaactagatggaagtgggttctgtaccgttctg

SEQ ID NO: 273945 - DNA, 55 bp, Artificial
  Synthetic oligonucleotide
gtgcttgtcgacgttgtaactatcatcatgagagctagtaccctcatacggttga

SEQ ID NO: 273946 - DNA, 52 bp, Artificial
  Synthetic oligonucleotide
attcaccaaacttctcaaaaactaattattcgtagttacaaactctatttta

SEQ ID NO: 273947 - DNA, 55 bp, Artificial
  Synthetic oligonucleotide
cagcccgggtaacgcacggcggagtcccgtaagagtgaggccattaggtggacag

SEQ ID NO: 273948 - DNA, 55 bp, Artificial
  Synthetic oligonucleotide
cagcatcggtaatcagcgtacatacatgttcaacgaactcattgctagctttacc

SEQ ID NO: 273949 - DNA, 55 bp, Artificial
  Synthetic oligonucleotide
cagcaagttgttcattctgcgagcgatttccctgtgagtaccgataacgagcgga

SEQ ID NO: 273950 - DNA, 55 bp, Artificial
  Synthetic oligonucleotide
cagattggacccgtgtatatagtccgattgcaacattcagtgttggcttagcgac

SEQ ID NO: 273951 - DNA, 55 bp, Artificial
  Synthetic oligonucleotide
cagattgctactacgcttgacaatgtcggatccaataccgatctgattcatatcg

SEQ ID NO: 273952 - DNA, 54 bp, Artificial
  Synthetic oligonucleotide
cctaagttactcggtcggtctcctatacgactaaatcggtcttttgcacgcagt

SEQ ID NO: 273953 - DNA, 55 bp, Artificial
  Synthetic oligonucleotide
cagatccaacgtggggaaggtctaggcctctacttgcgacatctgtacagaacat

SEQ ID NO: 273954 - DNA, 55 bp, Artificial
  Synthetic oligonucleotide
tacatcgttctgtgacgccgcgaaccaaagtcacgaactaaaagtgggtctggag

SEQ ID NO: 273955 - DNA, 55 bp, Artificial
  Synthetic oligonucleotide
gtgctgagttggcttacccctgagggtaataaagagtcggggagtggtcttggtg

SEQ ID NO: 273956 - DNA, 55 bp, Artificial
  Synthetic oligonucleotide
cctaataatatgtcacacaatgattcaatctgcgcgatgggccattgacccgaag

SEQ ID NO: 273957 - DNA, 60 bp, Artificial
  Synthetic oligonucleotide
gaagaggaggctctgagaaggatcctgaggatcaaagtgaaactgagtccagtggataga

SEQ ID NO: 273958 - DNA, 55 bp, Artificial
  Synthetic oligonucleotide
cagagttaattcggtattgagtcacacatgcttcacatgacttgttgtgcgtgtg

SEQ ID NO: 273959 - DNA, 55 bp, Artificial
  Synthetic oligonucleotide
cagagtgtaatgtgcccatcattgtaaaccaactcatcggcttacaggcaccgat

SEQ ID NO: 273960 - DNA, 55 bp, Artificial
  Synthetic oligonucleotide
cctaattaactactttctaccggtgcgttcttaaagctgagtaggcacttcagcc

SEQ ID NO: 273961 - DNA, 55 bp, Artificial
  Synthetic oligonucleotide
cctacttgcgtatgtccgatcggccgtaactagtccccaatattagcactttccg

SEQ ID NO: 273962 - DNA, 55 bp, Artificial
  Synthetic oligonucleotide
cctagactgttatacacaatcgtcacagggcaaaatccaaccggtatgacacaat

SEQ ID NO: 273963 - DNA, 55 bp, Artificial
  Synthetic oligonucleotide
cctagttctaggagaacgtcgctggggaaaggtcttagtgagagcaatggtcttt

SEQ ID NO: 273964 - DNA, 55 bp, Artificial
  Synthetic oligonucleotide
taccaagtgtcctgggctcaactttctaccgttcgaatagaaagctgccgtttgt

SEQ ID NO: 273965 - DNA, 55 bp, Artificial
  Synthetic oligonucleotide
cagagctccgttccttgcacatacgcatgtgtctagacattacacaccaaggacg

SEQ ID NO: 273966 - DNA, 54 bp, Artificial
  Synthetic oligonucleotide
cctatagaaactggtaccacaaccacaatatccaagatgtactttgggaaaccc

SEQ ID NO: 273967 - DNA, 55 bp, Artificial
  Synthetic oligonucleotide
ccgcggagccataaacaatcatcttttaaattagatgcacagccttaaaccaagc

SEQ ID NO: 273968 - DNA, 56 bp, Artificial
  Synthetic oligonucleotide
tagcgcgaataccaggaagggcgctaaatttgttacgactcacaggcgacaacggt

SEQ ID NO: 273969 - DNA, 55 bp, Artificial
  Synthetic oligonucleotide
gtgtaaacttattttgctcttggggctcgatgagtctcactcgctaataatgcga

SEQ ID NO: 273970 - DNA, 55 bp, Artificial
  Synthetic oligonucleotide
ccggagttctacgtgatgtgtttggacaacctattaaccagccagacgtctctaa

SEQ ID NO: 273971 - DNA, 55 bp, Artificial
  Synthetic oligonucleotide
gtggtaccggtcacataaattgacgggaatatgcgtctttaggcggcttttggcg

SEQ ID NO: 273972 - DNA, 55 bp, Artificial
  Synthetic oligonucleotide
catcgaacagcccaccaaatgctttgcgcacacattatatacacccacatgattc

SEQ ID NO: 273973 - DNA, 55 bp, Artificial
  Synthetic oligonucleotide
ccggcagatcccgtaacgatcaagttgttaccgatttgagaatatactgtcgtga

SEQ ID NO: 273974 - DNA, 55 bp, Artificial
  Synthetic oligonucleotide
catcctgtgtacggtgcaaagatttcattaccacagggcacgcatatgagttggg

SEQ ID NO: 273975 - DNA, 55 bp, Artificial
  Synthetic oligonucleotide
catccgtcatctacagtgagctacgaacctttcggtaatgattctatagatcaag

SEQ ID NO: 273976 - DNA, 55 bp, Artificial
  Synthetic oligonucleotide
catccgtacacacacagagaccaccgtttactttcatatcagaatagaagttgtg

SEQ ID NO: 273977 - DNA, 55 bp, Artificial
  Synthetic oligonucleotide
catggagaaccctcacgaacaagtgcaggctaacatactttcgcgaataattggt

SEQ ID NO: 273978 - DNA, 55 bp, Artificial
  Synthetic oligonucleotide
gtggtacaagggtagctgtaatggccgtaccggtattttcccagcaaactatgtc

SEQ ID NO: 273979 - DNA, 53 bp, Artificial
  Synthetic oligonucleotide
gtaagtggtaggggtatttgtatacaaacacccctaggagacatattataccc

SEQ ID NO: 273980 - DNA, 55 bp, Artificial
  Synthetic oligonucleotide
ccgcctagcgttacgtagtgggctgtatgtacgatctgcattaagtaatgtccac

SEQ ID NO: 273981 - DNA, 55 bp, Artificial
  Synthetic oligonucleotide
catggcgaacgataaaacagaacctgttgtgccagatactaacgcagacgattgt

SEQ ID NO: 273982 - DNA, 55 bp, Artificial
  Synthetic oligonucleotide
gtggtacaacacgtagcgggaccacttcgctcattatcttactaatgtagtatgc

SEQ ID NO: 273983 - DNA, 55 bp, Artificial
  Synthetic oligonucleotide
catccgctggtaaatccaaggatatccatattgacactttcgacttgtacgttgg

SEQ ID NO: 273984 - DNA, 55 bp, Artificial
  Synthetic oligonucleotide
ccggctcatagtccctttcgtaaaatgactctataagtcctactcgtagttctcc

SEQ ID NO: 273985 - DNA, 55 bp, Artificial
  Synthetic oligonucleotide
gtgtaccaaatgagaatccactcttgggttgagtgtctttagcctgttgcgaccc

SEQ ID NO: 273986 - DNA, 55 bp, Artificial
  Synthetic oligonucleotide
catccgcgataatgattatgtaatgtagccgggaatcggagttaaagagtcctgc

SEQ ID NO: 273987 - DNA, 55 bp, Artificial
  Synthetic oligonucleotide
catggcgtggttgtgaattagtgccggaagaacgaagttgcctcgcaaatatgct

SEQ ID NO: 273988 - DNA, 55 bp, Artificial
  Synthetic oligonucleotide
catccgcatacagctatcaccgagacgatctttcgaattgtctcttcaagggact

SEQ ID NO: 273989 - DNA, 55 bp, Artificial
  Synthetic oligonucleotide
catccaatgaacatgctctgttgatgttttcgtgttctttggtgaggaaagtgcc

SEQ ID NO: 273990 - DNA, 60 bp, Artificial
  Synthetic oligonucleotide
aagctgaccgaaagtgtcaatccgtcagctgagcggcatccacgatatgctctcagctcc

SEQ ID NO: 273991 - DNA, 54 bp, Artificial
  Synthetic oligonucleotide
gtgtagacttctaaaacaccggctggtaaaacgaagttggcattgttttcagcg

SEQ ID NO: 273992 - DNA, 55 bp, Artificial
  Synthetic oligonucleotide
taaccgttaccctccaattagccatattcaacttcactaccacttaccctgccat

SEQ ID NO: 273993 - DNA, 54 bp, Artificial
  Synthetic oligonucleotide
gtggggtggattatcttctattgtacgtatttgttttcgtcttgtttcgcaccc

SEQ ID NO: 273994 - DNA, 55 bp, Artificial
  Synthetic oligonucleotide
gtggtggtcccgtaatcaagattaacgcgaatcaacgttacatgaccaattcacc

SEQ ID NO: 273995 - DNA, 55 bp, Artificial
  Synthetic oligonucleotide
catgaaaggggaaatagcttctagtatctggcatgatatgtccttacagaacttg

SEQ ID NO: 273996 - DNA, 55 bp, Artificial
  Synthetic oligonucleotide
catctgtgcaccacgtagaccaatattcgaggcccttcgatcagatcacgtgact

SEQ ID NO: 273997 - DNA, 55 bp, Artificial
  Synthetic oligonucleotide
gtggtgacggtaaatgcagctgagcagtgttgttggatagagtgatgaggcgggt

SEQ ID NO: 273998 - DNA, 55 bp, Artificial
  Synthetic oligonucleotide
taaatcatcggaaccttcttaccttccttcgctatttaggatcctcttcatgggg

SEQ ID NO: 273999 - DNA, 55 bp, Artificial
  Synthetic oligonucleotide
taaatacacgagtcagttgaactcaactagagctgctactctagcacagagttgg

SEQ ID NO: 274000 - DNA, 55 bp, Artificial
  Synthetic oligonucleotide
gtggtcccacctccatacactaccactgtcgtttctggtacttctagcgagaccg

SEQ ID NO: 274001 - DNA, 54 bp, Artificial
  Synthetic oligonucleotide
cgtatgaggacgacacgggtctgtggttcgatacttcccagggttcgtcaaagg

SEQ ID NO: 274002 - DNA, 55 bp, Artificial
  Synthetic oligonucleotide
catctccatcgttaccacgtcgcctatttgagcctcgttccaccagtaacctgct

SEQ ID NO: 274003 - DNA, 55 bp, Artificial
  Synthetic oligonucleotide
catcgttggagaccaccatgtatgaactgtcgtcttgcgattcattattggtcaa

SEQ ID NO: 274004 - DNA, 55 bp, Artificial
  Synthetic oligonucleotide
catcgtgatacgtcaatcatttccgtaatgggagtccggtcaagccttgttagcg

SEQ ID NO: 274005 - DNA, 55 bp, Artificial
  Synthetic oligonucleotide
gtggtttcataagtgccggtccatggttgggttgtggtcacataggtcaccggag

SEQ ID NO: 274006 - DNA, 55 bp, Artificial
  Synthetic oligonucleotide
catgcagcaaagtcacatcgcccatatctctcgagtgcgataacggggaacttga

SEQ ID NO: 274007 - DNA, 55 bp, Artificial
  Synthetic oligonucleotide
taaagcatcaaagactatacacttcgataatgataacgcaatagaggcgctctgg

SEQ ID NO: 274008 - DNA, 54 bp, Artificial
  Synthetic oligonucleotide
ccggaagaaactcaaactggtaactaggggtgtatcgagtggtaattccgatgc

SEQ ID NO: 274009 - DNA, 55 bp, Artificial
  Synthetic oligonucleotide
gtgtaaacatttcgcccttgagctgataacctcttggaagactttcttatgctcc

SEQ ID NO: 274010 - DNA, 55 bp, Artificial
  Synthetic oligonucleotide
catcggtattgcggaaccattgtccttgcacgttgacacctatggtactgcgacc

SEQ ID NO: 274011 - DNA, 55 bp, Artificial
  Synthetic oligonucleotide
catcggtatgttggcgtggcgatacaggagagctattttgcataggtgggcccgg

SEQ ID NO: 274012 - DNA, 52 bp, Artificial
  Synthetic oligonucleotide
ccgcggcccttaccttatggtaagggccgcggggtagtatatattacccaca

SEQ ID NO: 274013 - DNA, 55 bp, Artificial
  Synthetic oligonucleotide
taaagagacgctcaaatcttctccccaggctattggtactcgagacaagaatcga

SEQ ID NO: 274014 - DNA, 55 bp, Artificial
  Synthetic oligonucleotide
ccgctacgggtgtttctgtggacggcagggagctccgcgtggagtgaggagaaac

SEQ ID NO: 274015 - DNA, 55 bp, Artificial
  Synthetic oligonucleotide
ccggaatagggcgtcgcagcgtaagtatatatagcaaggctatacggcgggagct

SEQ ID NO: 274016 - DNA, 55 bp, Artificial
  Synthetic oligonucleotide
ccggagcacacaaacacagcaacaccactatgtacgccgatatatacctagcctc

SEQ ID NO: 274017 - DNA, 55 bp, Artificial
  Synthetic oligonucleotide
ccgctaacaatgggctgggtatcttgggtcgaatcatccccgcttacgtggccga

SEQ ID NO: 274018 - DNA, 55 bp, Artificial
  Synthetic oligonucleotide
ccgcggggatttcatgagaaggccagttctcataagactcagagattggttagcg

SEQ ID NO: 274019 - DNA, 55 bp, Artificial
  Synthetic oligonucleotide
taacatattcttcagccagtgagttgttactagtctccgtagctctcattaccgc

SEQ ID NO: 274020 - DNA, 55 bp, Artificial
  Synthetic oligonucleotide
gtgggatatcagagcgaataaacttcagcgtcacagtctcggtagcagtagctgt

SEQ ID NO: 274021 - DNA, 55 bp, Artificial
  Synthetic oligonucleotide
catagtagggaccacttcaagcgcagaatgtcgcctgtacgctttgcaatgcgcg

SEQ ID NO: 274022 - DNA, 53 bp, Artificial
  Synthetic oligonucleotide
gtgtaggtggagttaagtgttacatggttaggttaacgaacttcttacaagtc

SEQ ID NO: 274023 - DNA, 52 bp, Artificial
  Synthetic oligonucleotide
ccgcggctcctcccttcggggggagaccgcggggaagatttaatgaaggcta

SEQ ID NO: 274024 - DNA, 54 bp, Artificial
  Synthetic oligonucleotide
ccgggcgccaataactctatccccgagtactttaataactctcatgtaacttac

SEQ ID NO: 274025 - DNA, 55 bp, Artificial
  Synthetic oligonucleotide
catggctgaatctcgatgatggagccagtgtcgaaatgtggccatcggatgactt

SEQ ID NO: 274026 - DNA, 55 bp, Artificial
  Synthetic oligonucleotide
catgggatgtcaagatcagattacaaggtttacctggacccgaggctggtaagag

SEQ ID NO: 274027 - DNA, 55 bp, Artificial
  Synthetic oligonucleotide
gtgggagttatgcgtaaatggcacagggtatagaccgctgaggcaagtgccgtgc

SEQ ID NO: 274028 - DNA, 55 bp, Artificial
  Synthetic oligonucleotide
ccgccactgtacaaccatacagcatacggaatgtcattatcgtcacgtccagtgg

SEQ ID NO: 274029 - DNA, 55 bp, Artificial
  Synthetic oligonucleotide
catgggcggtgacggtatactacactgcgcgcctttctgagaaaactgacggtcg

SEQ ID NO: 274030 - DNA, 55 bp, Artificial
  Synthetic oligonucleotide
taaaccaaactagtctggacaccgtggcatcgtttggtccagtacgtcctcttct

SEQ ID NO: 274031 - DNA, 55 bp, Artificial
  Synthetic oligonucleotide
catagccctaagtagccctcatgtacgtctcctccaagccctgttgtctcttacc

SEQ ID NO: 274032 - DNA, 55 bp, Artificial
  Synthetic oligonucleotide
gtgtattcgtatgcgcagaatgtgagaatgccaattataggggtgccgaggtgcc

SEQ ID NO: 274033 - DNA, 53 bp, Artificial
  Synthetic oligonucleotide
ccggggcttaacttgagaaaatcaggggacgggtaatagcaaatacgacactg

SEQ ID NO: 274034 - DNA, 60 bp, Artificial
  Synthetic oligonucleotide
gagatggtattcgaagaatactgtcttgcttgacatatcataatacaatgacttcgcaac

SEQ ID NO: 274035 - DNA, 55 bp, Artificial
  Synthetic oligonucleotide
aagataatatacagattgaaccgagtggtttaggggctgtttttgggaagcagaa

SEQ ID NO: 274036 - DNA, 55 bp, Artificial
  Synthetic oligonucleotide
catacttcggaaaccgctagagaatcattctatgagctagatagtacagcggaca

SEQ ID NO: 274037 - DNA, 55 bp, Artificial
  Synthetic oligonucleotide
catacgtcttaacgaaaactttggatcatgataacgaccagtcacaggatgtttg

SEQ ID NO: 274038 - DNA, 53 bp, Artificial
  Synthetic oligonucleotide
catacgtacaagaccttacaaggaaatggccgtataaactttcggacttggac

SEQ ID NO: 274039 - DNA, 55 bp, Artificial
  Synthetic oligonucleotide
catacctgttgggccctattagggtggacacgtacagttttgcattagtgtaacc

SEQ ID NO: 274040 - DNA, 55 bp, Artificial
  Synthetic oligonucleotide
cataccgttgactgtaatgcatcctacagcactacacgactcgaacaaccctaat

SEQ ID NO: 274041 - DNA, 55 bp, Artificial
  Synthetic oligonucleotide
ccgcatatggatcatcaccctggataccgtaatctaactgctcttcgggatactg

SEQ ID NO: 274042 - DNA, 55 bp, Artificial
  Synthetic oligonucleotide
catgggcttgagtgcaaccgccacacttacaacagagctataagcagggacaacg

SEQ ID NO: 274043 - DNA, 55 bp, Artificial
  Synthetic oligonucleotide
gtggctgcacgaaagttcattgtgagcagggtttaattgcaaacttagaccatgg

SEQ ID NO: 274044 - DNA, 55 bp, Artificial
  Synthetic oligonucleotide
cataccacgtatatcatccacgggccaaacctttagtatacatccttcgcgaacg

SEQ ID NO: 274045 - DNA, 55 bp, Artificial
  Synthetic oligonucleotide
ccgccatctctggtagccatgacactatcataattacgtttggtctcctccgatg

SEQ ID NO: 274046 - DNA, 60 bp, Artificial
  Synthetic oligonucleotide
ttcgtattattaggacaaattggagcatgtcatgtagaagtaccttatgtcttaatggga

SEQ ID NO: 274047 - DNA, 55 bp, Artificial
  Synthetic oligonucleotide
catatgtgcttgaggaacgttatcatttggcatgactaccacacctgtgccatct

SEQ ID NO: 274048 - DNA, 55 bp, Artificial
  Synthetic oligonucleotide
catattactgtctaactgatggaactatcagggcttcaagtccatggtaagatca

SEQ ID NO: 274049 - DNA, 54 bp, Artificial
  Synthetic oligonucleotide
catggctgaaactgaaagactaatgcctaacggtggttcccgcgaaacaaaacc

SEQ ID NO: 274050 - DNA, 55 bp, Artificial
  Synthetic oligonucleotide
catggctagtgtaagtcataatacgtcaaggatttccatgttgggtcgtcctcct

SEQ ID NO: 274051 - DNA, 55 bp, Artificial
  Synthetic oligonucleotide
taacgaaaggttgtgttcaaaagaaggcaacgcctgagccttcggcgacaagcga

SEQ ID NO: 274052 - DNA, 55 bp, Artificial
  Synthetic oligonucleotide
ccggcttgctagtatcttgcatcttgacatcaacagtctcgtctgccattatagt

SEQ ID NO: 274053 - DNA, 55 bp, Artificial
  Synthetic oligonucleotide
gtggggcacgtgacgcgccgtgggctgtgtaaatcccctcctatcacatcacgtg

SEQ ID NO: 274054 - DNA, 55 bp, Artificial
  Synthetic oligonucleotide
ccgggacggtaatagaatagggttatgatggcttagagggatgtgtgatggatgc

SEQ ID NO: 274055 - DNA, 55 bp, Artificial
  Synthetic oligonucleotide
ccgccctccgtatcaccacatgcgacgatttgttccctcaccgggttaaacttgc

SEQ ID NO: 274056 - DNA, 55 bp, Artificial
  Synthetic oligonucleotide
ccgccgattacagttattgcgggcccttgtacatgaaatattaggatggcttcgc

SEQ ID NO: 274057 - DNA, 60 bp, Artificial
  Synthetic oligonucleotide
agatctctcgaaaggccctttcacggaagcccagtcaactcaatcatctattgagacact

SEQ ID NO: 274058 - DNA, 54 bp, Artificial
  Synthetic oligonucleotide
aattgacacacccggcaagaggttgctcggtcagcaacccactatccccgttct

SEQ ID NO: 274059 - DNA, 54 bp, Artificial
  Synthetic oligonucleotide
aatggcgacacacagcaacgatggttgtgagtcaagcgctagtcctccgaccgg

SEQ ID NO: 274060 - DNA, 54 bp, Artificial
  Synthetic oligonucleotide
gggcctaggaggcccgtatacctagagaagtgaatataatttagtctggctcac

SEQ ID NO: 274061 - DNA, 54 bp, Artificial
  Synthetic oligonucleotide
acacactccatctgcccatcttaagttagcttgcttgcagttgacgatggacaa

SEQ ID NO: 274062 - DNA, 54 bp, Artificial
  Synthetic oligonucleotide
ccgtttagatgctggtgtcgatagtggtagccaacctgtgactttgactaacgc

SEQ ID NO: 274063 - DNA, 54 bp, Artificial
  Synthetic oligonucleotide
aacactatccctcacggatcgcaacctgatgggaatcgttacaaagttagtgca

SEQ ID NO: 274064 - DNA, 54 bp, Artificial
  Synthetic oligonucleotide
tttaactccatcaagacaggtttcaactctcgtaacctgagcacaacatctaac

SEQ ID NO: 274065 - DNA, 54 bp, Artificial
  Synthetic oligonucleotide
agaaggtattatacttctaatggcaatgcatggatccaccggactgagtgtgat

SEQ ID NO: 274066 - DNA, 54 bp, Artificial
  Synthetic oligonucleotide
ccgcccaaaacaggtttgagtagcggcagagctacacccgagaacgtttcgtgt

SEQ ID NO: 274067 - DNA, 54 bp, Artificial
  Synthetic oligonucleotide
ttgttttgtacgtggatggtattcaaccatccgagcagagacatctatatcatc

SEQ ID NO: 274068 - DNA, 57 bp, Artificial
  Synthetic oligonucleotide
agtcctccaggaacacctactaatgaagcgcaaccctggtttatttctgaagatctc

SEQ ID NO: 274069 - DNA, 54 bp, Artificial
  Synthetic oligonucleotide
tgatttctggtaaatttcgttccttgtatacctctctgaacctgtaaagcgttc

SEQ ID NO: 274070 - DNA, 54 bp, Artificial
  Synthetic oligonucleotide
ggtcaagatggtggaaatgcgggtgcacctagaggtgcgggaggtatcttcggc

SEQ ID NO: 274071 - DNA, 54 bp, Artificial
  Synthetic oligonucleotide
actgacgcgagcagttgacgtatgtccaactttcgctagggcggaacacaataa

SEQ ID NO: 274072 - DNA, 54 bp, Artificial
  Synthetic oligonucleotide
cgctgaaagatgttagtgaatgagacgattgttcataagccaactgagtaggtg

SEQ ID NO: 274073 - DNA, 54 bp, Artificial
  Synthetic oligonucleotide
tgcacagtatcttaaccgtctgcttagtcgaggagaaccaggattctgttcgtt

SEQ ID NO: 274074 - DNA, 54 bp, Artificial
  Synthetic oligonucleotide
tgacatcgttgacactgctatgtaacacccgtctaatcctgccacctctagatc

SEQ ID NO: 274075 - DNA, 54 bp, Artificial
  Synthetic oligonucleotide
acaccgcgttcagaacgaacagaataaccgccatcactgacgaaaccactgctg

SEQ ID NO: 274076 - DNA, 54 bp, Artificial
  Synthetic oligonucleotide
cgctagtccgagagggtaacaatgcaatcacgcaagtagcacgtgattgatttt

SEQ ID NO: 274077 - DNA, 53 bp, Artificial
  Synthetic oligonucleotide
aaactatctagccaccttataggaggtagtatataaggtccttcttgttttag

SEQ ID NO: 274078 - DNA, 54 bp, Artificial
  Synthetic oligonucleotide
acttggcgtatacccaccatggggaatgggtctcaccatatgggaattggtcag

SEQ ID NO: 274079 - DNA, 60 bp, Artificial
  Synthetic oligonucleotide
gtatgatatacatggtatatgggaatacggtaaagccaatagttatataaactgccatac

SEQ ID NO: 274080 - DNA, 54 bp, Artificial
  Synthetic oligonucleotide
aatctggaatctttcggatcgtcatcctgtagcctcagttgcaactttacaggc

SEQ ID NO: 274081 - DNA, 54 bp, Artificial
  Synthetic oligonucleotide
ggataagcacacaatatgtcccgcataatttggatactcagggctcctaattag

SEQ ID NO: 274082 - DNA, 54 bp, Artificial
  Synthetic oligonucleotide
gggagtatcgatccccagaggtcctgttaggcgttccctggggctgtagtgcag

SEQ ID NO: 274083 - DNA, 54 bp, Artificial
  Synthetic oligonucleotide
acaacaacgtcacaaagacaaaacctcgaacgagatagaagagataactgggac

SEQ ID NO: 274084 - DNA, 54 bp, Artificial
  Synthetic oligonucleotide
tgaggcctatgtgccgcttgtagtatatgacttctctccaagtgcgaaaatact

SEQ ID NO: 274085 - DNA, 54 bp, Artificial
  Synthetic oligonucleotide
acttgcatctcgagacttcatgccatgtcgctcgctgttcgcactcatactagt

SEQ ID NO: 274086 - DNA, 54 bp, Artificial
  Synthetic oligonucleotide
agaaacagaggttcaagcgtcggcagtcttccctagtggcatttctaatggttc

SEQ ID NO: 274087 - DNA, 54 bp, Artificial
  Synthetic oligonucleotide
aatctgtcaccgtggttgtaacgtagctcgttgcagtaagggtactagttgtgg

SEQ ID NO: 274088 - DNA, 54 bp, Artificial
  Synthetic oligonucleotide
ttaaggtgacgcaacgtatcatatcgggtgtctactccggtgtgacgaccgttg

SEQ ID NO: 274089 - DNA, 54 bp, Artificial
  Synthetic oligonucleotide
ttagacacgaaacttcctaaactttcacgtctggttcagatgaacgtttgatct

SEQ ID NO: 274090 - DNA, 60 bp, Artificial
  Synthetic oligonucleotide
gaggtgcgtagctcattatggagcgccctgatagcttcccaaaatgattcctccgtttct

SEQ ID NO: 274091 - DNA, 54 bp, Artificial
  Synthetic oligonucleotide
tgatcctgttctgctcgaccaaactggtactaccggctcttgcctgagagttta

SEQ ID NO: 274092 - DNA, 54 bp, Artificial
  Synthetic oligonucleotide
gggccagtttcaaaggtgaattggggccataccgcgttacttgtggcacggcca

SEQ ID NO: 274093 - DNA, 54 bp, Artificial
  Synthetic oligonucleotide
ttaaagtgtgatgagggaaacatgatgagccgaataacccaagaagggccttta

SEQ ID NO: 274094 - DNA, 54 bp, Artificial
  Synthetic oligonucleotide
acaaggacaaccagagtgtaagaactcgaatacaaccaagacgaatgcccagcg

SEQ ID NO: 274095 - DNA, 54 bp, Artificial
  Synthetic oligonucleotide
ttttaagcaatttatacttggttcgatcccagttattctcatttatagctctct

SEQ ID NO: 274096 - DNA, 54 bp, Artificial
  Synthetic oligonucleotide
aatacagaggtagggtcggaccacccactcacgactggcaccacccgtgatcaa

SEQ ID NO: 274097 - DNA, 54 bp, Artificial
  Synthetic oligonucleotide
gggtccctttctagtgactgcaccattaagcaccctagataattggatgaacga

SEQ ID NO: 274098 - DNA, 54 bp, Artificial
  Synthetic oligonucleotide
cctattatctggggaggggttatctttcattatctctctaatacctcttaatac

SEQ ID NO: 274099 - DNA, 54 bp, Artificial
  Synthetic oligonucleotide
agagcgactaatggtgtgtttataccccacaacaacatgcatctgccattatgg

SEQ ID NO: 274100 - DNA, 54 bp, Artificial
  Synthetic oligonucleotide
tgaccgtggggtctgcagccgtggttgctagcggattagcgtaccgctcctgaa

SEQ ID NO: 274101 - DNA, 49 bp, Artificial
  Synthetic oligonucleotide
ttcttcggacccttaccccaagaaaggtgcgtagtaccgagggttcccc

SEQ ID NO: 274102 - DNA, 54 bp, Artificial
  Synthetic oligonucleotide
acaaggattcaggtaagtaggagggtcaccccatgcaggactactaaccgaaaa

SEQ ID NO: 274103 - DNA, 54 bp, Artificial
  Synthetic oligonucleotide
acattgccttccgagtcagtcgaagtgtacgtggaggtcgttagggaggcttcc

SEQ ID NO: 274104 - DNA, 54 bp, Artificial
  Synthetic oligonucleotide
acgaggatgttggctcaaactgctagactgttgggccaaggaacgcgcgccaac

SEQ ID NO: 274105 - DNA, 54 bp, Artificial
  Synthetic oligonucleotide
aagagctctgaaccctgacaagtcgctctttaaagtgcacgagggactatccaa

SEQ ID NO: 274106 - DNA, 54 bp, Artificial
  Synthetic oligonucleotide
aagatgatctgttgtacctattagagaagtcggacgtagatgattggtggaccg

SEQ ID NO: 274107 - DNA, 54 bp, Artificial
  Synthetic oligonucleotide
cgcccgggtttacgctggtccgcgttacgggtgcttagcttggctaggcttgtc

SEQ ID NO: 274108 - DNA, 54 bp, Artificial
  Synthetic oligonucleotide
ttgatactctaggtcctccgaggggcgaggcacagtcctccggtgttgggaagt

SEQ ID NO: 274109 - DNA, 54 bp, Artificial
  Synthetic oligonucleotide
gcttggaccgatcgaagaggcgttcccatccccgccatcactgttttcaacgcc

SEQ ID NO: 274110 - DNA, 54 bp, Artificial
  Synthetic oligonucleotide
acgcgtggggcttctaaacccactgagcaccatagtaaaaggaatgccttaagc

SEQ ID NO: 274111 - DNA, 54 bp, Artificial
  Synthetic oligonucleotide
ccttctaactcggtgccttaactgctgtgggctcataatcgtagaagtacagaa

SEQ ID NO: 274112 - DNA, 58 bp, Artificial
  Synthetic oligonucleotide
cgaagacggagaaaagggaccatatcacctcgcatttgagagttcacgtaccattgaa

SEQ ID NO: 274113 - DNA, 54 bp, Artificial
  Synthetic oligonucleotide
aacgccccacgccattaaggcacgagacacataacatcctagggttcctgcccc

SEQ ID NO: 274114 - DNA, 54 bp, Artificial
  Synthetic oligonucleotide
acatcggcgcccgatcctatagcaatagtcccaccagcggacaccccaggtgta

SEQ ID NO: 274115 - DNA, 54 bp, Artificial
  Synthetic oligonucleotide
acgcttgaaaggtatcactacgggatccactcctaatttccttgacgcaatctt

SEQ ID NO: 274116 - DNA, 54 bp, Artificial
  Synthetic oligonucleotide
ttggaccggggcgacccagtaaacgagcttattctctgtggtgtgcttgccgtt

SEQ ID NO: 274117 - DNA, 54 bp, Artificial
  Synthetic oligonucleotide
acggatatacttggtaatatatccagcccccgcgacatgaccctttatgagggt

SEQ ID NO: 274118 - DNA, 54 bp, Artificial
  Synthetic oligonucleotide
gcgtgaacgtaatcccgttatgcgatcgtatgagctagtcagcgtcatagcgct

SEQ ID NO: 274119 - DNA, 54 bp, Artificial
  Synthetic oligonucleotide
ccttcatgactattctagaggcagtggttaccgcaatgctacttgccttttcaa

SEQ ID NO: 274120 - DNA, 54 bp, Artificial
  Synthetic oligonucleotide
ttggggagtttccaaaataacaacggcatctgagaattctgacgaatggattaa

SEQ ID NO: 274121 - DNA, 52 bp, Artificial
  Synthetic oligonucleotide
accctttgtcaagagttcgtggttaacgtcgactgcgtttactgattaccgt

SEQ ID NO: 274122 - DNA, 54 bp, Artificial
  Synthetic oligonucleotide
ggggtatctacctgggcggcatccaacccatcatagaccacaccccactccagg

SEQ ID NO: 274123 - DNA, 60 bp, Artificial
  Synthetic oligonucleotide
ggttatgaaatgcatctgtttacattgtatgtaatacccttactaggcaatgttataagc

SEQ ID NO: 274124 - DNA, 54 bp, Artificial
  Synthetic oligonucleotide
tgtcagcaacaagtatgcgtccgccgcacgttatccggatctcgctcgcgtaag

SEQ ID NO: 274125 - DNA, 54 bp, Artificial
  Synthetic oligonucleotide
aactgccctgagtactcccgcccaagacttgatgggctccctccatcctcgttg

SEQ ID NO: 274126 - DNA, 54 bp, Artificial
  Synthetic oligonucleotide
accaggtcatgtttacgattctgttaccgaccagatcacacgttactacactcc

SEQ ID NO: 274127 - DNA, 54 bp, Artificial
  Synthetic oligonucleotide
ccggggcagtgaggccgggctactctattgtctctatggagcgcagcgggctag

SEQ ID NO: 274128 - DNA, 54 bp, Artificial
  Synthetic oligonucleotide
ggggtcttccagggtacgtgggtcacgccacgagtaggatcaaccggttagaga

SEQ ID NO: 274129 - DNA, 54 bp, Artificial
  Synthetic oligonucleotide
accgggtggctattccaggtgttgccagcttctgtcacgtggcaagggcgctac

SEQ ID NO: 274130 - DNA, 54 bp, Artificial
  Synthetic oligonucleotide
accggtacagaggaggtagcactaacgtggctggtattatcgtaggaacaattt

SEQ ID NO: 274131 - DNA, 54 bp, Artificial
  Synthetic oligonucleotide
ccggtgttagcataatgcagacgtaaagtcttctcgccaggtagcactctaact

SEQ ID NO: 274132 - DNA, 54 bp, Artificial
  Synthetic oligonucleotide
gctgtcccttgcgtgcgccgtggattgtgttcgataaggcttactttataacgg

SEQ ID NO: 274133 - DNA, 49 bp, Artificial
  Synthetic oligonucleotide
cccggtttccacctaccgtccgcctagggtccctttaccaattcttcgc

SEQ ID NO: 274134 - DNA, 54 bp, Artificial
  Synthetic oligonucleotide
ctgtaatacaggtacacctttaagtggtaattttgtaggtgaattcttatctat

SEQ ID NO: 274135 - DNA, 54 bp, Artificial
  Synthetic oligonucleotide
ggtaaacgttattgatatgcgtaaccgcaagagcaatcgcctcgagtaacgaca

SEQ ID NO: 274136 - DNA, 54 bp, Artificial
  Synthetic oligonucleotide
cgcagacgtctcgatctggttggtatagagacaacagccactggggttcatacg

SEQ ID NO: 274137 - DNA, 54 bp, Artificial
  Synthetic oligonucleotide
ttcttctaggaggtgtgaaagacgttacgtgcggctgggagttcactgtagtga

SEQ ID NO: 274138 - DNA, 54 bp, Artificial
  Synthetic oligonucleotide
ttgaaattcattaacagcgctagaaacttttattcgaggctttaatgacgatcg

SEQ ID NO: 274139 - DNA, 54 bp, Artificial
  Synthetic oligonucleotide
aacggctgaggggtaggtagctcactggtggacccatcctgggacgggtatgaa

SEQ ID NO: 274140 - DNA, 54 bp, Artificial
  Synthetic oligonucleotide
ttctacgaagacgtcggccgtgtcagttatgtccacgataacagtgccaatcag

SEQ ID NO: 274141 - DNA, 54 bp, Artificial
  Synthetic oligonucleotide
accttatgtcatcgtctaacaccgtacatgataacatactggtagtgtaactac

SEQ ID NO: 274142 - DNA, 54 bp, Artificial
  Synthetic oligonucleotide
ttcgattgccaactatactgaagctcctgtggatacttccgtcgatattactgc

SEQ ID NO: 274143 - DNA, 54 bp, Artificial
  Synthetic oligonucleotide
actaagtccacgagcggttaagaaactgcacctgatgactattggatcttatat

SEQ ID NO: 274144 - DNA, 54 bp, Artificial
  Synthetic oligonucleotide
ttgtcgtgttgcacgggtgcacgtcgctggagaatacgattaccgaaagcggga

SEQ ID NO: 274145 - DNA, 52 bp, Artificial
  Synthetic oligonucleotide
actagaggagttactgggggtactagagtacttgaggtactagggttactaa

SEQ ID NO: 274146 - DNA, 56 bp, Artificial
  Synthetic oligonucleotide
tcttataattgtcaggaactggaaaagtcccccttgtcgtctcgattacacaccta

SEQ ID NO: 274147 - DNA, 54 bp, Artificial
  Synthetic oligonucleotide
gggctgttgactccactggcggtaggcgtggctgcgttagctaaggaatccatt

SEQ ID NO: 274148 - DNA, 54 bp, Artificial
  Synthetic oligonucleotide
gcgccatagttatgtatgaacccatgcgaggggaaaatgttgtcgacaaatctt

SEQ ID NO: 274149 - DNA, 54 bp, Artificial
  Synthetic oligonucleotide
ttccttacgaacaagctcccaagtctgcaaccgctctggataacccttaacatg

SEQ ID NO: 274150 - DNA, 54 bp, Artificial
  Synthetic oligonucleotide
gtggacactatatgtgttacagacgcaagactgaaattcgtttcgggaaggagg

SEQ ID NO: 274151 - DNA, 54 bp, Artificial
  Synthetic oligonucleotide
aagggcattcccaccgctagcaagacatgctctctagaacaggctgaggcggct

SEQ ID NO: 274152 - DNA, 53 bp, Artificial
  Synthetic oligonucleotide
cgcgggattatcgcccaagacggggtcgtttgagggtaataccgtggctagct

SEQ ID NO: 274153 - DNA, 51 bp, Artificial
  Synthetic oligonucleotide
aagggggacaatttgcccactgggttgggttttgagtggtagcagccgggt

SEQ ID NO: 274154 - DNA, 54 bp, Artificial
  Synthetic oligonucleotide
aacattaaactcgtcttgatatcaccccaatgtttaccctcagagtacacgacg

SEQ ID NO: 274155 - DNA, 54 bp, Artificial
  Synthetic oligonucleotide
gcgataccggcactttaactatgttaaagtgccgggatataacctcataccata

SEQ ID NO: 274156 - DNA, 54 bp, Artificial
  Synthetic oligonucleotide
actcactagcgtctattctaggggaaatcggccgtaatagctacataggggcaa

SEQ ID NO: 274157 - DNA, 59 bp, Artificial
  Synthetic oligonucleotide
tcccaaccgttcttccaacccagtcagccagtgagatatcaacgcaaggccttggtgct

SEQ ID NO: 274158 - DNA, 54 bp, Artificial
  Synthetic oligonucleotide
actcactcactcatcacgtacagataaataggtcacaagagaccaccactcctc

SEQ ID NO: 274159 - DNA, 54 bp, Artificial
  Synthetic oligonucleotide
ggcttgaaagtggactggttgggcttcaggggctcgctatcgaagtcgcgctcc

SEQ ID NO: 274160 - DNA, 54 bp, Artificial
  Synthetic oligonucleotide
tgcccgcaaacggccacagaccgatgtagttgctgccacaccggggtactctcc

SEQ ID NO: 274161 - DNA, 54 bp, Artificial
  Synthetic oligonucleotide
ggcttgatggattcatgcgtaaattcatgagcagttaggtttccccttctggca

SEQ ID NO: 274162 - DNA, 54 bp, Artificial
  Synthetic oligonucleotide
ttcacaccagtccgtgacccactcatcgacatttcgtgtaaggataatcaactg

SEQ ID NO: 274163 - DNA, 54 bp, Artificial
  Synthetic oligonucleotide
gcgtagggaaaggccttcgagaggttgcttgctgttcgaattgacaaaaggtta

SEQ ID NO: 274164 - DNA, 54 bp, Artificial
  Synthetic oligonucleotide
tggaactttgccgtgacccgaagcgatttcgattcagaccaagctttgaagtct

SEQ ID NO: 274165 - DNA, 54 bp, Artificial
  Synthetic oligonucleotide
gcggttgtctgtgacaaccagaagacttaaccggcccattttggcatccgcgga

SEQ ID NO: 274166 - DNA, 54 bp, Artificial
  Synthetic oligonucleotide
ggtagagctataagaataggttctcatgagggtttagaagataaaagtatgaaa

SEQ ID NO: 274167 - DNA, 54 bp, Artificial
  Synthetic oligonucleotide
aacgaaatgccaccacaagactctgaaggttggttctacaagcgtgccgcttct

SEQ ID NO: 274168 - DNA, 59 bp, Artificial
  Synthetic oligonucleotide
ccaaataattgtgccagcagttgcggttatacaatgaaggctaacgttaatcataatgg

SEQ ID NO: 274169 - DNA, 53 bp, Artificial
  Synthetic oligonucleotide
ccctgtacgcgaccgggtcccctggaagttccacggcgactccataaatgttc

SEQ ID NO: 274170 - DNA, 54 bp, Artificial
  Synthetic oligonucleotide
aagccggtcttagattattagtttcggacatcagtgcttggtacaccggatgct

SEQ ID NO: 274171 - DNA, 54 bp, Artificial
  Synthetic oligonucleotide
tgctctttcttacgacggtactactggtgtcttaactgcaacccaaggtaacag

SEQ ID NO: 274172 - DNA, 54 bp, Artificial
  Synthetic oligonucleotide
acagcgggaatcctgtgcgtatagtgcggaggcggcttgtatatcagcgagccg

SEQ ID NO: 274173 - DNA, 54 bp, Artificial
  Synthetic oligonucleotide
aagctagtacgacagattgcctttgacacattagttgacagaatgccgttttct

SEQ ID NO: 274174 - DNA, 54 bp, Artificial
  Synthetic oligonucleotide
gcggcgttttcttacagttctataatataacttcaacctatacgcaagccaaac

SEQ ID NO: 274175 - DNA, 54 bp, Artificial
  Synthetic oligonucleotide
acagccaaaagcgtcccacccatggcttgacgccatactccctgcaaaatcaac

SEQ ID NO: 274176 - DNA, 54 bp, Artificial
  Synthetic oligonucleotide
ggctcacgataggcatatcggacaatgttggcggtttctgttcttgctctcgtg

SEQ ID NO: 274177 - DNA, 54 bp, Artificial
  Synthetic oligonucleotide
ccccattgtccaagcgttggctgtagtatctgtgctggtattagtgttattgac

SEQ ID NO: 274178 - DNA, 54 bp, Artificial
  Synthetic oligonucleotide
ggctccaagggtgtccaactgctatcctcctatgtcaccgacgagttaggaatc

SEQ ID NO: 274179 - DNA, 55 bp, Artificial
  Synthetic oligonucleotide
agtaatattacccgcggatatactacgagaatatcgtagtatatccgcggtaaag

SEQ ID NO: 274180 - DNA, 54 bp, Artificial
  Synthetic oligonucleotide
tgcgttagtacggttcgggcgctctaggacgcgtgtcggtcgggtaaccatcat

SEQ ID NO: 274181 - DNA, 54 bp, Artificial
  Synthetic oligonucleotide
acgtgggccaggcacatgaccgacgttgttatggcaacctacgggctgtcacat

SEQ ID NO: 274182 - DNA, 52 bp, Artificial
  Synthetic oligonucleotide
gttcgtaggtcccccgcgtggtttattccgaacgtgcccttctcaccctagc

SEQ ID NO: 274183 - DNA, 54 bp, Artificial
  Synthetic oligonucleotide
caagtctcaccacttagcaagtcaatccagtttgcaatagacaaaggttcgtcg

SEQ ID NO: 274184 - DNA, 54 bp, Artificial
  Synthetic oligonucleotide
caggtgtcagcaaatcaaggtggactacaagcactatattcatcgatcgtacgc

SEQ ID NO: 274185 - DNA, 54 bp, Artificial
  Synthetic oligonucleotide
ccaggagatcaaagtcttatcacgggaagcggacaacaataggtttggttgacc

SEQ ID NO: 274186 - DNA, 54 bp, Artificial
  Synthetic oligonucleotide
tcgggtatcgaggcgttcactgcagcaggggcattctgtttggacgcttgatct

SEQ ID NO: 274187 - DNA, 54 bp, Artificial
  Synthetic oligonucleotide
cttatgcaccagcgcttaatttacagaagtggccatcatcatattgtgaaaaca

SEQ ID NO: 274188 - DNA, 54 bp, Artificial
  Synthetic oligonucleotide
tatactttacccttatcttgtcctacccgcggcatatacgcacccgtatatgcc

SEQ ID NO: 274189 - DNA, 54 bp, Artificial
  Synthetic oligonucleotide
gacagtggtatcgatagggcaagtagtggtataaatagtggtcatgccattact

SEQ ID NO: 274190 - DNA, 59 bp, Artificial
  Synthetic oligonucleotide
agtaataatccagtgtttagtgacagagacaaagacaagcgttagtaggcacatatact

SEQ ID NO: 274191 - DNA, 54 bp, Artificial
  Synthetic oligonucleotide
gcaatactgtaccaatgaccacgttttgactatgtggactccttacaaggacgg

SEQ ID NO: 274192 - DNA, 54 bp, Artificial
  Synthetic oligonucleotide
agcttgggggtgaacacctcgaatttcttggtaggctggcgaacgggtgctacg

SEQ ID NO: 274193 - DNA, 54 bp, Artificial
  Synthetic oligonucleotide
tcattcacctagcgcctgttgagtaccactcacttagtggtttgccgtgataag

SEQ ID NO: 274194 - DNA, 54 bp, Artificial
  Synthetic oligonucleotide
cagtagtttgagttgtggagtctttcgcatctagtgattggagtagagcgttta

SEQ ID NO: 274195 - DNA, 54 bp, Artificial
  Synthetic oligonucleotide
tatacaaggaagggatactgtactggatcggaaactagaaaccagcttatactt

SEQ ID NO: 274196 - DNA, 54 bp, Artificial
  Synthetic oligonucleotide
tcattgggtcgacgattttgcgctgtagatctgtcaacgcatttgactcagtgt

SEQ ID NO: 274197 - DNA, 54 bp, Artificial
  Synthetic oligonucleotide
caacgacacagcagcggcaggggagggtggttacccgggatgttccccagatat

SEQ ID NO: 274198 - DNA, 54 bp, Artificial
  Synthetic oligonucleotide
caaccttgaaggactaaattacttgccgttgtgcttggatcatccgttataaat

SEQ ID NO: 274199 - DNA, 54 bp, Artificial
  Synthetic oligonucleotide
tcgcaggcactagttgctcaaggctctcaggtggccctggtagacttggctgta

SEQ ID NO: 274200 - DNA, 54 bp, Artificial
  Synthetic oligonucleotide
gcaaatgcctttaacctaggtgccagcctatcagtgtatattttgtcgattaac

SEQ ID NO: 274201 - DNA, 56 bp, Artificial
  Synthetic oligonucleotide
agtaacatacatagtatttagatacgtaaaccatatggcttacccagttggggcca

SEQ ID NO: 274202 - DNA, 54 bp, Artificial
  Synthetic oligonucleotide
caggaagctaacttgtccaggcctttcacagcgccgtctcaatcagaaggcgtt

SEQ ID NO: 274203 - DNA, 54 bp, Artificial
  Synthetic oligonucleotide
ctgggtagaaaattgattacctagcgttccagatgatgacacaacggaggtctg

SEQ ID NO: 274204 - DNA, 54 bp, Artificial
  Synthetic oligonucleotide
gcagaaacattgttggagataacagaaatgacatcactggagttgatagtctca

SEQ ID NO: 274205 - DNA, 54 bp, Artificial
  Synthetic oligonucleotide
tacacagcggtttcaagcaacggtgcagcaggggcaagggcatagagtggaact

SEQ ID NO: 274206 - DNA, 53 bp, Artificial
  Synthetic oligonucleotide
gaccgtacggacctccacgtatgtccggctccgcccaacctccaagacgttac

SEQ ID NO: 274207 - DNA, 54 bp, Artificial
  Synthetic oligonucleotide
atctatggggcgggcggaatccataccacctgcactgtgccatagtggaaattc

SEQ ID NO: 274208 - DNA, 54 bp, Artificial
  Synthetic oligonucleotide
tatcaggtggccgacactagggaataagacagcatggagcggcctggcttggta

SEQ ID NO: 274209 - DNA, 54 bp, Artificial
  Synthetic oligonucleotide
caatgtatccagtatgactcttgtatgttatgctcttagaagttgggtgagatg

SEQ ID NO: 274210 - DNA, 54 bp, Artificial
  Synthetic oligonucleotide
caatcacggatccgtctgcgtcagttgtccatgtggtataagtgccagtccaaa

SEQ ID NO: 274211 - DNA, 54 bp, Artificial
  Synthetic oligonucleotide
atctttagtgcggggttatcctattgtagatagtgtaatcctgcaggttgtgta

SEQ ID NO: 274212 - DNA, 58 bp, Artificial
  Synthetic oligonucleotide
gaaattttgatggaaatccagaagacgatccaaatgtgccctggcttgtaaggaggga

SEQ ID NO: 274213 - DNA, 54 bp, Artificial
  Synthetic oligonucleotide
atgacctcattgggctactgaagaagctaagcgagtatgatgtcctactagacc

SEQ ID NO: 274214 - DNA, 54 bp, Artificial
  Synthetic oligonucleotide
caatatccccagttggcactgttttacttcagtgctgttctcaatcaaaatgga

SEQ ID NO: 274215 - DNA, 54 bp, Artificial
  Synthetic oligonucleotide
tatagtcgtcaggtattctaggagaatcactacccgagccagatatctcattct

SEQ ID NO: 274216 - DNA, 54 bp, Artificial
  Synthetic oligonucleotide
gcacatgcaacagtaaaggtatcggtctcgcaagtgttacagcctttagagcaa

SEQ ID NO: 274217 - DNA, 54 bp, Artificial
  Synthetic oligonucleotide
tcgtaccttctctaagccaacaattggtctcataagtcgttcttctagaatcga

SEQ ID NO: 274218 - DNA, 54 bp, Artificial
  Synthetic oligonucleotide
caggtctacacaaagtcaccgtatgtctttggtaactcattttccctaggctgt

SEQ ID NO: 274219 - DNA, 54 bp, Artificial
  Synthetic oligonucleotide
cgtatacttacatatatgggggatccctcacttctccggcgtcctactcaccct

SEQ ID NO: 274220 - DNA, 54 bp, Artificial
  Synthetic oligonucleotide
gcacaacgacacaagaaggcacattgtgtcacagaggggtgcgtgccaccagta

SEQ ID NO: 274221 - DNA, 54 bp, Artificial
  Synthetic oligonucleotide
gtaattccatggatactagtaatttcgatgaggaattcactagggagaagccaa

SEQ ID NO: 274222 - DNA, 54 bp, Artificial
  Synthetic oligonucleotide
gatgtaccgagaacgtcaagatatgatccctctcccatccaaagatcatcttcg

SEQ ID NO: 274223 - DNA, 60 bp, Artificial
  Synthetic oligonucleotide
tctgtgcagtggacacctctgtttatctttacccgcccttcagagaacataatctgtctt

SEQ ID NO: 274224 - DNA, 54 bp, Artificial
  Synthetic oligonucleotide
tagattgactgctgactacgatgctttggacattgctaacagaatcggttacat

SEQ ID NO: 274225 - DNA, 54 bp, Artificial
  Synthetic oligonucleotide
gatggtgcttgactgtgagccaacaacgaggaacgtctgttagtcggcgtatta

SEQ ID NO: 274226 - DNA, 54 bp, Artificial
  Synthetic oligonucleotide
aggcggaattgctagacgggacttcgctgtgttagccggagactcctcggctca

SEQ ID NO: 274227 - DNA, 54 bp, Artificial
  Synthetic oligonucleotide
tagcactggcatcggccgccattcttgtcctggcgtagtctagtgagtacacga

SEQ ID NO: 274228 - DNA, 53 bp, Artificial
  Synthetic oligonucleotide
ctaagggcaattcttgcccaaactacggaaccctgtttctgatccgaagggct

SEQ ID NO: 274229 - DNA, 54 bp, Artificial
  Synthetic oligonucleotide
attctaggagcctcttctgcgtaccactcgtaataagaagcagcgtacttaatt

SEQ ID NO: 274230 - DNA, 54 bp, Artificial
  Synthetic oligonucleotide
agggtcccgtgagaccgttcgtggtctctgaacctcccaagactctggcggcag

SEQ ID NO: 274231 - DNA, 54 bp, Artificial
  Synthetic oligonucleotide
gaatgtacaagttggatcatccttactacaagcatcgaaatacatatggtcagg

SEQ ID NO: 274232 - DNA, 54 bp, Artificial
  Synthetic oligonucleotide
tccctgtgtataatgccatgagagtgcatgcttccaatcgcatctattatctgt

SEQ ID NO: 274233 - DNA, 54 bp, Artificial
  Synthetic oligonucleotide
tcctcccgcccgcgttcataatcccctgtgctacacatgcaccaaacttggcta

SEQ ID NO: 274234 - DNA, 57 bp, Artificial
  Synthetic oligonucleotide
gcattaattaatggagtaagtagaaacccttcattgaaagatcagttattcagtttc

SEQ ID NO: 274235 - DNA, 54 bp, Artificial
  Synthetic oligonucleotide
ctaaaggcccactatttatttataatgatcctaatttcaagagaataaaatacg

SEQ ID NO: 274236 - DNA, 54 bp, Artificial
  Synthetic oligonucleotide
atgtgcccagcactaatggtaccgcaaacgggtaggcctctagtggttcgctga

SEQ ID NO: 274237 - DNA, 54 bp, Artificial
  Synthetic oligonucleotide
tccggagttccaggaatcgcccctcccccattacaaagccctccagagtcggaa

SEQ ID NO: 274238 - DNA, 54 bp, Artificial
  Synthetic oligonucleotide
taggtacgtccgattgctttggaccggggtaaaataagactgtgtgacataaac

SEQ ID NO: 274239 - DNA, 54 bp, Artificial
  Synthetic oligonucleotide
atggctgtaacacaggatctaattgtacgagttgttcataaatgacatggggtc

SEQ ID NO: 274240 - DNA, 54 bp, Artificial
  Synthetic oligonucleotide
aggacgctagtcggctggatacacattcacctcttaatttccaatactctctga

SEQ ID NO: 274241 - DNA, 54 bp, Artificial
  Synthetic oligonucleotide
cttgccctgcgttgaacccatccgtggtttttgccccggacagcaagaggacgt

SEQ ID NO: 274242 - DNA, 54 bp, Artificial
  Synthetic oligonucleotide
gagtagcgatcgttcacttgtccctagatgtgagtatcgaatgtaccgctaagt

SEQ ID NO: 274243 - DNA, 54 bp, Artificial
  Synthetic oligonucleotide
gcaaacccgaacgtaaacctcttggccattcgtcttatatcagtatactgagta

SEQ ID NO: 274244 - DNA, 54 bp, Artificial
  Synthetic oligonucleotide
tagaattacgtgagagaaccactgcacgaccgtagcattccccagacgggcccg

SEQ ID NO: 274245 - DNA, 60 bp, Artificial
  Synthetic oligonucleotide
tagcaaatgagtctatccactggactcagtttcactttgatcctcaggatccttctcaga

SEQ ID NO: 274246 - DNA, 54 bp, Artificial
  Synthetic oligonucleotide
agtagcgagcctagacagtcgacacggcctagctgggttccttcctacacccgg

SEQ ID NO: 274247 - DNA, 54 bp, Artificial
  Synthetic oligonucleotide
agtaccaaggttgtaccagcagtcacccaacaagctgggttagcaggagcaaca

SEQ ID NO: 274248 - DNA, 54 bp, Artificial
  Synthetic oligonucleotide
cgtagaaaagactcattcatgaatcgtcggaaacccatagtcatcttcgagcaa

SEQ ID NO: 274249 - DNA, 53 bp, Artificial
  Synthetic oligonucleotide
aggagggccgcttccgaaccgttcaatacggcaaaggatgggttaatgcggga

SEQ ID NO: 274250 - DNA, 54 bp, Artificial
  Synthetic oligonucleotide
taagagatcaagtaacttgggaacaagccctgcaatgttgtcactcacaatcaa

SEQ ID NO: 274251 - DNA, 54 bp, Artificial
  Synthetic oligonucleotide
tcccctccacactgtttagtttgggacgtacatccaagtagatctgcgggccct

SEQ ID NO: 274252 - DNA, 54 bp, Artificial
  Synthetic oligonucleotide
cgttctcgttcagcggttcgtcactatatgtgttgctagatagtttcagcatct

SEQ ID NO: 274253 - DNA, 54 bp, Artificial
  Synthetic oligonucleotide
tccctaataccagtgctgaactgttgttacaacctatgcatgtatcccgtaacg

SEQ ID NO: 274254 - DNA, 54 bp, Artificial
  Synthetic oligonucleotide
gaaaactcatggttacgtcggtgcagatttaactgctctgtgtagagaatcggt

SEQ ID NO: 274255 - DNA, 54 bp, Artificial
  Synthetic oligonucleotide
cggtgtggaccggtgccctttggtggagctggtccgacgtacggtaattgcaca

SEQ ID NO: 274256 - DNA, 58 bp, Artificial
  Synthetic oligonucleotide
aattaggtgtaccacggaagctattggcttgaacggtcaagaagatgaacggatgtca

SEQ ID NO: 274257 - DNA, 60 bp, Artificial
  Synthetic oligonucleotide
aattttcctattatcgaatctaatcagatttgcactgacatcctccattatgacaaaatg

SEQ ID NO: 274258 - DNA, 56 bp, Artificial
  Synthetic oligonucleotide
atttattggcgccagaacccttcggcgcttactctctactgttctcctcccgccca

SEQ ID NO: 274259 - DNA, 54 bp, Artificial
  Synthetic oligonucleotide
gaaactctgtgacggcaaatattttcaaccgtccttcacaagtgagggaaccgc

SEQ ID NO: 274260 - DNA, 54 bp, Artificial
  Synthetic oligonucleotide
ccagaaagcttaagtcctagtggaccctctgggtttgtggaggacgtattgtta

SEQ ID NO: 274261 - DNA, 54 bp, Artificial
  Synthetic oligonucleotide
tccctcggctctcggacgttgcttcgcaggtaaacgcaccgtaaaggttgactc

SEQ ID NO: 274262 - DNA, 54 bp, Artificial
  Synthetic oligonucleotide
tcaatgtcccactgtccgagaagaacggctgtagggtgtgtaggcccacacgta

SEQ ID NO: 274263 - DNA, 54 bp, Artificial
  Synthetic oligonucleotide
tcaagcttgtgggtggcactaccccgccaatccatatctatcatcgcccaccct

SEQ ID NO: 274264 - DNA, 54 bp, Artificial
  Synthetic oligonucleotide
ggttttcaacttggtaatctattggggattgtgtattggagggtgcactataat

SEQ ID NO: 274265 - DNA, 54 bp, Artificial
  Synthetic oligonucleotide
tcaacttaagtctcattcttagtacgcaaggatcagaatgaattaacctatggt

SEQ ID NO: 274266 - DNA, 54 bp, Artificial
  Synthetic oligonucleotide
gccaaccggtgaggcactttctttgggagaaagacttagtaagttcgattcttg

SEQ ID NO: 274267 - DNA, 54 bp, Artificial
  Synthetic oligonucleotide
agccattccaatactagtggatcgtgaggaactaatctggccatctgtattggg

SEQ ID NO: 274268 - DNA, 54 bp, Artificial
  Synthetic oligonucleotide
agtttgtatacctctgctggagatatccattctagatctttgatataagtttgg

SEQ ID NO: 274269 - DNA, 60 bp, Artificial
  Synthetic oligonucleotide
gcattaaatatcttttcagatatctattagtgatccagtctgtcgcaatagtatatacta

SEQ ID NO: 274270 - DNA, 54 bp, Artificial
  Synthetic oligonucleotide
ctgcaacttaaattataaccctcagtcggacgcctttgtttccactggtaagca

SEQ ID NO: 274271 - DNA, 53 bp, Artificial
  Synthetic oligonucleotide
ccattgaaaccgttcggttgctctacgtgctccaaaaagtttaaacgtccgca

SEQ ID NO: 274272 - DNA, 54 bp, Artificial
  Synthetic oligonucleotide
ctgcaaattagcacctcgttccctgttggcaaacgcgcgcgtacaagccttaca

SEQ ID NO: 274273 - DNA, 54 bp, Artificial
  Synthetic oligonucleotide
ccattgactcaacttttttggttgacgatacttcgaatactattggcgcaaatg

SEQ ID NO: 274274 - DNA, 54 bp, Artificial
  Synthetic oligonucleotide
agccaagggaacccgtactgtcagcccccacgagcctaggaagatggtcccgcc

SEQ ID NO: 274275 - DNA, 54 bp, Artificial
  Synthetic oligonucleotide
ctgatcgtggaaatgccgcaacttacttgcaaagtcgtaaggggaaactccctt

SEQ ID NO: 274276 - DNA, 54 bp, Artificial
  Synthetic oligonucleotide
ggtctcgacgtggtagatagtttctggagtggtcttgccatcggtaccagtgaa

SEQ ID NO: 274277 - DNA, 54 bp, Artificial
  Synthetic oligonucleotide
tacgcgtccgtcccctctgcccggaataaacaacagcctcagatcctactggca

SEQ ID NO: 274278 - DNA, 54 bp, Artificial
  Synthetic oligonucleotide
ataaacccgcaatagggacgaacccagctaatagtagctgggttcgtgcccgcg

SEQ ID NO: 274279 - DNA, 54 bp, Artificial
  Synthetic oligonucleotide
atcatgtgagcccagttgactaatcttgaacgggatggtagtaatacctgtcgc

SEQ ID NO: 274280 - DNA, 56 bp, Artificial
  Synthetic oligonucleotide
atttgatgaaagaacgaattaatgaaagaacgatttgatgaaagaataacgtattc

SEQ ID NO: 274281 - DNA, 54 bp, Artificial
  Synthetic oligonucleotide
ataatataatattatccccacgagggccacacatgtgtggccctcgcggggtat

SEQ ID NO: 274282 - DNA, 54 bp, Artificial
  Synthetic oligonucleotide
cggagtctagtggtcttgttgacacatagtaagttcgaggtatgtaccccagtt

SEQ ID NO: 274283 - DNA, 54 bp, Artificial
  Synthetic oligonucleotide
tctttccacgaagtcacgtccccaacacaattttggtccgcgaatgcgcgcacg

SEQ ID NO: 274284 - DNA, 54 bp, Artificial
  Synthetic oligonucleotide
gccatgctggatcaacgatctagatcttcagacacaactaagaccacatccttc

SEQ ID NO: 274285 - DNA, 54 bp, Artificial
  Synthetic oligonucleotide
tcaaagagtaagtcaagtgatgacaactcgaatgagggcgggctagttatcgac

SEQ ID NO: 274286 - DNA, 54 bp, Artificial
  Synthetic oligonucleotide
taccccataggttgatactctaggtcctccgaggggcgaggcacagtcctccgg

SEQ ID NO: 274287 - DNA, 54 bp, Artificial
  Synthetic oligonucleotide
atactttctacgcaaggtgccagtaagggccttcgtcgggggcagcccacaccg

SEQ ID NO: 274288 - DNA, 54 bp, Artificial
  Synthetic oligonucleotide
ctctggacagaatactggtcttcacaagggacatgttgctaggcagtcttatcg

SEQ ID NO: 274289 - DNA, 54 bp, Artificial
  Synthetic oligonucleotide
cggagacaccagtggatcttgcatgcaaggggtacaccgtgttcccaatgatca

SEQ ID NO: 274290 - DNA, 54 bp, Artificial
  Synthetic oligonucleotide
agattaacagggagcaacgacacagcagcggcaggggagggtggttacccggga

SEQ ID NO: 274291 - DNA, 55 bp, Artificial
  Synthetic oligonucleotide
ggcggccgtaccagaaccgaaagcctctactagttcgcccctcttggatctgtcg

SEQ ID NO: 274292 - DNA, 54 bp, Artificial
  Synthetic oligonucleotide
tgaatctcacaggtagaaaacgagcgatccaggtccaataagtagagcttaata

SEQ ID NO: 274293 - DNA, 54 bp, Artificial
  Synthetic oligonucleotide
atcaactgctcccaatgaacaatttccatcctgcgtacgatgcaaagaatttat

SEQ ID NO: 274294 - DNA, 54 bp, Artificial
  Synthetic oligonucleotide
gtagtagtttgtatcgtttgatgctagtgaagtttagtccctgacgagtgcaag

SEQ ID NO: 274295 - DNA, 51 bp, Artificial
  Synthetic oligonucleotide
ataggtttcagtaccgccgtcccttaagggacggcgggtatgaaactaata

SEQ ID NO: 274296 - DNA, 54 bp, Artificial
  Synthetic oligonucleotide
cccaatactactccttccaagccgctcatccaactgaaacctacccagttgaga

SEQ ID NO: 274297 - DNA, 54 bp, Artificial
  Synthetic oligonucleotide
cacaagtccttatcgttgatcaccgtggagtagcaagtaacttcactagccatc

SEQ ID NO: 274298 - DNA, 54 bp, Artificial
  Synthetic oligonucleotide
ctcagatgtgattagtacaccctcccattcgccatacacgaagaaacatagttc

SEQ ID NO: 274299 - DNA, 54 bp, Artificial
  Synthetic oligonucleotide
atcgaataaacctaagctcaaactggtattattcaattcgccttccagtggctc

SEQ ID NO: 274300 - DNA, 54 bp, Artificial
  Synthetic oligonucleotide
gcaggtacccttgaaagcaagcattatcttctgggcgtctaaggcgaatgttgg

SEQ ID NO: 274301 - DNA, 54 bp, Artificial
  Synthetic oligonucleotide
ctggattggtatcctaagcgggacgccgtgcatgtaccaccacataactttatc

SEQ ID NO: 274302 - DNA, 59 bp, Artificial
  Synthetic oligonucleotide
cgaatcgtcctagccgttctaccgataaaggatccaatgtgattattagctccactaca

SEQ ID NO: 274303 - DNA, 54 bp, Artificial
  Synthetic oligonucleotide
ctggacttccgggtcttggtctgcttcacctccgcctgaagcaaatatcccaca

SEQ ID NO: 274304 - DNA, 54 bp, Artificial
  Synthetic oligonucleotide
tctctgcggtgaattctgtgcgaagtgcctaaacgaaaacggacggagaaggct

SEQ ID NO: 274305 - DNA, 54 bp, Artificial
  Synthetic oligonucleotide
cattcaacgctgttgtgctgttcaccaagagccctctcacacgcctcgctcgcc

SEQ ID NO: 274306 - DNA, 54 bp, Artificial
  Synthetic oligonucleotide
tctgcatacaccctggggcagcactagcaagaactgttgtacgtacaagtggtg

SEQ ID NO: 274307 - DNA, 54 bp, Artificial
  Synthetic oligonucleotide
gtagacaattttgtgtgcagttctacgcatgtatagggttgtcgatctacatgt

SEQ ID NO: 274308 - DNA, 54 bp, Artificial
  Synthetic oligonucleotide
ccatacccaccctctctaacgttcctctccaccgtacgtgcatgatgtaccatt

SEQ ID NO: 274309 - DNA, 54 bp, Artificial
  Synthetic oligonucleotide
ccacaacgtctctaatatcacatttgcgctggccaacatcgctaacgccagcat

SEQ ID NO: 274310 - DNA, 54 bp, Artificial
  Synthetic oligonucleotide
ctgctactcatcatgttaatttagaaactactatcttatatcttcatatcttag

SEQ ID NO: 274311 - DNA, 54 bp, Artificial
  Synthetic oligonucleotide
tatctgtggacccctttaataagcacgatagagccattgcagcgccaatggagg

SEQ ID NO: 274312 - DNA, 54 bp, Artificial
  Synthetic oligonucleotide
cagagtctccgcctagcgaggccacagtagggagctgtctcactgccactcagg

SEQ ID NO: 274313 - DNA, 60 bp, Artificial
  Synthetic oligonucleotide
gtggtatccagagcctctgattcctctcgggctgtcgtagtttgttcgcccgatgcatta

SEQ ID NO: 274314 - DNA, 54 bp, Artificial
  Synthetic oligonucleotide
gtatccggccaataaaaggtaagtgtgacgccattcatgctataccaccgtgca

SEQ ID NO: 274315 - DNA, 54 bp, Artificial
  Synthetic oligonucleotide
tacgtactctcactcgccttgtgctccccaacacattacccggagtctggcaga

SEQ ID NO: 274316 - DNA, 53 bp, Artificial
  Synthetic oligonucleotide
gtagcggtacgccctttcttcacacgtgaccctgtacgcgaccgggtcccctg

SEQ ID NO: 274317 - DNA, 53 bp, Artificial
  Synthetic oligonucleotide
ttcaaccgagctgacttgcatttccgggtgcgctgtggctacatgccaggcgg

SEQ ID NO: 274318 - DNA, 53 bp, Artificial
  Synthetic oligonucleotide
gtttctagttaaacaaagaggtgtcacctacttaaaccaattgcccacaagac

SEQ ID NO: 274319 - DNA, 53 bp, Artificial
  Synthetic oligonucleotide
tagtgaaaccactcccccacctcgtgtaggacatgctgccactctgtgtggga

SEQ ID NO: 274320 - DNA, 53 bp, Artificial
  Synthetic oligonucleotide
ttacaacgaaaactgtttaggcgtcttgcccggcgaagtgttcacttggaaaa

SEQ ID NO: 274321 - DNA, 53 bp, Artificial
  Synthetic oligonucleotide
acaactctctctcgtcagaaatggccgcaggcggacactacaagcgcgcccgt

SEQ ID NO: 274322 - DNA, 53 bp, Artificial
  Synthetic oligonucleotide
ggacgccagcacctgtctcataagcgtacgttttctcaattggttccgataag

SEQ ID NO: 274323 - DNA, 53 bp, Artificial
  Synthetic oligonucleotide
cgtgcggccgggctatcttaacgtgcgtgccatcgataaatcccacgattcta

SEQ ID NO: 274324 - DNA, 58 bp, Artificial
  Synthetic oligonucleotide
agtcaaatagcagccttattttgagggttataatgtagcgaaattcattggctactaa

SEQ ID NO: 274325 - DNA, 53 bp, Artificial
  Synthetic oligonucleotide
atccactccacgcacaatgggaaagcaggcagcatgaggtcgtggtgcacata

SEQ ID NO: 274326 - DNA, 53 bp, Artificial
  Synthetic oligonucleotide
ccaaatgggtcgaatcttggatatagagtcggtaagatattaggaactctgca

SEQ ID NO: 274327 - DNA, 53 bp, Artificial
  Synthetic oligonucleotide
cgagccgccctctcattagcggtacgccgaggtcacacaggatcacgaggatc

SEQ ID NO: 274328 - DNA, 53 bp, Artificial
  Synthetic oligonucleotide
tatccgctgggcgtcccacttagggtaacactccaagccggagttactctccc

SEQ ID NO: 274329 - DNA, 53 bp, Artificial
  Synthetic oligonucleotide
ttcagtgttagttctgctgtcatgcagttttcttgcagctggtaaaccgtcaa

SEQ ID NO: 274330 - DNA, 53 bp, Artificial
  Synthetic oligonucleotide
catgacctcagcggacttgtggaaacactaagcagctttgactatgagaaggc

SEQ ID NO: 274331 - DNA, 53 bp, Artificial
  Synthetic oligonucleotide
aagtacgctaagctgtcagggctggttagcggctgcttgtcccgtcccgacta

SEQ ID NO: 274332 - DNA, 53 bp, Artificial
  Synthetic oligonucleotide
tatggtcaattaagaaaggatggtcatgcggtgtctatattacacggtgactt

SEQ ID NO: 274333 - DNA, 53 bp, Artificial
  Synthetic oligonucleotide
taggtagacgattgacaagtgtcttctggaaaagtcagacactacactactac

SEQ ID NO: 274334 - DNA, 53 bp, Artificial
  Synthetic oligonucleotide
ttaccatcactccaggttttcccggagtggggtggcagtccgcagtctctcgc

SEQ ID NO: 274335 - DNA, 58 bp, Artificial
  Synthetic oligonucleotide
ggggcggcattttattgccctctgcccaaattctgcaactcctcttaactgttacaga

SEQ ID NO: 274336 - DNA, 53 bp, Artificial
  Synthetic oligonucleotide
ttccagtattcatactgcgcgttagagtggtagccataagagccggcatattg

SEQ ID NO: 274337 - DNA, 53 bp, Artificial
  Synthetic oligonucleotide
aaggtacaataggtataagttaattggtaaactggatgtcttccaaacattga

SEQ ID NO: 274338 - DNA, 53 bp, Artificial
  Synthetic oligonucleotide
tgttgagagttgaggaggtatcacgtgacccatagtgctcttagaagcgagac

SEQ ID NO: 274339 - DNA, 53 bp, Artificial
  Synthetic oligonucleotide
ggagtagcatacaatccatataggagttcctcaggaaacataaatctggatag

SEQ ID NO: 274340 - DNA, 53 bp, Artificial
  Synthetic oligonucleotide
tatctattcggttctctggtctgaaaattcgttcgtaacctggagatcctttg

SEQ ID NO: 274341 - DNA, 53 bp, Artificial
  Synthetic oligonucleotide
tatcgcaagtctaaccctccaattcatatcgtttgctaattctgtaatggcag

SEQ ID NO: 274342 - DNA, 53 bp, Artificial
  Synthetic oligonucleotide
gacatcatacatcgggaaataccgaatcattgcatggagccccacatataagc

SEQ ID NO: 274343 - DNA, 53 bp, Artificial
  Synthetic oligonucleotide
catggcccgggtacacaagagtactagaccaattgttcttgccgacaccttct

SEQ ID NO: 274344 - DNA, 53 bp, Artificial
  Synthetic oligonucleotide
aatcaaaacgcgatcatcaattgtctccctgccagatagttgtggaactgggg

SEQ ID NO: 274345 - DNA, 53 bp, Artificial
  Synthetic oligonucleotide
atgagagacattgttgttagccaagccgaggtatgaactgacttcgattgtat

SEQ ID NO: 274346 - DNA, 57 bp, Artificial
  Synthetic oligonucleotide
agcatttgggcggcagaaagagtccgggtagtgcatttccattttaggagagtttca

SEQ ID NO: 274347 - DNA, 53 bp, Artificial
  Synthetic oligonucleotide
cgagagtggccaaaatacagccatccctgcaaagctccctcgcacccgacact

SEQ ID NO: 274348 - DNA, 53 bp, Artificial
  Synthetic oligonucleotide
gtaagcaccctttccctccactccgaggttacttagacaaatcttaactggta

SEQ ID NO: 274349 - DNA, 53 bp, Artificial
  Synthetic oligonucleotide
gacgggtgatgcccttccagataaatctcgtggagattggctagcgtcaaacg

SEQ ID NO: 274350 - DNA, 46 bp, Artificial
  Synthetic oligonucleotide
aatcccgtaaggagtgagggaccccccccttacggggggaaccgaa

SEQ ID NO: 274351 - DNA, 53 bp, Artificial
  Synthetic oligonucleotide
gtcagggaagcacaacagatccacttcattagtggtaccgcattaccgtacca

SEQ ID NO: 274352 - DNA, 53 bp, Artificial
  Synthetic oligonucleotide
tagtggttagttaactcgacgcatacatagacacgctcttgttccttaagctc

SEQ ID NO: 274353 - DNA, 53 bp, Artificial
  Synthetic oligonucleotide
tatataccgccttctgtgtatcctctcacgatgtgggtactgcattaagttgt

SEQ ID NO: 274354 - DNA, 53 bp, Artificial
  Synthetic oligonucleotide
cattgcccaacgcgtcggggagggactcgcttctcgctaggcggagcgtcctg

SEQ ID NO: 274355 - DNA, 53 bp, Artificial
  Synthetic oligonucleotide
cattgtaggctctggcgagaacggtgtacttgcctggaggcacctcgtctggg

SEQ ID NO: 274356 - DNA, 53 bp, Artificial
  Synthetic oligonucleotide
tatacagtccaatggggtagtcaaccccgcacatgccgcaccactgataccac

SEQ ID NO: 274357 - DNA, 58 bp, Artificial
  Synthetic oligonucleotide
gtgagaatgccaattataggggtgccgagatgtgccttgaaaaaccctttcgcgcgcc

SEQ ID NO: 274358 - DNA, 53 bp, Artificial
  Synthetic oligonucleotide
gaccatcgtcttaaagaggaggttctgaccccaactacatctgcctcgactcc

SEQ ID NO: 274359 - DNA, 53 bp, Artificial
  Synthetic oligonucleotide
cgtggtttggatggtatataagcttgcaattagtcattgttctggtattgctg

SEQ ID NO: 274360 - DNA, 53 bp, Artificial
  Synthetic oligonucleotide
atcacggccaactgtttcgacaagaggagtggtgccccgccagcgagatctca

SEQ ID NO: 274361 - DNA, 53 bp, Artificial
  Synthetic oligonucleotide
gtgaactggaggattccagaacctggcctcataggaggggccccactgcttcg

SEQ ID NO: 274362 - DNA, 53 bp, Artificial
  Synthetic oligonucleotide
ttaccatcgcgccgtacaatggcaggtggaacttcattgaagcctaactggga

SEQ ID NO: 274363 - DNA, 53 bp, Artificial
  Synthetic oligonucleotide
ggatctcccaaggttccagcgacatcgttggcgttctccgactcaggcaaccc

SEQ ID NO: 274364 - DNA, 53 bp, Artificial
  Synthetic oligonucleotide
tttatcggaagactaagttttgggttgcccaccgtctgtgcatctacgtgaac

SEQ ID NO: 274365 - DNA, 53 bp, Artificial
  Synthetic oligonucleotide
aaagtgacttcaatactcgttgtctaggattggccctgatagggaccgaccgg

SEQ ID NO: 274366 - DNA, 53 bp, Artificial
  Synthetic oligonucleotide
ctcccgcagaggctaccacgagggaatggaacaggatgtctttgtgccctggg

SEQ ID NO: 274367 - DNA, 53 bp, Artificial
  Synthetic oligonucleotide
cctgatgcttggaagcatgattgcaagaccattgtgtgccagcgtgtagaaga

SEQ ID NO: 274368 - DNA, 57 bp, Artificial
  Synthetic oligonucleotide
ctcatattatgagattggggggaatcgatatataaaccccggacgccatcgtccgac

SEQ ID NO: 274369 - DNA, 57 bp, Artificial
  Synthetic oligonucleotide
gtggtacggtcaagtttcctggcacgagtcaattttccctcttcgtgtagatcagag

SEQ ID NO: 274370 - DNA, 53 bp, Artificial
  Synthetic oligonucleotide
cagagtcccacgggagaagtactgccttaggtttagagcccctggcgcctccc

SEQ ID NO: 274371 - DNA, 53 bp, Artificial
  Synthetic oligonucleotide
tttaatcccctccccaataaattatataggttacactctttatctacttattg

SEQ ID NO: 274372 - DNA, 53 bp, Artificial
  Synthetic oligonucleotide
gtgctgccaacagagtaaggggcaaccgaccgttgaccgtatccggatgtgct

SEQ ID NO: 274373 - DNA, 53 bp, Artificial
  Synthetic oligonucleotide
tacatcacgcgtagtgacgcggccagaggggaaagtatgccattgcggcgaca

SEQ ID NO: 274374 - DNA, 53 bp, Artificial
  Synthetic oligonucleotide
ctcatagacatgtaaaatggctaataaacaggcagaaaaactcataaccgcga

SEQ ID NO: 274375 - DNA, 53 bp, Artificial
  Synthetic oligonucleotide
cacagtggggatagtgacagtaccaccaagtgcagctgtggttataggaatct

SEQ ID NO: 274376 - DNA, 53 bp, Artificial
  Synthetic oligonucleotide
ctcaggtaagatattgggaagcacataacgtctcgtcaattcgtataccccat

SEQ ID NO: 274377 - DNA, 53 bp, Artificial
  Synthetic oligonucleotide
ctcagctagcttttgtttccagttcgaggttatcgtgtttaatgctgtatcct

SEQ ID NO: 274378 - DNA, 53 bp, Artificial
  Synthetic oligonucleotide
ccgttcgccaccaaatgtgttgtgggaggcgggtaatggtatgcctggcgtcc

SEQ ID NO: 274379 - DNA, 53 bp, Artificial
  Synthetic oligonucleotide
gtgcctgaaacgccctctcgacaagcgaggtgtcaggactcacgattaaggat

SEQ ID NO: 274380 - DNA, 54 bp, Artificial
  Synthetic oligonucleotide
ctatgaaagtagtacgtacagttctgagtgggggaaaatttgtaaagatctacc

SEQ ID NO: 274381 - DNA, 53 bp, Artificial
  Synthetic oligonucleotide
cacaatccactgtactgagtccgccagacgcccagggtcccaagcgtgccgtt

SEQ ID NO: 274382 - DNA, 53 bp, Artificial
  Synthetic oligonucleotide
ccgtgcttccgggcaacgaagctatgctgatcccaaccttagtcggctctggg

SEQ ID NO: 274383 - DNA, 53 bp, Artificial
  Synthetic oligonucleotide
tacaatcttagtagtggtcagagtgcgtagtaacttatgcacgtaatatgacg

SEQ ID NO: 274384 - DNA, 53 bp, Artificial
  Synthetic oligonucleotide
tactccagacgccaagcagacgaggacgtgtcaggctcccgtctccttgagca

SEQ ID NO: 274385 - DNA, 53 bp, Artificial
  Synthetic oligonucleotide
gtgcccagccaattgttggtacttcttggctagcgccgccaccttcttacgga

SEQ ID NO: 274386 - DNA, 53 bp, Artificial
  Synthetic oligonucleotide
tactccgcctaggtcgagacagagaaggcacgattccgggtcgctggaaatgc

SEQ ID NO: 274387 - DNA, 53 bp, Artificial
  Synthetic oligonucleotide
gtagtcaggttaccgatgtgtgatagtgtcaagttgcataatgccacattagt

SEQ ID NO: 274388 - DNA, 53 bp, Artificial
  Synthetic oligonucleotide
ctcgtgagcgtttaaggtgaaagcggggctaacagccagccgtagcactgcct

SEQ ID NO: 274389 - DNA, 52 bp, Artificial
  Synthetic oligonucleotide
aaaaccaggacctgcaacccacctttattagccgctttacgtaagttacaca

SEQ ID NO: 274390 - DNA, 53 bp, Artificial
  Synthetic oligonucleotide
aaaactagacgagagctagaaagctaatgtatcaaggcgcattgactcccact

SEQ ID NO: 274391 - DNA, 54 bp, Artificial
  Synthetic oligonucleotide
gtccaccagagttcttttgagaactatgggttatttaatttaaggtatagtcca

SEQ ID NO: 274392 - DNA, 53 bp, Artificial
  Synthetic oligonucleotide
cactgggaacactgcgtagtaggataagagacttatcaccagacatgagccag

SEQ ID NO: 274393 - DNA, 53 bp, Artificial
  Synthetic oligonucleotide
cctccccctcgataagtagacggcccaacacagaaccgcccgtgcagaatcag

SEQ ID NO: 274394 - DNA, 53 bp, Artificial
  Synthetic oligonucleotide
gtagggggaatggtcacaggtgggcgtgccctaatgcgaagtacgggaagtgg

SEQ ID NO: 274395 - DNA, 53 bp, Artificial
  Synthetic oligonucleotide
cacttctcctagcaacgttgtctccggccctcttatttcgtattttctgagaa

SEQ ID NO: 274396 - DNA, 53 bp, Artificial
  Synthetic oligonucleotide
gggcctctactgagctgcccgatccttagttgggttgagaggtcgggggcatc

SEQ ID NO: 274397 - DNA, 53 bp, Artificial
  Synthetic oligonucleotide
ctcgaccgaagcctgccaagcgtcgtacccgactgagaagcgagggagacact

SEQ ID NO: 274398 - DNA, 50 bp, Artificial
  Synthetic oligonucleotide
gggcaaagggcccgacccattcaatcgggtccgacggttcccaagaaggg

SEQ ID NO: 274399 - DNA, 53 bp, Artificial
  Synthetic oligonucleotide
gggatgtttttgttccggggttataataatatgagattattataagaaataat

SEQ ID NO: 274400 - DNA, 53 bp, Artificial
  Synthetic oligonucleotide
tacgcactgctaggaacctcccagatcttgctttgctcagcgcagtcacgtga

SEQ ID NO: 274401 - DNA, 53 bp, Artificial
  Synthetic oligonucleotide
aaaccaccatgttttgcactgtattcacttactacaggagtgccaaactcaga

SEQ ID NO: 274402 - DNA, 52 bp, Artificial
  Synthetic oligonucleotide
agccaataatggtttaggtagtaggtttaataaaagtgaacctagccaacga

SEQ ID NO: 274403 - DNA, 53 bp, Artificial
  Synthetic oligonucleotide
gggatcgctcgtgagcatgggctagtgggtgctgtagacacaggttgtgtgga

SEQ ID NO: 274404 - DNA, 53 bp, Artificial
  Synthetic oligonucleotide
cagacctagctccataggccaacaattgccctgattcgttgatactcaagcca

SEQ ID NO: 274405 - DNA, 53 bp, Artificial
  Synthetic oligonucleotide
cagactatcggcgttgccctttatgagacataggaatgaggacaaaggtcgct

SEQ ID NO: 274406 - DNA, 53 bp, Artificial
  Synthetic oligonucleotide
gtataacttgttaatatgtgcatcgtggtgtcgtttaaagaacctagttgggg

SEQ ID NO: 274407 - DNA, 53 bp, Artificial
  Synthetic oligonucleotide
tttccacgagcatgcgacgtagaggttccataacgaactcagactcgagcact

SEQ ID NO: 274408 - DNA, 53 bp, Artificial
  Synthetic oligonucleotide
caccgtccgttgcctcgtcgcaccaagtggtatccatctgtcaaaccgtcccg

SEQ ID NO: 274409 - DNA, 53 bp, Artificial
  Synthetic oligonucleotide
cctagcagtcagcatgaagccgagctcgccggttcgaaaccagatgcgaacgc

SEQ ID NO: 274410 - DNA, 53 bp, Artificial
  Synthetic oligonucleotide
caacaatcatcccgtttattatgccgagccacttcctctggagtaattacttt

SEQ ID NO: 274411 - DNA, 53 bp, Artificial
  Synthetic oligonucleotide
aactcggagcatgaatgtgtagccgcctggggtgagtgcaaccacgcattcca

SEQ ID NO: 274412 - DNA, 53 bp, Artificial
  Synthetic oligonucleotide
ttctctgtgcccgatctcagggctatgctcgtcacctgtggcccggggatcag

SEQ ID NO: 274413 - DNA, 60 bp, Artificial
  Synthetic oligonucleotide
agagcccataaagcctgaccatgcgtcgccgattgaagctcctcccagaattagcggtga

SEQ ID NO: 274414 - DNA, 53 bp, Artificial
  Synthetic oligonucleotide
tagacagtcgacacggcctagctgggttccttcctacacccggaacaggacca

SEQ ID NO: 274415 - DNA, 53 bp, Artificial
  Synthetic oligonucleotide
caaaaccgcatgaatggtgtagactaccgtaacaatggcggagctatgaacaa

SEQ ID NO: 274416 - DNA, 52 bp, Artificial
  Synthetic oligonucleotide
atttgtgtcccccacggcattgtcccttttcccgaaaccctcatcgctccgg

SEQ ID NO: 274417 - DNA, 52 bp, Artificial
  Synthetic oligonucleotide
gaaataccccgagactaaggtcttacgaattaagtccggatccccataacaa

SEQ ID NO: 274418 - DNA, 53 bp, Artificial
  Synthetic oligonucleotide
ggcatgactacatcatatgtatactccaggattagatgctgatactagagctt

SEQ ID NO: 274419 - DNA, 53 bp, Artificial
  Synthetic oligonucleotide
taacggaggcaagagcggtttgtgaggtttcctcgaacctagccgtcccgctc

SEQ ID NO: 274420 - DNA, 53 bp, Artificial
  Synthetic oligonucleotide
tagcatcgacggaagcagctaagctttctaagacagtggcgctcaattcagat

SEQ ID NO: 274421 - DNA, 53 bp, Artificial
  Synthetic oligonucleotide
ctaagaggcatcatggaaaggctattactaaacgtgaattatcagtgccccgg

SEQ ID NO: 274422 - DNA, 53 bp, Artificial
  Synthetic oligonucleotide
tagcctttcgtgctctccggccaacttgcaactcgagcagctcgcaaatacga

SEQ ID NO: 274423 - DNA, 53 bp, Artificial
  Synthetic oligonucleotide
taaccacaatgtggcttaccagttggagcagtaccccagtataacttgattgg

SEQ ID NO: 274424 - DNA, 55 bp, Artificial
  Synthetic oligonucleotide
taatcattctaagaatttaggtaaagatacgacttcgattttaataggtattgcg

SEQ ID NO: 274425 - DNA, 53 bp, Artificial
  Synthetic oligonucleotide
aagcgctaccgctgtcacgtgaacagtgccctttcctcggataaaacccggcg

SEQ ID NO: 274426 - DNA, 53 bp, Artificial
  Synthetic oligonucleotide
catcgagtaagtattattccaggccaacgtccttggaggtgggaggacggacg

SEQ ID NO: 274427 - DNA, 53 bp, Artificial
  Synthetic oligonucleotide
gtaagtacgctcaccaatctttcggtttggacagattcggtgcttctggtaag

SEQ ID NO: 274428 - DNA, 53 bp, Artificial
  Synthetic oligonucleotide
gaatagctggatcagctatgtcaataattattagaatagaattagccgcacca

SEQ ID NO: 274429 - DNA, 53 bp, Artificial
  Synthetic oligonucleotide
gtggtccatagtgatgagacgttggggcacaagggtcgtgagacgcgtgagga

SEQ ID NO: 274430 - DNA, 53 bp, Artificial
  Synthetic oligonucleotide
cgaatctatccttgaacaattcaatatcgatagacaacgtgccctagagagta

SEQ ID NO: 274431 - DNA, 53 bp, Artificial
  Synthetic oligonucleotide
aagggcccttgcgccgagtagcgccatttgcccacgtcacaattccatgagct

SEQ ID NO: 274432 - DNA, 53 bp, Artificial
  Synthetic oligonucleotide
caatcactggacactattacttcgaaagcgcagtgggttaacagagaccgtga

SEQ ID NO: 274433 - DNA, 53 bp, Artificial
  Synthetic oligonucleotide
cttaaggcctcaagacacgcaaggaaaacacgaggcacacgtggccggggcat

SEQ ID NO: 274434 - DNA, 53 bp, Artificial
  Synthetic oligonucleotide
cttaccactaacaatgggttagcggctttgtgtgtatgactatgtcctagtga

SEQ ID NO: 274435 - DNA, 59 bp, Artificial
  Synthetic oligonucleotide
ggttcatatactttttccctgtcaatacggccgcggatcctctagtagcgcttcatgat

SEQ ID NO: 274436 - DNA, 53 bp, Artificial
  Synthetic oligonucleotide
aacgagattgtgcagcagtcgctgattgggatcatgcctcttggggctgcccc

SEQ ID NO: 274437 - DNA, 53 bp, Artificial
  Synthetic oligonucleotide
ctatcaccactcgaatcaatcatatccctccgattgctacacaagtgcaatca

SEQ ID NO: 274438 - DNA, 52 bp, Artificial
  Synthetic oligonucleotide
ttggcttaatggtatagcgttcgttttgtaatcgaaaggtttggggttcaac

SEQ ID NO: 274439 - DNA, 53 bp, Artificial
  Synthetic oligonucleotide
ggggaaactctagatcggaaacaccagagcatgaattagaacccacagcgtct

SEQ ID NO: 274440 - DNA, 53 bp, Artificial
  Synthetic oligonucleotide
caagtgcgagggcagcagactggcaccatacgccgtgtcaaacggagtcggtg

SEQ ID NO: 274441 - DNA, 53 bp, Artificial
  Synthetic oligonucleotide
cttatttcgctaatacccctgaagtccaacttttggttagccgagatcttagc

SEQ ID NO: 274442 - DNA, 53 bp, Artificial
  Synthetic oligonucleotide
ggcgcgtaacaacgctagctagagccacaggaagacatgggaggggttgcctc

SEQ ID NO: 274443 - DNA, 53 bp, Artificial
  Synthetic oligonucleotide
caagctacgcagttctcctggctcgagaatgaatctggcccgccgcagacgtt

SEQ ID NO: 274444 - DNA, 53 bp, Artificial
  Synthetic oligonucleotide
tactgctcggcactacggccatccactcacacttcaattattttacatgacat

SEQ ID NO: 274445 - DNA, 53 bp, Artificial
  Synthetic oligonucleotide
cagtgcgggtaatggagcgagccgccctctcattagcggtacgccgaggtcac

SEQ ID NO: 274446 - DNA, 57 bp, Artificial
  Synthetic oligonucleotide
attgcccactcccaagggatcggtggtgtcgcatgggggtcccacacaatcggatct

SEQ ID NO: 274447 - DNA, 53 bp, Artificial
  Synthetic oligonucleotide
taagtcacatgtgtctttcttcagtcacgtgctactccctctcgtcacatgct

SEQ ID NO: 274448 - DNA, 53 bp, Artificial
  Synthetic oligonucleotide
ctagacccactgtattgcttacaacgtagaagtatattactggaaccgccagc

SEQ ID NO: 274449 - DNA, 53 bp, Artificial
  Synthetic oligonucleotide
ttcttgcgtgtctccggaagacccttggcgcccacccacagccctattaatcg

SEQ ID NO: 274450 - DNA, 53 bp, Artificial
  Synthetic oligonucleotide
aacggggtcaaatatgcctgtgaaacgtgtatcaggggtcacagggcggcgca

SEQ ID NO: 274451 - DNA, 53 bp, Artificial
  Synthetic oligonucleotide
ctacggctttgcaagcgtcaataactcctccgcatgacagtttagcactaaca

SEQ ID NO: 274452 - DNA, 53 bp, Artificial
  Synthetic oligonucleotide
caacccagactggtttgcactagacagttctcgtggtattgagacccaaggct

SEQ ID NO: 274453 - DNA, 53 bp, Artificial
  Synthetic oligonucleotide
aactatgttgttcctctaactgacctctcttttcacgcttctcacgttcaatt

SEQ ID NO: 274454 - DNA, 53 bp, Artificial
  Synthetic oligonucleotide
ctacgagaatatcgtagtatatccgcggtaaaggttattaccgccattagtca

SEQ ID NO: 274455 - DNA, 53 bp, Artificial
  Synthetic oligonucleotide
caacaccggagtcaaggactaagagagacgggttagtgttcgtctggcctcgc

SEQ ID NO: 274456 - DNA, 53 bp, Artificial
  Synthetic oligonucleotide
agccgctacgtcgcgtatctgccccagaactatctctcgcaatacccacaggg

SEQ ID NO: 274457 - DNA, 57 bp, Artificial
  Synthetic oligonucleotide
cagtaggtctagggttatctgtcctaatttgacgaacattagaattgccagggccta

SEQ ID NO: 274458 - DNA, 53 bp, Artificial
  Synthetic oligonucleotide
ggtgtgggactacaaccacaatgctggcatctcgtcagggacagcatgggcgt

SEQ ID NO: 274459 - DNA, 52 bp, Artificial
  Synthetic oligonucleotide
tctggtgtcctcccagtattagcccacctgggggtaatcccgtaagggccct

SEQ ID NO: 274460 - DNA, 53 bp, Artificial
  Synthetic oligonucleotide
acgccccctagcaaacgacccaccagtcccacacaaacagcgatttggccctg

SEQ ID NO: 274461 - DNA, 53 bp, Artificial
  Synthetic oligonucleotide
tgggggtaggccctggtaacggctggtccgtgctagtgggtgtcttggtatgg

SEQ ID NO: 274462 - DNA, 53 bp, Artificial
  Synthetic oligonucleotide
cgccattcgcaacttgcggctcaccccgcaaacgctagctctgcaccagagga

SEQ ID NO: 274463 - DNA, 53 bp, Artificial
  Synthetic oligonucleotide
tcctgatgcgcagagtacatccaccccgttccatcagggtacccgctgttgta

SEQ ID NO: 274464 - DNA, 53 bp, Artificial
  Synthetic oligonucleotide
acgccttattggttcaacggccattgtgcgagtgttccactggggctacgggg

SEQ ID NO: 274465 - DNA, 53 bp, Artificial
  Synthetic oligonucleotide
tgggatagcaaagtagtcgacttcgccacaaccttcatcggtgacgtattgtc

SEQ ID NO: 274466 - DNA, 53 bp, Artificial
  Synthetic oligonucleotide
tggctcgctagcttctaacgccctatcaagagtgaattcaagaggctcgttga

SEQ ID NO: 274467 - DNA, 53 bp, Artificial
  Synthetic oligonucleotide
tctgctactcagcaacctgcttggccccaacaacccgctgctaaccaatacga

SEQ ID NO: 274468 - DNA, 60 bp, Artificial
  Synthetic oligonucleotide
aagggcagactattgccagatgcaaatacaaaacagtattagggccacactggaatctaa

SEQ ID NO: 274469 - DNA, 53 bp, Artificial
  Synthetic oligonucleotide
tcgacagtggatgctgacaacggtgcctccgattttgaggcaggccagcaatt

SEQ ID NO: 274470 - DNA, 53 bp, Artificial
  Synthetic oligonucleotide
cccgacactgcccctcacaagccatatgtagccttccgctatgcaagaccgct

SEQ ID NO: 274471 - DNA, 53 bp, Artificial
  Synthetic oligonucleotide
gcatagcaggctttcccccgaaaacgtcgcagtgaacaggacatcggcgcccg

SEQ ID NO: 274472 - DNA, 53 bp, Artificial
  Synthetic oligonucleotide
agcgaagatatagctcgagacaacgaataatacaggctggtgttagatcccgt

SEQ ID NO: 274473 - DNA, 53 bp, Artificial
  Synthetic oligonucleotide
tggatgtaccagaggcttcagtacctgcagtcgaaatatgttcacttaagtca

SEQ ID NO: 274474 - DNA, 53 bp, Artificial
  Synthetic oligonucleotide
gcgaactggattcctgcctagagtggcggagccaccagcctgttgccagcaat

SEQ ID NO: 274475 - DNA, 53 bp, Artificial
  Synthetic oligonucleotide
agccatccctgcaaagctccctcgcacccgacactttgctactgcgataccac

SEQ ID NO: 274476 - DNA, 53 bp, Artificial
  Synthetic oligonucleotide
ccattactgcctacctcatatctgactacaccctcacgtattcagtgattact

SEQ ID NO: 274477 - DNA, 53 bp, Artificial
  Synthetic oligonucleotide
tggttccgcagcagtgggacgaaatgtcggaagactcactgagacggcactct

SEQ ID NO: 274478 - DNA, 53 bp, Artificial
  Synthetic oligonucleotide
tcttacattgggtccatgttacagtggcgtctcttagggcagcccaatcagcg

SEQ ID NO: 274479 - DNA, 60 bp, Artificial
  Synthetic oligonucleotide
tagttcgagttttgggaataggatctgtccattggaggtatgaatctagtgccaacagcg

SEQ ID NO: 274480 - DNA, 59 bp, Artificial
  Synthetic oligonucleotide
cgtaggaaggtgactcgatcagaccctcgctacagcatgggatgggaccctcatcgcag

SEQ ID NO: 274481 - DNA, 53 bp, Artificial
  Synthetic oligonucleotide
tctgtttggatacctagaacttttatgtacggatttctgattgcgaccgccga

SEQ ID NO: 274482 - DNA, 53 bp, Artificial
  Synthetic oligonucleotide
cgtaactcgaataggccaggcaaaaggctagattggggaagagacgtcaatta

SEQ ID NO: 274483 - DNA, 53 bp, Artificial
  Synthetic oligonucleotide
agggattaaaactagagtagcgaaacggattcgatacccgtgtagttctagta

SEQ ID NO: 274484 - DNA, 52 bp, Artificial
  Synthetic oligonucleotide
cgtaacgttacctctgtccttttccttagtttcaaggctcgggatttgacta

SEQ ID NO: 274485 - DNA, 53 bp, Artificial
  Synthetic oligonucleotide
acgaatggcgtccgattattcgtaccggcactgtaaattaacgacgtaacttc

SEQ ID NO: 274486 - DNA, 53 bp, Artificial
  Synthetic oligonucleotide
agggaactatggagtacgccattcgcaacttgcggctcaccccgcaaacgcta

SEQ ID NO: 274487 - DNA, 53 bp, Artificial
  Synthetic oligonucleotide
gtctggaggcggacctacgggtcaggctgaatcaatcatgcacgccattgcga

SEQ ID NO: 274488 - DNA, 53 bp, Artificial
  Synthetic oligonucleotide
agcccgctgtcaccccgtcctaattgggacactccgtcgtctcaacccaacta

SEQ ID NO: 274489 - DNA, 53 bp, Artificial
  Synthetic oligonucleotide
tctgtgcctcttggtcttgaacctgccgatagacgcgaggtgaacgtctccgg

SEQ ID NO: 274490 - DNA, 53 bp, Artificial
  Synthetic oligonucleotide
tcctcaggcatcgtctctcacgtgaaatctgtgggggcaccagcgtgacaggg

SEQ ID NO: 274491 - DNA, 59 bp, Artificial
  Synthetic oligonucleotide
tcgacaatgtatcgggcgggcccagtgttttcaacagtatgtcgtgctatgccgtggta

SEQ ID NO: 274492 - DNA, 53 bp, Artificial
  Synthetic oligonucleotide
acgactttctacgcgtgcccaactgtggaggagagccgtgtgggactcttgcg

SEQ ID NO: 274493 - DNA, 53 bp, Artificial
  Synthetic oligonucleotide
gatgaccagcattgttatagctatggattgccaatcgacacaactccaacgag

SEQ ID NO: 274494 - DNA, 53 bp, Artificial
  Synthetic oligonucleotide
acgaggcgtattttgtgacgcgactggggttttcgttacccggatggcataac

SEQ ID NO: 274495 - DNA, 53 bp, Artificial
  Synthetic oligonucleotide
tggtcttcacaactgctcctgactggcgatatgcatagctaagcacaacataa

SEQ ID NO: 274496 - DNA, 53 bp, Artificial
  Synthetic oligonucleotide
tcgttatctcgaaaggaacgtaagaggtataaagctggcgcgcaacaatcgag

SEQ ID NO: 274497 - DNA, 53 bp, Artificial
  Synthetic oligonucleotide
agcgtctctacccttggcagccattaccctgggcacctccggatggtaccctt

SEQ ID NO: 274498 - DNA, 52 bp, Artificial
  Synthetic oligonucleotide
aggaaccgtaagagatccaagaaacgggggcctacctcgccctctggtttgc

SEQ ID NO: 274499 - DNA, 53 bp, Artificial
  Synthetic oligonucleotide
acgtaactaatacggggtgtggtaatcaactggaagtcgtaatcacctggcgg

SEQ ID NO: 274500 - DNA, 53 bp, Artificial
  Synthetic oligonucleotide
gcggggtagtcacgcacatgtaaagccggacgatgagtctgcctgactggtcc

SEQ ID NO: 274501 - DNA, 53 bp, Artificial
  Synthetic oligonucleotide
tcggccagaactaagttcgacctcacaaacagtaacgtacctttacggctcat

SEQ ID NO: 274502 - DNA, 59 bp, Artificial
  Synthetic oligonucleotide
ccacgggagcttttcctgacatgtcgctggtacaagtgtgctgagtgggggactgtgtt

SEQ ID NO: 274503 - DNA, 53 bp, Artificial
  Synthetic oligonucleotide
tgccgatggttcgctagctggtgttcgtactgacgactggaagcgagcaacac

SEQ ID NO: 274504 - DNA, 53 bp, Artificial
  Synthetic oligonucleotide
agctaactgacaagtggggccacaactaacaattgttaaagcttccttcccgt

SEQ ID NO: 274505 - DNA, 53 bp, Artificial
  Synthetic oligonucleotide
gttcgtaaatcctgggatcgcagggagcacgggaagcccagtcactgcagcgt

SEQ ID NO: 274506 - DNA, 53 bp, Artificial
  Synthetic oligonucleotide
tgcgtggtcggagttcgtatacgttcgtaggaggcggttcagggtctcgcgct

SEQ ID NO: 274507 - DNA, 53 bp, Artificial
  Synthetic oligonucleotide
actacttccaacctactctgcttgttgatgtgaccacagacatgcgcatctca

SEQ ID NO: 274508 - DNA, 53 bp, Artificial
  Synthetic oligonucleotide
tcggttgtgcttccgttgaagggtccgctaaatggtggggccactctcacaga

SEQ ID NO: 274509 - DNA, 53 bp, Artificial
  Synthetic oligonucleotide
acgttcgtaggaggcggttcagggtctcgcgctcagactggtcatcggtctga

SEQ ID NO: 274510 - DNA, 53 bp, Artificial
  Synthetic oligonucleotide
gcgcgtgtgctattttggccccggcagtacaagcggtagtcatggtttccgcc

SEQ ID NO: 274511 - DNA, 53 bp, Artificial
  Synthetic oligonucleotide
gcaccaccactcttaaatcgtctgcacaggaaacgaataacaccgagaactac

SEQ ID NO: 274512 - DNA, 53 bp, Artificial
  Synthetic oligonucleotide
tgccggcatgctttctgcgatggacaatagaaccgaaggtgccaatgcgcacg

SEQ ID NO: 274513 - DNA, 56 bp, Artificial
  Synthetic oligonucleotide
tcgaaatggggtttaaaatctgcgaggcaccaaaggccctcagggatagggcagac

SEQ ID NO: 274514 - DNA, 53 bp, Artificial
  Synthetic oligonucleotide
gcgcctcaacggggctggcactttgttctctatccctgaacggagacgcgggt

SEQ ID NO: 274515 - DNA, 53 bp, Artificial
  Synthetic oligonucleotide
gcaccattcgaccagtatctctcgcagttggatatcatcgcatatccagcgcg

SEQ ID NO: 274516 - DNA, 53 bp, Artificial
  Synthetic oligonucleotide
tctgagataggggcaacattgcccatcctaatagatcattcgaaagtgcgcca

SEQ ID NO: 274517 - DNA, 53 bp, Artificial
  Synthetic oligonucleotide
cggtgccctttggtggagctggtccgacgtacggtaattgcacatcgcctgcc

SEQ ID NO: 274518 - DNA, 53 bp, Artificial
  Synthetic oligonucleotide
aggatatttgctgatcctgaacgtgtgtctcaaatggtcaacaacggagttcc

SEQ ID NO: 274519 - DNA, 52 bp, Artificial
  Synthetic oligonucleotide
ccccttaggttacttatctataggattcgaattacgatatgaaaccctttcg

SEQ ID NO: 274520 - DNA, 53 bp, Artificial
  Synthetic oligonucleotide
acggcagtgcactgaatgctatggggccgggtttgagtccaccgttctctcca

SEQ ID NO: 274521 - DNA, 53 bp, Artificial
  Synthetic oligonucleotide
acggccattcgtcttcacgtgaactcgatgacgttacccaatctgtatacccc

SEQ ID NO: 274522 - DNA, 52 bp, Artificial
  Synthetic oligonucleotide
acggccggttctaacaccacgccattcccgccacccgaaaatggaaaggcga

SEQ ID NO: 274523 - DNA, 53 bp, Artificial
  Synthetic oligonucleotide
gttgcgtccggtgttcgctatgcctactgagaccgctgaaagctgcgggatta

SEQ ID NO: 274524 - DNA, 59 bp, Artificial
  Synthetic oligonucleotide
tccttggagcatgcccgtggtgcgtggatgcctattaatcaagatggcgggtccatatt

SEQ ID NO: 274525 - DNA, 53 bp, Artificial
  Synthetic oligonucleotide
ccagtctaggcagagccatcccgcctagttctcaggtgggattacgcggtcct

SEQ ID NO: 274526 - DNA, 53 bp, Artificial
  Synthetic oligonucleotide
cccctgtccagcgagaggatgtgtcgtatgtgctgcgtccccaacaagggcaa

SEQ ID NO: 274527 - DNA, 53 bp, Artificial
  Synthetic oligonucleotide
agcgctaccgtcgccccaactgcctctggttacagcaacggttcttctccaat

SEQ ID NO: 274528 - DNA, 53 bp, Artificial
  Synthetic oligonucleotide
gcgagcctaagctctagttgtcaggtaatcgatcctctggttctagctagtgt

SEQ ID NO: 274529 - DNA, 53 bp, Artificial
  Synthetic oligonucleotide
tctaatagacccttcaggcgagtatttcagatgcttgtgaccatggaatagac

SEQ ID NO: 274530 - DNA, 53 bp, Artificial
  Synthetic oligonucleotide
gcaacgaaactgggccttgcgggcacgaagttctcatgtattgcagctggtcc

SEQ ID NO: 274531 - DNA, 53 bp, Artificial
  Synthetic oligonucleotide
tgctgccgatgtttgcgtgcagccagttctcggagtgtgactcgtacacgggc

SEQ ID NO: 274532 - DNA, 53 bp, Artificial
  Synthetic oligonucleotide
cgggcgaggagtagagcgtaacgtaccagctaaggggcaaagacgcgtgcttt

SEQ ID NO: 274533 - DNA, 53 bp, Artificial
  Synthetic oligonucleotide
gcaacggatgtttcttaaataaagacgtagcatctacagctcgtgacttaggt

SEQ ID NO: 274534 - DNA, 53 bp, Artificial
  Synthetic oligonucleotide
gcaacttgcggctcaccccgcaaacgctagctctgcaccagaggacggaaata

SEQ ID NO: 274535 - DNA, 55 bp, Artificial
  Synthetic oligonucleotide
acctggtaaccaatacttaggtggaaaccatcaattattcaatctattagtacta

SEQ ID NO: 274536 - DNA, 53 bp, Artificial
  Synthetic oligonucleotide
agttctcctggctcgagaatgaatctggcccgccgcagacgtttcctggcccc

SEQ ID NO: 274537 - DNA, 53 bp, Artificial
  Synthetic oligonucleotide
cggactagaccagcccagcttctacacagtgttgttcggcatctcgcggtgct

SEQ ID NO: 274538 - DNA, 53 bp, Artificial
  Synthetic oligonucleotide
cccacgtttgtttacgtggcttggcttggctccctaatgcagttcggccgagg

SEQ ID NO: 274539 - DNA, 53 bp, Artificial
  Synthetic oligonucleotide
acatccatagcggaagctaaaagtctatggagttccatgcatgccagtaatgg

SEQ ID NO: 274540 - DNA, 53 bp, Artificial
  Synthetic oligonucleotide
agtgggtagggcaaacatatgagcgggagtggtgtaccgaataattagatacg

SEQ ID NO: 274541 - DNA, 53 bp, Artificial
  Synthetic oligonucleotide
cgcttattacattctgagacagaagttgtagcctcggaagaattatcagatgc

SEQ ID NO: 274542 - DNA, 53 bp, Artificial
  Synthetic oligonucleotide
gtttcagcgtttattaatgtaagctcgtctttgtattcggttggcttcccctc

SEQ ID NO: 274543 - DNA, 53 bp, Artificial
  Synthetic oligonucleotide
tcaggagtagcagtcatggatcccttcttcctatcccacttatcacttgcttc

SEQ ID NO: 274544 - DNA, 53 bp, Artificial
  Synthetic oligonucleotide
gccctttcttcacacgtgaccctgtacgcgaccgggtcccctggaagttccac

SEQ ID NO: 274545 - DNA, 53 bp, Artificial
  Synthetic oligonucleotide
tcaggccattactattcgtcggcgtacttgctttatatttcccgaagggaggt

SEQ ID NO: 274546 - DNA, 56 bp, Artificial
  Synthetic oligonucleotide
tcccctggaagcgtaaggcggaactcccactctccattgaggcgtagagtaccacc

SEQ ID NO: 274547 - DNA, 53 bp, Artificial
  Synthetic oligonucleotide
tcagggacgaccccgtcaagtgcaatgagttggcggatggttgcataagagcc

SEQ ID NO: 274548 - DNA, 53 bp, Artificial
  Synthetic oligonucleotide
agtgagccattacacactatcagcaagatgtcacggcacaaagggtaagtaac

SEQ ID NO: 274549 - DNA, 53 bp, Artificial
  Synthetic oligonucleotide
cgctgtgaactgcccccaacgagcaagtttcagacgtccctagtccccgtctt

SEQ ID NO: 274550 - DNA, 53 bp, Artificial
  Synthetic oligonucleotide
gaggcacaaggggtacctgcacgacctgcgaagagacactgtgcgggcactac

SEQ ID NO: 274551 - DNA, 53 bp, Artificial
  Synthetic oligonucleotide
tcatcgcacatgttatgtgtgactaccggaggcaattccccgtaaggtcttct

SEQ ID NO: 274552 - DNA, 53 bp, Artificial
  Synthetic oligonucleotide
gctgtggcccaaagctggcggccggttctcatcgccatgtaaattacaccgca

SEQ ID NO: 274553 - DNA, 53 bp, Artificial
  Synthetic oligonucleotide
atagtgacgacgttttacgcgagcctttacagcaattagaggttccattgaga

SEQ ID NO: 274554 - DNA, 53 bp, Artificial
  Synthetic oligonucleotide
ataggttgacgaccgacgcttggggccatgttgttaggggctctcataccggg

SEQ ID NO: 274555 - DNA, 53 bp, Artificial
  Synthetic oligonucleotide
tgttccggttacacagcggtttcaagcaacggtgcagcaggggcaagggcata

SEQ ID NO: 274556 - DNA, 53 bp, Artificial
  Synthetic oligonucleotide
ggtcgcagacgttggcggctgcatagcctgaggtggcacaaaattccagttgg

SEQ ID NO: 274557 - DNA, 59 bp, Artificial
  Synthetic oligonucleotide
tccctgcaggcacagctaaccggagggaagacaagtcaagcggacatgcagttcccgct

SEQ ID NO: 274558 - DNA, 53 bp, Artificial
  Synthetic oligonucleotide
cgaggcagctagcgagcttccttcgctgccccttgtcctgacgtcagactgag

SEQ ID NO: 274559 - DNA, 53 bp, Artificial
  Synthetic oligonucleotide
gactgttgccccttgactttccgggcacccgtgacccattttaaagcgcaggc

SEQ ID NO: 274560 - DNA, 53 bp, Artificial
  Synthetic oligonucleotide
ccgacggctgcgtcgggacccttaccgaatcctagctccttagccaattgggt

SEQ ID NO: 274561 - DNA, 53 bp, Artificial
  Synthetic oligonucleotide
tgaattcatctaatccacgtcaagttgttttacaagtatgcagtaccggtgct

SEQ ID NO: 274562 - DNA, 53 bp, Artificial
  Synthetic oligonucleotide
gagactaggttggttgaaaatttggtaccagctgatccagctaatgccgattc

SEQ ID NO: 274563 - DNA, 53 bp, Artificial
  Synthetic oligonucleotide
gagagtggtcttctatttcgggtaccgcgtttgtggaattgctagcgatcgaa

SEQ ID NO: 274564 - DNA, 53 bp, Artificial
  Synthetic oligonucleotide
agatcgttcgcgacgcatcaatcaacaactatgaccggtttgttggtaagcac

SEQ ID NO: 274565 - DNA, 53 bp, Artificial
  Synthetic oligonucleotide
ggaagtactattcgataagcatcaaggaattggcgagaggtacgatgagtgat

SEQ ID NO: 274566 - DNA, 52 bp, Artificial
  Synthetic oligonucleotide
ggttgtcgcgctttcgtagtaatggaaggttacgaggggttagttcgtggtg

SEQ ID NO: 274567 - DNA, 53 bp, Artificial
  Synthetic oligonucleotide
ataaaagagaccgagaggctggttagcgacccggttcccggcatcacagctga

SEQ ID NO: 274568 - DNA, 57 bp, Artificial
  Synthetic oligonucleotide
agccagtgagatatcaacgcaaggccttggtgcttaggaccaccagaggggtccggg

SEQ ID NO: 274569 - DNA, 53 bp, Artificial
  Synthetic oligonucleotide
agttttgcatccttggtgaccaagcgaattgccacagcagacgcaatatcaat

SEQ ID NO: 274570 - DNA, 53 bp, Artificial
  Synthetic oligonucleotide
cccttaatggtcttgcttgtaggagaaaatcacgtttggtgaagaatcaccgc

SEQ ID NO: 274571 - DNA, 53 bp, Artificial
  Synthetic oligonucleotide
tcaaggatcttggccgttggtacaccttccgtgagaggcgttgcagaaggcta

SEQ ID NO: 274572 - DNA, 53 bp, Artificial
  Synthetic oligonucleotide
agttggtgcgacaatcacggatctgacggagtctgaacctgcgacgttgctac

SEQ ID NO: 274573 - DNA, 53 bp, Artificial
  Synthetic oligonucleotide
tcaatgaagcgtctgaaccacatgctccttctatctcctgctgcgaagagtac

SEQ ID NO: 274574 - DNA, 53 bp, Artificial
  Synthetic oligonucleotide
cgctgcgtgtaaccgacgacgatttatacaggcattcgtcacagtatagagta

SEQ ID NO: 274575 - DNA, 53 bp, Artificial
  Synthetic oligonucleotide
agccacctgtgtgcggcgttcccctcggcagtcatcgtgacctcaaagaatgg

SEQ ID NO: 274576 - DNA, 53 bp, Artificial
  Synthetic oligonucleotide
aggttattgtgtacagggagaccccaattgctctggcgagcgttgtagagaac

SEQ ID NO: 274577 - DNA, 53 bp, Artificial
  Synthetic oligonucleotide
cgctgacactccttcctacgcctgtatagtgtgccgcggaactgcactgccga

SEQ ID NO: 274578 - DNA, 53 bp, Artificial
  Synthetic oligonucleotide
accggttagggcttgtactgggtccattgtcgagaggttggtcgcggacccaa

SEQ ID NO: 274579 - DNA, 59 bp, Artificial
  Synthetic oligonucleotide
actcgagcgtgaggtgccagtgtcagacatactcgagcgtgaggtgccagtgtcagaca

SEQ ID NO: 274580 - DNA, 53 bp, Artificial
  Synthetic oligonucleotide
tcttgctctggcgataacatcgaggtccaccgtgacctcatcaagtagtaaaa

SEQ ID NO: 274581 - DNA, 53 bp, Artificial
  Synthetic oligonucleotide
agtcaagcagcccgctgtcaccccgtcctaattgggacactccgtcgtctcaa

SEQ ID NO: 274582 - DNA, 53 bp, Artificial
  Synthetic oligonucleotide
agacagaggatccgtcctactgctgggcaggtgattcgacggagcagtagcga

SEQ ID NO: 274583 - DNA, 53 bp, Artificial
  Synthetic oligonucleotide
accctgacagagcgtcaaatcatcggaaagattcataccattctatctatatg

SEQ ID NO: 274584 - DNA, 53 bp, Artificial
  Synthetic oligonucleotide
cgattttgaaccagctctctacgcggtcatccaacggatctttacgtacttcc

SEQ ID NO: 274585 - DNA, 53 bp, Artificial
  Synthetic oligonucleotide
tcattctgtggtctgccccaatgttccataaacggggtactattgacttccca

SEQ ID NO: 274586 - DNA, 53 bp, Artificial
  Synthetic oligonucleotide
tgaggctccacacacttcgtttggccctgcacctccagtggagacgcacacag

SEQ ID NO: 274587 - DNA, 53 bp, Artificial
  Synthetic oligonucleotide
tgagcatacgagaggaactatcacggttctagcaaccacggcatgtgtttgtt

SEQ ID NO: 274588 - DNA, 53 bp, Artificial
  Synthetic oligonucleotide
tgtcgaatcaatactcctgcatgtagtatcgtagccaatatgagcaggacaag

SEQ ID NO: 274589 - DNA, 53 bp, Artificial
  Synthetic oligonucleotide
tgtcgaattgggaactatgttctgagagctcgttattataaacgtcgatagac

SEQ ID NO: 274590 - DNA, 52 bp, Artificial
  Synthetic oligonucleotide
aatttactatgcagatcggtaaaaatatacatttccccgcggtttcaccccc

SEQ ID NO: 274591 - DNA, 55 bp, Artificial
  Synthetic oligonucleotide
agccaccatcggaccttacttttacgccttatcacgcctccgcggttgtgttagc

SEQ ID NO: 274592 - DNA, 53 bp, Artificial
  Synthetic oligonucleotide
gagggttgtgataagcaatctagcgccgcatagcaaaactggttatggatctt

SEQ ID NO: 274593 - DNA, 53 bp, Artificial
  Synthetic oligonucleotide
tccctgcgcgactcacccaaccctttatgagggtcgggtgatgtcgcgcaggg

SEQ ID NO: 274594 - DNA, 53 bp, Artificial
  Synthetic oligonucleotide
cgattaaatcggaaccatcttctagctctcacagtgtgtgtaactacatgact

SEQ ID NO: 274595 - DNA, 53 bp, Artificial
  Synthetic oligonucleotide
gttctcttcccaatattaacgctacaaggggtgaatggttctcctactatttt

SEQ ID NO: 274596 - DNA, 53 bp, Artificial
  Synthetic oligonucleotide
tccgcggacccgctccgtgcaataatctccgatccctcggcaatagccctact

SEQ ID NO: 274597 - DNA, 53 bp, Artificial
  Synthetic oligonucleotide
ggttactccggttaacttgcaacttgcctattacgctttgttgtctcctctaa

SEQ ID NO: 274598 - DNA, 53 bp, Artificial
  Synthetic oligonucleotide
agtcgcgcgctgcccggttgttctatctctcatggtgtgtcttgggacccggg

SEQ ID NO: 274599 - DNA, 53 bp, Artificial
  Synthetic oligonucleotide
cccgggcaggtccgatagtagctctatttcgatgcagcagacctatatcagga

SEQ ID NO: 274600 - DNA, 52 bp, Artificial
  Synthetic oligonucleotide
gtgcccgcactccctgtagtgtgtctaggtggggtcattgagccccggtagt

SEQ ID NO: 274601 - DNA, 52 bp, Artificial
  Synthetic oligonucleotide
gttctgccagtaacggaatcctagtctgtcgtggtttggtccaccaccccag

SEQ ID NO: 274602 - DNA, 55 bp, Artificial
  Synthetic oligonucleotide
cagcatttcggctacgttgctttcagggaacgtgggacttacccaatccacggaa

SEQ ID NO: 274603 - DNA, 52 bp, Artificial
  Synthetic oligonucleotide
gttcttcataatagaacggtgaaatttatcctctgtttcgtactaattactc

SEQ ID NO: 274604 - DNA, 52 bp, Artificial
  Synthetic oligonucleotide
gtctctaagggaatattgtttaatggtaaaacagttgtcttttaagcagctc

SEQ ID NO: 274605 - DNA, 52 bp, Artificial
  Synthetic oligonucleotide
gtatacttacattaaatatccccgcaaagacggatttcattcaatttctggg

SEQ ID NO: 274606 - DNA, 52 bp, Artificial
  Synthetic oligonucleotide
tcgtggatccagaaatggtgtaagctcctctatactatcattcgtgggacac

SEQ ID NO: 274607 - DNA, 52 bp, Artificial
  Synthetic oligonucleotide
ggtgaatggcggcgtcgtcttatgttctcgcaattattggtagatggtcaca

SEQ ID NO: 274608 - DNA, 52 bp, Artificial
  Synthetic oligonucleotide
tcgtctacaataagactcctttgcttcgccaattcttccctgctgtttctac

SEQ ID NO: 274609 - DNA, 52 bp, Artificial
  Synthetic oligonucleotide
ggtatgcaggacccctgaacttagtgttcaagggcagaagcgcaaagttccc

SEQ ID NO: 274610 - DNA, 52 bp, Artificial
  Synthetic oligonucleotide
tgaatttgcgttctgtggggccatcggagcctctaaacgcgcggtctctcat

SEQ ID NO: 274611 - DNA, 52 bp, Artificial
  Synthetic oligonucleotide
tgaaggatatcagaccacgggactaagtccagaatgtcagggaattcaatga

SEQ ID NO: 274612 - DNA, 52 bp, Artificial
  Synthetic oligonucleotide
tacgattacacggcccaagccgaaggtgatttgacgttccctgctggtgcca

SEQ ID NO: 274613 - DNA, 55 bp, Artificial
  Synthetic oligonucleotide
ctccgtggacatccaacccggacctagagcggaccaaatctgactccgcggggga

SEQ ID NO: 274614 - DNA, 52 bp, Artificial
  Synthetic oligonucleotide
tttggcgccgcctgagtacggatccaatgcgacaccagtaagtccactggta

SEQ ID NO: 274615 - DNA, 52 bp, Artificial
  Synthetic oligonucleotide
tgcaaggctccgtcttgagcaataccggaacgtctagaatagccactaccac

SEQ ID NO: 274616 - DNA, 52 bp, Artificial
  Synthetic oligonucleotide
taccgcaagcgcttgactacagcctggttggtggactggcaaaggagatcga

SEQ ID NO: 274617 - DNA, 52 bp, Artificial
  Synthetic oligonucleotide
tctggaaagcgcacctctgtagtgtgcaaggaggggcacgaacagtgcaacg

SEQ ID NO: 274618 - DNA, 52 bp, Artificial
  Synthetic oligonucleotide
tctcgtcacccagtagtcccacagggggatgtatgatgcatggccccacgtt

SEQ ID NO: 274619 - DNA, 52 bp, Artificial
  Synthetic oligonucleotide
tgagatataccgttggcactatgaatgcctctacctgtgataacttgaagag

SEQ ID NO: 274620 - DNA, 52 bp, Artificial
  Synthetic oligonucleotide
gtctcgctgtctttacagcggtggttaggttgcgtagtctggcctggcccga

SEQ ID NO: 274621 - DNA, 52 bp, Artificial
  Synthetic oligonucleotide
tgacttggcatggtaaaggatcccatcttgagtcatgttaccgtcataaact

SEQ ID NO: 274622 - DNA, 52 bp, Artificial
  Synthetic oligonucleotide
tcgtttcttggcgctgttaagcggttgcaagggcatccttggcttagggtga

SEQ ID NO: 274623 - DNA, 52 bp, Artificial
  Synthetic oligonucleotide
gtcgacagcatattgaacagactacacgttgaaaggttcgaattgaaagaga

SEQ ID NO: 274624 - DNA, 57 bp, Artificial
  Synthetic oligonucleotide
cagtttgtgggtccgtccccctaggctgacactcggtatctcgtaatggtactgcgc

SEQ ID NO: 274625 - DNA, 52 bp, Artificial
  Synthetic oligonucleotide
ttgtcggaagtcacaaagtcttccggtaaccgcgccccggatttagatgcgt

SEQ ID NO: 274626 - DNA, 52 bp, Artificial
  Synthetic oligonucleotide
gtctatcccgccgctctcagcgtctctacccttggcagccattaccctgggc

SEQ ID NO: 274627 - DNA, 52 bp, Artificial
  Synthetic oligonucleotide
tactcagggtccacaaagcagtaagactatcggtgtcttagcactacaaggt

SEQ ID NO: 274628 - DNA, 52 bp, Artificial
  Synthetic oligonucleotide
tctgtttatgaagttaatcataaccttaaagcacaaacttaaaacaacgatg

SEQ ID NO: 274629 - DNA, 52 bp, Artificial
  Synthetic oligonucleotide
tccattacgtgcacattcactacggcattcccgtgaagagagcagggggcgg

SEQ ID NO: 274630 - DNA, 52 bp, Artificial
  Synthetic oligonucleotide
gtcacaacaccatgtgctgaacggttctaataccaacgattgtatgctagat

SEQ ID NO: 274631 - DNA, 52 bp, Artificial
  Synthetic oligonucleotide
tagtggctggctacagtaccacagtagattctgcccaatacgccgagcacac

SEQ ID NO: 274632 - DNA, 52 bp, Artificial
  Synthetic oligonucleotide
gtgaccttgtgacctctagcccactcattctggatcgtaccatatgtcgaga

SEQ ID NO: 274633 - DNA, 52 bp, Artificial
  Synthetic oligonucleotide
gtcaattaatatagataaatccgttattaaacattctaaagaaggagttagt

SEQ ID NO: 274634 - DNA, 52 bp, Artificial
  Synthetic oligonucleotide
taaaccatgggactgcaagcactattgcctcggtgccgtcaccccttggagc

SEQ ID NO: 274635 - DNA, 55 bp, Artificial
  Synthetic oligonucleotide
ctcgaaaacccggtgtgggccactttccagcaaagcgcctcttataacaagcacc

SEQ ID NO: 274636 - DNA, 52 bp, Artificial
  Synthetic oligonucleotide
taaacctagccgagcactgataggaagggccgtgtcaatacgataacgcatt

SEQ ID NO: 274637 - DNA, 52 bp, Artificial
  Synthetic oligonucleotide
tccctctccaaaccaacacagtatgaatctgaacacaagtgttctttactcc

SEQ ID NO: 274638 - DNA, 52 bp, Artificial
  Synthetic oligonucleotide
ttcaaagggaaccagctgattgtggactatgccaggcctgcgtggtcgcagg

SEQ ID NO: 274639 - DNA, 52 bp, Artificial
  Synthetic oligonucleotide
tgtaaatctggtagaagaattcaagtatttacagatggtttatgatatgagt

SEQ ID NO: 274640 - DNA, 52 bp, Artificial
  Synthetic oligonucleotide
ttccaaaccctgtggcaatctcatctagtataagtgggatatggtaccggtt

SEQ ID NO: 274641 - DNA, 52 bp, Artificial
  Synthetic oligonucleotide
tggttggctagtcaaaagggtggggcgggaggaaggcaagccaagagcaaga

SEQ ID NO: 274642 - DNA, 52 bp, Artificial
  Synthetic oligonucleotide
gtttaacactttcaacgggccagcgtcccggtccaagagggacagcccagac

SEQ ID NO: 274643 - DNA, 52 bp, Artificial
  Synthetic oligonucleotide
ttccccatggggaccatgtctcttggtagtactgaaattcacgttcaatacg

SEQ ID NO: 274644 - DNA, 52 bp, Artificial
  Synthetic oligonucleotide
ggttacactatgaaggctaacgttaatcattaaggcttaaaggatccgtaga

SEQ ID NO: 274645 - DNA, 52 bp, Artificial
  Synthetic oligonucleotide
ttcctgacatagttcacactgtatcatagtcccaatatcccctccacgacaa

SEQ ID NO: 274646 - DNA, 59 bp, Artificial
  Synthetic oligonucleotide
cagctagtaaaggtaaatgtaccgtagcagcttgttacaaccatatatgctgggcacat

SEQ ID NO: 274647 - DNA, 52 bp, Artificial
  Synthetic oligonucleotide
taggcgctcttgcgggaagagttgggaatgtgtgcccctaccaaacgactct

SEQ ID NO: 274648 - DNA, 52 bp, Artificial
  Synthetic oligonucleotide
ttcgacaaacaggtaggggtgtagaatcaaccaaggcgcttttaatttcgtt

SEQ ID NO: 274649 - DNA, 52 bp, Artificial
  Synthetic oligonucleotide
tatggtgacaacagttatgcatctggtttgtggggtactgatgacgttcgtc

SEQ ID NO: 274650 - DNA, 52 bp, Artificial
  Synthetic oligonucleotide
gtgtgcgtctccactggaggtgcagggccaaacgacgtgtgtggagcctcag

SEQ ID NO: 274651 - DNA, 52 bp, Artificial
  Synthetic oligonucleotide
gtttcccattagattgtgtggaataatactcgactactccggaccaagtgga

SEQ ID NO: 274652 - DNA, 52 bp, Artificial
  Synthetic oligonucleotide
ttaacaaacaacgtcttgagtagccctagagttcagcaatagtgcaacgatc

SEQ ID NO: 274653 - DNA, 52 bp, Artificial
  Synthetic oligonucleotide
tcaccataattggttgccttacacaattctcgacaaatagcaacctgtgccg

SEQ ID NO: 274654 - DNA, 52 bp, Artificial
  Synthetic oligonucleotide
tatcggctcggagacttcggtggactcgcgtataaactccggtactacttca

SEQ ID NO: 274655 - DNA, 52 bp, Artificial
  Synthetic oligonucleotide
tgtgcggcgttcccctcggcagtcatcgtgacctcaaagaatggggctgcac

SEQ ID NO: 274656 - DNA, 52 bp, Artificial
  Synthetic oligonucleotide
tcagctgtcacgtactggtgcgagtgtcagtggttagcgctatacccgggga

SEQ ID NO: 274657 - DNA, 59 bp, Artificial
  Synthetic oligonucleotide
gcgtgttccgttgaggagaccgcacctaagagaaagcacgtacgcgcatgcatagtgta

SEQ ID NO: 274658 - DNA, 52 bp, Artificial
  Synthetic oligonucleotide
tgtgataaaaccggtcgcagacgttggcggctgcatagcctgaggtggcaca

SEQ ID NO: 274659 - DNA, 52 bp, Artificial
  Synthetic oligonucleotide
tcagggctggttagcggctgcttgtcccgtcccgactaataagtacgggggc

SEQ ID NO: 274660 - DNA, 52 bp, Artificial
  Synthetic oligonucleotide
gggtattttcgcgcatgcagtaagcgcagaaagtgagcctagccgcgccaca

SEQ ID NO: 274661 - DNA, 52 bp, Artificial
  Synthetic oligonucleotide
taaacaacaaccacacaccagcccgtcctctagagggcacagtcgcatgcga

SEQ ID NO: 274662 - DNA, 52 bp, Artificial
  Synthetic oligonucleotide
ttactgcggcatgtccgcgagggaaggggctggtttctgcctcgagcatagt

SEQ ID NO: 274663 - DNA, 52 bp, Artificial
  Synthetic oligonucleotide
gtgacctgctaagtaatcatccagacaactccaagtccaacgctgtgacttg

SEQ ID NO: 274664 - DNA, 52 bp, Artificial
  Synthetic oligonucleotide
ggttcgtacataagcccactacgcgtacctataacacctaacagtggacctg

SEQ ID NO: 274665 - DNA, 52 bp, Artificial
  Synthetic oligonucleotide
tcatgaaacgggctctcggctcgcgctgtcctccccataccgaggggacaat

SEQ ID NO: 274666 - DNA, 52 bp, Artificial
  Synthetic oligonucleotide
tatacatactcggactcacatgattaccgtcactgctcacatctcgcgtttt

SEQ ID NO: 274667 - DNA, 52 bp, Artificial
  Synthetic oligonucleotide
tgtcctactctgacaacgagcgtctaaacatgattaagaacggtttcgaagc

SEQ ID NO: 274668 - DNA, 59 bp, Artificial
  Synthetic oligonucleotide
agcagcgcctcaatcaacccaagcagattttccaaccgctgctaaaaacaccccagcta

SEQ ID NO: 274669 - DNA, 52 bp, Artificial
  Synthetic oligonucleotide
tcgcaccaggatgtagccgcgaaatggtacccgcaagttctagagcaggtgc

SEQ ID NO: 274670 - DNA, 52 bp, Artificial
  Synthetic oligonucleotide
tgctggctgagtcgtctgccctctcgcactatcccttgtgttctcccgggta

SEQ ID NO: 274671 - DNA, 52 bp, Artificial
  Synthetic oligonucleotide
tagaagcctacagatatgtccaaaagtacgaagttttggtgggcctgatatt

SEQ ID NO: 274672 - DNA, 52 bp, Artificial
  Synthetic oligonucleotide
tagaacatacggaccgcgccagcaactaggcttcgactttgcagttctagtg

SEQ ID NO: 274673 - DNA, 52 bp, Artificial
  Synthetic oligonucleotide
tacttttcacgtgggagctgcaaaataacatcgcatagatcatgtttaggag

SEQ ID NO: 274674 - DNA, 52 bp, Artificial
  Synthetic oligonucleotide
gtccccaagagcacgtatcctggaaactgagagcttcgatcagacatttggt

SEQ ID NO: 274675 - DNA, 52 bp, Artificial
  Synthetic oligonucleotide
tcggatttcgtggagactcggacataccgggaaacgttcggacaggggcgga

SEQ ID NO: 274676 - DNA, 52 bp, Artificial
  Synthetic oligonucleotide
tactgtccttctctatcggcggagcctgcaagctgctctcaaggggtccccc

SEQ ID NO: 274677 - DNA, 52 bp, Artificial
  Synthetic oligonucleotide
tcggccgctggtttaattgaccaggctgctgagaatagaacccagtttgctg

SEQ ID NO: 274678 - DNA, 52 bp, Artificial
  Synthetic oligonucleotide
tcgggccacagccctaactgccaagccctacctttgtggatgcgtttctaga

SEQ ID NO: 274679 - DNA, 55 bp, Artificial
  Synthetic oligonucleotide
acttgggcacactacctagaatacgttgctattacccgccagagggcccgacctc

SEQ ID NO: 274680 - DNA, 52 bp, Artificial
  Synthetic oligonucleotide
taatctatgtacgtacatgggtatactttacgtgatggttgttcgtagcgca

SEQ ID NO: 274681 - DNA, 52 bp, Artificial
  Synthetic oligonucleotide
tgcggactcacttggtggaccccctccgtaattctagtgggggaggccctaa

SEQ ID NO: 274682 - DNA, 52 bp, Artificial
  Synthetic oligonucleotide
ggtagcgcttgtgtgaagaagttggcacgagtgcaagagagccactaagttc

SEQ ID NO: 274683 - DNA, 52 bp, Artificial
  Synthetic oligonucleotide
ggtataacggcgtcttatgtgaatattcgttgtgggacgatacggaggatta

SEQ ID NO: 274684 - DNA, 52 bp, Artificial
  Synthetic oligonucleotide
ttgggatgtctgacgcttccactgggtcacctacgatgctatccgcctgcct

SEQ ID NO: 274685 - DNA, 52 bp, Artificial
  Synthetic oligonucleotide
gtccgcgagggaaggggctggtttctgcctcgagcatagtagtgatgcgagc

SEQ ID NO: 274686 - DNA, 52 bp, Artificial
  Synthetic oligonucleotide
tcgtatggggccaatttacgcaactccgaaagtattccaagagccatagtct

SEQ ID NO: 274687 - DNA, 52 bp, Artificial
  Synthetic oligonucleotide
taggcgcgggttttcttttacttgaggccagtcttgaatctctgaaccgaga

SEQ ID NO: 274688 - DNA, 52 bp, Artificial
  Synthetic oligonucleotide
tggtgagttcctgataagccttgttcacaaacctaatgtctctatccgaggt

SEQ ID NO: 274689 - DNA, 52 bp, Artificial
  Synthetic oligonucleotide
taggacaagccgcccccaaggtccaggtgaagtggatagtacactcgctcct

SEQ ID NO: 274690 - DNA, 59 bp, Artificial
  Synthetic oligonucleotide
tgggctttgggagggccgagggagggatgacacactcttagtacttgtcaagctctggc

SEQ ID NO: 274691 - DNA, 52 bp, Artificial
  Synthetic oligonucleotide
tcctctgcggttatgatgtcctctctattactcaagattctctcgaggcagt

SEQ ID NO: 274692 - DNA, 52 bp, Artificial
  Synthetic oligonucleotide
ggtactctccttcacctgagtaacgaagctgagctggttagtggtcacaacc

SEQ ID NO: 274693 - DNA, 52 bp, Artificial
  Synthetic oligonucleotide
tagcacagattcgttgcgtactagtgaatgcctctaaaagaacgtcattaga

SEQ ID NO: 274694 - DNA, 52 bp, Artificial
  Synthetic oligonucleotide
taacggcaagcgcttccgcaggatctgtttcagaccctacgggctttcggtt

SEQ ID NO: 274695 - DNA, 52 bp, Artificial
  Synthetic oligonucleotide
tggcgccctaggcgtcagcagcaatgcctcaagtaacgcagcctcaatgaca

SEQ ID NO: 274696 - DNA, 52 bp, Artificial
  Synthetic oligonucleotide
tcgatagggtttggtacatcggccacaggcgctgggagtgatggatctgcta

SEQ ID NO: 274697 - DNA, 48 bp, Artificial
  Synthetic oligonucleotide
taacgggccccccccctgtaggtcgtggttttaatagtaatatagggg

SEQ ID NO: 274698 - DNA, 52 bp, Artificial
  Synthetic oligonucleotide
ttctagcacttcctgggtagaggtcaagtcgatagcaagtcctaatggtgtg

SEQ ID NO: 274699 - DNA, 52 bp, Artificial
  Synthetic oligonucleotide
tggatgagcggttgggactcggtatggtaccgcccacggatacggttgtgct

SEQ ID NO: 274700 - DNA, 52 bp, Artificial
  Synthetic oligonucleotide
tggatcgttctcctgatgtcaaattgccctgagcaatactaaacggcttctt

SEQ ID NO: 274701 - DNA, 54 bp, Artificial
  Synthetic oligonucleotide
ggacttgtttccgtaggaaatacttgttcttttgtagacgttccatgatgagtt

SEQ ID NO: 274702 - DNA, 57 bp, Artificial
  Synthetic oligonucleotide
ctaaacgagagcaccccgaattcgtgtggctccttcactggggagagaacgagcaac

SEQ ID NO: 274703 - DNA, 52 bp, Artificial
  Synthetic oligonucleotide
gtgcagggccaaacgacgtgtgtggagcctcaggcaacttgtagtcacgcgt

SEQ ID NO: 274704 - DNA, 52 bp, Artificial
  Synthetic oligonucleotide
ggggcggacactcacctctcccgatgtatattaattaggtgccttgttagtt

SEQ ID NO: 274705 - DNA, 49 bp, Artificial
  Synthetic oligonucleotide
tggaggggtaaatggtgtattttacctaaggggggaaagcccggaataa

SEQ ID NO: 274706 - DNA, 52 bp, Artificial
  Synthetic oligonucleotide
tcgattcgaacaactcaggagccatgtatctttcgctaccaacatttctgtc

SEQ ID NO: 274707 - DNA, 52 bp, Artificial
  Synthetic oligonucleotide
gtgcagtatccgagaaagatacccgcggtaatcataagttggtaacatgaca

SEQ ID NO: 274708 - DNA, 52 bp, Artificial
  Synthetic oligonucleotide
gaacgtcccctcggggaacatcctcacccagtgcgagagcccggagtggtgt

SEQ ID NO: 274709 - DNA, 52 bp, Artificial
  Synthetic oligonucleotide
attatcaagacttcatccccatccaatgacactatcctgccagacaaacctc

SEQ ID NO: 274710 - DNA, 52 bp, Artificial
  Synthetic oligonucleotide
cttcgtgccctcttgtaccacttcagaattctcatcatcgtaatgtagtttt

SEQ ID NO: 274711 - DNA, 52 bp, Artificial
  Synthetic oligonucleotide
cttattctacctacttcacgttaagtgtcctcatcaattgaagtgccttacc

SEQ ID NO: 274712 - DNA, 52 bp, Artificial
  Synthetic oligonucleotide
aacttcgggtttagccgccgaatgccacatgtgcgggtaactcagccacagc

SEQ ID NO: 274713 - DNA, 55 bp, Artificial
  Synthetic oligonucleotide
agatccactcctcgtcccgagggagttaacaccaaccctggtcgtgtcgcgctta

SEQ ID NO: 274714 - DNA, 52 bp, Artificial
  Synthetic oligonucleotide
ctgttcggggaccccgtgccttgttgcctgggtaccgatctcggttaccacg

SEQ ID NO: 274715 - DNA, 52 bp, Artificial
  Synthetic oligonucleotide
attttaagctcgccaggacgcaagagtcccgctgtgtgcagccctttccact

SEQ ID NO: 274716 - DNA, 52 bp, Artificial
  Synthetic oligonucleotide
caaacacctccggaggccaccctaagagaacgcatagctatgactttcccct

SEQ ID NO: 274717 - DNA, 52 bp, Artificial
  Synthetic oligonucleotide
caacgcgcattgggaggatctaaggaaaagggttattgagcacaacttgagg

SEQ ID NO: 274718 - DNA, 52 bp, Artificial
  Synthetic oligonucleotide
ctctcctaaaatggaaatgcactacccggactctttctgccgcccaaatgct

SEQ ID NO: 274719 - DNA, 52 bp, Artificial
  Synthetic oligonucleotide
ctcggtgaaacacaccaattgcgccatccgtaccgcctccacacggcagaca

SEQ ID NO: 274720 - DNA, 52 bp, Artificial
  Synthetic oligonucleotide
ctcgaccgctgcctccccctacacaactgcgactgcctctccagttgcaagt

SEQ ID NO: 274721 - DNA, 52 bp, Artificial
  Synthetic oligonucleotide
cacaaccggtgcaaaccacgtgcctgacgactctttaggcgtgtgctagggg

SEQ ID NO: 274722 - DNA, 52 bp, Artificial
  Synthetic oligonucleotide
ctccctggagaccagtccactttgtatacatcgccctgggccgggggaaact

SEQ ID NO: 274723 - DNA, 52 bp, Artificial
  Synthetic oligonucleotide
ctcccgtcacacattcgatgctgagaaccatgctagtttggtgaacgtctcc

SEQ ID NO: 274724 - DNA, 59 bp, Artificial
  Synthetic oligonucleotide
cccagcatagcatgatgttccccatcagtgaccaacaggagccgcaaacatccgcgtct

SEQ ID NO: 274725 - DNA, 52 bp, Artificial
  Synthetic oligonucleotide
ctcccctgtacgtctgtctctgcactccgtgtgcatgagtgggctgaccgta

SEQ ID NO: 274726 - DNA, 52 bp, Artificial
  Synthetic oligonucleotide
ctcccagtctcgatctttatgggcctcggtaacaaaggagagataatcagga

SEQ ID NO: 274727 - DNA, 52 bp, Artificial
  Synthetic oligonucleotide
ctccactggaggtgcagggccaaacgacgtgtgtggagcctcaggcaacttg

SEQ ID NO: 274728 - DNA, 52 bp, Artificial
  Synthetic oligonucleotide
ctcaatcatataatcccttcactccggaatggacaggtaacttaaccaacgg

SEQ ID NO: 274729 - DNA, 52 bp, Artificial
  Synthetic oligonucleotide
cacacgtgaccctgtacgcgaccgggtcccctggaagttccacggcgactcc

SEQ ID NO: 274730 - DNA, 52 bp, Artificial
  Synthetic oligonucleotide
ctatatgtcagttgacccagttgagagagttattcacgaaggtattctaacc

SEQ ID NO: 274731 - DNA, 52 bp, Artificial
  Synthetic oligonucleotide
ctagtctattgaagctccgaagaatggcgtttacaagaccatagcttgtatg

SEQ ID NO: 274732 - DNA, 52 bp, Artificial
  Synthetic oligonucleotide
caccaatccactatataagtttagagcacctacaattgatgggtccactttc

SEQ ID NO: 274733 - DNA, 52 bp, Artificial
  Synthetic oligonucleotide
caccacaagttagaacgcacttcacgggcgagttctgagctaccggttacac

SEQ ID NO: 274734 - DNA, 52 bp, Artificial
  Synthetic oligonucleotide
caccgaaccctctctggcactactttcgggtccggaagcgacttctgggtga

SEQ ID NO: 274735 - DNA, 58 bp, Artificial
  Synthetic oligonucleotide
acgagctcagccaaaagtctccgcctctctgcgagacacctttgtacgggtcctacac

SEQ ID NO: 274736 - DNA, 52 bp, Artificial
  Synthetic oligonucleotide
ctaatttatggaggatctattagattagctgttcctataatgtttgctattg

SEQ ID NO: 274737 - DNA, 52 bp, Artificial
  Synthetic oligonucleotide
cacggactctccgcccagtcaatccgcacctcatctccatctccgaacggag

SEQ ID NO: 274738 - DNA, 52 bp, Artificial
  Synthetic oligonucleotide
cgttctcacattagacatcatgctcgcctgttgctgggggcctagggccgga

SEQ ID NO: 274739 - DNA, 52 bp, Artificial
  Synthetic oligonucleotide
cgttcctagaccgtgcaactccattggatgggaacatcatctactagacgac

SEQ ID NO: 274740 - DNA, 52 bp, Artificial
  Synthetic oligonucleotide
acgtccgtggtggcagaactcttgttcgtgtgcatgggcgagcgcgaaacta

SEQ ID NO: 274741 - DNA, 52 bp, Artificial
  Synthetic oligonucleotide
cgttaccaatcgagacggtgtaaatatcgtcccaagaaccgtaagatgaaac

SEQ ID NO: 274742 - DNA, 52 bp, Artificial
  Synthetic oligonucleotide
cactttgacaacgatgaaactgaagcccacagatccggcagtggggcccgag

SEQ ID NO: 274743 - DNA, 52 bp, Artificial
  Synthetic oligonucleotide
gcagctctgtattcgggtccaacagatgcaaacgaactctcaccgcccggga

SEQ ID NO: 274744 - DNA, 52 bp, Artificial
  Synthetic oligonucleotide
gcagcggcaggggagggtggttacccgggatgttccccagatattacatccc

SEQ ID NO: 274745 - DNA, 52 bp, Artificial
  Synthetic oligonucleotide
gcagacatcgatgtgaggggtgaaagcctcttggttaccgctgggtcatctc

SEQ ID NO: 274746 - DNA, 53 bp, Artificial
  Synthetic oligonucleotide
agtgggtaaaacggttggtgtcctagggatgggtggtataggccgtgcagtgg

SEQ ID NO: 274747 - DNA, 52 bp, Artificial
  Synthetic oligonucleotide
agcaaatgcggcagtggaggtttcggtgccagatattgccgacgttcccaga

SEQ ID NO: 274748 - DNA, 52 bp, Artificial
  Synthetic oligonucleotide
agcaaagaccatacagcccatgaagacgtaaccgtagtagaagttaatagca

SEQ ID NO: 274749 - DNA, 52 bp, Artificial
  Synthetic oligonucleotide
atatagtttgtcttctagttctttggtccaaagggctttaccaccgaaggag

SEQ ID NO: 274750 - DNA, 52 bp, Artificial
  Synthetic oligonucleotide
gattcgtatatcccgttagtgatagagtaggacgcaaatctactatccaaca

SEQ ID NO: 274751 - DNA, 52 bp, Artificial
  Synthetic oligonucleotide
agatccgcggttctcctcttgcggccttgacacgctaggcgtggtgttctgg

SEQ ID NO: 274752 - DNA, 52 bp, Artificial
  Synthetic oligonucleotide
gatgcaccttcgggcgctagtatgggctcaacgggcggtcctacgggagcca

SEQ ID NO: 274753 - DNA, 52 bp, Artificial
  Synthetic oligonucleotide
atccatcctttcaacgggacttgcttgatgtataccaaatgtcgtatgagta

SEQ ID NO: 274754 - DNA, 52 bp, Artificial
  Synthetic oligonucleotide
atcccagctcgtcgccgctcacaaactctgagtctccgatgccaacgcatgt

SEQ ID NO: 274755 - DNA, 52 bp, Artificial
  Synthetic oligonucleotide
atccttcgaattcgaaccacgccgctgagcaggggacctcttgacgcccgac

SEQ ID NO: 274756 - DNA, 52 bp, Artificial
  Synthetic oligonucleotide
atcggtagccgcccggttttccattccgattacggcctgactcagtcgcgcc

SEQ ID NO: 274757 - DNA, 55 bp, Artificial
  Synthetic oligonucleotide
ccccactaccgcctgccaaagagccctcccgcacacaaggtcgtccctcagccgt

SEQ ID NO: 274758 - DNA, 52 bp, Artificial
  Synthetic oligonucleotide
agagtcgatcctcctcgtcagttgcagaacactgttcccgccgcggcagtcc

SEQ ID NO: 274759 - DNA, 52 bp, Artificial
  Synthetic oligonucleotide
agagggcatcgctcggctcattttcgcgtgggtcatactagagcggctagct

SEQ ID NO: 274760 - DNA, 52 bp, Artificial
  Synthetic oligonucleotide
atgagccctacattcgaattaggtggagtatgacctccagtaggtattgaag

SEQ ID NO: 274761 - DNA, 52 bp, Artificial
  Synthetic oligonucleotide
gaacttcaaacgatgcgattgtgtctccctgggtcgtaagtccctacacatt

SEQ ID NO: 274762 - DNA, 52 bp, Artificial
  Synthetic oligonucleotide
gaagctaatatagtatggagtaaggtacctcagccagtacgaataaccacat

SEQ ID NO: 274763 - DNA, 52 bp, Artificial
  Synthetic oligonucleotide
atgtccctcccaccagaaggcgtctttctgtccctacacggggcggagaatt

SEQ ID NO: 274764 - DNA, 52 bp, Artificial
  Synthetic oligonucleotide
agaagccgcggaacacttgctcaccgcactaagcatgcatgatgtcgaggga

SEQ ID NO: 274765 - DNA, 52 bp, Artificial
  Synthetic oligonucleotide
gaccctcgaacgcacactgaccgttgcggcaacagacaaaaacacgcaggga

SEQ ID NO: 274766 - DNA, 52 bp, Artificial
  Synthetic oligonucleotide
atggcgctcgtccatgggttcacgctggcaaggtagacatcgccttaccttg

SEQ ID NO: 274767 - DNA, 52 bp, Artificial
  Synthetic oligonucleotide
atgctgtgttccacgccatcactcagtctgacgctattgcacgcgctgttat

SEQ ID NO: 274768 - DNA, 56 bp, Artificial
  Synthetic oligonucleotide
gaccgtaggcccaacggtgaaacaatacgcggagaacgcttagccgctaggcagaa

SEQ ID NO: 274769 - DNA, 52 bp, Artificial
  Synthetic oligonucleotide
atgcgtctccagcttgttcactttcgaggacaaccgcaggaacgcgtgcgag

SEQ ID NO: 274770 - DNA, 52 bp, Artificial
  Synthetic oligonucleotide
gacgggggagcctggggctgctaacgggtcaccttcgttgatgcttgcgggt

SEQ ID NO: 274771 - DNA, 52 bp, Artificial
  Synthetic oligonucleotide
atgcgcaatcttgagtggaagagttggcgagatacccgccagcgaccgccat

SEQ ID NO: 274772 - DNA, 52 bp, Artificial
  Synthetic oligonucleotide
gactgcgccctacgtagaatcacgtacacttaccctaaatatttgaggagca

SEQ ID NO: 274773 - DNA, 52 bp, Artificial
  Synthetic oligonucleotide
agacttctgtaaatcgaatgtagtgttagcaagacagatagtacccgtgttg

SEQ ID NO: 274774 - DNA, 52 bp, Artificial
  Synthetic oligonucleotide
atgcctggccaaccatcttgcgggattttgcaagtgcctcggcggtatttgg

SEQ ID NO: 274775 - DNA, 52 bp, Artificial
  Synthetic oligonucleotide
gagcaggtgacttggtgctctaaagggcggaacttcggaaggggagggccat

SEQ ID NO: 274776 - DNA, 52 bp, Artificial
  Synthetic oligonucleotide
aacggaccatatacaacgtaagtatgtccagtgatccaaccgatatcaccag

SEQ ID NO: 274777 - DNA, 52 bp, Artificial
  Synthetic oligonucleotide
aacgctcttacatatatactggagcttagtttgactattgttggccgtgaag

SEQ ID NO: 274778 - DNA, 52 bp, Artificial
  Synthetic oligonucleotide
cgagaggactgttgcaacgtcattatcaacagagactgccaacaactgagag

SEQ ID NO: 274779 - DNA, 59 bp, Artificial
  Synthetic oligonucleotide
gcttaatctggtaaagcatctcactgttaatgagactactgtcggttcaaatccgtcta

SEQ ID NO: 274780 - DNA, 52 bp, Artificial
  Synthetic oligonucleotide
aatgcgagaggctgtccgctcatgctccgcggaagaaggatgtgtcccccat

SEQ ID NO: 274781 - DNA, 52 bp, Artificial
  Synthetic oligonucleotide
cccagagccctcccccattggccggtgaacctacagctcctactcagaatga

SEQ ID NO: 274782 - DNA, 52 bp, Artificial
  Synthetic oligonucleotide
ccccacgggactcccccaaccgaaacgtgttaccccgcgagaacagatgcaa

SEQ ID NO: 274783 - DNA, 52 bp, Artificial
  Synthetic oligonucleotide
cgaagatcgcgttaagctcgcatcgcgctaagctcgcaccgcgttaaacggc

SEQ ID NO: 274784 - DNA, 52 bp, Artificial
  Synthetic oligonucleotide
cgaactagcttgatcattccatgtctcaactctctaaaagacgacctcgaag

SEQ ID NO: 274785 - DNA, 52 bp, Artificial
  Synthetic oligonucleotide
accgaccgctagaaacaacacaactaagggatctactcttagtcccgtagcc

SEQ ID NO: 274786 - DNA, 52 bp, Artificial
  Synthetic oligonucleotide
aattgtatgaatcgaaataagtacgctagccaaggcagtaaggcctaatgcc

SEQ ID NO: 274787 - DNA, 52 bp, Artificial
  Synthetic oligonucleotide
cctgcttagcgaacacacccactccgcctaaacccgacaccttgacctcgca

SEQ ID NO: 274788 - DNA, 52 bp, Artificial
  Synthetic oligonucleotide
cccgggatccacttgtcatgcggtgagaatcgtatattgcgtataatccgtg

SEQ ID NO: 274789 - DNA, 52 bp, Artificial
  Synthetic oligonucleotide
accatggtgagagcacccatacattccgcatctgcctcaagttactaatttt

SEQ ID NO: 274790 - DNA, 56 bp, Artificial
  Synthetic oligonucleotide
cgccgactgtgggggtacgatggttgagagctttacggttccaaggagcgaagaca

SEQ ID NO: 274791 - DNA, 52 bp, Artificial
  Synthetic oligonucleotide
cctcggcggctccccttgccaagctgtcggttgttactctagagacacggct

SEQ ID NO: 274792 - DNA, 50 bp, Artificial
  Synthetic oligonucleotide
accaggagagaagtccgcggggggacgtcccttaaagggtgtggtaaata

SEQ ID NO: 274793 - DNA, 52 bp, Artificial
  Synthetic oligonucleotide
accagactggtcagatacacaaacgtttacacgcccacattgctggctactg

SEQ ID NO: 274794 - DNA, 52 bp, Artificial
  Synthetic oligonucleotide
cctaacgccactactccaaatgctacgcagccaaatgctacgcagccaaata

SEQ ID NO: 274795 - DNA, 52 bp, Artificial
  Synthetic oligonucleotide
ccgttgagacttttgtctggactggcactttcgtgattgtgcgaatacgaag

SEQ ID NO: 274796 - DNA, 52 bp, Artificial
  Synthetic oligonucleotide
ccgttctcgtgcgtgctcaattgcacgttcaggttctccgcgccattgtgct

SEQ ID NO: 274797 - DNA, 52 bp, Artificial
  Synthetic oligonucleotide
ccgtgatttcgggtccccaacgggtctctcgcaaagtgcccccgtgtaatct

SEQ ID NO: 274798 - DNA, 52 bp, Artificial
  Synthetic oligonucleotide
cccttgccaagctgtcggttgttactctagagacacggctgtgcggcccctc

SEQ ID NO: 274799 - DNA, 52 bp, Artificial
  Synthetic oligonucleotide
acaatccggtccattgaatcccatttcaatcaatggttccattacccatacg

SEQ ID NO: 274800 - DNA, 52 bp, Artificial
  Synthetic oligonucleotide
acacaaatcgaagactggaccagtgcgactcaagactacaattttcgcatac

SEQ ID NO: 274801 - DNA, 59 bp, Artificial
  Synthetic oligonucleotide
atgagagaaggtggagtctagcgagacggcggagttctgtcttgacgacccatacggcg

SEQ ID NO: 274802 - DNA, 52 bp, Artificial
  Synthetic oligonucleotide
ccgggagagctattctattagcaggtggtccatctactggtaagaccgcttt

SEQ ID NO: 274803 - DNA, 52 bp, Artificial
  Synthetic oligonucleotide
ccgatatttcgaaaagtgctccagtacgaaccattgtcagatggtgccacta

SEQ ID NO: 274804 - DNA, 52 bp, Artificial
  Synthetic oligonucleotide
acagttggcgatgggggagtcacctgggactggcttgaggtcttgaccgggg

SEQ ID NO: 274805 - DNA, 52 bp, Artificial
  Synthetic oligonucleotide
ccggattacgtggttcatggtgcacaccaggataaggcaaatgatgataacg

SEQ ID NO: 274806 - DNA, 52 bp, Artificial
  Synthetic oligonucleotide
ccgccacccactgtggctataccggaccctttgtacgtaccctttggcgaga

SEQ ID NO: 274807 - DNA, 52 bp, Artificial
  Synthetic oligonucleotide
ccgccagtctactggatgagcggttgggactcggtatggtaccgcccacgga

SEQ ID NO: 274808 - DNA, 52 bp, Artificial
  Synthetic oligonucleotide
acagtaaatagtgaatcactcgctatcgaatcgaggaaggtctggtgccttt

SEQ ID NO: 274809 - DNA, 52 bp, Artificial
  Synthetic oligonucleotide
ccgctgcctaacacgtggccctcaagacttgctaccgtgacattggtagcat

SEQ ID NO: 274810 - DNA, 52 bp, Artificial
  Synthetic oligonucleotide
acagctacactagcacgattgcatagctacaaacaaatctgacagttttcgc

SEQ ID NO: 274811 - DNA, 52 bp, Artificial
  Synthetic oligonucleotide
ccgctatacggccgcgcattaaccgctatgcaacgttcgggcgatctaagct

SEQ ID NO: 274812 - DNA, 58 bp, Artificial
  Synthetic oligonucleotide
atgccccttcatgaacttctcgagtcaggcaatgctaaattggttccaaatcccgagt

SEQ ID NO: 274813 - DNA, 59 bp, Artificial
  Synthetic oligonucleotide
gtagcttaatagtaaagcactatcttgtcacgatagtagatgtcagtgcgattctgatc

SEQ ID NO: 274814 - DNA, 52 bp, Artificial
  Synthetic oligonucleotide
cgtctccatagggcattgagtcggacaccttcatagctaatatgggtgcctc

SEQ ID NO: 274815 - DNA, 52 bp, Artificial
  Synthetic oligonucleotide
cacttttgtcccacctggatagtaccgaccctagactatagcttacgttagg

SEQ ID NO: 274816 - DNA, 52 bp, Artificial
  Synthetic oligonucleotide
cagaacattcgcaggataatgttagcctccatgaaagtaggtcttctctcat

SEQ ID NO: 274817 - DNA, 52 bp, Artificial
  Synthetic oligonucleotide
acgggagtctgaactacgtggtgagctcaagccggggctctgtcgcggacgc

SEQ ID NO: 274818 - DNA, 52 bp, Artificial
  Synthetic oligonucleotide
cgtccagcgaggttcccggctctggagctaccaagtgcgacataggcaactc

SEQ ID NO: 274819 - DNA, 52 bp, Artificial
  Synthetic oligonucleotide
acggaagtgtacctgaaatggcggggtgattgccctttggagaagcggcgct

SEQ ID NO: 274820 - DNA, 52 bp, Artificial
  Synthetic oligonucleotide
cagggtccctcgtaatttcttgatcattgtgttcgtagtaacggagcttcat

SEQ ID NO: 274821 - DNA, 52 bp, Artificial
  Synthetic oligonucleotide
cgtaaaagcatcttgcgagacgagccagtgctatctcgagcttcgacttgga

SEQ ID NO: 274822 - DNA, 52 bp, Artificial
  Synthetic oligonucleotide
cggtttcgttgtcccacacaacagctctgaactgctaggtgccagcggcggt

SEQ ID NO: 274823 - DNA, 52 bp, Artificial
  Synthetic oligonucleotide
cggttgatcctaactctggtcacgcaatctacgtctttgactcgacttattt

SEQ ID NO: 274824 - DNA, 53 bp, Artificial
  Synthetic oligonucleotide
cgaggggttcggtcccgccctccctactggtatgagagggcggtccctcactc

SEQ ID NO: 274825 - DNA, 52 bp, Artificial
  Synthetic oligonucleotide
cggtgcgaccccttccgtctctttggtgacctctcaaccgcgtcactctcat

SEQ ID NO: 274826 - DNA, 52 bp, Artificial
  Synthetic oligonucleotide
cggtccaaggcgcgagcacaagggtttcccgttgtactggggcatctcccaa

SEQ ID NO: 274827 - DNA, 52 bp, Artificial
  Synthetic oligonucleotide
cagtaggactgcccgccgtcagtccctctgcccagtactaccccgccgatgc

SEQ ID NO: 274828 - DNA, 52 bp, Artificial
  Synthetic oligonucleotide
cggggtacacgttctggaatgtacccgccctgttgcaactcaggtggaccgg

SEQ ID NO: 274829 - DNA, 52 bp, Artificial
  Synthetic oligonucleotide
cgggggcactttgcgagagacccgttggggacccgaaatcacggaggcagat

SEQ ID NO: 274830 - DNA, 52 bp, Artificial
  Synthetic oligonucleotide
cgctggcagaagtggggatatctctcagtacagggtttctaagatgcttgga

SEQ ID NO: 274831 - DNA, 52 bp, Artificial
  Synthetic oligonucleotide
ccatgtgtgctctacgggaatgcgttagattcaagaggagctgtcctaaatg

SEQ ID NO: 274832 - DNA, 52 bp, Artificial
  Synthetic oligonucleotide
cgattaccttggccgatttagttagtgcctcgagtttcacacttggcttcca

SEQ ID NO: 274833 - DNA, 52 bp, Artificial
  Synthetic oligonucleotide
cgattcttgctccacgcagctcgcgactgtgagtcgtcccacgagggagaca

SEQ ID NO: 274834 - DNA, 52 bp, Artificial
  Synthetic oligonucleotide
cgcacagagacctacccacgcgctgatgctacgatgacccacacggcgacgg

SEQ ID NO: 274835 - DNA, 58 bp, Artificial
  Synthetic oligonucleotide
ttcaaccagtgaaagcatcagggtaatcagggattcttctaggcataccgttaatacc

SEQ ID NO: 274836 - DNA, 52 bp, Artificial
  Synthetic oligonucleotide
cgcacagagcacgccctgggtaggaagctgtcagtgcgacgaggcaggacgg

SEQ ID NO: 274837 - DNA, 52 bp, Artificial
  Synthetic oligonucleotide
cgcagaaagattagtagtgatgtcggatgtagataactgggagcccgtatcc

SEQ ID NO: 274838 - DNA, 52 bp, Artificial
  Synthetic oligonucleotide
ccagctcgtagcacgcctgcggggacccttgctccgtggccttagagagcca

SEQ ID NO: 274839 - DNA, 52 bp, Artificial
  Synthetic oligonucleotide
cgcgcatgggctgtcccgattttctgaacatcccgaacgcttgggaccacaa

SEQ ID NO: 274840 - DNA, 52 bp, Artificial
  Synthetic oligonucleotide
ccagcagagagccatgagccttgacgccatgcagcgacacacttagtccggt

SEQ ID NO: 274841 - DNA, 52 bp, Artificial
  Synthetic oligonucleotide
ccagataccacaactacgatgctttaatgccaggtgcatacatcaaagcgtc

SEQ ID NO: 274842 - DNA, 49 bp, Artificial
  Synthetic oligonucleotide
cgcggggtaacacgtttcggttgggggagtcccgtggggaataatgggc

SEQ ID NO: 274843 - DNA, 52 bp, Artificial
  Synthetic oligonucleotide
cgcggtacacccaaccctttataagggttgggtgatgccgcatttgtggggc

SEQ ID NO: 274844 - DNA, 52 bp, Artificial
  Synthetic oligonucleotide
acgaacttctggtaaagaagcggtatcgacaactttctgcacacctggtaat

SEQ ID NO: 274845 - DNA, 52 bp, Artificial
  Synthetic oligonucleotide
cgctagtatgggctcaacgggcggtcctacgggagccaagtcgttgaaggct

SEQ ID NO: 274846 - DNA, 59 bp, Artificial
  Synthetic oligonucleotide
tagctcaccggcttgtttgtgatggtaccactccggacgatgcctgtgccacgtaactt

SEQ ID NO: 274847 - DNA, 52 bp, Artificial
  Synthetic oligonucleotide
cgctagtgtgggaggatatgtggcggatgggtgagcggtctgtgtgggaaga

SEQ ID NO: 274848 - DNA, 52 bp, Artificial
  Synthetic oligonucleotide
acgagtgaacccgccttcgggcagaaataggggagcagtacaacgcaagccc

SEQ ID NO: 274849 - DNA, 52 bp, Artificial
  Synthetic oligonucleotide
ggattgtagtctccagaaagtctgtataacgcagcttggtctttgttcgtca

SEQ ID NO: 274850 - DNA, 52 bp, Artificial
  Synthetic oligonucleotide
aggcgggcacgctaggaggggtaaaagttccacgcacactaccttccatcga

SEQ ID NO: 274851 - DNA, 52 bp, Artificial
  Synthetic oligonucleotide
agccgactagctagccgctctagtatgacccacgcgaaaatgagccgagcga

SEQ ID NO: 274852 - DNA, 52 bp, Artificial
  Synthetic oligonucleotide
ggcacgattccgggtcgctggaaatgcatgggtatggggactctgtgatggg

SEQ ID NO: 274853 - DNA, 52 bp, Artificial
  Synthetic oligonucleotide
ggcattcggtcacgtacgataacgtgatcctgccacaggagtccatggaggt

SEQ ID NO: 274854 - DNA, 52 bp, Artificial
  Synthetic oligonucleotide
ggccaaggaatgggtagcccttcccctgtagggacacctaccgatccaccag

SEQ ID NO: 274855 - DNA, 52 bp, Artificial
  Synthetic oligonucleotide
gcgccgtattcaatgtagtgtcgtccttccacgaccctgcagggttacttgt

SEQ ID NO: 274856 - DNA, 52 bp, Artificial
  Synthetic oligonucleotide
aggcctccttaggcgaactggttcctcagtcaacgcgaccggttggctcctg

SEQ ID NO: 274857 - DNA, 53 bp, Artificial
  Synthetic oligonucleotide
attgcgtcccacctctgtaacggtacaacccttcccttacgcgtggtagctcc

SEQ ID NO: 274858 - DNA, 52 bp, Artificial
  Synthetic oligonucleotide
aggcccgttatgagtagttcgttgcgtccgatggacctagtgagccagccgg

SEQ ID NO: 274859 - DNA, 52 bp, Artificial
  Synthetic oligonucleotide
agctcagcatcataccgatggcacagcacatggcccgtagccagcgcactca

SEQ ID NO: 274860 - DNA, 52 bp, Artificial
  Synthetic oligonucleotide
gcgactcatgacgcgcgtgtgctattttggccccggcagtacaagcggtagt

SEQ ID NO: 274861 - DNA, 52 bp, Artificial
  Synthetic oligonucleotide
aaacagcagggaatgcggatgtaaacccatccaaatcgcttctaatcaattc

SEQ ID NO: 274862 - DNA, 52 bp, Artificial
  Synthetic oligonucleotide
agccagcatctaggatagtgtcgctagcctcgttagttgctctaataccaac

SEQ ID NO: 274863 - DNA, 52 bp, Artificial
  Synthetic oligonucleotide
aaccatgcggagggctttcgcccgcaagtttccgtccatgcctctaccgctc

SEQ ID NO: 274864 - DNA, 52 bp, Artificial
  Synthetic oligonucleotide
ggcgagcggagaggatgccatagggcgtaaacaagtttcaggctggaaggga

SEQ ID NO: 274865 - DNA, 52 bp, Artificial
  Synthetic oligonucleotide
ggcgaggctaaagggcagagcaatgtccgcctaacggagaaaccgtgcaagg

SEQ ID NO: 274866 - DNA, 52 bp, Artificial
  Synthetic oligonucleotide
aaacaaggacaggcaccgcctggtatgggcgttggagctggtattcaagcgg

SEQ ID NO: 274867 - DNA, 52 bp, Artificial
  Synthetic oligonucleotide
gccgcccaagttaatccactcggtttgtcaggggaggcagaccatgtagccc

SEQ ID NO: 274868 - DNA, 55 bp, Artificial
  Synthetic oligonucleotide
attgggccgggattacgtcagctgtcaaccctagggcaagagtagggttgccaac

SEQ ID NO: 274869 - DNA, 52 bp, Artificial
  Synthetic oligonucleotide
agttcgtaccagtaggactgcccgccgtcagtccctctgcccagtactaccc

SEQ ID NO: 274870 - DNA, 52 bp, Artificial
  Synthetic oligonucleotide
agttcgttgcgtccgatggacctagtgagccagccggctccttatcaggacc

SEQ ID NO: 274871 - DNA, 52 bp, Artificial
  Synthetic oligonucleotide
aggcaccgaagttttccatccatcgggagcaacagttggcttgcgcgggaat

SEQ ID NO: 274872 - DNA, 52 bp, Artificial
  Synthetic oligonucleotide
agggtggttgggaccgatcgcaagaaccctgcatcctaagtgcacttggcta

SEQ ID NO: 274873 - DNA, 52 bp, Artificial
  Synthetic oligonucleotide
aaacgggagatgaaatttcgtggatctctgatgtagtcgatttacgtggcaa

SEQ ID NO: 274874 - DNA, 52 bp, Artificial
  Synthetic oligonucleotide
aggtcgtatcgcagaggcgcccacgtatggcaagttttccgtgcgcagaaat

SEQ ID NO: 274875 - DNA, 49 bp, Artificial
  Synthetic oligonucleotide
agggggttgtagcggtacggagtttttagggcgtcaaacgcggcttagg

SEQ ID NO: 274876 - DNA, 52 bp, Artificial
  Synthetic oligonucleotide
gctgttaacgacctcttgaagtatgaccgggatcacatatggcacccgtaca

SEQ ID NO: 274877 - DNA, 52 bp, Artificial
  Synthetic oligonucleotide
agtcacgtcattatcagctgtgttgatccctggaacgttcaaccactcaaag

SEQ ID NO: 274878 - DNA, 52 bp, Artificial
  Synthetic oligonucleotide
gctgagatgcaaccgcgagcccactagcgggtacctgtcgaaagcaggtggc

SEQ ID NO: 274879 - DNA, 57 bp, Artificial
  Synthetic oligonucleotide
caataacaggagggactccattgcccactcccaagggatcggtggtgtcgcatgggg

SEQ ID NO: 274880 - DNA, 52 bp, Artificial
  Synthetic oligonucleotide
aggggcaccggtcagtagttcaaacgccaggacgccaagagcccatgcatct

SEQ ID NO: 274881 - DNA, 52 bp, Artificial
  Synthetic oligonucleotide
agccttgacgccatgcagcgacacacttagtccggtccgcactgccagatca

SEQ ID NO: 274882 - DNA, 52 bp, Artificial
  Synthetic oligonucleotide
ggagcatgccattctggtagttgcacgataagctccctgtgtctggtcatca

SEQ ID NO: 274883 - DNA, 52 bp, Artificial
  Synthetic oligonucleotide
ggagcccctagacgggctcactgatcccgcttcctatagcgacgacgacgat

SEQ ID NO: 274884 - DNA, 52 bp, Artificial
  Synthetic oligonucleotide
gctatcgtaacaacgcaatacatcccattgcaacctaaggtacggtgaaccg

SEQ ID NO: 274885 - DNA, 52 bp, Artificial
  Synthetic oligonucleotide
gctagccgcgcaaacaaaggggtcttccccgcatcgggtgaccttccgaaag

SEQ ID NO: 274886 - DNA, 52 bp, Artificial
  Synthetic oligonucleotide
gctagcaccaaagggtgacgctaaggggacaccggctgaagctccacaggaa

SEQ ID NO: 274887 - DNA, 52 bp, Artificial
  Synthetic oligonucleotide
gctacttgcgtgaggacccagcaccgactactactacgcacaatctgaggcc

SEQ ID NO: 274888 - DNA, 47 bp, Artificial
  Synthetic oligonucleotide
agtccggcccgtcccgcgggggggaaccgaaggagtgcgggaccccg

SEQ ID NO: 274889 - DNA, 52 bp, Artificial
  Synthetic oligonucleotide
gctaagaggggttgagtcgcacgatggtgttaatactgtgttttcaagtgga

SEQ ID NO: 274890 - DNA, 59 bp, Artificial
  Synthetic oligonucleotide
caagtgcactagggttcaattcacacatggacccacttaccgctactgccgcggacgta

SEQ ID NO: 274891 - DNA, 52 bp, Artificial
  Synthetic oligonucleotide
agtccgtgtgcgggaagtattcgggcaggttcgtcgatatcagctcgctggg

SEQ ID NO: 274892 - DNA, 52 bp, Artificial
  Synthetic oligonucleotide
gcggttgcatagcaacaactgggatggctccaggtcagcgtcgcagaacact

SEQ ID NO: 274893 - DNA, 52 bp, Artificial
  Synthetic oligonucleotide
agtgccctgaccgtgccctatgaagtggcctgtcccgagtattcgcttgtga

SEQ ID NO: 274894 - DNA, 52 bp, Artificial
  Synthetic oligonucleotide
agcgtactgccagggaaagacacagtttttcggttgcgatgccctggacggg

SEQ ID NO: 274895 - DNA, 52 bp, Artificial
  Synthetic oligonucleotide
aggctaggtgggccgtgagcaagttcaaggtgaggaggtgctcgagacaggt

SEQ ID NO: 274896 - DNA, 52 bp, Artificial
  Synthetic oligonucleotide
gcccgcccgggctcctttgaaatgcgcttggctctcattgttcacgcccaat

SEQ ID NO: 274897 - DNA, 52 bp, Artificial
  Synthetic oligonucleotide
agcagaggcatcgccccaagtggaagtagcacgggttggttgaccaccccag

SEQ ID NO: 274898 - DNA, 52 bp, Artificial
  Synthetic oligonucleotide
agtttcccccggcccagggcgatgtatacaaagtggactggtctccagggag

SEQ ID NO: 274899 - DNA, 52 bp, Artificial
  Synthetic oligonucleotide
aggacgctttgtagcatactacccgttaaagtagcatgtagtctgactattg

SEQ ID NO: 274900 - DNA, 52 bp, Artificial
  Synthetic oligonucleotide
gccattgtgcgagtgttccactggggctacggggagtacccgtccaagtgaa

SEQ ID NO: 274901 - DNA, 59 bp, Artificial
  Synthetic oligonucleotide
cctggggctcgcttgcccgagagtggtggctagtctatttctgttcacgtcactggagc

SEQ ID NO: 274902 - DNA, 52 bp, Artificial
  Synthetic oligonucleotide
aacccttgtgctcgcgccttggaccgtgtcgtctggcgacggattggacttc

SEQ ID NO: 274903 - DNA, 52 bp, Artificial
  Synthetic oligonucleotide
gccagacgacacggtccaaggcgcgagcacaagggtttcccgttgtactggg

SEQ ID NO: 274904 - DNA, 52 bp, Artificial
  Synthetic oligonucleotide
gccaccggggcagtagtagcttctggggcaataatccgtgctggagccaagc

SEQ ID NO: 274905 - DNA, 52 bp, Artificial
  Synthetic oligonucleotide
ggcttcccgtaagatccatattccacaaattccattacatcgatgttttgtg

SEQ ID NO: 274906 - DNA, 52 bp, Artificial
  Synthetic oligonucleotide
ggctttcgcccgcaagtttccgtccatgcctctaccgctctccctaactcct

SEQ ID NO: 274907 - DNA, 52 bp, Artificial
  Synthetic oligonucleotide
gccaagtcggtttgtggaaggaagctggtggttgtttcgcgggttcccggga

SEQ ID NO: 274908 - DNA, 52 bp, Artificial
  Synthetic oligonucleotide
gggaacatcctcacccagtgcgagagcccggagtggtgtctcctgggcctct

SEQ ID NO: 274909 - DNA, 52 bp, Artificial
  Synthetic oligonucleotide
aggacagggtccatcttaccggctccggtactcagacggcactgcacaggtg

SEQ ID NO: 274910 - DNA, 52 bp, Artificial
  Synthetic oligonucleotide
ataccgccgaggcacttgcaaaatcccgcaagatggttggccaggcattgta

SEQ ID NO: 274911 - DNA, 52 bp, Artificial
  Synthetic oligonucleotide
gcatctgttctcgcggggtaacacgtttcggttgggggagtcccgtggggaa

SEQ ID NO: 274912 - DNA, 57 bp, Artificial
  Synthetic oligonucleotide
aacagacggtaccttgctcataaacgaatgcagcgaagctaacggggagccgcgtgt

SEQ ID NO: 274913 - DNA, 52 bp, Artificial
  Synthetic oligonucleotide
aaaacggggtctgttaggcggactcctccctggcgtgcgacttaagcgcgga

SEQ ID NO: 274914 - DNA, 49 bp, Artificial
  Synthetic oligonucleotide
aggaagcccattattccccacgggactcccccaaccgaaacgtgttacc

SEQ ID NO: 274915 - DNA, 52 bp, Artificial
  Synthetic oligonucleotide
gcatccatagtgggagcatcagcagggtatctgggagataccggagcggaat

SEQ ID NO: 274916 - DNA, 52 bp, Artificial
  Synthetic oligonucleotide
aacctgtaaaagctggttctacaaaggtggcatacagatgcgctacacctac

SEQ ID NO: 274917 - DNA, 52 bp, Artificial
  Synthetic oligonucleotide
gggcacgcgtcagtgtccgggtaagaaagaacgatgcgcgtcacgctcgata

SEQ ID NO: 274918 - DNA, 52 bp, Artificial
  Synthetic oligonucleotide
aaaattctgagtccaagcggcggcgataggtggcacacgcgacacacccatc

SEQ ID NO: 274919 - DNA, 52 bp, Artificial
  Synthetic oligonucleotide
agttgggttcactccgtcatcttggactgtgttacgttgctgagatatacgc

SEQ ID NO: 274920 - DNA, 52 bp, Artificial
  Synthetic oligonucleotide
agcagcccaccgcgtaggcagcgcttgggaccagtttgttagccaatcagtt

SEQ ID NO: 274921 - DNA, 52 bp, Artificial
  Synthetic oligonucleotide
gccctaaagggcacgaccttacgcatgaattcgtgtccgtacttggattcca

SEQ ID NO: 274922 - DNA, 52 bp, Artificial
  Synthetic oligonucleotide
agttcttgctcgaccgaagcctgccaagcgtcgtacccgactgagaagcgag

SEQ ID NO: 274923 - DNA, 53 bp, Artificial
  Synthetic oligonucleotide
agtttcattaaggaataactaattccctaatgaaactcgtccctagtgactcc

SEQ ID NO: 274924 - DNA, 59 bp, Artificial
  Synthetic oligonucleotide
caaggttgaaagtattgtcaccataatcgcaattgtaagatatctcttgagtaattcgc

SEQ ID NO: 274925 - DNA, 51 bp, Artificial
  Synthetic oligonucleotide
aggcatgctcaggcgcctcaaccccatcagtttgacgccactagatgggac

SEQ ID NO: 274926 - DNA, 51 bp, Artificial
  Synthetic oligonucleotide
acccacttaccactagaggcctcgttgaagtaaacgcctagacgcgatctt

SEQ ID NO: 274927 - DNA, 51 bp, Artificial
  Synthetic oligonucleotide
tgggtcctaagttgactgaccgttacttcccagctaactctagacctcgtg

SEQ ID NO: 274928 - DNA, 51 bp, Artificial
  Synthetic oligonucleotide
acgccacgtgatctgtttcaataaggggccgcagcgatggttgtgcctgga

SEQ ID NO: 274929 - DNA, 51 bp, Artificial
  Synthetic oligonucleotide
acagtgtgtaggatgaactgacaggtatcgagaggcaatcagctacccctt

SEQ ID NO: 274930 - DNA, 51 bp, Artificial
  Synthetic oligonucleotide
tggtaagcgacggtggtttcggaccagtgctccttggcgacctctggggcc

SEQ ID NO: 274931 - DNA, 51 bp, Artificial
  Synthetic oligonucleotide
catggttccttgtatacgaccctaacagctctgataaggcaaacatgcact

SEQ ID NO: 274932 - DNA, 51 bp, Artificial
  Synthetic oligonucleotide
catgtggtctgtggccttctgctccgctgtaggcgtggtgctcacatgtgc

SEQ ID NO: 274933 - DNA, 51 bp, Artificial
  Synthetic oligonucleotide
cattctgagtcgcagcttgtagtaaatgcgaaaggctcctgggcacagacg

SEQ ID NO: 274934 - DNA, 51 bp, Artificial
  Synthetic oligonucleotide
cccgtcggggagctttgcgtggaagaaccgctgagatcagttgaacccaga

SEQ ID NO: 274935 - DNA, 56 bp, Artificial
  Synthetic oligonucleotide
cctgccaaagagccctcccgcacacaaggtcgtccctcagccgttcgtataaaatg

SEQ ID NO: 274936 - DNA, 51 bp, Artificial
  Synthetic oligonucleotide
aggaaggcacgcgtttctccctccagtaaacccccacccatgggcccaatc

SEQ ID NO: 274937 - DNA, 51 bp, Artificial
  Synthetic oligonucleotide
ccaccaaccagcgttgttgcggttgcttggtacgctcggtgggcgttgact

SEQ ID NO: 274938 - DNA, 51 bp, Artificial
  Synthetic oligonucleotide
tcgcgcgcacgctaccgtcgatccaaaccgaacaggacagcaactccgcaa

SEQ ID NO: 274939 - DNA, 51 bp, Artificial
  Synthetic oligonucleotide
ccgcatagacgggtggcacggttgccttcgcgactccttccggtgactcag

SEQ ID NO: 274940 - DNA, 51 bp, Artificial
  Synthetic oligonucleotide
tccgggacagtccagccagccggacacttctcacccactgcacccacctcg

SEQ ID NO: 274941 - DNA, 51 bp, Artificial
  Synthetic oligonucleotide
ccaccggggtgtctattctgacggggccaaacgggcaagctaccacgcaaa

SEQ ID NO: 274942 - DNA, 51 bp, Artificial
  Synthetic oligonucleotide
aggaatgggcctactgtcccatgacgctaggaagggccctctaggcagagc

SEQ ID NO: 274943 - DNA, 51 bp, Artificial
  Synthetic oligonucleotide
ccgaggatctgggtatattaaccggggaagccttaagacccgtctttgccg

SEQ ID NO: 274944 - DNA, 51 bp, Artificial
  Synthetic oligonucleotide
aggatgcagtcggtggaaagttcccagtacgctccgtctagcacgccctcg

SEQ ID NO: 274945 - DNA, 51 bp, Artificial
  Synthetic oligonucleotide
tcggtggaaagttcccagtacgctccgtctagcacgccctcgagtgggtac

SEQ ID NO: 274946 - DNA, 59 bp, Artificial
  Synthetic oligonucleotide
tttgcggcagcggtaggagcgccctgtttcgtctcgtaagtttgagtctcagtcgcaac

SEQ ID NO: 274947 - DNA, 51 bp, Artificial
  Synthetic oligonucleotide
ccgcctaaccttcggcatccgccttgcaaactccccactggcgcccactgg

SEQ ID NO: 274948 - DNA, 51 bp, Artificial
  Synthetic oligonucleotide
tctagctcctgagaacggtgggtgtgtctgttgggagggtggtccttgcgc

SEQ ID NO: 274949 - DNA, 51 bp, Artificial
  Synthetic oligonucleotide
cagtcacagagccttttgttggacctatatcacaagaagcatgcatagcca

SEQ ID NO: 274950 - DNA, 51 bp, Artificial
  Synthetic oligonucleotide
cagtgaatttgaacagtgtgtaagaagtgctcgatggtataagcatccgcc

SEQ ID NO: 274951 - DNA, 51 bp, Artificial
  Synthetic oligonucleotide
tccctgttggaactggtgaggattaaccacggattgctagtttcattgggg

SEQ ID NO: 274952 - DNA, 51 bp, Artificial
  Synthetic oligonucleotide
agctctgctaaaccccctgcagagaggacccggtcgaagtctcctgtgctt

SEQ ID NO: 274953 - DNA, 51 bp, Artificial
  Synthetic oligonucleotide
acgctaagccacgcgttattggccttgtgtaggcggcactgctgcacactg

SEQ ID NO: 274954 - DNA, 51 bp, Artificial
  Synthetic oligonucleotide
taaggtgaaagcggggctaacagccagccgtagcactgccttccaattggg

SEQ ID NO: 274955 - DNA, 51 bp, Artificial
  Synthetic oligonucleotide
taagggactcggagtccggaacccatcatcgtttgccacgagtgtgtcggc

SEQ ID NO: 274956 - DNA, 51 bp, Artificial
  Synthetic oligonucleotide
cataatgccgacttgaatctagtggtcgagttagatgtgcctgaatccgcg

SEQ ID NO: 274957 - DNA, 59 bp, Artificial
  Synthetic oligonucleotide
tacttgatgaatgtgctacgctttctttcactcaatttactgaaggtagccattatcac

SEQ ID NO: 274958 - DNA, 51 bp, Artificial
  Synthetic oligonucleotide
ccctcgcgcccgttacacttgaagaactgcgtaagctgcaggacgagggcc

SEQ ID NO: 274959 - DNA, 51 bp, Artificial
  Synthetic oligonucleotide
taagcaggcgaaggacctacggagcagagttgctgcggaactgcgacagaa

SEQ ID NO: 274960 - DNA, 51 bp, Artificial
  Synthetic oligonucleotide
catagagacaattgagtccaaggacatgagttctaacccgaatatcagccc

SEQ ID NO: 274961 - DNA, 51 bp, Artificial
  Synthetic oligonucleotide
catcatttctgcgggtcagtgggctgcacttacacctatccaacctgacac

SEQ ID NO: 274962 - DNA, 51 bp, Artificial
  Synthetic oligonucleotide
taaccttcaccccagatattgaaattaggaaaccaagaacactcttaagat

SEQ ID NO: 274963 - DNA, 51 bp, Artificial
  Synthetic oligonucleotide
catccaaggacaacaaacgacaattgtatctgacattcttgtgcagtaggg

SEQ ID NO: 274964 - DNA, 51 bp, Artificial
  Synthetic oligonucleotide
tgggagtagttgtaatggtttgcgttgctccattgactgttatcaatacat

SEQ ID NO: 274965 - DNA, 51 bp, Artificial
  Synthetic oligonucleotide
catcggtcacgtataactcctttgacatctcaagctactgccaattgaaac

SEQ ID NO: 274966 - DNA, 51 bp, Artificial
  Synthetic oligonucleotide
taaagaggcgccacgaccaacaactttgcctccagtcccaactccggctcc

SEQ ID NO: 274967 - DNA, 51 bp, Artificial
  Synthetic oligonucleotide
catgcctagtatactgtctcacacaatcttgaatctctacaccagaggaac

SEQ ID NO: 274968 - DNA, 59 bp, Artificial
  Synthetic oligonucleotide
tatctaagtccctataaaattgggtgaattgcatagatcattatattagacatctacct

SEQ ID NO: 274969 - DNA, 51 bp, Artificial
  Synthetic oligonucleotide
taaaccccctgcagagaggacccggtcgaagtctcctgtgctttgctcacc

SEQ ID NO: 274970 - DNA, 51 bp, Artificial
  Synthetic oligonucleotide
accaagagcattaagacttcggcgcctccccagctatcccctcccagccaa

SEQ ID NO: 274971 - DNA, 51 bp, Artificial
  Synthetic oligonucleotide
gttgcggttgcttggtacgcttggtgggtggttggctggtggagatttgcg

SEQ ID NO: 274972 - DNA, 51 bp, Artificial
  Synthetic oligonucleotide
ccatcgctaagccaaccgaggtcccagaaactgtccacaccctgggtgcta

SEQ ID NO: 274973 - DNA, 49 bp, Artificial
  Synthetic oligonucleotide
cccgcggctcctcccctggtaatccctttaaaggggaggagtccgcggg

SEQ ID NO: 274974 - DNA, 51 bp, Artificial
  Synthetic oligonucleotide
tgtccatcctgacgttcgccataccggggacgctgatatccgcagtggtcc

SEQ ID NO: 274975 - DNA, 51 bp, Artificial
  Synthetic oligonucleotide
cccaacaatagcatttgatggctaaacggcagtgcccgttaatactattca

SEQ ID NO: 274976 - DNA, 51 bp, Artificial
  Synthetic oligonucleotide
tccttcgctagttgcactagcaatagcgtcagcgctgacagttgccgaggc

SEQ ID NO: 274977 - DNA, 51 bp, Artificial
  Synthetic oligonucleotide
gttgattgccgtggggagcgtcggcgaacacttgttaccaccggaacaatg

SEQ ID NO: 274978 - DNA, 51 bp, Artificial
  Synthetic oligonucleotide
accggtcgctacaatggccaacagggtgtcttcccgggcaactacgtccaa

SEQ ID NO: 274979 - DNA, 59 bp, Artificial
  Synthetic oligonucleotide
ctctattaggagcagatgccgctataaacggagagttaaatccatcagacctagcattc

SEQ ID NO: 274980 - DNA, 51 bp, Artificial
  Synthetic oligonucleotide
aggcggaaagaatgggagacttgccatgatgggacccggacccttcgcttg

SEQ ID NO: 274981 - DNA, 51 bp, Artificial
  Synthetic oligonucleotide
cccgccccaagacggtcaagacttgggttagtgcaacgagccagtcatccg

SEQ ID NO: 274982 - DNA, 51 bp, Artificial
  Synthetic oligonucleotide
gttgaagttgtacatgttcaaacaatccgtactgcccttttctgacgatcc

SEQ ID NO: 274983 - DNA, 51 bp, Artificial
  Synthetic oligonucleotide
tgtacaatgaccccccccttccgccacccataaccaatatagtatagaata

SEQ ID NO: 274984 - DNA, 51 bp, Artificial
  Synthetic oligonucleotide
accggaaggagtcgcgaaggcaaccgtgccacccgtctatgcggaagtcag

SEQ ID NO: 274985 - DNA, 51 bp, Artificial
  Synthetic oligonucleotide
agctaggtagtcgcgggtgcgaagggcccaggatccataatgacgagccga

SEQ ID NO: 274986 - DNA, 51 bp, Artificial
  Synthetic oligonucleotide
accaagatagcacagaatcgtctttcaattccataggcgtagtgaatttct

SEQ ID NO: 274987 - DNA, 51 bp, Artificial
  Synthetic oligonucleotide
accaccgattgcgagcgtgacctcatgggaccttcttggggcctactgcta

SEQ ID NO: 274988 - DNA, 51 bp, Artificial
  Synthetic oligonucleotide
aggagccggagttgggactggaggcaaagttgttggtcgtggcgcctcttt

SEQ ID NO: 274989 - DNA, 51 bp, Artificial
  Synthetic oligonucleotide
ccccgccaccccactcgaatctcctgacctattccgactggggcctatggc

SEQ ID NO: 274990 - DNA, 58 bp, Artificial
  Synthetic oligonucleotide
ggcacatcggcagacggtaattccgagtttcacgacttcgctgagccccctccctctc

SEQ ID NO: 274991 - DNA, 51 bp, Artificial
  Synthetic oligonucleotide
accgaggttaagaattcagctgatgtcattctatttggcttaacccaaccc

SEQ ID NO: 274992 - DNA, 51 bp, Artificial
  Synthetic oligonucleotide
ccccggaagacaaacatcttagatgtttgtcttccggggtaaatattccgg

SEQ ID NO: 274993 - DNA, 51 bp, Artificial
  Synthetic oligonucleotide
acccttggcagtctctgatgcccccactctggtgtcgtggtctggccaatc

SEQ ID NO: 274994 - DNA, 51 bp, Artificial
  Synthetic oligonucleotide
acatccagcccccttggagccccagtatgagcagaagggctctagcgatga

SEQ ID NO: 274995 - DNA, 51 bp, Artificial
  Synthetic oligonucleotide
ccctcgtgggacgactcacagtcgcgagctgcgtggagcaagaatcggtag

SEQ ID NO: 274996 - DNA, 51 bp, Artificial
  Synthetic oligonucleotide
ccacgtgtcaataagcaccgagttcgtggggactttggcccggccaatcgg

SEQ ID NO: 274997 - DNA, 51 bp, Artificial
  Synthetic oligonucleotide
tctaaaccagctggtagctcattgttcggaaacaccagtgccgcggggcca

SEQ ID NO: 274998 - DNA, 51 bp, Artificial
  Synthetic oligonucleotide
ccagagtatctgaccacgtgaggggcaccgtgtcaacgtgtagcgccctga

SEQ ID NO: 274999 - DNA, 51 bp, Artificial
  Synthetic oligonucleotide
tcgtttacgaaaaggactccgttgctgactggactgaagatgtcgaattac

SEQ ID NO: 275000 - DNA, 51 bp, Artificial
  Synthetic oligonucleotide
agggcaccgactcgttaatgtcctgcttagcgaacacacccactccgccta

SEQ ID NO: 275001 - DNA, 55 bp, Artificial
  Synthetic oligonucleotide
cgcttgcttcttggtaaggaaccgtggtactgggggcgaaggcagcttgttccac

SEQ ID NO: 275002 - DNA, 51 bp, Artificial
  Synthetic oligonucleotide
gtgtgcagggtaggagcatctttgattgttgctggggcgtggttatatgag

SEQ ID NO: 275003 - DNA, 51 bp, Artificial
  Synthetic oligonucleotide
cccggaccagtaaccggggtaccgagactaccctgcggggttggagaatgc

SEQ ID NO: 275004 - DNA, 51 bp, Artificial
  Synthetic oligonucleotide
ccagcgactacgcccagtgtagccaagatggtgacagatggtgacagattc

SEQ ID NO: 275005 - DNA, 51 bp, Artificial
  Synthetic oligonucleotide
tcgaggtttgctcgagaacggtgcttgctggtcgctagccgattggccctt

SEQ ID NO: 275006 - DNA, 51 bp, Artificial
  Synthetic oligonucleotide
gttggtgataatgaggcagttatagctgaactgttattggatgtttctgac

SEQ ID NO: 275007 - DNA, 51 bp, Artificial
  Synthetic oligonucleotide
gttggtatataaaccatgacggtagtttggattcgacaggaacttggatta

SEQ ID NO: 275008 - DNA, 51 bp, Artificial
  Synthetic oligonucleotide
tcgagcccgcagcccttttggtggcattacgcacttgaaggaacacaccag

SEQ ID NO: 275009 - DNA, 51 bp, Artificial
  Synthetic oligonucleotide
gttgggccccaaactggccgatataggtgctttggttgaccctgcccgctt

SEQ ID NO: 275010 - DNA, 51 bp, Artificial
  Synthetic oligonucleotide
tcgcacgtttccaaagcgcatgtccctcgatgagtcggatggggatgccat

SEQ ID NO: 275011 - DNA, 51 bp, Artificial
  Synthetic oligonucleotide
ccagggttctctgatccttcaagagaaacgatatttctattattcgtagac

SEQ ID NO: 275012 - DNA, 56 bp, Artificial
  Synthetic oligonucleotide
ttcgggacacattgggccgggattacgtcagctgtcaaccctagggcaagagtagg

SEQ ID NO: 275013 - DNA, 51 bp, Artificial
  Synthetic oligonucleotide
ccaggtctgagccacctttcagagacgcaaagacccaccatgcacgctgga

SEQ ID NO: 275014 - DNA, 51 bp, Artificial
  Synthetic oligonucleotide
tcctggtgcctcgaacccaactgcaggccagccataggtacgtgccaaaag

SEQ ID NO: 275015 - DNA, 51 bp, Artificial
  Synthetic oligonucleotide
ccaggtctttggtcacatacgccgccccaatggtggcattgttccgcaggt

SEQ ID NO: 275016 - DNA, 51 bp, Artificial
  Synthetic oligonucleotide
ccagtacaacgggaaacccttgtgctcgcgccttggaccgtgtcgtctggc

SEQ ID NO: 275017 - DNA, 51 bp, Artificial
  Synthetic oligonucleotide
tccttccactgacttccgcatagacgggtggcacggttgccttcgcgactc

SEQ ID NO: 275018 - DNA, 51 bp, Artificial
  Synthetic oligonucleotide
gttacgtcatacatactactcgcagactattaccactgtaacttcaaggta

SEQ ID NO: 275019 - DNA, 51 bp, Artificial
  Synthetic oligonucleotide
tccttccctctgacaccagttggccaaagactcgaccgcagtccagtggga

SEQ ID NO: 275020 - DNA, 51 bp, Artificial
  Synthetic oligonucleotide
atgccaacggttctccgggtacaacggggtagtcccgcccctccctgagct

SEQ ID NO: 275021 - DNA, 51 bp, Artificial
  Synthetic oligonucleotide
agcatgacgtgcaagcgacaatccgagggctcccgcttttgtggcgaccgc

SEQ ID NO: 275022 - DNA, 51 bp, Artificial
  Synthetic oligonucleotide
agttcctggctcagtacccgaaggcggaaccgtgtaggtggtctcgtaagt

SEQ ID NO: 275023 - DNA, 58 bp, Artificial
  Synthetic oligonucleotide
gctacagcattcttaggatactgttgtgtatatggtcaaatatcacattgaggtgctc

SEQ ID NO: 275024 - DNA, 51 bp, Artificial
  Synthetic oligonucleotide
tagtgcgccacttatgctgttacacctgccacactcaaatccctcgtgcta

SEQ ID NO: 275025 - DNA, 51 bp, Artificial
  Synthetic oligonucleotide
agacgggtcctcaacgtcgctgattccccagcagcgaagacacttgcaagc

SEQ ID NO: 275026 - DNA, 51 bp, Artificial
  Synthetic oligonucleotide
tcaccatttgatgccctcccctcatggtgaattagcgcccgccatccatgc

SEQ ID NO: 275027 - DNA, 51 bp, Artificial
  Synthetic oligonucleotide
agttatttgattaggtgtaacaataataggtttatatactcatggtttaac

SEQ ID NO: 275028 - DNA, 51 bp, Artificial
  Synthetic oligonucleotide
atggactgggcctgctactccattccactgggcaacgtcccccggtgacgc

SEQ ID NO: 275029 - DNA, 51 bp, Artificial
  Synthetic oligonucleotide
tagtagacaaccccgctctatcttaacgataggacaagataagtctctgcg

SEQ ID NO: 275030 - DNA, 51 bp, Artificial
  Synthetic oligonucleotide
taggtgagggatgggagcctagcagacgcgcagtacggggttaagatgcgt

SEQ ID NO: 275031 - DNA, 51 bp, Artificial
  Synthetic oligonucleotide
agacacagtttttcggttgcgatgccctggacgggtagtagtgcgggcgtc

SEQ ID NO: 275032 - DNA, 51 bp, Artificial
  Synthetic oligonucleotide
atgggggacggagggtcttatgttccctttgggtcatcggggacgcaagta

SEQ ID NO: 275033 - DNA, 51 bp, Artificial
  Synthetic oligonucleotide
taggggagtattgggggcaaggcacggcggctttagaacggctacggccga

SEQ ID NO: 275034 - DNA, 60 bp, Artificial
  Synthetic oligonucleotide
ttaatagtaaagtaccattttgtcataatggaggatgtcagtgcaaatctgattagattc

SEQ ID NO: 275035 - DNA, 58 bp, Artificial
  Synthetic oligonucleotide
ggtcaggctatccacacggtactctctatatgtactacgagtcatcgtcgtgtacttt

SEQ ID NO: 275036 - DNA, 51 bp, Artificial
  Synthetic oligonucleotide
atggtaagctcagtgccggcgaccaatcccgtgcaaatggtgaacagcgta

SEQ ID NO: 275037 - DNA, 51 bp, Artificial
  Synthetic oligonucleotide
tcttccagctcggtcctgagagctgacagagtactggcgctttccgcagct

SEQ ID NO: 275038 - DNA, 51 bp, Artificial
  Synthetic oligonucleotide
agtgtgcagcagtgccgcctacacaaggccaataacgcgtggcttagcgtt

SEQ ID NO: 275039 - DNA, 51 bp, Artificial
  Synthetic oligonucleotide
tgatccctgaaacgcgtttactgagggaccttgattcatctacaattcgaa

SEQ ID NO: 275040 - DNA, 51 bp, Artificial
  Synthetic oligonucleotide
agtggtacccccaccgacagggagcgggtcagctacacctggtgtgttaaa

SEQ ID NO: 275041 - DNA, 51 bp, Artificial
  Synthetic oligonucleotide
atgtttagcacgtcccgtgctttgtatgctggacagaacatgactgaaaag

SEQ ID NO: 275042 - DNA, 51 bp, Artificial
  Synthetic oligonucleotide
attataggcgacagtaatcgtgtacggagataacacaatcttgtcaaatcc

SEQ ID NO: 275043 - DNA, 51 bp, Artificial
  Synthetic oligonucleotide
agcccattgccaaaacacagtcccggccgtacccaaccctggtgtcaacat

SEQ ID NO: 275044 - DNA, 51 bp, Artificial
  Synthetic oligonucleotide
actgcgcggtaggtgtctccgtctgcagctttccacgtgcccaagccgagc

SEQ ID NO: 275045 - DNA, 51 bp, Artificial
  Synthetic oligonucleotide
tagcctttccgttctgttccccgtaaggtatgtcgaaactctttgaatcga

SEQ ID NO: 275046 - DNA, 58 bp, Artificial
  Synthetic oligonucleotide
gcagccttattttgagggttataatgtagcgaaattcattggctactaattatagtcc

SEQ ID NO: 275047 - DNA, 51 bp, Artificial
  Synthetic oligonucleotide
attcgacaagcatactagataatgccagacaagcacatttagtctctagac

SEQ ID NO: 275048 - DNA, 51 bp, Artificial
  Synthetic oligonucleotide
tcagccgcactttgtactacacaaaacatcgaggtgcccactatcaagaac

SEQ ID NO: 275049 - DNA, 51 bp, Artificial
  Synthetic oligonucleotide
tgattcgcgtatcgcctgcgtcccattaagccgtcgtctgaccacccggat

SEQ ID NO: 275050 - DNA, 51 bp, Artificial
  Synthetic oligonucleotide
tgattgtattccaggccaaatacactcgccgtcaagaggttttaacaaaag

SEQ ID NO: 275051 - DNA, 51 bp, Artificial
  Synthetic oligonucleotide
tcagcggtctaataaactgccccggagagaaggttatgccgcaattctgcc

SEQ ID NO: 275052 - DNA, 51 bp, Artificial
  Synthetic oligonucleotide
attcggtttatacaatcctcgtggcgcgcttatatccgattctagccaagg

SEQ ID NO: 275053 - DNA, 51 bp, Artificial
  Synthetic oligonucleotide
agcaatacataccgctagcgccagccgcagggttgtacttgcaccacccaa

SEQ ID NO: 275054 - DNA, 51 bp, Artificial
  Synthetic oligonucleotide
atacggtgagcaaagcacaggagacttcgaccgggtcctctctgcaggggg

SEQ ID NO: 275055 - DNA, 51 bp, Artificial
  Synthetic oligonucleotide
tgaacagagaggcgataaggcccaagttagatacaggtagagttttcgtta

SEQ ID NO: 275056 - DNA, 51 bp, Artificial
  Synthetic oligonucleotide
atagcagaggaattcgaatcgtatgtcaattttacccatccgtcgccggta

SEQ ID NO: 275057 - DNA, 58 bp, Artificial
  Synthetic oligonucleotide
ggacggttgtgtttgagacagcgggtgaccgtttctgtcctgtgacatcatagcggcc

SEQ ID NO: 275058 - DNA, 51 bp, Artificial
  Synthetic oligonucleotide
tattctgcgggagaataccaacacagtggaagctaggagagcgatagatga

SEQ ID NO: 275059 - DNA, 51 bp, Artificial
  Synthetic oligonucleotide
atagccaccacaagtgcctcccagattcgacgcccagtggactcgcgggtc

SEQ ID NO: 275060 - DNA, 51 bp, Artificial
  Synthetic oligonucleotide
tgaatgcactaacgacgtccatgaggactcggatggccctaggacatggct

SEQ ID NO: 275061 - DNA, 51 bp, Artificial
  Synthetic oligonucleotide
tatggtggaggacccgaggtgcactacacgcggaacccatattcagccgct

SEQ ID NO: 275062 - DNA, 51 bp, Artificial
  Synthetic oligonucleotide
tatggtccgcggtgcaaccccggacactccatcaatcccgctagtatcgga

SEQ ID NO: 275063 - DNA, 51 bp, Artificial
  Synthetic oligonucleotide
atatatgtctagaccggtatcagagtcttgagatgttaccaatataggctc

SEQ ID NO: 275064 - DNA, 51 bp, Artificial
  Synthetic oligonucleotide
atcagtcccaggttatgttatcccatatgaaaatatgaatactagttgatt

SEQ ID NO: 275065 - DNA, 51 bp, Artificial
  Synthetic oligonucleotide
tatgctgtaagcgcaactgacaatgtctcttcgttgcaaatatcgtcaact

SEQ ID NO: 275066 - DNA, 51 bp, Artificial
  Synthetic oligonucleotide
tatgcccagcaacggccctcacatatcccagcaaggccaacgtcataggca

SEQ ID NO: 275067 - DNA, 51 bp, Artificial
  Synthetic oligonucleotide
tatgcaatccgctatacggccgcgcattaaccgctatgcaacgttcgggcg

SEQ ID NO: 275068 - DNA, 58 bp, Artificial
  Synthetic oligonucleotide
tctagcagaggccatggaaggactagagccgacggtaggagcagttgctctagcagct

SEQ ID NO: 275069 - DNA, 51 bp, Artificial
  Synthetic oligonucleotide
atccacgttttccacctcaactgtaccccaacgatactttctcacatgaag

SEQ ID NO: 275070 - DNA, 51 bp, Artificial
  Synthetic oligonucleotide
atccaggagctagcgaagtggctagcggtggagactaaccccccacggtac

SEQ ID NO: 275071 - DNA, 51 bp, Artificial
  Synthetic oligonucleotide
tatcgttacgaatgctcttgagacgcttcttcttagcacgagcttgaagtt

SEQ ID NO: 275072 - DNA, 51 bp, Artificial
  Synthetic oligonucleotide
atcggcaggaacactgatccgagcagcaaagatggggagcgagactccggc

SEQ ID NO: 275073 - DNA, 51 bp, Artificial
  Synthetic oligonucleotide
atcggcaggtgaggattgtggttgggagtcagcgctttttgccggcccaga

SEQ ID NO: 275074 - DNA, 51 bp, Artificial
  Synthetic oligonucleotide
atctccaccagtcaacgcccaccaagcgtaccgcaacaacgctggttggtg

SEQ ID NO: 275075 - DNA, 51 bp, Artificial
  Synthetic oligonucleotide
atctcgtcctccggtgactccagcgtggctttgcttgcctggagcacattc

SEQ ID NO: 275076 - DNA, 51 bp, Artificial
  Synthetic oligonucleotide
atctgatcttgtgcacggagtgaccactggcaacgttgggcacgaaaggcc

SEQ ID NO: 275077 - DNA, 51 bp, Artificial
  Synthetic oligonucleotide
atgacttgcattgggattcctctgggcggctctcacacgtgcaacggcagc

SEQ ID NO: 275078 - DNA, 51 bp, Artificial
  Synthetic oligonucleotide
atgagcttcggaactagtctctatatcttgtcgttgtgccccgtcatgcga

SEQ ID NO: 275079 - DNA, 58 bp, Artificial
  Synthetic oligonucleotide
tccgttgacctccatttcgtaaggcccaatactcgcacctgtaatgtccgccacagga

SEQ ID NO: 275080 - DNA, 51 bp, Artificial
  Synthetic oligonucleotide
atgatcccttagggagctgaaccaacgtgactttggtcttggaaatgtagc

SEQ ID NO: 275081 - DNA, 51 bp, Artificial
  Synthetic oligonucleotide
agcatgacaacgggtggcagcctttgccttttggcaaaatgtggcctcgct

SEQ ID NO: 275082 - DNA, 51 bp, Artificial
  Synthetic oligonucleotide
atgcaagcagccctccggccttaccactggcgcctccagcgactcttttac

SEQ ID NO: 275083 - DNA, 51 bp, Artificial
  Synthetic oligonucleotide
atgcactgtatgctcaagcaacgcagactacaccacagttgtcacgaagtc

SEQ ID NO: 275084 - DNA, 51 bp, Artificial
  Synthetic oligonucleotide
tgcctcgatgctgcgtccctcatcgttcgcgctgagctcgtttgacatgga

SEQ ID NO: 275085 - DNA, 51 bp, Artificial
  Synthetic oligonucleotide
agtcccctcttagctgctgccgagtgtgccatctcaactagccttggccga

SEQ ID NO: 275086 - DNA, 51 bp, Artificial
  Synthetic oligonucleotide
tccaacgcagacgctatgcagtgccacggatctctagaccctccccattgc

SEQ ID NO: 275087 - DNA, 51 bp, Artificial
  Synthetic oligonucleotide
agtcccaagaagttgggctgaactgtcccgttgatgatgggggtccggcag

SEQ ID NO: 275088 - DNA, 51 bp, Artificial
  Synthetic oligonucleotide
tacggggaagtccaatccgtcgccagacgacacggtccaaggcgcgagcac

SEQ ID NO: 275089 - DNA, 51 bp, Artificial
  Synthetic oligonucleotide
cacgcccgcacgagctaccgatcgacagtgcagacctaggcgcctgtggcg

SEQ ID NO: 275090 - DNA, 58 bp, Artificial
  Synthetic oligonucleotide
tagcggagtgaattggtcgactgtttgttaggagtctggtgtgcgcgagacgtcccta

SEQ ID NO: 275091 - DNA, 51 bp, Artificial
  Synthetic oligonucleotide
cacggaacggtcttggcatgcatttatactgcccctttcccaagctaatcc

SEQ ID NO: 275092 - DNA, 51 bp, Artificial
  Synthetic oligonucleotide
tccacccatcgatatcaacatcccttgcaccatcagctctaaccgggattg

SEQ ID NO: 275093 - DNA, 51 bp, Artificial
  Synthetic oligonucleotide
tctctggacagctgctacgtactggtaggcatagccaccacaggtgccgcc

SEQ ID NO: 275094 - DNA, 51 bp, Artificial
  Synthetic oligonucleotide
tcccacccacggccaattgcctgatttcgaatcgaagcctgacgagtcccc

SEQ ID NO: 275095 - DNA, 51 bp, Artificial
  Synthetic oligonucleotide
acggttgtatgtcctgtccatagaccacttgtagttgtagtgacatggttt

SEQ ID NO: 275096 - DNA, 51 bp, Artificial
  Synthetic oligonucleotide
aggttagtgcagcctgtcaacttttcctcgctctacggacgccgctgggcg

SEQ ID NO: 275097 - DNA, 51 bp, Artificial
  Synthetic oligonucleotide
acggttgagccgactcagttatctcaccctcaataggctggtaagagtcct

SEQ ID NO: 275098 - DNA, 51 bp, Artificial
  Synthetic oligonucleotide
tcccccgaaaacgtcgcagtgaacaggacatcggcgcccgatcctatagca

SEQ ID NO: 275099 - DNA, 51 bp, Artificial
  Synthetic oligonucleotide
aggtgtgagaagacgcggtatgaccattgagggtcttcgcaacttcgtgct

SEQ ID NO: 275100 - DNA, 51 bp, Artificial
  Synthetic oligonucleotide
cagatgccaccaatatagttatgtatcgcattcgttttaaagttgggtgtg

SEQ ID NO: 275101 - DNA, 58 bp, Artificial
  Synthetic oligonucleotide
tagcgtaagctggtcctacgcccatgacttccggtggaacaccaactgcttgaaacgc

SEQ ID NO: 275102 - DNA, 51 bp, Artificial
  Synthetic oligonucleotide
tcccgagtatgaaattgaccgtggggtctgcagccgtggttgctagcggat

SEQ ID NO: 275103 - DNA, 51 bp, Artificial
  Synthetic oligonucleotide
acggcgtttgcctccggctggtggagaaaagtccatgcatgtcttcccgcg

SEQ ID NO: 275104 - DNA, 51 bp, Artificial
  Synthetic oligonucleotide
tggaccgctgttgcgtgcgtgttgatatacactctcggagcctgtattcca

SEQ ID NO: 275105 - DNA, 51 bp, Artificial
  Synthetic oligonucleotide
cagctgtggctcgatgtaaggcccccagtatgagtcgtccgtggagtcccg

SEQ ID NO: 275106 - DNA, 51 bp, Artificial
  Synthetic oligonucleotide
tggaggcgaacctgggggacgtaaagaatgtgcccgagagggagcaactga

SEQ ID NO: 275107 - DNA, 51 bp, Artificial
  Synthetic oligonucleotide
caggaggtatggactgggcctgctactccattccactgggcaacgtccccc

SEQ ID NO: 275108 - DNA, 51 bp, Artificial
  Synthetic oligonucleotide
tctcgcgaggtctatcccgccgctctcagcgtctctacccttggcagccat

SEQ ID NO: 275109 - DNA, 51 bp, Artificial
  Synthetic oligonucleotide
acgctgcggctcatctaagggcgcgctagtctcccagggcttaggtcgtgg

SEQ ID NO: 275110 - DNA, 51 bp, Artificial
  Synthetic oligonucleotide
tctcgagcccgctagcgtgggtgaaccatacagaccaccggtccacttgga

SEQ ID NO: 275111 - DNA, 51 bp, Artificial
  Synthetic oligonucleotide
taatctgcctccgtgatttcgggtccccaacgggtctctcgcaaagtgccc

SEQ ID NO: 275112 - DNA, 58 bp, Artificial
  Synthetic oligonucleotide
aaatgcgctttcggtccattgggtattttaaagatgctctcatccgattgtttagaga

SEQ ID NO: 275113 - DNA, 51 bp, Artificial
  Synthetic oligonucleotide
agcgcaaccacttgcgatgacatgcaagttgctggtgacaggtgcctgggt

SEQ ID NO: 275114 - DNA, 51 bp, Artificial
  Synthetic oligonucleotide
cagtaatctacacggaagttggccataattgaatcgactatgagaagtcga

SEQ ID NO: 275115 - DNA, 51 bp, Artificial
  Synthetic oligonucleotide
attgccaataggattagtatgtttagtgacatctactttagtagaatctgg

SEQ ID NO: 275116 - DNA, 51 bp, Artificial
  Synthetic oligonucleotide
agtggtaccacaagaatgctgaaagcattaggggtgtgtaccttagctctc

SEQ ID NO: 275117 - DNA, 51 bp, Artificial
  Synthetic oligonucleotide
tagcatcgtcgtccctcgaatcgtccccaagacccggaccagtaaccgggg

SEQ ID NO: 275118 - DNA, 51 bp, Artificial
  Synthetic oligonucleotide
attggtgggaccagacgttgcactgatcgcagccattctttgcggccagct

SEQ ID NO: 275119 - DNA, 51 bp, Artificial
  Synthetic oligonucleotide
tagcaataactttaaactgcgctctcttggccttgatctatcaagatcaaa

SEQ ID NO: 275120 - DNA, 51 bp, Artificial
  Synthetic oligonucleotide
tgcaccctgtcccacatgtataaacttagggacggtacattcggaacgtct

SEQ ID NO: 275121 - DNA, 51 bp, Artificial
  Synthetic oligonucleotide
atttgcggagttgctgtcctgttcggtttggatcgacggtagcgtgcgcgc

SEQ ID NO: 275122 - DNA, 51 bp, Artificial
  Synthetic oligonucleotide
tctgttacattgagcggagacctttagatcatcctcggagatcagttcgac

SEQ ID NO: 275123 - DNA, 58 bp, Artificial
  Synthetic oligonucleotide
gctccatataagatcgatctaaatacaactgataggtaatgacatccgatagtgatac

SEQ ID NO: 275124 - DNA, 51 bp, Artificial
  Synthetic oligonucleotide
tgcaccttcaatgggcacgttcaaaagcttaggacctccgtatgaacaaca

SEQ ID NO: 275125 - DNA, 51 bp, Artificial
  Synthetic oligonucleotide
tagaggctcttctgtgcatctccgctgaaagaaggagcggatccggcccca

SEQ ID NO: 275126 - DNA, 51 bp, Artificial
  Synthetic oligonucleotide
caaactttagattagtccatttagttatatctcctccttttgcagacccaa

SEQ ID NO: 275127 - DNA, 51 bp, Artificial
  Synthetic oligonucleotide
tagagaaataagtcgtgtgagtactttgcctgctatccttctgaacagttc

SEQ ID NO: 275128 - DNA, 51 bp, Artificial
  Synthetic oligonucleotide
caaaggggtctagtgtcccaggtctcacagccagagagtttccttcggacg

SEQ ID NO: 275129 - DNA, 51 bp, Artificial
  Synthetic oligonucleotide
agccgcaatgagcgcggaaacccgttctaagttgggctcctgcccgaatcc

SEQ ID NO: 275130 - DNA, 51 bp, Artificial
  Synthetic oligonucleotide
caacggtacctaaatccataggttccttaacgtaatcgaaataagtgggta

SEQ ID NO: 275131 - DNA, 51 bp, Artificial
  Synthetic oligonucleotide
caactgtgtcaacatggccttggacgtaatggccaccaaatcgtacctctt

SEQ ID NO: 275132 - DNA, 51 bp, Artificial
  Synthetic oligonucleotide
caagagtccctcgatgatttcagtattgagggatctcgaatcttcgaacat

SEQ ID NO: 275133 - DNA, 51 bp, Artificial
  Synthetic oligonucleotide
actataataagagaattcacgaagcttccttcgtcttaccaacttgggtca

SEQ ID NO: 275134 - DNA, 58 bp, Artificial
  Synthetic oligonucleotide
agtaccattttgtcataatggaggatgtcagtgcaaatctgattaaattcgttaataa

SEQ ID NO: 275135 - DNA, 51 bp, Artificial
  Synthetic oligonucleotide
caagtggcgcccttcgactgcgacccacctttggtatcagaagccaccgga

SEQ ID NO: 275136 - DNA, 51 bp, Artificial
  Synthetic oligonucleotide
agtgcggggctaccattatgcacgagagaggcatcacggccctcatcccgt

SEQ ID NO: 275137 - DNA, 51 bp, Artificial
  Synthetic oligonucleotide
tactcgtgagatggttctcgaattattgatccgtaatagagagaagagtac

SEQ ID NO: 275138 - DNA, 51 bp, Artificial
  Synthetic oligonucleotide
caattatggggttcccggccttgttcaagctatgcgagtgctggcataact

SEQ ID NO: 275139 - DNA, 51 bp, Artificial
  Synthetic oligonucleotide
agtgcgatggagttcttttacctcacgcatgccccatgtgggaccggtcgc

SEQ ID NO: 275140 - DNA, 51 bp, Artificial
  Synthetic oligonucleotide
tactcatcacacgcccgcacgagctaccgatcgacagtgcagacctaggcg

SEQ ID NO: 275141 - DNA, 51 bp, Artificial
  Synthetic oligonucleotide
tctgtacggtcaagctttttcgcacttgcggcggactcatgcagtgcgcat

SEQ ID NO: 275142 - DNA, 50 bp, Artificial
  Synthetic oligonucleotide
actagtcgggtccgtaaaacatcgaacgggtaggaaacgatggaactggt

SEQ ID NO: 275143 - DNA, 51 bp, Artificial
  Synthetic oligonucleotide
tactagagcaactgaagtagctaatgacactacttagatgttggaactacc

SEQ ID NO: 275144 - DNA, 51 bp, Artificial
  Synthetic oligonucleotide
agtccgcgctgtctgaggagaggttgtatagcgccgcgttctggtatcgag

SEQ ID NO: 275145 - DNA, 59 bp, Artificial
  Synthetic oligonucleotide
gacaatctctaattggtagttttgatggggcgtcattttcagcaaaagtatctgaataa

SEQ ID NO: 275146 - DNA, 58 bp, Artificial
  Synthetic oligonucleotide
gaattttatggagccctgctattaccaatatgcacacttatgtttgtgttgataatcg

SEQ ID NO: 275147 - DNA, 51 bp, Artificial
  Synthetic oligonucleotide
cacagtgtatacctctgatatgtgacgactcgagagtagttagagagcaac

SEQ ID NO: 275148 - DNA, 51 bp, Artificial
  Synthetic oligonucleotide
tacgttgggttgtcgcgtcgttctctctattgacgtgcctggcgagcccta

SEQ ID NO: 275149 - DNA, 51 bp, Artificial
  Synthetic oligonucleotide
actacgtaacggagctgaaatatggtctttcccatgtgtcaaataactcta

SEQ ID NO: 275150 - DNA, 51 bp, Artificial
  Synthetic oligonucleotide
gagattctctctacatatgctctttcgcgtgtagcgacattttaccattag

SEQ ID NO: 275151 - DNA, 51 bp, Artificial
  Synthetic oligonucleotide
gagagttaaacaaagtcacggttaaagacccagttgcacttcctcacgttg

SEQ ID NO: 275152 - DNA, 51 bp, Artificial
  Synthetic oligonucleotide
ttctttcgccatagcttcggggataccctcagaaacaatagaagatattcg

SEQ ID NO: 275153 - DNA, 51 bp, Artificial
  Synthetic oligonucleotide
gacgtgagccatgttagggcacgcttgtccgggacaaccggggaagtgtac

SEQ ID NO: 275154 - DNA, 51 bp, Artificial
  Synthetic oligonucleotide
gacggagagctgccacagaaggacacgcaaccagcgaagtctcacaccgcg

SEQ ID NO: 275155 - DNA, 51 bp, Artificial
  Synthetic oligonucleotide
gacgcaaatcacggacccgcaagtgagttcgatgcccgcaggccgatgact

SEQ ID NO: 275156 - DNA, 51 bp, Artificial
  Synthetic oligonucleotide
aacgggataggggacgcaaatcacggacccgcaagtgagttcgatgcccgc

SEQ ID NO: 275157 - DNA, 58 bp, Artificial
  Synthetic oligonucleotide
gcaatcgctctcgaggccagacgcacatttctcgctcgccattctccaatcacacgtc

SEQ ID NO: 275158 - DNA, 51 bp, Artificial
  Synthetic oligonucleotide
aacggtccagtttcgcgcaccactggggtatcgtgaggacgacattgcaga

SEQ ID NO: 275159 - DNA, 51 bp, Artificial
  Synthetic oligonucleotide
ttctgtcgcagttccgcagcaactctgctccgtaggtccttcgcctgctta

SEQ ID NO: 275160 - DNA, 51 bp, Artificial
  Synthetic oligonucleotide
gaccctataatgccaaagcgtataatctccataacggacacttttctggct

SEQ ID NO: 275161 - DNA, 51 bp, Artificial
  Synthetic oligonucleotide
gacacgatcacattacacgtcccggtgccacgtgctggcgttgcggtcacg

SEQ ID NO: 275162 - DNA, 51 bp, Artificial
  Synthetic oligonucleotide
gaattcgcttatcaaggcccctattcctactgcggttatccacgaagtttg

SEQ ID NO: 275163 - DNA, 51 bp, Artificial
  Synthetic oligonucleotide
gaatcgtgccctggttgccccaaacatctccagagggtcgccttggctgag

SEQ ID NO: 275164 - DNA, 51 bp, Artificial
  Synthetic oligonucleotide
gaatcctctaatttgtggcattgcccctattataacaacttcgttcacact

SEQ ID NO: 275165 - DNA, 51 bp, Artificial
  Synthetic oligonucleotide
gaaagcagacatcttgctttcgcatcacagagcatcgcctgcggatgtgtc

SEQ ID NO: 275166 - DNA, 51 bp, Artificial
  Synthetic oligonucleotide
ttctcctcttgcggccttgacacgctaggcgtggtgttctgggaaactgcc

SEQ ID NO: 275167 - DNA, 51 bp, Artificial
  Synthetic oligonucleotide
cttgactttggatctccttattccccaggacgggtttgaatgcagctctaa

SEQ ID NO: 275168 - DNA, 58 bp, Artificial
  Synthetic oligonucleotide
cgacgcaatggtggccacaatgaagggcattcccaccgctagcaagacatgctctcta

SEQ ID NO: 275169 - DNA, 51 bp, Artificial
  Synthetic oligonucleotide
ttggctctcatcgccccagtgctcaacgatcggggtataggtgccactccg

SEQ ID NO: 275170 - DNA, 51 bp, Artificial
  Synthetic oligonucleotide
gcaagccacgacgtacgagtgaacccgccttcgggcagaaataggggagca

SEQ ID NO: 275171 - DNA, 51 bp, Artificial
  Synthetic oligonucleotide
gattggccagaccacgacaccagagtgggggcatcagagactgccaagggt

SEQ ID NO: 275172 - DNA, 51 bp, Artificial
  Synthetic oligonucleotide
gattaaatattaccagctgttcacaggtaatataaaatcctatcgtttcac

SEQ ID NO: 275173 - DNA, 51 bp, Artificial
  Synthetic oligonucleotide
gatggccacccactcatgcgtgataggacaagatctaatgcttccacgctg

SEQ ID NO: 275174 - DNA, 51 bp, Artificial
  Synthetic oligonucleotide
ttggaaagaaggccgagtgtgttaacctgggcagagggcagattccggggg

SEQ ID NO: 275175 - DNA, 51 bp, Artificial
  Synthetic oligonucleotide
aacgccagtctcccgaccggtgttttgctcgtgcgccgagtaggcttggac

SEQ ID NO: 275176 - DNA, 51 bp, Artificial
  Synthetic oligonucleotide
gatcgttagtacggagtctagagtgaaatacttacataacttgtcgactct

SEQ ID NO: 275177 - DNA, 51 bp, Artificial
  Synthetic oligonucleotide
ggtgtttgctgcaccaccgggccccagctctaatagcttaggcgtcggttc

SEQ ID NO: 275178 - DNA, 51 bp, Artificial
  Synthetic oligonucleotide
gatacgaccaagacatcttcaaagggtacttcaatagtaaagaccgagaag

SEQ ID NO: 275179 - DNA, 55 bp, Artificial
  Synthetic oligonucleotide
ataggtgaaaaacactcgactgacttcggccgccgtatgggcactcccccgcgaa

SEQ ID NO: 275180 - DNA, 51 bp, Artificial
  Synthetic oligonucleotide
ttgctctcctgcggacccaacaactggcggatcaagtgcttcaccgcatga

SEQ ID NO: 275181 - DNA, 51 bp, Artificial
  Synthetic oligonucleotide
gagtcgcgaaggcaaccgtgccacccgtctatgcggaagtcagtggaagga

SEQ ID NO: 275182 - DNA, 51 bp, Artificial
  Synthetic oligonucleotide
gagtcccagtggactagcccaacatcaaccgagatggtgtaaattaggaag

SEQ ID NO: 275183 - DNA, 51 bp, Artificial
  Synthetic oligonucleotide
gagtccacgtcggtttattcaatgcattcgtgtcgcataaatcagtagcgt

SEQ ID NO: 275184 - DNA, 51 bp, Artificial
  Synthetic oligonucleotide
gagggtactttaaaacctgagatagcattgacatatgatccattaagcgag

SEQ ID NO: 275185 - DNA, 51 bp, Artificial
  Synthetic oligonucleotide
gaggatgtgaaggcttaatcttgtcaggaggtgtcaggaggtgtcgatgga

SEQ ID NO: 275186 - DNA, 51 bp, Artificial
  Synthetic oligonucleotide
aacggctccacacgcactcccaacatagccaacaacaaaggagcccgcctt

SEQ ID NO: 275187 - DNA, 51 bp, Artificial
  Synthetic oligonucleotide
gagcagcactctgttcaacgccacgcgtgactacaacttgccggaggcccc

SEQ ID NO: 275188 - DNA, 51 bp, Artificial
  Synthetic oligonucleotide
ctcgtgcactcgcgcactcactgcagtcagttaccctccaaacagtggccc

SEQ ID NO: 275189 - DNA, 51 bp, Artificial
  Synthetic oligonucleotide
ctcgacagccctggagtggtggccccctcggacgaaggaaccggcccactc

SEQ ID NO: 275190 - DNA, 58 bp, Artificial
  Synthetic oligonucleotide
tcggcttcccatcgctgccacaatcaggaggcaaatggttctgtctcaaggcactgac

SEQ ID NO: 275191 - DNA, 51 bp, Artificial
  Synthetic oligonucleotide
ctcctgaatagcaaatttagttctcttctgtctagccatggttctacctag

SEQ ID NO: 275192 - DNA, 51 bp, Artificial
  Synthetic oligonucleotide
ctatggggaattagcccctcggacgcggctttaggaagttcggccttgcga

SEQ ID NO: 275193 - DNA, 51 bp, Artificial
  Synthetic oligonucleotide
gtatggtaatggaatgccagagtacacgggcccatattacgatcccataac

SEQ ID NO: 275194 - DNA, 51 bp, Artificial
  Synthetic oligonucleotide
ctagtcgataggttcgaaggcaattgtagcgtgtcttggagttttgcgtgc

SEQ ID NO: 275195 - DNA, 51 bp, Artificial
  Synthetic oligonucleotide
ctagggttgtgggcgagtttcccgtcggggagctttgcgtggaagaaccgc

SEQ ID NO: 275196 - DNA, 51 bp, Artificial
  Synthetic oligonucleotide
ctaaagagcgtgtgtattgtcggattgccggtgtggtttgaataagtgaag

SEQ ID NO: 275197 - DNA, 51 bp, Artificial
  Synthetic oligonucleotide
aaggagggctgcgttcgctattcccggtgcaggtgtggtagtatggctgta

SEQ ID NO: 275198 - DNA, 51 bp, Artificial
  Synthetic oligonucleotide
cgtgtcgcgactgagccccgctgctctctccgtccgctctagcggtatctc

SEQ ID NO: 275199 - DNA, 51 bp, Artificial
  Synthetic oligonucleotide
cgtctcaagatagccgcaattgctctcgaactagacgttgctcttatggga

SEQ ID NO: 275200 - DNA, 51 bp, Artificial
  Synthetic oligonucleotide
cgtccgcatggtatggcgagtggtattgtgaaggtaattccgccccgtgaa

SEQ ID NO: 275201 - DNA, 57 bp, Artificial
  Synthetic oligonucleotide
cgtggagaagtacccgccaggtttgtaaatcgatgcacactggacacgctaagggcc

SEQ ID NO: 275202 - DNA, 51 bp, Artificial
  Synthetic oligonucleotide
cgtcccagcgacgtctgagagctgtttgcttcattctgacgcaggcctgga

SEQ ID NO: 275203 - DNA, 51 bp, Artificial
  Synthetic oligonucleotide
cgtcactggcgggcaattgtgtgtttgggtcaaggctctgtactggcgcgt

SEQ ID NO: 275204 - DNA, 51 bp, Artificial
  Synthetic oligonucleotide
cgtcactccatcctatgtgcccaaccttagaaacgtatgcataattcccac

SEQ ID NO: 275205 - DNA, 51 bp, Artificial
  Synthetic oligonucleotide
gtccaaggtttcagtaggttgacatttaaggacagagcttggttgcggagg

SEQ ID NO: 275206 - DNA, 51 bp, Artificial
  Synthetic oligonucleotide
ttctatgttcaccaaccttgcgaatccttgcaccaagacgagatagctagc

SEQ ID NO: 275207 - DNA, 51 bp, Artificial
  Synthetic oligonucleotide
gtacccatcttccgcctgccacactgcgccattgtacgtggtagtggcact

SEQ ID NO: 275208 - DNA, 51 bp, Artificial
  Synthetic oligonucleotide
cttagatgacttcagaaaattagctgttgacaacatcccagttggtccaaa

SEQ ID NO: 275209 - DNA, 51 bp, Artificial
  Synthetic oligonucleotide
gtaccgtgcccccgaggtcttgcttggaggcaagcagtacagtacgggtgt

SEQ ID NO: 275210 - DNA, 48 bp, Artificial
  Synthetic oligonucleotide
gtacgccccggaggagtgagggaccccttatacttacggggggggacc

SEQ ID NO: 275211 - DNA, 51 bp, Artificial
  Synthetic oligonucleotide
ctggtgctcctggtacagatggctgtttttctaattgtggttatggttcta

SEQ ID NO: 275212 - DNA, 54 bp, Artificial
  Synthetic oligonucleotide
cgccctgaagtcaaacgaggacaggtactatgaggacccggtactcgaggaccc

SEQ ID NO: 275213 - DNA, 51 bp, Artificial
  Synthetic oligonucleotide
ctggtaggcatagccaccacaggtgccgcctagattcgacgcccagtggac

SEQ ID NO: 275214 - DNA, 51 bp, Artificial
  Synthetic oligonucleotide
gtacgtacaataagctgaaaccatactgctttgggcaagcccgcacttggg

SEQ ID NO: 275215 - DNA, 51 bp, Artificial
  Synthetic oligonucleotide
ctgggggacattctaggcgggcacgctaggaggggtaaaagttccacgcac

SEQ ID NO: 275216 - DNA, 51 bp, Artificial
  Synthetic oligonucleotide
ctgggcggaaacacgtaacacttccccacgcgacgcaggactctgcgcgga

SEQ ID NO: 275217 - DNA, 51 bp, Artificial
  Synthetic oligonucleotide
ctggcagtgtttggcacccgattcccgcacccaatacccctactcgcaacg

SEQ ID NO: 275218 - DNA, 51 bp, Artificial
  Synthetic oligonucleotide
ttcgttcttgtgtgatggccattcgaccctctagaaggctttccacttctc

SEQ ID NO: 275219 - DNA, 51 bp, Artificial
  Synthetic oligonucleotide
ctgcaggcccccgtcaggatctaccgtatcagcccacacgcccattgatct

SEQ ID NO: 275220 - DNA, 51 bp, Artificial
  Synthetic oligonucleotide
ctgcacgcacgcgagcggggtcttgtagtccgtgtcgtcctccgagtaagc

SEQ ID NO: 275221 - DNA, 51 bp, Artificial
  Synthetic oligonucleotide
ctgcaacggccgaaattgccccaccccctctagcgtggccgtccatcttgg

SEQ ID NO: 275222 - DNA, 51 bp, Artificial
  Synthetic oligonucleotide
aagattgccgcggcccaaactgctgcaccagctaacggaatctcgcgtccc

SEQ ID NO: 275223 - DNA, 56 bp, Artificial
  Synthetic oligonucleotide
ggcatagtgttaacagaaaatggtagtggaaatagtactaggaatacgaattctag

SEQ ID NO: 275224 - DNA, 51 bp, Artificial
  Synthetic oligonucleotide
ctctctttgaaatggtaagaggttaacttttaggtctggtatagattgggg

SEQ ID NO: 275225 - DNA, 51 bp, Artificial
  Synthetic oligonucleotide
ctctccgaagcctcgccgcctgtgcatcactcggcccccgcgtgggtatgt

SEQ ID NO: 275226 - DNA, 51 bp, Artificial
  Synthetic oligonucleotide
ggcaacagaaggcctccttaggcgaactggttcctcagtcaacgcgaccgg

SEQ ID NO: 275227 - DNA, 51 bp, Artificial
  Synthetic oligonucleotide
ggcaaatgaatcgtagactccgcccgcggggtccactatcatctttgatga

SEQ ID NO: 275228 - DNA, 51 bp, Artificial
  Synthetic oligonucleotide
ggatccatagatcctatatcccttaatctagagacaatgcgagcccggtct

SEQ ID NO: 275229 - DNA, 51 bp, Artificial
  Synthetic oligonucleotide
ggaggcgatactgtatgggcagaagccacacgagaaggtgccatgctggcg

SEQ ID NO: 275230 - DNA, 51 bp, Artificial
  Synthetic oligonucleotide
ggaggagcatcgcaccgcagagatgcgatgatatgagggttcgccagggct

SEQ ID NO: 275231 - DNA, 51 bp, Artificial
  Synthetic oligonucleotide
ggagcttgggagaaattatccacccttgctgaaagtaaatggtcaggatct

SEQ ID NO: 275232 - DNA, 51 bp, Artificial
  Synthetic oligonucleotide
ggacgctggccaatactccagacgccaagcagacgaggacgtgtcaggctc

SEQ ID NO: 275233 - DNA, 51 bp, Artificial
  Synthetic oligonucleotide
ggacataccgggacctaatatgcaccttcgtgcacccggtaactccacccc

SEQ ID NO: 275234 - DNA, 55 bp, Artificial
  Synthetic oligonucleotide
cgcggcaaccacaccagtctaaccagtttgtgggtccgtccccctaggctgacac

SEQ ID NO: 275235 - DNA, 51 bp, Artificial
  Synthetic oligonucleotide
ggacaggtgtgtcgccaagatgcactacagcaaccgtgtgatcggcgcgta

SEQ ID NO: 275236 - DNA, 51 bp, Artificial
  Synthetic oligonucleotide
ggaatatagaccgctttgaacgagccttttctaatcgcacgttgcccaaaa

SEQ ID NO: 275237 - DNA, 51 bp, Artificial
  Synthetic oligonucleotide
ggaaacgtatcctaccatacgacagcctggttcggcccgtagtgctccatt

SEQ ID NO: 275238 - DNA, 51 bp, Artificial
  Synthetic oligonucleotide
gggttatagttcaatttggtagaacgactgcgttgcatgcatttaatatga

SEQ ID NO: 275239 - DNA, 49 bp, Artificial
  Synthetic oligonucleotide
gggttcggtccaccctcccgtatacttacgggagggggtccctcactcc

SEQ ID NO: 275240 - DNA, 51 bp, Artificial
  Synthetic oligonucleotide
aaactcgcctccgtgacctttttcggacatgcgtgcctgttgcctgcgata

SEQ ID NO: 275241 - DNA, 51 bp, Artificial
  Synthetic oligonucleotide
gcttggctccagcacggattattgccccagaagctactactgccccggtgg

SEQ ID NO: 275242 - DNA, 51 bp, Artificial
  Synthetic oligonucleotide
gggtttgctgcaccttacaaggcacctgaacggcatctctgcgagccggtg

SEQ ID NO: 275243 - DNA, 51 bp, Artificial
  Synthetic oligonucleotide
gctgtagggtgtgtaggcccacacgtaccgccatgtgctaccgctaggtcg

SEQ ID NO: 275244 - DNA, 51 bp, Artificial
  Synthetic oligonucleotide
gggagatgccccagtacaacgggaaacccttgtgctcgcgccttggaccgt

SEQ ID NO: 275245 - DNA, 58 bp, Artificial
  Synthetic oligonucleotide
ttgtgggacaatgtttccgtgttgacatgctcgggatcctcccagtgacagggtccga

SEQ ID NO: 275246 - DNA, 51 bp, Artificial
  Synthetic oligonucleotide
gggaatgaaagaacctaccagtaaattattgcttggcgctaacctctattt

SEQ ID NO: 275247 - DNA, 51 bp, Artificial
  Synthetic oligonucleotide
gggaacgggaatcacggccaactgtttcgacaagaggagtggtgccccgcc

SEQ ID NO: 275248 - DNA, 51 bp, Artificial
  Synthetic oligonucleotide
ggcttccatcggaggccctaacgcaaacgcacttacaggagcaaatgcggc

SEQ ID NO: 275249 - DNA, 51 bp, Artificial
  Synthetic oligonucleotide
gggctactagtgcgaccaccggtcgatgccttggatagcgaacgtcccctt

SEQ ID NO: 275250 - DNA, 51 bp, Artificial
  Synthetic oligonucleotide
aaaagtgctcacagtatcagaggcgggtgctaaatcgttcactagtagaac

SEQ ID NO: 275251 - DNA, 51 bp, Artificial
  Synthetic oligonucleotide
ttttatagaattctgaccctgcggttcatcttccttgtggatatgaaccgc

SEQ ID NO: 275252 - DNA, 51 bp, Artificial
  Synthetic oligonucleotide
ggctcggagttcagcgaaggagcaccgcccaccgtgaactgtctagagacg

SEQ ID NO: 275253 - DNA, 51 bp, Artificial
  Synthetic oligonucleotide
ggcggtcgctggcgggtatctcgccaactcttccactcaagattgcgcatt

SEQ ID NO: 275254 - DNA, 51 bp, Artificial
  Synthetic oligonucleotide
ggcgctctttaggtgagggatgggagcctagcagacgcgcagtacggggtt

SEQ ID NO: 275255 - DNA, 51 bp, Artificial
  Synthetic oligonucleotide
tttgttcctcacgcgtgggcaagtgcagtgtggtcgggagcacatgtggtt

SEQ ID NO: 275256 - DNA, 54 bp, Artificial
  Synthetic oligonucleotide
tagttattccttaatgaaactctcctaaaatggaaatgcactacccggactctt

SEQ ID NO: 275257 - DNA, 57 bp, Artificial
  Synthetic oligonucleotide
accccactggccccacttataccagtggccacttctgaccgtcaaaaatgcagccga

SEQ ID NO: 275258 - DNA, 51 bp, Artificial
  Synthetic oligonucleotide
ggggcctccggcaagttgtagtcacgcgtggcgttgaacagagtgctgctc

SEQ ID NO: 275259 - DNA, 51 bp, Artificial
  Synthetic oligonucleotide
ggcccgctgttgagaggggtcactaccatgccttatccgttgatgcggcgc

SEQ ID NO: 275260 - DNA, 51 bp, Artificial
  Synthetic oligonucleotide
ggccccttcccaacgttcctagccctctacgccgtgattccacgatcagga

SEQ ID NO: 275261 - DNA, 51 bp, Artificial
  Synthetic oligonucleotide
ggcccaccggatcacacctggaagccatcgggagcaccgcaattacagttt

SEQ ID NO: 275262 - DNA, 51 bp, Artificial
  Synthetic oligonucleotide
ggcccacaactggtgaacagccttccattgcgcctgggtattcagcaaaag

SEQ ID NO: 275263 - DNA, 51 bp, Artificial
  Synthetic oligonucleotide
ggcagtggaaccccagacacaaccgtcttcggtggaaactccaggtgggtt

SEQ ID NO: 275264 - DNA, 51 bp, Artificial
  Synthetic oligonucleotide
ggcaagaggtgcgttgtcccgcccactaggtgcaaatacccaacgtgggag

SEQ ID NO: 275265 - DNA, 51 bp, Artificial
  Synthetic oligonucleotide
gccggtatcacttcgggatgcaagaaaagctccctggcctcattgtatggc

SEQ ID NO: 275266 - DNA, 51 bp, Artificial
  Synthetic oligonucleotide
ttgttcgcttacaatctcgtactggaaccaaactgtaaaccccgccgtgtg

SEQ ID NO: 275267 - DNA, 51 bp, Artificial
  Synthetic oligonucleotide
ggtcattttgatattcacccaaaatccggagaggtgaccagaattgcttgg

SEQ ID NO: 275268 - DNA, 58 bp, Artificial
  Synthetic oligonucleotide
ctatcctatatgcctacctctacatccctcatacatttagcaaattcgtgtattttat

SEQ ID NO: 275269 - DNA, 51 bp, Artificial
  Synthetic oligonucleotide
ggtccgaaggttctaatggttacgcaaatagcttctgatctggataggtgt

SEQ ID NO: 275270 - DNA, 51 bp, Artificial
  Synthetic oligonucleotide
aacccacctggagtttccaccgaagacggttgtgtctggggttccactgcc

SEQ ID NO: 275271 - DNA, 51 bp, Artificial
  Synthetic oligonucleotide
ggtcgagcacttcgaactttctggggtcggccctgggtatggcgacgaatg

SEQ ID NO: 275272 - DNA, 51 bp, Artificial
  Synthetic oligonucleotide
gccctctctacgacttacttacgtcgtggaggatataagccggaattgggg

SEQ ID NO: 275273 - DNA, 51 bp, Artificial
  Synthetic oligonucleotide
gcccgccgtcagtccctctgcccagtactaccccgccgatgcttctaggcc

SEQ ID NO: 275274 - DNA, 51 bp, Artificial
  Synthetic oligonucleotide
aacccgcaagcatcaacgaaggtgacccgttagcagccccaggctcccccg

SEQ ID NO: 275275 - DNA, 51 bp, Artificial
  Synthetic oligonucleotide
aaccctgacctagggggcatgtgacggttgcaccggggtatttcgagcaag

SEQ ID NO: 275276 - DNA, 51 bp, Artificial
  Synthetic oligonucleotide
aacctgcccccggtctggactcatcaattgctgcagtcaacgcagggtcat

SEQ ID NO: 275277 - DNA, 51 bp, Artificial
  Synthetic oligonucleotide
gcactggttcgtgtggagactctttcacccacctggggtgaacatcggcga

SEQ ID NO: 275278 - DNA, 51 bp, Artificial
  Synthetic oligonucleotide
aacgaggtgaactgacctatgtgctgcccgtgtcggacaacggaggctcga

SEQ ID NO: 275279 - DNA, 58 bp, Artificial
  Synthetic oligonucleotide
atgtgggaggagtgatgtaatccgcaggggtagatgacagaagtgcgtggctgcagga

SEQ ID NO: 275280 - DNA, 51 bp, Artificial
  Synthetic oligonucleotide
gcacccagggtgtggacagtttctgggacctcggttggcttagcgatggac

SEQ ID NO: 275281 - DNA, 51 bp, Artificial
  Synthetic oligonucleotide
gcacaattggctgcttggatacgagttccccgccacagcccttgcgatcac

SEQ ID NO: 275282 - DNA, 51 bp, Artificial
  Synthetic oligonucleotide
ggtggcagtctgagttgctcgcccagggagtttataacgcggataccggcc

SEQ ID NO: 275283 - DNA, 51 bp, Artificial
  Synthetic oligonucleotide
ggtggccccctcggacgaaggaaccggcccactctcagctaacagggccaa

SEQ ID NO: 275284 - DNA, 51 bp, Artificial
  Synthetic oligonucleotide
gctgcgattagagtgcccccagtactttgccccttaccttcgcgcttcgga

SEQ ID NO: 275285 - DNA, 51 bp, Artificial
  Synthetic oligonucleotide
gctgcccgatccttagttgggttgagaggtcgggggcatcagttcgcagtt

SEQ ID NO: 275286 - DNA, 51 bp, Artificial
  Synthetic oligonucleotide
gctcttttgcatgcttgctccaacccgtcactgcccaagacaggttgccga

SEQ ID NO: 275287 - DNA, 51 bp, Artificial
  Synthetic oligonucleotide
gctccttcgatacctggtcaggctcccccatttccctctggaggagcacct

SEQ ID NO: 275288 - DNA, 51 bp, Artificial
  Synthetic oligonucleotide
tttattcgtcggttgcataccagttcgcgaaggttaacatgcggcgaggct

SEQ ID NO: 275289 - DNA, 51 bp, Artificial
  Synthetic oligonucleotide
aaagctggcggccggttctcatcgccatgtaaattacaccgcaagcccaga

SEQ ID NO: 275290 - DNA, 58 bp, Artificial
  Synthetic oligonucleotide
tgcgctctgcgcttagtgttataacccgcgttaatggaggcacccgggactgaggtct

SEQ ID NO: 275291 - DNA, 51 bp, Artificial
  Synthetic oligonucleotide
gctatggagttatgtggggcctagcaatagcataattccgaccacgacgag

SEQ ID NO: 275292 - DNA, 51 bp, Artificial
  Synthetic oligonucleotide
aaatgcgttggctgtacggcactgcctcaaccctatgggcagcttgttgcg

SEQ ID NO: 275293 - DNA, 51 bp, Artificial
  Synthetic oligonucleotide
gcgtctagctggtagctgattcggcccatgcgcaccaagagtgttgcgtgc

SEQ ID NO: 275294 - DNA, 51 bp, Artificial
  Synthetic oligonucleotide
ggtagagtactagctagaatcttcccatatcacaccaatttcattaacctc

SEQ ID NO: 275295 - DNA, 51 bp, Artificial
  Synthetic oligonucleotide
tttaccgacccgaccaatcaacgttgtgccgatgctcgcaaaaggcaccct

SEQ ID NO: 275296 - DNA, 51 bp, Artificial
  Synthetic oligonucleotide
ggtaggcgcctccgggtcaaacgcggcatctctgagttagaggacctgcct

SEQ ID NO: 275297 - DNA, 51 bp, Artificial
  Synthetic oligonucleotide
gcgcgcatggttacgtaaagactcgctcagaaagacgcgcacacagtgttc

SEQ ID NO: 275298 - DNA, 51 bp, Artificial
  Synthetic oligonucleotide
gcgccagtaagggccatcgtggaacctgaggtcaagtcgcagctggaccag

SEQ ID NO: 275299 - DNA, 51 bp, Artificial
  Synthetic oligonucleotide
gcgatcctgagtcaccggaaggagtcgcgaaggcaaccgtgccacccgtct

SEQ ID NO: 275300 - DNA, 51 bp, Artificial
  Synthetic oligonucleotide
aaccacgcacgcataaacccgacgcaacggtgttttgtgggcagagcgagc

SEQ ID NO: 275301 - DNA, 58 bp, Artificial
  Synthetic oligonucleotide
gcaagcgacgcagtgtcgtcttgttctgcatctgtgccttccgctatagctggtagct

SEQ ID NO: 275302 - DNA, 51 bp, Artificial
  Synthetic oligonucleotide
gcgaactggttcctcagtcaacgcgaccggttggctcctggttctacgggc

SEQ ID NO: 275303 - DNA, 51 bp, Artificial
  Synthetic oligonucleotide
gcgaaaatgtacacgagctgccaagacggcgtcgcacgaccgcgcttatca

SEQ ID NO: 275304 - DNA, 51 bp, Artificial
  Synthetic oligonucleotide
gtgcgatcctcggtcaactcgttccgtgcacccattccaccccgggctgac

SEQ ID NO: 275305 - DNA, 51 bp, Artificial
  Synthetic oligonucleotide
acactgatagtacggttaataatcttctttaggatcaagaccgtcggttaa

SEQ ID NO: 275306 - DNA, 51 bp, Artificial
  Synthetic oligonucleotide
cgccatcggttgtatcccatccccattcgacgcttggttgacccaccgtgg

SEQ ID NO: 275307 - DNA, 51 bp, Artificial
  Synthetic oligonucleotide
cgaagtcagcactctgggaattacgctttatgtgtttgggctcggtatagg

SEQ ID NO: 275308 - DNA, 51 bp, Artificial
  Synthetic oligonucleotide
cgcccgaaccctgcgtggaaagcgcaacacagagacagcgtggggtcagat

SEQ ID NO: 275309 - DNA, 51 bp, Artificial
  Synthetic oligonucleotide
ttaacgatcatgctgaatccggtgaaccatggcaaggtaatgctaacatcg

SEQ ID NO: 275310 - DNA, 51 bp, Artificial
  Synthetic oligonucleotide
aagttgggtccagttttggcttgtactgagaattgcgcaaatcggcttcat

SEQ ID NO: 275311 - DNA, 51 bp, Artificial
  Synthetic oligonucleotide
ccttgactttaaattgcctccacaattccccaacgatttgttgcgggctcg

SEQ ID NO: 275312 - DNA, 58 bp, Artificial
  Synthetic oligonucleotide
caactctcgtggaatcatcagccctctgcctatggtgtgctattgcgccacgacccac

SEQ ID NO: 275313 - DNA, 51 bp, Artificial
  Synthetic oligonucleotide
cctccattcagcaaactaattcgagaacaatgcactcacttaatagtagca

SEQ ID NO: 275314 - DNA, 51 bp, Artificial
  Synthetic oligonucleotide
cctaagttgcggattcgtgcctcccacccacggccaattgcctgatttcga

SEQ ID NO: 275315 - DNA, 51 bp, Artificial
  Synthetic oligonucleotide
ttagcctgccccgatgggtatggagccatcctgggaactgccgcttgttgt

SEQ ID NO: 275316 - DNA, 51 bp, Artificial
  Synthetic oligonucleotide
cggggctggaacttggaatgctgagtaacttgtgcgggcgcgcttttcacg

SEQ ID NO: 275317 - DNA, 51 bp, Artificial
  Synthetic oligonucleotide
cgggcaaccccagcctcaaacgattgtgatgggccctcagcctatccagca

SEQ ID NO: 275318 - DNA, 51 bp, Artificial
  Synthetic oligonucleotide
cgaagcgcgaaggtaaggggcaaagtactgggggcactctaatcgcagcct

SEQ ID NO: 275319 - DNA, 51 bp, Artificial
  Synthetic oligonucleotide
ttagcttgtgttgctgctttcttagaatcatccgctacgaatggtgaccat

SEQ ID NO: 275320 - DNA, 51 bp, Artificial
  Synthetic oligonucleotide
cgggacccccgacgtaggcatcggggttgtagttggaccacacggattcct

SEQ ID NO: 275321 - DNA, 51 bp, Artificial
  Synthetic oligonucleotide
cggcttcaatccttaccatggccgcataccgcgctcttttgggcaacaggg

SEQ ID NO: 275322 - DNA, 51 bp, Artificial
  Synthetic oligonucleotide
aagtcccaacttcaggggcagcctggacgctccacctactcagtcagaggc

SEQ ID NO: 275323 - DNA, 58 bp, Artificial
  Synthetic oligonucleotide
aagaagggtgacattgctctgtgtctgtcgccttccacattactgccgccccgctgcc

SEQ ID NO: 275324 - DNA, 51 bp, Artificial
  Synthetic oligonucleotide
cggattgtgggcaggttgtgcaacataggtggttacgggatctcggggcct

SEQ ID NO: 275325 - DNA, 51 bp, Artificial
  Synthetic oligonucleotide
acaatcccaaagtgatagcgaaccggtgattgatagtctaactaataatgc

SEQ ID NO: 275326 - DNA, 51 bp, Artificial
  Synthetic oligonucleotide
cggccgtcgttattcttgcaggcctcggcccatgaggtaaagcaaaaccgc

SEQ ID NO: 275327 - DNA, 51 bp, Artificial
  Synthetic oligonucleotide
cggcactgcctcaaccctatgggcagcttgttgcgagacgccgcacggaaa

SEQ ID NO: 275328 - DNA, 51 bp, Artificial
  Synthetic oligonucleotide
cgaacagtacaccaccgtcgcccgtagggctagattctgctgggcacctgg

SEQ ID NO: 275329 - DNA, 51 bp, Artificial
  Synthetic oligonucleotide
cgaacgaaaacggacgtggtttccgtggagataagcccgcgggagtgcctc

SEQ ID NO: 275330 - DNA, 51 bp, Artificial
  Synthetic oligonucleotide
cgctaatggtatatccatgtaaactaggttgagttccggtaaacatggtac

SEQ ID NO: 275331 - DNA, 51 bp, Artificial
  Synthetic oligonucleotide
cgctagcgctaacgggcctgacagtgccggtaactccaggatacgagtcgc

SEQ ID NO: 275332 - DNA, 51 bp, Artificial
  Synthetic oligonucleotide
gtcgttcatcccagctacctagcgacctcagtgcgccacgtcttgggtcgg

SEQ ID NO: 275333 - DNA, 51 bp, Artificial
  Synthetic oligonucleotide
ttatccccgcgtcagttacgcatgcgtaactgacgcgggggggtataaatg

SEQ ID NO: 275334 - DNA, 58 bp, Artificial
  Synthetic oligonucleotide
gctagattaagagaatctggttatgctttcattgctaatttagctaaggtttacggtg

SEQ ID NO: 275335 - DNA, 51 bp, Artificial
  Synthetic oligonucleotide
gtgcctccttgagtaatccgtagcgggcgcctcccgttgcgcacttttgtc

SEQ ID NO: 275336 - DNA, 51 bp, Artificial
  Synthetic oligonucleotide
aatgactccttacggaagtgtcaaaattgcgaggtccctatagcacagaat

SEQ ID NO: 275337 - DNA, 51 bp, Artificial
  Synthetic oligonucleotide
ccgctagcgccagccgcagggttgtacttgcaccacccaacgttcgaaggc

SEQ ID NO: 275338 - DNA, 51 bp, Artificial
  Synthetic oligonucleotide
cgtagacaagagcaccatggccggaggccgtgtgaacaggtccagagcctg

SEQ ID NO: 275339 - DNA, 51 bp, Artificial
  Synthetic oligonucleotide
gtgcctctgactgagtaggtggagcgtccaggctgcccctgaagttgggac

SEQ ID NO: 275340 - DNA, 51 bp, Artificial
  Synthetic oligonucleotide
gtgaagctcattgtctaggaactttcaacatggtagcatttaatcggtgtt

SEQ ID NO: 275341 - DNA, 51 bp, Artificial
  Synthetic oligonucleotide
gtggtttagatgcgatagctacctattacagcgatcggcattatagtatta

SEQ ID NO: 275342 - DNA, 51 bp, Artificial
  Synthetic oligonucleotide
ttcccaaatcagcgggcgggcccaaacacaacatcaggcgaataagagcga

SEQ ID NO: 275343 - DNA, 51 bp, Artificial
  Synthetic oligonucleotide
gtccagtagctcaaatctagtgtagaatcttaaaacattgaatcataaatc

SEQ ID NO: 275344 - DNA, 51 bp, Artificial
  Synthetic oligonucleotide
cgactttgggtattcactccgtaccaaagagcactcgttctaacctaacca

SEQ ID NO: 275345 - DNA, 56 bp, Artificial
  Synthetic oligonucleotide
atcaaaactacccgcccggccccacacgagtacattcgcgccaacaacagcgcaaa

SEQ ID NO: 275346 - DNA, 51 bp, Artificial
  Synthetic oligonucleotide
cgatctttgatcaagtgcaagtccctcatccatcacaaacaaccaacaaag

SEQ ID NO: 275347 - DNA, 51 bp, Artificial
  Synthetic oligonucleotide
gtcggtgttcacacttgtcgaccctactgctgggtggcttatggtcccata

SEQ ID NO: 275348 - DNA, 51 bp, Artificial
  Synthetic oligonucleotide
ccggaggagtcacatacctcacccatgcgccctgacgcgaagtagaaggcc

SEQ ID NO: 275349 - DNA, 51 bp, Artificial
  Synthetic oligonucleotide
cggtatacattacggtatcttatataccccgcccaactcttataaagagtt

SEQ ID NO: 275350 - DNA, 51 bp, Artificial
  Synthetic oligonucleotide
aatggcgtgggccgcgtgtattcaacaatagcgagaggaagctgagggccg

SEQ ID NO: 275351 - DNA, 51 bp, Artificial
  Synthetic oligonucleotide
aaggtgggtcgagagaatgagcattaggtcgcagcatgggcagacaatggg

SEQ ID NO: 275352 - DNA, 51 bp, Artificial
  Synthetic oligonucleotide
ttagcaacggtctatggtggttcaattagattagcactacctatgttatat

SEQ ID NO: 275353 - DNA, 51 bp, Artificial
  Synthetic oligonucleotide
cgctgggcacgaaacattggaatgcaacgagaccagcgttggacgcgaagc

SEQ ID NO: 275354 - DNA, 51 bp, Artificial
  Synthetic oligonucleotide
cgactgtttgatggagagtgctttatatcttgttgcgttccccttgaaact

SEQ ID NO: 275355 - DNA, 50 bp, Artificial
  Synthetic oligonucleotide
tctggggatgactatcacgcgtggcttcaaccggatccgttgcatgggga

SEQ ID NO: 275356 - DNA, 58 bp, Artificial
  Synthetic oligonucleotide
tccatggagttcccgccgttattgtttagcatgcccccagcagtaggaccgagaagcc

SEQ ID NO: 275357 - DNA, 50 bp, Artificial
  Synthetic oligonucleotide
agcgaagaaccagccacgccacatgaagaggaacccgccattcccaatgg

SEQ ID NO: 275358 - DNA, 50 bp, Artificial
  Synthetic oligonucleotide
agccgtgctaccggcccttgttaagcgaagccgtctgcacccacgcgcgc

SEQ ID NO: 275359 - DNA, 50 bp, Artificial
  Synthetic oligonucleotide
agccgtggtcacgcttagctgaactgcttacgcaccgctcccccactgcc

SEQ ID NO: 275360 - DNA, 50 bp, Artificial
  Synthetic oligonucleotide
agcgagggacaacaagacaccgatgggcgccacgaaaacaggctagagga

SEQ ID NO: 275361 - DNA, 50 bp, Artificial
  Synthetic oligonucleotide
aatgtcccttccggccaaaggccgtcacagctaaaagagaggcgcccacg

SEQ ID NO: 275362 - DNA, 50 bp, Artificial
  Synthetic oligonucleotide
agcgagcgtggtggggcatcggcacatgtcctatcctgggcttgccctaa

SEQ ID NO: 275363 - DNA, 50 bp, Artificial
  Synthetic oligonucleotide
agcctgtagaaccaaacgtagggcggctttcaggttgggaggacccagga

SEQ ID NO: 275364 - DNA, 50 bp, Artificial
  Synthetic oligonucleotide
tctgagtcgccatatccgcgctccaaaccacgtaatccgggctggatcct

SEQ ID NO: 275365 - DNA, 50 bp, Artificial
  Synthetic oligonucleotide
ttacagggcgccggtacatctctggagtacgcaatggaaatccgcaccta

SEQ ID NO: 275366 - DNA, 50 bp, Artificial
  Synthetic oligonucleotide
aatgtgtatagagccacagcctttggaccagcatgactaactccgtcgtt

SEQ ID NO: 275367 - DNA, 60 bp, Artificial
  Synthetic oligonucleotide
ggagcaacagatatgtcattcccaagaattaattctattgggttctgattattgccaata

SEQ ID NO: 275368 - DNA, 60 bp, Artificial
  Synthetic oligonucleotide
ttaatggtgcgcctctcagtgcgtatatttcgttgatgcgtctagcattagtattatgaa

SEQ ID NO: 275369 - DNA, 58 bp, Artificial
  Synthetic oligonucleotide
cccttgtcgtctcgattacacacctactttcatcgtacaccataggttggaagtgctg

SEQ ID NO: 275370 - DNA, 50 bp, Artificial
  Synthetic oligonucleotide
accctgaggtcgcttgggtcggaaagaccgaggagcagctaaaggaggcc

SEQ ID NO: 275371 - DNA, 50 bp, Artificial
  Synthetic oligonucleotide
aaaggcgccctgcccgcagtagaggtcctgcaacaagacctgacacacga

SEQ ID NO: 275372 - DNA, 50 bp, Artificial
  Synthetic oligonucleotide
accccgcttgcgtctgccaaggaggtgcactctgcgcccacgtatgtgcc

SEQ ID NO: 275373 - DNA, 50 bp, Artificial
  Synthetic oligonucleotide
agccttggaatacgggcccttgggttaggcccatagaacctcccaccggt

SEQ ID NO: 275374 - DNA, 50 bp, Artificial
  Synthetic oligonucleotide
aattctatcgggccctgcgggtggggttgttggatactccgccacttgct

SEQ ID NO: 275375 - DNA, 50 bp, Artificial
  Synthetic oligonucleotide
agcgacgggagttcggattggctcttggagtgcggcagggcatgcattag

SEQ ID NO: 275376 - DNA, 50 bp, Artificial
  Synthetic oligonucleotide
tctgctacgcctccaactttctttgagcttgcccgccctgcgctaaccta

SEQ ID NO: 275377 - DNA, 50 bp, Artificial
  Synthetic oligonucleotide
agcccatgccccactccgacgtcacagatcaatctccaacgccacaggcc

SEQ ID NO: 275378 - DNA, 50 bp, Artificial
  Synthetic oligonucleotide
accggcagcggggagaaacgccggagggcctaaaccgttccactggtagt

SEQ ID NO: 275379 - DNA, 50 bp, Artificial
  Synthetic oligonucleotide
agcccatatacactccggtcacatgaccatccgtagcacggcctgcgcct

SEQ ID NO: 275380 - DNA, 58 bp, Artificial
  Synthetic oligonucleotide
ccgcctgttagcatcgtttgcaccgggacgattcactctgggacccccatcgtgagtc

SEQ ID NO: 275381 - DNA, 50 bp, Artificial
  Synthetic oligonucleotide
agccattccaatcacgtgacaccgtgcgcccagtacacagctgcggttgt

SEQ ID NO: 275382 - DNA, 50 bp, Artificial
  Synthetic oligonucleotide
aatgggccctccgtgtgaggtgacattggattcaagagcagagggccgcg

SEQ ID NO: 275383 - DNA, 50 bp, Artificial
  Synthetic oligonucleotide
agcatgcctttacgccccataaagagctcgcccccattgaaaggcgcgaa

SEQ ID NO: 275384 - DNA, 50 bp, Artificial
  Synthetic oligonucleotide
aaccatgctgagactctctcgcgtggctaacagcgtcacagggctgcgct

SEQ ID NO: 275385 - DNA, 50 bp, Artificial
  Synthetic oligonucleotide
ttgtgatcccgtttgaggtaccccagggccacccgaaggaccctgacctg

SEQ ID NO: 275386 - DNA, 50 bp, Artificial
  Synthetic oligonucleotide
accgtaccgggctcactaccgtcgtggtgcgaacctggagttgttgaggc

SEQ ID NO: 275387 - DNA, 50 bp, Artificial
  Synthetic oligonucleotide
aaccccgtggtttgcggcggtccccagtgtaaagcggttctgaacccata

SEQ ID NO: 275388 - DNA, 50 bp, Artificial
  Synthetic oligonucleotide
agcaggagcagaagtgtatacaccctcacctacttgatcatatgacataa

SEQ ID NO: 275389 - DNA, 50 bp, Artificial
  Synthetic oligonucleotide
tcttgcgtttggcgaccaagggatcaacccaacgccatgtctctgggcaa

SEQ ID NO: 275390 - DNA, 50 bp, Artificial
  Synthetic oligonucleotide
accgtcagggagaatctcgcgtggcagcctccacacaagtctcgagtcga

SEQ ID NO: 275391 - DNA, 57 bp, Artificial
  Synthetic oligonucleotide
tcgaaactacgttgggtgtgaggtggtgcggtggttgtagggtaagctgtcattggc

SEQ ID NO: 275392 - DNA, 50 bp, Artificial
  Synthetic oligonucleotide
aatcttgtgcgggcctgcaagtggtagacttccggtctcgcctgcggaaa

SEQ ID NO: 275393 - DNA, 50 bp, Artificial
  Synthetic oligonucleotide
agcacgttcgcactggagtcgcccggtatttgcgtcatgggaagctcgtc

SEQ ID NO: 275394 - DNA, 50 bp, Artificial
  Synthetic oligonucleotide
aacccttccaattcctcaccattgaaggagcctctagtcgcacaatcctc

SEQ ID NO: 275395 - DNA, 50 bp, Artificial
  Synthetic oligonucleotide
agccgggaattaagcgaaatacctccagtgtatgaccatgactttactag

SEQ ID NO: 275396 - DNA, 50 bp, Artificial
  Synthetic oligonucleotide
tctggtccagctgcgacttgacctcaggttccacgatggcccttactggc

SEQ ID NO: 275397 - DNA, 50 bp, Artificial
  Synthetic oligonucleotide
agccggctgtagggccctctgaagagcttcgaagggtacccgggtttgcc

SEQ ID NO: 275398 - DNA, 50 bp, Artificial
  Synthetic oligonucleotide
tgtagtgatgcttgcgcgggtccatgtttaggagaacagacataaagggg

SEQ ID NO: 275399 - DNA, 50 bp, Artificial
  Synthetic oligonucleotide
agccgcatctgattaaggaacgtgccggacgaggacttgacgtcgcgcac

SEQ ID NO: 275400 - DNA, 50 bp, Artificial
  Synthetic oligonucleotide
aacacacgcgcagcactttgcaacagtccgctagcatcgaccgcccagag

SEQ ID NO: 275401 - DNA, 50 bp, Artificial
  Synthetic oligonucleotide
accgatgcctgtgcaagccgcatctgattaaggaacgtgccggacgagga

SEQ ID NO: 275402 - DNA, 58 bp, Artificial
  Synthetic oligonucleotide
gagcgggtgctacccgggttccgtgcctccttcatcggccttggatatgctctcttcg

SEQ ID NO: 275403 - DNA, 50 bp, Artificial
  Synthetic oligonucleotide
aacacccacctcttggatggtgccccattgcttgcgctctcaatggaggg

SEQ ID NO: 275404 - DNA, 50 bp, Artificial
  Synthetic oligonucleotide
agccgatccatgcatgcgtgcgcgtttcaagtcacagcgcgttagtcggg

SEQ ID NO: 275405 - DNA, 50 bp, Artificial
  Synthetic oligonucleotide
aacacctagtgctgcgaccgggacacggccctcactagcgctccttgttc

SEQ ID NO: 275406 - DNA, 50 bp, Artificial
  Synthetic oligonucleotide
agcccgtaaccatagcgcgcggcatgtgagccaagcaccccgaaaaggca

SEQ ID NO: 275407 - DNA, 50 bp, Artificial
  Synthetic oligonucleotide
aacactgacgcgcagctgaagtgcaatgtgccaatgtttactcgaatggc

SEQ ID NO: 275408 - DNA, 50 bp, Artificial
  Synthetic oligonucleotide
tgtagcctcagactcagattggtgtttcaaagatcctcaaggcaatagaa

SEQ ID NO: 275409 - DNA, 50 bp, Artificial
  Synthetic oligonucleotide
agcccctctcagggcatcgcattcgttgcatatcccgctctggcccctca

SEQ ID NO: 275410 - DNA, 50 bp, Artificial
  Synthetic oligonucleotide
accgcgctaggtggcccgacgtcaagcacgagagggagggtctgtgcatt

SEQ ID NO: 275411 - DNA, 50 bp, Artificial
  Synthetic oligonucleotide
aacatcggaatgcgtgggcaagtgccctgagaacagccggcgggcgggta

SEQ ID NO: 275412 - DNA, 50 bp, Artificial
  Synthetic oligonucleotide
aatggttggctgttctaccgaggggtccgctcccgtaaaagcctggggct

SEQ ID NO: 275413 - DNA, 57 bp, Artificial
  Synthetic oligonucleotide
cgagttttggcgtaaaatcctaactgaggtatactaatatatttactgacgtgcata

SEQ ID NO: 275414 - DNA, 50 bp, Artificial
  Synthetic oligonucleotide
accggatcggtgtgacttagcaaacgtaatttaagttatgtgaggagacg

SEQ ID NO: 275415 - DNA, 50 bp, Artificial
  Synthetic oligonucleotide
acactggcgttggtaaaccggcttcgggggcccctcctccatacactgag

SEQ ID NO: 275416 - DNA, 50 bp, Artificial
  Synthetic oligonucleotide
tcggttggttcgggttagcaggccaaaggggttccgtgatccctttcagc

SEQ ID NO: 275417 - DNA, 50 bp, Artificial
  Synthetic oligonucleotide
acacgcgtaggcggtgcccctgtcctttccctgcggtaggcaaatgccgt

SEQ ID NO: 275418 - DNA, 50 bp, Artificial
  Synthetic oligonucleotide
acaccatacctcggggaacgtgattcaccttcccaaccgttggcgcccct

SEQ ID NO: 275419 - DNA, 50 bp, Artificial
  Synthetic oligonucleotide
agctcgctggccaagacactacgctcacgcagctgagacacaatgtcggg

SEQ ID NO: 275420 - DNA, 50 bp, Artificial
  Synthetic oligonucleotide
agctccgccagcgggacacttatcagtttgggcacaccaaaagcgcaact

SEQ ID NO: 275421 - DNA, 50 bp, Artificial
  Synthetic oligonucleotide
acatctgccggtttcctactagtaaccacgttagtctccgatgaatccgg

SEQ ID NO: 275422 - DNA, 50 bp, Artificial
  Synthetic oligonucleotide
aaacagcatgcgcaagcacaaggcaccttcaaacttccgtccaacttcaa

SEQ ID NO: 275423 - DNA, 50 bp, Artificial
  Synthetic oligonucleotide
agctcaaccacttggcctgcgctcgcctgttgactctcgtgagcatccta

SEQ ID NO: 275424 - DNA, 57 bp, Artificial
  Synthetic oligonucleotide
gtatatagagtacttatggaaattaaggaggatatagatactagaggagttactggg

SEQ ID NO: 275425 - DNA, 50 bp, Artificial
  Synthetic oligonucleotide
agctagtgccgaggtcccagtcagggcagcgactcgctctccgaaggagc

SEQ ID NO: 275426 - DNA, 50 bp, Artificial
  Synthetic oligonucleotide
tgtgatcgctgctccctcgagtaaagcaatcttgagattggataacccaa

SEQ ID NO: 275427 - DNA, 50 bp, Artificial
  Synthetic oligonucleotide
acaccacggttcgagaggccctcacgacggacccatggctcacccaagag

SEQ ID NO: 275428 - DNA, 50 bp, Artificial
  Synthetic oligonucleotide
tcgtccccatcttcgatgtatccaattgtgccagttaataatgccaatcg

SEQ ID NO: 275429 - DNA, 50 bp, Artificial
  Synthetic oligonucleotide
acatggggaacccttcttctacccgctcttggaccctaaggccccacgcg

SEQ ID NO: 275430 - DNA, 50 bp, Artificial
  Synthetic oligonucleotide
agctagcagggcgcaagttctcggaataatgtcgcgcgcacgtgacgtga

SEQ ID NO: 275431 - DNA, 50 bp, Artificial
  Synthetic oligonucleotide
aaacagtccaatgggcttcggacaaggtgccagagccccattcgcaggcg

SEQ ID NO: 275432 - DNA, 50 bp, Artificial
  Synthetic oligonucleotide
accaaaatacgtaccatctagtcctgatccacagtcctcagtccctaact

SEQ ID NO: 275433 - DNA, 50 bp, Artificial
  Synthetic oligonucleotide
aaacatcgcgcgtccccgcaaacgcccagtaagattcgcttgctgcgaaa

SEQ ID NO: 275434 - DNA, 50 bp, Artificial
  Synthetic oligonucleotide
agctttgcgaggtacctggttcggcgcttgtgctctccctgggggtacct

SEQ ID NO: 275435 - DNA, 58 bp, Artificial
  Synthetic oligonucleotide
cgcttatggctattcattagatagtagcatcagatatgtttatatgacctatgctacg

SEQ ID NO: 275436 - DNA, 50 bp, Artificial
  Synthetic oligonucleotide
aaaacacggctcctaccggcatggtatattgggtgagtcagtataatcca

SEQ ID NO: 275437 - DNA, 50 bp, Artificial
  Synthetic oligonucleotide
agctgtaccaaaccccaacggtgccaagccgcccgcagtcctagagcggc

SEQ ID NO: 275438 - DNA, 50 bp, Artificial
  Synthetic oligonucleotide
ttttgtctgctcggcgatgagacaacgtgatctcggggcgcgcaacgcac

SEQ ID NO: 275439 - DNA, 50 bp, Artificial
  Synthetic oligonucleotide
agctggcaaggtggcgtgacgatgagcaacctaccatcctgggaactggg

SEQ ID NO: 275440 - DNA, 50 bp, Artificial
  Synthetic oligonucleotide
aaaacttgacgcccggaatgtaaacatcgcgcgtccccgcaaacgcccag

SEQ ID NO: 275441 - DNA, 50 bp, Artificial
  Synthetic oligonucleotide
tcggctgctgtggtcaatgagcgtctggggacgttggaccctgaaatcgc

SEQ ID NO: 275442 - DNA, 50 bp, Artificial
  Synthetic oligonucleotide
agctggaccaagcgagacctcgcaagaatctgcagctgcatagccggtgc

SEQ ID NO: 275443 - DNA, 50 bp, Artificial
  Synthetic oligonucleotide
acaggagcgcaccagagaggcaaccaccatgcggcgtatgatcaacagcg

SEQ ID NO: 275444 - DNA, 50 bp, Artificial
  Synthetic oligonucleotide
agctgcacagagggccagtgctcgagggcagacagtatggctctgaacga

SEQ ID NO: 275445 - DNA, 50 bp, Artificial
  Synthetic oligonucleotide
acagcgcgctcgagtcggcggtttgcccaagcacaggggaagttggcgcc

SEQ ID NO: 275446 - DNA, 58 bp, Artificial
  Synthetic oligonucleotide
gccgatgtaacttctgcgatcttggccgatgttctcttcctcgcagtccgttgggcta

SEQ ID NO: 275447 - DNA, 50 bp, Artificial
  Synthetic oligonucleotide
tcgggcggacaagaggtaaacaacatcgtctggagaccccagggcgactg

SEQ ID NO: 275448 - DNA, 50 bp, Artificial
  Synthetic oligonucleotide
acagagtttggcgccctgcctccttcgtcggtccccgtcattctccgcga

SEQ ID NO: 275449 - DNA, 50 bp, Artificial
  Synthetic oligonucleotide
agctgaactgcttacgcaccgctcccccactgccttgccatctgaggcgc

SEQ ID NO: 275450 - DNA, 50 bp, Artificial
  Synthetic oligonucleotide
acagaagttgtggggccgagtccgttggcacggtccggtgcagattcacc

SEQ ID NO: 275451 - DNA, 50 bp, Artificial
  Synthetic oligonucleotide
agctctgggtattcggcggtgacacgcctcagggtctcatcaacgacgta

SEQ ID NO: 275452 - DNA, 50 bp, Artificial
  Synthetic oligonucleotide
acactgtaggccttgcaagaggcgttccgcccacgcttttggagactcgc

SEQ ID NO: 275453 - DNA, 50 bp, Artificial
  Synthetic oligonucleotide
ttttaagctagggaatgaaatccttgcgatgtccattgtattggcacctt

SEQ ID NO: 275454 - DNA, 50 bp, Artificial
  Synthetic oligonucleotide
tcgggttactggatcgccctccttgtatcactgtggatctagcaagagaa

SEQ ID NO: 275455 - DNA, 50 bp, Artificial
  Synthetic oligonucleotide
agcgcttaagccgcaatgagcgcggaaacccgttctaagttgggctcctg

SEQ ID NO: 275456 - DNA, 50 bp, Artificial
  Synthetic oligonucleotide
acaacaccggcgcgagtgcgtagtgcagcaatggcggccactactgaaga

SEQ ID NO: 275457 - DNA, 56 bp, Artificial
  Synthetic oligonucleotide
tcggcggttgcgtactagtccttcctcgagaacaaagccacgtgacctcggagtac

SEQ ID NO: 275458 - DNA, 50 bp, Artificial
  Synthetic oligonucleotide
agcgctcccggtggcaacttttggacgtctagcgtacactagccgagcca

SEQ ID NO: 275459 - DNA, 50 bp, Artificial
  Synthetic oligonucleotide
agcgcgtgtcacttctggcggctgcactagaactaaccttctcgggagcg

SEQ ID NO: 275460 - DNA, 50 bp, Artificial
  Synthetic oligonucleotide
agcgcgtcgtgctagtagacctgcgaccacatgcctcgtccgcaggagtc

SEQ ID NO: 275461 - DNA, 50 bp, Artificial
  Synthetic oligonucleotide
agcgcgaggggagtggcacctgagcgcatagactggtacgtactcgtgat

SEQ ID NO: 275462 - DNA, 50 bp, Artificial
  Synthetic oligonucleotide
agcgcccgaccatggagtagtcagttcttggctgtgcacccgcctgaaat

SEQ ID NO: 275463 - DNA, 50 bp, Artificial
  Synthetic oligonucleotide
agcgcccaaggagaattttggttgcgaagccccagctggtttactggcgg

SEQ ID NO: 275464 - DNA, 50 bp, Artificial
  Synthetic oligonucleotide
acaaaggaccactcgccctggcgctctctggaccgcgaaatcaccggggt

SEQ ID NO: 275465 - DNA, 50 bp, Artificial
  Synthetic oligonucleotide
acaaagcgcgacgctgcggacttcgaaatcggccaaagggtccttcacgg

SEQ ID NO: 275466 - DNA, 50 bp, Artificial
  Synthetic oligonucleotide
aaactggcgcgcataaagcatgtcccaagcgccaaatgactgctccgcca

SEQ ID NO: 275467 - DNA, 50 bp, Artificial
  Synthetic oligonucleotide
agcgcaaacatgcgaccaatgggtcaaaataatggtaagacgctgcaaaa

SEQ ID NO: 275468 - DNA, 54 bp, Artificial
  Synthetic oligonucleotide
caagtccctctccgcggtccgttgttcacggtcaccccgccacaagaaagtgta

SEQ ID NO: 275469 - DNA, 50 bp, Artificial
  Synthetic oligonucleotide
agcgagggtctcacaggcgctctagcttcccccgccatcggctcaaatga

SEQ ID NO: 275470 - DNA, 50 bp, Artificial
  Synthetic oligonucleotide
aaagagccatcctctgagccggctagcatcgcggagactagcgcacagga

SEQ ID NO: 275471 - DNA, 50 bp, Artificial
  Synthetic oligonucleotide
aattgacgggaagttctggccgatgcgttagggctgcaccgtcccagcag

SEQ ID NO: 275472 - DNA, 50 bp, Artificial
  Synthetic oligonucleotide
aaagcatgaggggagccttgtgtcctctttggccccggctgcgttgccat

SEQ ID NO: 275473 - DNA, 50 bp, Artificial
  Synthetic oligonucleotide
aaagcgcggttcgggcactcaattgcaggtctccccgacacacgattcta

SEQ ID NO: 275474 - DNA, 50 bp, Artificial
  Synthetic oligonucleotide
tgttgagttccatatcggtctcattgaaacctaggttcgaatagtcagtg

SEQ ID NO: 275475 - DNA, 50 bp, Artificial
  Synthetic oligonucleotide
tcgtctataccatttaagcgcatctccactgtcgggaaataattttcgtc

SEQ ID NO: 275476 - DNA, 50 bp, Artificial
  Synthetic oligonucleotide
tgttggttcagattaagcgctaaataaggacatgacacatgcgaatcata

SEQ ID NO: 275477 - DNA, 50 bp, Artificial
  Synthetic oligonucleotide
agctagacgctgcaggccagctgcattccaagtgcgacggtgagtcacag

SEQ ID NO: 275478 - DNA, 50 bp, Artificial
  Synthetic oligonucleotide
accaagatcccagacggcggctccaccactgtgtaccgctcgggcaagtt

SEQ ID NO: 275479 - DNA, 58 bp, Artificial
  Synthetic oligonucleotide
aattcctcttcctagctactttcatcaattgtggaagattcagcgatattaagaacgt

SEQ ID NO: 275480 - DNA, 57 bp, Artificial
  Synthetic oligonucleotide
tgccggaggctcagcgtgacagtgcagataggttacctgccaaggacgacggtggat

SEQ ID NO: 275481 - DNA, 50 bp, Artificial
  Synthetic oligonucleotide
agcgtgtcctgcgtgggtgatattctggcagcggacccggggagactgct

SEQ ID NO: 275482 - DNA, 50 bp, Artificial
  Synthetic oligonucleotide
agcgtcttgaaacaccaggtgtgcaccccaggcgggaccacaatcgcggg

SEQ ID NO: 275483 - DNA, 50 bp, Artificial
  Synthetic oligonucleotide
aaaccggcggaagaccagcaggcgttcgcaagtgaaccacgttctctcga

SEQ ID NO: 275484 - DNA, 50 bp, Artificial
  Synthetic oligonucleotide
aaacgccagttcacacgcgcctgagaaaccctctgggcattccaacggca

SEQ ID NO: 275485 - DNA, 50 bp, Artificial
  Synthetic oligonucleotide
agcgtaagtgcatgcggcggactccatcgacgttgtgtcgtgtttccgct

SEQ ID NO: 275486 - DNA, 50 bp, Artificial
  Synthetic oligonucleotide
agcgtaaaccggctagggcatatagtgctggcttcacgcggtgtgcggtt

SEQ ID NO: 275487 - DNA, 50 bp, Artificial
  Synthetic oligonucleotide
agcggtgctagacgttgtgctgcccggtcgcaagatgtttggcgttgagt

SEQ ID NO: 275488 - DNA, 50 bp, Artificial
  Synthetic oligonucleotide
tgtttacctcgaaactacgggcaggcttgagaaattatttacggttcggc

SEQ ID NO: 275489 - DNA, 50 bp, Artificial
  Synthetic oligonucleotide
agcgggctggagtccactggatccgtcacttctgtcgccgttagctcggg

SEQ ID NO: 275490 - DNA, 50 bp, Artificial
  Synthetic oligonucleotide
accactgttggggtcgcccttgttgcaccgggactggcacgtcctatata

SEQ ID NO: 275491 - DNA, 57 bp, Artificial
  Synthetic oligonucleotide
gcaagtttaatgggacgaattatatcagtaatgtgtaaattccgacacaatgttcgg

SEQ ID NO: 275492 - DNA, 50 bp, Artificial
  Synthetic oligonucleotide
agcgggatggatgtgtccaggcgacagtcgggaggcagagcgccgttgta

SEQ ID NO: 275493 - DNA, 50 bp, Artificial
  Synthetic oligonucleotide
agcggatcacacggtacaaaggccgagtcaccgggcgaaaatacggccga

SEQ ID NO: 275494 - DNA, 50 bp, Artificial
  Synthetic oligonucleotide
acaaggtacgcacggctacacctgcggcctcaactggcacaagggcacgt

SEQ ID NO: 275495 - DNA, 50 bp, Artificial
  Synthetic oligonucleotide
acaaccttcatgcgcgatccacgctcttggcagctggctcggcctcttgt

SEQ ID NO: 275496 - DNA, 50 bp, Artificial
  Synthetic oligonucleotide
aagagggtcctcaaagtccgccagtgtgcgttgacctccgccactggttc

SEQ ID NO: 275497 - DNA, 50 bp, Artificial
  Synthetic oligonucleotide
actcgccgcgggggtttcccgtaggccagaggcttgcaactccgactatc

SEQ ID NO: 275498 - DNA, 50 bp, Artificial
  Synthetic oligonucleotide
actcgccgccttagcgagaccctcggttcccaacggatgtcacgtgccaa

SEQ ID NO: 275499 - DNA, 50 bp, Artificial
  Synthetic oligonucleotide
actccagcatgagattaggtaacataaatacgagaacacgcttgtcgcag

SEQ ID NO: 275500 - DNA, 50 bp, Artificial
  Synthetic oligonucleotide
ttcgtattagtcaaccgtatcaacacaatagcatgcgaccgcgaacttct

SEQ ID NO: 275501 - DNA, 50 bp, Artificial
  Synthetic oligonucleotide
acgcggtcggatgcgctaccgtcactggcaaaaccaacttcagcgcctaa

SEQ ID NO: 275502 - DNA, 57 bp, Artificial
  Synthetic oligonucleotide
gtcattcagccgccctggtgtagccaccaataagtcacagccgcggtcaacctccct

SEQ ID NO: 275503 - DNA, 50 bp, Artificial
  Synthetic oligonucleotide
actccagagcgggattcgcagtccgagattcgcaagcccagagcctagga

SEQ ID NO: 275504 - DNA, 50 bp, Artificial
  Synthetic oligonucleotide
acgcggtggctttttactctgcccgcccagttagcgcacttccggttgag

SEQ ID NO: 275505 - DNA, 50 bp, Artificial
  Synthetic oligonucleotide
actcattattcgccgcactcggtcgcacgttccgtccgcgggactgtgag

SEQ ID NO: 275506 - DNA, 50 bp, Artificial
  Synthetic oligonucleotide
acgcgtacccccttatggtgcgccttgtcgtttgcgctgctagccgctga

SEQ ID NO: 275507 - DNA, 50 bp, Artificial
  Synthetic oligonucleotide
acgcgttggtcaagaacgaatcacccaaaatggtacccgtattatcgctt

SEQ ID NO: 275508 - DNA, 50 bp, Artificial
  Synthetic oligonucleotide
aagtgagggggtaggagcatcgcgttttaccaaaagggggcctgcggctg

SEQ ID NO: 275509 - DNA, 50 bp, Artificial
  Synthetic oligonucleotide
actagttggtgcggggccttgggcagttggagcgtatgccatttgcgggg

SEQ ID NO: 275510 - DNA, 50 bp, Artificial
  Synthetic oligonucleotide
aagcaaagggcagcgaatcacccgacttggtccaaccagcggggcgtgaa

SEQ ID NO: 275511 - DNA, 50 bp, Artificial
  Synthetic oligonucleotide
aagcacaaggcaagcaacagcggttgacgtgtgtaccggggaagccgagg

SEQ ID NO: 275512 - DNA, 50 bp, Artificial
  Synthetic oligonucleotide
tggcgactggtgacctgctctgctgcccactaccgcgttctggagtgtaa

SEQ ID NO: 275513 - DNA, 57 bp, Artificial
  Synthetic oligonucleotide
ttcttagtgatctcaccgccgatccacccaagcgtctcgttcgggtaccagcaacga

SEQ ID NO: 275514 - DNA, 50 bp, Artificial
  Synthetic oligonucleotide
aagcaccaacacgtacttcctgacggaggagaaccaccccgcttccctga

SEQ ID NO: 275515 - DNA, 50 bp, Artificial
  Synthetic oligonucleotide
aagcggcgactggacgagctaaacgagcgcaagtcgaaggagcgcctgga

SEQ ID NO: 275516 - DNA, 50 bp, Artificial
  Synthetic oligonucleotide
aatacccatcggcctcctgtcggtcgttctatgagcgccaacgtcgccct

SEQ ID NO: 275517 - DNA, 50 bp, Artificial
  Synthetic oligonucleotide
acgccgaagtctttggactcaccgggcttgcatatcatgggcaagggcct

SEQ ID NO: 275518 - DNA, 50 bp, Artificial
  Synthetic oligonucleotide
aactggagggggagcatgcttgggagctgcggccatcgaaacttcaggat

SEQ ID NO: 275519 - DNA, 50 bp, Artificial
  Synthetic oligonucleotide
aataacggcaatacgcaagagccgccgagctccccctttgcgcgtcagta

SEQ ID NO: 275520 - DNA, 50 bp, Artificial
  Synthetic oligonucleotide
acgccgaccaaacgtgttgccaccgatttacgcaggtgcccgccgtagcg

SEQ ID NO: 275521 - DNA, 50 bp, Artificial
  Synthetic oligonucleotide
acgccggagtgcgggggacgccagttgggcgttagagattcgggccagat

SEQ ID NO: 275522 - DNA, 50 bp, Artificial
  Synthetic oligonucleotide
aagaatgcgccgcagcgctaacctacgcgacagggggagccaggtctaga

SEQ ID NO: 275523 - DNA, 50 bp, Artificial
  Synthetic oligonucleotide
actgccgttgtcagttgggggccggcaatccatgaagcccggtacctgta

SEQ ID NO: 275524 - DNA, 57 bp, Artificial
  Synthetic oligonucleotide
ttgtgacctcggggaatatataataaagagtcagattatgtgcgataaggtaaataa

SEQ ID NO: 275525 - DNA, 50 bp, Artificial
  Synthetic oligonucleotide
actgccgtcccgatctcgacgcacgtgacccctgtcccgtacaccgtgac

SEQ ID NO: 275526 - DNA, 50 bp, Artificial
  Synthetic oligonucleotide
aagacaacgcgagcaccgctccgcttgtgtcacattgctcgtcctccgca

SEQ ID NO: 275527 - DNA, 50 bp, Artificial
  Synthetic oligonucleotide
acgcgagtccgagcatccgatgaacagtgtgtgaggcgcctggccgtgag

SEQ ID NO: 275528 - DNA, 50 bp, Artificial
  Synthetic oligonucleotide
actcggcagagacactgtgggtcccccaccgcgacgcctccacggtaggc

SEQ ID NO: 275529 - DNA, 50 bp, Artificial
  Synthetic oligonucleotide
acgcgcccggagcttgacctgcgaggaacgccttaacgcgatccacgtga

SEQ ID NO: 275530 - DNA, 50 bp, Artificial
  Synthetic oligonucleotide
acgcgcctgagaaaccctctgggcattccaacggcactggcgctatgaac

SEQ ID NO: 275531 - DNA, 50 bp, Artificial
  Synthetic oligonucleotide
aagttctggccgatgcgttagggctgcaccgtcccagcaggcacgcttca

SEQ ID NO: 275532 - DNA, 50 bp, Artificial
  Synthetic oligonucleotide
aagtggccatagaaacggctcatccgcagaccagtcgagccacgtgccct

SEQ ID NO: 275533 - DNA, 50 bp, Artificial
  Synthetic oligonucleotide
actcggcacattccagtgttgcggtccagactgaacctggcacgtccccc

SEQ ID NO: 275534 - DNA, 50 bp, Artificial
  Synthetic oligonucleotide
aagacaggcgagcaccccagcgtcttgaaacaccaggtgtgcaccccagg

SEQ ID NO: 275535 - DNA, 55 bp, Artificial
  Synthetic oligonucleotide
ccagtttaagttgacaaattaatgtctaggtcgcgtacttgtattttcaacagct

SEQ ID NO: 275536 - DNA, 50 bp, Artificial
  Synthetic oligonucleotide
aagtgcggggcaggctgctgatagcgtgggatcggaaaacagaggcgagt

SEQ ID NO: 275537 - DNA, 50 bp, Artificial
  Synthetic oligonucleotide
acgctctgtccgcttcgacaagctctctcgcacaactcagatccggccgg

SEQ ID NO: 275538 - DNA, 50 bp, Artificial
  Synthetic oligonucleotide
aagggggcagcacggcacagacctagaaccttcgatctaaacgacgcccg

SEQ ID NO: 275539 - DNA, 50 bp, Artificial
  Synthetic oligonucleotide
acggttctgcccaacgctcctcgccacgcactagctaccttccctaccgt

SEQ ID NO: 275540 - DNA, 50 bp, Artificial
  Synthetic oligonucleotide
acggtacgtggcccgaaccacctggtcctaaacctcctggccctagctcg

SEQ ID NO: 275541 - DNA, 49 bp, Artificial
  Synthetic oligonucleotide
acgggtttttccgggaggtcaggacacgcaacgggtaccgggtgccgcg

SEQ ID NO: 275542 - DNA, 50 bp, Artificial
  Synthetic oligonucleotide
acggggcgacgccaaagggagttgggtaccagtctttgatcggggaccat

SEQ ID NO: 275543 - DNA, 50 bp, Artificial
  Synthetic oligonucleotide
acggctgttacgattattgtggcagggcgcctaatgttggcgcgggtcct

SEQ ID NO: 275544 - DNA, 50 bp, Artificial
  Synthetic oligonucleotide
ttccgtccatgcctctaccgctctccctaactcctaggcggacctccgcc

SEQ ID NO: 275545 - DNA, 50 bp, Artificial
  Synthetic oligonucleotide
acggcggcgaaaggcaccaaacggcctaggatcaacctagtgttggcgga

SEQ ID NO: 275546 - DNA, 56 bp, Artificial
  Synthetic oligonucleotide
ccgacgccccagttgtttctagtgctgaaacatccagtaccgctacttccgacgcc

SEQ ID NO: 275547 - DNA, 50 bp, Artificial
  Synthetic oligonucleotide
tggcactaaagacgcagggagcgcctgttgatcgcctgctcttgcagcgt

SEQ ID NO: 275548 - DNA, 50 bp, Artificial
  Synthetic oligonucleotide
ttcccgccgagcaagagggattagcggggactgagcccgaggcgagaagt

SEQ ID NO: 275549 - DNA, 50 bp, Artificial
  Synthetic oligonucleotide
acgctttggggaccccaacacccattgtaggcacggcacttggctgtgag

SEQ ID NO: 275550 - DNA, 50 bp, Artificial
  Synthetic oligonucleotide
acggcctgggggagtccgggcctgagttgggtgatctccgcttcttatta

SEQ ID NO: 275551 - DNA, 50 bp, Artificial
  Synthetic oligonucleotide
acggcacacctcggcaggggcaagcctatggaccgggacgacatgccata

SEQ ID NO: 275552 - DNA, 50 bp, Artificial
  Synthetic oligonucleotide
acggagtttatcgtatctacgatccatcagttgtaaagacagattgcaag

SEQ ID NO: 275553 - DNA, 50 bp, Artificial
  Synthetic oligonucleotide
acggaccgacccgcgactctacaggcgaatccgcaggcgactctgcagac

SEQ ID NO: 275554 - DNA, 50 bp, Artificial
  Synthetic oligonucleotide
aaggtccgcttgtgcctttgaccgccgagcatcagtgggtgaagctggtc

SEQ ID NO: 275555 - DNA, 50 bp, Artificial
  Synthetic oligonucleotide
aagtacgctccgccacctatcacatctcctagcagtgccccacgcggctc

SEQ ID NO: 275556 - DNA, 50 bp, Artificial
  Synthetic oligonucleotide
aagcgtgaagcccgttcagtgtcggtcctcatcacgtcatgcacgggtgc

SEQ ID NO: 275557 - DNA, 57 bp, Artificial
  Synthetic oligonucleotide
gcctctggccaagttgtaccggcgttgccggcgaagtagttagatactgatgtcgga

SEQ ID NO: 275558 - DNA, 50 bp, Artificial
  Synthetic oligonucleotide
tgcgagttatataccgcgccgattgtctgtcctgcaggttacgtattgct

SEQ ID NO: 275559 - DNA, 50 bp, Artificial
  Synthetic oligonucleotide
aagctcaggacacgcccagctcaggtgaagaagccatggtagcgtgaggg

SEQ ID NO: 275560 - DNA, 50 bp, Artificial
  Synthetic oligonucleotide
acgttgtccgagacctggcgcacttccactcaggggaggctacggctccg

SEQ ID NO: 275561 - DNA, 50 bp, Artificial
  Synthetic oligonucleotide
aagctggccgcaaagaatggctgcgatcagtgcaacgtctggtcccacca

SEQ ID NO: 275562 - DNA, 50 bp, Artificial
  Synthetic oligonucleotide
acgtgtgctgcggttagagcctagggctaacgactcagcgccgcaatcta

SEQ ID NO: 275563 - DNA, 50 bp, Artificial
  Synthetic oligonucleotide
aagtaaaagagtcgctggaggcgccagtggtaaggccggagggctgcttg

SEQ ID NO: 275564 - DNA, 50 bp, Artificial
  Synthetic oligonucleotide
acgtggaccctgcctccaagatgccaacccatcggacaaagttgggtggc

SEQ ID NO: 275565 - DNA, 50 bp, Artificial
  Synthetic oligonucleotide
aaggagcatgactctgcggcccatttggagcagtccctccgtgtgcagct

SEQ ID NO: 275566 - DNA, 50 bp, Artificial
  Synthetic oligonucleotide
acgctagaccaattagtcgcaaaggcaatacgtacttcattcccatgctt

SEQ ID NO: 275567 - DNA, 50 bp, Artificial
  Synthetic oligonucleotide
acgtgccgggctggtctcccattatcgctgaaacacgcaactgtggccga

SEQ ID NO: 275568 - DNA, 50 bp, Artificial
  Synthetic oligonucleotide
tcacccgccccctccccctattacgtctccgaggtcccggtttcgtaaga

SEQ ID NO: 275569 - DNA, 50 bp, Artificial
  Synthetic oligonucleotide
acgtgactgggagtcatcgggcggcgagtgaccaaacaccctgagggggc

SEQ ID NO: 275570 - DNA, 50 bp, Artificial
  Synthetic oligonucleotide
acgtgaccccaggtactgcgccctcgtagacatgaggcccccatacaagg

SEQ ID NO: 275571 - DNA, 50 bp, Artificial
  Synthetic oligonucleotide
aaggcaaagtacggcgggttccgtcacttggtggactgcgttgcgacccc

SEQ ID NO: 275572 - DNA, 50 bp, Artificial
  Synthetic oligonucleotide
aaggctgagttccaaaaccctggtgggtctgtaaaggaccgcgcggctct

SEQ ID NO: 275573 - DNA, 50 bp, Artificial
  Synthetic oligonucleotide
tgctccaagcagtgtcacgtctgaataagcttggacggactgcttgtacc

SEQ ID NO: 275574 - DNA, 50 bp, Artificial
  Synthetic oligonucleotide
ttcctgcatgacgagattcaactcaggacccgaaaacccgtcaatcgtgg

SEQ ID NO: 275575 - DNA, 50 bp, Artificial
  Synthetic oligonucleotide
ttggaatggtgatctaagcaaggcgattgacgtttgatacagtggtggtg

SEQ ID NO: 275576 - DNA, 50 bp, Artificial
  Synthetic oligonucleotide
ttagcccctcggacgcggctttaggaagttcggccttgcgatgcgatggg

SEQ ID NO: 275577 - DNA, 50 bp, Artificial
  Synthetic oligonucleotide
aacgcatggcgcagcaggtcagacttgtcgagtctggcgatccgcaccag

SEQ ID NO: 275578 - DNA, 50 bp, Artificial
  Synthetic oligonucleotide
acctgcgttggggaacccccgttgggactcgaagcaaccatagctgcggc

SEQ ID NO: 275579 - DNA, 56 bp, Artificial
  Synthetic oligonucleotide
cggtgcctctcgtccggggcaagttctctccacctcggcggctaaaatcttgtgcg

SEQ ID NO: 275580 - DNA, 50 bp, Artificial
  Synthetic oligonucleotide
aatccgacgtgatttccggaccggtctctgcaccaccacgcgacttgtgg

SEQ ID NO: 275581 - DNA, 50 bp, Artificial
  Synthetic oligonucleotide
agatactgggtgccctgaagaccgcatccggacccaagtgcaaggtgcag

SEQ ID NO: 275582 - DNA, 50 bp, Artificial
  Synthetic oligonucleotide
agataaagaccataccggcactggtctccccggcagacgacccgccgtga

SEQ ID NO: 275583 - DNA, 50 bp, Artificial
  Synthetic oligonucleotide
ttgctggacgtagtaggggacggagtaggagcggcaggagtgtcagcgtt

SEQ ID NO: 275584 - DNA, 50 bp, Artificial
  Synthetic oligonucleotide
acctggaggagggggtgcatcgtcgtgaccagaggccacggaagatggac

SEQ ID NO: 275585 - DNA, 50 bp, Artificial
  Synthetic oligonucleotide
agagtgtctcgggcccgttgtgggtgcataccacatacctggacggcgat

SEQ ID NO: 275586 - DNA, 50 bp, Artificial
  Synthetic oligonucleotide
agagtcgcgtggctggctgcattcactgcccccagactgtcttgaaagct

SEQ ID NO: 275587 - DNA, 50 bp, Artificial
  Synthetic oligonucleotide
ttgctgacacagagaaataacgcgatatcctattatcaatggagggacgt

SEQ ID NO: 275588 - DNA, 50 bp, Artificial
  Synthetic oligonucleotide
aatcccgggtttgccaacaggctgcgcgactcttttcgcttccgcacctc

SEQ ID NO: 275589 - DNA, 50 bp, Artificial
  Synthetic oligonucleotide
acctggcgcacttccactcaggggaggctacggctccggcagagctgtcg

SEQ ID NO: 275590 - DNA, 50 bp, Artificial
  Synthetic oligonucleotide
agaagtaaataaccgggggggacgaacccagctactattagctgggttcg

SEQ ID NO: 275591 - DNA, 57 bp, Artificial
  Synthetic oligonucleotide
ccgctcgtgaagccgtccctgttgtaagcagacgtggagtttccgtgatccgaatgg

SEQ ID NO: 275592 - DNA, 50 bp, Artificial
  Synthetic oligonucleotide
aacgcctgcacacggctcggttggctcttccacatcaagctcgcacgaaa

SEQ ID NO: 275593 - DNA, 50 bp, Artificial
  Synthetic oligonucleotide
agaggttgattacgcgcacaacgcaggtcgggtgcccttgcaagaacgta

SEQ ID NO: 275594 - DNA, 50 bp, Artificial
  Synthetic oligonucleotide
acctggttcggcgcttgtgctctccctgggggtaccttggagcgaatcct

SEQ ID NO: 275595 - DNA, 50 bp, Artificial
  Synthetic oligonucleotide
agaggtccgagcgggcgccacacttgcacgtgatggtgacgtgtgtcatc

SEQ ID NO: 275596 - DNA, 50 bp, Artificial
  Synthetic oligonucleotide
agcacccttggagccaccgctcaccgctaaatgcagcccgcccatgtagt

SEQ ID NO: 275597 - DNA, 50 bp, Artificial
  Synthetic oligonucleotide
agcacaggagacttcgaccgggtcctctctgcagggggtttagcagagct

SEQ ID NO: 275598 - DNA, 50 bp, Artificial
  Synthetic oligonucleotide
aacctcagaggacgttactctattgaaacagaggattgaggcatatccgg

SEQ ID NO: 275599 - DNA, 50 bp, Artificial
  Synthetic oligonucleotide
tgtaaagtgaagtaaagagtacagaatgaaggatgcgcccaagagggaga

SEQ ID NO: 275600 - DNA, 50 bp, Artificial
  Synthetic oligonucleotide
aaccttaaggggatcgcaccactgttggggtcgcccttgttgcaccggga

SEQ ID NO: 275601 - DNA, 50 bp, Artificial
  Synthetic oligonucleotide
agcaagcagtgcggcgtgttgataaccgccacctcagttaccctgccgtc

SEQ ID NO: 275602 - DNA, 56 bp, Artificial
  Synthetic oligonucleotide
agcgtttaacctggggagcatggtatcgatggggtcgcctatcgggactgccgtat

SEQ ID NO: 275603 - DNA, 50 bp, Artificial
  Synthetic oligonucleotide
aacgacagccctcccaagtacgaggacctattcccctgcggtagcgaccc

SEQ ID NO: 275604 - DNA, 50 bp, Artificial
  Synthetic oligonucleotide
acctcattctgctggcccgtgttggcatgcggcagtaccacggtctcact

SEQ ID NO: 275605 - DNA, 50 bp, Artificial
  Synthetic oligonucleotide
tgaacgttacggtgtctcgtaatgtttaaacttcccgtttgtaaacagtg

SEQ ID NO: 275606 - DNA, 50 bp, Artificial
  Synthetic oligonucleotide
aacgaggacaactataataccatgacctttcccagagaataagcattgac

SEQ ID NO: 275607 - DNA, 50 bp, Artificial
  Synthetic oligonucleotide
aacgaggccacatgggtccgggagggtccttgcaatcgcgactagcatgg

SEQ ID NO: 275608 - DNA, 50 bp, Artificial
  Synthetic oligonucleotide
acctgcattgtgccgggtgttgcgatactgtggctcggggttaccaaggc

SEQ ID NO: 275609 - DNA, 50 bp, Artificial
  Synthetic oligonucleotide
aatctcagaattgtggaaacacgaccgcggggttcggcagtgcttcgcgc

SEQ ID NO: 275610 - DNA, 50 bp, Artificial
  Synthetic oligonucleotide
agatgtgcgcacaaatgcgggctcttgttttgcgtcgcggatcctacccc

SEQ ID NO: 275611 - DNA, 50 bp, Artificial
  Synthetic oligonucleotide
aatcgtccccaagacccggaccagtaaccggggtaccgagactaccctgc

SEQ ID NO: 275612 - DNA, 50 bp, Artificial
  Synthetic oligonucleotide
aatcggtccacggattggggaatgtctgctgaccctgcggcgtagtggat

SEQ ID NO: 275613 - DNA, 57 bp, Artificial
  Synthetic oligonucleotide
tcccgctgcacagcttgctatcccgctgcacaacatgaaattgctcacgtcgtgcca

SEQ ID NO: 275614 - DNA, 50 bp, Artificial
  Synthetic oligonucleotide
aatcggccaacgtagacgcggtggtcttgagggctgcctgggcaaccgga

SEQ ID NO: 275615 - DNA, 50 bp, Artificial
  Synthetic oligonucleotide
ttggagttctttatgtgcgatagtaggtccgatagtgcctcatactatta

SEQ ID NO: 275616 - DNA, 50 bp, Artificial
  Synthetic oligonucleotide
aacgcaggtcgggtgcccttgcaagaacgtatcacgcttggatcaggcca

SEQ ID NO: 275617 - DNA, 50 bp, Artificial
  Synthetic oligonucleotide
acgcacaggtcaaacgaaatgataccgtctcaacctttgcatctatttca

SEQ ID NO: 275618 - DNA, 50 bp, Artificial
  Synthetic oligonucleotide
aatactgccgcaaatgggtaacaaacctaggataaggagtggcccttggg

SEQ ID NO: 275619 - DNA, 50 bp, Artificial
  Synthetic oligonucleotide
agacggatcggccatgtttgggcagcgtggggcttcaaatgctcaggatg

SEQ ID NO: 275620 - DNA, 50 bp, Artificial
  Synthetic oligonucleotide
agacgccccctaggatgccagagcacttgcttcacgccagccggaacctt

SEQ ID NO: 275621 - DNA, 50 bp, Artificial
  Synthetic oligonucleotide
tggtagctcattgttcggaaacaccagtgccgcggggccagctgtgggag

SEQ ID NO: 275622 - DNA, 50 bp, Artificial
  Synthetic oligonucleotide
aacggtcgaagtgtcctggaagcccgtccgatgagctagaccggagctgg

SEQ ID NO: 275623 - DNA, 50 bp, Artificial
  Synthetic oligonucleotide
aacgttcgtgctgcttggaatgcgtgcacccctcgcgcttttctgttcgg

SEQ ID NO: 275624 - DNA, 56 bp, Artificial
  Synthetic oligonucleotide
tcaattccgcgggtcgcctttgtacgaagtcttccacgggaaccagtgcaacatcc

SEQ ID NO: 275625 - DNA, 50 bp, Artificial
  Synthetic oligonucleotide
agacactagctcgctgcggggagtagacttggcctcaccacgagcaggcg

SEQ ID NO: 275626 - DNA, 50 bp, Artificial
  Synthetic oligonucleotide
aacgttgactcacaagcctaccgagtgggggcgtccagcgcttgagtgtg

SEQ ID NO: 275627 - DNA, 50 bp, Artificial
  Synthetic oligonucleotide
aactcgcgacagtcagggcctgtgttggcctagttgcgtagcgccctata

SEQ ID NO: 275628 - DNA, 50 bp, Artificial
  Synthetic oligonucleotide
aactctgcctatgaggtcgtcgttttcgctgggcggggctgcgtacacta

SEQ ID NO: 275629 - DNA, 50 bp, Artificial
  Synthetic oligonucleotide
acgcagcaatcgccctcgcgcgatatcagcagtcctgcccgtggacactc

SEQ ID NO: 275630 - DNA, 50 bp, Artificial
  Synthetic oligonucleotide
agaatgaccaattcgctaacactggtgccccgggccccaaatcgccggcc

SEQ ID NO: 275631 - DNA, 50 bp, Artificial
  Synthetic oligonucleotide
ttatcttagcattatttagtggaatagtaggtacagcaatgtctgtaatc

SEQ ID NO: 275632 - DNA, 50 bp, Artificial
  Synthetic oligonucleotide
agaagcacagctcggatgaatgcgcagtaagaagcaagggccccgggcgt

SEQ ID NO: 275633 - DNA, 50 bp, Artificial
  Synthetic oligonucleotide
acgcatatcggaggttctgtttgcaccatgatacatgtacgtttccagtt

SEQ ID NO: 275634 - DNA, 50 bp, Artificial
  Synthetic oligonucleotide
aactcttgcgagccatcccccacccgaaacaagcgtctcagcggactcac

SEQ ID NO: 275635 - DNA, 57 bp, Artificial
  Synthetic oligonucleotide
taatccgcaggggtagatgacagaagtgcgtggctgcaggactaggagagtggcgga

SEQ ID NO: 275636 - DNA, 50 bp, Artificial
  Synthetic oligonucleotide
aactgcgcccacgccacctcttgcggtggggatgtttttccgagcctacg

SEQ ID NO: 275637 - DNA, 50 bp, Artificial
  Synthetic oligonucleotide
acttcgccacgagggggcgagcatccgctagacttctcctcatcgtgagc

SEQ ID NO: 275638 - DNA, 50 bp, Artificial
  Synthetic oligonucleotide
acctgtatggaccagcacaacaccggcgcgagtgcgtagtgcagcaatgg

SEQ ID NO: 275639 - DNA, 50 bp, Artificial
  Synthetic oligonucleotide
aacgcggaccacgcgcccaggaaccctgacccgctctctaggtcaccgtc

SEQ ID NO: 275640 - DNA, 50 bp, Artificial
  Synthetic oligonucleotide
aatccaccccgggcccgtatgagtgcgacgctttcgactccgagctctct

SEQ ID NO: 275641 - DNA, 50 bp, Artificial
  Synthetic oligonucleotide
aacgctctgcagtccgaaagcggctgctctctggaacaacacgcctcccc

SEQ ID NO: 275642 - DNA, 50 bp, Artificial
  Synthetic oligonucleotide
ttgagcggaaccggagtgatcaaaagggtgggggcagcacatgcaatgct

SEQ ID NO: 275643 - DNA, 50 bp, Artificial
  Synthetic oligonucleotide
aacggcgatgcattacccggctaccacgcggccacagttacccggccacg

SEQ ID NO: 275644 - DNA, 50 bp, Artificial
  Synthetic oligonucleotide
acgaatggtggaccggtcgctacaatggccaacagggtgtcttcccgggc

SEQ ID NO: 275645 - DNA, 50 bp, Artificial
  Synthetic oligonucleotide
acgaccaccgggccttgccgctcaagcgtgatccttctggcatgttccgc

SEQ ID NO: 275646 - DNA, 57 bp, Artificial
  Synthetic oligonucleotide
ggccagtacatgaatctaagtggagaacaggtgtgcaaggtctgggcccggtacgcc

SEQ ID NO: 275647 - DNA, 50 bp, Artificial
  Synthetic oligonucleotide
agagcgccacattgtggtacacgtagcccatgttcgtgccctcgcagtcc

SEQ ID NO: 275648 - DNA, 50 bp, Artificial
  Synthetic oligonucleotide
aacgggaaaccacatgctactccagcgggtggcagcgacggtacgccaaa

SEQ ID NO: 275649 - DNA, 50 bp, Artificial
  Synthetic oligonucleotide
agagccatggccgctagaaccaggtgtggtcccacctcccgagtggttcg

SEQ ID NO: 275650 - DNA, 50 bp, Artificial
  Synthetic oligonucleotide
agagaggcgcggttacacgcgtctgcgagcatgtcggagtaccggagcgc

SEQ ID NO: 275651 - DNA, 50 bp, Artificial
  Synthetic oligonucleotide
aataggctccgccggccccgtactctgacccgacgcccaacttgaggccc

SEQ ID NO: 275652 - DNA, 50 bp, Artificial
  Synthetic oligonucleotide
agagagctgtgcccgctccctctagcaaaaccgaggggtgcaaggccggc

SEQ ID NO: 275653 - DNA, 50 bp, Artificial
  Synthetic oligonucleotide
aatagcccggatgcatacgtcaggttccgcagtcgcgcctcctgggggta

SEQ ID NO: 275654 - DNA, 50 bp, Artificial
  Synthetic oligonucleotide
acgagtgacttcagtggagcagactcgcagccttgtagcgtggggcaggg

SEQ ID NO: 275655 - DNA, 50 bp, Artificial
  Synthetic oligonucleotide
agacttccgacgtgtacccgatgcaggacaagcctccagtgatgccggct

SEQ ID NO: 275656 - DNA, 50 bp, Artificial
  Synthetic oligonucleotide
agacgtgcggcacccgttgggttttggagcgttcgtacacagcgaccagc

SEQ ID NO: 275657 - DNA, 57 bp, Artificial
  Synthetic oligonucleotide
atgggccatcaggtgagacttacgccaaatgcacaatcctgcagtccgatgcgtcct

SEQ ID NO: 275658 - DNA, 50 bp, Artificial
  Synthetic oligonucleotide
acgcacagcacgcgaactccctcgtgggtgacctctcggtgatttagcga

SEQ ID NO: 275659 - DNA, 50 bp, Artificial
  Synthetic oligonucleotide
cgccagagacccatccaggacttccatgggcaccaagcataagcgcccaa

SEQ ID NO: 275660 - DNA, 50 bp, Artificial
  Synthetic oligonucleotide
cgcagcgggaccgcgggacctgtggagatggaccatactcggaagggttg

SEQ ID NO: 275661 - DNA, 50 bp, Artificial
  Synthetic oligonucleotide
cgcagccttgtgcgtctgcgtgccaatgccccggcgcctagttgtccgga

SEQ ID NO: 275662 - DNA, 50 bp, Artificial
  Synthetic oligonucleotide
cgcacagcatcccgtggcaaatcgagccaagaggaatgcgattccgcggg

SEQ ID NO: 275663 - DNA, 50 bp, Artificial
  Synthetic oligonucleotide
gtcttcagcaaagcactccgcagggcctcatgcccaaaatccccgtcccg

SEQ ID NO: 275664 - DNA, 50 bp, Artificial
  Synthetic oligonucleotide
cgagtacgggtggtgcgagacaagcagaacaagtcgcggggctacgcatt

SEQ ID NO: 275665 - DNA, 50 bp, Artificial
  Synthetic oligonucleotide
cgagaggctggttagcgacccggttcccggcatcacagctgaacctcacg

SEQ ID NO: 275666 - DNA, 50 bp, Artificial
  Synthetic oligonucleotide
cgacgctcctgctcatgtggctgacgacatccctgccgaacccctaccct

SEQ ID NO: 275667 - DNA, 50 bp, Artificial
  Synthetic oligonucleotide
cgaccatcaaatgtacgagccgtaggatttgcgaacgtggaaacaaagct

SEQ ID NO: 275668 - DNA, 57 bp, Artificial
  Synthetic oligonucleotide
gcgaaactctcgaagcttagtgagcgtgcacctgagagagcttcacaggaccggggc

SEQ ID NO: 275669 - DNA, 50 bp, Artificial
  Synthetic oligonucleotide
gtgagccgtacagcggtctccaagagtgtgatggcctccgctatcgcacg

SEQ ID NO: 275670 - DNA, 50 bp, Artificial
  Synthetic oligonucleotide
cctttgactcgagcacaacgtcccacccgttccctggaaacgcgaaggga

SEQ ID NO: 275671 - DNA, 50 bp, Artificial
  Synthetic oligonucleotide
ccttgatctgttaggctccggcccagcggcaatggagttgtggcgcgacc

SEQ ID NO: 275672 - DNA, 50 bp, Artificial
  Synthetic oligonucleotide
cctgtcgaggacgtagttgactgcgttgtgttggaaagggtcccgcgcgg

SEQ ID NO: 275673 - DNA, 50 bp, Artificial
  Synthetic oligonucleotide
cctgtccggtgggtcaaggcatactttccgtggaccgcgccgtcttggga

SEQ ID NO: 275674 - DNA, 50 bp, Artificial
  Synthetic oligonucleotide
cctgtcaccgtgccatcaacattgaagcgcactagccgcccaacgaagga

SEQ ID NO: 275675 - DNA, 50 bp, Artificial
  Synthetic oligonucleotide
cctggggacaccttacggaggggcttgcccacaactccttggcatgccac

SEQ ID NO: 275676 - DNA, 50 bp, Artificial
  Synthetic oligonucleotide
cctggcagccatgcatgactatctggagaacttgggacggcggcatgcca

SEQ ID NO: 275677 - DNA, 50 bp, Artificial
  Synthetic oligonucleotide
gtgcgaccaccggtcgatgccttggatagcgaacgtccccttcgacttga

SEQ ID NO: 275678 - DNA, 50 bp, Artificial
  Synthetic oligonucleotide
cctgcgcagcaacatataccccggtggacgcgtgccagccaaacagcgtg

SEQ ID NO: 275679 - DNA, 56 bp, Artificial
  Synthetic oligonucleotide
atgggtttacggctggaaagtgatgcttttcgcgcggtgtgtgggtgcagtttcgt

SEQ ID NO: 275680 - DNA, 50 bp, Artificial
  Synthetic oligonucleotide
cctcgggtggaaaactggcgctgtggatcagagatgcggtggagcacgat

SEQ ID NO: 275681 - DNA, 50 bp, Artificial
  Synthetic oligonucleotide
ccgtttcctgtgcacggccggccccattctgaggctcatcccctctttgc

SEQ ID NO: 275682 - DNA, 50 bp, Artificial
  Synthetic oligonucleotide
ccgttcagtggaagcatgcatgagatcacgcaatagatcataagagaaaa

SEQ ID NO: 275683 - DNA, 50 bp, Artificial
  Synthetic oligonucleotide
ccgtggttagagcggacaacaagggccagactgcgaacctggggcttgca

SEQ ID NO: 275684 - DNA, 50 bp, Artificial
  Synthetic oligonucleotide
ccgtgacaatcaccgggtgagctgttaccctaagcgggacggagtgcggg

SEQ ID NO: 275685 - DNA, 50 bp, Artificial
  Synthetic oligonucleotide
cgtcagctgaaatcaatactggagctactagtgatcgtcgacactataat

SEQ ID NO: 275686 - DNA, 50 bp, Artificial
  Synthetic oligonucleotide
cgtcacatgcgctccaaagcatgcctaggaaacgggccacgggaagcttc

SEQ ID NO: 275687 - DNA, 50 bp, Artificial
  Synthetic oligonucleotide
cgtagacgcgcactccggggtcctgctcacgcactacggactagaccagc

SEQ ID NO: 275688 - DNA, 50 bp, Artificial
  Synthetic oligonucleotide
cgtaagggcccctgtcaccgtgccatcaacattgaagcgcactagccgcc

SEQ ID NO: 275689 - DNA, 50 bp, Artificial
  Synthetic oligonucleotide
cggtgactggtggcgacgaagagcctagcgacgagccagcgcgtccactt

SEQ ID NO: 275690 - DNA, 57 bp, Artificial
  Synthetic oligonucleotide
ccactgactcgtctttccaatggagctgcccgttaagagtgccagtgcgagcggaca

SEQ ID NO: 275691 - DNA, 50 bp, Artificial
  Synthetic oligonucleotide
cgggttccctcgtttatcagtcgacctggccacaaccaggggcagacgct

SEQ ID NO: 275692 - DNA, 50 bp, Artificial
  Synthetic oligonucleotide
cgggttagcgtacgccgcagtgccattatacagagccatctgtgcgcgta

SEQ ID NO: 275693 - DNA, 50 bp, Artificial
  Synthetic oligonucleotide
cggctgggtaatacgctgttggggtggtgctcgccccgttttgcctgttt

SEQ ID NO: 275694 - DNA, 50 bp, Artificial
  Synthetic oligonucleotide
cggctgacagtacagcgcacggctgaacggggcctatccactcaaacacg

SEQ ID NO: 275695 - DNA, 50 bp, Artificial
  Synthetic oligonucleotide
cggcccagtgacttgcaacgggataggggacgcaaatcacggacccgcaa

SEQ ID NO: 275696 - DNA, 50 bp, Artificial
  Synthetic oligonucleotide
gtcgagatgcacgacctgacaagaatcatgtatgaaacgtagaccaaggc

SEQ ID NO: 275697 - DNA, 50 bp, Artificial
  Synthetic oligonucleotide
cggccactacgtcccgcagcctggggtagtcttcgcaaagcataaccagc

SEQ ID NO: 275698 - DNA, 50 bp, Artificial
  Synthetic oligonucleotide
cggagtggcatccaggactaatgccttcacgtgaggatgtgtattaacag

SEQ ID NO: 275699 - DNA, 50 bp, Artificial
  Synthetic oligonucleotide
cggaccctttcgtcgcagaagcgcccgcacgacttcggtgcattgtgcgt

SEQ ID NO: 275700 - DNA, 50 bp, Artificial
  Synthetic oligonucleotide
cgctgacaacttgtccgctatcgctaaggctgccggtgcctccgttgacc

SEQ ID NO: 275701 - DNA, 52 bp, Artificial
  Synthetic oligonucleotide
agaattactagtaatacgtaaataaccaagttacggtgaatattctaactgt

SEQ ID NO: 275702 - DNA, 57 bp, Artificial
  Synthetic oligonucleotide
gccgtcagacttcgtgtgtcacaaatgcgggtaaggccagtgtcgcacaagcggata

SEQ ID NO: 275703 - DNA, 50 bp, Artificial
  Synthetic oligonucleotide
cgctctgtacacgcagcgagacctccaagcatttccaacttaggcaatgc

SEQ ID NO: 275704 - DNA, 50 bp, Artificial
  Synthetic oligonucleotide
cgctctctgagtgtactgcggcgctctttccgcggctggaactaggcagc

SEQ ID NO: 275705 - DNA, 50 bp, Artificial
  Synthetic oligonucleotide
cgctcgagaaggtggctagaaatcagaccgcggtgcccaaatcggcacct

SEQ ID NO: 275706 - DNA, 50 bp, Artificial
  Synthetic oligonucleotide
cgctcctcccggcagaccctagtttctctacaccgtgcggattcgcagcg

SEQ ID NO: 275707 - DNA, 50 bp, Artificial
  Synthetic oligonucleotide
cgcgttactttgcgacttcgggctcagtacgctcgcggagcggcttccag

SEQ ID NO: 275708 - DNA, 50 bp, Artificial
  Synthetic oligonucleotide
cgcggtcatccgtcccttgcggaccaacgccggtgtacaccttagccttt

SEQ ID NO: 275709 - DNA, 50 bp, Artificial
  Synthetic oligonucleotide
cgcggcccacgcagcgtgtcggagcctcctacagtgcctagccacctcat

SEQ ID NO: 275710 - DNA, 50 bp, Artificial
  Synthetic oligonucleotide
cgcggaactcgcgggtccagagcgccgtggtgctatttgaggcatcgatg

SEQ ID NO: 275711 - DNA, 50 bp, Artificial
  Synthetic oligonucleotide
cgcgcggagtggaagagtcttctggcggacagtttcgctgccgagacgct

SEQ ID NO: 275712 - DNA, 50 bp, Artificial
  Synthetic oligonucleotide
cgcgcaccgtccagatgtagctttatgccctcctcatggcaccagtcgct

SEQ ID NO: 275713 - DNA, 56 bp, Artificial
  Synthetic oligonucleotide
agaatgccaattataggggtgccgaggtgccttgaaaaccccttttgcgcgcctgc

SEQ ID NO: 275714 - DNA, 50 bp, Artificial
  Synthetic oligonucleotide
cccttaccggtagtcagggacccgggctgtacgatgcactggtcgtggta

SEQ ID NO: 275715 - DNA, 50 bp, Artificial
  Synthetic oligonucleotide
ccctgtcgcgtagacggtctttgttcgcagcgcgcccacgtctaatgtct

SEQ ID NO: 275716 - DNA, 50 bp, Artificial
  Synthetic oligonucleotide
ccctggtgcgggaaaacgaagttcacttgctaccactgggacgcggagct

SEQ ID NO: 275717 - DNA, 50 bp, Artificial
  Synthetic oligonucleotide
ccctcagacgcgtgcgcaggcaccccactacagatatctcacagcgggtg

SEQ ID NO: 275718 - DNA, 50 bp, Artificial
  Synthetic oligonucleotide
ccctaaaccgctagaggtacacgaggagaccaggccagtgcccgacgcgc

SEQ ID NO: 275719 - DNA, 50 bp, Artificial
  Synthetic oligonucleotide
cccgtcgggcatccctgctgagctctagcgtcctgtgagacctgaacgtc

SEQ ID NO: 275720 - DNA, 50 bp, Artificial
  Synthetic oligonucleotide
cccgtactcgtgtggcgcccacttgaccgaattgacggacgcagagtgca

SEQ ID NO: 275721 - DNA, 50 bp, Artificial
  Synthetic oligonucleotide
cccgcgaatgtacctctgtgccgggcagtcggccctctaaactgtaccct

SEQ ID NO: 275722 - DNA, 50 bp, Artificial
  Synthetic oligonucleotide
cccgcctgtgaccgttatcgtgtcggatggtggacctggcgccttgaggc

SEQ ID NO: 275723 - DNA, 50 bp, Artificial
  Synthetic oligonucleotide
ccccttgatttgggacactatacgttactgaatttctaggcatatgctcg

SEQ ID NO: 275724 - DNA, 54 bp, Artificial
  Synthetic oligonucleotide
gggaaataagaacgaatgaatagtagacgaagtatttataagttggcttgtttc

SEQ ID NO: 275725 - DNA, 50 bp, Artificial
  Synthetic oligonucleotide
ccccgtacgcacgatgatccgcctcccactccaaggccccattccatacc

SEQ ID NO: 275726 - DNA, 50 bp, Artificial
  Synthetic oligonucleotide
ccccggttacgcgctcgataggacctgcctctgctaggctgctcatccac

SEQ ID NO: 275727 - DNA, 50 bp, Artificial
  Synthetic oligonucleotide
ccccgcgagcatgactacaaggttttcgaggggtggcagatccccgagtc

SEQ ID NO: 275728 - DNA, 50 bp, Artificial
  Synthetic oligonucleotide
ccccgaagctaacgggccgacacaaggcgcatgcacagcctagttaggac

SEQ ID NO: 275729 - DNA, 50 bp, Artificial
  Synthetic oligonucleotide
ccccatgacgggttggggtgtgcctggggtattcaaggtggtcaggtgcg

SEQ ID NO: 275730 - DNA, 50 bp, Artificial
  Synthetic oligonucleotide
gttctcaccgaaactttactcgcatgaaagatcgactgctcctgttgtgc

SEQ ID NO: 275731 - DNA, 50 bp, Artificial
  Synthetic oligonucleotide
ccccaacacccattgtaggcacggcacttggctgtgagtcggccctgaat

SEQ ID NO: 275732 - DNA, 50 bp, Artificial
  Synthetic oligonucleotide
cccagttggccttgccggatccgtgcttcttgaccccgttaggcgaattc

SEQ ID NO: 275733 - DNA, 50 bp, Artificial
  Synthetic oligonucleotide
cccagggattgcaaatttatgtgtaaacttctgtccaggtaatatcggaa

SEQ ID NO: 275734 - DNA, 50 bp, Artificial
  Synthetic oligonucleotide
cccagctctgcgttaagaacagaaccgcggcccgcgctaccccagcctaa

SEQ ID NO: 275735 - DNA, 57 bp, Artificial
  Synthetic oligonucleotide
tccaacagaccacgccggttctcaaacccgacgtacattcttgctcagtagtggccg

SEQ ID NO: 275736 - DNA, 50 bp, Artificial
  Synthetic oligonucleotide
cccagcccaacgtatcaagaactatcgccagagaactgaagtcgttcctg

SEQ ID NO: 275737 - DNA, 50 bp, Artificial
  Synthetic oligonucleotide
cccactgcaagacgagacaaagcaccacggcacgtccttttcaaacagag

SEQ ID NO: 275738 - DNA, 50 bp, Artificial
  Synthetic oligonucleotide
cccaagtacgaggacctattcccctgcggtagcgacccaagtgccacaga

SEQ ID NO: 275739 - DNA, 50 bp, Artificial
  Synthetic oligonucleotide
ccatgaagcccggtacctgtactggttcgtctgaaagggacgccgcggaa

SEQ ID NO: 275740 - DNA, 50 bp, Artificial
  Synthetic oligonucleotide
gttgcgctcggaggatgatcagtataaggattggtttctactgccgaaac

SEQ ID NO: 275741 - DNA, 50 bp, Artificial
  Synthetic oligonucleotide
gttgcggttgcttggtacgctcggtgggcgttgactggtggagatttgcg

SEQ ID NO: 275742 - DNA, 50 bp, Artificial
  Synthetic oligonucleotide
ccgtcacagaaacacgtgcagtgcattcgccactgtgcatagccgcagga

SEQ ID NO: 275743 - DNA, 50 bp, Artificial
  Synthetic oligonucleotide
ccgtaggggcggagcttagaagccgagcaccccgcttgagtatgccattg

SEQ ID NO: 275744 - DNA, 50 bp, Artificial
  Synthetic oligonucleotide
ccgtagcccgaggtagctagcgagcccgtgttgcagattgtgagaacggc

SEQ ID NO: 275745 - DNA, 50 bp, Artificial
  Synthetic oligonucleotide
gtggccaacggagtgtatattcgcgaatcttcaagcgatttgatcagggg

SEQ ID NO: 275746 - DNA, 57 bp, Artificial
  Synthetic oligonucleotide
gcgagaaggcagggactttcgagctcccaagccagcgagacgggacaacgtcttcgt

SEQ ID NO: 275747 - DNA, 50 bp, Artificial
  Synthetic oligonucleotide
ccgggggtttgcgcacaggtctcggtactcgttctgagagcggctgagat

SEQ ID NO: 275748 - DNA, 50 bp, Artificial
  Synthetic oligonucleotide
ccgggctgcagcggagctctggctggaacaacagtggagactttcgtagc

SEQ ID NO: 275749 - DNA, 50 bp, Artificial
  Synthetic oligonucleotide
ccgggaacgcaattatggagggattcgggccgaaagaacgggcagaagcc

SEQ ID NO: 275750 - DNA, 50 bp, Artificial
  Synthetic oligonucleotide
ccggctctcgtacccaagctcagcgtttcctcaacgggttcgcaccgtga

SEQ ID NO: 275751 - DNA, 50 bp, Artificial
  Synthetic oligonucleotide
ccggcgactggcgtgtttccacaagcggaggctcggacccgcccgcagtc

SEQ ID NO: 275752 - DNA, 50 bp, Artificial
  Synthetic oligonucleotide
ccggcccatcggggttctacactgcggtgcacctgctgactcgtgctact

SEQ ID NO: 275753 - DNA, 50 bp, Artificial
  Synthetic oligonucleotide
ccgctttctttcagccacggcggagatgcgttagaccccgatctcgagga

SEQ ID NO: 275754 - DNA, 50 bp, Artificial
  Synthetic oligonucleotide
ccgcttagtgggccgtatgacacaagtgaggaggacaaacgggctgcccg

SEQ ID NO: 275755 - DNA, 50 bp, Artificial
  Synthetic oligonucleotide
ccgctgctatcgtgggcaacaattgcacagacctctgggcgccactcgta

SEQ ID NO: 275756 - DNA, 50 bp, Artificial
  Synthetic oligonucleotide
gtggtcgcgaactgggacacgctgtacaaggagaacaacttcatgcccaa

SEQ ID NO: 275757 - DNA, 57 bp, Artificial
  Synthetic oligonucleotide
gtgtgccagtgatctgaggtcaaacactctgacggatccatcaccaccgcagctggc

SEQ ID NO: 275758 - DNA, 50 bp, Artificial
  Synthetic oligonucleotide
ccgctcaagcccaccctatcgagggcaatgctgggggtgagtacctgact

SEQ ID NO: 275759 - DNA, 50 bp, Artificial
  Synthetic oligonucleotide
ccgcgacgcaggcactagcggcatcagagcaccaatcatgcgcagccaga

SEQ ID NO: 275760 - DNA, 50 bp, Artificial
  Synthetic oligonucleotide
ccgccgtgagtcttcccgcagacccctacatcagcgagaatggctatcgc

SEQ ID NO: 275761 - DNA, 50 bp, Artificial
  Synthetic oligonucleotide
ccgccgattgcgtgcagtgtgatacctttgccatgcgtagattgccccgc

SEQ ID NO: 275762 - DNA, 50 bp, Artificial
  Synthetic oligonucleotide
ccgcaagtgagttcgatgcccgcaggccgatgacttgcaataggggaaga

SEQ ID NO: 275763 - DNA, 50 bp, Artificial
  Synthetic oligonucleotide
ccgagcttgatccattctcaaggcccgactcccgtgaccgtgcttccact

SEQ ID NO: 275764 - DNA, 50 bp, Artificial
  Synthetic oligonucleotide
ccgagcccatccgcttagcgcacctactgacgagaccggcccattccatt

SEQ ID NO: 275765 - DNA, 50 bp, Artificial
  Synthetic oligonucleotide
ccgagcaggggtgtccttatcgtcgcgcaggcagacagccgcctcagtgt

SEQ ID NO: 275766 - DNA, 50 bp, Artificial
  Synthetic oligonucleotide
ccgagattgacccagcggtgtcgcctattgcaaccccgtgctctgttgca

SEQ ID NO: 275767 - DNA, 50 bp, Artificial
  Synthetic oligonucleotide
ccgagatgtgtgagcagtgggagtaccggcgcgtggttgtcaagggcgcg

SEQ ID NO: 275768 - DNA, 57 bp, Artificial
  Synthetic oligonucleotide
gctcattatttatgtactagcactaaaacaatacaacgtggtttacatttgggttga

SEQ ID NO: 275769 - DNA, 50 bp, Artificial
  Synthetic oligonucleotide
ccgaaaagcttgcttagcccggactctaccttgctagcggcaggcccgaa

SEQ ID NO: 275770 - DNA, 50 bp, Artificial
  Synthetic oligonucleotide
cccttactaagctgaggcccagccgcgctctacggtaggctccgcattca

SEQ ID NO: 275771 - DNA, 50 bp, Artificial
  Synthetic oligonucleotide
gcgctgccccgcgcacaatacagtttctaccctacgcatggactcagcca

SEQ ID NO: 275772 - DNA, 50 bp, Artificial
  Synthetic oligonucleotide
gcgctgcacgccaggtgccagcccaaccttagtcgaacgcccaattacgt

SEQ ID NO: 275773 - DNA, 50 bp, Artificial
  Synthetic oligonucleotide
ggtaggtagggttcatcgcccgcactgcttgagaccaccggtctcggagg

SEQ ID NO: 275774 - DNA, 50 bp, Artificial
  Synthetic oligonucleotide
gcgctaagggcgtccttccacagtgtaacatgaggaccgcgagacaccgc

SEQ ID NO: 275775 - DNA, 50 bp, Artificial
  Synthetic oligonucleotide
gcgcgagaagtactcacttctagtagagagaagtgcagacgaccttcctc

SEQ ID NO: 275776 - DNA, 50 bp, Artificial
  Synthetic oligonucleotide
gcgagaagggcgccatcctaaatgacacaagcggggctggcagatgagta

SEQ ID NO: 275777 - DNA, 50 bp, Artificial
  Synthetic oligonucleotide
gcgacgctgagacacttggagcgcatggacgctgtggctaagagggtgcg

SEQ ID NO: 275778 - DNA, 50 bp, Artificial
  Synthetic oligonucleotide
ggtcatgtcgtacaaccccgtggtttgcggcggtccccagtgtaaagcgg

SEQ ID NO: 275779 - DNA, 57 bp, Artificial
  Synthetic oligonucleotide
tctataatgcagtctcttgataactttttgcactgtaggtccgttaaggttagaaga

SEQ ID NO: 275780 - DNA, 50 bp, Artificial
  Synthetic oligonucleotide
gccggggagcctaccagtggttatactcgtcaacgcagagcctcggggag

SEQ ID NO: 275781 - DNA, 50 bp, Artificial
  Synthetic oligonucleotide
gccgcttgaataccagctccaacgcccataccaggcggtgcctgtccttg

SEQ ID NO: 275782 - DNA, 50 bp, Artificial
  Synthetic oligonucleotide
gccgcactcgcatgctgcatacacgtgatccgtggttcgtgctccctcat

SEQ ID NO: 275783 - DNA, 50 bp, Artificial
  Synthetic oligonucleotide
gccgaacttccaggcacacttgccccaccttcgcacagaaatcgcgcacc

SEQ ID NO: 275784 - DNA, 50 bp, Artificial
  Synthetic oligonucleotide
ggtcgacccgaaacgatctagaacgccgcctgtttgggactacgggctga

SEQ ID NO: 275785 - DNA, 50 bp, Artificial
  Synthetic oligonucleotide
ggtcgtcgttttcgctgggcggggctgcgtacactaagactggcaggtgt

SEQ ID NO: 275786 - DNA, 50 bp, Artificial
  Synthetic oligonucleotide
gcccattcgatggaccgctcaactttcaccagggggagcgcggagtcctc

SEQ ID NO: 275787 - DNA, 50 bp, Artificial
  Synthetic oligonucleotide
gccagctttcatctacgctagacaattgatctccaacgaaggtgtcttga

SEQ ID NO: 275788 - DNA, 50 bp, Artificial
  Synthetic oligonucleotide
gccaatatgagtcccgggcaaccccagcctcaaacgattgtgatgggccc

SEQ ID NO: 275789 - DNA, 50 bp, Artificial
  Synthetic oligonucleotide
gccaacacaagattcacgcaatttacgccgtcgaatcaggggacataccc

SEQ ID NO: 275790 - DNA, 56 bp, Artificial
  Synthetic oligonucleotide
aggagcgccctgtttcgtctcgtaagtttgagtctcagtcgcaaccttgccggttg

SEQ ID NO: 275791 - DNA, 50 bp, Artificial
  Synthetic oligonucleotide
gcatggcccgcgagtcgtacgcgttggagtacgctagaggctggatccca

SEQ ID NO: 275792 - DNA, 50 bp, Artificial
  Synthetic oligonucleotide
gcatatggcaagctgcacgcagcgtaaacatgccggacaactgtcatttc

SEQ ID NO: 275793 - DNA, 50 bp, Artificial
  Synthetic oligonucleotide
gcatactgctaaatgcgctgaagccgccagggcctctcgaggtcgggaaa

SEQ ID NO: 275794 - DNA, 50 bp, Artificial
  Synthetic oligonucleotide
gcagacattagtgtatcattgttaggaagttcgagctccgatacttacct

SEQ ID NO: 275795 - DNA, 50 bp, Artificial
  Synthetic oligonucleotide
ggtggacgcaaatctccaccagtcaacgcccaccaagcgtaccgcaacaa

SEQ ID NO: 275796 - DNA, 50 bp, Artificial
  Synthetic oligonucleotide
ggtggattgtactgtggatgagttacgtgatgggaagctggcgatttatg

SEQ ID NO: 275797 - DNA, 50 bp, Artificial
  Synthetic oligonucleotide
ggtggggtccccttcgctccgtttcccgcattgtcagcccaatagaggtt

SEQ ID NO: 275798 - DNA, 50 bp, Artificial
  Synthetic oligonucleotide
gggcctgacagtgccggtaactccaggatacgagtcgctgcattggccgt

SEQ ID NO: 275799 - DNA, 50 bp, Artificial
  Synthetic oligonucleotide
gggcgagtttcccgtcggggagctttgcgtggaagaaccgctgagatcag

SEQ ID NO: 275800 - DNA, 50 bp, Artificial
  Synthetic oligonucleotide
gggataatacggaagggatatcagatctactcatcgttctgatagtgtat

SEQ ID NO: 275801 - DNA, 57 bp, Artificial
  Synthetic oligonucleotide
gaccagtagttgctaatctgttttggtatagaatcccataatagtaatactgtccac

SEQ ID NO: 275802 - DNA, 50 bp, Artificial
  Synthetic oligonucleotide
gggagtcagcgctttttgccggcccagaactcgttcccgcatcatcacct

SEQ ID NO: 275803 - DNA, 50 bp, Artificial
  Synthetic oligonucleotide
ggctgtagcgcgcgcggtgtttctctaatattaagctacagacgcaatac

SEQ ID NO: 275804 - DNA, 50 bp, Artificial
  Synthetic oligonucleotide
ggctggctcgtgtctcccgaccctttgccagtgttcccatgccctgcgtt

SEQ ID NO: 275805 - DNA, 50 bp, Artificial
  Synthetic oligonucleotide
ggctgacgagtcgaggtttgctcgagaacggtgcttgctggtcgctagcc

SEQ ID NO: 275806 - DNA, 50 bp, Artificial
  Synthetic oligonucleotide
ggctgaaagggatcacggaacccctttggcctgctaacccgaaccaaccg

SEQ ID NO: 275807 - DNA, 50 bp, Artificial
  Synthetic oligonucleotide
ggcgcaaaccccaaattatgtatgtcaatgcctcctgtgtcgataccgac

SEQ ID NO: 275808 - DNA, 50 bp, Artificial
  Synthetic oligonucleotide
ggcgactctgacgtttctaccacctgaacaagttgtgattaaatcagcta

SEQ ID NO: 275809 - DNA, 50 bp, Artificial
  Synthetic oligonucleotide
ggccttgacacgctaggcgtggtgttctgggaaactgccggtttggacgc

SEQ ID NO: 275810 - DNA, 50 bp, Artificial
  Synthetic oligonucleotide
ggcccgagttgatttggaggcccaagttgtgaatcccgagtaaatttcgg

SEQ ID NO: 275811 - DNA, 50 bp, Artificial
  Synthetic oligonucleotide
ggccaaggtagacgccaaagtcgggccctccgcaagatcaggacacagaa

SEQ ID NO: 275812 - DNA, 56 bp, Artificial
  Synthetic oligonucleotide
aataaccatagagtcccggaaaagctgccacttttgttcggatacctggtcagata

SEQ ID NO: 275813 - DNA, 57 bp, Artificial
  Synthetic oligonucleotide
attgctcgcctgaggggcacgacaatctctagccgagtgaccacctctcttgcatct

SEQ ID NO: 275814 - DNA, 50 bp, Artificial
  Synthetic oligonucleotide
ggcaatacgacatgcggaccctcctgtactcgtcggctctggtcgcagta

SEQ ID NO: 275815 - DNA, 50 bp, Artificial
  Synthetic oligonucleotide
gggtaggagcatcgcgttttaccaaaagggggcctgcggctgctttccac

SEQ ID NO: 275816 - DNA, 50 bp, Artificial
  Synthetic oligonucleotide
gggtagtaagtgactatattctgcacgctcttaaagcagccacctcgttt

SEQ ID NO: 275817 - DNA, 50 bp, Artificial
  Synthetic oligonucleotide
ggaacattccaccaagttagagatcagatgcttatggctgttgagtctat

SEQ ID NO: 275818 - DNA, 50 bp, Artificial
  Synthetic oligonucleotide
gcttgtccggtggttttgccgacacacgactgtggtccgaagtgcgcgag

SEQ ID NO: 275819 - DNA, 50 bp, Artificial
  Synthetic oligonucleotide
gctgtgatgactcttaatatacaattgggaagcattcaaggattggtacg

SEQ ID NO: 275820 - DNA, 50 bp, Artificial
  Synthetic oligonucleotide
gctggctcctcttccccgcaggacgagcccacatcatacctgaactgcgc

SEQ ID NO: 275821 - DNA, 50 bp, Artificial
  Synthetic oligonucleotide
gctgctgccgagtgtgccatctcaactagccttggccgagcttcgttcca

SEQ ID NO: 275822 - DNA, 50 bp, Artificial
  Synthetic oligonucleotide
ggtacagtagtaccgtgagaggcagcacacagagcactaccaataaccaa

SEQ ID NO: 275823 - DNA, 50 bp, Artificial
  Synthetic oligonucleotide
gctcctcgacactgatcgtctgagacccttccaacagctggctcccgcta

SEQ ID NO: 275824 - DNA, 57 bp, Artificial
  Synthetic oligonucleotide
tccccgaggtgggtgcattcacggtggctaagaaggccgattcgttgtattgcgtgg

SEQ ID NO: 275825 - DNA, 50 bp, Artificial
  Synthetic oligonucleotide
gctatagaatctctccgaagcctcgccgcctgtgcatcactcggcccccg

SEQ ID NO: 275826 - DNA, 50 bp, Artificial
  Synthetic oligonucleotide
gctacctcctttcgggtggccaaaggagggatttccaatgttggtaattg

SEQ ID NO: 275827 - DNA, 50 bp, Artificial
  Synthetic oligonucleotide
gaaagactccgacatagcatcccttgtgggcgcatatgcagaatgggagg

SEQ ID NO: 275828 - DNA, 50 bp, Artificial
  Synthetic oligonucleotide
ctttccgtgacattcgcgtttagggattctaattgaaccgtgcgacttgg

SEQ ID NO: 275829 - DNA, 50 bp, Artificial
  Synthetic oligonucleotide
cttggcttagcatctccctcgggtaaatctgtcttaaagaccccgtatga

SEQ ID NO: 275830 - DNA, 50 bp, Artificial
  Synthetic oligonucleotide
cttctttgcgcctcttttctctagttagaggctggcctacgaggcttccg

SEQ ID NO: 275831 - DNA, 50 bp, Artificial
  Synthetic oligonucleotide
cttcagcgcgacggagccaagccagtttctggcgcggcccatgagttttc

SEQ ID NO: 275832 - DNA, 50 bp, Artificial
  Synthetic oligonucleotide
cttaccgttgcactatctcctggatcctcgttcagtgtgtatgccgttcc

SEQ ID NO: 275833 - DNA, 50 bp, Artificial
  Synthetic oligonucleotide
ctgtgggaagtgctagacccagaagcacgggccagaaaactcgcggagga

SEQ ID NO: 275834 - DNA, 50 bp, Artificial
  Synthetic oligonucleotide
ctgtcagtaaagcggtacagctggtagcattattcggcacacctttcacc

SEQ ID NO: 275835 - DNA, 57 bp, Artificial
  Synthetic oligonucleotide
ccaccggtttcggcagcctgtagctcctggtatcgcacgagaacagagttcgcttta

SEQ ID NO: 275836 - DNA, 50 bp, Artificial
  Synthetic oligonucleotide
ctgcttatccaactgatggtatctcagtcctccgaatgccttctgaaatt

SEQ ID NO: 275837 - DNA, 50 bp, Artificial
  Synthetic oligonucleotide
ctgctgccttcacttcgcgcccgcaggttacttcgaggctgggtgtgaac

SEQ ID NO: 275838 - DNA, 50 bp, Artificial
  Synthetic oligonucleotide
ctgctcatgtggctgacgacatccctgccgaacccctaccctccagaccg

SEQ ID NO: 275839 - DNA, 50 bp, Artificial
  Synthetic oligonucleotide
ctgcggaatttcctgcctggctttgggttcgatgggcccagagacaccgc

SEQ ID NO: 275840 - DNA, 50 bp, Artificial
  Synthetic oligonucleotide
ctgaggttcgtgcagtgtgggcctaccaacgctgagtgtctcgtcacggg

SEQ ID NO: 275841 - DNA, 50 bp, Artificial
  Synthetic oligonucleotide
ctcggggcgtccacgactcccgcatgcgcgaattagctggctcctcataa

SEQ ID NO: 275842 - DNA, 50 bp, Artificial
  Synthetic oligonucleotide
ctcctcccctaagtactggccccctatgcggggttacaagggcagagcta

SEQ ID NO: 275843 - DNA, 50 bp, Artificial
  Synthetic oligonucleotide
ctatacattcataacatctggaagcgtgcccgagtagatataatcaacgt

SEQ ID NO: 275844 - DNA, 50 bp, Artificial
  Synthetic oligonucleotide
ctaggtcggaacgcagctcaggcaacgaggttgcgagcatgacgcatggc

SEQ ID NO: 275845 - DNA, 50 bp, Artificial
  Synthetic oligonucleotide
ctacgaggctgttgcgacatagtactcaacccggaacttgttagactctt

SEQ ID NO: 275846 - DNA, 57 bp, Artificial
  Synthetic oligonucleotide
cccaagaatccgcttcggcgatggctacagcggtagctagaccttgtgaatgaccgg

SEQ ID NO: 275847 - DNA, 50 bp, Artificial
  Synthetic oligonucleotide
ctaccgctccacaactggaccaatgcccccagcggaagggtgtggtacta

SEQ ID NO: 275848 - DNA, 50 bp, Artificial
  Synthetic oligonucleotide
ctaagtttgtccccgaagctaacgggccgacacaaggcgcatgcacagcc

SEQ ID NO: 275849 - DNA, 50 bp, Artificial
  Synthetic oligonucleotide
cgttgggctcaatcgcgcctattccaatgctgttgcgcctcacgtagccc

SEQ ID NO: 275850 - DNA, 50 bp, Artificial
  Synthetic oligonucleotide
cgttgcgagtaggggtattgggtgcgggaatcgggtgccaaacactgcca

SEQ ID NO: 275851 - DNA, 50 bp, Artificial
  Synthetic oligonucleotide
cgttagagaatctatacgcttctcaaccatggatccgttcaggtatcgca

SEQ ID NO: 275852 - DNA, 50 bp, Artificial
  Synthetic oligonucleotide
cgtgtttgagtggataggccccgttcagccgtgcgctgtactgtcagccg

SEQ ID NO: 275853 - DNA, 50 bp, Artificial
  Synthetic oligonucleotide
cgtcgaggcgccatcgagtggctctgacgtatacacaccatggagcgggt

SEQ ID NO: 275854 - DNA, 50 bp, Artificial
  Synthetic oligonucleotide
gcaacttcacagtgtcgtaatatgtgatacgcgtgtttctacgtacattt

SEQ ID NO: 275855 - DNA, 50 bp, Artificial
  Synthetic oligonucleotide
gcaaaggacgcgcggtcatccgtcccttgcggaccaacgccggtgtacac

SEQ ID NO: 275856 - DNA, 50 bp, Artificial
  Synthetic oligonucleotide
gattcctggaacgtgctttctctcgaggtaacctgccttgttcctcctgg

SEQ ID NO: 275857 - DNA, 57 bp, Artificial
  Synthetic oligonucleotide
gtagttgattccactatataaccatagtgtgtactgtgaaccgtttacaacctaatg

SEQ ID NO: 275858 - DNA, 50 bp, Artificial
  Synthetic oligonucleotide
gatggcacgcacgttaagatagcccggccgcacggaaacgcgagactaga

SEQ ID NO: 275859 - DNA, 50 bp, Artificial
  Synthetic oligonucleotide
ggtgtctgctcccgacgcttgtactggagtaggggtacctgacccgctct

SEQ ID NO: 275860 - DNA, 50 bp, Artificial
  Synthetic oligonucleotide
ggtgttactgaactccttaagctatggaaccgagccaaagtcacttcggc

SEQ ID NO: 275861 - DNA, 50 bp, Artificial
  Synthetic oligonucleotide
gatctagccatgggtatattcgtatgtgcaatggagattggccttggtgc

SEQ ID NO: 275862 - DNA, 50 bp, Artificial
  Synthetic oligonucleotide
gatcgataacgggccaaccgtatgcgttggcaaactttcttcggactata

SEQ ID NO: 275863 - DNA, 50 bp, Artificial
  Synthetic oligonucleotide
gataagcgcggtcgtgcgacgccgtcttggcagctcgtgtacattttcgc

SEQ ID NO: 275864 - DNA, 50 bp, Artificial
  Synthetic oligonucleotide
gagtcctccatgtatcttgtgtgggaaaaccgaccaaacgaatccgtaga

SEQ ID NO: 275865 - DNA, 50 bp, Artificial
  Synthetic oligonucleotide
gagggtcgcgacaaaccgatgtacaatgcacgcggggcggcatgtggggt

SEQ ID NO: 275866 - DNA, 50 bp, Artificial
  Synthetic oligonucleotide
gagggtaagttagtaacccctccccagtaataagtagctataaaatacca

SEQ ID NO: 275867 - DNA, 50 bp, Artificial
  Synthetic oligonucleotide
gaggccccaactgtggccaccactgttttcactcccggcacttgctctga

SEQ ID NO: 275868 - DNA, 55 bp, Artificial
  Synthetic oligonucleotide
ctaagtggagaacaggtgtgcaaggtctgggcccggtacgccaagtaccaagccc

SEQ ID NO: 275869 - DNA, 50 bp, Artificial
  Synthetic oligonucleotide
gaggagcagtcgaccgccttgttcgcagttcccattctaggaacctagta

SEQ ID NO: 275870 - DNA, 50 bp, Artificial
  Synthetic oligonucleotide
gagctcggaagcgaacccgcctgtcttggagcccttcaccgttacggtgg

SEQ ID NO: 275871 - DNA, 50 bp, Artificial
  Synthetic oligonucleotide
gagcccatcaagcgtgcgggcgagactctagagaacaagcgagcgcgact

SEQ ID NO: 275872 - DNA, 50 bp, Artificial
  Synthetic oligonucleotide
gagatcacggcactggcaaaccttacacggacgcacagaggcggcgtcgc

SEQ ID NO: 275873 - DNA, 50 bp, Artificial
  Synthetic oligonucleotide
gactttgttttcgccagtctcagggcatagcgtgtgagccggcgctccta

SEQ ID NO: 275874 - DNA, 50 bp, Artificial
  Synthetic oligonucleotide
gacgagaggggcgactctggtatggaagagggcgaaccattggccacaga

SEQ ID NO: 275875 - DNA, 50 bp, Artificial
  Synthetic oligonucleotide
gtaaatacttagactacgcccggcacatacacattgtgtatgtgccgggc

SEQ ID NO: 275876 - DNA, 50 bp, Artificial
  Synthetic oligonucleotide
gacctgatgacaatagcgagacgaatcctgtcttgttggctaggaggatg

SEQ ID NO: 275877 - DNA, 50 bp, Artificial
  Synthetic oligonucleotide
gacctcgcacaataacggcaatacgcaagagccgccgagctccccctttg

SEQ ID NO: 275878 - DNA, 50 bp, Artificial
  Synthetic oligonucleotide
gaccgagttggtttaaggtataatatttgagctattacgtgtattttata

SEQ ID NO: 275879 - DNA, 57 bp, Artificial
  Synthetic oligonucleotide
caagaggcggctatggcgccccaagaggtggttacggtggcccaagagattcatatg

SEQ ID NO: 275880 - DNA, 50 bp, Artificial
  Synthetic oligonucleotide
gtaaccgatgagatggtagtaactttcaacttgctaccctatgacctttg

SEQ ID NO: 275881 - DNA, 50 bp, Artificial
  Synthetic oligonucleotide
gacccaagtgtctagcttcgctaacagtttgagcagtatcgtctcttggt

SEQ ID NO: 275882 - DNA, 50 bp, Artificial
  Synthetic oligonucleotide
agttagtagatggaggtgggtatggagatggttgttgccacatagcatta

SEQ ID NO: 275883 - DNA, 50 bp, Artificial
  Synthetic oligonucleotide
tcactgatcattgtgaaggcgtcaagttagtcttagttgcactaaagtgt

SEQ ID NO: 275884 - DNA, 50 bp, Artificial
  Synthetic oligonucleotide
agttagagatacgcgaggctggcccgcagcaagtgtgagacccacgcacg

SEQ ID NO: 275885 - DNA, 50 bp, Artificial
  Synthetic oligonucleotide
agtgtcactactaatgtccgaggtggatctgagtcgtatcgggtatcgga

SEQ ID NO: 275886 - DNA, 50 bp, Artificial
  Synthetic oligonucleotide
tcagcccgtagtcccaaacaggcggcgttctagatcgtttcgggtcgacc

SEQ ID NO: 275887 - DNA, 50 bp, Artificial
  Synthetic oligonucleotide
tcagcggtccaagcaggataggggtcggtaggcaaggctaccattccaga

SEQ ID NO: 275888 - DNA, 50 bp, Artificial
  Synthetic oligonucleotide
agtgggaccaacagcccgtaaccatagcgcgcggcatgtgagccaagcac

SEQ ID NO: 275889 - DNA, 50 bp, Artificial
  Synthetic oligonucleotide
agtggccctgactgtaacctgcttgagggcgggtttatcggcccacgata

SEQ ID NO: 275890 - DNA, 57 bp, Artificial
  Synthetic oligonucleotide
accaaaggcgaagagagctaagacgggcagtgcatctaccgtgaaagggagcgtgga

SEQ ID NO: 275891 - DNA, 50 bp, Artificial
  Synthetic oligonucleotide
agtggaacctacctgccaccgcagctgggcgccagggcattcgccccagc

SEQ ID NO: 275892 - DNA, 50 bp, Artificial
  Synthetic oligonucleotide
tcaggcagcgcaaaaccacggtccaagagacccaaaaggcccgcgactca

SEQ ID NO: 275893 - DNA, 50 bp, Artificial
  Synthetic oligonucleotide
agtgctttgtggcatcgcgtctgctaggcggaagcgcttgatagcggggc

SEQ ID NO: 275894 - DNA, 50 bp, Artificial
  Synthetic oligonucleotide
agtgagaaggcgagtccttgcctgcgactcaaaagcagccacgtaccggc

SEQ ID NO: 275895 - DNA, 50 bp, Artificial
  Synthetic oligonucleotide
agtctggggccgggagctaaacgtgcccaagtgtacgccagaacgagtgg

SEQ ID NO: 275896 - DNA, 50 bp, Artificial
  Synthetic oligonucleotide
tcatcacaagattggacgaaatttgccgtgaagttaaaactgcgtctgtt

SEQ ID NO: 275897 - DNA, 50 bp, Artificial
  Synthetic oligonucleotide
agtcgttgccagcctgcgtccgaagtttcacgcggttgcgctcgtacggc

SEQ ID NO: 275898 - DNA, 50 bp, Artificial
  Synthetic oligonucleotide
agtcgttctacgggttagcccggcttgtgcgcgatgacggcatacacgca

SEQ ID NO: 275899 - DNA, 50 bp, Artificial
  Synthetic oligonucleotide
agtcgggttcttccgcgctcggtaactccaagtcgcgaaactgcgacgct

SEQ ID NO: 275900 - DNA, 50 bp, Artificial
  Synthetic oligonucleotide
agtcgcagacgacccacagcttttggccggatcccacactggcgtcctga

SEQ ID NO: 275901 - DNA, 57 bp, Artificial
  Synthetic oligonucleotide
gccaacaccatatgcattaggtttccaagattcagctctaccaaatcaagaaggtat

SEQ ID NO: 275902 - DNA, 50 bp, Artificial
  Synthetic oligonucleotide
agtcgcacttgcaacgcatactgctaaatgcgctgaagccgccagggcct

SEQ ID NO: 275903 - DNA, 50 bp, Artificial
  Synthetic oligonucleotide
agtccgtgctgtgtgacgccactggcttggccagagagtccatggaacta

SEQ ID NO: 275904 - DNA, 50 bp, Artificial
  Synthetic oligonucleotide
agtcccgcgtgaacaccaatacgcagcagacgagccgattacccagggca

SEQ ID NO: 275905 - DNA, 50 bp, Artificial
  Synthetic oligonucleotide
agtcagagcccagctctgcgttaagaacagaaccgcggcccgcgctaccc

SEQ ID NO: 275906 - DNA, 50 bp, Artificial
  Synthetic oligonucleotide
tccagacgatcggctaaagttgcagcacgtttggccccaccagcatccgg

SEQ ID NO: 275907 - DNA, 50 bp, Artificial
  Synthetic oligonucleotide
agtatgtcagccctggccgtgtgcgcacccttcttacgcgggaatacaga

SEQ ID NO: 275908 - DNA, 50 bp, Artificial
  Synthetic oligonucleotide
agtaggccccgcatgtaccggtcagctagccaggcgtgatcccttcaaac

SEQ ID NO: 275909 - DNA, 50 bp, Artificial
  Synthetic oligonucleotide
atctcgctctgaacgagggattgtgcgatgcgtgtcttgctcgtgcccgg

SEQ ID NO: 275910 - DNA, 50 bp, Artificial
  Synthetic oligonucleotide
atctacggtggcagctcgccgctacacacctgtcccattacatgggtcgc

SEQ ID NO: 275911 - DNA, 50 bp, Artificial
  Synthetic oligonucleotide
atccgtggttcgtgctccctcattccgatagttgcgtgctcacgtgcgcg

SEQ ID NO: 275912 - DNA, 57 bp, Artificial
  Synthetic oligonucleotide
cattgctctgtgtctgtcgccttccacattactgccgccccgctgccaaatttgtgc

SEQ ID NO: 275913 - DNA, 50 bp, Artificial
  Synthetic oligonucleotide
atccgtacccgtgctggtttgggtgccccttgagtacccgatagcggcgc

SEQ ID NO: 275914 - DNA, 50 bp, Artificial
  Synthetic oligonucleotide
atccatcgttcctgccgactatgcgccagcggtcatcaagtccccggata

SEQ ID NO: 275915 - DNA, 50 bp, Artificial
  Synthetic oligonucleotide
tatgcattactgaacgagaaaccacggacagacattgggaggggtaggaa

SEQ ID NO: 275916 - DNA, 50 bp, Artificial
  Synthetic oligonucleotide
atataaggggcgctattctgtggagggtataaaagttctgttggcgtagt

SEQ ID NO: 275917 - DNA, 50 bp, Artificial
  Synthetic oligonucleotide
ataggagagagcgctgggagttacgctttccaggcccgttggcccgtttt

SEQ ID NO: 275918 - DNA, 50 bp, Artificial
  Synthetic oligonucleotide
atagctgggcggctaacgtgttatgtcccagcggtgccaagaggccggag

SEQ ID NO: 275919 - DNA, 50 bp, Artificial
  Synthetic oligonucleotide
tattctcgatcaggttcctccagcagggaacagcgtaactctgtagatcg

SEQ ID NO: 275920 - DNA, 50 bp, Artificial
  Synthetic oligonucleotide
atagagagccgtctgtttgcgctccgatggcctgaaaagccggaggctcg

SEQ ID NO: 275921 - DNA, 50 bp, Artificial
  Synthetic oligonucleotide
atactaccacgccttcccgggggcaccttccctctccacactacgtgact

SEQ ID NO: 275922 - DNA, 50 bp, Artificial
  Synthetic oligonucleotide
tcaaaattggtggttaatctgttagccccgatctggtttccaacgatcgg

SEQ ID NO: 275923 - DNA, 51 bp, Artificial
  Synthetic oligonucleotide
agacaaccttacaactcggtgggaataccttacggaccctccttcgcggtg

SEQ ID NO: 275924 - DNA, 57 bp, Artificial
  Synthetic oligonucleotide
ctaatcagagtcgagtcccattgctgcgagaggctgccataacgcccgccccggtcc

SEQ ID NO: 275925 - DNA, 50 bp, Artificial
  Synthetic oligonucleotide
atacgctgttggggtggtgctcgccccgttttgcctgtttggtagcgctt

SEQ ID NO: 275926 - DNA, 50 bp, Artificial
  Synthetic oligonucleotide
ataagagtgttcaggcctcgtatggcgtgtgcgccgcgggaatcccaggc

SEQ ID NO: 275927 - DNA, 50 bp, Artificial
  Synthetic oligonucleotide
tcaactccactatcagtttccgcaacttacaaaactttcgtgacatacag

SEQ ID NO: 275928 - DNA, 50 bp, Artificial
  Synthetic oligonucleotide
agttgtcgctttgagggtccctggcctcagctcggcagctcaccgatgct

SEQ ID NO: 275929 - DNA, 50 bp, Artificial
  Synthetic oligonucleotide
agttgtagtcccacgggacccccgacgtaggcatcggggttgtagttgga

SEQ ID NO: 275930 - DNA, 50 bp, Artificial
  Synthetic oligonucleotide
tcaatagaaacgacgagcaatgggcctgtttgtgtaaaccgtggattaat

SEQ ID NO: 275931 - DNA, 50 bp, Artificial
  Synthetic oligonucleotide
agttgggagcggcctgcgccaaaaatagggctccagcactcatgtttggc

SEQ ID NO: 275932 - DNA, 50 bp, Artificial
  Synthetic oligonucleotide
agttgctgcggaggttgcagtccaacgagtcctcggctacaggcaagcct

SEQ ID NO: 275933 - DNA, 50 bp, Artificial
  Synthetic oligonucleotide
tcaatgcgacaggttcggcaaggccccacaaggatgcggtagcaagtacc

SEQ ID NO: 275934 - DNA, 50 bp, Artificial
  Synthetic oligonucleotide
agttcggcatcggagaatcaaatcccacgcagcgagaccaacgggggctt

SEQ ID NO: 275935 - DNA, 56 bp, Artificial
  Synthetic oligonucleotide
ttttacaattctaatggtaatgtttatggatttatgtgggtaggtagtatggttca

SEQ ID NO: 275936 - DNA, 50 bp, Artificial
  Synthetic oligonucleotide
tcaccgggagccaagaagtcgtagctgcacgaatgatgtctcggcacccc

SEQ ID NO: 275937 - DNA, 50 bp, Artificial
  Synthetic oligonucleotide
tcacgtggcggatcaaaactcaaaggtgactgtgaatcgactctagtcag

SEQ ID NO: 275938 - DNA, 50 bp, Artificial
  Synthetic oligonucleotide
aggctcgacgaaaggcacaatagtcggggacagaccgcgccctagctgca

SEQ ID NO: 275939 - DNA, 50 bp, Artificial
  Synthetic oligonucleotide
aggcgtgctagggcctgggtcgagcattcttgtgcacctagatccgggga

SEQ ID NO: 275940 - DNA, 50 bp, Artificial
  Synthetic oligonucleotide
tcctgcctagagtggcggagccaccagcctgttgccagcaatggaattcg

SEQ ID NO: 275941 - DNA, 50 bp, Artificial
  Synthetic oligonucleotide
aggcggaagcgcttgatagcggggctccccacgataggccaatagtggtt

SEQ ID NO: 275942 - DNA, 50 bp, Artificial
  Synthetic oligonucleotide
aggcgcttcatgtctgcatatgctctcaggccatgcgctgagtgctccgc

SEQ ID NO: 275943 - DNA, 50 bp, Artificial
  Synthetic oligonucleotide
aggcctcctgctgacaaacgacgcgcctgcctaacaacggcagcatgaga

SEQ ID NO: 275944 - DNA, 50 bp, Artificial
  Synthetic oligonucleotide
aggccgttaacttgcttccgcctgccgagtggataagcaccggcgaagcg

SEQ ID NO: 275945 - DNA, 50 bp, Artificial
  Synthetic oligonucleotide
aggcccttctcccggaaaaacgcagagatgaccgtccacgagtcctccgc

SEQ ID NO: 275946 - DNA, 57 bp, Artificial
  Synthetic oligonucleotide
taacgaagtagcgagcaatgttgacgccgcaaaccagggccaatagtggaacgtcga

SEQ ID NO: 275947 - DNA, 50 bp, Artificial
  Synthetic oligonucleotide
tcgacacccgtgactgcagcgactccttccctctgacaccagttggccaa

SEQ ID NO: 275948 - DNA, 50 bp, Artificial
  Synthetic oligonucleotide
aggcccggagctagtgggcacgttgaggactggcaagtaacacgcctgcc

SEQ ID NO: 275949 - DNA, 50 bp, Artificial
  Synthetic oligonucleotide
aggccccgatgggtccttacctgtgggtaagaacgagagagcgccccagc

SEQ ID NO: 275950 - DNA, 50 bp, Artificial
  Synthetic oligonucleotide
aggccaagtacgttgaccccatcctgctaggcaccgccgacccacatgag

SEQ ID NO: 275951 - DNA, 50 bp, Artificial
  Synthetic oligonucleotide
aggcagtgaccaggaccgttatgcccgtgtaatcgacgcacgcgcagtta

SEQ ID NO: 275952 - DNA, 50 bp, Artificial
  Synthetic oligonucleotide
aggcacggaggaacaagtgcggggccggactgaggaggcaaatacggggg

SEQ ID NO: 275953 - DNA, 50 bp, Artificial
  Synthetic oligonucleotide
tcgatggcacaggggcaggttgcggtaaatactgacccaagggcggcaat

SEQ ID NO: 275954 - DNA, 50 bp, Artificial
  Synthetic oligonucleotide
aggagggatggttgtgctcggaattactcgcttgcactcgggccgttcct

SEQ ID NO: 275955 - DNA, 50 bp, Artificial
  Synthetic oligonucleotide
aggagacgtggctaccgtcgccttgcagaatatcgcggggaagcgcgacc

SEQ ID NO: 275956 - DNA, 50 bp, Artificial
  Synthetic oligonucleotide
tcgcacgtatgttccgacgtgcgactgcgttctcttgttctctatgttcc

SEQ ID NO: 275957 - DNA, 53 bp, Artificial
  Synthetic oligonucleotide
attcatctgtccaattaagaaacccaaaaaatagtcaaggaacgtactataaa

SEQ ID NO: 275958 - DNA, 50 bp, Artificial
  Synthetic oligonucleotide
aggacgcggctgcaccaagtacctgagtccccactgcaggtaagtgcgac

SEQ ID NO: 275959 - DNA, 50 bp, Artificial
  Synthetic oligonucleotide
aggaaggtgcattcgcggagctgccactaagcttgtcgggtgttgctcct

SEQ ID NO: 275960 - DNA, 50 bp, Artificial
  Synthetic oligonucleotide
tcgcgcggacccccggcaaaaaccgtagggatatgactacctcctactgg

SEQ ID NO: 275961 - DNA, 50 bp, Artificial
  Synthetic oligonucleotide
aggaagcgcaattccgtgggaggtggcttgcggcccatctggatgaccgt

SEQ ID NO: 275962 - DNA, 50 bp, Artificial
  Synthetic oligonucleotide
aggaacttcgggcgttgcttacgtgccaaggcgtccgactcggagcgtat

SEQ ID NO: 275963 - DNA, 50 bp, Artificial
  Synthetic oligonucleotide
tcggacatgcgtgcctgttgcctgcgatactcatgcacccgttttggcga

SEQ ID NO: 275964 - DNA, 50 bp, Artificial
  Synthetic oligonucleotide
aggaacgggggatgcagcggtatctggctgttggagacctgcgagttgga

SEQ ID NO: 275965 - DNA, 50 bp, Artificial
  Synthetic oligonucleotide
agtaggcacatatacttctttagcgcaaggggtaggatcgatccacttgt

SEQ ID NO: 275966 - DNA, 50 bp, Artificial
  Synthetic oligonucleotide
agtaccgcagctctacggtcaactgcgctgcacggtcccaatcgtgttgc

SEQ ID NO: 275967 - DNA, 50 bp, Artificial
  Synthetic oligonucleotide
agtacacacatccgagtctcactaccggcgcaacgttcctcccgcaggcc

SEQ ID NO: 275968 - DNA, 57 bp, Artificial
  Synthetic oligonucleotide
gccccctagcgcctgtgttggatcctcaaaagatcgacgcaatggtggccacaatga

SEQ ID NO: 275969 - DNA, 50 bp, Artificial
  Synthetic oligonucleotide
aggtgtaggtaacggccttgtttcgggtgctcctgacgggtctcgcgttg

SEQ ID NO: 275970 - DNA, 50 bp, Artificial
  Synthetic oligonucleotide
aggtgcctcgcaaaggcctcgtgtagcactcccaccggcgtgaaacagga

SEQ ID NO: 275971 - DNA, 50 bp, Artificial
  Synthetic oligonucleotide
aggtcgacggcaggagcatcgatacggggtcctcgcacctcacgtacacc

SEQ ID NO: 275972 - DNA, 50 bp, Artificial
  Synthetic oligonucleotide
aggtccacgatgatcgaatggcgctccgccgcgctaagatttacccacgc

SEQ ID NO: 275973 - DNA, 50 bp, Artificial
  Synthetic oligonucleotide
aggtagtgcgtccagcacaacgaccggttcttgcgcacccgatgtatcgg

SEQ ID NO: 275974 - DNA, 50 bp, Artificial
  Synthetic oligonucleotide
agggttgtgaaccacgtgtatgtcacgcgatggagccacgcgaaccggca

SEQ ID NO: 275975 - DNA, 50 bp, Artificial
  Synthetic oligonucleotide
agggtgtgactacggtggagctagacaaccttgcggcggagacctgtgct

SEQ ID NO: 275976 - DNA, 50 bp, Artificial
  Synthetic oligonucleotide
tccctcttgcctggattagatacgaagctagttccctgcacatattgaca

SEQ ID NO: 275977 - DNA, 50 bp, Artificial
  Synthetic oligonucleotide
agggtgctgcttgactccaaccttagtcacatgtaagatcatggcgtcag

SEQ ID NO: 275978 - DNA, 50 bp, Artificial
  Synthetic oligonucleotide
agggtcacgtgacacgccgtcccagactacacctatctacagcccgcagc

SEQ ID NO: 275979 - DNA, 57 bp, Artificial
  Synthetic oligonucleotide
aggtttgggatgaccacttacatcttgagagcgccacacgcccattccgtggaacct

SEQ ID NO: 275980 - DNA, 50 bp, Artificial
  Synthetic oligonucleotide
agggtagccccgcgccaatgatgcaccctgcccggttgcggtccacgctg

SEQ ID NO: 275981 - DNA, 50 bp, Artificial
  Synthetic oligonucleotide
aggggtcgctaccgctcgcgcttctttcggtatggggctcagaagacacc

SEQ ID NO: 275982 - DNA, 50 bp, Artificial
  Synthetic oligonucleotide
aggggcgcgtgtctgtctggctggtttgcgggcgcaacgtccctgtagtg

SEQ ID NO: 275983 - DNA, 50 bp, Artificial
  Synthetic oligonucleotide
aggggagggctccagaaatttcagggccataggccacaccgggactctca

SEQ ID NO: 275984 - DNA, 50 bp, Artificial
  Synthetic oligonucleotide
tccggtgactccagcgtggctttgcttgcctggagcacattcaacacacg

SEQ ID NO: 275985 - DNA, 50 bp, Artificial
  Synthetic oligonucleotide
agggcgttgctatggaagggaggagaacgtcggtggcttccgatgccatg

SEQ ID NO: 275986 - DNA, 50 bp, Artificial
  Synthetic oligonucleotide
agggcgcttaagctagccactctccgcatgtgcctggtagcgtcaggtgt

SEQ ID NO: 275987 - DNA, 50 bp, Artificial
  Synthetic oligonucleotide
agggcgagtcgcggaacctatggcgctgtgggattttgacgcaaaagcag

SEQ ID NO: 275988 - DNA, 50 bp, Artificial
  Synthetic oligonucleotide
agggccctgcggaagccccagttcgatgtcaaaggcatttcaggccgact

SEQ ID NO: 275989 - DNA, 50 bp, Artificial
  Synthetic oligonucleotide
agggcccacttcccctcaccgaggccgtcagtgagtctagttggaagcaa

SEQ ID NO: 275990 - DNA, 57 bp, Artificial
  Synthetic oligonucleotide
tgtccgctcgcactggcactcttaacgggcagctccattggaaagacgagtcagtgg

SEQ ID NO: 275991 - DNA, 50 bp, Artificial
  Synthetic oligonucleotide
agggcactgcgtgttcgacgcatagctgccacaggtgcgccaagaactgt

SEQ ID NO: 275992 - DNA, 50 bp, Artificial
  Synthetic oligonucleotide
agggactcgcccctgctgtgcgaaaagcgcttcaacatctccctcgtgcc

SEQ ID NO: 275993 - DNA, 50 bp, Artificial
  Synthetic oligonucleotide
catcagcgcgaagcgccacaatgcttgcaccccaagaaacaagccgcagt

SEQ ID NO: 275994 - DNA, 50 bp, Artificial
  Synthetic oligonucleotide
catatgcaagccgctggcgaaacgacccatcttcgggttagcccagctgc

SEQ ID NO: 275995 - DNA, 50 bp, Artificial
  Synthetic oligonucleotide
catatatccagctcgtcttgcaacgctcatactgcggcctatcgtgaaca

SEQ ID NO: 275996 - DNA, 50 bp, Artificial
  Synthetic oligonucleotide
catacccctccccacgagccggtgagaggttcggctaccctactagtggc

SEQ ID NO: 275997 - DNA, 50 bp, Artificial
  Synthetic oligonucleotide
cagttcggtgccaggcccgtgggcttttggacggtcaagaatgtggtgga

SEQ ID NO: 275998 - DNA, 50 bp, Artificial
  Synthetic oligonucleotide
cagtgcgttggctagttcctgcggattcaccaagcggggtgcactttcga

SEQ ID NO: 275999 - DNA, 50 bp, Artificial
  Synthetic oligonucleotide
cagtatctgtccaactgcaatgaaatccttaagccaaatctctgatagct

SEQ ID NO: 276000 - DNA, 50 bp, Artificial
  Synthetic oligonucleotide
caggtgtgcaccccaggcgggaccacaatcgcgggtttgtgtgttatgga

SEQ ID NO: 276001 - DNA, 48 bp, Artificial
  Synthetic oligonucleotide
ggttcggtccccccgtaagtataagtatacgggggggtccctcactcc

SEQ ID NO: 276002 - DNA, 50 bp, Artificial
  Synthetic oligonucleotide
cagggttaattgagggctgcgcgatcggacccttgtcaacgtcccagcct

SEQ ID NO: 276003 - DNA, 50 bp, Artificial
  Synthetic oligonucleotide
caggctctgaccgcgcatcttggcaagccttcgatcgctaacgtccgcca

SEQ ID NO: 276004 - DNA, 50 bp, Artificial
  Synthetic oligonucleotide
taattgataacaatccaggctttcattccgcattagatgttgcggcgtct

SEQ ID NO: 276005 - DNA, 50 bp, Artificial
  Synthetic oligonucleotide
caggcgccaggtctctggtcctgactcctcgtggaaacccgctaacgtgc

SEQ ID NO: 276006 - DNA, 50 bp, Artificial
  Synthetic oligonucleotide
tacaaggtggcgctctagccgacttgactggttctatcccaggtattgac

SEQ ID NO: 276007 - DNA, 50 bp, Artificial
  Synthetic oligonucleotide
caggcacaggcttgcccatttggcagtcgcgtgcaacctgggggtcgttt

SEQ ID NO: 276008 - DNA, 50 bp, Artificial
  Synthetic oligonucleotide
caggcaacgaggttgcgagcatgacgcatggcaccggagagtctgcgtat

SEQ ID NO: 276009 - DNA, 50 bp, Artificial
  Synthetic oligonucleotide
caggatatcgggtcggaccccacgctcccgcggtctgacagagagtgccc

SEQ ID NO: 276010 - DNA, 50 bp, Artificial
  Synthetic oligonucleotide
tacacgagctgccaagacggcgtcgcacgaccgcgcttatcagtaatcta

SEQ ID NO: 276011 - DNA, 50 bp, Artificial
  Synthetic oligonucleotide
cagctcgtggagcacatgcgagtgagccccttgacccatctctccacagc

SEQ ID NO: 276012 - DNA, 57 bp, Artificial
  Synthetic oligonucleotide
cactttcatggaggctgtacgagagtctccacgtgcggaggaacccctcggtgtgtg

SEQ ID NO: 276013 - DNA, 50 bp, Artificial
  Synthetic oligonucleotide
tacagcctcgcaagcccgagtgttgggtcaagcgtatgcacaaatggcgc

SEQ ID NO: 276014 - DNA, 50 bp, Artificial
  Synthetic oligonucleotide
cagcgtgtcggagcctcctacagtgcctagccacctcatgcagggggtcc

SEQ ID NO: 276015 - DNA, 50 bp, Artificial
  Synthetic oligonucleotide
cagcgtcctgcgattgaaggtccaccagcccgtgcgtactgcctaggtcc

SEQ ID NO: 276016 - DNA, 50 bp, Artificial
  Synthetic oligonucleotide
cagcactacccgggagcaggtcttgagcgttgcctaccgatgtgttcccc

SEQ ID NO: 276017 - DNA, 50 bp, Artificial
  Synthetic oligonucleotide
cagatacgcttcctcgttcgtttttccttggcccagcaacgcagggggcg

SEQ ID NO: 276018 - DNA, 50 bp, Artificial
  Synthetic oligonucleotide
cagaggcgagcaccgcgtttgcgcacgcaagggaaaagagcactgaacgc

SEQ ID NO: 276019 - DNA, 50 bp, Artificial
  Synthetic oligonucleotide
taccaggaagctcccaccagttaggcagaggcatctgacgaacctccccc

SEQ ID NO: 276020 - DNA, 50 bp, Artificial
  Synthetic oligonucleotide
cagacatgacctctctgaaggcgcgagaggcgcaagcttggcccacgtaa

SEQ ID NO: 276021 - DNA, 50 bp, Artificial
  Synthetic oligonucleotide
ccatacaatggaccaatgctgcgcaatgaaccgttcttctgcggaatttt

SEQ ID NO: 276022 - DNA, 50 bp, Artificial
  Synthetic oligonucleotide
ccagcgcgctctcgcagcctaacactccttccttggccaacgatagccgc

SEQ ID NO: 276023 - DNA, 49 bp, Artificial
  Synthetic oligonucleotide
accccccccccccgtactatcactaagtgatagtacgggggtggggata

SEQ ID NO: 276024 - DNA, 50 bp, Artificial
  Synthetic oligonucleotide
gttgtaacgaggaccgtggtcttctggagtgtttccccggagaacttaag

SEQ ID NO: 276025 - DNA, 50 bp, Artificial
  Synthetic oligonucleotide
ccagagggccatccatgattccggtgcttcccacctctggcgtattccga

SEQ ID NO: 276026 - DNA, 50 bp, Artificial
  Synthetic oligonucleotide
ccagacaagcctgagtcgttgcgtgaaagcgcgctcgaacccatgcctcc

SEQ ID NO: 276027 - DNA, 50 bp, Artificial
  Synthetic oligonucleotide
ccactgccacgcggtaccagcgattctttgggtgcttgcacctcgacaga

SEQ ID NO: 276028 - DNA, 50 bp, Artificial
  Synthetic oligonucleotide
gttgttgttcccttatcagaaaccaagttaccactcttaacgggtgttcc

SEQ ID NO: 276029 - DNA, 50 bp, Artificial
  Synthetic oligonucleotide
ccacgggcctcaggagacgcagcgccccacttgagaggaatagggttcga

SEQ ID NO: 276030 - DNA, 50 bp, Artificial
  Synthetic oligonucleotide
ccaccacaggtgccgcctagattcgacgcccagtggacttgagggtccca

SEQ ID NO: 276031 - DNA, 50 bp, Artificial
  Synthetic oligonucleotide
ccacaggtgcttgtgggggtgtcgataggtgcattcctcgggtcgctcta

SEQ ID NO: 276032 - DNA, 50 bp, Artificial
  Synthetic oligonucleotide
ccaacgcctctatgcgcgacaagacgcttttcacgtttcgccgcctgggt

SEQ ID NO: 276033 - DNA, 50 bp, Artificial
  Synthetic oligonucleotide
ccaaccatagaagcatcgtatttatgtgtttcctcgtagcgatcaaacaa

SEQ ID NO: 276034 - DNA, 57 bp, Artificial
  Synthetic oligonucleotide
cgtaatccaggggattatacagtgtttcagccagcacgtactcgccttggttggact

SEQ ID NO: 276035 - DNA, 57 bp, Artificial
  Synthetic oligonucleotide
gtctcgtacgcccagcatagcatgatgttccccatcagtgaccaacaggagccgcaa

SEQ ID NO: 276036 - DNA, 50 bp, Artificial
  Synthetic oligonucleotide
cattgattgcatcggcctcctattctaaacattgtgtaacaaaagtcggt

SEQ ID NO: 276037 - DNA, 50 bp, Artificial
  Synthetic oligonucleotide
cattcctacacgtacctctatgcgctccttacctagtggatatcttcctc

SEQ ID NO: 276038 - DNA, 50 bp, Artificial
  Synthetic oligonucleotide
gttttgtcgctgctaaattccaaccccttaagatcctacagcccaattgt

SEQ ID NO: 276039 - DNA, 50 bp, Artificial
  Synthetic oligonucleotide
taaaatgattgggtccgcgtccgactcatctagcaagttaggacgcctcc

SEQ ID NO: 276040 - DNA, 50 bp, Artificial
  Synthetic oligonucleotide
catggggatgacagttagaaactagccaaattaccccttatgtagataac

SEQ ID NO: 276041 - DNA, 50 bp, Artificial
  Synthetic oligonucleotide
catgggcttatgtgcacggagtgagcggcgcatggctatacgcagttggc

SEQ ID NO: 276042 - DNA, 50 bp, Artificial
  Synthetic oligonucleotide
catgctcagaccgtcacgcgaggtccccctgccagctcctaggtgccgac

SEQ ID NO: 276043 - DNA, 50 bp, Artificial
  Synthetic oligonucleotide
catgcggctgcccggcacctgttgttggtttgaccccttgtttcaacccc

SEQ ID NO: 276044 - DNA, 50 bp, Artificial
  Synthetic oligonucleotide
catgccaagcctacacggaacactgctccgggcgttattccacggccgaa

SEQ ID NO: 276045 - DNA, 50 bp, Artificial
  Synthetic oligonucleotide
catgatgacccacactgctaagacgcgccgcagcatatggccgacgcgcc

SEQ ID NO: 276046 - DNA, 57 bp, Artificial
  Synthetic oligonucleotide
tcatctcttcttcagaacatgtaagcgattccttgaagttttgggaggtattaaact

SEQ ID NO: 276047 - DNA, 50 bp, Artificial
  Synthetic oligonucleotide
catgacgcttttgtgagtgtccttccaactcgttgttatgatagcgttgt

SEQ ID NO: 276048 - DNA, 50 bp, Artificial
  Synthetic oligonucleotide
catcgcaaggccgaacttcctaaagccgcgtccgaggggctaattcccca

SEQ ID NO: 276049 - DNA, 50 bp, Artificial
  Synthetic oligonucleotide
catcgagatagcacccttggagccaccgctcaccgctaaatgcagcccgc

SEQ ID NO: 276050 - DNA, 50 bp, Artificial
  Synthetic oligonucleotide
catccacctttagtcagccggccgtcgttattcttgcaggcctcggccca

SEQ ID NO: 276051 - DNA, 50 bp, Artificial
  Synthetic oligonucleotide
atttacgcttcgaccttccgctagccgccgagtggtgcccagcacttgta

SEQ ID NO: 276052 - DNA, 50 bp, Artificial
  Synthetic oligonucleotide
tagcaagtgtgaggcagtgcttgccctaccgagtgtaaggcctggaactt

SEQ ID NO: 276053 - DNA, 50 bp, Artificial
  Synthetic oligonucleotide
attgctgtagattgcatggttgggccaggtggaattgacggtggcaatct

SEQ ID NO: 276054 - DNA, 50 bp, Artificial
  Synthetic oligonucleotide
attgcccaagacggcggcgcactcaatgtccgagctgttttgctcctggc

SEQ ID NO: 276055 - DNA, 50 bp, Artificial
  Synthetic oligonucleotide
tagccggcactcaggcttccatcggaggccctaacgcaaacgcacttaca

SEQ ID NO: 276056 - DNA, 50 bp, Artificial
  Synthetic oligonucleotide
attcgctaatacaagtcgaggcagttcgcacaaacaacctttgacacttg

SEQ ID NO: 276057 - DNA, 57 bp, Artificial
  Synthetic oligonucleotide
tctaccattcactcagggttgcaccatcacagcgactcgcctgaactcgccggttac

SEQ ID NO: 276058 - DNA, 50 bp, Artificial
  Synthetic oligonucleotide
attcattgcctatcgtgtcagcgcccgttgtgggggcatccggtggcagt

SEQ ID NO: 276059 - DNA, 50 bp, Artificial
  Synthetic oligonucleotide
attattgacttctatagcccatactgtccgcactgcaaacacctagcacc

SEQ ID NO: 276060 - DNA, 50 bp, Artificial
  Synthetic oligonucleotide
atgtctgcagtcgctgcgtgaaaagagagcagaggcgggccgcaagacgg

SEQ ID NO: 276061 - DNA, 50 bp, Artificial
  Synthetic oligonucleotide
atgtcatccaccgctccgcgaaacgcatcgtccatgaacgccgcttggaa

SEQ ID NO: 276062 - DNA, 50 bp, Artificial
  Synthetic oligonucleotide
atgtcacgtcacgtgcgcgcgacattattccgagaacttgcgccctgcta

SEQ ID NO: 276063 - DNA, 50 bp, Artificial
  Synthetic oligonucleotide
atggtggcgcctctacgctgaagtacgtcgctttgggcacgagtcgcttg

SEQ ID NO: 276064 - DNA, 50 bp, Artificial
  Synthetic oligonucleotide
atgggaaacgcggagacgccacagataaaacagacggctcgactgccgcg

SEQ ID NO: 276065 - DNA, 50 bp, Artificial
  Synthetic oligonucleotide
atgctgccgttcctcactcgatcgctgtgctccacgtctgccgtctgcta

SEQ ID NO: 276066 - DNA, 50 bp, Artificial
  Synthetic oligonucleotide
atgctatctcacccgcctccttgcgggacgtgttccctgctggattgctc

SEQ ID NO: 276067 - DNA, 50 bp, Artificial
  Synthetic oligonucleotide
atgcggtcccgacaagctctgtgacagcgtccactatagcccactcgggg

SEQ ID NO: 276068 - DNA, 57 bp, Artificial
  Synthetic oligonucleotide
taagccgtttcctgcggggtgcgtcaatagaccttgacactgctgtggtactcccgc

SEQ ID NO: 276069 - DNA, 50 bp, Artificial
  Synthetic oligonucleotide
atgcggccggcagttcacgcggaagacgcatctggagcgtcatatgttca

SEQ ID NO: 276070 - DNA, 50 bp, Artificial
  Synthetic oligonucleotide
atgcgcgatccacgctcttggcagctggctcggcctcttgtcacgtgccc

SEQ ID NO: 276071 - DNA, 50 bp, Artificial
  Synthetic oligonucleotide
tagtgtgccgcggaactgcactgccgacagcaaaggaaatgtacggcgtg

SEQ ID NO: 276072 - DNA, 50 bp, Artificial
  Synthetic oligonucleotide
atgcgaggccaacattactgcggacgtgtggagaggcgcgaactcaggaa

SEQ ID NO: 276073 - DNA, 50 bp, Artificial
  Synthetic oligonucleotide
atgcccacgcgcctcccgcgcacagcctgtgtccctttcgtggtgaagcc

SEQ ID NO: 276074 - DNA, 50 bp, Artificial
  Synthetic oligonucleotide
atgccaggctctcgggatggctgagagcagttactcacaagccttcggga

SEQ ID NO: 276075 - DNA, 50 bp, Artificial
  Synthetic oligonucleotide
atgcagctgcgacactcgcccacaggatcgcgtagaaattgcggcctagg

SEQ ID NO: 276076 - DNA, 50 bp, Artificial
  Synthetic oligonucleotide
atgaggcctccaacgcccattgctgtgctgtcgagcactgcggttctgtg

SEQ ID NO: 276077 - DNA, 50 bp, Artificial
  Synthetic oligonucleotide
atgacggagcctcgcgcctaggtgtcgctagacacgcagcttcatcccaa

SEQ ID NO: 276078 - DNA, 50 bp, Artificial
  Synthetic oligonucleotide
tatatgcctggtcaacgggatactttggctatcggaaaggaaggctagtc

SEQ ID NO: 276079 - DNA, 57 bp, Artificial
  Synthetic oligonucleotide
gggaggggtaaatatcttaagagagttatatatgtaatgtggggtgaggctataata

SEQ ID NO: 276080 - DNA, 50 bp, Artificial
  Synthetic oligonucleotide
cagacagaggggccggcggatactttggtttaagtggtagtgtcatacgt

SEQ ID NO: 276081 - DNA, 50 bp, Artificial
  Synthetic oligonucleotide
taccggaaccgacgtttgcacccgtacccacggtagggaaccgcatcagt

SEQ ID NO: 276082 - DNA, 50 bp, Artificial
  Synthetic oligonucleotide
cactgtttggagggcccaaacgaggacggccctggacacatttgcgagct

SEQ ID NO: 276083 - DNA, 50 bp, Artificial
  Synthetic oligonucleotide
cacgtgcccttcccgctttacccgggctgtcccggtgtgcattttgaacg

SEQ ID NO: 276084 - DNA, 50 bp, Artificial
  Synthetic oligonucleotide
cacgtgcagctgggcgggacaatggtccccttcgcagggtacgcaatgcc

SEQ ID NO: 276085 - DNA, 50 bp, Artificial
  Synthetic oligonucleotide
cacgtgagcggatctagcgggtggaggacacgtgctcgagcttatcggga

SEQ ID NO: 276086 - DNA, 50 bp, Artificial
  Synthetic oligonucleotide
cacgggacgcgtcgtggccagcaaagttggagtatggcccactaggccca

SEQ ID NO: 276087 - DNA, 50 bp, Artificial
  Synthetic oligonucleotide
cacgggaaagagtctggcctacgagtatcttacatgaagattcatagaac

SEQ ID NO: 276088 - DNA, 50 bp, Artificial
  Synthetic oligonucleotide
cacgccgtgtgacttgaatcgcccggccccctctagaatttcccttgcgt

SEQ ID NO: 276089 - DNA, 50 bp, Artificial
  Synthetic oligonucleotide
cacgatctagcggcacagggctttcgtccatagcgctggctgggaagtcg

SEQ ID NO: 276090 - DNA, 57 bp, Artificial
  Synthetic oligonucleotide
gttgcgcaatagttgcaagttccaaagtcttccccgcagtagtcccaccagcagccc

SEQ ID NO: 276091 - DNA, 50 bp, Artificial
  Synthetic oligonucleotide
caccgctcccccactgccttgccatctgaggcgccgctatcagcgcttgt

SEQ ID NO: 276092 - DNA, 50 bp, Artificial
  Synthetic oligonucleotide
caccagcggtagcctacagcgacacttccatggccccaagacttcccagc

SEQ ID NO: 276093 - DNA, 50 bp, Artificial
  Synthetic oligonucleotide
cacatgcgcgtatctccacgctcggtgctctcgtctcccgtgcatggact

SEQ ID NO: 276094 - DNA, 50 bp, Artificial
  Synthetic oligonucleotide
tacgttccgggcatttcctgggagcaactgccagactactccccaccact

SEQ ID NO: 276095 - DNA, 50 bp, Artificial
  Synthetic oligonucleotide
cacacgccgtccatagtccgccgcagggtaattggtgggcacgtcattgg

SEQ ID NO: 276096 - DNA, 50 bp, Artificial
  Synthetic oligonucleotide
caatggtcgtgtgcgccgcggtattcccccactctgggcagtccgagatc

SEQ ID NO: 276097 - DNA, 50 bp, Artificial
  Synthetic oligonucleotide
caagcgttcactgatgcccgcaggctctgcatgtttacctccctcgggct

SEQ ID NO: 276098 - DNA, 50 bp, Artificial
  Synthetic oligonucleotide
caacttagcgccctccccggttagcatgtcaagccgcaccaacatcccgc

SEQ ID NO: 276099 - DNA, 50 bp, Artificial
  Synthetic oligonucleotide
caacggtgacatccgcgctcaggtctgttcgttcgtcagggcccctgtgt

SEQ ID NO: 276100 - DNA, 50 bp, Artificial
  Synthetic oligonucleotide
caacgagcgcacggactaccacgtcaacccgacgcccgaatggttctacc

SEQ ID NO: 276101 - DNA, 55 bp, Artificial
  Synthetic oligonucleotide
agggtctgttgttacccccttgctccgggggcccacatctctctgacgcgaagaa

SEQ ID NO: 276102 - DNA, 50 bp, Artificial
  Synthetic oligonucleotide
caacatgtttgaaaagacgggatgggtttgtagtaaggtgattagactgg

SEQ ID NO: 276103 - DNA, 50 bp, Artificial
  Synthetic oligonucleotide
caacagttggttggcttaccgtctctagcacagttatggtcgattagagt

SEQ ID NO: 276104 - DNA, 50 bp, Artificial
  Synthetic oligonucleotide
tagagcacgatccacgtggtagcacagccgccaaacacgagaggcttgct

SEQ ID NO: 276105 - DNA, 50 bp, Artificial
  Synthetic oligonucleotide
caaaagggggcctgcggctgctttccacgcattcctgactgcgctcgtac

SEQ ID NO: 276106 - DNA, 44 bp, Artificial
  Synthetic oligonucleotide
gagcagcactctgttcaactacgcacgcgtgactacaacttgcc

SEQ ID NO: 276107 - DNA, 44 bp, Artificial
  Synthetic oligonucleotide
ggtggacgcaaatctccaccagccaaccacccaccaagcgtacc

SEQ ID NO: 276108 - DNA, 57 bp, Artificial
  Synthetic oligonucleotide
cctaggcagagccatctagaaggagaccgtttaaccgctaggcagaggctcgcgcga

SEQ ID NO: 276109 - DNA, 56 bp, Artificial
  Synthetic oligonucleotide
gaggataagaggaggccgtcctgcgttgcgcttaaagttcacccctattagccgcc

SEQ ID NO: 276110 - DNA, 57 bp, Artificial
  Synthetic oligonucleotide
cgccaatggatatactgcccacgattcccgggtccacgagtgctacgcctgcgaagc

SEQ ID NO: 276111 - DNA, 56 bp, Artificial
  Synthetic oligonucleotide
tacgttattctttcatcaaatcgttctttcattaattcgttctttcatcaaatcgt

SEQ ID NO: 276112 - DNA, 57 bp, Artificial
  Synthetic oligonucleotide
tcctcaaaagatcgacgcaatggtggccacaatgaagggcattcccaccgctagcaa

SEQ ID NO: 276113 - DNA, 57 bp, Artificial
  Synthetic oligonucleotide
tgaatcctgtcagggggatgggttccagacgcaaactaggaggatgggccccatggt

SEQ ID NO: 276114 - DNA, 57 bp, Artificial
  Synthetic oligonucleotide
gcaacctcggcatcattagccggcgtcacagaagcgctaacactcgaacgcacatcc

SEQ ID NO: 276115 - DNA, 57 bp, Artificial
  Synthetic oligonucleotide
gtctcttcatcggtagtctgagttttgggcactgggccaacccacaggagataggaa

SEQ ID NO: 276116 - DNA, 57 bp, Artificial
  Synthetic oligonucleotide
aggctttatctccgcttagccaaggccgtcaaaggcgataaggtgcgttgcacccca

SEQ ID NO: 276117 - DNA, 57 bp, Artificial
  Synthetic oligonucleotide
tacgccgaacgttttggatccaatcaaacctgccacatgcgtcccatgtccgttgta

SEQ ID NO: 276118 - DNA, 57 bp, Artificial
  Synthetic oligonucleotide
tcgcaagtcgtaggtccccgttgcgatccttcctcgggatagttagacatccgcctg

SEQ ID NO: 276119 - DNA, 57 bp, Artificial
  Synthetic oligonucleotide
cccgcccggccccacacgagtacattcgcgccaacaacagcgcaaatcagacctctc

SEQ ID NO: 276120 - DNA, 53 bp, Artificial
  Synthetic oligonucleotide
aacgatgaccacagccttcgtccgccctcccgtttatcttcttccccactcgg

SEQ ID NO: 276121 - DNA, 56 bp, Artificial
  Synthetic oligonucleotide
acggcggggtctaacgaggtcgatcaatccacagctaacccagaccgtgtcacctc

SEQ ID NO: 276122 - DNA, 60 bp, Artificial
  Synthetic oligonucleotide
cacatcaaagatcatcttcatctctttagtgggcctggaggccctaacctcttccctgga

SEQ ID NO: 276123 - DNA, 53 bp, Artificial
  Synthetic oligonucleotide
cgacatgtggggatcgggtggtcggatggtcggatggttccggttaattaccc

SEQ ID NO: 276124 - DNA, 56 bp, Artificial
  Synthetic oligonucleotide
atccgttcgaggtcagtggcatgggacgccttagccagatctgaggaattgagcga

SEQ ID NO: 276125 - DNA, 56 bp, Artificial
  Synthetic oligonucleotide
ctgggttctgtgcttacagtcgtcacagctgacgtcacggtgccgttacccggttg

SEQ ID NO: 276126 - DNA, 56 bp, Artificial
  Synthetic oligonucleotide
tccgggttgagtactatgtcgcaacagcctcgtagcacaccagcaagcagcatggt

SEQ ID NO: 276127 - DNA, 56 bp, Artificial
  Synthetic oligonucleotide
tctcggtatttcaatctacgaaagaaacactaggaggagtaaaatagatatagtag

SEQ ID NO: 276128 - DNA, 56 bp, Artificial
  Synthetic oligonucleotide
agactcaattgtggaagatgtcaatcagttttttgcaagaattactgacctaccga

SEQ ID NO: 276129 - DNA, 55 bp, Artificial
  Synthetic oligonucleotide
gccccaagaggaagttacggtggtccaagaggcggctatggcgccccaagaggtg

SEQ ID NO: 276130 - DNA, 56 bp, Artificial
  Synthetic oligonucleotide
agtcgctgcaactccccgcacgagcgctcctttctcgcgcaaaacgtcccagaacg

SEQ ID NO: 276131 - DNA, 56 bp, Artificial
  Synthetic oligonucleotide
ctggcctggcgtgtgctgtcgagacagtatggtgcgacactttgctacactccgat

SEQ ID NO: 276132 - DNA, 56 bp, Artificial
  Synthetic oligonucleotide
atcctcgttagaaggctcacagggtctgatcccttcccgtgggtggaccgatgacc

SEQ ID NO: 276133 - DNA, 60 bp, Artificial
  Synthetic oligonucleotide
gagcttatttccattcagctatgagtcctgatgtactattaggtgcatgttgaccacccg

SEQ ID NO: 276134 - DNA, 56 bp, Artificial
  Synthetic oligonucleotide
ctgctgcgcgggcagtcacacggaggagtccatcaattgagctcgtttcctctgga

SEQ ID NO: 276135 - DNA, 56 bp, Artificial
  Synthetic oligonucleotide
taatctgtgcggggtgggagaaataacccgctcgagcttgacttgcggcctagctc

SEQ ID NO: 276136 - DNA, 56 bp, Artificial
  Synthetic oligonucleotide
gtactcctgcgggttgcgtacgatcactcagagggttgcggtaactgcgtcgagta

SEQ ID NO: 276137 - DNA, 56 bp, Artificial
  Synthetic oligonucleotide
ttcacggggtcgaaaccagacgaagtcacgatacagtcccactggaccgcacgcag

SEQ ID NO: 276138 - DNA, 56 bp, Artificial
  Synthetic oligonucleotide
agagtatcattttgtcataatgaaggatgtcagtgcaaatctgatcaaattcgata

SEQ ID NO: 276139 - DNA, 54 bp, Artificial
  Synthetic oligonucleotide
gccgggcactaaactttcctgacaacggcgtaagctggaaactggtcccccatc

SEQ ID NO: 276140 - DNA, 56 bp, Artificial
  Synthetic oligonucleotide
gtccttaagccaagtgaaattgaactggtagtgaagatgctatctaggtatagtta

SEQ ID NO: 276141 - DNA, 56 bp, Artificial
  Synthetic oligonucleotide
tcgctagcgccagaggtcacgcttgggaagtgcagttcctctgatacacggccacc

SEQ ID NO: 276142 - DNA, 56 bp, Artificial
  Synthetic oligonucleotide
ggaatataaagtctttatggcttagtggttaaagcatctcactgttaatgagaata

SEQ ID NO: 276143 - DNA, 54 bp, Artificial
  Synthetic oligonucleotide
ggaataggtgacaacgccttcccaccgccttggttgttctttgggagtgcggaa

SEQ ID NO: 276144 - DNA, 60 bp, Artificial
  Synthetic oligonucleotide
tgccatactttcggaatacgccagaggtgggaagcaccggaatcatggatggccctctgg

SEQ ID NO: 276145 - DNA, 52 bp, Artificial
  Synthetic oligonucleotide
aagtctataatagtttaggtagtaggttaattaatagtttataacctagcca

SEQ ID NO: 276146 - DNA, 56 bp, Artificial
  Synthetic oligonucleotide
cctacaccttatgctatgggttttcaggattctgctacacctaatcaagagggtat

SEQ ID NO: 276147 - DNA, 56 bp, Artificial
  Synthetic oligonucleotide
gtataccatgatacggtgaaaagggcatgtaatattgcgttaatttgtcgataacc

SEQ ID NO: 276148 - DNA, 56 bp, Artificial
  Synthetic oligonucleotide
gtcgacactagaaataacatatcaggagcattactgaagagtactaatgatgcaac

SEQ ID NO: 276149 - DNA, 55 bp, Artificial
  Synthetic oligonucleotide
tgttccaagccgcccacccaactgaaacctacccagtcgaagttgctgaagccgt

SEQ ID NO: 276150 - DNA, 56 bp, Artificial
  Synthetic oligonucleotide
gtataaatgtgagtactgttttttgcctgtcagtgttagtctgggtctctatcgag

SEQ ID NO: 276151 - DNA, 56 bp, Artificial
  Synthetic oligonucleotide
cgtgagtagttaaaacgcacacttcactacacagtttcattaagaagtaatcttcg

SEQ ID NO: 276152 - DNA, 56 bp, Artificial
  Synthetic oligonucleotide
cgaaggaagcaataacggcaagcgcttccgcaggatctgtttcagaccctacgggc

SEQ ID NO: 276153 - DNA, 56 bp, Artificial
  Synthetic oligonucleotide
gactgtcaggatccccgaccaaaggatggccccacggagtaaccccattgttgtga

SEQ ID NO: 276154 - DNA, 51 bp, Artificial
  Synthetic oligonucleotide
gcgtttaaacgtttcgcgttccttatacactaataacgttaaactaagcaa

SEQ ID NO: 276155 - DNA, 56 bp, Artificial
  Synthetic oligonucleotide
cgcgaacaaatctcgtagacctagctccatgacgaacccccacccgcgagtggtgt

SEQ ID NO: 276156 - DNA, 60 bp, Artificial
  Synthetic oligonucleotide
gaatatatgaggggagggcaatatataatagggatttgtagcttaacagtagagtatcat

SEQ ID NO: 276157 - DNA, 56 bp, Artificial
  Synthetic oligonucleotide
tggttggtcctccgcagtgtggcacaacttacgcctttttgcctgacgcgtcacca

SEQ ID NO: 276158 - DNA, 56 bp, Artificial
  Synthetic oligonucleotide
tggcgcgctgactgaatgtgtagggtctgttgttacccccttgctccgggggccca

SEQ ID NO: 276159 - DNA, 56 bp, Artificial
  Synthetic oligonucleotide
ggggagttgttgtggccgggagcaagagaagagacgcagcaagcgtgggtcaatga

SEQ ID NO: 276160 - DNA, 56 bp, Artificial
  Synthetic oligonucleotide
ctcgcacgcgcgcaagtggcggaaccagacacagaaatcgatcatcccatgcccaa

SEQ ID NO: 276161 - DNA, 56 bp, Artificial
  Synthetic oligonucleotide
gagttacatagagatgatttagctgcgttaaaatttattatagatctatttgaaat

SEQ ID NO: 276162 - DNA, 56 bp, Artificial
  Synthetic oligonucleotide
ggggagggcaatatataatagggatttgtagcttaacagtagagtatcattttgtc

SEQ ID NO: 276163 - DNA, 56 bp, Artificial
  Synthetic oligonucleotide
aacggcagtactttcacagacgctgggagacacgaaacgaccagcttgagatccca

SEQ ID NO: 276164 - DNA, 56 bp, Artificial
  Synthetic oligonucleotide
tggtaaaacagttatcttttaagtaacccatgcttggttcaactccagctattctc

SEQ ID NO: 276165 - DNA, 56 bp, Artificial
  Synthetic oligonucleotide
tatccgctgtgtcatgggtttcgctcggactggtaacttggtgcgtatccgggaca

SEQ ID NO: 276166 - DNA, 56 bp, Artificial
  Synthetic oligonucleotide
ggcgccccaagaggtggttacggtggcccaagagattcatatggtcctccaagaga

SEQ ID NO: 276167 - DNA, 60 bp, Artificial
  Synthetic oligonucleotide
ctatttgcgcttctctgtcatattgtactgattgtcttatctcccgcgagtacttgatga

SEQ ID NO: 276168 - DNA, 55 bp, Artificial
  Synthetic oligonucleotide
gtcgttctatttctggtactatttgaccttagtaatgtcttgaacccgttacata

SEQ ID NO: 276169 - DNA, 56 bp, Artificial
  Synthetic oligonucleotide
gaatgtgttacttgtgcgttgttcgttggtttatcttatgttggtgttaatcactc

SEQ ID NO: 276170 - DNA, 56 bp, Artificial
  Synthetic oligonucleotide
cagtgcagcgactgtaacacttgcgacccccacacttcgaacccctgtaggcaaca

SEQ ID NO: 276171 - DNA, 56 bp, Artificial
  Synthetic oligonucleotide
gcacaatgcagcttcgaacacatccactcgtcccagacagtttcgggcccaatgcg

SEQ ID NO: 276172 - DNA, 56 bp, Artificial
  Synthetic oligonucleotide
cgttggctccggcaacttaactcctacgcacgctagggactggtctccatcgcagg

SEQ ID NO: 276173 - DNA, 56 bp, Artificial
  Synthetic oligonucleotide
tagacagatggtgtcaagaaccggcttggctgctacggaatgcgtagctgaacgcc

SEQ ID NO: 276174 - DNA, 56 bp, Artificial
  Synthetic oligonucleotide
ctcagagtgcattacattatcagaagcgttcttagataattcaggtggactaattg

SEQ ID NO: 276175 - DNA, 56 bp, Artificial
  Synthetic oligonucleotide
gtgttgactcatggtttatcaattaaacgcggtgttcaaatacaaaatgcactagg

SEQ ID NO: 276176 - DNA, 56 bp, Artificial
  Synthetic oligonucleotide
atggatcattattaggtgatgctcatgctgaacatcgtaaaggaggaaaaggtact

SEQ ID NO: 276177 - DNA, 56 bp, Artificial
  Synthetic oligonucleotide
atgcctcgagggctgccctatttaaccctctgggtgtgatatcgccgtcattggga

SEQ ID NO: 276178 - DNA, 60 bp, Artificial
  Synthetic oligonucleotide
gaatacccccttcactacttggtagcagtagtccagcagatagcgacaatagtcctccag

SEQ ID NO: 276179 - DNA, 56 bp, Artificial
  Synthetic oligonucleotide
tacagtgggaacgcacgtctatagtggggtagcggggactgctatacgcaactgga

SEQ ID NO: 276180 - DNA, 56 bp, Artificial
  Synthetic oligonucleotide
actcaccgacccagtttctcgctccccatgcatgcacgtcgcgttggttaccgctc

SEQ ID NO: 276181 - DNA, 56 bp, Artificial
  Synthetic oligonucleotide
cttagttcttctttacaaatagatgcgaaatgtgctaattgggacgattctgtacc

SEQ ID NO: 276182 - DNA, 56 bp, Artificial
  Synthetic oligonucleotide
atgccagccacagtctccgccgaagagagatgctgacgccgcaaaagaattggtct

SEQ ID NO: 276183 - DNA, 56 bp, Artificial
  Synthetic oligonucleotide
tcaactggtagcctacgcggggtcggcagtctatgcattagtggggacggtcctag

SEQ ID NO: 276184 - DNA, 56 bp, Artificial
  Synthetic oligonucleotide
tgtaccgcgacgacacgcctcacggacacgacaaggctcagaccattgaacagtgc

SEQ ID NO: 276185 - DNA, 56 bp, Artificial
  Synthetic oligonucleotide
ccagaggtcacgcttgggaagtgcagttcctctgatacacggccacctagtgccat

SEQ ID NO: 276186 - DNA, 55 bp, Artificial
  Synthetic oligonucleotide
ttgtgtcaccggggcctgccaacgggcacccctaaattcaatgcgtcgggtaaca

SEQ ID NO: 276187 - DNA, 49 bp, Artificial
  Synthetic oligonucleotide
atgccaaccccgcggctccacccccccccctttaaggggtgggtggagc

SEQ ID NO: 276188 - DNA, 56 bp, Artificial
  Synthetic oligonucleotide
cctgctagcgtgtgtttttgtggcgcatgctcgttctgctgtgtgttacccgcgct

SEQ ID NO: 276189 - DNA, 60 bp, Artificial
  Synthetic oligonucleotide
taggacacgtaaatctgcgctagataagtacattgtgcaaatgcctctggtacttcgtaa

SEQ ID NO: 276190 - DNA, 56 bp, Artificial
  Synthetic oligonucleotide
cacctgaagagtacgttaatgaaactcaaaacaatagacggttatagtcaacaaca

SEQ ID NO: 276191 - DNA, 56 bp, Artificial
  Synthetic oligonucleotide
catgccagtccgatgatggagcacgcgtaaccgaatgcgaggacatggtccgtggc

SEQ ID NO: 276192 - DNA, 56 bp, Artificial
  Synthetic oligonucleotide
acgttggcctggtcccaacattggaggccttttgtgcagtctctgtgcgcagtagc

SEQ ID NO: 276193 - DNA, 55 bp, Artificial
  Synthetic oligonucleotide
ctgtgatcatatttctcagactatcaatttccaagttggcgtggaccctcaaagc

SEQ ID NO: 276194 - DNA, 55 bp, Artificial
  Synthetic oligonucleotide
ctgtctgagcaactcacaaagtttcaaacgagcgacaaatatgggtacccagcgg

SEQ ID NO: 276195 - DNA, 55 bp, Artificial
  Synthetic oligonucleotide
ctagccaactgcaacggttcagaggaagtcaacccgcttatcttgacgtgtgtag

SEQ ID NO: 276196 - DNA, 55 bp, Artificial
  Synthetic oligonucleotide
ctagcgatagcataactatggaaggaacgaattcggaaaccatttggcctaccac

SEQ ID NO: 276197 - DNA, 55 bp, Artificial
  Synthetic oligonucleotide
ctgttagtggctaacaagcataagttaaggaaagcccttagaacgtaagaatgaa

SEQ ID NO: 276198 - DNA, 55 bp, Artificial
  Synthetic oligonucleotide
ctagggactgtgtccttcctgctagaccaactagtaccagaaaaggtggatcgat

SEQ ID NO: 276199 - DNA, 55 bp, Artificial
  Synthetic oligonucleotide
gtacctctcaaccttcaaagacacgtttaactcctggtcctcctcaatatcaagc

SEQ ID NO: 276200 - DNA, 60 bp, Artificial
  Synthetic oligonucleotide
tgaggtgccagtgtcagacatactcgagcgtgaggtgccagtgtcagacatactcgagcg

SEQ ID NO: 276201 - DNA, 55 bp, Artificial
  Synthetic oligonucleotide
ctagctgcgaagctcgacaaaaggggatcagattcagcgggtggtacggtagcta

SEQ ID NO: 276202 - DNA, 55 bp, Artificial
  Synthetic oligonucleotide
ctgttcattttagagctgacagactgttcattcgtagtctgtggcctccatgtag

SEQ ID NO: 276203 - DNA, 55 bp, Artificial
  Synthetic oligonucleotide
ctagccaatatggtcgcaatatctaaacccgagcgcttgccatagatctccgggc

SEQ ID NO: 276204 - DNA, 55 bp, Artificial
  Synthetic oligonucleotide
ctagccacgtcggattcctcataagtgaatagttcgtgttaaattgtgcatggca

SEQ ID NO: 276205 - DNA, 55 bp, Artificial
  Synthetic oligonucleotide
gtacctcgcagcagaattaccagccgtatggctactaaagatcgcaaaacctcgc

SEQ ID NO: 276206 - DNA, 55 bp, Artificial
  Synthetic oligonucleotide
ctgtggctaagatattccccgcatacattggtctcttaaatgttttcgggtcctg

SEQ ID NO: 276207 - DNA, 55 bp, Artificial
  Synthetic oligonucleotide
cttataaagcagttggcaatcgaaacttgttggattagaactccaagatcaaccc

SEQ ID NO: 276208 - DNA, 55 bp, Artificial
  Synthetic oligonucleotide
ctctatatgtactacgagtcatcgtcgtgtactttgcgaagtgcaggccgtggcg

SEQ ID NO: 276209 - DNA, 55 bp, Artificial
  Synthetic oligonucleotide
ctctaagacttcgtatgcagaaataatcacacggttaatccgggatgcggatcca

SEQ ID NO: 276210 - DNA, 55 bp, Artificial
  Synthetic oligonucleotide
gtaccctgctcatgagattcctgtgttgtagtgtctctggtagacattagggagt

SEQ ID NO: 276211 - DNA, 52 bp, Artificial
  Synthetic oligonucleotide
tcagcttagctgggaagaagatatggggggggtattaaaaaaggtaaatccc

SEQ ID NO: 276212 - DNA, 55 bp, Artificial
  Synthetic oligonucleotide
ctaccgacctgtacctcggtccaggcaaattggtcttgcgagactccttgctcgt

SEQ ID NO: 276213 - DNA, 55 bp, Artificial
  Synthetic oligonucleotide
ctacccatcagggagagcgactgacaagaagccaaagtcttcggagacctcctat

SEQ ID NO: 276214 - DNA, 55 bp, Artificial
  Synthetic oligonucleotide
gtacccactactgttgtcggcggatgagataacggtgaatgtatcgccagctaaa

SEQ ID NO: 276215 - DNA, 55 bp, Artificial
  Synthetic oligonucleotide
ctctactcattaccggggaaacaaagagacatcgaggttacatccgcggataagt

SEQ ID NO: 276216 - DNA, 55 bp, Artificial
  Synthetic oligonucleotide
ctacccaacgacactattgcaaaatcgaaactttgtctgaatggtgatattcctg

SEQ ID NO: 276217 - DNA, 55 bp, Artificial
  Synthetic oligonucleotide
cttcataaccaggaccagatgggactaaggcgctacacaacatttccctgtggtg

SEQ ID NO: 276218 - DNA, 55 bp, Artificial
  Synthetic oligonucleotide
cttcccggatctttaccacggaggtgctggttacacttggtccactctaagagat

SEQ ID NO: 276219 - DNA, 55 bp, Artificial
  Synthetic oligonucleotide
ctaccacgtgggatgatccaagattaccatcctccctagaccaaaacgttccaca

SEQ ID NO: 276220 - DNA, 55 bp, Artificial
  Synthetic oligonucleotide
cttcgacgaaactattaccacgagggataccacctcgctggttgcatctctacct

SEQ ID NO: 276221 - DNA, 55 bp, Artificial
  Synthetic oligonucleotide
ctaccaagagaaagcagtacgactcttgtgattacaacgcggatgttgagccacc

SEQ ID NO: 276222 - DNA, 58 bp, Artificial
  Synthetic oligonucleotide
aaggtggactttttttaaccgtgtgcatgtatcggctgtcagccattttgctgacgcc

SEQ ID NO: 276223 - DNA, 55 bp, Artificial
  Synthetic oligonucleotide
cttcgatttccatcgttcgttgttgaaagtccaactataacaccaaccttgatcg

SEQ ID NO: 276224 - DNA, 55 bp, Artificial
  Synthetic oligonucleotide
cttcgcagactacaaccatattagaaactaccgcaatttcacgctctagtactca

SEQ ID NO: 276225 - DNA, 55 bp, Artificial
  Synthetic oligonucleotide
ctacagcagtgggaggagactgatcagtgtctgaagtaggcgcttcgatggttgc

SEQ ID NO: 276226 - DNA, 55 bp, Artificial
  Synthetic oligonucleotide
cttcggatgttgtacgttgctctccggaaaataataggggcgaaaagacagcggc

SEQ ID NO: 276227 - DNA, 55 bp, Artificial
  Synthetic oligonucleotide
ctacagcaattggggcaaaggctatcttctttaggagtaagttcgatggggtctc

SEQ ID NO: 276228 - DNA, 55 bp, Artificial
  Synthetic oligonucleotide
gtaccatggttcgagattgacagctagtatcgccggtaagtgcgtctaatttgcg

SEQ ID NO: 276229 - DNA, 55 bp, Artificial
  Synthetic oligonucleotide
ctacagagacgctagtaaggtgatacacgttggttgtactgttggattctcggag

SEQ ID NO: 276230 - DNA, 55 bp, Artificial
  Synthetic oligonucleotide
cttctacgtagtccgcatgtatggggtatcttctgtgggaagtgcctgtaagagc

SEQ ID NO: 276231 - DNA, 55 bp, Artificial
  Synthetic oligonucleotide
ctagaactatcctttaaactatctctaggagcgtttctgtattgtgactctctac

SEQ ID NO: 276232 - DNA, 55 bp, Artificial
  Synthetic oligonucleotide
ctgttctcgacggcattgcagtattggacgatctaagtgctatggtatatagtaa

SEQ ID NO: 276233 - DNA, 60 bp, Artificial
  Synthetic oligonucleotide
atgtgcagccacctaatgctccttcataccaatccgtacaaggtggtagctctatttcgg

SEQ ID NO: 276234 - DNA, 55 bp, Artificial
  Synthetic oligonucleotide
ctgttggactggacaatcgtcaagtttggtagtagcgattagcctagctgatgct

SEQ ID NO: 276235 - DNA, 55 bp, Artificial
  Synthetic oligonucleotide
ctactctggctagacacgccctaaagagcgctagattccaattcatcgctcaacg

SEQ ID NO: 276236 - DNA, 55 bp, Artificial
  Synthetic oligonucleotide
cttaactaatctttgtattgaactagctgaccaatgtagagcagatcgctaaacc

SEQ ID NO: 276237 - DNA, 55 bp, Artificial
  Synthetic oligonucleotide
cttacacggcgtaagcaggcctgggacggataggattttctgtctatcctaaggg

SEQ ID NO: 276238 - DNA, 55 bp, Artificial
  Synthetic oligonucleotide
gtacctagcactgtaatgaacctggagtattggtcgcacaacaggaaaacggttc

SEQ ID NO: 276239 - DNA, 55 bp, Artificial
  Synthetic oligonucleotide
ctacgtctacggagcccaacttactagcaatggctcaccgagaaggacacaggga

SEQ ID NO: 276240 - DNA, 55 bp, Artificial
  Synthetic oligonucleotide
cttacgcggccttcctgagaagagcacagtggggccagatcaaaatcccacaggc

SEQ ID NO: 276241 - DNA, 55 bp, Artificial
  Synthetic oligonucleotide
ctacgtaggtaacctgttgatagccgaagtggtagtatagtacacggcattggcg

SEQ ID NO: 276242 - DNA, 55 bp, Artificial
  Synthetic oligonucleotide
cttagaggaggctccatctttatgtccaatatggtcgagtcccaagtaatgcatt

SEQ ID NO: 276243 - DNA, 55 bp, Artificial
  Synthetic oligonucleotide
ctacgcggggtcggcagtctatgcattagtggggacggtcctagttgctggtcta

SEQ ID NO: 276244 - DNA, 56 bp, Artificial
  Synthetic oligonucleotide
tgaggaattagtaagggaaaagaggtcacaagagacacaaaagacctctagtacga

SEQ ID NO: 276245 - DNA, 55 bp, Artificial
  Synthetic oligonucleotide
ctacgagttttggattggcccgttcccatgggtgctgatcgtagaatagagctcg

SEQ ID NO: 276246 - DNA, 55 bp, Artificial
  Synthetic oligonucleotide
gtattcggcgaatttgcggtcctcatccacaatagcattggggtcaagctcaggt

SEQ ID NO: 276247 - DNA, 55 bp, Artificial
  Synthetic oligonucleotide
ctacgaacagtacccctcaacacttctaccgagcaaaatctcccgatatcgaatg

SEQ ID NO: 276248 - DNA, 55 bp, Artificial
  Synthetic oligonucleotide
ctacctgtagctgagggtactgaattcctgtctgttgtacgtacgatttccatac

SEQ ID NO: 276249 - DNA, 53 bp, Artificial
  Synthetic oligonucleotide
gtaccggtatttgaagggtgaagttggcccacgagtggaggaagtggggtcca

SEQ ID NO: 276250 - DNA, 55 bp, Artificial
  Synthetic oligonucleotide
cttagcctgtgggccattaccgatagtacggtcttcgattactatgccgccttcc

SEQ ID NO: 276251 - DNA, 55 bp, Artificial
  Synthetic oligonucleotide
ctcgtcccagttggaagtctcttgatcagagacagagtgaagtgtttcgttgtcg

SEQ ID NO: 276252 - DNA, 55 bp, Artificial
  Synthetic oligonucleotide
ctcgttgcaggtacttatgcgtaagtgttgggagagcgggtaagcacgcgctgta

SEQ ID NO: 276253 - DNA, 55 bp, Artificial
  Synthetic oligonucleotide
cttaggacgaacgttattctccaatagttcatcttcacttgagctcgtgacgtag

SEQ ID NO: 276254 - DNA, 55 bp, Artificial
  Synthetic oligonucleotide
cttagtgccagagacagtaatggacgccttgatgggaacccacttcgtagcagtg

SEQ ID NO: 276255 - DNA, 58 bp, Artificial
  Synthetic oligonucleotide
ctgccgtaacggctttagctcaccggcttgtttgtgatggtaccactccggacgatgc

SEQ ID NO: 276256 - DNA, 58 bp, Artificial
  Synthetic oligonucleotide
gccgcaggggcagggcggaagagaggcgtgggcgggaggagaacagtagagagtaagc

SEQ ID NO: 276257 - DNA, 55 bp, Artificial
  Synthetic oligonucleotide
gtattgacgatggtagcgacgagcgaaattcaaattcgcgtagcaaaagagtatc

SEQ ID NO: 276258 - DNA, 55 bp, Artificial
  Synthetic oligonucleotide
gtaggcatagaatttactacaagcatctgtatcactgcggcctcgtagtgcaacg

SEQ ID NO: 276259 - DNA, 47 bp, Artificial
  Synthetic oligonucleotide
ctcctgcggggttcggttcccccccgtaaggggggggtccctcactc

SEQ ID NO: 276260 - DNA, 55 bp, Artificial
  Synthetic oligonucleotide
ctcctgcacgcagggttgacagcccgggtaacgcacggcggagtcccgtaagagt

SEQ ID NO: 276261 - DNA, 55 bp, Artificial
  Synthetic oligonucleotide
ctgagtgaatcgatgtggccttataacgttaagaatttaccggctaacaacggcc

SEQ ID NO: 276262 - DNA, 55 bp, Artificial
  Synthetic oligonucleotide
ctcccttgcattatattccgcgcgggacggaacaaattggctagttccgaggagc

SEQ ID NO: 276263 - DNA, 55 bp, Artificial
  Synthetic oligonucleotide
ctcgtcactagccttaacggaaagcctttccaaagttgcgcacattacgcctgac

SEQ ID NO: 276264 - DNA, 55 bp, Artificial
  Synthetic oligonucleotide
ctgatacgtatcgttgtggacggggatagtttcagagtacaatggagcggagagg

SEQ ID NO: 276265 - DNA, 55 bp, Artificial
  Synthetic oligonucleotide
ctgatagatctacaacatctgctctgatatgttggttgtcttcagtatatccacg

SEQ ID NO: 276266 - DNA, 55 bp, Artificial
  Synthetic oligonucleotide
ctcccgatggaggactttgagagctcacaattcgatgatattgagagcgggctca

SEQ ID NO: 276267 - DNA, 58 bp, Artificial
  Synthetic oligonucleotide
agagcaacacagatttgtcacaaaaagcggctataaaggattccccagcttcataaaa

SEQ ID NO: 276268 - DNA, 55 bp, Artificial
  Synthetic oligonucleotide
gtatcaaagggcttctatagcggtgataagttaagttcgatgcgtgataatgcta

SEQ ID NO: 276269 - DNA, 55 bp, Artificial
  Synthetic oligonucleotide
ctcccacactgaaggtacgaggaaagcgctagcgatggcattagagttagaatcg

SEQ ID NO: 276270 - DNA, 55 bp, Artificial
  Synthetic oligonucleotide
ctgcaactgagaggttggttgacaagatactgcttgttagtcgactgttagcttc

SEQ ID NO: 276271 - DNA, 55 bp, Artificial
  Synthetic oligonucleotide
ctgcacacacgcaatgagacgaatcttttccagtagcaagtctcccgggaactcg

SEQ ID NO: 276272 - DNA, 55 bp, Artificial
  Synthetic oligonucleotide
ctgcacctgatcatgtcgcctgaaggtttccgagtgactaagactccaaggaagt

SEQ ID NO: 276273 - DNA, 55 bp, Artificial
  Synthetic oligonucleotide
ctccagcattcattgtatgttttgggccattagatttgacgatgatagcgttccg

SEQ ID NO: 276274 - DNA, 55 bp, Artificial
  Synthetic oligonucleotide
ctccaattcgctgcgcaactgcttaacagcattgcaatcgtccctagctaacgag

SEQ ID NO: 276275 - DNA, 55 bp, Artificial
  Synthetic oligonucleotide
ctccaagaggatcgcgatgtatctcttcaggtcaatttggtctcgctgatcactc

SEQ ID NO: 276276 - DNA, 55 bp, Artificial
  Synthetic oligonucleotide
ctcattaggaaaccatgatcctaatatcacatcctactggtctggtttgacgttg

SEQ ID NO: 276277 - DNA, 55 bp, Artificial
  Synthetic oligonucleotide
gtagcgtggcatagtgtggtcaataggtgtccgctcggacttgtgtagctgatgg

SEQ ID NO: 276278 - DNA, 57 bp, Artificial
  Synthetic oligonucleotide
tactaggggtatatagagtacttatggaaattaaggaggatatagatactagaggag

SEQ ID NO: 276279 - DNA, 55 bp, Artificial
  Synthetic oligonucleotide
ctcataaagggtcggacaatggcgtccgggatatatattgaaccggtttgattcg

SEQ ID NO: 276280 - DNA, 55 bp, Artificial
  Synthetic oligonucleotide
ctgcatgtcgattacggtaaactccttgcatcacggtttactcgaccggaacctt

SEQ ID NO: 276281 - DNA, 55 bp, Artificial
  Synthetic oligonucleotide
ctgccccggatagggcgatgagccgttacaacacacgctctgcagtgacaataac

SEQ ID NO: 276282 - DNA, 55 bp, Artificial
  Synthetic oligonucleotide
ctgcgcactttatacggatatacgtcattgttctgcgctgacgtaattgaggaga

SEQ ID NO: 276283 - DNA, 55 bp, Artificial
  Synthetic oligonucleotide
ctgcgccaattaggatttgaagggacttcagcgccatttagatcaaaggctatcc

SEQ ID NO: 276284 - DNA, 55 bp, Artificial
  Synthetic oligonucleotide
ctgcggcttaagtggactattgcattgctgtgtatcgagagctgacacaattgcg

SEQ ID NO: 276285 - DNA, 55 bp, Artificial
  Synthetic oligonucleotide
ctcagttggggccaactcaacggggacaatagcatgccataaaagcgctggagta

SEQ ID NO: 276286 - DNA, 55 bp, Artificial
  Synthetic oligonucleotide
ctcaggtccgctaacctttccttcgaacctagacagttcgtatgaaaactctatc

SEQ ID NO: 276287 - DNA, 55 bp, Artificial
  Synthetic oligonucleotide
ctctcgcacacgatctcacctcagacgtctgttcaggacatagacagggacgccc

SEQ ID NO: 276288 - DNA, 55 bp, Artificial
  Synthetic oligonucleotide
gtagttcttcacatacatatacccggaatcacgtgcattgcaattaccgccacct

SEQ ID NO: 276289 - DNA, 58 bp, Artificial
  Synthetic oligonucleotide
acttatagtcatcatgccttaatcgcaggtaatagaaataaagccttatcaggtttat

SEQ ID NO: 276290 - DNA, 55 bp, Artificial
  Synthetic oligonucleotide
ctctcgatccctctctagtaccttgcaactcggaagaaaggttgatatcccattc

SEQ ID NO: 276291 - DNA, 55 bp, Artificial
  Synthetic oligonucleotide
ctcgctttcggagctccgcggggtatgtgcgttttgtacgtgtggaggtcaggtg

SEQ ID NO: 276292 - DNA, 55 bp, Artificial
  Synthetic oligonucleotide
ctctcttgaatgtcgtgttgattttctggccactctcgatggcactctcccatgc

SEQ ID NO: 276293 - DNA, 55 bp, Artificial
  Synthetic oligonucleotide
ctctgaggggaaagttaaccttttgcgcattaagactgccacgccaaacatcgac

SEQ ID NO: 276294 - DNA, 55 bp, Artificial
  Synthetic oligonucleotide
ctcgctcgttgatgctatgtcgaacttgttcaacgtcaagtttggtgttgccaac

SEQ ID NO: 276295 - DNA, 55 bp, Artificial
  Synthetic oligonucleotide
ctcgcgtctctcaatttaattctcactctttgcgagacacttgctaattcgtccc

SEQ ID NO: 276296 - DNA, 55 bp, Artificial
  Synthetic oligonucleotide
ctctgatgtagtcccgtcatctttctctgcaaccgcataaaggttcgataaacgc

SEQ ID NO: 276297 - DNA, 55 bp, Artificial
  Synthetic oligonucleotide
ctctgctgaaatgcagtctggtataccgacacagagggcatccagctccggtagg

SEQ ID NO: 276298 - DNA, 55 bp, Artificial
  Synthetic oligonucleotide
ctctgggctcaccatcgcagacattattgctagaagacgcggtatttacccgctt

SEQ ID NO: 276299 - DNA, 55 bp, Artificial
  Synthetic oligonucleotide
ctcggtaacgcctccactgctagcggggaccattcatcctaatatgggtcaaagg

SEQ ID NO: 276300 - DNA, 47 bp, Artificial
  Synthetic oligonucleotide
cccttccccctcccccgggggcatatatgccccccgggggaggggta

SEQ ID NO: 276301 - DNA, 55 bp, Artificial
  Synthetic oligonucleotide
ctctgggtaacttaggccgacacttagtgcagcagaaccactcatccatgtacct

SEQ ID NO: 276302 - DNA, 55 bp, Artificial
  Synthetic oligonucleotide
gtagtctcataagtaccggtccatggttgggttgtggttacatatgtttcacagt

SEQ ID NO: 276303 - DNA, 55 bp, Artificial
  Synthetic oligonucleotide
ctcgagttttgttcaaatgagttgaatggatcgacgcagattgcattcatcgatc

SEQ ID NO: 276304 - DNA, 55 bp, Artificial
  Synthetic oligonucleotide
ctctggtgactctaagagcaaagtgcatatatgggattggacaaccactagattg

SEQ ID NO: 276305 - DNA, 55 bp, Artificial
  Synthetic oligonucleotide
ctcgagtcgttgatgtaggttgcagtatacaccctctttccgtcaaatgatggca

SEQ ID NO: 276306 - DNA, 53 bp, Artificial
  Synthetic oligonucleotide
ctgaaagttaccaatcgttttcaggggattacgtttgtaatggtgcgacgctt

SEQ ID NO: 276307 - DNA, 55 bp, Artificial
  Synthetic oligonucleotide
ctgaacagactagagcgtatgaagcgggcctctccacaagagaacaggaggtacc

SEQ ID NO: 276308 - DNA, 55 bp, Artificial
  Synthetic oligonucleotide
ctgaagaatacgtcgagtgatgtcactgcttcccaactcttttaccatacccctg

SEQ ID NO: 276309 - DNA, 55 bp, Artificial
  Synthetic oligonucleotide
ctgaagctcgtccgccaattctacctctgaagtcacatctctcgcgtttacccag

SEQ ID NO: 276310 - DNA, 55 bp, Artificial
  Synthetic oligonucleotide
ctgacaacgcgtgtggtatagatgaactcagaagttactcacatatggcagtttg

SEQ ID NO: 276311 - DNA, 56 bp, Artificial
  Synthetic oligonucleotide
tacgtatacttacgtatacttatatatatgggggatccctcacttctccggcgtcc

SEQ ID NO: 276312 - DNA, 55 bp, Artificial
  Synthetic oligonucleotide
gtagtttaaggtcagttggagtgctagctgtcgagatatggtcggtgtcacagtg

SEQ ID NO: 276313 - DNA, 53 bp, Artificial
  Synthetic oligonucleotide
ctccttacaagaatgtttagggttctcattaactccttcccactcggggattg

SEQ ID NO: 276314 - DNA, 55 bp, Artificial
  Synthetic oligonucleotide
gtaggtaagttctctgcttagcggcctcctcatgccaccagtaatctctaccggc

SEQ ID NO: 276315 - DNA, 55 bp, Artificial
  Synthetic oligonucleotide
ctgacacatttggaacagaagcatttctaagacatttcgtccctccttattcgga

SEQ ID NO: 276316 - DNA, 55 bp, Artificial
  Synthetic oligonucleotide
ctgagcagcgggtgtctcattctttggaacctccgcaggtgacgattcacccggg

SEQ ID NO: 276317 - DNA, 55 bp, Artificial
  Synthetic oligonucleotide
ctgagcagtgtaacgtggatcggtcttacgtaggacagcatgcccatatccaggg

SEQ ID NO: 276318 - DNA, 55 bp, Artificial
  Synthetic oligonucleotide
gtactctggatagatttgtggatgctacactacgaagttccctaggtagacgatc

SEQ ID NO: 276319 - DNA, 55 bp, Artificial
  Synthetic oligonucleotide
ctatctaatatgacaattgagggtgacgctagagctatagttagggagaacattg

SEQ ID NO: 276320 - DNA, 55 bp, Artificial
  Synthetic oligonucleotide
ctggccggtgttgtcacctctctactaggcttagaggacttatggaaaggtacga

SEQ ID NO: 276321 - DNA, 55 bp, Artificial
  Synthetic oligonucleotide
ctatcgaagagtaggttggttgccagtctatcccatattgacctacattacacga

SEQ ID NO: 276322 - DNA, 53 bp, Artificial
  Synthetic oligonucleotide
ggagtaccttgaggtacgaataaggcgaagaaacctaaaccatgtctaactaa

SEQ ID NO: 276323 - DNA, 55 bp, Artificial
  Synthetic oligonucleotide
ctggctatacgatcccacttttcgagatcatctccaggagcaaagtgcatcacag

SEQ ID NO: 276324 - DNA, 55 bp, Artificial
  Synthetic oligonucleotide
gtatgaaagctgtcgtcattgaaggcgtaaacgctgtcgtaaaggaaaacgttcc

SEQ ID NO: 276325 - DNA, 55 bp, Artificial
  Synthetic oligonucleotide
ctatatggagcattgaatagcccgtaccaagtttggtctagcactgtacttcccc

SEQ ID NO: 276326 - DNA, 55 bp, Artificial
  Synthetic oligonucleotide
ctatatcgaatagctatgaagtagcatggaccgcgaatctatgcatgttaccgtt

SEQ ID NO: 276327 - DNA, 55 bp, Artificial
  Synthetic oligonucleotide
ctgggctccgtctagagaatgacacgaaacctcactcgttgtttccttccgagtg

SEQ ID NO: 276328 - DNA, 55 bp, Artificial
  Synthetic oligonucleotide
gtacgtacttggctctagccacgttactttccaccgtatccttacctgcactcca

SEQ ID NO: 276329 - DNA, 55 bp, Artificial
  Synthetic oligonucleotide
ctataatcgtgatttctgaatatacctggcgtatgtctggagtcatccagatcaa

SEQ ID NO: 276330 - DNA, 55 bp, Artificial
  Synthetic oligonucleotide
ctagtggttgtttactatgtagcattgttgcaccactggtcatactgtgtcccca

SEQ ID NO: 276331 - DNA, 55 bp, Artificial
  Synthetic oligonucleotide
ctagtgaaacatcccatgtggatctccaatctttagggagaattccaagcgcaag

SEQ ID NO: 276332 - DNA, 55 bp, Artificial
  Synthetic oligonucleotide
gtatgggcgtttatgttgggctattgctgtacgtcgtctcaggctagtgccaagg

SEQ ID NO: 276333 - DNA, 57 bp, Artificial
  Synthetic oligonucleotide
acttcttacaagtctttatcaggattacaatttcctctaatcatttggatatagtaa

SEQ ID NO: 276334 - DNA, 55 bp, Artificial
  Synthetic oligonucleotide
gtacggtggtgttaatatggtttctcacgaagctacccatgaaagtgcgctaagg

SEQ ID NO: 276335 - DNA, 55 bp, Artificial
  Synthetic oligonucleotide
ctggtcacctctccggattttgggtgaatatcaaaatgacctcacaaggtaacac

SEQ ID NO: 276336 - DNA, 55 bp, Artificial
  Synthetic oligonucleotide
gtatgtcttgatatgcctattggggtgttccgatttccgactaacatacaggccc

SEQ ID NO: 276337 - DNA, 55 bp, Artificial
  Synthetic oligonucleotide
ctggtgctagaatgtgtgaacgtttgagtcaatgtaactgtggtacccaaatcgt

SEQ ID NO: 276338 - DNA, 54 bp, Artificial
  Synthetic oligonucleotide
gtacggcgatacttgtaaccacccacggacgtactgacagagtattcccctccc

SEQ ID NO: 276339 - DNA, 55 bp, Artificial
  Synthetic oligonucleotide
ctggtgtatataacgtcttaacccctctaaccgaactcctaagcattacgtgcat

SEQ ID NO: 276340 - DNA, 55 bp, Artificial
  Synthetic oligonucleotide
ctctcaacagctcaatgggacaccgatgtctatgtcctcaggctatacgtggtcc

SEQ ID NO: 276341 - DNA, 55 bp, Artificial
  Synthetic oligonucleotide
ctgtcaacgtgtgcatcaatcatagcttgggattctaagccagttagatacccca

SEQ ID NO: 276342 - DNA, 55 bp, Artificial
  Synthetic oligonucleotide
gtatgtgcgtttaatgacactagtaccatcgtgtagtgttgcctgattctgccac

SEQ ID NO: 276343 - DNA, 55 bp, Artificial
  Synthetic oligonucleotide
gtattcgacctggaacacgcatttaccacgagaagacagcaatagtccgtacaac

SEQ ID NO: 276344 - DNA, 55 bp, Artificial
  Synthetic oligonucleotide
tagtcaagccaataatggtttaggtagtaggtagagtaagagtttacctagccaa

SEQ ID NO: 276345 - DNA, 53 bp, Artificial
  Synthetic oligonucleotide
ctagggattctgttttaacgttagctagagaaaacttggatccaaccgaatgg

SEQ ID NO: 276346 - DNA, 55 bp, Artificial
  Synthetic oligonucleotide
gtaccttatcgtcctacacagtctctaacgaacgagttggctggcgcctacttac

SEQ ID NO: 276347 - DNA, 55 bp, Artificial
  Synthetic oligonucleotide
ctagggatcgaatcgttagcttatagcttacccatcaatagacagaaaggatgac

SEQ ID NO: 276348 - DNA, 55 bp, Artificial
  Synthetic oligonucleotide
ctgtctcgcttgtaacatcactgctctcatacaccgacgaccggctaacttcccg

SEQ ID NO: 276349 - DNA, 55 bp, Artificial
  Synthetic oligonucleotide
ctgcgttcagattcgtagttgtgtcgtcctctgtattcacatcaatgttcactgt

SEQ ID NO: 276350 - DNA, 55 bp, Artificial
  Synthetic oligonucleotide
ctcagctccacacactgcgctaagcgtttcatctatatttccagtataaaccgcc

SEQ ID NO: 276351 - DNA, 55 bp, Artificial
  Synthetic oligonucleotide
ctcagatccaattctacgctagctcccgataactctcctcgagccgcagataatg

SEQ ID NO: 276352 - DNA, 55 bp, Artificial
  Synthetic oligonucleotide
ctgcgttttggtcagagccgtgcaactatacgaagaggaagattcgtcggagttc

SEQ ID NO: 276353 - DNA, 49 bp, Artificial
  Synthetic oligonucleotide
ctgctacttattatttataaccccccccccgaacgaagtgaggggggga

SEQ ID NO: 276354 - DNA, 55 bp, Artificial
  Synthetic oligonucleotide
ctgctcaagccttccactcttttcgtatttgcaatctcagggagtgaaatgtcac

SEQ ID NO: 276355 - DNA, 60 bp, Artificial
  Synthetic oligonucleotide
ccagaggtgggaagcaccggaatcatggatggccctctggcaaaaatgttctcggctaga

SEQ ID NO: 276356 - DNA, 55 bp, Artificial
  Synthetic oligonucleotide
gtagacctatcaggccctttggcttacaatcagttgtaaagaacgtaccatgacc

SEQ ID NO: 276357 - DNA, 55 bp, Artificial
  Synthetic oligonucleotide
ctgctcctcctttaccgcgattcttctccaatgtaacaactctaaattctccgtc

SEQ ID NO: 276358 - DNA, 55 bp, Artificial
  Synthetic oligonucleotide
ctcagacctttactccgagcccaagatcgagtaattgccacgaaattcagctctg

SEQ ID NO: 276359 - DNA, 55 bp, Artificial
  Synthetic oligonucleotide
ctcactcgcgttccttctatctttggtaagtagctcgtgtctgttatagaagacg

SEQ ID NO: 276360 - DNA, 55 bp, Artificial
  Synthetic oligonucleotide
ctcaccggagacacccttagaggtggaatgtaaggaggccaattggacgttgtcg

SEQ ID NO: 276361 - DNA, 55 bp, Artificial
  Synthetic oligonucleotide
ctgctcgccctaggttaacgtcctgacgtattagcctcatgcgcgaatctttggg

SEQ ID NO: 276362 - DNA, 55 bp, Artificial
  Synthetic oligonucleotide
ctcaccgattgttgttctcttgtattagtagccttaggctccggctgagtagtcc

SEQ ID NO: 276363 - DNA, 55 bp, Artificial
  Synthetic oligonucleotide
gtatccgttgtcaaacaactcgtagaaagcctgcgatacactcagagaccttgtg

SEQ ID NO: 276364 - DNA, 55 bp, Artificial
  Synthetic oligonucleotide
ctcaatagaggtaactatatcatgaagaaccttgtggatgcgtgccaaaagtccg

SEQ ID NO: 276365 - DNA, 55 bp, Artificial
  Synthetic oligonucleotide
ctcaacatagtcagcggaaaacagtagtttaactacggagccacttctaccaagg

SEQ ID NO: 276366 - DNA, 60 bp, Artificial
  Synthetic oligonucleotide
ctgcgactttatagtttcgtataatcttaaatggatagatgcaatagagaaattcgatct

SEQ ID NO: 276367 - DNA, 53 bp, Artificial
  Synthetic oligonucleotide
ttagccctcccgaagtgccctctatcgtgagttccttagttcccgttccccac

SEQ ID NO: 276368 - DNA, 55 bp, Artificial
  Synthetic oligonucleotide
ctgctgcgcatacgtgtagagatacagcagtgcgtcttttggtatcactttcgca

SEQ ID NO: 276369 - DNA, 55 bp, Artificial
  Synthetic oligonucleotide
gtactgcctctcagatctttcataaccaccaagatacattatagctatactctct

SEQ ID NO: 276370 - DNA, 55 bp, Artificial
  Synthetic oligonucleotide
ctgcttcattgccgaagtaatcctcgaagcgtagcttgcttcaaagacttgacca

SEQ ID NO: 276371 - DNA, 55 bp, Artificial
  Synthetic oligonucleotide
ctgcttccgtttagaccagcttcggggcaaccatatacgtgttctcaaaatacga

SEQ ID NO: 276372 - DNA, 55 bp, Artificial
  Synthetic oligonucleotide
ctatttgccttttcgctagcttacacacctagggttaaatggccatggtagctcc

SEQ ID NO: 276373 - DNA, 55 bp, Artificial
  Synthetic oligonucleotide
ctattgtactgacaacatcgggcgaaatattctgctggggctggaaccgctactc

SEQ ID NO: 276374 - DNA, 55 bp, Artificial
  Synthetic oligonucleotide
ctggatcagcgcttgcttcttggtaaggaaccgtggtactgggggcgaaggcagc

SEQ ID NO: 276375 - DNA, 55 bp, Artificial
  Synthetic oligonucleotide
ctggcaacatctgctatggctagtggtatgacttactatggtatggtgccgcccc

SEQ ID NO: 276376 - DNA, 55 bp, Artificial
  Synthetic oligonucleotide
gtatctcagagaccattgcatatacatgggagaacgtccagcattgtcccgatga

SEQ ID NO: 276377 - DNA, 55 bp, Artificial
  Synthetic oligonucleotide
ctatgggatcagtacttttccgagtttgatgcactgaaatatctccctactagag

SEQ ID NO: 276378 - DNA, 60 bp, Artificial
  Synthetic oligonucleotide
ccagactccccagaatatcaggatgttctggggtattggggaagtatattctgatatgta

SEQ ID NO: 276379 - DNA, 55 bp, Artificial
  Synthetic oligonucleotide
ctatgctagtggtaggacgacggggtgcgttgttgattgcggcgaaggttactgt

SEQ ID NO: 276380 - DNA, 55 bp, Artificial
  Synthetic oligonucleotide
ctatgacttcctcgtaactcaacggctgtgacatcctagactaccaatgttcctc

SEQ ID NO: 276381 - DNA, 55 bp, Artificial
  Synthetic oligonucleotide
ctggcaccgttacctcttacaccactacctgccctatcaccgaagtcgagccaac

SEQ ID NO: 276382 - DNA, 55 bp, Artificial
  Synthetic oligonucleotide
cgatagtcggaagttattgtccgcctccctttggatcaaagacacctcttaggcc

SEQ ID NO: 276383 - DNA, 55 bp, Artificial
  Synthetic oligonucleotide
cgatcaaagtttagctggcgatacattcaccgttatctcatccgccgacaacagt

SEQ ID NO: 276384 - DNA, 55 bp, Artificial
  Synthetic oligonucleotide
cgatcccacatctaatgtccaatgccctccaccatataccgtaacgcaagaatac

SEQ ID NO: 276385 - DNA, 55 bp, Artificial
  Synthetic oligonucleotide
cgatcctgcagcgatacatttctcagatagtgcccatatagacggatctttaccg

SEQ ID NO: 276386 - DNA, 55 bp, Artificial
  Synthetic oligonucleotide
cgatcgtgtacgtttattgttaatggagcgtcaaggcttgagagatccttatacc

SEQ ID NO: 276387 - DNA, 55 bp, Artificial
  Synthetic oligonucleotide
cgatctcagtagcgctgttgctgaatacgggctcaatataggtcgcccagacttt

SEQ ID NO: 276388 - DNA, 55 bp, Artificial
  Synthetic oligonucleotide
gtgaaagttatgaggtcgttccaaaccatactgataactgcgtctgactgttaag

SEQ ID NO: 276389 - DNA, 48 bp, Artificial
  Synthetic oligonucleotide
ttagggaggggtccctcactccttcggggtccgcgccccccgcggggg

SEQ ID NO: 276390 - DNA, 55 bp, Artificial
  Synthetic oligonucleotide
cgatgaggaaagaatcttcgaacttctaggtgaggaatatgtagggcccgaggaa

SEQ ID NO: 276391 - DNA, 55 bp, Artificial
  Synthetic oligonucleotide
cgatgtatcagtggacaatgtacaccactatggtgactggaccccgttcctcgct

SEQ ID NO: 276392 - DNA, 55 bp, Artificial
  Synthetic oligonucleotide
cgatgtctatgggactcaactgagacgctgcgagacgtgttgacaaagactgttg

SEQ ID NO: 276393 - DNA, 55 bp, Artificial
  Synthetic oligonucleotide
cgatgtctgttgttacccgtactcctagatgcagctccgcaagcatagggtacga

SEQ ID NO: 276394 - DNA, 55 bp, Artificial
  Synthetic oligonucleotide
cgatgtgacacatttgtcgtgagcatacggtatcacgtgagatggtccctcaagg

SEQ ID NO: 276395 - DNA, 55 bp, Artificial
  Synthetic oligonucleotide
cgatgttccctggtctagacggcggtgctttcgatctaggtagctttggtgcatc

SEQ ID NO: 276396 - DNA, 55 bp, Artificial
  Synthetic oligonucleotide
cgatgttgaaaccacatcattcgtaccagccattttagcaatgctttgacctatg

SEQ ID NO: 276397 - DNA, 55 bp, Artificial
  Synthetic oligonucleotide
gtcttggcatcagcattttcagtaccgaaagttggcatatgacctctcttaaaca

SEQ ID NO: 276398 - DNA, 55 bp, Artificial
  Synthetic oligonucleotide
cgattaggacactactacttggcctagttatgtggttcagggccaattaccagat

SEQ ID NO: 276399 - DNA, 55 bp, Artificial
  Synthetic oligonucleotide
gtcttgctgaacgtattcataaccttgcttcctatccctgagccaaacgtatacg

SEQ ID NO: 276400 - DNA, 59 bp, Artificial
  Synthetic oligonucleotide
tcacaggatagaagttaacgtaccgttcagttctgcttttcgtttctgtcacagtagca

SEQ ID NO: 276401 - DNA, 55 bp, Artificial
  Synthetic oligonucleotide
cgattgtgtcactgaaaaggccaacgtagcaatgaaaatgtacgcaattagagcg

SEQ ID NO: 276402 - DNA, 55 bp, Artificial
  Synthetic oligonucleotide
cgatttagttccacttaacagctcactttgtgcgattctgttatttacgatagac

SEQ ID NO: 276403 - DNA, 55 bp, Artificial
  Synthetic oligonucleotide
cgattttgtttgcgtcttcagaaaggtacaggcttggatcaagagaagactttgc

SEQ ID NO: 276404 - DNA, 54 bp, Artificial
  Synthetic oligonucleotide
cgcaagctaaggcccttggggagtctacaccattaactaaaagtatcgtgggtc

SEQ ID NO: 276405 - DNA, 55 bp, Artificial
  Synthetic oligonucleotide
cgcaataagccactgtcccaacttcgcaatgtcacactaataccacgcatagctg

SEQ ID NO: 276406 - DNA, 55 bp, Artificial
  Synthetic oligonucleotide
gtcttctccgggaacacaagtctctctaatgctaagttacccttcaacactaaag

SEQ ID NO: 276407 - DNA, 55 bp, Artificial
  Synthetic oligonucleotide
cgagaagttccctgtagttgcacctctacattcgagaagattatcactttcagta

SEQ ID NO: 276408 - DNA, 55 bp, Artificial
  Synthetic oligonucleotide
cgagacccggattaatgggatgacacggcgctaggaagcccgagtcatttgtcgg

SEQ ID NO: 276409 - DNA, 55 bp, Artificial
  Synthetic oligonucleotide
cgagacttatgggttttgttgcagggatgtgttctggagttgcgaagaactcagt

SEQ ID NO: 276410 - DNA, 55 bp, Artificial
  Synthetic oligonucleotide
cgagagaccccgtttatgggatcattcgtaatatctgctaatgcgtatcctcagt

SEQ ID NO: 276411 - DNA, 60 bp, Artificial
  Synthetic oligonucleotide
gaatcgtgcaaaagcattctgcaacggctggcagagtgtatagctaaacgagagcggaag

SEQ ID NO: 276412 - DNA, 55 bp, Artificial
  Synthetic oligonucleotide
gtgaatattagagtacctagagaatctcatatagccatctacacaccactagtac

SEQ ID NO: 276413 - DNA, 55 bp, Artificial
  Synthetic oligonucleotide
cgagatccaatgtgagatctcggttagaaaacttcgtttcacaacagtattttcg

SEQ ID NO: 276414 - DNA, 55 bp, Artificial
  Synthetic oligonucleotide
cgagatttgttggactattaaatcctatacagccgtctgtgagagatccgttggg

SEQ ID NO: 276415 - DNA, 55 bp, Artificial
  Synthetic oligonucleotide
cgagcaatgcttagttggcacataaatgagtcaggcactaccactcgggtaacgg

SEQ ID NO: 276416 - DNA, 55 bp, Artificial
  Synthetic oligonucleotide
cgagcaatgtgggcagacaacgtgcgttcttctaaacccattgtttagcactttt

SEQ ID NO: 276417 - DNA, 55 bp, Artificial
  Synthetic oligonucleotide
cgagcgaatcgtggctaccttatggattggaagccatatcagactatcaacttac

SEQ ID NO: 276418 - DNA, 55 bp, Artificial
  Synthetic oligonucleotide
cgagcgtagcctaaatagcacgttttctgccttgatgtccctgtgaacaacaccg

SEQ ID NO: 276419 - DNA, 55 bp, Artificial
  Synthetic oligonucleotide
cgagcttgataagatcaggatctgttaacatcgaagactcgctggagcctagcgg

SEQ ID NO: 276420 - DNA, 55 bp, Artificial
  Synthetic oligonucleotide
cgaggagccactgctagcggaaactgacgagttggaccaataataaaacttctac

SEQ ID NO: 276421 - DNA, 55 bp, Artificial
  Synthetic oligonucleotide
cgagggtgtgcgcttaaacgattctataccaccgcagaggaaagctgacagtacg

SEQ ID NO: 276422 - DNA, 60 bp, Artificial
  Synthetic oligonucleotide
tcacattacccggtatcaacaagatgcgtcaatgcattgtgcgtctattgcttctcgtac

SEQ ID NO: 276423 - DNA, 55 bp, Artificial
  Synthetic oligonucleotide
cgaggtaaaggcctccccttgtgccggtgttaaacattgtatgacttcttgatcg

SEQ ID NO: 276424 - DNA, 55 bp, Artificial
  Synthetic oligonucleotide
cgagtacattcctgatgagggcctagatgacatatctgagaacaaccgtggctac

SEQ ID NO: 276425 - DNA, 55 bp, Artificial
  Synthetic oligonucleotide
cgagtaccagtcttagtctctgggacaaaagcacgtagcatgcggccaaggtgct

SEQ ID NO: 276426 - DNA, 55 bp, Artificial
  Synthetic oligonucleotide
gtgaacgaaagtcttttgggctgtatgagcacgtctcagtcccctggatacctca

SEQ ID NO: 276427 - DNA, 55 bp, Artificial
  Synthetic oligonucleotide
cgagtgatcgattttctctggaggtctagaagctcgtctgacgcccaagttgatg

SEQ ID NO: 276428 - DNA, 55 bp, Artificial
  Synthetic oligonucleotide
cgagtttcctctattcctttgctaacggagctgcggtatataaaccatcgtagac

SEQ ID NO: 276429 - DNA, 55 bp, Artificial
  Synthetic oligonucleotide
cgagtttcgatgtgaatcgcccgtacgaaaatttcagcagcatgagtgatgtgcc

SEQ ID NO: 276430 - DNA, 55 bp, Artificial
  Synthetic oligonucleotide
cgatacgcatagcttccccaactttagcatcggcatcgactcccgacttataatc

SEQ ID NO: 276431 - DNA, 55 bp, Artificial
  Synthetic oligonucleotide
cgataggcatactcatcgataaacatactactcatactactcaccgatagacagt

SEQ ID NO: 276432 - DNA, 55 bp, Artificial
  Synthetic oligonucleotide
cgcgaaacaactgagacagtcgacttaggaaatggagtgacggaatatcatgtac

SEQ ID NO: 276433 - DNA, 58 bp, Artificial
  Synthetic oligonucleotide
agtgttgccctgtctaacaacggtgacccacatggacgttggcgcacgtgtggttgtg

SEQ ID NO: 276434 - DNA, 55 bp, Artificial
  Synthetic oligonucleotide
cgcgaaatttaaacgatcgcgttagagaaccgtttcacccggagtaatgatcaga

SEQ ID NO: 276435 - DNA, 55 bp, Artificial
  Synthetic oligonucleotide
cgcgacgcgcctccgtttcgcgttagtctctttattagggtggagcacaagttgc

SEQ ID NO: 276436 - DNA, 55 bp, Artificial
  Synthetic oligonucleotide
cgcgagtcctttggtggtcccacacttagctgggattgaagatcctctaccggct

SEQ ID NO: 276437 - DNA, 55 bp, Artificial
  Synthetic oligonucleotide
cgcgcaccagagagtttgtggagcgaaagttggcctttactacagaggagcgcac

SEQ ID NO: 276438 - DNA, 55 bp, Artificial
  Synthetic oligonucleotide
gtctctatgccaattagggacgttcttgtaagtgattctggatgtgacatcgaac

SEQ ID NO: 276439 - DNA, 55 bp, Artificial
  Synthetic oligonucleotide
cgcgcacgggtctcagagaaatcgcgcacagcatcccgtggcaaatcgagccaag

SEQ ID NO: 276440 - DNA, 55 bp, Artificial
  Synthetic oligonucleotide
cgcgcagctaagctattagctgtctcaacaagaacttgctactataaaaggtcag

SEQ ID NO: 276441 - DNA, 55 bp, Artificial
  Synthetic oligonucleotide
gtctctagcatgttccggccctactcgctactaatggggatgatggcagagaact

SEQ ID NO: 276442 - DNA, 55 bp, Artificial
  Synthetic oligonucleotide
gtctctactgcttgaagtcttgcacattagggagaccttaatcgtgctcttgacg

SEQ ID NO: 276443 - DNA, 55 bp, Artificial
  Synthetic oligonucleotide
gtctctacgttgacgtcccgtagcgatagtccgtccgaaatacaaagtccgcagg

SEQ ID NO: 276444 - DNA, 60 bp, Artificial
  Synthetic oligonucleotide
aatagtaaacttatttttgatcatgagagatgtgcaactgtgggtgattattaagatacc

SEQ ID NO: 276445 - DNA, 55 bp, Artificial
  Synthetic oligonucleotide
cgcggaatagatatcgttgtacgccaacttaaattgctcatatacgcccgagtgt

SEQ ID NO: 276446 - DNA, 55 bp, Artificial
  Synthetic oligonucleotide
gtctcgccagtaggtctcaaaacggacttcttgagggtttgatcgtcgccctcac

SEQ ID NO: 276447 - DNA, 55 bp, Artificial
  Synthetic oligonucleotide
cgcgtaactatgttgcaataccttggtctaacttgatggaggtctgctgcagggc

SEQ ID NO: 276448 - DNA, 55 bp, Artificial
  Synthetic oligonucleotide
cgcgtcgtatctagcacaacccacgtaagaaccttaattgacgaacagtcaaacc

SEQ ID NO: 276449 - DNA, 55 bp, Artificial
  Synthetic oligonucleotide
gtctcaattaacccatctggtagggatgtggttcttgccgggaggaaaggtctat

SEQ ID NO: 276450 - DNA, 55 bp, Artificial
  Synthetic oligonucleotide
cgcgttgtggtaggaactttgacgatgatactgcgttggctcttgaacgcatagt

SEQ ID NO: 276451 - DNA, 55 bp, Artificial
  Synthetic oligonucleotide
cgctaaagactatccaaaggcaagtgttcacatcgagacattagatgtcactcga

SEQ ID NO: 276452 - DNA, 55 bp, Artificial
  Synthetic oligonucleotide
cgctaaatattctatgaggagtcgaggcagatgtagttggggtcagaacctcctc

SEQ ID NO: 276453 - DNA, 54 bp, Artificial
  Synthetic oligonucleotide
cgctaaccgacagagtatggtcccaaggtgaattcggtggatttaaccctaata

SEQ ID NO: 276454 - DNA, 55 bp, Artificial
  Synthetic oligonucleotide
gtctcaaacctctccaacgactgcaagtccaccccaagttatgcctattcgacag

SEQ ID NO: 276455 - DNA, 59 bp, Artificial
  Synthetic oligonucleotide
cgtaaaccatatggcttactcagttggggccaactcaacggggacaatagcatgccata

SEQ ID NO: 276456 - DNA, 53 bp, Artificial
  Synthetic oligonucleotide
cgctaccgttgtccaaacaacggacccctttgtgacgggtgtaagacccatca

SEQ ID NO: 276457 - DNA, 55 bp, Artificial
  Synthetic oligonucleotide
cgctacggtacaattcaaagcgtaaccgttgatcaacattgactcggtggaagac

SEQ ID NO: 276458 - DNA, 55 bp, Artificial
  Synthetic oligonucleotide
gtcttctaggacggttatcgtcacagaattgcacaagagcatcgctcaagagggg

SEQ ID NO: 276459 - DNA, 54 bp, Artificial
  Synthetic oligonucleotide
gtcttcacttagaagcgttgaactaaccaatggggccaccggtaagaagagacc

SEQ ID NO: 276460 - DNA, 55 bp, Artificial
  Synthetic oligonucleotide
cgcacatggttagttagcacaaacttgcattacctcttgtcccatctggctctga

SEQ ID NO: 276461 - DNA, 55 bp, Artificial
  Synthetic oligonucleotide
cgcactattcttaactattgtgcctcaagcgaccgaatcggatgcaattttgact

SEQ ID NO: 276462 - DNA, 55 bp, Artificial
  Synthetic oligonucleotide
cgcactgacctctagcacgtctgggagagtttcattggtgccggcaagcgaatgg

SEQ ID NO: 276463 - DNA, 55 bp, Artificial
  Synthetic oligonucleotide
cgcagccacatagtaacgcagcgacgtcagtagatgcattttacgcgtgtgggct

SEQ ID NO: 276464 - DNA, 55 bp, Artificial
  Synthetic oligonucleotide
gtctgggtttatgtgtagaccatgtttaattcctcttagtgggcacctagtagcg

SEQ ID NO: 276465 - DNA, 55 bp, Artificial
  Synthetic oligonucleotide
cgcataaataatagaagaatgcgtaatcctgcagagtaggttcgctgtgaatcgg

SEQ ID NO: 276466 - DNA, 58 bp, Artificial
  Synthetic oligonucleotide
gagctcattttcgtacgtagatatcagaagaggttttcgcggatagtgctttccattt

SEQ ID NO: 276467 - DNA, 55 bp, Artificial
  Synthetic oligonucleotide
cgcataccggtactctgaaccattcccggtgtcttttcttccctgatgggtcgca

SEQ ID NO: 276468 - DNA, 55 bp, Artificial
  Synthetic oligonucleotide
cgcatatccttatggcgctaatttgctcgtctaagggttcaacgaaaactccgga

SEQ ID NO: 276469 - DNA, 55 bp, Artificial
  Synthetic oligonucleotide
cgccacccatttactgacacacccatcttccatacttgactccgttcggcgcagc

SEQ ID NO: 276470 - DNA, 55 bp, Artificial
  Synthetic oligonucleotide
gtctgacgcggagttgatgacgggcgtgtaaggtaacgtgactacggggctatcg

SEQ ID NO: 276471 - DNA, 55 bp, Artificial
  Synthetic oligonucleotide
cgccatgtgtaagtttatgtctattagacctttcggtaacgatccaatgctgcgc

SEQ ID NO: 276472 - DNA, 55 bp, Artificial
  Synthetic oligonucleotide
gtctctcggccctaatcaaaacatcctttgtcgcgttgttttcagatcgattcgc

SEQ ID NO: 276473 - DNA, 53 bp, Artificial
  Synthetic oligonucleotide
cgccctctgctaacgctgttctagtttctgtaccccagtaaaccggtttgttc

SEQ ID NO: 276474 - DNA, 55 bp, Artificial
  Synthetic oligonucleotide
cgcccttcgaagtgcgacaaggcccagattttagatatgtccatgcgtcccggag

SEQ ID NO: 276475 - DNA, 55 bp, Artificial
  Synthetic oligonucleotide
cgccggcaccattaggtcaaccatattatgcgatatccgtggtcttgttgttatg

SEQ ID NO: 276476 - DNA, 55 bp, Artificial
  Synthetic oligonucleotide
cgcctccaaaggctacacggtctgtcgctggaacctccgtctacgttagtggatc

SEQ ID NO: 276477 - DNA, 59 bp, Artificial
  Synthetic oligonucleotide
ggtatttgtatacaaacacccctaggagacatattatacccgcggcagtttgcatgcaa

SEQ ID NO: 276478 - DNA, 60 bp, Artificial
  Synthetic oligonucleotide
atggggcatatcatactttagtagagggacatagagtagatagatgtataagatctgtta

SEQ ID NO: 276479 - DNA, 54 bp, Artificial
  Synthetic oligonucleotide
cgcctgtccaattcagaacggacaaggtgtacgttagcccttaaagttggagtc

SEQ ID NO: 276480 - DNA, 55 bp, Artificial
  Synthetic oligonucleotide
cgcctgtgactctttgccatctcgcctgttaattaccgctcataggcacggctga

SEQ ID NO: 276481 - DNA, 55 bp, Artificial
  Synthetic oligonucleotide
cgccttctcctcctataccgccgtatcagatatcagagatgccccttcatgaact

SEQ ID NO: 276482 - DNA, 55 bp, Artificial
  Synthetic oligonucleotide
cgcctttgaagcaagtaccgtgctagtagcgacatactcttatacacctagtacc

SEQ ID NO: 276483 - DNA, 55 bp, Artificial
  Synthetic oligonucleotide
gtgcctgctttaatacgatcagtacactggtcccaattttagaaagcgacagagc

SEQ ID NO: 276484 - DNA, 55 bp, Artificial
  Synthetic oligonucleotide
cctggggcgacctcatagattgtagagaccagcttaaagagatcgtagtcaggga

SEQ ID NO: 276485 - DNA, 55 bp, Artificial
  Synthetic oligonucleotide
cctggtagatcacctgccagagccttttctctaaattgagtcctacatagtctga

SEQ ID NO: 276486 - DNA, 55 bp, Artificial
  Synthetic oligonucleotide
cctgtatttgagacgcacaacatcctagtatgttattgccttagagcggttatgt

SEQ ID NO: 276487 - DNA, 55 bp, Artificial
  Synthetic oligonucleotide
gtgcctcgattgtaccagacagaaccatcaggtatctattctgcatggaaggcag

SEQ ID NO: 276488 - DNA, 53 bp, Artificial
  Synthetic oligonucleotide
ccttaccgtcttttccaattctcctagtagaggaaattggcctgttcctagtc

SEQ ID NO: 276489 - DNA, 60 bp, Artificial
  Synthetic oligonucleotide
ttatggaaatctgcgcaggtatgacacacatgattctggacctaggacaagaaaatgtac

SEQ ID NO: 276490 - DNA, 55 bp, Artificial
  Synthetic oligonucleotide
ccttagcgaccacactagggcccggagctgactcactggaggatgtgatgctgcg

SEQ ID NO: 276491 - DNA, 55 bp, Artificial
  Synthetic oligonucleotide
ccttatagagtgtggtcgtggcggaggttgtttatctttcgagtactgaatgttg

SEQ ID NO: 276492 - DNA, 53 bp, Artificial
  Synthetic oligonucleotide
ccttatggggtcccggttggaccgagactcctcccttgcgggattggttcaca

SEQ ID NO: 276493 - DNA, 55 bp, Artificial
  Synthetic oligonucleotide
ccttcaagccccacaacgagatacgaatggtgttcgacgagtacctcactgtgta

SEQ ID NO: 276494 - DNA, 55 bp, Artificial
  Synthetic oligonucleotide
ccttcacaaacgccctgttgtgtacttgatgatagttcggaggtaaggtggaact

SEQ ID NO: 276495 - DNA, 55 bp, Artificial
  Synthetic oligonucleotide
ccttcctttgacgaagctgtcagccaaggtaaattcagagccatgccaaactcct

SEQ ID NO: 276496 - DNA, 55 bp, Artificial
  Synthetic oligonucleotide
ccttcgaagccgtacgtagctagttagtttgttcctttagtcgcgctgcgcagtc

SEQ ID NO: 276497 - DNA, 55 bp, Artificial
  Synthetic oligonucleotide
ccttcgactgcacaacataagacagcatatccgccaggacgtccaagggattacg

SEQ ID NO: 276498 - DNA, 55 bp, Artificial
  Synthetic oligonucleotide
ccttcgctacccacgtctctagatttattgactcatccgttgggttcactgtatc

SEQ ID NO: 276499 - DNA, 54 bp, Artificial
  Synthetic oligonucleotide
ccttcttattagatcgatgtggccttgtaacgttaagaatttaccggctaacga

SEQ ID NO: 276500 - DNA, 57 bp, Artificial
  Synthetic oligonucleotide
tagggtcgccgcgactcaaaatacgctttatttctgcaacctggtctaatgggagaa

SEQ ID NO: 276501 - DNA, 55 bp, Artificial
  Synthetic oligonucleotide
gtgcattcattgtaagtaggatagtcgatataaccttcagcaccattaatgcgtt

SEQ ID NO: 276502 - DNA, 55 bp, Artificial
  Synthetic oligonucleotide
ccttgcactgaagttgagctacagagcttattacctgatcttaaaacgtccgact

SEQ ID NO: 276503 - DNA, 55 bp, Artificial
  Synthetic oligonucleotide
ccttgcagttgaccacacacatatctttcgtggtgatctatgttccatgtgattg

SEQ ID NO: 276504 - DNA, 55 bp, Artificial
  Synthetic oligonucleotide
ccttgggtctagatttgccaatcggcgatgacgtctactggagtaccagatgggc

SEQ ID NO: 276505 - DNA, 55 bp, Artificial
  Synthetic oligonucleotide
ccttgtggtatccgttagttctgtagttgtggtgctcttaacctcacgtagtgca

SEQ ID NO: 276506 - DNA, 55 bp, Artificial
  Synthetic oligonucleotide
ccttgttaaaggaggaatccttagaactccgagatatggagggactcgtaccatc

SEQ ID NO: 276507 - DNA, 54 bp, Artificial
  Synthetic oligonucleotide
cctttaattccgcgtttaccacatctgtacgacctaatctaattatagccggcc

SEQ ID NO: 276508 - DNA, 55 bp, Artificial
  Synthetic oligonucleotide
gtgctacgacatttaccactgggacttacgcttgggatagtaactacagttcccg

SEQ ID NO: 276509 - DNA, 55 bp, Artificial
  Synthetic oligonucleotide
cctcggggacagtaagtttgtataaggtgccattcgtagattggaccaattgagg

SEQ ID NO: 276510 - DNA, 55 bp, Artificial
  Synthetic oligonucleotide
gtgctaagagatgctacgactcataagcgaatttggatcccactaaaggcaggtc

SEQ ID NO: 276511 - DNA, 54 bp, Artificial
  Synthetic oligonucleotide
aataatgggttccaattctatccaggtagcggttaattgacggtgcttaagccg

SEQ ID NO: 276512 - DNA, 55 bp, Artificial
  Synthetic oligonucleotide
cctcgttgcggacattcgtgatttaaagtgatctgctggatggttccccgggttg

SEQ ID NO: 276513 - DNA, 55 bp, Artificial
  Synthetic oligonucleotide
cctctacgattaccagcggtcatcctaccaataatacgggtaccagcgatagttg

SEQ ID NO: 276514 - DNA, 55 bp, Artificial
  Synthetic oligonucleotide
cctctacggcttcagtacatttctcacagcgatcctaaagttggggttgggttac

SEQ ID NO: 276515 - DNA, 55 bp, Artificial
  Synthetic oligonucleotide
cctctagattgattcagggtttggcgacagcaggccaacttccaaagatctgcgc

SEQ ID NO: 276516 - DNA, 55 bp, Artificial
  Synthetic oligonucleotide
cctctgtattctccttaggacaggtatctgacgttttgataggaacgacgtggtg

SEQ ID NO: 276517 - DNA, 54 bp, Artificial
  Synthetic oligonucleotide
cctcttatatctaacccggggaaagtctcgtagactagttggctttgtaatgta

SEQ ID NO: 276518 - DNA, 55 bp, Artificial
  Synthetic oligonucleotide
cctgaactaccaaaccctatcacaaagactacagtcgctaattttgaaccatctc

SEQ ID NO: 276519 - DNA, 55 bp, Artificial
  Synthetic oligonucleotide
cctgaattgcatttaacccttcgtgccttatcgcggctgaaatttcgtcacgatc

SEQ ID NO: 276520 - DNA, 55 bp, Artificial
  Synthetic oligonucleotide
cctgagaagctggtaatcatagcgtgcatcctcatcagtagttcgagttttggga

SEQ ID NO: 276521 - DNA, 55 bp, Artificial
  Synthetic oligonucleotide
cctgatatggatcctgtccttcgtattatactggaataagggacatggtaaatct

SEQ ID NO: 276522 - DNA, 56 bp, Artificial
  Synthetic oligonucleotide
cccaggcatgtgccgtgaagagtgaccttccctatagaacccagacggtttagccg

SEQ ID NO: 276523 - DNA, 55 bp, Artificial
  Synthetic oligonucleotide
cctgatcagtcactcagggttagacgcggatagttaccccaacactcagggtaac

SEQ ID NO: 276524 - DNA, 55 bp, Artificial
  Synthetic oligonucleotide
cctgcaacattcatcctcattaccttacgccatcaccgtcttaataccttcccta

SEQ ID NO: 276525 - DNA, 55 bp, Artificial
  Synthetic oligonucleotide
gtgcgtcgaatgggtttcctagtataatctcacattttcgcgatagctggaaacg

SEQ ID NO: 276526 - DNA, 55 bp, Artificial
  Synthetic oligonucleotide
cctgcgttcgtataatcaccgcggtttgtcgaaggattgttggttgaggcctgtg

SEQ ID NO: 276527 - DNA, 55 bp, Artificial
  Synthetic oligonucleotide
gtgcgacacaaaatggacctcgggattatctccgatacatgtgaggcatttcata

SEQ ID NO: 276528 - DNA, 55 bp, Artificial
  Synthetic oligonucleotide
cctgcttcgaggttcgtcagtaaaggactgcttatatcaaccgagtcattaccat

SEQ ID NO: 276529 - DNA, 55 bp, Artificial
  Synthetic oligonucleotide
cctgcttgccacacgatgatccccggtagtcagtactactagtacatagcatacc

SEQ ID NO: 276530 - DNA, 55 bp, Artificial
  Synthetic oligonucleotide
cctggatcacgtaataacgcagatagtgccttcttcacctgtatggtagtggaca

SEQ ID NO: 276531 - DNA, 55 bp, Artificial
  Synthetic oligonucleotide
cgacatttcgagtatatatgacctgttttctatacgcacctcaaatcctactgga

SEQ ID NO: 276532 - DNA, 55 bp, Artificial
  Synthetic oligonucleotide
gtgactgttgagccctgtataatgtgtgcgtctgccctcaagcaattgggtatcc

SEQ ID NO: 276533 - DNA, 60 bp, Artificial
  Synthetic oligonucleotide
gactagagatgttatgtttcgcgagactagctcttcaaataatgatattcggggcggcat

SEQ ID NO: 276534 - DNA, 55 bp, Artificial
  Synthetic oligonucleotide
cgaccagacttatatcgtcctcgggtccactttccagaagttaacacgatcattg

SEQ ID NO: 276535 - DNA, 55 bp, Artificial
  Synthetic oligonucleotide
cgaccctgaaaatattcgaatgccgtatgcacgtgtgtcaagtaggactcaaagc

SEQ ID NO: 276536 - DNA, 54 bp, Artificial
  Synthetic oligonucleotide
cgaccgaaacgcggcggatccgttccttcacgccctaaataaaacatgagattc

SEQ ID NO: 276537 - DNA, 55 bp, Artificial
  Synthetic oligonucleotide
cgacctaattgaccctataattcatcccaaatcgttctatagggcggctaacgag

SEQ ID NO: 276538 - DNA, 55 bp, Artificial
  Synthetic oligonucleotide
cgacgaattgcctcaaatcgctctaagactgcgttattactttcgatcttcttgc

SEQ ID NO: 276539 - DNA, 55 bp, Artificial
  Synthetic oligonucleotide
cgacgacaatcacgttacctgtagtaactttcccttgcgtattggtgtaagtcga

SEQ ID NO: 276540 - DNA, 55 bp, Artificial
  Synthetic oligonucleotide
cgacgataccgttcgaagacgggacattgacagacgtgggagattcaacgaatca

SEQ ID NO: 276541 - DNA, 55 bp, Artificial
  Synthetic oligonucleotide
cgacgatgctaccttggtgggagaggacgtctcgggcacttgcactacgtcatcc

SEQ ID NO: 276542 - DNA, 55 bp, Artificial
  Synthetic oligonucleotide
cgacgattattggaaacagggtaacacatacgtcaaatcgcgtcacattgggata

SEQ ID NO: 276543 - DNA, 55 bp, Artificial
  Synthetic oligonucleotide
cgacggcttttgaacattgcgttaactggtcagccctcttacgcctggccctgtc

SEQ ID NO: 276544 - DNA, 59 bp, Artificial
  Synthetic oligonucleotide
tggtctattactggatactgttttttcaataggcgagcaaacacgcaaatagtcgtata

SEQ ID NO: 276545 - DNA, 53 bp, Artificial
  Synthetic oligonucleotide
cgacggggtttgaaaaggttgcctccgaagaagctgccggaacagggatgaaa

SEQ ID NO: 276546 - DNA, 55 bp, Artificial
  Synthetic oligonucleotide
cgactacattgtataatctaccacctgcacatacttgtaaagcagttgcactgtc

SEQ ID NO: 276547 - DNA, 55 bp, Artificial
  Synthetic oligonucleotide
cgactacgtctaggaagcataccgcacaaataagaccaaccgaaactgatttctg

SEQ ID NO: 276548 - DNA, 55 bp, Artificial
  Synthetic oligonucleotide
cgactagaccagttctaaccttagacaagtagtgagtaccattagcacgagtttg

SEQ ID NO: 276549 - DNA, 55 bp, Artificial
  Synthetic oligonucleotide
gtgacaagcgcagttattacactcccgtacctgccataaattcgggactcgcagc

SEQ ID NO: 276550 - DNA, 55 bp, Artificial
  Synthetic oligonucleotide
cgacttagccgctcaggcgctacggactagtcttagggaagattaccccgctgtc

SEQ ID NO: 276551 - DNA, 55 bp, Artificial
  Synthetic oligonucleotide
gtgaattataattctgagctcgtaaatgcagttttgccacagatatactccgttg

SEQ ID NO: 276552 - DNA, 55 bp, Artificial
  Synthetic oligonucleotide
cgagaaaacggtgtattgagtctgatagattttgtagtaggcgctagggaggacg

SEQ ID NO: 276553 - DNA, 55 bp, Artificial
  Synthetic oligonucleotide
cgagaaagcgagctttaggccttggtcaacatagctttaagctttaaggaacgac

SEQ ID NO: 276554 - DNA, 55 bp, Artificial
  Synthetic oligonucleotide
cgagaaccaattcaccaagcaggtggtactagggaaaaccgcttacactctcgaa

SEQ ID NO: 276555 - DNA, 59 bp, Artificial
  Synthetic oligonucleotide
tggtcggtctcggatgagcgggcgggtaagttgtgctctgggtaaatagcagtgcgttc

SEQ ID NO: 276556 - DNA, 55 bp, Artificial
  Synthetic oligonucleotide
cctttcaagaaccgagaggatggggacgaaattagagcgagggatgagaatagcc

SEQ ID NO: 276557 - DNA, 55 bp, Artificial
  Synthetic oligonucleotide
cctttgccaggcggataagttagattcaatagatatcccgtggatgagtaacgac

SEQ ID NO: 276558 - DNA, 55 bp, Artificial
  Synthetic oligonucleotide
cgaaacagccaattggtccattaccgctaggtagcttcctaagtagacatcgttc

SEQ ID NO: 276559 - DNA, 53 bp, Artificial
  Synthetic oligonucleotide
cgaaagaacgtaattgtgcaacaacttgtatagggaaaataggggccgtgggc

SEQ ID NO: 276560 - DNA, 55 bp, Artificial
  Synthetic oligonucleotide
cgaacaaaaccgtggataactgcaggtattctatgcgtgtattgaggcggaggct

SEQ ID NO: 276561 - DNA, 55 bp, Artificial
  Synthetic oligonucleotide
cgaacagatgtataatcgaggaacgctaatccgggacaacaagctgcactacgtc

SEQ ID NO: 276562 - DNA, 55 bp, Artificial
  Synthetic oligonucleotide
cgaaccataattcagatgtctaattcagagttattctgacgaacttgctagtctc

SEQ ID NO: 276563 - DNA, 55 bp, Artificial
  Synthetic oligonucleotide
gtgcaagactcgtcaatacaagtgctagtgtcaataacagttctgtcatgcgtct

SEQ ID NO: 276564 - DNA, 52 bp, Artificial
  Synthetic oligonucleotide
cgaacgaacttggggtcggttaattcatgacaccgtttaccaagctctaaac

SEQ ID NO: 276565 - DNA, 55 bp, Artificial
  Synthetic oligonucleotide
cgaacgctcaacctgcaaaactgatcgaggtgccctcttaatgcctacgcgtctg

SEQ ID NO: 276566 - DNA, 60 bp, Artificial
  Synthetic oligonucleotide
gctactgcatgctatttatcttatgcatatagaaagcccattgttaatgataattttgta

SEQ ID NO: 276567 - DNA, 55 bp, Artificial
  Synthetic oligonucleotide
cgaacgtggactgacttgtttctacgacgtcctattgttcctataaacgagaata

SEQ ID NO: 276568 - DNA, 55 bp, Artificial
  Synthetic oligonucleotide
gtgattggttctcaatcctcaggtaaatcatcagtattggaatcgatcgtcggga

SEQ ID NO: 276569 - DNA, 55 bp, Artificial
  Synthetic oligonucleotide
cgaactcgctgttgactttctggacgttgatcaattccgttctttcgtctgtttg

SEQ ID NO: 276570 - DNA, 55 bp, Artificial
  Synthetic oligonucleotide
cgaactggtcgaaactagattggtctatgttgcttaccgtcacggatgcgagtaa

SEQ ID NO: 276571 - DNA, 55 bp, Artificial
  Synthetic oligonucleotide
gtgatatgtacttactgcgggtttatggatgatcattactcacaacactgcccta

SEQ ID NO: 276572 - DNA, 55 bp, Artificial
  Synthetic oligonucleotide
gtgataagtcttaagccaatacgaatacacaccccataacacaagatgacattag

SEQ ID NO: 276573 - DNA, 55 bp, Artificial
  Synthetic oligonucleotide
cgaagcttatctgttgacgagaaagcccggtcactcagcgaaaaccgcgagaggc

SEQ ID NO: 276574 - DNA, 55 bp, Artificial
  Synthetic oligonucleotide
cgaaggacgcaacagtatcgatgcttcactttcaggttcgctgcattttatactc

SEQ ID NO: 276575 - DNA, 55 bp, Artificial
  Synthetic oligonucleotide
cgaagtaggaaatgagtggccaaacagtgatttgttcaatcgcagtacctaccgt

SEQ ID NO: 276576 - DNA, 55 bp, Artificial
  Synthetic oligonucleotide
cgaagttgaaacaaccactgatgtgcttgccacgaattgagtacttgttgcttgt

SEQ ID NO: 276577 - DNA, 56 bp, Artificial
  Synthetic oligonucleotide
cgcgcacgtgagcggttttaagctttagccctcccgaagtgccctctatcgtgagt

SEQ ID NO: 276578 - DNA, 55 bp, Artificial
  Synthetic oligonucleotide
cgaatcaggtactcgtccgaagcatttcgagtaatgcaaccccacaagtgtcccc

SEQ ID NO: 276579 - DNA, 55 bp, Artificial
  Synthetic oligonucleotide
cgaattacacttctataactgtccacttgggcaagcttgtcgcgaaatgcattac

SEQ ID NO: 276580 - DNA, 55 bp, Artificial
  Synthetic oligonucleotide
cgaatttacacacacaccaattgatgatcccaccgtagacgaaatttacaagtta

SEQ ID NO: 276581 - DNA, 55 bp, Artificial
  Synthetic oligonucleotide
cgacacccaccattatcgtaggtttaaactccatcaggtcaccttggcaattacg

SEQ ID NO: 276582 - DNA, 55 bp, Artificial
  Synthetic oligonucleotide
cgtccaaaggagaccagtaattgacaccgtataactcatatccagcagcggtaac

SEQ ID NO: 276583 - DNA, 55 bp, Artificial
  Synthetic oligonucleotide
gtcatcactagatggatcgttgatattcgttgaggcatcatctttcacaggatca

SEQ ID NO: 276584 - DNA, 55 bp, Artificial
  Synthetic oligonucleotide
gtcatactaagccagaccacgggacagtttctataagcgggaatgcagttgttgg

SEQ ID NO: 276585 - DNA, 55 bp, Artificial
  Synthetic oligonucleotide
cgtccgcactacataataggttggcagagttaccagggtagctgaactggttgcc

SEQ ID NO: 276586 - DNA, 55 bp, Artificial
  Synthetic oligonucleotide
gtcatacgcatcacatggagtaactcaaggacggagaaagaagatttatgcccag

SEQ ID NO: 276587 - DNA, 55 bp, Artificial
  Synthetic oligonucleotide
cgtcctgatcacatcttgcctgagcgatagaactgacctctgatgctaacaaact

SEQ ID NO: 276588 - DNA, 55 bp, Artificial
  Synthetic oligonucleotide
ggtattttatcaaagttatactttgatattgtaagactcagtatttacctatggt

SEQ ID NO: 276589 - DNA, 53 bp, Artificial
  Synthetic oligonucleotide
cccccccccagataaatatttatctgggggaacattatagctactttggtgga

SEQ ID NO: 276590 - DNA, 55 bp, Artificial
  Synthetic oligonucleotide
cgtcctgtgccatctgtatcgacctaagcagttctttcggatagtacttagagag

SEQ ID NO: 276591 - DNA, 55 bp, Artificial
  Synthetic oligonucleotide
cgtcgaaggctctatggttggcacctgtgaagtagtgaaagtcttcaatgtactt

SEQ ID NO: 276592 - DNA, 55 bp, Artificial
  Synthetic oligonucleotide
gtcataaggagaaactgcgcgcacgtcgtaggaagactaatacagacatgtctcc

SEQ ID NO: 276593 - DNA, 55 bp, Artificial
  Synthetic oligonucleotide
cgtcgatccaatgctgcaatacgttacagaggatggattggattcaaagcacaga

SEQ ID NO: 276594 - DNA, 55 bp, Artificial
  Synthetic oligonucleotide
cgtcgcaagttcagatgtgggtctatcgagcatgtttatcctatcctgttatgtc

SEQ ID NO: 276595 - DNA, 55 bp, Artificial
  Synthetic oligonucleotide
cgtcgtgcctttcgtagtagtcactatcatggccgctctctgcggaatcacggcc

SEQ ID NO: 276596 - DNA, 55 bp, Artificial
  Synthetic oligonucleotide
gtcagtctaagtccagacgcataacctttattgttggctgctatcgacctaacag

SEQ ID NO: 276597 - DNA, 55 bp, Artificial
  Synthetic oligonucleotide
gtcagggtgtatcaactggaccaatcattgcttctcgtagtcaaatgtttattcg

SEQ ID NO: 276598 - DNA, 55 bp, Artificial
  Synthetic oligonucleotide
cgtctcggcatatctactgtacgtacgttacgacactattgtgtgtctgtaaatc

SEQ ID NO: 276599 - DNA, 55 bp, Artificial
  Synthetic oligonucleotide
cgtctcgtcactgtcgcggcacagcgtccgaagccgcatataaaccgggtacgac

SEQ ID NO: 276600 - DNA, 58 bp, Artificial
  Synthetic oligonucleotide
gctacggagaaaccgtgcactaactctctcgagggtagccgcaaagatttcttgtctc

SEQ ID NO: 276601 - DNA, 55 bp, Artificial
  Synthetic oligonucleotide
cgtctgccaaaagattagttggaatactatcttctctaacaccggccttcaacgg

SEQ ID NO: 276602 - DNA, 55 bp, Artificial
  Synthetic oligonucleotide
cgtcttaatatctcatcggaatccaaatcttcattaccgtccaaagtcccgctta

SEQ ID NO: 276603 - DNA, 55 bp, Artificial
  Synthetic oligonucleotide
cgtcttcagtctcagtgacaccgttagcggcggcaatggacaataagatttgagc

SEQ ID NO: 276604 - DNA, 55 bp, Artificial
  Synthetic oligonucleotide
cgtctttcgcttatcggaagagcacctgtcacttgcctcgcttgtcacaaaggag

SEQ ID NO: 276605 - DNA, 55 bp, Artificial
  Synthetic oligonucleotide
cgtgaaatgcagtgtagttggaaaggcgtagttttcctagcacaaggcgtttcgg

SEQ ID NO: 276606 - DNA, 55 bp, Artificial
  Synthetic oligonucleotide
cgtgaatctagcgtgtaaatctatcgtgctcatagaatgtctggttcttgtcaac

SEQ ID NO: 276607 - DNA, 55 bp, Artificial
  Synthetic oligonucleotide
cgtgatagaatgcccaaggttatacattgggatgggatccgcacgttatcagatc

SEQ ID NO: 276608 - DNA, 55 bp, Artificial
  Synthetic oligonucleotide
gtccagaagctctagcgtggctacatcgtgagggcactggtacaagatgcgcaga

SEQ ID NO: 276609 - DNA, 55 bp, Artificial
  Synthetic oligonucleotide
cgtagaggctatgcttctagaagatctggtgttagtatccgaatgatacatcccc

SEQ ID NO: 276610 - DNA, 53 bp, Artificial
  Synthetic oligonucleotide
cgtaggaaaaggcgcggcccaatcattttccttttcggacttcaaggagccga

SEQ ID NO: 276611 - DNA, 60 bp, Artificial
  Synthetic oligonucleotide
cgcttccacggcattcgaaagaactaatattgtatcattgtacatatgaggaacacgcag

SEQ ID NO: 276612 - DNA, 55 bp, Artificial
  Synthetic oligonucleotide
cgtagtcggataccactgtagaatctctttgaggtggtctaccgataccgaccga

SEQ ID NO: 276613 - DNA, 55 bp, Artificial
  Synthetic oligonucleotide
cgtagtggaactgaactctagaggggagctgaccatgaatctacccaaaagagac

SEQ ID NO: 276614 - DNA, 55 bp, Artificial
  Synthetic oligonucleotide
cgtatacgaaggtatttgcaacatgcaggatttacgcctggggatgtgagagact

SEQ ID NO: 276615 - DNA, 55 bp, Artificial
  Synthetic oligonucleotide
cgtatatctcagacaatatagtggtagtgatacttcttggttcggctaaacgatt

SEQ ID NO: 276616 - DNA, 55 bp, Artificial
  Synthetic oligonucleotide
cgtatcggtagacagaccacactcactgaagatagaatgcaattgtttagcacca

SEQ ID NO: 276617 - DNA, 55 bp, Artificial
  Synthetic oligonucleotide
cgtatgccctgtaaagggtaatggcattactacgttgggttgtcgcgtcgttctc

SEQ ID NO: 276618 - DNA, 55 bp, Artificial
  Synthetic oligonucleotide
cgtatgggccaggtttgagccgaggacaaatttactatgggcgcataatttgtgc

SEQ ID NO: 276619 - DNA, 55 bp, Artificial
  Synthetic oligonucleotide
cgtattcattaaatccgtgtacctcgaagcaacgatagacaatccggtgatcagt

SEQ ID NO: 276620 - DNA, 55 bp, Artificial
  Synthetic oligonucleotide
cgtattcgaagggcttttctcgtctagggtatgctaagtatgccctgggaaggca

SEQ ID NO: 276621 - DNA, 55 bp, Artificial
  Synthetic oligonucleotide
cgtattgttcgtagttcttcgatgccccaggacaatgataatctgacacagatct

SEQ ID NO: 276622 - DNA, 60 bp, Artificial
  Synthetic oligonucleotide
accaatagtgaattttcctattacgaatctaatcagacttgcactgacatcaaccatcgt

SEQ ID NO: 276623 - DNA, 55 bp, Artificial
  Synthetic oligonucleotide
cgtcacaagtcttgcaacatgagcgtaaacatcttgtggtctatcgtgtggaatt

SEQ ID NO: 276624 - DNA, 55 bp, Artificial
  Synthetic oligonucleotide
gtcatttagtctaacatgagttatgtatccggactcagtgtcgtcaccctcgcgg

SEQ ID NO: 276625 - DNA, 55 bp, Artificial
  Synthetic oligonucleotide
cgtcacctctcttaaagccgacacctcccacagtttccaacagcttggtgaactt

SEQ ID NO: 276626 - DNA, 55 bp, Artificial
  Synthetic oligonucleotide
cgtcacctttcaatatatcctgctcggaaggtggaagatgtacccctatggaaac

SEQ ID NO: 276627 - DNA, 52 bp, Artificial
  Synthetic oligonucleotide
gtcatcgttacgttaaggttccggtcgagtaaaccgtaatgcaaggagttta

SEQ ID NO: 276628 - DNA, 55 bp, Artificial
  Synthetic oligonucleotide
gtcatcatgtatgcacctgaactatgtgaaatgcaacttcgaagcctaaagacat

SEQ ID NO: 276629 - DNA, 55 bp, Artificial
  Synthetic oligonucleotide
cgtcatatacaatgcggcccttatgtacgtgcgttcaccatagccttcggttgat

SEQ ID NO: 276630 - DNA, 55 bp, Artificial
  Synthetic oligonucleotide
cgtcatattccacgacacgcttgtcctttaaatcacacttgttacctaccaatag

SEQ ID NO: 276631 - DNA, 55 bp, Artificial
  Synthetic oligonucleotide
cgtcatcaacgatgctgtcgttccaattgaaacctgttctactggtccagggttc

SEQ ID NO: 276632 - DNA, 55 bp, Artificial
  Synthetic oligonucleotide
cgtcatcatatgccaatagcatgaatagcgtctcacgcaggtcgcttcgtattgc

SEQ ID NO: 276633 - DNA, 54 bp, Artificial
  Synthetic oligonucleotide
ccccgacggcggaacttcgtctcttgtttctccgagagaacccatccaggccgc

SEQ ID NO: 276634 - DNA, 55 bp, Artificial
  Synthetic oligonucleotide
cgtcattagacgttcgcacgacggaggaattactacgattagttgatatattggg

SEQ ID NO: 276635 - DNA, 55 bp, Artificial
  Synthetic oligonucleotide
cgttgctagggcgcttcgtaacgtatctacatacccgtgaaccgtgttcgtgccc

SEQ ID NO: 276636 - DNA, 55 bp, Artificial
  Synthetic oligonucleotide
gtcaactccgacagtaccccagcgcaccccttcgcttgccaagtcttcgcacaag

SEQ ID NO: 276637 - DNA, 55 bp, Artificial
  Synthetic oligonucleotide
cgttgtacactgacataagcctatcatcgctcgaagaaagttggtaggcacttgg

SEQ ID NO: 276638 - DNA, 55 bp, Artificial
  Synthetic oligonucleotide
cgttgtgcgcttcttccatgttttcaggggccacatgctttaatgcctgcactaa

SEQ ID NO: 276639 - DNA, 55 bp, Artificial
  Synthetic oligonucleotide
cgtttaagttttaggcccttagattaagataatacactatgcggcgctcccctgc

SEQ ID NO: 276640 - DNA, 55 bp, Artificial
  Synthetic oligonucleotide
cgttttatgtagccataccagataactcatcgacacttatacattctgcagacag

SEQ ID NO: 276641 - DNA, 55 bp, Artificial
  Synthetic oligonucleotide
ctaaaagaccctcgatacgattttcactgtgaggttgagacacagcctgcgagtt

SEQ ID NO: 276642 - DNA, 55 bp, Artificial
  Synthetic oligonucleotide
gtcaacctcagcccattataggctatattactcattagcttgctaccaccaacgg

SEQ ID NO: 276643 - DNA, 55 bp, Artificial
  Synthetic oligonucleotide
ctaaatagaacgaggcccttatggggttcatatttcggagtttctttgcagatgg

SEQ ID NO: 276644 - DNA, 57 bp, Artificial
  Synthetic oligonucleotide
tgggcacttgagggctttcgggtgtctagcttatactacgcttcctcccgcacttcg

SEQ ID NO: 276645 - DNA, 55 bp, Artificial
  Synthetic oligonucleotide
ctaaatggaatgcggagtccaatctatccgcttgacctttaaccatccctttagc

SEQ ID NO: 276646 - DNA, 55 bp, Artificial
  Synthetic oligonucleotide
ctaacaacgttgaccaataagtctaggactttggcattcgtggaaagggcagagt

SEQ ID NO: 276647 - DNA, 54 bp, Artificial
  Synthetic oligonucleotide
ctaacggtcacttgtgtgttgttagcgaacaaagggttcctcggctccatttcg

SEQ ID NO: 276648 - DNA, 55 bp, Artificial
  Synthetic oligonucleotide
ctaactgttgtcccatcattccgttttacagcaacccatttagttataccaccac

SEQ ID NO: 276649 - DNA, 55 bp, Artificial
  Synthetic oligonucleotide
ctaagatatggctctacgtggtattcaatggactacttacagacatcccacggga

SEQ ID NO: 276650 - DNA, 55 bp, Artificial
  Synthetic oligonucleotide
ctaagtgtgaggaagttccacttgatgggtaagaaccatcttagagtgcgagctg

SEQ ID NO: 276651 - DNA, 55 bp, Artificial
  Synthetic oligonucleotide
gtcaacattagtgaccacgctaccacaagaggcttgacgcgggtcaaaagtcgac

SEQ ID NO: 276652 - DNA, 55 bp, Artificial
  Synthetic oligonucleotide
ctaatataggtgctaactggagacaagggcctgctacaataaaatttctcgagca

SEQ ID NO: 276653 - DNA, 55 bp, Artificial
  Synthetic oligonucleotide
ctaatggagcgtggtccatagacagcggtaatgagcgatgtttggtgtcctaagc

SEQ ID NO: 276654 - DNA, 55 bp, Artificial
  Synthetic oligonucleotide
ctaattcgcagtactccactggatgctgaacacctcggatgtgttgcgtgtgcgc

SEQ ID NO: 276655 - DNA, 53 bp, Artificial
  Synthetic oligonucleotide
tgggaataccttacggaccctccttcgcggtgtagcggtgacaattaagcggg

SEQ ID NO: 276656 - DNA, 55 bp, Artificial
  Synthetic oligonucleotide
ctaattgtagagatgttgattcgacagatgaacggttctatagtttcagtggacg

SEQ ID NO: 276657 - DNA, 55 bp, Artificial
  Synthetic oligonucleotide
gtcaacagatcccacacggatgcaagacccccattcaggtgagcagaatgccgga

SEQ ID NO: 276658 - DNA, 55 bp, Artificial
  Synthetic oligonucleotide
ctacaattggcagctatttaccacattccccatattctgattcgcaagtgtctgc

SEQ ID NO: 276659 - DNA, 55 bp, Artificial
  Synthetic oligonucleotide
ctacacctagcgctccaattgattacagtactgcaacaggccctggcttgggctc

SEQ ID NO: 276660 - DNA, 55 bp, Artificial
  Synthetic oligonucleotide
cgtgccccaatgcagccaggcccatataatgcggcacctagaggaaggtcgcagc

SEQ ID NO: 276661 - DNA, 55 bp, Artificial
  Synthetic oligonucleotide
cgtgcgacgttaagacagctgtaggaattagattcgagacctttaagccctccct

SEQ ID NO: 276662 - DNA, 55 bp, Artificial
  Synthetic oligonucleotide
cgtgctggcatacattccatgattacataaatgaccttgcgttagtgactctacc

SEQ ID NO: 276663 - DNA, 55 bp, Artificial
  Synthetic oligonucleotide
cgtggaccacgtttccaaggagtaatcatggattctagtttgcctggtagagcca

SEQ ID NO: 276664 - DNA, 55 bp, Artificial
  Synthetic oligonucleotide
cgtggcagaatgtgattagccttgcatctaccattagtacaaagcgcagaataag

SEQ ID NO: 276665 - DNA, 55 bp, Artificial
  Synthetic oligonucleotide
cgtggctctagttggagtctcgacatagtagatggtctgggtcgttggttcgctg

SEQ ID NO: 276666 - DNA, 60 bp, Artificial
  Synthetic oligonucleotide
gctaagttaataaagaataagtattgaatgcatatcaaatacgaagttgtcttaatatga

SEQ ID NO: 276667 - DNA, 55 bp, Artificial
  Synthetic oligonucleotide
gtcaggattaagaactgtgagtgcctcttcaggcaatggtaagagttacgattct

SEQ ID NO: 276668 - DNA, 54 bp, Artificial
  Synthetic oligonucleotide
gtcagcctttggtttcgcaacagtttccaccttttgggatctatctagggtccc

SEQ ID NO: 276669 - DNA, 55 bp, Artificial
  Synthetic oligonucleotide
cgtgtcgggtatactccaaagacgcttgtcacctgtgtctctttctacccatcac

SEQ ID NO: 276670 - DNA, 55 bp, Artificial
  Synthetic oligonucleotide
cgtgttccacgtcccaacttgtaaactagtcgcaaagtcttacggtagaatgatg

SEQ ID NO: 276671 - DNA, 55 bp, Artificial
  Synthetic oligonucleotide
gtcagcacttttgtatacgactggaggttgattggttgcttttcacggtgtcgcg

SEQ ID NO: 276672 - DNA, 55 bp, Artificial
  Synthetic oligonucleotide
cgttaatcgggtcctctattggttgagattcccgttgaatgacaacttcgttatc

SEQ ID NO: 276673 - DNA, 55 bp, Artificial
  Synthetic oligonucleotide
gtcagatagccacccataacacggactctcacttacgaggcactttgcaggggag

SEQ ID NO: 276674 - DNA, 55 bp, Artificial
  Synthetic oligonucleotide
gtcaccccaggaggtaaatgacaccactcatgttaatgcagatgaggaatcctac

SEQ ID NO: 276675 - DNA, 55 bp, Artificial
  Synthetic oligonucleotide
cgttagccctttgaattttagctgcgtgcagcccaaactatatcgcggatcatac

SEQ ID NO: 276676 - DNA, 55 bp, Artificial
  Synthetic oligonucleotide
cgttatcctcggttctgctatagggtgctccttcgctcactacatctatagaagg

SEQ ID NO: 276677 - DNA, 56 bp, Artificial
  Synthetic oligonucleotide
cccaattgcggactcatccccgagaatctcagggggatgagccgcggggttaatat

SEQ ID NO: 276678 - DNA, 55 bp, Artificial
  Synthetic oligonucleotide
cgttatgggttgttctaacttgtagccccatggtcaagcttggtgttattctatc

SEQ ID NO: 276679 - DNA, 55 bp, Artificial
  Synthetic oligonucleotide
cgttcaccggacatgttcgatcgtggcatgcaatggttactcgaagacgataccc

SEQ ID NO: 276680 - DNA, 55 bp, Artificial
  Synthetic oligonucleotide
cgttcatatccgcagatggtaccttgtgagccgcgttgtgtgatgtatggcttgg

SEQ ID NO: 276681 - DNA, 55 bp, Artificial
  Synthetic oligonucleotide
cgttcttgcatagctaccaacctatagcgttcccaggtttctcatttgcgtggat

SEQ ID NO: 276682 - DNA, 50 bp, Artificial
  Synthetic oligonucleotide
cgttgacgtcggttgtagtggttaaactttccgcgttagtgttttacgtc

SEQ ID NO: 276683 - DNA, 55 bp, Artificial
  Synthetic oligonucleotide
cgttgagttcaagggcccctatgggtttatgcactccccagtgccaccagtggtt

SEQ ID NO: 276684 - DNA, 54 bp, Artificial
  Synthetic oligonucleotide
cgttgatttagtgataagagtgggcgttgatttggtaccctttaagtatggtac

SEQ ID NO: 276685 - DNA, 55 bp, Artificial
  Synthetic oligonucleotide
gtcaatcgggctagcctcatacaatacgatgtgatggacataaccacttagcggc

SEQ ID NO: 276686 - DNA, 55 bp, Artificial
  Synthetic oligonucleotide
cggagcgtccacaaaccccggtgtcgcttaagcagatgtgccaattcggacagcg

SEQ ID NO: 276687 - DNA, 55 bp, Artificial
  Synthetic oligonucleotide
gtcgggtcggagaggcattccccattcggacctagctgcttccccacatagagga

SEQ ID NO: 276688 - DNA, 60 bp, Artificial
  Synthetic oligonucleotide
tgtgagcgctcgaattttttgcgtgccatgatgggccgcctctatgaccctgatttacga

SEQ ID NO: 276689 - DNA, 55 bp, Artificial
  Synthetic oligonucleotide
cggagtacaggcggagcgtcgtggatgccccattcaaacaacgtagcggacgaat

SEQ ID NO: 276690 - DNA, 55 bp, Artificial
  Synthetic oligonucleotide
gtcggccgtgttacgactcaagagtagacaacattgggcaattttaagccggtca

SEQ ID NO: 276691 - DNA, 55 bp, Artificial
  Synthetic oligonucleotide
cggagtttacatgaccacttaatgtatatagacaaactcttcttcccgtatccca

SEQ ID NO: 276692 - DNA, 55 bp, Artificial
  Synthetic oligonucleotide
cggataccatcagaatactgttatagtctgttacatttgagacttacgtatcgtc

SEQ ID NO: 276693 - DNA, 55 bp, Artificial
  Synthetic oligonucleotide
cggatgattctagaattccgaccgttgaatttggtactcctaaacaggatgcgct

SEQ ID NO: 276694 - DNA, 55 bp, Artificial
  Synthetic oligonucleotide
cggattgtcgccttccctacgcgatgtaagcaccttagggcattattgagcgacc

SEQ ID NO: 276695 - DNA, 55 bp, Artificial
  Synthetic oligonucleotide
gtcggagtggctgtgtctggtagctctctaacagcaatctgggaactaagcttcc

SEQ ID NO: 276696 - DNA, 55 bp, Artificial
  Synthetic oligonucleotide
cggcaatcaaatatcctctgttgtccctccattgaacgttacgtggtaatttctg

SEQ ID NO: 276697 - DNA, 55 bp, Artificial
  Synthetic oligonucleotide
gtcggacctttcattacaaagatcagcaaactccttcgcggaagaaaaccaacca

SEQ ID NO: 276698 - DNA, 55 bp, Artificial
  Synthetic oligonucleotide
cggcatgaatcagtttcgtgggtttgtcaactaccagtccatcttgtgccttatg

SEQ ID NO: 276699 - DNA, 60 bp, Artificial
  Synthetic oligonucleotide
tgttagaatgatcatatgaatatcaagaatataggctactaattgcccatcaatctccga

SEQ ID NO: 276700 - DNA, 54 bp, Artificial
  Synthetic oligonucleotide
agtaaagtcgagccctccttggaagtatgaacgtgggttatctctgtggtccct

SEQ ID NO: 276701 - DNA, 59 bp, Artificial
  Synthetic oligonucleotide
ccagttgataaaccaatagtgtatactaactgagcattaatagctagtccgaataatcc

SEQ ID NO: 276702 - DNA, 59 bp, Artificial
  Synthetic oligonucleotide
cctgagaactctaaggtagcaaaatacctagatttataattgaaatcgtgcatgaatgg

SEQ ID NO: 276703 - DNA, 58 bp, Artificial
  Synthetic oligonucleotide
cagaaataagagttacagtggattctgctgtaaggtagatggaattaagaatgttagc

SEQ ID NO: 276704 - DNA, 57 bp, Artificial
  Synthetic oligonucleotide
gtacgacaggactcttattaagttatcaatggtcgttgtaaggctaaataactatgc

SEQ ID NO: 276705 - DNA, 54 bp, Artificial
  Synthetic oligonucleotide
gaaggtagttacttaggtgttcatacattattagtaagaagaggattcggttac

SEQ ID NO: 276706 - DNA, 55 bp, Artificial
  Synthetic oligonucleotide
acaactgtgaagaggcgatgtgtagctcctagctagtgaagcgatgacggattag

SEQ ID NO: 276707 - DNA, 55 bp, Artificial
  Synthetic oligonucleotide
accatctctatcatagtttccagatgtacctaatgggttagatctaccgtgaagg

SEQ ID NO: 276708 - DNA, 55 bp, Artificial
  Synthetic oligonucleotide
gtcgtccaagtattacacgagtaatcctagatgttacatcgacataagagtgatg

SEQ ID NO: 276709 - DNA, 55 bp, Artificial
  Synthetic oligonucleotide
caggtgctggtactggatgaactgtttactatcctttaagtggtattatgtcaca

SEQ ID NO: 276710 - DNA, 60 bp, Artificial
  Synthetic oligonucleotide
tggtattatcagcatacagttctaaaaacgtattcggatctgtaagtatgatttatgcta

SEQ ID NO: 276711 - DNA, 55 bp, Artificial
  Synthetic oligonucleotide
gggattacacgtgtacgaccacacttccgattttgctccttatccgctccaagac

SEQ ID NO: 276712 - DNA, 55 bp, Artificial
  Synthetic oligonucleotide
atagcagtagagaatgccataattttttacttcgttactattttgttatattggc

SEQ ID NO: 276713 - DNA, 55 bp, Artificial
  Synthetic oligonucleotide
gagtggatcgtgctatttaatttgacaacccacaataaaccttacctgtctttgt

SEQ ID NO: 276714 - DNA, 55 bp, Artificial
  Synthetic oligonucleotide
gaagttattaccgaaatatgctaccaagtagcaatgtgactggtctacatgactc

SEQ ID NO: 276715 - DNA, 55 bp, Artificial
  Synthetic oligonucleotide
cttatgtcgatgtaacatctaggattactcgtgtaatacttggacgacactactc

SEQ ID NO: 276716 - DNA, 55 bp, Artificial
  Synthetic oligonucleotide
ctccgagtgagataagttgacacatagttacgttagatgaatttgacgtgggaaa

SEQ ID NO: 276717 - DNA, 55 bp, Artificial
  Synthetic oligonucleotide
cacacccttatcatgttgttcttcctagtccttgaccaatggctagtagtattgc

SEQ ID NO: 276718 - DNA, 55 bp, Artificial
  Synthetic oligonucleotide
cgaagattgatcttaccacctcgatgttgactagtcttagctcaggaattgtagc

SEQ ID NO: 276719 - DNA, 51 bp, Artificial
  Synthetic oligonucleotide
ccgggttcctcctcctgttacatccattaactttacaatttcaacccttcc

SEQ ID NO: 276720 - DNA, 51 bp, Artificial
  Synthetic oligonucleotide
gtctaggtttctggtaactaccgtagtaaatacctttaccaatatgagcgt

SEQ ID NO: 276721 - DNA, 60 bp, Artificial
  Synthetic oligonucleotide
tacgcactgagtatatatattttcgattcacaagggaccacagagataacccacgttcat

SEQ ID NO: 276722 - DNA, 51 bp, Artificial
  Synthetic oligonucleotide
cggtatctttactggttactactactgatcaccattagtattaggtttaga

SEQ ID NO: 276723 - DNA, 50 bp, Artificial
  Synthetic oligonucleotide
catatatcctaaagtaggatataagtatagatatctaccgatattattag

SEQ ID NO: 276724 - DNA, 60 bp, Artificial
  Synthetic oligonucleotide
gtaatcttagagtagaaatcgaagattgatcttaccacctcgatgttgactagtcttagc

SEQ ID NO: 276725 - DNA, 60 bp, Artificial
  Synthetic oligonucleotide
gcatccagaagtatatattatgatcgttcccgctttcggtatcgttagtatggtattatc

SEQ ID NO: 276726 - DNA, 60 bp, Artificial
  Synthetic oligonucleotide
gattaaaaaggcacttgagttgagttcaatacggcgtaagccagtatgtctgatatctgt

SEQ ID NO: 276727 - DNA, 58 bp, Artificial
  Synthetic oligonucleotide
ctaattattggaggtagattaagatttggagttcctgtattattcgcattagcattct

SEQ ID NO: 276728 - DNA, 57 bp, Artificial
  Synthetic oligonucleotide
aaacttcgataagtttctacacatgcactttcacgagtaagtggttattgataataa

SEQ ID NO: 276729 - DNA, 59 bp, Artificial
  Synthetic oligonucleotide
agatggttcgactctatcacttcattataacccttgatctaatagttaatcggcataac

SEQ ID NO: 276730 - DNA, 59 bp, Artificial
  Synthetic oligonucleotide
atgtctacgaagtatgaaggtacttcccatgggttattagatactaatccttgatatgc

SEQ ID NO: 276731 - DNA, 55 bp, Artificial
  Synthetic oligonucleotide
gtataccattcctaaatatccgaaaatagttttacctgagaatgtagatactacg

SEQ ID NO: 276732 - DNA, 58 bp, Artificial
  Synthetic oligonucleotide
taccagaatcgaactgatgctaacttcgtgaaagaaagttgtactaaccgctatacca

SEQ ID NO: 276733 - DNA, 52 bp, Artificial
  Synthetic oligonucleotide
tacttaaataagataccttatagtttccttaattaggagataaccaataaag

SEQ ID NO: 276734 - DNA, 53 bp, Artificial
  Synthetic oligonucleotide
tttttttgtattaactgtaataacagtggcggattagttacttatattagacc

SEQ ID NO: 276735 - DNA, 59 bp, Artificial
  Synthetic oligonucleotide
gtcaaatagctactgcattttattttgcatggtttgttttcatagtaccagctgtagga

SEQ ID NO: 276736 - DNA, 57 bp, Artificial
  Synthetic oligonucleotide
ggagcatttatttcgggattcttaggtagattcgtaggaactactggtgcacaaatc

SEQ ID NO: 276737 - DNA, 57 bp, Artificial
  Synthetic oligonucleotide
atttatccaagcatttgtgtttactatcttaacatgttcttacttaaaagatgctat

SEQ ID NO: 276738 - DNA, 57 bp, Artificial
  Synthetic oligonucleotide
tgattctgttttaactagtcttcttcaaattgaatcattaggtcacatgttatacac

SEQ ID NO: 276739 - DNA, 56 bp, Artificial
  Synthetic oligonucleotide
attaatcaaactactattactataataggattcttacttcttgtaggggctatggc

SEQ ID NO: 276740 - DNA, 54 bp, Artificial
  Synthetic oligonucleotide
gaaactagaaattatcttaaagaggaagcaaatctattgaaggacaaagtaaaa

SEQ ID NO: 276741 - DNA, 60 bp, Artificial
  Synthetic oligonucleotide
attaatgtggatcggagctgaacaccctgcatctccttaccttgaagtaggtcaaatagc

SEQ ID NO: 276742 - DNA, 55 bp, Artificial
  Synthetic oligonucleotide
catagcaaatactaatggtgtattgaatcttaaacttccaccgaataatgtagct

SEQ ID NO: 276743 - DNA, 55 bp, Artificial
  Synthetic oligonucleotide
gcactggtctttgcttgcgcctcagtagatattcttgaaacacggacacgacgcg

SEQ ID NO: 276744 - DNA, 55 bp, Artificial
  Synthetic oligonucleotide
cacactccagagcatccgctgtctcttcgaggattgcgctcagtctggcggggtc

SEQ ID NO: 276745 - DNA, 55 bp, Artificial
  Synthetic oligonucleotide
gctattagtgatttaatgcggtctctaaggcacagaccaaatggttaggccgatg

SEQ ID NO: 276746 - DNA, 55 bp, Artificial
  Synthetic oligonucleotide
gctcgactctagcagttactcggtcacgtcatgcacttacgctttatataccaag

SEQ ID NO: 276747 - DNA, 55 bp, Artificial
  Synthetic oligonucleotide
atccgagcagaatctcaaagtatggctgaccatggtacgtcccgaagttctgcca

SEQ ID NO: 276748 - DNA, 51 bp, Artificial
  Synthetic oligonucleotide
acttgttaattcttatttagttgactctccccaacccggtaatttatctta

SEQ ID NO: 276749 - DNA, 55 bp, Artificial
  Synthetic oligonucleotide
ccgcggagtcctatcttcctatcctccatgatgcgctgcactttggggtgctgcc

SEQ ID NO: 276750 - DNA, 55 bp, Artificial
  Synthetic oligonucleotide
cgtgcatgggcacccatccatcgactgaacaaccttttctcctcgcacaccgtca

SEQ ID NO: 276751 - DNA, 55 bp, Artificial
  Synthetic oligonucleotide
aaaccgacactcgcgcgtgcacactagcggctcgcactggctcttccgctctaac

SEQ ID NO: 276752 - DNA, 53 bp, Artificial
  Synthetic oligonucleotide
cacttttacaaagtgatgctaagacctattacccttatgaagctttttttaag

SEQ ID NO: 276753 - DNA, 55 bp, Artificial
  Synthetic oligonucleotide
ggagtcgtcttgcagacccagctcaacgttccaagtgatagcattgacaaagagg

SEQ ID NO: 276754 - DNA, 55 bp, Artificial
  Synthetic oligonucleotide
ggccgagatcatatgccaggcttcccaccgcaggcgactcgacttgatgggatcc

SEQ ID NO: 276755 - DNA, 55 bp, Artificial
  Synthetic oligonucleotide
ggcgtacgcagctacatgcacggatctgacgcgctaggtaggcctggctggacaa

SEQ ID NO: 276756 - DNA, 55 bp, Artificial
  Synthetic oligonucleotide
ggctgccttagcgagtgtagaacgacgcaccagtgatgacgtacccattctcgat

SEQ ID NO: 276757 - DNA, 55 bp, Artificial
  Synthetic oligonucleotide
gagtggtggtttagttagttcttcacaaaggaactgacagcgatgctaacgcgat

SEQ ID NO: 276758 - DNA, 55 bp, Artificial
  Synthetic oligonucleotide
gactcaggggacaaaggcagtcacctaaagaccgattgatgggtgcgtgtaccgg

SEQ ID NO: 276759 - DNA, 55 bp, Artificial
  Synthetic oligonucleotide
gtgctcgatgcccctcctcggagtggacgcgcaaccgcccctcgacatgggcact

SEQ ID NO: 276760 - DNA, 55 bp, Artificial
  Synthetic oligonucleotide
gagaagttctgtagaagtgagagcatgccataacggggataaccgtagacgtacg

SEQ ID NO: 276761 - DNA, 55 bp, Artificial
  Synthetic oligonucleotide
tgcaacactcaccgatatgacacaggtctcgaaatacaggtctgaacaggttatc

SEQ ID NO: 276762 - DNA, 55 bp, Artificial
  Synthetic oligonucleotide
gagctcacagtacagctgcgacgtccagataggctggtgaggaggaccatgcgac

SEQ ID NO: 276763 - DNA, 60 bp, Artificial
  Synthetic oligonucleotide
catgatagcattacatgtgcatggatcaggaaatccaaatggattaaatgcaggtgatga

SEQ ID NO: 276764 - DNA, 55 bp, Artificial
  Synthetic oligonucleotide
gagagtattgcgatatacagatgcggaagaactaaccttggcgggactcgcgggc

SEQ ID NO: 276765 - DNA, 55 bp, Artificial
  Synthetic oligonucleotide
tctctgctatgaacgcttgctaagcccgccacagctctgcaattctatactactc

SEQ ID NO: 276766 - DNA, 55 bp, Artificial
  Synthetic oligonucleotide
tccgaaagcgcccatgattgcatggacatggtacggcacggccggacgatcctgc

SEQ ID NO: 276767 - DNA, 55 bp, Artificial
  Synthetic oligonucleotide
tcgctacattcaagcgatacgtcgcctatgtctaacatcgctgcaggtacgggca

SEQ ID NO: 276768 - DNA, 54 bp, Artificial
  Synthetic oligonucleotide
cagtcagcatgtcccgcgatacgttccactcgagatcgaatgcggacacgtccc

SEQ ID NO: 276769 - DNA, 54 bp, Artificial
  Synthetic oligonucleotide
gtaacaccacttaatgttgaatctaattctagtcaatcaaatccttcggtgcta

SEQ ID NO: 276770 - DNA, 54 bp, Artificial
  Synthetic oligonucleotide
gaaactagtcgtacaccttttgatctacaagaagctgaatctgaactagttgcc

SEQ ID NO: 276771 - DNA, 54 bp, Artificial
  Synthetic oligonucleotide
ccgctccacagaacggtggctcagcgcatgcactcacgttcgttagtcgacagt

SEQ ID NO: 276772 - DNA, 53 bp, Artificial
  Synthetic oligonucleotide
tgactcgtcggatgctatgattcgagtcgatgggtcggagtactctgagaagc

SEQ ID NO: 276773 - DNA, 53 bp, Artificial
  Synthetic oligonucleotide
tattctgggtaaggttcgccgttgtgagcacgattgttctcaccgaaagcctt

SEQ ID NO: 276774 - DNA, 52 bp, Artificial
  Synthetic oligonucleotide
cttcaaagaagagttgggcctaatagtgttggagttttaggacttttacaac

SEQ ID NO: 276775 - DNA, 53 bp, Artificial
  Synthetic oligonucleotide
tacccgtcacgttgacgagtattgactggacggtaggcgaagatggctgcgca

SEQ ID NO: 276776 - DNA, 53 bp, Artificial
  Synthetic oligonucleotide
ggtattatcttattaggtttaaatctattattagcccctcatattcctgacga

SEQ ID NO: 276777 - DNA, 53 bp, Artificial
  Synthetic oligonucleotide
ggttagtcccctcgtcgtgaggccgcgtgtcttggctaacgtcaacagtagtc

SEQ ID NO: 276778 - DNA, 52 bp, Artificial
  Synthetic oligonucleotide
tcacgttagatttatcgtgacaggggctgatgttattcactcatttgctgta

SEQ ID NO: 276779 - DNA, 52 bp, Artificial
  Synthetic oligonucleotide
ccccttccgcgcctcgcatggcactgtgcagactccggccgtcattaagaag

SEQ ID NO: 276780 - DNA, 52 bp, Artificial
  Synthetic oligonucleotide
aatcccttcgtagccgggtgagggagcgagataatgactgatcacgtcgggg

SEQ ID NO: 276781 - DNA, 52 bp, Artificial
  Synthetic oligonucleotide
cagaacccttctcaggggagtgcagctcataattcatcctattcttgacagg

SEQ ID NO: 276782 - DNA, 51 bp, Artificial
  Synthetic oligonucleotide
gccttgccctttacttatttaagtaaactagatcaaataccaaaagacatg

SEQ ID NO: 276783 - DNA, 51 bp, Artificial
  Synthetic oligonucleotide
actggtgagtagcgactcattcctcacccctcgtcgacctcaatagtgatt

SEQ ID NO: 276784 - DNA, 51 bp, Artificial
  Synthetic oligonucleotide
acagtaaggacttgaaccctaataatacccgttatgagcggatcgcattaa

SEQ ID NO: 276785 - DNA, 55 bp, Artificial
  Synthetic oligonucleotide
gaattagaaactgggataggaatctatagtggttactttaatgtaacagtgttta

SEQ ID NO: 276786 - DNA, 51 bp, Artificial
  Synthetic oligonucleotide
aatgttcagaagtgtacattacttaagaattcactatatgtttttccaaca

SEQ ID NO: 276787 - DNA, 50 bp, Artificial
  Synthetic oligonucleotide
aaaccacacggtctccccgggcctccgacgattccagtgccggcaacaat

SEQ ID NO: 276788 - DNA, 50 bp, Artificial
  Synthetic oligonucleotide
aaaccaaagctcacatccccagcactcgcgctgtctccgcgtcgcgctcc

SEQ ID NO: 276789 - DNA, 50 bp, Artificial
  Synthetic oligonucleotide
aaacaccgcgaagggtgcgtatggcacggggctcccggcgcttatcgatc

SEQ ID NO: 276790 - DNA, 50 bp, Artificial
  Synthetic oligonucleotide
aaaatgtctgcgtcagcgccgtacagtgcccgctctctgcatgggcgtgt

SEQ ID NO: 276791 - DNA, 50 bp, Artificial
  Synthetic oligonucleotide
aaaccctgcgtatcgtcgtcggaccctgtgcgatcgtcagcccatgcgta

SEQ ID NO: 276792 - DNA, 50 bp, Artificial
  Synthetic oligonucleotide
aaaatccccagtccaatctcgcgtacaaccgcgcgtgcatccatcgccca

SEQ ID NO: 276793 - DNA, 50 bp, Artificial
  Synthetic oligonucleotide
aaaagttcccggatgccacacagtagccggaagcgtgccagacgacccgg

SEQ ID NO: 276794 - DNA, 50 bp, Artificial
  Synthetic oligonucleotide
aaaagtggcatgctacgcgctaggacgagccggagtactcagcgacgtgc

SEQ ID NO: 276795 - DNA, 50 bp, Artificial
  Synthetic oligonucleotide
aaaactccatgggttcagtcaacggcctcgcccaagcctccgcgaccctt

SEQ ID NO: 276796 - DNA, 54 bp, Artificial
  Synthetic oligonucleotide
gatttatgttggttaaaccttttacctatggtagttgcttgtgtagtattaata

SEQ ID NO: 276797 - DNA, 50 bp, Artificial
  Synthetic oligonucleotide
aaaacaattagccctcgttcgcgtgggaggagcgtgcagggtcccctgcg

SEQ ID NO: 276798 - DNA, 50 bp, Artificial
  Synthetic oligonucleotide
aaacggaccagacgttgggttgacgatcgagccgcagggtacagcgtagc

SEQ ID NO: 276799 - DNA, 50 bp, Artificial
  Synthetic oligonucleotide
aaacggcgtacacccgaggcttggctctccgtgcgtcgagcgcaactccc

SEQ ID NO: 276800 - DNA, 50 bp, Artificial
  Synthetic oligonucleotide
aaacggggatcggaagacggggcacgcacagggtataagaccacgcagcg

SEQ ID NO: 276801 - DNA, 50 bp, Artificial
  Synthetic oligonucleotide
aaacgggggcgccggatacgcagagccgtggcaatccgaagggggcagag

SEQ ID NO: 276802 - DNA, 50 bp, Artificial
  Synthetic oligonucleotide
aaactcggaccgcaacgtcgcacgtaccctggtccaccgcatgcagagac

SEQ ID NO: 276803 - DNA, 50 bp, Artificial
  Synthetic oligonucleotide
aaactggggccacgcgtagttccgatgcggactccttgcaggcggaagga

SEQ ID NO: 276804 - DNA, 50 bp, Artificial
  Synthetic oligonucleotide
aaagaagggcggagagacgggtcacggcagcatgtctccacctaacgcca

SEQ ID NO: 276805 - DNA, 50 bp, Artificial
  Synthetic oligonucleotide
aaagacgcagatctaagcgcggcaccgggtcagctggaccctcggcacca

SEQ ID NO: 276806 - DNA, 50 bp, Artificial
  Synthetic oligonucleotide
aaagacggcggcgcatagaggcccgtcgacaggattgacgcgagacgtag

SEQ ID NO: 276807 - DNA, 60 bp, Artificial
  Synthetic oligonucleotide
gcagtagttattcctgtagattgtcacgttagatttatcgtgacaggggctgatgttatt

SEQ ID NO: 276808 - DNA, 50 bp, Artificial
  Synthetic oligonucleotide
aaagagtcctcctggagtggtgccccgcgccgtgagggtatgggtgcttg

SEQ ID NO: 276809 - DNA, 50 bp, Artificial
  Synthetic oligonucleotide
aaagcccatcatggagtgtagcccccatttcggggcgaggtcctcccata

SEQ ID NO: 276810 - DNA, 50 bp, Artificial
  Synthetic oligonucleotide
aaagccccaacttgccacaggagcagcatcgctttcatgagcccaaccct

SEQ ID NO: 276811 - DNA, 50 bp, Artificial
  Synthetic oligonucleotide
aaagcctgcccatgatcacttcccgcccacgagcactttccgcgcgaccg

SEQ ID NO: 276812 - DNA, 50 bp, Artificial
  Synthetic oligonucleotide
aaagcgcgagtgcgccacaccataaggtccgccctgtgctagataagcga

SEQ ID NO: 276813 - DNA, 50 bp, Artificial
  Synthetic oligonucleotide
aaagcgcgattgggcgtcgtggactcaatgtgttaccaaggcgttggcct

SEQ ID NO: 276814 - DNA, 50 bp, Artificial
  Synthetic oligonucleotide
aaagcggcatcgtgcatcagcaacgtagctcgctaaggaggcgcagagcg

SEQ ID NO: 276815 - DNA, 50 bp, Artificial
  Synthetic oligonucleotide
aaagcgtcaacgagcgcccgcctctgagcagctacgcgtcgtcaagctac

SEQ ID NO: 276816 - DNA, 50 bp, Artificial
  Synthetic oligonucleotide
aaaggcagcgaaggcctaccagacctgcggatggtacaggctgagtgcag

SEQ ID NO: 276817 - DNA, 50 bp, Artificial
  Synthetic oligonucleotide
aaaggcccttccagtggtctgcggccggacgaatgtggcggatctgggac

SEQ ID NO: 276818 - DNA, 53 bp, Artificial
  Synthetic oligonucleotide
gggtaggcgtgactcgaacacgctaacgcgagcccccaaaacccgtaactatc

SEQ ID NO: 276819 - DNA, 50 bp, Artificial
  Synthetic oligonucleotide
aaaggcgttcaatacggatccttcagtgcggcgtgcggtacccaccgtcg

SEQ ID NO: 276820 - DNA, 50 bp, Artificial
  Synthetic oligonucleotide
aaaggggtgcgaagccgcggagaggctgatcgagagatatagcgggagcg

SEQ ID NO: 276821 - DNA, 50 bp, Artificial
  Synthetic oligonucleotide
aaaggtaggtgttgccacaattcgaccacaagggcgcacggctcgcatcc

SEQ ID NO: 276822 - DNA, 50 bp, Artificial
  Synthetic oligonucleotide
aaaggtccatcccccgaccctacagccgcgagtggtgcataagtaagcgc

SEQ ID NO: 276823 - DNA, 50 bp, Artificial
  Synthetic oligonucleotide
aaaggtcctgagctccccttcgacgcgtggtggacagaatatgcgccgct

SEQ ID NO: 276824 - DNA, 50 bp, Artificial
  Synthetic oligonucleotide
aaacgcgtctcccttaggccaggcaacgataatcccctccggccttcgtc

SEQ ID NO: 276825 - DNA, 50 bp, Artificial
  Synthetic oligonucleotide
aaacgcgcgagtggcgatagggcagggagcgaaggtggatcttgggaggt

SEQ ID NO: 276826 - DNA, 50 bp, Artificial
  Synthetic oligonucleotide
aaacgcaccaccgtcgctagatgtctgatgagacgggccgcaactgcgca

SEQ ID NO: 276827 - DNA, 50 bp, Artificial
  Synthetic oligonucleotide
aaaccgtaacgagcgggagggtagcgatggcggggatagcgagacttggc

SEQ ID NO: 276828 - DNA, 50 bp, Artificial
  Synthetic oligonucleotide
aaaccgcgccatcgtctgtgcgagcctcttgaccagcttcaatagcggga

SEQ ID NO: 276829 - DNA, 52 bp, Artificial
  Synthetic oligonucleotide
tataactactcctaatagatttaacttaattcagcccaccgggcggaacccc

SEQ ID NO: 276830 - DNA, 58 bp, Artificial
  Synthetic oligonucleotide
atgatatagtccgataaataggtctttacggaaagtaatgccttattcttatcacatc

SEQ ID NO: 276831 - DNA, 55 bp, Artificial
  Synthetic oligonucleotide
gaaccttcatgagttatctcaaatcatcctaaatgattcacgtctacctattccg

SEQ ID NO: 276832 - DNA, 55 bp, Artificial
  Synthetic oligonucleotide
ctttacttgcgctagtgaattgaggccatccaagcatagcagccagcataccacc

SEQ ID NO: 276833 - DNA, 55 bp, Artificial
  Synthetic oligonucleotide
cttcttgtatcgagagactgccatgatgtctttcgtgttcggatgaggactgtgg

SEQ ID NO: 276834 - DNA, 55 bp, Artificial
  Synthetic oligonucleotide
gcgtactttctgcggaataagccgtctggcctgacatctagctgctccttgccgc

SEQ ID NO: 276835 - DNA, 55 bp, Artificial
  Synthetic oligonucleotide
gctagattcgaactaacaaaatctcacacccaaagcaagcacatgaaccgataca

SEQ ID NO: 276836 - DNA, 55 bp, Artificial
  Synthetic oligonucleotide
gctcggttagaacgcgctctagagattttaacacatgcgaatcttacgattcttt

SEQ ID NO: 276837 - DNA, 55 bp, Artificial
  Synthetic oligonucleotide
ctgcagttaagcgtctgagggcctcgttagtactatggttggagacaacatggga

SEQ ID NO: 276838 - DNA, 55 bp, Artificial
  Synthetic oligonucleotide
ctgcacgagttatctccatacacccttcgtgatcgtttaacacctcagggtctac

SEQ ID NO: 276839 - DNA, 55 bp, Artificial
  Synthetic oligonucleotide
gctctcaggcatgctcgaatgactctccgtaattgcagacgcatcgtccccagag

SEQ ID NO: 276840 - DNA, 55 bp, Artificial
  Synthetic oligonucleotide
ctgacgtaccgagtccgtagatgatcattccacttcgcgtgttaatgtcgatctt

SEQ ID NO: 276841 - DNA, 58 bp, Artificial
  Synthetic oligonucleotide
gcgtctgagggcctcgttagtactatggttggagacaacatgggaatccggggtgctg

SEQ ID NO: 276842 - DNA, 55 bp, Artificial
  Synthetic oligonucleotide
ctcgtttgaaaagacgacactgggacaatggggacaagtgatgtgaagccttgac

SEQ ID NO: 276843 - DNA, 55 bp, Artificial
  Synthetic oligonucleotide
ctcggcccgtacggcagtttatcatgacgactccctccgtaacgaatggcgtcac

SEQ ID NO: 276844 - DNA, 55 bp, Artificial
  Synthetic oligonucleotide
gcttaagatatgtccaaactgttcgcagacgtggctttgttgttgacaaaacatc

SEQ ID NO: 276845 - DNA, 55 bp, Artificial
  Synthetic oligonucleotide
ctagcttgaacttggtggatgtagaatggttaaagtcggctaatgtgcacatcgc

SEQ ID NO: 276846 - DNA, 55 bp, Artificial
  Synthetic oligonucleotide
gcttcgactatgacgaagggattctctagctgaattttcggttcgttgctctccg

SEQ ID NO: 276847 - DNA, 55 bp, Artificial
  Synthetic oligonucleotide
ggaacggctcgtttgcttgacattgaatgcgttttacatgtgagagatctggcgc

SEQ ID NO: 276848 - DNA, 55 bp, Artificial
  Synthetic oligonucleotide
cgttatctattgtaagctcatgttatggttcggaacatgctcgcgttttagttta

SEQ ID NO: 276849 - DNA, 55 bp, Artificial
  Synthetic oligonucleotide
cgttagcaatgcaacacccaccgacaagaaatctatacgttagcagacttcgtga

SEQ ID NO: 276850 - DNA, 55 bp, Artificial
  Synthetic oligonucleotide
cgtgctaaccaattcttcaccaagagggtcttcgtcaaacttcacaggcgtacca

SEQ ID NO: 276851 - DNA, 55 bp, Artificial
  Synthetic oligonucleotide
atactcatagtttgtctggacacacgggtaatgtccttgcggtggattggtgtcc

SEQ ID NO: 276852 - DNA, 60 bp, Artificial
  Synthetic oligonucleotide
atgaattgtattaatctagacaatgaattgtattaatctacctcacataatgtggtagtt

SEQ ID NO: 276853 - DNA, 54 bp, Artificial
  Synthetic oligonucleotide
gtaggtgccgttgactgtaaacggatttgagaaactcgaaaactttgacctctg

SEQ ID NO: 276854 - DNA, 55 bp, Artificial
  Synthetic oligonucleotide
agtcaacaagactgagcgtagacgtccttgtagtgtgagttgattctgagtttcg

SEQ ID NO: 276855 - DNA, 55 bp, Artificial
  Synthetic oligonucleotide
agcagatgaaccagtgctacccatacgagagacaacatagatgaaagagtcagcg

SEQ ID NO: 276856 - DNA, 55 bp, Artificial
  Synthetic oligonucleotide
actttgcttgtttacacatgtgtcactatgaactaaagttgcctacccaacagac

SEQ ID NO: 276857 - DNA, 55 bp, Artificial
  Synthetic oligonucleotide
actcgttcaagagcctccggagatgtgtcactgcactaacgagccctagcgctcc

SEQ ID NO: 276858 - DNA, 55 bp, Artificial
  Synthetic oligonucleotide
actcgtgctattcaactggacagcacgtttgaatatgcgtacacgttacagggtc

SEQ ID NO: 276859 - DNA, 55 bp, Artificial
  Synthetic oligonucleotide
gtccttcctgtaacgaaacagataagttcagatggatcagttcaaatagatacgg

SEQ ID NO: 276860 - DNA, 55 bp, Artificial
  Synthetic oligonucleotide
gtcgaagtgaatccttgagaaccggaggtgacagtcttggtaacccaagagggac

SEQ ID NO: 276861 - DNA, 55 bp, Artificial
  Synthetic oligonucleotide
gtcgcagtgctaagctcaaatctacgcgctatcaactaacataggcaagtaccca

SEQ ID NO: 276862 - DNA, 55 bp, Artificial
  Synthetic oligonucleotide
acggaggattcgtatagtagaagagattcacagcggtcgggcaatgaggcacccc

SEQ ID NO: 276863 - DNA, 60 bp, Artificial
  Synthetic oligonucleotide
gttctcatagtggtttatctgttgatctattaattatgagtcttcaattaactggtatct

SEQ ID NO: 276864 - DNA, 55 bp, Artificial
  Synthetic oligonucleotide
gtgcggtcatatgcgtgttgtatttctcgactaaagcttccaagtactcacgccc

SEQ ID NO: 276865 - DNA, 55 bp, Artificial
  Synthetic oligonucleotide
gtggaacttcctgactattcatgctatgctgcttacgtgatcactcttgcctcgg

SEQ ID NO: 276866 - DNA, 55 bp, Artificial
  Synthetic oligonucleotide
gttacgcctgttgaggatgcaattaagactgattggttccagaacgacattcatc

SEQ ID NO: 276867 - DNA, 55 bp, Artificial
  Synthetic oligonucleotide
gttgatcggaaaggattggacccatgcaggagtcgccaagttatatacggacatc

SEQ ID NO: 276868 - DNA, 55 bp, Artificial
  Synthetic oligonucleotide
gttgtctccaaccatagtactaacgaggccctcagacgcttaactgcagtgatcg

SEQ ID NO: 276869 - DNA, 55 bp, Artificial
  Synthetic oligonucleotide
gtttagagcaaactacgctatgcggccttacaccggatctacaccattgtgggac

SEQ ID NO: 276870 - DNA, 55 bp, Artificial
  Synthetic oligonucleotide
taactttaccgacgttatcgcgtactttggctatttactcgacgacaaggctatg

SEQ ID NO: 276871 - DNA, 55 bp, Artificial
  Synthetic oligonucleotide
accgaagatccacacgagagtccccgcaaccccgctaagatcgacaggtcggctc

SEQ ID NO: 276872 - DNA, 55 bp, Artificial
  Synthetic oligonucleotide
tagccagattaacaactatcctacagttatcactgcggttggtgttgtctctacc

SEQ ID NO: 276873 - DNA, 55 bp, Artificial
  Synthetic oligonucleotide
tcaagcttgtaactgttgagtagggagaatgcaagagcaacagcgtcctcgagac

SEQ ID NO: 276874 - DNA, 59 bp, Artificial
  Synthetic oligonucleotide
gttatgcttacatgaacttatcatagtttatagtaatcctctcaattaatagtctaccc

SEQ ID NO: 276875 - DNA, 55 bp, Artificial
  Synthetic oligonucleotide
aatgtggtgcatgcgctttgattattccacttgcgaagcgaaacagaggtgcgca

SEQ ID NO: 276876 - DNA, 55 bp, Artificial
  Synthetic oligonucleotide
tcacatccctcggggcatcaagatcactcttcggcttcgcaccacccgtagatgg

SEQ ID NO: 276877 - DNA, 55 bp, Artificial
  Synthetic oligonucleotide
tcggtagcgtttaaggataaaaggccaaatatgactcgcatcttgtgagcaaaag

SEQ ID NO: 276878 - DNA, 55 bp, Artificial
  Synthetic oligonucleotide
tgattcgtaggttgatgaaccgccattacgttgagaaggttgactacgttcttgg

SEQ ID NO: 276879 - DNA, 55 bp, Artificial
  Synthetic oligonucleotide
tggagagccgtataattacgaaagtatcccgtacggttcggtgacgagccgtgtc

SEQ ID NO: 276880 - DNA, 55 bp, Artificial
  Synthetic oligonucleotide
tgtcatcgtctttcacacgcgaaaagatgtgatcgctgctatcacggaaccaaga

SEQ ID NO: 276881 - DNA, 55 bp, Artificial
  Synthetic oligonucleotide
ttaaactgactcggaacgccaaaacgttcgtgtcctctccaatccacacaaacgc

SEQ ID NO: 276882 - DNA, 53 bp, Artificial
  Synthetic oligonucleotide
aaccctccgtccacggaagtgacgccactgaactataaaagggcgactccctc

SEQ ID NO: 276883 - DNA, 55 bp, Artificial
  Synthetic oligonucleotide
aacatccgtacgtgacacgaacgaacaatgaaagtatcgcacagagtagatccgc

SEQ ID NO: 276884 - DNA, 55 bp, Artificial
  Synthetic oligonucleotide
ttctgctaaatagtgctttccctgcgtaccctacaaacggtatagcttataacga

SEQ ID NO: 276885 - DNA, 58 bp, Artificial
  Synthetic oligonucleotide
gtaattcaatggtagaatgcttatttgtggcataagaagttcttggttcaattccaag

SEQ ID NO: 276886 - DNA, 55 bp, Artificial
  Synthetic oligonucleotide
tttacaagtcgatgctgagggtgctattcaatacgacgcaattgttaagcaaggc

SEQ ID NO: 276887 - DNA, 55 bp, Artificial
  Synthetic oligonucleotide
ccgtcttctagcgctccgtgtagaagagagacttcacacgcaagacacgttagtg

SEQ ID NO: 276888 - DNA, 55 bp, Artificial
  Synthetic oligonucleotide
ccgtatacgcaacagcgtagggacggagagggcgacgcgaaaagtgtggtgtaga

SEQ ID NO: 276889 - DNA, 55 bp, Artificial
  Synthetic oligonucleotide
ccggcatcgcgactggtgcaatgagtccatacggcagttctgagcctattcacac

SEQ ID NO: 276890 - DNA, 55 bp, Artificial
  Synthetic oligonucleotide
ccggcatcgaatgccctcccaacgttattgccgtccccgatgttcgtgaggtcgc

SEQ ID NO: 276891 - DNA, 53 bp, Artificial
  Synthetic oligonucleotide
ccgctagacggctagtcggaacaacgaaagagggcgcacccgtggtaacgaaa

SEQ ID NO: 276892 - DNA, 55 bp, Artificial
  Synthetic oligonucleotide
ccctgaaatcggtttatccggagctagggtatggtgtttggaagagttcagcgcc

SEQ ID NO: 276893 - DNA, 55 bp, Artificial
  Synthetic oligonucleotide
ggcttgaggtgtgtttcccaacgactcactagacaaagagcactcctctgagtac

SEQ ID NO: 276894 - DNA, 55 bp, Artificial
  Synthetic oligonucleotide
gggaacaatgaatttggcccgtttcagcggtgatactatatacggttacctggct

SEQ ID NO: 276895 - DNA, 55 bp, Artificial
  Synthetic oligonucleotide
gggatatacgcagttgacaagggtgaatatgtacgaaccagccaactttagtgag

SEQ ID NO: 276896 - DNA, 56 bp, Artificial
  Synthetic oligonucleotide
gtgtgaggtctgctcaatgtcctatggttaacaatacgaactttaacgagttttac

SEQ ID NO: 276897 - DNA, 55 bp, Artificial
  Synthetic oligonucleotide
ccagtatgtggtacaagcgaacggaacaacccgcacgatcactgttctggtcctc

SEQ ID NO: 276898 - DNA, 55 bp, Artificial
  Synthetic oligonucleotide
ccagctgtaccgtagtctgtatgcgacgagtgtcagcagtgtaggcctccaattg

SEQ ID NO: 276899 - DNA, 55 bp, Artificial
  Synthetic oligonucleotide
ccaaaacatcagagtagcgagtagcgatctgcacaacaatttggaggttttggcg

SEQ ID NO: 276900 - DNA, 55 bp, Artificial
  Synthetic oligonucleotide
catagaaagccatgtcaaagccgaggagatacagatgttctacatagatttgcag

SEQ ID NO: 276901 - DNA, 55 bp, Artificial
  Synthetic oligonucleotide
gggctcacgattgcacttgtcgtaggagcagcacggacctgcggtctagagatga

SEQ ID NO: 276902 - DNA, 55 bp, Artificial
  Synthetic oligonucleotide
cagtatgcaacacagattcgtacataacgacttggattggaatacagcgtaacgc

SEQ ID NO: 276903 - DNA, 55 bp, Artificial
  Synthetic oligonucleotide
cagtagggaaccctgaatagaacgaacaatagcttatatccgataagtccttaga

SEQ ID NO: 276904 - DNA, 55 bp, Artificial
  Synthetic oligonucleotide
atcatccttctaagtgcttatattagtgccaaagttggaattggcacgatgtcta

SEQ ID NO: 276905 - DNA, 53 bp, Artificial
  Synthetic oligonucleotide
attatcaccttgcgattacgaactccccaatttaatacgaagggccggaatac

SEQ ID NO: 276906 - DNA, 55 bp, Artificial
  Synthetic oligonucleotide
ggtcctggaactgttgtttctaccgaacttcgtgagccaattcgttcgcatcacg

SEQ ID NO: 276907 - DNA, 55 bp, Artificial
  Synthetic oligonucleotide
cggatagaagcataattggtttatgtattcgctttgggtgcggaagtttattagt

SEQ ID NO: 276908 - DNA, 55 bp, Artificial
  Synthetic oligonucleotide
ggtatagggttgctaagatctcccgaacttgttttgaagcgctttcagaatctac

SEQ ID NO: 276909 - DNA, 55 bp, Artificial
  Synthetic oligonucleotide
attgaatttaggagatacaaagcgcccaagcagaccacgtcccaatgcccctggc

SEQ ID NO: 276910 - DNA, 52 bp, Artificial
  Synthetic oligonucleotide
ggggaggtaccgaaaggacgcacctagctttgttagttggaaatgggccgaa

SEQ ID NO: 276911 - DNA, 55 bp, Artificial
  Synthetic oligonucleotide
cacaagcccacgttaacctcacatagcccgcttacagtgcattgccctacatcgt

SEQ ID NO: 276912 - DNA, 55 bp, Artificial
  Synthetic oligonucleotide
cacgacgagtaacggtcttggcttttgaagtcagcatggaattaacgtggccagc

SEQ ID NO: 276913 - DNA, 55 bp, Artificial
  Synthetic oligonucleotide
cacttaggtagctggggaaacccaatgccgaacagagcatgtgtacagaaggtcc

SEQ ID NO: 276914 - DNA, 55 bp, Artificial
  Synthetic oligonucleotide
cagacgcactgtcaatcactattactgtttaacgactctcgcaccaccgtactac

SEQ ID NO: 276915 - DNA, 55 bp, Artificial
  Synthetic oligonucleotide
cagccaagatgaacatttagttcatccagcagtggagaatattagtcaatgatcg

SEQ ID NO: 276916 - DNA, 55 bp, Artificial
  Synthetic oligonucleotide
cagcctatactaccacttaattcgcatttgtttgaatcggccattcctgtccagg

SEQ ID NO: 276917 - DNA, 55 bp, Artificial
  Synthetic oligonucleotide
cagcgtagggacggagagggcgacgcgaaaagtgtggtgtagaattacacgggga

SEQ ID NO: 276918 - DNA, 56 bp, Artificial
  Synthetic oligonucleotide
gtacggttcggtgacgagccgtgtcaaccctgcaaagggaatgcgtcttagttcaa

SEQ ID NO: 276919 - DNA, 55 bp, Artificial
  Synthetic oligonucleotide
cagtaatctccaggaagagttatacgctcagtcggcaaggcagaatgcatgcgtc

SEQ ID NO: 276920 - DNA, 54 bp, Artificial
  Synthetic oligonucleotide
tagggtttaaagtgccgaagaacgacgcaccctgcccaataagcgcagagacga

SEQ ID NO: 276921 - DNA, 54 bp, Artificial
  Synthetic oligonucleotide
tcagcggctgttagctcgtcacggaagcaaaaacgaaagcgcacctcggaaggt

SEQ ID NO: 276922 - DNA, 54 bp, Artificial
  Synthetic oligonucleotide
gggaattggtagctgggttcacaacccacatcgtgtgtgcgggaattgcggacc

SEQ ID NO: 276923 - DNA, 54 bp, Artificial
  Synthetic oligonucleotide
gtcccgccggccatactgcagccatctatctcgcccgtggtgagcttaagcccg

SEQ ID NO: 276924 - DNA, 54 bp, Artificial
  Synthetic oligonucleotide
tagctggacatgtggattggaccagagacgttgcttgggctcccagtgtgggcc

SEQ ID NO: 276925 - DNA, 54 bp, Artificial
  Synthetic oligonucleotide
tggtgtacttcattcatctatgcctattgttgttcaaggtgtatctcttgaaga

SEQ ID NO: 276926 - DNA, 54 bp, Artificial
  Synthetic oligonucleotide
taagccagtgggatcgtatgcaataatgcccgtaccaggcagtgacaaagagcc

SEQ ID NO: 276927 - DNA, 54 bp, Artificial
  Synthetic oligonucleotide
ttatcttgtcacgataatggatgcccactcgtactgggtcagattcgtataaaa

SEQ ID NO: 276928 - DNA, 54 bp, Artificial
  Synthetic oligonucleotide
atgccttggaaatttagatctcccatcccttggaattcccgcttatgatcccac

SEQ ID NO: 276929 - DNA, 60 bp, Artificial
  Synthetic oligonucleotide
ctctgagacaacagccaagatgaacatttagttcatccagcagtggagaatattagtcaa

SEQ ID NO: 276930 - DNA, 54 bp, Artificial
  Synthetic oligonucleotide
aaaccactgttcgttgtcctcatgctgcgacggccgccaagatggctgaacgta

SEQ ID NO: 276931 - DNA, 53 bp, Artificial
  Synthetic oligonucleotide
cggttggtctggttttaccggtgtcggttatcccaagatgatccctcaagctt

SEQ ID NO: 276932 - DNA, 54 bp, Artificial
  Synthetic oligonucleotide
attcttcgtctggtacgtctaccccacgtggacccattcgcgcagtgcaggtta

SEQ ID NO: 276933 - DNA, 54 bp, Artificial
  Synthetic oligonucleotide
caagcatcggagagcctatgccatttattcagaccaaaaggcctatttcgctga

SEQ ID NO: 276934 - DNA, 52 bp, Artificial
  Synthetic oligonucleotide
cttaaccctacttacgtatctgtccgacttgttggtctttcagtttaaccta

SEQ ID NO: 276935 - DNA, 53 bp, Artificial
  Synthetic oligonucleotide
ctaagataattctctatctcttatttacgattagtaatcttatttacgattag

SEQ ID NO: 276936 - DNA, 53 bp, Artificial
  Synthetic oligonucleotide
tcggcctactttcccatcatcttcgcatccttggcgcttccatccatgcgtcg

SEQ ID NO: 276937 - DNA, 53 bp, Artificial
  Synthetic oligonucleotide
cggggccatagaaggagcagcacgtctcataggtagctgaccaagcatggggg

SEQ ID NO: 276938 - DNA, 53 bp, Artificial
  Synthetic oligonucleotide
tccattgcattgtctgttcggaaccagcacagtgtccttcacatctctctact

SEQ ID NO: 276939 - DNA, 53 bp, Artificial
  Synthetic oligonucleotide
aatgctcagcaggctccgtcaccgaaggaggaggagcgtccacttccttccga

SEQ ID NO: 276940 - DNA, 60 bp, Artificial
  Synthetic oligonucleotide
atgctctgataacttaacggttaaagtgcagtattgaagctgctgagatattggttcgat

SEQ ID NO: 276941 - DNA, 60 bp, Artificial
  Synthetic oligonucleotide
ctctgactcatgatcagtgtattaaggttcaagtccttaggtcgcactttatgctctgat

SEQ ID NO: 276942 - DNA, 53 bp, Artificial
  Synthetic oligonucleotide
ccgccctggtgctcgatttggtccaagcagtttgcgtgaaggatctcgacgca

SEQ ID NO: 276943 - DNA, 53 bp, Artificial
  Synthetic oligonucleotide
tattgctctcccaatctttttgattgggtttagtgaagacggtaagcaatatg

SEQ ID NO: 276944 - DNA, 53 bp, Artificial
  Synthetic oligonucleotide
cagtatgcccctcacaaaggatcagcggagagcgagccccagcttgaggtgtg

SEQ ID NO: 276945 - DNA, 53 bp, Artificial
  Synthetic oligonucleotide
atgtccagagcgagacctgtgaccagtgtagtgggaaggtgctgccccttcct

SEQ ID NO: 276946 - DNA, 53 bp, Artificial
  Synthetic oligonucleotide
gttaggtgatagctggttgtccacgaaaccattttaagatgggcacttcaaaa

SEQ ID NO: 276947 - DNA, 53 bp, Artificial
  Synthetic oligonucleotide
gttacctccggcgagcgactccacaatccgttgcaccgcgctaaacgctgaga

SEQ ID NO: 276948 - DNA, 53 bp, Artificial
  Synthetic oligonucleotide
gattatttcaattatctagattattattacaactatctagattatttccaact

SEQ ID NO: 276949 - DNA, 53 bp, Artificial
  Synthetic oligonucleotide
tgtttgatgctagggtgcgagttaatcgttatcgttgtgtgctatgcataaaa

SEQ ID NO: 276950 - DNA, 53 bp, Artificial
  Synthetic oligonucleotide
gagtttccgtgcctatcgtacttgtcgtactcgcagttttctccgaactagct

SEQ ID NO: 276951 - DNA, 51 bp, Artificial
  Synthetic oligonucleotide
cttaattgtactaaaactgacactagtgggttaaatgttaaaacattaaag

SEQ ID NO: 276952 - DNA, 56 bp, Artificial
  Synthetic oligonucleotide
gtcatttaattcataacgttggatcgattttccacacctcttgggttatgagaaac

SEQ ID NO: 276953 - DNA, 53 bp, Artificial
  Synthetic oligonucleotide
gaataaagggttacggtgatgtccgtcaagaccattatcctctacagaagcca

SEQ ID NO: 276954 - DNA, 53 bp, Artificial
  Synthetic oligonucleotide
aacacctgttaacatcccgttcttacagcgatccatcgttgtccgcgctttag

SEQ ID NO: 276955 - DNA, 52 bp, Artificial
  Synthetic oligonucleotide
gtcagtctccaccccactcgatacatcgactacagctgggcggctaacagat

SEQ ID NO: 276956 - DNA, 52 bp, Artificial
  Synthetic oligonucleotide
ataattagactcatataaatgctagtaataagataattatactcctctaaag

SEQ ID NO: 276957 - DNA, 52 bp, Artificial
  Synthetic oligonucleotide
accttcggcatgcatggacctgcatccgacttccatcgccttcgttggctta

SEQ ID NO: 276958 - DNA, 52 bp, Artificial
  Synthetic oligonucleotide
gtttagttaatgatctattagtcctctacaggcttatttagttagctaatgg

SEQ ID NO: 276959 - DNA, 52 bp, Artificial
  Synthetic oligonucleotide
gtaagttcgaatcttactttcccatacccctaacatcacttattggcatatt

SEQ ID NO: 276960 - DNA, 52 bp, Artificial
  Synthetic oligonucleotide
tacacatgctattcgcaaatattgcatgctcaggctagcatacgccaggtca

SEQ ID NO: 276961 - DNA, 52 bp, Artificial
  Synthetic oligonucleotide
gacatcatacggctacttgaggcaggtttcaatgatgtgccgatgcgtgaaa

SEQ ID NO: 276962 - DNA, 52 bp, Artificial
  Synthetic oligonucleotide
gaactcgcagagtgaagggattaaggaagtccgtgtgcagggttccaatgga

SEQ ID NO: 276963 - DNA, 59 bp, Artificial
  Synthetic oligonucleotide
gtcaatgggtgcattatttggtctttgtggtgcatactattggagtccaaaaatgtttg

SEQ ID NO: 276964 - DNA, 52 bp, Artificial
  Synthetic oligonucleotide
ccactgatcctgttgcagagcccactgcacaactgctgcctcccgacggtct

SEQ ID NO: 276965 - DNA, 52 bp, Artificial
  Synthetic oligonucleotide
tgggacttggtaatgcgcaatgtaggtgtgatggaacctagcatggcagact

SEQ ID NO: 276966 - DNA, 52 bp, Artificial
  Synthetic oligonucleotide
cgctgcggtgcagtaaacggaacttcgtccagcctgctcggaagggttggtt

SEQ ID NO: 276967 - DNA, 52 bp, Artificial
  Synthetic oligonucleotide
cttagaaaagtcccctaacgcagagttcaaacgacgccctaaatctgcaaaa

SEQ ID NO: 276968 - DNA, 52 bp, Artificial
  Synthetic oligonucleotide
cccgagggatggggtcccttggcagcatggtttaccggttggtccaactata

SEQ ID NO: 276969 - DNA, 52 bp, Artificial
  Synthetic oligonucleotide
tcaaaattggacggccgtggcatatggtgttgacatccatccggctgccagc

SEQ ID NO: 276970 - DNA, 51 bp, Artificial
  Synthetic oligonucleotide
ccatcccccgtaaacacaccaaggctcccagcggtgtcccctcccgtattt

SEQ ID NO: 276971 - DNA, 52 bp, Artificial
  Synthetic oligonucleotide
gggagggctactcgcatcagtagataccgtcgccccaagtaagggtggcgca

SEQ ID NO: 276972 - DNA, 52 bp, Artificial
  Synthetic oligonucleotide
ttctataagttagcacattatctaatgtaagttagctctttatgtaatttag

SEQ ID NO: 276973 - DNA, 51 bp, Artificial
  Synthetic oligonucleotide
tatgcttgacttgctcggtgtgcgaggtgcccatatgacctctcccggtga

SEQ ID NO: 276974 - DNA, 56 bp, Artificial
  Synthetic oligonucleotide
gtatttacttgtttaggactatcgtatctttctgatcgattcttaatttagagttc

SEQ ID NO: 276975 - DNA, 51 bp, Artificial
  Synthetic oligonucleotide
tcaacaaaaacaatacatcctttaggggatgtttgtgtttttttgtgacgt

SEQ ID NO: 276976 - DNA, 51 bp, Artificial
  Synthetic oligonucleotide
tagtagtcaggagcatttaacaattccgcagctgtaaatccatgaccggcc

SEQ ID NO: 276977 - DNA, 51 bp, Artificial
  Synthetic oligonucleotide
taccagcgtagcgtcaatacatgtcatttcccattgctgtgacttaggggt

SEQ ID NO: 276978 - DNA, 51 bp, Artificial
  Synthetic oligonucleotide
aacgttgctgcctccaccacccgttttgctcctcgcatgactgcccctatg

SEQ ID NO: 276979 - DNA, 51 bp, Artificial
  Synthetic oligonucleotide
tccctagacgagcgtagtttcacgtcgtacactagtaagccgaccaatctg

SEQ ID NO: 276980 - DNA, 51 bp, Artificial
  Synthetic oligonucleotide
aagcacagaactgcagatgcgactgaggccgcttgtgttgccagtgcggtt

SEQ ID NO: 276981 - DNA, 51 bp, Artificial
  Synthetic oligonucleotide
ttttcgtgaagtcaaccctagtgctaaactcgaagaggagcgtgccttaca

SEQ ID NO: 276982 - DNA, 51 bp, Artificial
  Synthetic oligonucleotide
tctagtttatggccaactccgcggaaaacggagccctcggttcctcgggtt

SEQ ID NO: 276983 - DNA, 51 bp, Artificial
  Synthetic oligonucleotide
tgaatcaacgatgaattggtctccgggccacggaaacgagaaatgagcagc

SEQ ID NO: 276984 - DNA, 51 bp, Artificial
  Synthetic oligonucleotide
cgaggctggatgcaaatttctttcgctagatgaatcgctagatgaaactac

SEQ ID NO: 276985 - DNA, 60 bp, Artificial
  Synthetic oligonucleotide
gctgacttctgtattttagcatggattggtggatctcatccggaaaatgtctttatcaca

SEQ ID NO: 276986 - DNA, 51 bp, Artificial
  Synthetic oligonucleotide
gggaattataacgacctcgcaactcgagtcccttcgtaacaacactgagtg

SEQ ID NO: 276987 - DNA, 51 bp, Artificial
  Synthetic oligonucleotide
ggccgtttgacccctttgcccacgttcccacgtctatttggaccacgcgtt

SEQ ID NO: 276988 - DNA, 51 bp, Artificial
  Synthetic oligonucleotide
atggaactatcagctccaggatctcaattcctttctggaaatggtcaatta

SEQ ID NO: 276989 - DNA, 51 bp, Artificial
  Synthetic oligonucleotide
atcgcccttggccagggaggtgtgacgcatgaggcaacaaccagtgctaga

SEQ ID NO: 276990 - DNA, 51 bp, Artificial
  Synthetic oligonucleotide
attatctctgctttagctattatgcatatgatcgctcttcatactaatggc

SEQ ID NO: 276991 - DNA, 51 bp, Artificial
  Synthetic oligonucleotide
atatttagatgggttaatagttctattagttaattatatttctacccacat

SEQ ID NO: 276992 - DNA, 51 bp, Artificial
  Synthetic oligonucleotide
actgcagatgcgactgaggccgcttgtgttgccagtgcggttgttcggcgt

SEQ ID NO: 276993 - DNA, 51 bp, Artificial
  Synthetic oligonucleotide
agggtgccaagcaatactgttaaccgctccggtagctgcgctaacaccggc

SEQ ID NO: 276994 - DNA, 50 bp, Artificial
  Synthetic oligonucleotide
aaggttcgtgaagcgtgggcgttttggatggatgcctaccacgtggccta

SEQ ID NO: 276995 - DNA, 50 bp, Artificial
  Synthetic oligonucleotide
gcttatcttgatagatcactgtccaaccagtaccaggtccttcttcacta

SEQ ID NO: 276996 - DNA, 59 bp, Artificial
  Synthetic oligonucleotide
agactatttcggataagctagattcgaactaacaaaatctcacacccaaagcaagcaca

SEQ ID NO: 276997 - DNA, 50 bp, Artificial
  Synthetic oligonucleotide
tcttgtagtgggcatcagcccaacgctcttcacgacggtgggtacggagc

SEQ ID NO: 276998 - DNA, 50 bp, Artificial
  Synthetic oligonucleotide
aatacgccgagtaggcgtgttcggggggagggatctggcgcgctctcaca

SEQ ID NO: 276999 - DNA, 50 bp, Artificial
  Synthetic oligonucleotide
tctccgtttgactcgccttccgttacctctgcttcggaaacccacgggga

SEQ ID NO: 277000 - DNA, 50 bp, Artificial
  Synthetic oligonucleotide
tctatgggagctatcgtagacctagaactttaacttggactattggtact

SEQ ID NO: 277001 - DNA, 50 bp, Artificial
  Synthetic oligonucleotide
aatcactaacgtgagttccgaaccgaacccccagacccccagcgctgcac

SEQ ID NO: 277002 - DNA, 50 bp, Artificial
  Synthetic oligonucleotide
ggaaccgcaaggtgctatgcttgacttgctcggtgtgcgaggtgcccata

SEQ ID NO: 277003 - DNA, 50 bp, Artificial
  Synthetic oligonucleotide
aatccgcttgcgtaagccattggacgaacgttgggatgaggaacggcgga

SEQ ID NO: 277004 - DNA, 50 bp, Artificial
  Synthetic oligonucleotide
cgttttcgctacggcgttagggcgcacccaggatccctaggtgctagtgg

SEQ ID NO: 277005 - DNA, 50 bp, Artificial
  Synthetic oligonucleotide
tcgcgaaaacttctacctccgtgccccggatacctgtcctggacgccgat

SEQ ID NO: 277006 - DNA, 50 bp, Artificial
  Synthetic oligonucleotide
tcgccgcccgacgtttcttggaatgggcgcaaagcccatggatctgggag

SEQ ID NO: 277007 - DNA, 58 bp, Artificial
  Synthetic oligonucleotide
agatattcatctagtaaatatacactaaagtagatgcctacttgtagtaatcttttaa

SEQ ID NO: 277008 - DNA, 50 bp, Artificial
  Synthetic oligonucleotide
cgggtcaggtcagggacggtcgtagtagcgatgggaaaccccgaaccagg

SEQ ID NO: 277009 - DNA, 50 bp, Artificial
  Synthetic oligonucleotide
tccaccacccgttttgctcctcgcatgactgcccctatggttcaaacccg

SEQ ID NO: 277010 - DNA, 50 bp, Artificial
  Synthetic oligonucleotide
aatgcggcaccaacctcgggcagaagagtcggaggcgagatctaatgccg

SEQ ID NO: 277011 - DNA, 50 bp, Artificial
  Synthetic oligonucleotide
gatggtgcgagagcctttacggtctaccatagcaccggcccaagctccgc

SEQ ID NO: 277012 - DNA, 50 bp, Artificial
  Synthetic oligonucleotide
tttcagtctcccgttggcgtcgtattggccgaataggcttggggccgcca

SEQ ID NO: 277013 - DNA, 50 bp, Artificial
  Synthetic oligonucleotide
gcacctcccagtgttgagcaactagaggctcgcttacgcggccgtggtac

SEQ ID NO: 277014 - DNA, 50 bp, Artificial
  Synthetic oligonucleotide
gcggccgctggaggctcactaggaggggcgtaagattccccaggctgtgt

SEQ ID NO: 277015 - DNA, 50 bp, Artificial
  Synthetic oligonucleotide
gcggtgcctggcaacctcttggctttggcacgaatggggcagtcgaacat

SEQ ID NO: 277016 - DNA, 50 bp, Artificial
  Synthetic oligonucleotide
ttccaccgcacaaacggcactcggcttgccttcctttccctacacttgcc

SEQ ID NO: 277017 - DNA, 50 bp, Artificial
  Synthetic oligonucleotide
ttcaccaactgcaggtatcaaggctgcgagtggtaccggccatgctcccc

SEQ ID NO: 277018 - DNA, 60 bp, Artificial
  Synthetic oligonucleotide
gtagtactacttaatgaatacataagtttccagcttatagcacaatgcgtaaattcatta

SEQ ID NO: 277019 - DNA, 50 bp, Artificial
  Synthetic oligonucleotide
aacagcagcgcccctgctaccagtgctcctctgaccagtgcacccgtttc

SEQ ID NO: 277020 - DNA, 50 bp, Artificial
  Synthetic oligonucleotide
aacagccttgcgctcaaagctgccaggagcgggagcaacgttggagctaa

SEQ ID NO: 277021 - DNA, 50 bp, Artificial
  Synthetic oligonucleotide
aacgctcgcaatactcgctgcctcgctgcaaccctctccccatgttccgc

SEQ ID NO: 277022 - DNA, 50 bp, Artificial
  Synthetic oligonucleotide
ctgggttcacaacccacatcgtgtgtgcgggaattgcggacccaggatga

SEQ ID NO: 277023 - DNA, 50 bp, Artificial
  Synthetic oligonucleotide
aactcgatccgtactgcgttcgggcccactaagccaaggacccggaacgg

SEQ ID NO: 277024 - DNA, 50 bp, Artificial
  Synthetic oligonucleotide
ctgcaaacgttattggtcgcgtcttgttacgggccagtgaaagagtgtat

SEQ ID NO: 277025 - DNA, 50 bp, Artificial
  Synthetic oligonucleotide
aagactccgtgcgcagtgcccatcgtgggtgaaatttcgcgtcccactct

SEQ ID NO: 277026 - DNA, 50 bp, Artificial
  Synthetic oligonucleotide
ctcagtcttgggggtacggccaacagcccagagaaggctgtcgacgtcta

SEQ ID NO: 277027 - DNA, 50 bp, Artificial
  Synthetic oligonucleotide
aagccaacacagcggggacccttacacactcgaggactcgcccaatcgca

SEQ ID NO: 277028 - DNA, 50 bp, Artificial
  Synthetic oligonucleotide
ctatagcttctattcaattctggttattattcattggtgttaaccttgta

SEQ ID NO: 277029 - DNA, 52 bp, Artificial
  Synthetic oligonucleotide
atttacttctaatagagttgttgttaataacccttggatcttacctaatttc

SEQ ID NO: 277030 - DNA, 50 bp, Artificial
  Synthetic oligonucleotide
tggagcgagcgctagtggcagcaggagtagtgacggtccaagcaccaccg

SEQ ID NO: 277031 - DNA, 50 bp, Artificial
  Synthetic oligonucleotide
aaggtcgagggagccttgtcacggtgtgcgtcgacagtatcgaccctgca

SEQ ID NO: 277032 - DNA, 50 bp, Artificial
  Synthetic oligonucleotide
aaggtgcgcttcggacccttcgtcggaaaccccagtgagaaggacgcgtc

SEQ ID NO: 277033 - DNA, 50 bp, Artificial
  Synthetic oligonucleotide
acctccacaggaacaacgctttttctccgtccccgagtcccgcgaagcct

SEQ ID NO: 277034 - DNA, 50 bp, Artificial
  Synthetic oligonucleotide
taaacgcgcggtttgcgtggaactgcgactggagggaggaatccttgtga

SEQ ID NO: 277035 - DNA, 50 bp, Artificial
  Synthetic oligonucleotide
acctcgctcagtccttcggcgaggtcccaacgctctcaacgtccggttac

SEQ ID NO: 277036 - DNA, 50 bp, Artificial
  Synthetic oligonucleotide
acgaaccagaacacgatagcgcatgaccagacatcaattcctcgggcatc

SEQ ID NO: 277037 - DNA, 50 bp, Artificial
  Synthetic oligonucleotide
acgaagaatgggtcacagtcgtcctacgctggttgagggaggccgctgct

SEQ ID NO: 277038 - DNA, 50 bp, Artificial
  Synthetic oligonucleotide
acgacacgtgcgtcgctaacaccaaccttaatccccggctctcgtccgcc

SEQ ID NO: 277039 - DNA, 50 bp, Artificial
  Synthetic oligonucleotide
acgagagttgtccaagagcggctgagtccgcaaggtccggggtcgttctg

SEQ ID NO: 277040 - DNA, 57 bp, Artificial
  Synthetic oligonucleotide
caaaaagatgacatttattgagtggtcgtttctgtggggcgcaggcctcataaaaaa

SEQ ID NO: 277041 - DNA, 50 bp, Artificial
  Synthetic oligonucleotide
acgcaaactccatgagttgccaggaccggcctgcagacatagacgccgca

SEQ ID NO: 277042 - DNA, 50 bp, Artificial
  Synthetic oligonucleotide
acgcacggagacaccgggcgatgcaagcgtgtaaccagcgagcacaggtc

SEQ ID NO: 277043 - DNA, 50 bp, Artificial
  Synthetic oligonucleotide
acgcccaggacgcgtttccagcccctctcactcgctcacgacgttacata

SEQ ID NO: 277044 - DNA, 50 bp, Artificial
  Synthetic oligonucleotide
gtgcccgagctctcttcgcgtgatcgacgtctctggagggtgtggaagca

SEQ ID NO: 277045 - DNA, 50 bp, Artificial
  Synthetic oligonucleotide
acgcgacgtggcagttagcactcggagcggaccaggttctgcgacaatcg

SEQ ID NO: 277046 - DNA, 50 bp, Artificial
  Synthetic oligonucleotide
acggcgtccatacagccttgttgcgcatgtcccgaaacccgaaaggcgcg

SEQ ID NO: 277047 - DNA, 50 bp, Artificial
  Synthetic oligonucleotide
acgggacatggggttacgtgaaggcgtcgttggttgctcctgggctgccg

SEQ ID NO: 277048 - DNA, 50 bp, Artificial
  Synthetic oligonucleotide
acgggcgaaggacccgccaacggacgtggttcatgaagtgcggtaacatc

SEQ ID NO: 277049 - DNA, 50 bp, Artificial
  Synthetic oligonucleotide
acgtcacctcataagcctcctaaccgggtcccgaacacgctaccccgcct

SEQ ID NO: 277050 - DNA, 50 bp, Artificial
  Synthetic oligonucleotide
acgttcccggtctcccgcttgccgtcattctttcgggcattggcgctttt

SEQ ID NO: 277051 - DNA, 60 bp, Artificial
  Synthetic oligonucleotide
acagagcatgtgtacagaaggtccttcctgtaacgaaacagataagttcagatggatcag

SEQ ID NO: 277052 - DNA, 55 bp, Artificial
  Synthetic oligonucleotide
gattaaactctggtaagagatttcgtacttaatatgctttcagtacttaaattcc

SEQ ID NO: 277053 - DNA, 50 bp, Artificial
  Synthetic oligonucleotide
actccgtctgcggactcgacacgccggctctggacttgcacaccgcatca

SEQ ID NO: 277054 - DNA, 50 bp, Artificial
  Synthetic oligonucleotide
tcacgagagtgccagatggaccatcgttacccccgggtactggcagaagc

SEQ ID NO: 277055 - DNA, 50 bp, Artificial
  Synthetic oligonucleotide
aatgtgtgagtaaatttaattaaacccgaaaccttgcgatcttaccatga

SEQ ID NO: 277056 - DNA, 50 bp, Artificial
  Synthetic oligonucleotide
ccccagagtcagaactagcctcaggaggagtagggggcaccaccgactcc

SEQ ID NO: 277057 - DNA, 50 bp, Artificial
  Synthetic oligonucleotide
ccagtgcccggtgcaccactaatgtaaagagccgctcccgttggctcgcc

SEQ ID NO: 277058 - DNA, 50 bp, Artificial
  Synthetic oligonucleotide
gggtcccgctaaggtcagtaatgactatgcggtcagagatcctggagtag

SEQ ID NO: 277059 - DNA, 50 bp, Artificial
  Synthetic oligonucleotide
aattccagatccaccgttggtctccgtggcaggggagcaccgaacgactt

SEQ ID NO: 277060 - DNA, 50 bp, Artificial
  Synthetic oligonucleotide
acacctcacctttcgcacacactccgtctgcggactcgacacgccggctc

SEQ ID NO: 277061 - DNA, 50 bp, Artificial
  Synthetic oligonucleotide
acacgagtcgaatcggggcgcacgagttttgcgcgtgccaggctcacttt

SEQ ID NO: 277062 - DNA, 50 bp, Artificial
  Synthetic oligonucleotide
tagtggcagcaggagtagtgacggtccaagcaccaccggccatagcctta

SEQ ID NO: 277063 - DNA, 55 bp, Artificial
  Synthetic oligonucleotide
aacataattaattgtatcctcctccaaaagtttagatcataattattaattggta

SEQ ID NO: 277064 - DNA, 50 bp, Artificial
  Synthetic oligonucleotide
ggtcccgccaaatcctctgccaaccacaaaccgcacacccgtgcaaagaa

SEQ ID NO: 277065 - DNA, 50 bp, Artificial
  Synthetic oligonucleotide
acacggctgtgtgcctgtatgagcgcgtttggagtccgctgcgtatgcca

SEQ ID NO: 277066 - DNA, 50 bp, Artificial
  Synthetic oligonucleotide
tagggacaatacgcttgaaaagaccatcggtaggggcggcggaaccgcta

SEQ ID NO: 277067 - DNA, 50 bp, Artificial
  Synthetic oligonucleotide
accagtcgttgtttcgacgggcgaaggacccgccaacggacgtggttcat

SEQ ID NO: 277068 - DNA, 50 bp, Artificial
  Synthetic oligonucleotide
acccactttcctcgtcctaccggtgctcttaccgccgcccgtagaatccc

SEQ ID NO: 277069 - DNA, 50 bp, Artificial
  Synthetic oligonucleotide
acccgcacgcagcacaaccatggagccaccgtgaagccgaattacaccgt

SEQ ID NO: 277070 - DNA, 50 bp, Artificial
  Synthetic oligonucleotide
taattagtacttatacaaattacttacatggtgatcatgatagtccttat

SEQ ID NO: 277071 - DNA, 50 bp, Artificial
  Synthetic oligonucleotide
accgccacttaccgcatcaacccccgcggaagctgccacgtccatgaaca

SEQ ID NO: 277072 - DNA, 50 bp, Artificial
  Synthetic oligonucleotide
accgcggtttctgtggggcgtctggttcagggtcttacgtgagacacgga

SEQ ID NO: 277073 - DNA, 50 bp, Artificial
  Synthetic oligonucleotide
accggacacaggcaacgcacccgatctacccagctctaacgaaggcgagc

SEQ ID NO: 277074 - DNA, 60 bp, Artificial
  Synthetic oligonucleotide
ttagtgtaatttggttaacatcattgactcatgatcagtggatggaggttcaagtccttc

SEQ ID NO: 277075 - DNA, 58 bp, Artificial
  Synthetic oligonucleotide
ggctattagataattgattaatctatgagttatacttatttatatgtaagtaacttta

SEQ ID NO: 277076 - DNA, 60 bp, Artificial
  Synthetic oligonucleotide
tgtaaagatatgaacaatacacttaggtagctggggaaacccaatgccgaacagagcatg

SEQ ID NO: 277077 - DNA, 55 bp, Artificial
  Synthetic oligonucleotide
ggtgatacacaggatccttgtttaatagtaagtgcctaatatggccggtcccccc

SEQ ID NO: 277078 - DNA, 55 bp, Artificial
  Synthetic oligonucleotide
tgcttactatttttggtctccaaaaatgtttggactaaattataatgaaactata

SEQ ID NO: 277079 - DNA, 58 bp, Artificial
  Synthetic oligonucleotide
gagaaccaatctccaaagactaaatatattaactgagtgatagtgaagagtaccgtaa

SEQ ID NO: 277080 - DNA, 60 bp, Artificial
  Synthetic oligonucleotide
tctgtagatgtaattatgtaaagattatttatgtagatgtaattatgtaaagattatgta

SEQ ID NO: 277081 - DNA, 56 bp, Artificial
  Synthetic oligonucleotide
tctataagaaggttaaattttatactcactatctatgataaggttaaattatatac

SEQ ID NO: 277082 - DNA, 58 bp, Artificial
  Synthetic oligonucleotide
tacagcaccccggattcccatgttgtctccaaccatagtactaacgaggccctcagac

SEQ ID NO: 277083 - DNA, 59 bp, Artificial
  Synthetic oligonucleotide
aatcatccaacatctttacaacgatgactggttcgatccaaaaaatctgttcatggtaa

SEQ ID NO: 277084 - DNA, 54 bp, Artificial
  Synthetic oligonucleotide
acacaggatccttgtttaatagtaagtgcctaatatggccggtcccccctggta

SEQ ID NO: 277085 - DNA, 60 bp, Artificial
  Synthetic oligonucleotide
acaagctcaaatcgtaatcatgacactaagtggtgctctgatcacattggctctgagaca

SEQ ID NO: 277086 - DNA, 56 bp, Artificial
  Synthetic oligonucleotide
aattggactaacagtatctccaactaagactaaaataactaattcatatacggata

SEQ ID NO: 277087 - DNA, 59 bp, Artificial
  Synthetic oligonucleotide
tatacttctctttaggggaggattcttatgctggttctaagaggtgagttgtagcctca

SEQ ID NO: 277088 - DNA, 53 bp, Artificial
  Synthetic oligonucleotide
gaactagttaaatatcagcttatttttgagtcctacgaaagtaggagttacgt

SEQ ID NO: 277089 - DNA, 55 bp, Artificial
  Synthetic oligonucleotide
cgcatcgattccgaaataactcatactttggtaattcaacctcatcctttttaaa

SEQ ID NO: 277090 - DNA, 57 bp, Artificial
  Synthetic oligonucleotide
ggtgtaattggtaacatctttgactcatgatcattggtttttggttcaaatccttaa

SEQ ID NO: 277091 - DNA, 59 bp, Artificial
  Synthetic oligonucleotide
gaaagactaacaagtcgcacagatatgtaaatagggttaaatgatccacattgaaacac

SEQ ID NO: 277092 - DNA, 59 bp, Artificial
  Synthetic oligonucleotide
atggctagtaatggcaacattgtataattgattatttcctgctaaaaattgactaccag

SEQ ID NO: 277093 - DNA, 57 bp, Artificial
  Synthetic oligonucleotide
gggatcaaatcctacaatcttaatgagactgtttaaagtgaagacaacttacaataa

SEQ ID NO: 277094 - DNA, 59 bp, Artificial
  Synthetic oligonucleotide
acagcttaccaatataactcatcaacttatccaatttcaaacaaatatgcaacacatgg

SEQ ID NO: 277095 - DNA, 58 bp, Artificial
  Synthetic oligonucleotide
attcaataagaatatgggcttggaaacagccattatctaaggagtacgtaatagttca

SEQ ID NO: 277096 - DNA, 58 bp, Artificial
  Synthetic oligonucleotide
aggcttaactgataagatttacctatctatcagatgcgtaagcagggtaaaatgaccc

SEQ ID NO: 277097 - DNA, 58 bp, Artificial
  Synthetic oligonucleotide
ttagttcgaatctaatctatccgatattggaaaaattgctattggtacagtaagatat

SEQ ID NO: 277098 - DNA, 58 bp, Artificial
  Synthetic oligonucleotide
ctaatataagggactaagacaagtcaatatgatcctaatgtaaagggctatagacgtg

SEQ ID NO: 277099 - DNA, 57 bp, Artificial
  Synthetic oligonucleotide
atgtaaaagaactagcttattcgatgttgaaaaactagaggagtgtagcatgctagt

SEQ ID NO: 277100 - DNA, 57 bp, Artificial
  Synthetic oligonucleotide
ctattaatttgatgatacataaggagcctattaatttgatgatgcgtagtggtctac

SEQ ID NO: 277101 - DNA, 52 bp, Artificial
  Synthetic oligonucleotide
aactaattagttttgttgacattaagtggtacttatcgaaatatttaattac

SEQ ID NO: 277102 - DNA, 57 bp, Artificial
  Synthetic oligonucleotide
gaaacccatcagttcgacctcacttattctcaatggctatcctaggattcgccttaa

SEQ ID NO: 277103 - DNA, 56 bp, Artificial
  Synthetic oligonucleotide
ctccaaagactaaatatattaactgagtgatagtgaagagtaccgtaagggaaagc

SEQ ID NO: 277104 - DNA, 58 bp, Artificial
  Synthetic oligonucleotide
ctttacagtttctgatagattaggaattgaaatagtcatatctttaatcaatggtaaa

SEQ ID NO: 277105 - DNA, 56 bp, Artificial
  Synthetic oligonucleotide
ttaattggttagaatcttgtgtttgcaccacaatgatctggtttcgagtaccagaa

SEQ ID NO: 277106 - DNA, 56 bp, Artificial
  Synthetic oligonucleotide
acttagttagcaatctgttgggttatttacatgaagatagtctgatgggccatcac

SEQ ID NO: 277107 - DNA, 54 bp, Artificial
  Synthetic oligonucleotide
tatacggatagaataagcgtttaacataataaaaaggcctaaaaagtatgtaga

SEQ ID NO: 277108 - DNA, 54 bp, Artificial
  Synthetic oligonucleotide
ccgactcgaacggacaatacctaatttggaatcaagagttttgaccgattgaaa

SEQ ID NO: 277109 - DNA, 55 bp, Artificial
  Synthetic oligonucleotide
cgtctgatgtcgttaattcagctcaagccattagtgaacgagtattaacacgccc

SEQ ID NO: 277110 - DNA, 55 bp, Artificial
  Synthetic oligonucleotide
cggtttgcattagtacgctcctataactagttgcactacttgttccaatggccaa

SEQ ID NO: 277111 - DNA, 55 bp, Artificial
  Synthetic oligonucleotide
ggaacttagtgcagaattgacggcagcatacagcgaaaacagctgcatagacgac

SEQ ID NO: 277112 - DNA, 55 bp, Artificial
  Synthetic oligonucleotide
cgtagctctaataggatatcaaattcctcaacaactccaagctgggtaacgcgtc

SEQ ID NO: 277113 - DNA, 55 bp, Artificial
  Synthetic oligonucleotide
cgtagggagctgtaccgaattacgtagtcccaattaccgagctgtaacgaacaca

SEQ ID NO: 277114 - DNA, 55 bp, Artificial
  Synthetic oligonucleotide
cctcgtaaatgaacatggtaatcgtcgatgacgcgtagtgccctggacgacaaga

SEQ ID NO: 277115 - DNA, 54 bp, Artificial
  Synthetic oligonucleotide
ggttcccttgaactcgttaaagtcttaaaagttaaccataggacattgagcaga

SEQ ID NO: 277116 - DNA, 55 bp, Artificial
  Synthetic oligonucleotide
cgaattactttggccggcacgctaccttcaattagactccgtatcaaccgttcac

SEQ ID NO: 277117 - DNA, 55 bp, Artificial
  Synthetic oligonucleotide
cgacgctcgtaagcactgttttcgtacattcagttggggcaaacgccacatcccc

SEQ ID NO: 277118 - DNA, 55 bp, Artificial
  Synthetic oligonucleotide
cgagaatcacttatagagtaaaccgggactgactgcacccgtctccaacctaagc

SEQ ID NO: 277119 - DNA, 55 bp, Artificial
  Synthetic oligonucleotide
ggcgagcgactccacaatccgttgcaccgcgctaaacgctgagaggaagaacgaa

SEQ ID NO: 277120 - DNA, 55 bp, Artificial
  Synthetic oligonucleotide
cgataagcgagttacttggaaggcgtatgctggccactggattgctcgcgtctgc

SEQ ID NO: 277121 - DNA, 55 bp, Artificial
  Synthetic oligonucleotide
cgataggggtctattagtggttgaattgctctgtgcagatggtatttggcccacg

SEQ ID NO: 277122 - DNA, 55 bp, Artificial
  Synthetic oligonucleotide
cgatgcccgagattgcgaggccgtccatacaaaaccgtcgctattcctccgtccg

SEQ ID NO: 277123 - DNA, 55 bp, Artificial
  Synthetic oligonucleotide
cgcattcggaagctagaagccatattcaatagtgcacctagttatggaagggatg

SEQ ID NO: 277124 - DNA, 55 bp, Artificial
  Synthetic oligonucleotide
cgccagaggtgtgggtgcgtcatgtggggtttgtgggatatacatgagagaggcg

SEQ ID NO: 277125 - DNA, 55 bp, Artificial
  Synthetic oligonucleotide
cgctaaatttggccaaatcgtggacagtagccataatgtcggtaagttcagtttc

SEQ ID NO: 277126 - DNA, 52 bp, Artificial
  Synthetic oligonucleotide
taacttctcataaaagtgagttaaaggaaaaatagttctaattggtaagaag

SEQ ID NO: 277127 - DNA, 55 bp, Artificial
  Synthetic oligonucleotide
cgctgcgagagtatacacgaacataaccaagagttgtacaggctacaacgactcg

SEQ ID NO: 277128 - DNA, 55 bp, Artificial
  Synthetic oligonucleotide
ggagttacggaatacaacgtcacggaacaaaggagatacggcattgtacaagtgc

SEQ ID NO: 277129 - DNA, 55 bp, Artificial
  Synthetic oligonucleotide
cggaatttgggttacgaagaagctccagattatgactacctacgaagtctgttcg

SEQ ID NO: 277130 - DNA, 55 bp, Artificial
  Synthetic oligonucleotide
cggcatgaggaatcaaacgctccttgaagttttcagcgacttcatagtcacgcgc

SEQ ID NO: 277131 - DNA, 55 bp, Artificial
  Synthetic oligonucleotide
cggcgcgaaagtatagattgcgaaggtacggactgttgtacaagggatcccctgt

SEQ ID NO: 277132 - DNA, 55 bp, Artificial
  Synthetic oligonucleotide
cggctaagagtgcggaagaaactattacgcagcatcttccaaatgtaagttctgc

SEQ ID NO: 277133 - DNA, 55 bp, Artificial
  Synthetic oligonucleotide
ggagatgcgcgttttggttgctgagaccggaagagaagataatgtgtcagtacat

SEQ ID NO: 277134 - DNA, 55 bp, Artificial
  Synthetic oligonucleotide
ggaagacaccctgtatatgggtacgttgtcaccgacaaatagttgcgtccaatcc

SEQ ID NO: 277135 - DNA, 53 bp, Artificial
  Synthetic oligonucleotide
gattcgttccgcttacgcacgacaaaacgtagccttcccctgtcttacggaac

SEQ ID NO: 277136 - DNA, 55 bp, Artificial
  Synthetic oligonucleotide
gcaatccttaactctcggaatagtttatacggtgacgagcaaacgtataactagt

SEQ ID NO: 277137 - DNA, 59 bp, Artificial
  Synthetic oligonucleotide
taaatgaaaaattaggagtagcagattcaattgaatggttattacattctcctgtacac

SEQ ID NO: 277138 - DNA, 55 bp, Artificial
  Synthetic oligonucleotide
gcacaaattacagcaggccaggttggttctttactagcccgccaacagatgctcg

SEQ ID NO: 277139 - DNA, 55 bp, Artificial
  Synthetic oligonucleotide
gcacactaacattagcagtcacgatccgcttagggtaggtttccccgcaccaacg

SEQ ID NO: 277140 - DNA, 55 bp, Artificial
  Synthetic oligonucleotide
gagttggcttcttcctcagaacgtcaactgttggagacaatatgctgtcgtctag

SEQ ID NO: 277141 - DNA, 55 bp, Artificial
  Synthetic oligonucleotide
gaggatcgatcatgactagtggtagagcttgatcccaataaatcacgattcacgg

SEQ ID NO: 277142 - DNA, 55 bp, Artificial
  Synthetic oligonucleotide
gaggataatgttgcggaaaacttgcaattacagcagaatactccttctgtatccg

SEQ ID NO: 277143 - DNA, 55 bp, Artificial
  Synthetic oligonucleotide
gagaaggcgattccacgacataacctattcgaccattgatagactgagcccatgt

SEQ ID NO: 277144 - DNA, 55 bp, Artificial
  Synthetic oligonucleotide
gactatagccccgccgaaatacgagttgcctagtccccgatagaggaaaagctcg

SEQ ID NO: 277145 - DNA, 55 bp, Artificial
  Synthetic oligonucleotide
gcctagtcagtgttgatcgacagatctgcgatgatccgcatttaaggttgtcatg

SEQ ID NO: 277146 - DNA, 55 bp, Artificial
  Synthetic oligonucleotide
gcgaggacgaagatcccagagcgttacaagaaactctggagtcgttggatgcgct

SEQ ID NO: 277147 - DNA, 55 bp, Artificial
  Synthetic oligonucleotide
gcgcctaacagaattagatgcaacattccgatcacagaaggtaacgttaccggac

SEQ ID NO: 277148 - DNA, 60 bp, Artificial
  Synthetic oligonucleotide
atataggagcatcatgcgtcgaagttatcgtgtactacagccttgctgactcttttatag

SEQ ID NO: 277149 - DNA, 58 bp, Artificial
  Synthetic oligonucleotide
actaataccagatggtaccataagctcttacgagacttagacgcaaactatcccgcca

SEQ ID NO: 277150 - DNA, 52 bp, Artificial
  Synthetic oligonucleotide
cgaagaatatggcatgcgtaccataccccacgcaagaaactccgtatactga

SEQ ID NO: 277151 - DNA, 52 bp, Artificial
  Synthetic oligonucleotide
gtacataccacctcacgagcttttcgcctaacgtcagcttctcgcttagtcg

SEQ ID NO: 277152 - DNA, 52 bp, Artificial
  Synthetic oligonucleotide
cacttcctgcagtgccgttctcgcgaccataccaatactgaaatggtgatcg

SEQ ID NO: 277153 - DNA, 52 bp, Artificial
  Synthetic oligonucleotide
ttgagttcttgtgaaacggaaggtgtaactagccggcagaggtgcggactag

SEQ ID NO: 277154 - DNA, 50 bp, Artificial
  Synthetic oligonucleotide
accctgttacgaatcaggggtttaaactaaaactacccttgtctatagta

SEQ ID NO: 277155 - DNA, 51 bp, Artificial
  Synthetic oligonucleotide
tacttccctaccatttaaaccagacgcgttagctttatttaatgccacgtg

SEQ ID NO: 277156 - DNA, 50 bp, Artificial
  Synthetic oligonucleotide
aagagtccgtaacggctccacgtgccctttccggcgtcgtggtaaatgcc

SEQ ID NO: 277157 - DNA, 50 bp, Artificial
  Synthetic oligonucleotide
aagcactgccgatgtgcccagcggctatcgatggttggcactcaccacgc

SEQ ID NO: 277158 - DNA, 50 bp, Artificial
  Synthetic oligonucleotide
aagcctcgcggaatggtatgcaaccgcccagtacccgctatccaccgctc

SEQ ID NO: 277159 - DNA, 50 bp, Artificial
  Synthetic oligonucleotide
aacgtgggcgctcgcacgctcactaacaacgtagcgactgcaggaggaga

SEQ ID NO: 277160 - DNA, 57 bp, Artificial
  Synthetic oligonucleotide
gtggcgtaagcaaggggatgggtgggtggtcgctagccgtcccggaggagctagcaa

SEQ ID NO: 277161 - DNA, 50 bp, Artificial
  Synthetic oligonucleotide
aacggctgtgaagacacatacgccagcacactcaccggtatcggacccga

SEQ ID NO: 277162 - DNA, 50 bp, Artificial
  Synthetic oligonucleotide
aaaactgcgcgttgtgtgtgcggtcgctcgggtagcaatccgatcaaggg

SEQ ID NO: 277163 - DNA, 50 bp, Artificial
  Synthetic oligonucleotide
aacggccccgcctttacccgcgcagactgggaccaacttctcgggcactg

SEQ ID NO: 277164 - DNA, 50 bp, Artificial
  Synthetic oligonucleotide
aacgcaggccgccccattcttgcccatggggttgacagtcaatgtggaga

SEQ ID NO: 277165 - DNA, 50 bp, Artificial
  Synthetic oligonucleotide
aacctggctcgcgatcggtcctctgtcctttcgcactggagctgctccaa

SEQ ID NO: 277166 - DNA, 50 bp, Artificial
  Synthetic oligonucleotide
tgagtcctcgcacagtaggtgtactcgtatgtcaccccttgctcaacaaa

SEQ ID NO: 277167 - DNA, 50 bp, Artificial
  Synthetic oligonucleotide
aacctacattgtggtcggaggcttaggaggcctgggcaagcggcttgtcg

SEQ ID NO: 277168 - DNA, 50 bp, Artificial
  Synthetic oligonucleotide
aaatactgcactgcttgcttatgtggatccggcgccaaccgccatccgcc

SEQ ID NO: 277169 - DNA, 50 bp, Artificial
  Synthetic oligonucleotide
aaagtggacggaggcacacaattcaagccatgggccgggtgatgcacgtc

SEQ ID NO: 277170 - DNA, 50 bp, Artificial
  Synthetic oligonucleotide
aaagggaagaccgccgaccctgtttctcgtccgagcccagcagtcgttgg

SEQ ID NO: 277171 - DNA, 57 bp, Artificial
  Synthetic oligonucleotide
gatggggctggctaacttccaagttaagttcagattcactatctctagaaaaaagtc

SEQ ID NO: 277172 - DNA, 50 bp, Artificial
  Synthetic oligonucleotide
aaagcgggccagggactcacggtctgctggactagccggaaatttgggcc

SEQ ID NO: 277173 - DNA, 50 bp, Artificial
  Synthetic oligonucleotide
aaagccgggtgtcaagccccggactcctgccaatgcgcccatacacaaac

SEQ ID NO: 277174 - DNA, 50 bp, Artificial
  Synthetic oligonucleotide
aaagcccgtgggggtcacaatgcagcgtcgctatggaaatgcggcatctg

SEQ ID NO: 277175 - DNA, 50 bp, Artificial
  Synthetic oligonucleotide
aaacccccgttgggaccctcttaccgctacctcgtctgcgctacttggca

SEQ ID NO: 277176 - DNA, 50 bp, Artificial
  Synthetic oligonucleotide
aaaagcgccgcgagctacactcccacaacccaagacgcagatttgcgctc

SEQ ID NO: 277177 - DNA, 50 bp, Artificial
  Synthetic oligonucleotide
catatgtaaggagattatacaatactagcttatatacacggggacgtgca

SEQ ID NO: 277178 - DNA, 50 bp, Artificial
  Synthetic oligonucleotide
acaagcgcctggtgaggcaaatcggccatgggagtctcttgagcagccta

SEQ ID NO: 277179 - DNA, 50 bp, Artificial
  Synthetic oligonucleotide
acaacctgcgcgcgagtccaccagcgttgttgctatagggaacctgggta

SEQ ID NO: 277180 - DNA, 50 bp, Artificial
  Synthetic oligonucleotide
acaaacgctctgcccctgcattcgacgttctcggctgcgtatgcccatcg

SEQ ID NO: 277181 - DNA, 50 bp, Artificial
  Synthetic oligonucleotide
aatttgatcgccggtggttcaggcggggcacgaggatttcgcaatggtga

SEQ ID NO: 277182 - DNA, 60 bp, Artificial
  Synthetic oligonucleotide
tgacacagccgcgtataagactaaaagatgtcgacatctaactaataaagatgtctctac

SEQ ID NO: 277183 - DNA, 50 bp, Artificial
  Synthetic oligonucleotide
aattcgaccacggtgtacccagcccgagtcacatcccgcgctactctcca

SEQ ID NO: 277184 - DNA, 50 bp, Artificial
  Synthetic oligonucleotide
aattagggtcgaattacaactctatcctaaatagttgttaggccaaggct

SEQ ID NO: 277185 - DNA, 50 bp, Artificial
  Synthetic oligonucleotide
aatggtagaagagtccgtaacggctccacgtgccctttccggcgtcgtgg

SEQ ID NO: 277186 - DNA, 50 bp, Artificial
  Synthetic oligonucleotide
aatagccccgtgccgcgtagaatgtttgctccgttgattgtgccgcccat

SEQ ID NO: 277187 - DNA, 50 bp, Artificial
  Synthetic oligonucleotide
aatagagcgagtccgtggcccgcttttccgctgcagagcacgcataggaa

SEQ ID NO: 277188 - DNA, 50 bp, Artificial
  Synthetic oligonucleotide
aataccaagactgctcgacgagcggcaagcgaccgcgactgagaggcgac

SEQ ID NO: 277189 - DNA, 50 bp, Artificial
  Synthetic oligonucleotide
aagtggtcaacgaggagagtgcatgctgtcgcggggtcggcagatggatc

SEQ ID NO: 277190 - DNA, 50 bp, Artificial
  Synthetic oligonucleotide
aagtgggaactagcgacgaaaagggtttagccgctgagccgggcgcgagg

SEQ ID NO: 277191 - DNA, 50 bp, Artificial
  Synthetic oligonucleotide
aagtgcgctcacaagctgcttgcggaggctcggaacctgccaaacagact

SEQ ID NO: 277192 - DNA, 50 bp, Artificial
  Synthetic oligonucleotide
aagtgccgacctcggtccacctccccacgtgatccctcaaaatcatgccg

SEQ ID NO: 277193 - DNA, 60 bp, Artificial
  Synthetic oligonucleotide
gaggccattttgaatacctgacgtggcaatgcgtatattgaactccctgtgagcgggata

SEQ ID NO: 277194 - DNA, 50 bp, Artificial
  Synthetic oligonucleotide
aagggccggtgcaatcgaaccattcccacctttcggaagccagcccgtta

SEQ ID NO: 277195 - DNA, 50 bp, Artificial
  Synthetic oligonucleotide
aaggcgcttgcagccacttcgtgccgccctatccatctagcagcgcactt

SEQ ID NO: 277196 - DNA, 50 bp, Artificial
  Synthetic oligonucleotide
aaggccgtcccagtcgcatgctgcattctcctctctcgcaagagttgcga

SEQ ID NO: 277197 - DNA, 50 bp, Artificial
  Synthetic oligonucleotide
aaggatgtggtggctccatttcggatgagggtctgcgggcgtacgggcgg

SEQ ID NO: 277198 - DNA, 50 bp, Artificial
  Synthetic oligonucleotide
ggtaagagacccggtagttataacggagcaggtttatatagactattaag

SEQ ID NO: 277199 - DNA, 50 bp, Artificial
  Synthetic oligonucleotide
aaggaacattcggcggccataatccccaggagtcggcggttacgacacct

SEQ ID NO: 277200 - DNA, 50 bp, Artificial
  Synthetic oligonucleotide
aagctgcttgcggaggctcggaacctgccaaacagactgtgggtccgggt

SEQ ID NO: 277201 - DNA, 50 bp, Artificial
  Synthetic oligonucleotide
aagcgcgctgctggcacccacggtaacccagtcaagtacgttcaaggacc

SEQ ID NO: 277202 - DNA, 50 bp, Artificial
  Synthetic oligonucleotide
aagcctggacttgtgcctcgagggctgaagcgcggtcgtctctggcggaa

SEQ ID NO: 277203 - DNA, 50 bp, Artificial
  Synthetic oligonucleotide
aagcctgcattatcgcatgaaggcaccgcctgtaccccgtcccacaccat

SEQ ID NO: 277204 - DNA, 58 bp, Artificial
  Synthetic oligonucleotide
gagatagcttaaaggtagtagtgtgcgcttagaacctaagcgatttttagtacacatc

SEQ ID NO: 277205 - DNA, 56 bp, Artificial
  Synthetic oligonucleotide
ttagaccctacgaagtagggtgctgctattacacaacctacgtgcctaaggtctaa

SEQ ID NO: 277206 - DNA, 56 bp, Artificial
  Synthetic oligonucleotide
ttataactaggcaatacaggtgtagtcgtagaatacactctaacgttgttattttc

SEQ ID NO: 277207 - DNA, 57 bp, Artificial
  Synthetic oligonucleotide
gacttcttaagtctctaggtaaaatagcaacactgtcctttatattaacagtatgga

SEQ ID NO: 277208 - DNA, 57 bp, Artificial
  Synthetic oligonucleotide
cagtatgggtgtagtttagctgataaatctgtagtggtagaaatataattttgttgg

SEQ ID NO: 277209 - DNA, 49 bp, Artificial
  Synthetic oligonucleotide
ctgtacccaaatgattagtttggcccctttacttacccttttaggttaa

SEQ ID NO: 277210 - DNA, 59 bp, Artificial
  Synthetic oligonucleotide
ttcatttacctgagcgtcttgccccacgaatcaagcagtttgctcgatcccacgcgggc

SEQ ID NO: 277211 - DNA, 53 bp, Artificial
  Synthetic oligonucleotide
cccttcaaaatctcctcgcccctccgggtatcctgccttttcacgtgccttcc

SEQ ID NO: 277212 - DNA, 57 bp, Artificial
  Synthetic oligonucleotide
tgacgagtagtaaaataaactgaggatgtatcgggatataactttctaaccgctcgc

SEQ ID NO: 277213 - DNA, 57 bp, Artificial
  Synthetic oligonucleotide
accatcccgtgtttagcaagagctctaacgatatatgtactagcacgagcaacatag

SEQ ID NO: 277214 - DNA, 55 bp, Artificial
  Synthetic oligonucleotide
ataagtgtggggttagctaaatctcgagtgtaatttaaggaaacgcgacacaaga

SEQ ID NO: 277215 - DNA, 57 bp, Artificial
  Synthetic oligonucleotide
gaactgtaagttttgtctagagtcaatctttagagcattcttacctagttcaaacgc

SEQ ID NO: 277216 - DNA, 54 bp, Artificial
  Synthetic oligonucleotide
ctttgcaaacggggtctaaaccatcccacttttgcgtttaatatataagaggca

SEQ ID NO: 277217 - DNA, 55 bp, Artificial
  Synthetic oligonucleotide
gagacccggtagttataacggagcaggtttatatagactattaagcttatatttc

SEQ ID NO: 277218 - DNA, 56 bp, Artificial
  Synthetic oligonucleotide
ctaatatctaagccggtaaatactagagctaatagtactgtagctactaaaccgtc

SEQ ID NO: 277219 - DNA, 55 bp, Artificial
  Synthetic oligonucleotide
ccccaccaaacatggggatacgttgcaacattaggaccaccacgacgcttataca

SEQ ID NO: 277220 - DNA, 60 bp, Artificial
  Synthetic oligonucleotide
gcccttagtatctagcccttgcatcgtagcgtcaggcatacctgagacagtagctaatgc

SEQ ID NO: 277221 - DNA, 55 bp, Artificial
  Synthetic oligonucleotide
ccgcgtaactaaacaccactataaatttgggacgatacttctttgcactagaatc

SEQ ID NO: 277222 - DNA, 55 bp, Artificial
  Synthetic oligonucleotide
gaacgatggtatccaccacgtaaaagcccaggtgatagcgacccagatacgacgc

SEQ ID NO: 277223 - DNA, 55 bp, Artificial
  Synthetic oligonucleotide
ccgttcgtacgatgtatgcgtggtggtgtcaatagatccgcggtaacttcactgg

SEQ ID NO: 277224 - DNA, 51 bp, Artificial
  Synthetic oligonucleotide
cctccttagtactaggattagtaggtttaagtccgtccggagtcgacttag

SEQ ID NO: 277225 - DNA, 55 bp, Artificial
  Synthetic oligonucleotide
ccttcgctttgacgtgctgctagagaattaagacggggatactaacgaatggcgt

SEQ ID NO: 277226 - DNA, 55 bp, Artificial
  Synthetic oligonucleotide
ccttgcgtaatgttaccccgctttcaggcttactgcaggttgcataatacgaagc

SEQ ID NO: 277227 - DNA, 55 bp, Artificial
  Synthetic oligonucleotide
cgcaatcacgagctctgcgtgtaatgaggggtatgtcgaataattgacctgtgta

SEQ ID NO: 277228 - DNA, 55 bp, Artificial
  Synthetic oligonucleotide
cgcttgcgtaaggtccgaaccggatccttatattaatctcacatcgttaagggct

SEQ ID NO: 277229 - DNA, 55 bp, Artificial
  Synthetic oligonucleotide
cggcaatgcaccaaaacaacatcgtgctagtccctcgtctaacatcgtggctaga

SEQ ID NO: 277230 - DNA, 55 bp, Artificial
  Synthetic oligonucleotide
cttgaccatagcacaatgctctagctgccgcgctaacagaagagtatgttctaac

SEQ ID NO: 277231 - DNA, 56 bp, Artificial
  Synthetic oligonucleotide
gcccctaccttcgcgcttatatgtgactaacaaccctattaacactaagataataa

SEQ ID NO: 277232 - DNA, 51 bp, Artificial
  Synthetic oligonucleotide
cgtaacttaccgttttctgctaaacgtgttttaattctaggtatggttggc

SEQ ID NO: 277233 - DNA, 55 bp, Artificial
  Synthetic oligonucleotide
ctcgagccaggggccgttgtttgtacgttgacaatctcgagtttagtgctcgata

SEQ ID NO: 277234 - DNA, 55 bp, Artificial
  Synthetic oligonucleotide
cttctacgtcctccagatattgggccgacctctaggagatttgcatgtactgcgc

SEQ ID NO: 277235 - DNA, 55 bp, Artificial
  Synthetic oligonucleotide
ctgcaacaaggcacgactatcactctttagtggattgctgatcaaacaaccctgc

SEQ ID NO: 277236 - DNA, 55 bp, Artificial
  Synthetic oligonucleotide
cttatcattttgacgagctatagtgaaacttccatctccgtcggtcataccgact

SEQ ID NO: 277237 - DNA, 54 bp, Artificial
  Synthetic oligonucleotide
tttgaagggctcccttgtagaagcccgggtaagcatcggttactaaatccgatc

SEQ ID NO: 277238 - DNA, 55 bp, Artificial
  Synthetic oligonucleotide
ttggttgacacgtgatcctctaccaaaaccctgtcgctgtgcattccggtggctc

SEQ ID NO: 277239 - DNA, 55 bp, Artificial
  Synthetic oligonucleotide
ttgaacctgtaatctttgtggccgaaacacaatgccttaccatttggctaacgcg

SEQ ID NO: 277240 - DNA, 55 bp, Artificial
  Synthetic oligonucleotide
ttatataccctaaaatctggggcttcgcccaaagcaggtgtagaatttctgttgt

SEQ ID NO: 277241 - DNA, 55 bp, Artificial
  Synthetic oligonucleotide
tgggccaccgatttgtggtatatagctggtatgctatgtacgagaggacaacgat

SEQ ID NO: 277242 - DNA, 60 bp, Artificial
  Synthetic oligonucleotide
caacccttacgacctacgctcattagttctttgcttgcctcagtgtggatgtatccacgc

SEQ ID NO: 277243 - DNA, 55 bp, Artificial
  Synthetic oligonucleotide
tggatccttttgtgttacgtagtaacagtcaacctgtccatatgagctcagaccc

SEQ ID NO: 277244 - DNA, 55 bp, Artificial
  Synthetic oligonucleotide
tgatgtgttaaaattcctatcggtaagtaccattgtaattgcaccggctagtaca

SEQ ID NO: 277245 - DNA, 55 bp, Artificial
  Synthetic oligonucleotide
tcgggctagattacaacctgctctagtcaaggagtcgaaggccagtgatcatcac

SEQ ID NO: 277246 - DNA, 55 bp, Artificial
  Synthetic oligonucleotide
tataccggggtataactttcctttcgtgtagtctctaaggatcctgccaagatag

SEQ ID NO: 277247 - DNA, 55 bp, Artificial
  Synthetic oligonucleotide
taccggcatttaccaatgccagtcctatataagtcctatgctaagtgcgcatagc

SEQ ID NO: 277248 - DNA, 55 bp, Artificial
  Synthetic oligonucleotide
gtctcggttgcataacattttccgtctgattggatctagttttccttacagcatc

SEQ ID NO: 277249 - DNA, 55 bp, Artificial
  Synthetic oligonucleotide
gtacagtataaaccgcagcattacgggttttacgcagagtaactatacccacacc

SEQ ID NO: 277250 - DNA, 55 bp, Artificial
  Synthetic oligonucleotide
ggttgagcgagaaagattacaaatcacacctatatgcaggtggtaagagtcgctg

SEQ ID NO: 277251 - DNA, 55 bp, Artificial
  Synthetic oligonucleotide
ggtcgggttgtttgaatgcaaaggagtcatagaaggatagagtcatctcggcgtg

SEQ ID NO: 277252 - DNA, 55 bp, Artificial
  Synthetic oligonucleotide
ggtaggcagagaccgggtatattttctatgtatacagtaaaagacagtactgtcg

SEQ ID NO: 277253 - DNA, 60 bp, Artificial
  Synthetic oligonucleotide
cgtcagcttacagtgtggccgtgtaagcatgcagtaaaaaggacacgtcagctttagtta

SEQ ID NO: 277254 - DNA, 55 bp, Artificial
  Synthetic oligonucleotide
gggtacgtacctgcgattggggatggacagcttttcgactaacctggccttgccc

SEQ ID NO: 277255 - DNA, 55 bp, Artificial
  Synthetic oligonucleotide
ggcttggggtagtgaattactatccctgagaattggacgagagccgggactgtca

SEQ ID NO: 277256 - DNA, 55 bp, Artificial
  Synthetic oligonucleotide
ggactcaaacttcgctgtcgtgtaagtgtcgtcggtaatacaggcgcactggggc

SEQ ID NO: 277257 - DNA, 54 bp, Artificial
  Synthetic oligonucleotide
ggaaacagcaaatgaaccatctccgtctataaaccctgttacgaatcaggggtt

SEQ ID NO: 277258 - DNA, 55 bp, Artificial
  Synthetic oligonucleotide
gctgcagggaatgagttggcaataggttgggaatcgccttccggcattccaacgc

SEQ ID NO: 277259 - DNA, 55 bp, Artificial
  Synthetic oligonucleotide
gcgctaccggcgagaaccaagtttatgctctctgcggtttcatcagagctatggg

SEQ ID NO: 277260 - DNA, 55 bp, Artificial
  Synthetic oligonucleotide
gcctgtaacttctactgacacgcttccaggtctaatgcaattcacttcactctct

SEQ ID NO: 277261 - DNA, 55 bp, Artificial
  Synthetic oligonucleotide
gccccaatgctttatgcgccatactgaatgaagcaaaaggcgacccatgcaccat

SEQ ID NO: 277262 - DNA, 55 bp, Artificial
  Synthetic oligonucleotide
gattcaatattagctggtacacgtttcaccccattaacgtatcagtcactgtgga

SEQ ID NO: 277263 - DNA, 55 bp, Artificial
  Synthetic oligonucleotide
gatagtttctgtcgggaacgtcagttgaatctacatcgcgaaatttacccgaagg

SEQ ID NO: 277264 - DNA, 58 bp, Artificial
  Synthetic oligonucleotide
aatactgcacttagaccttaggcacgtaggttgtgtaatagcagcaccctacttcgta

SEQ ID NO: 277265 - DNA, 55 bp, Artificial
  Synthetic oligonucleotide
gacgatgtgaatacaagcaactaagcaaggaggagtgtcgaagaagttagatatg

SEQ ID NO: 277266 - DNA, 55 bp, Artificial
  Synthetic oligonucleotide
gaactttcaacgtcaatccaatcgccaaataaagagccacaatcaccacttcctc

SEQ ID NO: 277267 - DNA, 55 bp, Artificial
  Synthetic oligonucleotide
atactatcggaattaaaatatctgctctgaccgaagaaggagtatacagcctagg

SEQ ID NO: 277268 - DNA, 55 bp, Artificial
  Synthetic oligonucleotide
aggtcaacccctggcataaatcatggcagacccctcaaaagccaagtaaagctga

SEQ ID NO: 277269 - DNA, 55 bp, Artificial
  Synthetic oligonucleotide
atccattcgtggcctataggtggaatttctgtcgaggtaggaattcgagatgacg

SEQ ID NO: 277270 - DNA, 55 bp, Artificial
  Synthetic oligonucleotide
atgctgaatagattgcatgacattagccaggaatctttccgactccttaacgaac

SEQ ID NO: 277271 - DNA, 55 bp, Artificial
  Synthetic oligonucleotide
attagtacctccgcctgaagaagtctcagtacctactttattttcggcactacca

SEQ ID NO: 277272 - DNA, 54 bp, Artificial
  Synthetic oligonucleotide
caacctactctagaaggcgtagtgttagattctaggactattttgttttcggga

SEQ ID NO: 277273 - DNA, 55 bp, Artificial
  Synthetic oligonucleotide
aatatcgacactggtcctacacaccctccgcactccgctccttgcgcgaaagcac

SEQ ID NO: 277274 - DNA, 51 bp, Artificial
  Synthetic oligonucleotide
cagtcttaatttatgctttctcccgggttttccttatagttagcgggttta

SEQ ID NO: 277275 - DNA, 55 bp, Artificial
  Synthetic oligonucleotide
gtacgaaccgatgtgtactaaaaatcgcttaggttctaagcgcacactactacct

SEQ ID NO: 277276 - DNA, 55 bp, Artificial
  Synthetic oligonucleotide
cataccagctttgcaccacttgcgggacgtcgttgtgttccctcaaagtggcgaa

SEQ ID NO: 277277 - DNA, 55 bp, Artificial
  Synthetic oligonucleotide
catcttgtggagtatacacaaaagatatctcacaacaatcgacaaaacgtacggg

SEQ ID NO: 277278 - DNA, 53 bp, Artificial
  Synthetic oligonucleotide
ccaacaagctctacacttcctttatctaaaaccttagttgttagaccacctag

SEQ ID NO: 277279 - DNA, 55 bp, Artificial
  Synthetic oligonucleotide
ccaccacaccccttaacacatctttgcacataaatagacccaaccagccccgacg

SEQ ID NO: 277280 - DNA, 55 bp, Artificial
  Synthetic oligonucleotide
ccacgatcgcaagagacagaaagcaaaattagctagcgactcagagtagtataac

SEQ ID NO: 277281 - DNA, 55 bp, Artificial
  Synthetic oligonucleotide
ccatacataaaggagtttccccagataccatctattcaatcatcggctcaatccg

SEQ ID NO: 277282 - DNA, 55 bp, Artificial
  Synthetic oligonucleotide
cccactaactaactcagactcagcctctgccaggtcgaagggaggtctgttagtt

SEQ ID NO: 277283 - DNA, 54 bp, Artificial
  Synthetic oligonucleotide
gtaaacagcgtatgacacttagtgcggcgggtattgatcttataagatgggcgc

SEQ ID NO: 277284 - DNA, 54 bp, Artificial
  Synthetic oligonucleotide
gaatttggttagaagggattccagctcaggaaattctctcgaaccctcttagag

SEQ ID NO: 277285 - DNA, 54 bp, Artificial
  Synthetic oligonucleotide
gtcgccctctgattcccgagcaactaactccatcgtgctaacaaaccgaggaag

SEQ ID NO: 277286 - DNA, 52 bp, Artificial
  Synthetic oligonucleotide
gtcgggaagttcctaaaggtttgttgtagaagttatgaaagtttatccttga

SEQ ID NO: 277287 - DNA, 54 bp, Artificial
  Synthetic oligonucleotide
ataaatacccttacactgtaaacatgcagggaataaagttaacactagtgaaac

SEQ ID NO: 277288 - DNA, 53 bp, Artificial
  Synthetic oligonucleotide
cgttactacctggtaagaggatttcgattgtctggttggaaagttgtcgtaaa

SEQ ID NO: 277289 - DNA, 53 bp, Artificial
  Synthetic oligonucleotide
atcacgccatatggcatccgaatctggtgtctaaacctttaaagctccagagc

SEQ ID NO: 277290 - DNA, 53 bp, Artificial
  Synthetic oligonucleotide
tacagaacgtcttcccatgtctgaatcaggattattgtgatttagactcaaga

SEQ ID NO: 277291 - DNA, 52 bp, Artificial
  Synthetic oligonucleotide
tcctccctcctctagatcagattctggcactaagtaggaatcaaattctata

SEQ ID NO: 277292 - DNA, 52 bp, Artificial
  Synthetic oligonucleotide
ggaagcatcgttcgtgcctacaccatccagtgtccctacgggatctacccgg

SEQ ID NO: 277293 - DNA, 52 bp, Artificial
  Synthetic oligonucleotide
tccatcgacaatccctatgacaaacgagtatgaagcgcaacatttccgcaag

SEQ ID NO: 277294 - DNA, 52 bp, Artificial
  Synthetic oligonucleotide
gtgtccccaaagagccctccaagcatttagctgtctttaacactttcacgcg

SEQ ID NO: 277295 - DNA, 52 bp, Artificial
  Synthetic oligonucleotide
aatagcgtaacagctacgcaccttatattatgacgtagactctatagcctac

SEQ ID NO: 277296 - DNA, 52 bp, Artificial
  Synthetic oligonucleotide
cagtactggtcttgcatgaaggcagatttaagacctatggggctcgaacccc

SEQ ID NO: 277297 - DNA, 60 bp, Artificial
  Synthetic oligonucleotide
gatacacggcgcacgttgatttagctttcgattctattgaaagtattatgagagacgtat

SEQ ID NO: 277298 - DNA, 55 bp, Artificial
  Synthetic oligonucleotide
ccatacggtagggtcatactacacaaattaaaattgttcaccaattacgtagtca

SEQ ID NO: 277299 - DNA, 55 bp, Artificial
  Synthetic oligonucleotide
ttaaccggtgttgttctagctaacgcctcaatggatattgcatttcatgatacgt

SEQ ID NO: 277300 - DNA, 53 bp, Artificial
  Synthetic oligonucleotide
ttcagaccgtcggtactctgttgtattttcgacccttgaaactttgtaaataa

SEQ ID NO: 277301 - DNA, 55 bp, Artificial
  Synthetic oligonucleotide
gtgatcgtaccagtgctgttagcggttgcattcatgacaatcattgaacgaaaag

SEQ ID NO: 277302 - DNA, 55 bp, Artificial
  Synthetic oligonucleotide
ggtcattcagacaactacattcctgctaatcctatggtaacccctgcttcaatcg

SEQ ID NO: 277303 - DNA, 55 bp, Artificial
  Synthetic oligonucleotide
ggtagaatgatcctttgatgaggggtttgtaggagttcgaacctccttgagctta

SEQ ID NO: 277304 - DNA, 55 bp, Artificial
  Synthetic oligonucleotide
gggagtattagttgagacgtaggcgctaattgttgacgttatagaattgaagatc

SEQ ID NO: 277305 - DNA, 55 bp, Artificial
  Synthetic oligonucleotide
ggatcgaacggttgaatgttgcattattctccgaggaaatatggtacgtatgtga

SEQ ID NO: 277306 - DNA, 55 bp, Artificial
  Synthetic oligonucleotide
gattctgcgatcccttattaacccctctctctttatgtgggaggggagttctaac

SEQ ID NO: 277307 - DNA, 55 bp, Artificial
  Synthetic oligonucleotide
ttcccttttcatttagttgaacaatcaccttgaccattggctactagtttcacct

SEQ ID NO: 277308 - DNA, 55 bp, Artificial
  Synthetic oligonucleotide
tagactctaaagccttagagtctgcgaaatttcttaaaggtgtggatctttttgt

SEQ ID NO: 277309 - DNA, 55 bp, Artificial
  Synthetic oligonucleotide
aggaattaacatcttaaaagtcatagcagagtaggtccgtaagaatatggacctg

SEQ ID NO: 277310 - DNA, 55 bp, Artificial
  Synthetic oligonucleotide
atccgctaaacagcggccttaaccatgagggtcctcaggtagaataatcgctgcc

SEQ ID NO: 277311 - DNA, 55 bp, Artificial
  Synthetic oligonucleotide
cgagctacattaggtttaagagcccgattgaaaatcgttcttacacaacatacga

SEQ ID NO: 277312 - DNA, 55 bp, Artificial
  Synthetic oligonucleotide
ctcaggcaattgttgtttgaggttctagtatgggctctagttttggtcaaagata

SEQ ID NO: 277313 - DNA, 55 bp, Artificial
  Synthetic oligonucleotide
ctgagtggtattaatatagcctggtcgtacagtgctggtaccctgaatcgcgggt

SEQ ID NO: 277314 - DNA, 51 bp, Artificial
  Synthetic oligonucleotide
ctgcgggctttacggccttttattctttcagattaattactttaaccttct

SEQ ID NO: 277315 - DNA, 55 bp, Artificial
  Synthetic oligonucleotide
cttgtgtttccaccacaatggcctcagtgcgaatctgagtactcatagtttacac

SEQ ID NO: 277316 - DNA, 55 bp, Artificial
  Synthetic oligonucleotide
gaaatagtcaccatatactacgtgtgggcgcgtagcgcggtgtatggagagtcgt

SEQ ID NO: 277317 - DNA, 55 bp, Artificial
  Synthetic oligonucleotide
gaccagattatagcaaaggaacacctaacacttacagggcttattaaaattgtgg

SEQ ID NO: 277318 - DNA, 53 bp, Artificial
  Synthetic oligonucleotide
ttattagccttagtcattttctggggtagcgcgtaagtacgagatcgctaaaa

SEQ ID NO: 277319 - DNA, 52 bp, Artificial
  Synthetic oligonucleotide
aaaacggagccggtactggttgaacggtttatcctcctctagcgggaattca

SEQ ID NO: 277320 - DNA, 52 bp, Artificial
  Synthetic oligonucleotide
ggtttagcctgctcaggtttaattggagcgggagcagggattggtttagtat

SEQ ID NO: 277321 - DNA, 52 bp, Artificial
  Synthetic oligonucleotide
gttcgaggtaaaactcttgtgcgttcgaaccgcacctattccaggctaggga

SEQ ID NO: 277322 - DNA, 51 bp, Artificial
  Synthetic oligonucleotide
gttaggcttagtttcataatgtcggctaagattttccttgcatacgcaacc

SEQ ID NO: 277323 - DNA, 50 bp, Artificial
  Synthetic oligonucleotide
attctcgagctacattaggtttaagagcccgattgaaaatcgttcttaca

SEQ ID NO: 277324 - DNA, 51 bp, Artificial
  Synthetic oligonucleotide
gtttggccttgactaatttctactaacgttttaagatataggctttaaacc

SEQ ID NO: 277325 - DNA, 57 bp, Artificial
  Synthetic oligonucleotide
aatactgtaatagagcaaaagacggaagggtcagcaatactccaaacatagggtcac

SEQ ID NO: 277326 - DNA, 52 bp, Artificial
  Synthetic oligonucleotide
cactttgtggttttattaccgctagcttacttggtagaaaatgggccccttc

SEQ ID NO: 277327 - DNA, 53 bp, Artificial
  Synthetic oligonucleotide
ccacagtaggtttcggtattttcccaaatactatattagattctttacactac

SEQ ID NO: 277328 - DNA, 57 bp, Artificial
  Synthetic oligonucleotide
ccgaagagttatttcaactaacttggtgcgtattgacattcaaaacaagctgatctt

SEQ ID NO: 277329 - DNA, 57 bp, Artificial
  Synthetic oligonucleotide
ctgctttctctgtattaattcgattagaactatcagcacctggtgtacaattcttaa

SEQ ID NO: 277330 - DNA, 59 bp, Artificial
  Synthetic oligonucleotide
ctataacatgcgttttacctttcccgcttatgcggctcttgacagagttggggcagatc

SEQ ID NO: 277331 - DNA, 56 bp, Artificial
  Synthetic oligonucleotide
cctagggctcgaattcattccagcaaacatcccccctctgggcgaaggtgaagtaa

SEQ ID NO: 277332 - DNA, 55 bp, Artificial
  Synthetic oligonucleotide
tatgaaccatgcttgtggcgaagattcggattgtatcaatcgggccaccaaaatg

SEQ ID NO: 277333 - DNA, 55 bp, Artificial
  Synthetic oligonucleotide
tccccgtagtgaaagaataactaacgaactcccgtggaatgtcctgactgctatg

SEQ ID NO: 277334 - DNA, 51 bp, Artificial
  Synthetic oligonucleotide
cgggtaccggcagcttaaagtccgggatttactaatttctaggaagggctc

SEQ ID NO: 277335 - DNA, 52 bp, Artificial
  Synthetic oligonucleotide
cgggctttgttgaagctaaacccagctacgggaacggctttgtggaggtaaa

SEQ ID NO: 277336 - DNA, 55 bp, Artificial
  Synthetic oligonucleotide
cgggaggccatgcgtaatttctccttgaatccagatggatacgctcctagtcgcc

SEQ ID NO: 277337 - DNA, 55 bp, Artificial
  Synthetic oligonucleotide
cgctacctgaaaagagtgacgctcttactgtctggtactttggtcggtttgctgt

SEQ ID NO: 277338 - DNA, 55 bp, Artificial
  Synthetic oligonucleotide
cctcgagttgtggatttccatagctgagggcccaggtctcgcgtttgggttgtgc

SEQ ID NO: 277339 - DNA, 55 bp, Artificial
  Synthetic oligonucleotide
ccccgctagcaaacgtcgagacagctagcagctcgtctaacgtacctgatgtccg

SEQ ID NO: 277340 - DNA, 55 bp, Artificial
  Synthetic oligonucleotide
cccacctgccgtgccagcatgcgtgattcaagcgacggttgtgctttccgtcgtc

SEQ ID NO: 277341 - DNA, 55 bp, Artificial
  Synthetic oligonucleotide
cccacctcctctaagccttgccgctctttgttccgacctagaaatgttcgacttc

SEQ ID NO: 277342 - DNA, 58 bp, Artificial
  Synthetic oligonucleotide
tacgatactgaatattacactatagacgaacccaagaaattgaatgtgttgttaagtg

SEQ ID NO: 277343 - DNA, 55 bp, Artificial
  Synthetic oligonucleotide
catcctaggtatacgtcagcaaaccacgggaaggtccatgactcgccgtcacgat

SEQ ID NO: 277344 - DNA, 55 bp, Artificial
  Synthetic oligonucleotide
cactatagacgaacccaagaaattgaatgtgttgttaagtggtcaaatagctgcc

SEQ ID NO: 277345 - DNA, 55 bp, Artificial
  Synthetic oligonucleotide
caacacgacgcttattgtcgtactctatactaaaactcttatcacgataactagg

SEQ ID NO: 277346 - DNA, 55 bp, Artificial
  Synthetic oligonucleotide
atggagtgatgcgcgaatcaggggtagtacacacactgaaccatgtacgcacaca

SEQ ID NO: 277347 - DNA, 55 bp, Artificial
  Synthetic oligonucleotide
atctctagtcgggatttgctccgtggataagagggcactatatgaatggactggc

SEQ ID NO: 277348 - DNA, 54 bp, Artificial
  Synthetic oligonucleotide
aggtgactgaggattagttataaaggtccttcgcctttaagggtatgtgtgtcc

SEQ ID NO: 277349 - DNA, 55 bp, Artificial
  Synthetic oligonucleotide
agcttttcgcagttgtgaacgaaaccatcaacgatgtagaccagaaacacccaag

SEQ ID NO: 277350 - DNA, 55 bp, Artificial
  Synthetic oligonucleotide
acgatcttgaggtatccttgactaatctgatggcgttgttgggacaagtaagtgg

SEQ ID NO: 277351 - DNA, 55 bp, Artificial
  Synthetic oligonucleotide
acagtagggtgctcatatcctacgtcctgcttcgcaagagtcgtgatccatgaac

SEQ ID NO: 277352 - DNA, 55 bp, Artificial
  Synthetic oligonucleotide
aatcaggcaagggttagagtaaatcctggacagataaatttgagcttagcccaag

SEQ ID NO: 277353 - DNA, 55 bp, Artificial
  Synthetic oligonucleotide
tactccagacaggtccgggagccaagtctagtgaaacctccaacggtcggtcgaa

SEQ ID NO: 277354 - DNA, 55 bp, Artificial
  Synthetic oligonucleotide
aacgaagtccgccggtctgaaccaagacatcctcgtctaaggacgctgatctggc

SEQ ID NO: 277355 - DNA, 55 bp, Artificial
  Synthetic oligonucleotide
aaaccagacatgtcgacagaattgtttcacacttccacgttggtatcgagatatg

SEQ ID NO: 277356 - DNA, 55 bp, Artificial
  Synthetic oligonucleotide
gaagaatgaggccttccaagtccaagcgttcaaccatgtgtgcaaacactggtac

SEQ ID NO: 277357 - DNA, 55 bp, Artificial
  Synthetic oligonucleotide
gaaggccgtgcttaggagagagcgaacaacatgacgccagcatcgatggttgcac

SEQ ID NO: 277358 - DNA, 55 bp, Artificial
  Synthetic oligonucleotide
ctggtgttgaggacctgtacgcacggaacgcgaaggttgcactcctccgttctgg

SEQ ID NO: 277359 - DNA, 55 bp, Artificial
  Synthetic oligonucleotide
ctgaagagtgagtgttgttgttgcagtggcgagcaagcgaggccggacttatcgc

SEQ ID NO: 277360 - DNA, 55 bp, Artificial
  Synthetic oligonucleotide
ctctgagatggttaatgtggtgaccggtacgcttgtcgctttgttgcccgctcgg

SEQ ID NO: 277361 - DNA, 55 bp, Artificial
  Synthetic oligonucleotide
gatgccaaggaatactgaagacttggtagaagcctcatgaagaatgaggccttcc

SEQ ID NO: 277362 - DNA, 55 bp, Artificial
  Synthetic oligonucleotide
ctcggccgtaagcttcttgacatattcgcgctcggtttcgtacgagtggcgagga

SEQ ID NO: 277363 - DNA, 55 bp, Artificial
  Synthetic oligonucleotide
gcccaaccaccgtcttcctaattgcgtgagttacttaggtgaaaatcatgaactt

SEQ ID NO: 277364 - DNA, 60 bp, Artificial
  Synthetic oligonucleotide
tactgcagggatctagttctggtatacaaagacagccaggaagattccacttcttcacgg

SEQ ID NO: 277365 - DNA, 55 bp, Artificial
  Synthetic oligonucleotide
gcgaagtgattaactcaaataacacagagtaaacgactttcggtaggccacagcg

SEQ ID NO: 277366 - DNA, 55 bp, Artificial
  Synthetic oligonucleotide
ctccccagagaggcttcggtatgttcacatgtgacaacttccctcagagactacc

SEQ ID NO: 277367 - DNA, 55 bp, Artificial
  Synthetic oligonucleotide
cgtttgtagacatgcgggtgggtggggaccatgacattacgtcaggttaacgaag

SEQ ID NO: 277368 - DNA, 54 bp, Artificial
  Synthetic oligonucleotide
cggtactaaacagaagtcttgttgtcctcacctccgaggacaaaattcctgaac

SEQ ID NO: 277369 - DNA, 54 bp, Artificial
  Synthetic oligonucleotide
gctacaaacttgctcaagtcaagcggaacttcggaactacgagttgcaagcacc

SEQ ID NO: 277370 - DNA, 54 bp, Artificial
  Synthetic oligonucleotide
ttaggtgaaaatcatgaacttagctgattacatggaatgtttggcctattgaag

SEQ ID NO: 277371 - DNA, 54 bp, Artificial
  Synthetic oligonucleotide
aatcttcttcggggaacacactccgtgggcgtggacgcagtcaagacgccagat

SEQ ID NO: 277372 - DNA, 54 bp, Artificial
  Synthetic oligonucleotide
aaagccttgcctgcacccgtgctccgcttgccccatgcaccccgtgaagaaaca

SEQ ID NO: 277373 - DNA, 54 bp, Artificial
  Synthetic oligonucleotide
gaggtgtgccgtccatcttggttcgtactgggaagatatcttgtcaggcagtag

SEQ ID NO: 277374 - DNA, 49 bp, Artificial
  Synthetic oligonucleotide
agtaggaaacgggttaacgacaaacgttcgctttggaaggacacggtag

SEQ ID NO: 277375 - DNA, 58 bp, Artificial
  Synthetic oligonucleotide
ccatctacaagataggagaagtatcaaaaagtggggctctagtgatgttctttattta

SEQ ID NO: 277376 - DNA, 54 bp, Artificial
  Synthetic oligonucleotide
agttctcccaaaagccttgcctgcacccgtgctccgcttgccccatgcaccccg

SEQ ID NO: 277377 - DNA, 54 bp, Artificial
  Synthetic oligonucleotide
tcgatttgcagctcgtgtgcggtaacttgctgcgacaactgctctgcccgagct

SEQ ID NO: 277378 - DNA, 54 bp, Artificial
  Synthetic oligonucleotide
tcgacttgttggtgcccgacctctgcgagattgccggcggatccatgcgtgaac

SEQ ID NO: 277379 - DNA, 54 bp, Artificial
  Synthetic oligonucleotide
ctcgagtcccctccacgatcaactacgaagctcctgagtaacggcagtcaggac

SEQ ID NO: 277380 - DNA, 54 bp, Artificial
  Synthetic oligonucleotide
tcaacggtcgaatcttcttcggggaacacactccgtgggcgtggacgcagtcaa

SEQ ID NO: 277381 - DNA, 54 bp, Artificial
  Synthetic oligonucleotide
ctgcagagagggtcgagttacaaagggctgggccgtaggaacttcacaacttcg

SEQ ID NO: 277382 - DNA, 53 bp, Artificial
  Synthetic oligonucleotide
aacgcaagctctctagcttgcgatgatcttctctcccatctacaagataggag

SEQ ID NO: 277383 - DNA, 53 bp, Artificial
  Synthetic oligonucleotide
cacagtgagagtctcgacaagaggagtgggcatgccaggctcggcaggaatcg

SEQ ID NO: 277384 - DNA, 53 bp, Artificial
  Synthetic oligonucleotide
gcatccagctaccgccgtcaactcgctttgcgcctcctttgtcgtcgagagaa

SEQ ID NO: 277385 - DNA, 53 bp, Artificial
  Synthetic oligonucleotide
cctctagtgggaaggtaccttaggtacctcctcctccgattagaacgcaacag

SEQ ID NO: 277386 - DNA, 60 bp, Artificial
  Synthetic oligonucleotide
ccacgtatcgagtagcaagactatagagagaaggtctcttagacatgatggtaacatcat

SEQ ID NO: 277387 - DNA, 53 bp, Artificial
  Synthetic oligonucleotide
gggaatgagccacgggggcctcatctgagtcggaacgtttgaggagtgatgcg

SEQ ID NO: 277388 - DNA, 53 bp, Artificial
  Synthetic oligonucleotide
agtacgcggagcgtactgaggcttcgccttaggccggccctcgtgcttgcttc

SEQ ID NO: 277389 - DNA, 52 bp, Artificial
  Synthetic oligonucleotide
tttggacccaggaagctcgatcccagtcatgtcatttcaccaagcacgcgtc

SEQ ID NO: 277390 - DNA, 52 bp, Artificial
  Synthetic oligonucleotide
cggaacctttgcattgcacctgccgattggacttttcgtccggggtgggtgt

SEQ ID NO: 277391 - DNA, 52 bp, Artificial
  Synthetic oligonucleotide
gtgcacacaatacaggacatggttttttatcgtatctcacgtaatgtttatc

SEQ ID NO: 277392 - DNA, 52 bp, Artificial
  Synthetic oligonucleotide
tgcacccgtgctccgcttgccccatgcaccccgtgaagaaacagtataagcc

SEQ ID NO: 277393 - DNA, 52 bp, Artificial
  Synthetic oligonucleotide
ggctagcgctaaaaactatgcggatacaggatttgcacctatgtcattcgga

SEQ ID NO: 277394 - DNA, 52 bp, Artificial
  Synthetic oligonucleotide
cactaattttacagcgacccgaggaataggggtcgctaattagtgttgagga

SEQ ID NO: 277395 - DNA, 52 bp, Artificial
  Synthetic oligonucleotide
tcacaacttcgttgtgggtttactattcgttcaggctaaattcttaggctag

SEQ ID NO: 277396 - DNA, 51 bp, Artificial
  Synthetic oligonucleotide
gacgtagccgttgacattaaaaacttaaagaggtctatcactcttatgata

SEQ ID NO: 277397 - DNA, 54 bp, Artificial
  Synthetic oligonucleotide
ccacaacttcgttgtgggtttacagctctctctttgtatccaaaattctaaccc

SEQ ID NO: 277398 - DNA, 51 bp, Artificial
  Synthetic oligonucleotide
tatccgttgcataaaacacccgctagttcaggtactcgttcctggatgtgt

SEQ ID NO: 277399 - DNA, 51 bp, Artificial
  Synthetic oligonucleotide
tatgtatggacaggtattgacctgtcatagatgtatgtacgaagttgcata

SEQ ID NO: 277400 - DNA, 51 bp, Artificial
  Synthetic oligonucleotide
gtaccttaggtacctcctcctccgattagaacgcaatagccatttattata

SEQ ID NO: 277401 - DNA, 50 bp, Artificial
  Synthetic oligonucleotide
agggggggtcgagtggaaagtagagtattatccggacctaatactcgaag

SEQ ID NO: 277402 - DNA, 50 bp, Artificial
  Synthetic oligonucleotide
tggtactagcctaggtcaccaaggtgtacgaaccaggatgctaacccgac

SEQ ID NO: 277403 - DNA, 50 bp, Artificial
  Synthetic oligonucleotide
gtataagttgattggtaattctatatacggtttagcatctcagggtattg

SEQ ID NO: 277404 - DNA, 50 bp, Artificial
  Synthetic oligonucleotide
aacgagtcatttatgtatggtattgacgacataccggaatgtgaacaacg

SEQ ID NO: 277405 - DNA, 50 bp, Artificial
  Synthetic oligonucleotide
ggtggacgtcactgagatagattcaaaacttagtaggttaatgaagtttt

SEQ ID NO: 277406 - DNA, 60 bp, Artificial
  Synthetic oligonucleotide
catgcctacttccccaagagaggtgtattcactgcttgacgagccttatgaccaaaatta

SEQ ID NO: 277407 - DNA, 56 bp, Artificial
  Synthetic oligonucleotide
tacttcaagttgtgcgcttaacatacaaggtggggaattggctagaagtttacttc

SEQ ID NO: 277408 - DNA, 57 bp, Artificial
  Synthetic oligonucleotide
catcagtgaataccttacggtactaaacagaagtcttgttgtcctcacttccgagga

SEQ ID NO: 277409 - DNA, 56 bp, Artificial
  Synthetic oligonucleotide
ctagcttcgagggaccccacgaatacggcccacacacacgaagtgtgtgtggggta

SEQ ID NO: 277410 - DNA, 60 bp, Artificial
  Synthetic oligonucleotide
tagacatgatggtaacatcatgcctagatacgtgaagggctagaaacgttcgactcgtga

SEQ ID NO: 277411 - DNA, 55 bp, Artificial
  Synthetic oligonucleotide
gcctaggtcaccaaggtgtacgaaccaggatgctaacccgacccttgctcctcgg

SEQ ID NO: 277412 - DNA, 60 bp, Artificial
  Synthetic oligonucleotide
gcgcgacaaaggggatgccaaggaatactgaagacttggtagaagcctcatgaagaatga

SEQ ID NO: 277413 - DNA, 58 bp, Artificial
  Synthetic oligonucleotide
gcagtactgcagagagggtcgagttacaggacaaggggttgggccggaggacttcaca

SEQ ID NO: 277414 - DNA, 60 bp, Artificial
  Synthetic oligonucleotide
gatgtgcgtactgtagtctttggatctgccccaactctgtcaagagccgcataagcggga

SEQ ID NO: 277415 - DNA, 60 bp, Artificial
  Synthetic oligonucleotide
gatgaactaattatgtacgcagatgacggaattctttgtcgtcaagacccatccactccc

SEQ ID NO: 277416 - DNA, 59 bp, Artificial
  Synthetic oligonucleotide
gatccaaagactacagtgggacattactccagacaggtccgggagccaagtctagtgaa

SEQ ID NO: 277417 - DNA, 59 bp, Artificial
  Synthetic oligonucleotide
ggaggacttcacaacttcgttgtgggatcacaagtcaacagctctttctttgtatccaa

SEQ ID NO: 277418 - DNA, 60 bp, Artificial
  Synthetic oligonucleotide
gacattgctacaaatggagtaccacaaggtgcatcaacatcttgtggtcttgccacgtac

SEQ ID NO: 277419 - DNA, 52 bp, Artificial
  Synthetic oligonucleotide
gacattacgtcaggttaacgaagtatttattaaatacttcgggtattttgat

SEQ ID NO: 277420 - DNA, 52 bp, Artificial
  Synthetic oligonucleotide
gggtggcaacccctgaggggtatactaccgaaaaagagacaataggtgtaag

SEQ ID NO: 277421 - DNA, 57 bp, Artificial
  Synthetic oligonucleotide
gaagcttgttgtactttctaatcaggcaagggttagagcaaacccctggacagataa

SEQ ID NO: 277422 - DNA, 60 bp, Artificial
  Synthetic oligonucleotide
ggcccataatcatttatcgtacaccaaggcactgtatcatacatagtactacttatagat

SEQ ID NO: 277423 - DNA, 52 bp, Artificial
  Synthetic oligonucleotide
gaaccttcctaccccttagcacttttatagtttgggcgtgcctcccaaacta

SEQ ID NO: 277424 - DNA, 58 bp, Artificial
  Synthetic oligonucleotide
cttcacaacttcgttgtgggatcacaagccaacagctctttctttgtatccaaaattc

SEQ ID NO: 277425 - DNA, 57 bp, Artificial
  Synthetic oligonucleotide
ctggttattgcagggctttaatgggtgagtgtcttaacaatgtggataagttaggtg

SEQ ID NO: 277426 - DNA, 53 bp, Artificial
  Synthetic oligonucleotide
gggacaagtcccttagagggggacctggtactagcctaggtcaccaaggtgta

SEQ ID NO: 277427 - DNA, 55 bp, Artificial
  Synthetic oligonucleotide
gggacattactccagacaggtccgggagccaagtctagtgaaacctccaacggtc

SEQ ID NO: 277428 - DNA, 55 bp, Artificial
  Synthetic oligonucleotide
ctgactcggctttattgggtgagtatatgaaggatcgtaaaaacccaaagattag

SEQ ID NO: 277429 - DNA, 58 bp, Artificial
  Synthetic oligonucleotide
gggaccctatcgttctgtggcaccatgactccgataatacataggtcaaccccttcga

SEQ ID NO: 277430 - DNA, 60 bp, Artificial
  Synthetic oligonucleotide
gggcagatccaaagactacagtacgcacatctccagacagatccgggagcgaagcctact

SEQ ID NO: 277431 - DNA, 60 bp, Artificial
  Synthetic oligonucleotide
cgtttagacttgttcaacgcaagctctctagcttgcgatgatcttctctcccatctacaa

SEQ ID NO: 277432 - DNA, 59 bp, Artificial
  Synthetic oligonucleotide
ctccctgcaatactgcagggatctagttttggtatacaaagacggccaggaagattcca

SEQ ID NO: 277433 - DNA, 55 bp, Artificial
  Synthetic oligonucleotide
ctatgggttgtgaaatgactgttaagagtggggttatggtaccgtttgtcaaaga

SEQ ID NO: 277434 - DNA, 60 bp, Artificial
  Synthetic oligonucleotide
tggggcatgcgcgcgacaaaggggatgccaaggaatactgaagacttggtagaagcctca

SEQ ID NO: 277435 - DNA, 60 bp, Artificial
  Synthetic oligonucleotide
tttaccatactcaattctgcccggatatgtatggacaggtattgacctgtcatagatgta

SEQ ID NO: 277436 - DNA, 58 bp, Artificial
  Synthetic oligonucleotide
aggcatttgatcaaatgcccaaccaccgtcttcctaattgcgtgagttacttaggtga

SEQ ID NO: 277437 - DNA, 60 bp, Artificial
  Synthetic oligonucleotide
ttgtgataatctagttgataacgatcttgaggtatccttgactaatctgatggcgttgtt

SEQ ID NO: 277438 - DNA, 51 bp, Artificial
  Synthetic oligonucleotide
agccttagtaagttaggagtgccgttaacctctacggggattagtaagtct

SEQ ID NO: 277439 - DNA, 55 bp, Artificial
  Synthetic oligonucleotide
agcctaaaaaaacttgaagcttgtagtactttctaatcaggcaagggttagagca

SEQ ID NO: 277440 - DNA, 60 bp, Artificial
  Synthetic oligonucleotide
agataatggtttcttttctcgtcgatcatttattagtatacatagcagctcactcaaata

SEQ ID NO: 277441 - DNA, 56 bp, Artificial
  Synthetic oligonucleotide
agagccaagcgattctagactcctgtaccgtaagggaagttgggtcaatatccgct

SEQ ID NO: 277442 - DNA, 58 bp, Artificial
  Synthetic oligonucleotide
cggtagatatatcgataacgtttgtagacatgcgggtgggtggggaccatgacattac

SEQ ID NO: 277443 - DNA, 53 bp, Artificial
  Synthetic oligonucleotide
agagagggtcgagttacaggacaaggggttgggccggaggacttcacaactac

SEQ ID NO: 277444 - DNA, 60 bp, Artificial
  Synthetic oligonucleotide
agaagcctcatgaagaatgaggccttccaagtccaagcgttcaaccatgtgtgcaaacac

SEQ ID NO: 277445 - DNA, 58 bp, Artificial
  Synthetic oligonucleotide
acttatagatcattgactaacaacacgacgcttattgtcgtactctatactaaaactc

SEQ ID NO: 277446 - DNA, 59 bp, Artificial
  Synthetic oligonucleotide
acggctaaatcagtattagaaccaacgaagtgccttgctatattaagtcagctatccaa

SEQ ID NO: 277447 - DNA, 59 bp, Artificial
  Synthetic oligonucleotide
aatgcttgatcggtgtgtggtactctgttagagtctgtaccttgaggttcgataactcc

SEQ ID NO: 277448 - DNA, 60 bp, Artificial
  Synthetic oligonucleotide
tgtggaacgttcttctagtctgatacagaattcctgaacaagataaccaacatgcctact

SEQ ID NO: 277449 - DNA, 60 bp, Artificial
  Synthetic oligonucleotide
ttcagctctcctcttgacaggtaatagtaggcttcgctcccggatctgtctggagatgtg

SEQ ID NO: 277450 - DNA, 55 bp, Artificial
  Synthetic oligonucleotide
acacttagacagacaattcttagttgaagagcttcggcgtaggattaccggtccg

SEQ ID NO: 277451 - DNA, 56 bp, Artificial
  Synthetic oligonucleotide
acaaaggcctttgggtgtacctacggtcccatgaagagtttatctccacatgtgga

SEQ ID NO: 277452 - DNA, 60 bp, Artificial
  Synthetic oligonucleotide
aagtcatgtacatattcgtgatacagaattattagccccacctggtagcaaatcattagc

SEQ ID NO: 277453 - DNA, 58 bp, Artificial
  Synthetic oligonucleotide
ggtaacatcatgcctagatacgtgaagggctagaaacgttcgactcgtgagggcccac

SEQ ID NO: 277454 - DNA, 54 bp, Artificial
  Synthetic oligonucleotide
tttattcacctattcggcctaggataggaccgacgcaagtcccttagaggggga

SEQ ID NO: 277455 - DNA, 56 bp, Artificial
  Synthetic oligonucleotide
aaactctcaaagactagtatttccaatttaaaatgtcgtaatgctatagcacgaac

SEQ ID NO: 277456 - DNA, 57 bp, Artificial
  Synthetic oligonucleotide
ttgctaatctaaaaatacgtattaaattatgtcatagatttagtagtcatggttgtt

SEQ ID NO: 277457 - DNA, 59 bp, Artificial
  Synthetic oligonucleotide
attatgtacgcagatgacggaattctttgtcgtcaagacccatccactcccgacttctc

SEQ ID NO: 277458 - DNA, 60 bp, Artificial
  Synthetic oligonucleotide
atgtgtctaattatataatgtcgtatgtatctgcttaccgaggaggtagaaacgagtcat

SEQ ID NO: 277459 - DNA, 57 bp, Artificial
  Synthetic oligonucleotide
aaactgtagaatggagagtaggggaagatccaaagactacagtgggacattactcca

SEQ ID NO: 277460 - DNA, 59 bp, Artificial
  Synthetic oligonucleotide
tctgtaggaagtagccctcatactggttgggttctagaaaggatgcaaatcctctagtg

SEQ ID NO: 277461 - DNA, 57 bp, Artificial
  Synthetic oligonucleotide
atccactcccgacttctctgtcgaggaggcgggagttgttcaagaaccagccaaatc

SEQ ID NO: 277462 - DNA, 51 bp, Artificial
  Synthetic oligonucleotide
agttgaaagggtataaagaggaccccaattttatttcacatttaccaattc

SEQ ID NO: 277463 - DNA, 56 bp, Artificial
  Synthetic oligonucleotide
agtagccctcatactggttgggttctagaaaggatgcaaatcctctagtgggaagg

SEQ ID NO: 277464 - DNA, 60 bp, Artificial
  Synthetic oligonucleotide
cggaccaaatgggttcgtcaaatacatgatgaatctaatggggcatgcgcgcgacaaagg

SEQ ID NO: 277465 - DNA, 56 bp, Artificial
  Synthetic oligonucleotide
tgcctagatacgtgaagggctagaaacgttcgactcgtgagggcccaccattgttt

SEQ ID NO: 277466 - DNA, 56 bp, Artificial
  Synthetic oligonucleotide
aatctacaagagccaagcgattctagactcctgtaccgtaagggaagttgggtcaa

SEQ ID NO: 277467 - DNA, 56 bp, Artificial
  Synthetic oligonucleotide
cgtaattataatataatctcctggcaccttcactcgatttgaaggtgccggacccc

SEQ ID NO: 277468 - DNA, 57 bp, Artificial
  Synthetic oligonucleotide
ttgggtgtacctacggtcccatgaagagtttatctccacatgtggaacgttcttcta

SEQ ID NO: 277469 - DNA, 55 bp, Artificial
  Synthetic oligonucleotide
gggtataaagaggaccccaattttatttcacatttaccaattcttatggatgcaa

SEQ ID NO: 277470 - DNA, 57 bp, Artificial
  Synthetic oligonucleotide
cagtcatcgaatctgatgaccgagctttggagataaaaaaggaggacggtaagggtc

SEQ ID NO: 277471 - DNA, 51 bp, Artificial
  Synthetic oligonucleotide
cattacccccctccttggcgggccccccatctttcccccgccctgcagtac

SEQ ID NO: 277472 - DNA, 56 bp, Artificial
  Synthetic oligonucleotide
aaggaaagctctggtcctactcgatcagtgcccttcccctccatagtgcgcacgcg

SEQ ID NO: 277473 - DNA, 56 bp, Artificial
  Synthetic oligonucleotide
tgatgtctataaagtgttgagtatttcggttaaacgtgtgatgtatataatgatgc

SEQ ID NO: 277474 - DNA, 55 bp, Artificial
  Synthetic oligonucleotide
aagtaaaggattatcctagacttcgtggtgcaacccgtaatggttccaagatgga

SEQ ID NO: 277475 - DNA, 56 bp, Artificial
  Synthetic oligonucleotide
gtactgcagagagggtcgagttacaaaacaagggctggcccggaggtacttcacaa

SEQ ID NO: 277476 - DNA, 55 bp, Artificial
  Synthetic oligonucleotide
ggagtgccgttaacctctacggggattagtaagtcttatgtattcctagaatgac

SEQ ID NO: 277477 - DNA, 55 bp, Artificial
  Synthetic oligonucleotide
ggacattcacttgctgtcacgaaatcacctcagaccgaaccggaagcaagccacc

SEQ ID NO: 277478 - DNA, 55 bp, Artificial
  Synthetic oligonucleotide
gctggtcctgaaactagcattagcggcgatccgtctgtcaccaattggactccag

SEQ ID NO: 277479 - DNA, 55 bp, Artificial
  Synthetic oligonucleotide
tttagaagtggggggactctggtcatttatcacaataatcaggggctgaggctta

SEQ ID NO: 277480 - DNA, 55 bp, Artificial
  Synthetic oligonucleotide
gcggctagtcgtctctccatgtcaacaatccctagaccagacagtagtgcatcgc

SEQ ID NO: 277481 - DNA, 55 bp, Artificial
  Synthetic oligonucleotide
gcgatctgcctgagttctcatttgtgccgtctgagcttcaggtgtttgcgtaagg

SEQ ID NO: 277482 - DNA, 55 bp, Artificial
  Synthetic oligonucleotide
ggcccaccattgttttgcctatatgtccattgcccgtatgagagaatgctacgcg

SEQ ID NO: 277483 - DNA, 55 bp, Artificial
  Synthetic oligonucleotide
ttccaatttaaaatgtcgtaatgctatagcacgaacggtacctcgtacagatgag

SEQ ID NO: 277484 - DNA, 55 bp, Artificial
  Synthetic oligonucleotide
gggctagaaacgttcgactcgtgagggcccaccattgttttgcctatatgtccac

SEQ ID NO: 277485 - DNA, 55 bp, Artificial
  Synthetic oligonucleotide
gggtctgagcgtaaatgaactccgaatctgttacccatcttcgtctgaacttgtg

SEQ ID NO: 277486 - DNA, 60 bp, Artificial
  Synthetic oligonucleotide
cgactcgtgagggcccaccattgttttgcctatatgtccattgcccgtatgagagaatgc

SEQ ID NO: 277487 - DNA, 53 bp, Artificial
  Synthetic oligonucleotide
ggtcgagttacaaaacaagggctgggccggaggaactccacaacttcgttgtg

SEQ ID NO: 277488 - DNA, 55 bp, Artificial
  Synthetic oligonucleotide
ggtcgatgacgggtctacgagttagggtacgctgcccgaggggacagacagacca

SEQ ID NO: 277489 - DNA, 55 bp, Artificial
  Synthetic oligonucleotide
tgtaccggtgtctagctgcgtaaggcatgtcagccaacgctatgaagtgaagtcg

SEQ ID NO: 277490 - DNA, 53 bp, Artificial
  Synthetic oligonucleotide
gtacgaaccaggatgctaacccgacccttgctcctcggtgtcatttttagggg

SEQ ID NO: 277491 - DNA, 55 bp, Artificial
  Synthetic oligonucleotide
gtaggttgacgcttggggcctcgagggtacactacactgatgaagcgattggacc

SEQ ID NO: 277492 - DNA, 55 bp, Artificial
  Synthetic oligonucleotide
gtgcctcgctctgtccttgaacatgcaaaggcctcgcgccgtcacactcgggatg

SEQ ID NO: 277493 - DNA, 55 bp, Artificial
  Synthetic oligonucleotide
tgatacagaattcctgaacaagataaccaacacgcctacttccctaagagaggtg

SEQ ID NO: 277494 - DNA, 55 bp, Artificial
  Synthetic oligonucleotide
tctaatcaggcaagggttagagcaaacccctggacagataaatttgagcttagcc

SEQ ID NO: 277495 - DNA, 55 bp, Artificial
  Synthetic oligonucleotide
tcgtatgtatctgcttaccgaggaggtagaaacgagtcatttatgtatggtattg

SEQ ID NO: 277496 - DNA, 53 bp, Artificial
  Synthetic oligonucleotide
tagagctaaggattttcatccggcggtacttaatatcgtacggttttcccctc

SEQ ID NO: 277497 - DNA, 56 bp, Artificial
  Synthetic oligonucleotide
ttgtcctaagtcttactatcacggtcatactaacccttactataacggtcatacta

SEQ ID NO: 277498 - DNA, 56 bp, Artificial
  Synthetic oligonucleotide
ggagttattcgtcaacaagagttagctgcgggtatgaacgacagtagaacttactt

SEQ ID NO: 277499 - DNA, 57 bp, Artificial
  Synthetic oligonucleotide
gatagtctacctttaccgattagtaacctgatatccagagggactcagaccaactag

SEQ ID NO: 277500 - DNA, 58 bp, Artificial
  Synthetic oligonucleotide
gaaatgcgttgtgggtaccgctgggaagaatggaggtagttgaagtgtcaccatagta

SEQ ID NO: 277501 - DNA, 56 bp, Artificial
  Synthetic oligonucleotide
ctaggtttcgctctaaccgaagctctaggtctatttgccttaatgatggccctaat

SEQ ID NO: 277502 - DNA, 60 bp, Artificial
  Synthetic oligonucleotide
cgaactgcttgacaggaatgaagagccctcagaagagtaagattccaactacacatatat

SEQ ID NO: 277503 - DNA, 60 bp, Artificial
  Synthetic oligonucleotide
aacattcccatcgtactgcttgacaggaatgaattgcactcagaagagttagaatccatt

SEQ ID NO: 277504 - DNA, 53 bp, Artificial
  Synthetic oligonucleotide
accccatccggggtgaatcgtccgcaatcggacaatttccataccctcggtag

SEQ ID NO: 277505 - DNA, 55 bp, Artificial
  Synthetic oligonucleotide
acctaaaaccctggtgatggagatccgacattggtgaaagtgtagtgaccctaaa

SEQ ID NO: 277506 - DNA, 52 bp, Artificial
  Synthetic oligonucleotide
acctttaatagaggttgaaatgcgttgtgggtaccgctgggaaaagtggagg

SEQ ID NO: 277507 - DNA, 54 bp, Artificial
  Synthetic oligonucleotide
acggtctattgatcccctcggaggtcacggtactaaatggtactgaagaacctc

SEQ ID NO: 277508 - DNA, 56 bp, Artificial
  Synthetic oligonucleotide
tctactgctgtaaatataagggtatgataattataagtaaagggacctgtacggac

SEQ ID NO: 277509 - DNA, 57 bp, Artificial
  Synthetic oligonucleotide
actagtcttaactaatctcaactaggctagcttaatccgaacatattcaaactagtc

SEQ ID NO: 277510 - DNA, 60 bp, Artificial
  Synthetic oligonucleotide
agaatctctacccacaatccgagcgaatgaagcaatctagactttacttatttcagtcta

SEQ ID NO: 277511 - DNA, 58 bp, Artificial
  Synthetic oligonucleotide
agatgggtaagccaatcttctggaagtaatctgcactatgaaggtttgttcccaatag

SEQ ID NO: 277512 - DNA, 53 bp, Artificial
  Synthetic oligonucleotide
agtcactggtaggaaggtgaacgctgtaaggtatacccttaataggggttgaa

SEQ ID NO: 277513 - DNA, 53 bp, Artificial
  Synthetic oligonucleotide
caaccaagaccatgtaactaaacatagggtataaaagtggagggtagcgtaaa

SEQ ID NO: 277514 - DNA, 57 bp, Artificial
  Synthetic oligonucleotide
tgctagctacatcagaaggtgttaaggaaatgagcaggctcaaacctgttcgctagg

SEQ ID NO: 277515 - DNA, 56 bp, Artificial
  Synthetic oligonucleotide
tagccaaccaggtctggaagtggggtttccgggaaaagtagatctgctagctacat

SEQ ID NO: 277516 - DNA, 56 bp, Artificial
  Synthetic oligonucleotide
tccattagttgatctgctatacctttaaggcttacattatatggtatagtcataac

SEQ ID NO: 277517 - DNA, 55 bp, Artificial
  Synthetic oligonucleotide
ggtaaagcatataatgcaccttaggatggttcaccctgaggattaggtagatggt

SEQ ID NO: 277518 - DNA, 53 bp, Artificial
  Synthetic oligonucleotide
acgctgtaaggtatacccttaataggggttgaaatgcgttgtgggtaccgctg

SEQ ID NO: 277519 - DNA, 60 bp, Artificial
  Synthetic oligonucleotide
tagtctatattatattctaattactgatagactctgcttaggaatgaagctgaccattaa

SEQ ID NO: 277520 - DNA, 55 bp, Artificial
  Synthetic oligonucleotide
ctggaagtaatctgcactatgaaggtttgttcccaatagtgtatgttgctagcca

SEQ ID NO: 277521 - DNA, 55 bp, Artificial
  Synthetic oligonucleotide
gtaatctgcactatgaaggtttgttcccaatagtgtatgttgctagccaaccagg

SEQ ID NO: 277522 - DNA, 55 bp, Artificial
  Synthetic oligonucleotide
gtattgttaggagatgacttaactttacatagagatgggtaagccaatcttctgg

SEQ ID NO: 277523 - DNA, 55 bp, Artificial
  Synthetic oligonucleotide
tggatagggttaggtgacaggtgagagaataagttccagttctcaatgatcctgg

SEQ ID NO: 277524 - DNA, 55 bp, Artificial
  Synthetic oligonucleotide
aattactgatagactctgcttaggaatgaagctgaccattaagtcattggatgga

SEQ ID NO: 277525 - DNA, 54 bp, Artificial
  Synthetic oligonucleotide
ccatagtagcaactaggtagcgaaattccaagtctacatagagatgggtaagcc

SEQ ID NO: 277526 - DNA, 54 bp, Artificial
  Synthetic oligonucleotide
taaatctatccgatagcggatggattcaccctaatgggtaaatctaccagcgac

SEQ ID NO: 277527 - DNA, 52 bp, Artificial
  Synthetic oligonucleotide
taatctatgtgcctaatcagtatggctaactggtaccgttaaaggttaaggt

SEQ ID NO: 277528 - DNA, 51 bp, Artificial
  Synthetic oligonucleotide
ccctcagaagagtaagattccaactacacatatattgagatacaaaggcta

SEQ ID NO: 277529 - DNA, 59 bp, Artificial
  Synthetic oligonucleotide
gtaagccaatcttctggaagtaatctgcactatgaaggtttgttcccaatagtgtatgt

SEQ ID NO: 277530 - DNA, 60 bp, Artificial
  Synthetic oligonucleotide
ggttgtggatgaacctaagtaagacaggtgtagtcaagagcatctcgctatagtctatat

SEQ ID NO: 277531 - DNA, 59 bp, Artificial
  Synthetic oligonucleotide
ggttgaagtgtcaccatagtattgttaggagatgacttaactttacatagagatgggta

SEQ ID NO: 277532 - DNA, 59 bp, Artificial
  Synthetic oligonucleotide
ggttcactggtgtaattctggcaaacgcttctatcgacttagctctacacgatacttat

SEQ ID NO: 277533 - DNA, 60 bp, Artificial
  Synthetic oligonucleotide
ggtctagcccggattcaggcactgcgttgcctaaatctatccgattacggatggattcac

SEQ ID NO: 277534 - DNA, 57 bp, Artificial
  Synthetic oligonucleotide
ggatggactccaacccttaaatgggatcaggtaactggtgacctgaggagcaaccaa

SEQ ID NO: 277535 - DNA, 59 bp, Artificial
  Synthetic oligonucleotide
gaggtagttcaacacgaatacgtgctgcatttctactgtttctgtatactctattcggt

SEQ ID NO: 277536 - DNA, 56 bp, Artificial
  Synthetic oligonucleotide
cttagtgctagatactcaatttggctatacaatcgagtaagatttggatcatggag

SEQ ID NO: 277537 - DNA, 56 bp, Artificial
  Synthetic oligonucleotide
ctgtgcaaaagaagtatactaaccaaactatactatgtcccctttcttgacagtag

SEQ ID NO: 277538 - DNA, 56 bp, Artificial
  Synthetic oligonucleotide
ggatatcatcccttctcttagcattccattatcctctattcaattctagtacatcc

SEQ ID NO: 277539 - DNA, 56 bp, Artificial
  Synthetic oligonucleotide
ccggcctaagtataacgtgagttatattaagtacatcactatatgctgaaacatcc

SEQ ID NO: 277540 - DNA, 52 bp, Artificial
  Synthetic oligonucleotide
ggaggccctttgtcctaaaattaaagacagtagcttaatcggtaaagtcgcc

SEQ ID NO: 277541 - DNA, 55 bp, Artificial
  Synthetic oligonucleotide
gccggagattctaactagatataaggaacgtgtaataagttgctgaaataggcta

SEQ ID NO: 277542 - DNA, 55 bp, Artificial
  Synthetic oligonucleotide
gcacatggactagtaagtcctgctctctttatactagtaggtggtgtactttatg

SEQ ID NO: 277543 - DNA, 55 bp, Artificial
  Synthetic oligonucleotide
ggggtttatctacttcttcgttcttctcctatactagaatatagacctacgactc

SEQ ID NO: 277544 - DNA, 55 bp, Artificial
  Synthetic oligonucleotide
gatttatcgtaacaggtgcagatgtgattcatgattgggctattcctgcactagg

SEQ ID NO: 277545 - DNA, 55 bp, Artificial
  Synthetic oligonucleotide
gggtgagagtagatatcatcaaatggtagaccaaactacaaggtagctattttgc

SEQ ID NO: 277546 - DNA, 60 bp, Artificial
  Synthetic oligonucleotide
aagtggcatacaatgttgaatcactcgaataactccagctagactaccaatagatacagt

SEQ ID NO: 277547 - DNA, 55 bp, Artificial
  Synthetic oligonucleotide
tatagcaagagcgagtagaataaatcctacgtggctaattgttgagaatgctagt

SEQ ID NO: 277548 - DNA, 55 bp, Artificial
  Synthetic oligonucleotide
tatgctccttttaaacctagtcgtctatatccttaccctaaccctgatctgccac

SEQ ID NO: 277549 - DNA, 55 bp, Artificial
  Synthetic oligonucleotide
ttactacaaatgtccagaatactattcgagatagaggtcggaattgatttccacg

SEQ ID NO: 277550 - DNA, 55 bp, Artificial
  Synthetic oligonucleotide
gaggtagttcaaaagggttaatagtaggaataccagcaggaggccattgtgaacc

SEQ ID NO: 277551 - DNA, 55 bp, Artificial
  Synthetic oligonucleotide
ctggcttatgcacaatatcaatttagtggttctatggcttattggctaggtacta

SEQ ID NO: 277552 - DNA, 55 bp, Artificial
  Synthetic oligonucleotide
ctacgattatgcttgctgccgctaaatacataggatcaggaatcgctacactagg

SEQ ID NO: 277553 - DNA, 55 bp, Artificial
  Synthetic oligonucleotide
cggtgtacgtgtttgtctcacgtacggattatatataaagagaggtgaaagactc

SEQ ID NO: 277554 - DNA, 55 bp, Artificial
  Synthetic oligonucleotide
cacggatagtgccacggtctcctttaattgaacgtgcaaatgcaccaatacttgg

SEQ ID NO: 277555 - DNA, 55 bp, Artificial
  Synthetic oligonucleotide
cactctatatttaacttgctattatattacaaagacgcaggcttaggcatcgctg

SEQ ID NO: 277556 - DNA, 52 bp, Artificial
  Synthetic oligonucleotide
cagtaaagtcttagatcttttagtagtacgtaccctcgcccttttctctagg

SEQ ID NO: 277557 - DNA, 60 bp, Artificial
  Synthetic oligonucleotide
acatctcgtagcgaataataacaaactgatagttcctagtcgttggagcatttcactaga

SEQ ID NO: 277558 - DNA, 54 bp, Artificial
  Synthetic oligonucleotide
tcatcacgaaacccatctctacgtggtgcactcttcacatatagaattctagga

SEQ ID NO: 277559 - DNA, 53 bp, Artificial
  Synthetic oligonucleotide
atgggttccgattttcttgtctcagatagactgtttattcacccttcacatat

SEQ ID NO: 277560 - DNA, 52 bp, Artificial
  Synthetic oligonucleotide
cgaggtcttgttgaactagtgggaccatatggtctaagaaacactctccaat

SEQ ID NO: 277561 - DNA, 50 bp, Artificial
  Synthetic oligonucleotide
ccttgatagctcaaatggttagagtgtagaattgaagcttctaaggtcct

SEQ ID NO: 277562 - DNA, 56 bp, Artificial
  Synthetic oligonucleotide
caaacctaagtggtaacataccttatggtttcactgtacctacttctgcaatagta

SEQ ID NO: 277563 - DNA, 60 bp, Artificial
  Synthetic oligonucleotide
tatcggattattgctaatgcagctcaccaagtagtcgttgaacgttttattctctacaat

SEQ ID NO: 277564 - DNA, 58 bp, Artificial
  Synthetic oligonucleotide
ccgacaaacggattttaaagctctagtggcttattctagtgtagctcatatgggtgta

SEQ ID NO: 277565 - DNA, 55 bp, Artificial
  Synthetic oligonucleotide
ctaccaaccattactggaaggaggtagttaccaaatcctcctaccatagcgggca

SEQ ID NO: 277566 - DNA, 56 bp, Artificial
  Synthetic oligonucleotide
gattgataccgagagataatactcatttctctcatagtggtttgacaacatgacac

SEQ ID NO: 277567 - DNA, 56 bp, Artificial
  Synthetic oligonucleotide
gaactaatatggacaataagccctgctctaatactaattgctatagcctttcctag

SEQ ID NO: 277568 - DNA, 60 bp, Artificial
  Synthetic oligonucleotide
cgctcaacacccagagctcgcgtcgtacggagactgtgacaatgctatctgcgtggtcga

SEQ ID NO: 277569 - DNA, 58 bp, Artificial
  Synthetic oligonucleotide
aatcgagaagaacagagggccgaatggatccccctggcggactccttgggatgactga

SEQ ID NO: 277570 - DNA, 55 bp, Artificial
  Synthetic oligonucleotide
gcggtcttggaagagtgctctactcctttgttcaatacataaaccaaccagtggt

SEQ ID NO: 277571 - DNA, 50 bp, Artificial
  Synthetic oligonucleotide
aataggcccttcactaccggacacaggcctttggtcgcgaacgtgacgga

SEQ ID NO: 277572 - DNA, 50 bp, Artificial
  Synthetic oligonucleotide
aatccgctctgccaccaacggccgctgcttctaccatgcttgcccctcaa

SEQ ID NO: 277573 - DNA, 50 bp, Artificial
  Synthetic oligonucleotide
aatgggaatgcagggtttacgtcgcagttgccgctccgccagtttcccac

SEQ ID NO: 277574 - DNA, 50 bp, Artificial
  Synthetic oligonucleotide
tggagcatcacaccttcatacgggcccagagaaagctcctggtcgtgtaa

SEQ ID NO: 277575 - DNA, 50 bp, Artificial
  Synthetic oligonucleotide
aatggggcggagcggcaagtgttacctcgacggtgagtcgtacccgctac

SEQ ID NO: 277576 - DNA, 50 bp, Artificial
  Synthetic oligonucleotide
tgcggcttggcgagttcccctcggtctccagctcgttcctgcttttgtcc

SEQ ID NO: 277577 - DNA, 50 bp, Artificial
  Synthetic oligonucleotide
aattcgaccttatcccttcggccctccacttgctatcgcgcccacgcctt

SEQ ID NO: 277578 - DNA, 50 bp, Artificial
  Synthetic oligonucleotide
acaaataacgatgaaccacggcctgctattacctctcgatgggtttccct

SEQ ID NO: 277579 - DNA, 50 bp, Artificial
  Synthetic oligonucleotide
acaaggcggggcctcaatagggaaaggcggggaggatcgttggcgcaaat

SEQ ID NO: 277580 - DNA, 50 bp, Artificial
  Synthetic oligonucleotide
acacgactcggaacgcacggttagaggcgtcggtgagcccaggagacaca

SEQ ID NO: 277581 - DNA, 55 bp, Artificial
  Synthetic oligonucleotide
cgcatgatgtggagttccatatgtgtccgaattccactaattactcgtacccacg

SEQ ID NO: 277582 - DNA, 50 bp, Artificial
  Synthetic oligonucleotide
tgcacccgttaacgagggcaaagactgatacgacccagggctgactagcc

SEQ ID NO: 277583 - DNA, 50 bp, Artificial
  Synthetic oligonucleotide
acactttgcatactgcccccggcacctgaccacccacacagatcaacccg

SEQ ID NO: 277584 - DNA, 50 bp, Artificial
  Synthetic oligonucleotide
acagagctttcctggcgttgagggtgggtgcgggtgtgagcgaggtaaga

SEQ ID NO: 277585 - DNA, 50 bp, Artificial
  Synthetic oligonucleotide
acagggtatggcctgcagaaggcagctacggcccttgagccgtcgagaac

SEQ ID NO: 277586 - DNA, 50 bp, Artificial
  Synthetic oligonucleotide
accagcagtcggtcgctttttcggggctgaggggcggctaaattggtccg

SEQ ID NO: 277587 - DNA, 50 bp, Artificial
  Synthetic oligonucleotide
acccacgggcctccagattcgttatctagaacgagtcacgcaacccggcc

SEQ ID NO: 277588 - DNA, 50 bp, Artificial
  Synthetic oligonucleotide
acccaggactcggaaggcgctcccgtttgcgtctcgggtgaggtacgtca

SEQ ID NO: 277589 - DNA, 50 bp, Artificial
  Synthetic oligonucleotide
acccccgctgcggtccctgcgatactcgcgaggacactcgatcccatcgt

SEQ ID NO: 277590 - DNA, 50 bp, Artificial
  Synthetic oligonucleotide
accccgcagccacacctcgtccagagacttctgtcaacgcaaggccagca

SEQ ID NO: 277591 - DNA, 50 bp, Artificial
  Synthetic oligonucleotide
tgagagagagcaaagcggattcggtacgactaggactggagatgaatccg

SEQ ID NO: 277592 - DNA, 55 bp, Artificial
  Synthetic oligonucleotide
cgccaacgtggtaccctgcacataatccgccgaagacgcccagcctatgagtcgg

SEQ ID NO: 277593 - DNA, 50 bp, Artificial
  Synthetic oligonucleotide
acccgacagcaactcaggacctgcagaagtacccacccctgcctccgaga

SEQ ID NO: 277594 - DNA, 50 bp, Artificial
  Synthetic oligonucleotide
acccgatgacctctacgcgcaccctcccagacgaaaggggcacagcaaca

SEQ ID NO: 277595 - DNA, 50 bp, Artificial
  Synthetic oligonucleotide
acccgctgcgttaaggtgatctgccgccacatgtgccaaaaggtcgggca

SEQ ID NO: 277596 - DNA, 50 bp, Artificial
  Synthetic oligonucleotide
acccgtttcgccggctctacttcgggccttccagtcctgtgaggaggatc

SEQ ID NO: 277597 - DNA, 50 bp, Artificial
  Synthetic oligonucleotide
aaacgcgtcccaccaccccttgtctcgcctctttcctccgaaacccctgg

SEQ ID NO: 277598 - DNA, 50 bp, Artificial
  Synthetic oligonucleotide
aaactgccaagcgagtcgcgggtcggtctcattgttgcccacatgcccta

SEQ ID NO: 277599 - DNA, 50 bp, Artificial
  Synthetic oligonucleotide
aaagccggccgacggtacagcgaggagcttccgtgtcgcctgagccttgc

SEQ ID NO: 277600 - DNA, 50 bp, Artificial
  Synthetic oligonucleotide
aaagcgtccctcacgtccttcactcgtctgcccaccacctccgcattacc

SEQ ID NO: 277601 - DNA, 50 bp, Artificial
  Synthetic oligonucleotide
aaagctgactggactgctcgtcgagacgcgacgcgccttgcttcctatcc

SEQ ID NO: 277602 - DNA, 50 bp, Artificial
  Synthetic oligonucleotide
aaagttgtcatccacccagcaagccgctcgacccaagggattctcggcgg

SEQ ID NO: 277603 - DNA, 55 bp, Artificial
  Synthetic oligonucleotide
cgccagacagctcaataattaacttacccctcagaaaagggaggaacatgggtct

SEQ ID NO: 277604 - DNA, 50 bp, Artificial
  Synthetic oligonucleotide
aacactggccccagcttggtactctctcgagaccctgtccgccctttcca

SEQ ID NO: 277605 - DNA, 50 bp, Artificial
  Synthetic oligonucleotide
aaccccgcagagttctctgacgtctgtctcccagactgaggacccggctt

SEQ ID NO: 277606 - DNA, 50 bp, Artificial
  Synthetic oligonucleotide
aaccctgggaacgacaccaatcttcggggtacgtcaccccttgcagcgca

SEQ ID NO: 277607 - DNA, 50 bp, Artificial
  Synthetic oligonucleotide
aaccggaactcgacacatggtgccgtctggttagccgaccgaccgaacgt

SEQ ID NO: 277608 - DNA, 50 bp, Artificial
  Synthetic oligonucleotide
aacgcacggttagaggcgtcggtgagcccaggagacacacagaccccacg

SEQ ID NO: 277609 - DNA, 50 bp, Artificial
  Synthetic oligonucleotide
aacgtgtaatcccggaagaagagcgagaggcgagtgactggtgggccgga

SEQ ID NO: 277610 - DNA, 50 bp, Artificial
  Synthetic oligonucleotide
aagaccatcaggggcactggtagtggcagcgccgcccaatcgaatccctt

SEQ ID NO: 277611 - DNA, 50 bp, Artificial
  Synthetic oligonucleotide
aagacccaaaccacgcagccgagccacctgtctctcgtagaagcgtgccc

SEQ ID NO: 277612 - DNA, 50 bp, Artificial
  Synthetic oligonucleotide
aagatcaagcccaatcccaggctgcaccgcaagtcacaggctacgctcct

SEQ ID NO: 277613 - DNA, 50 bp, Artificial
  Synthetic oligonucleotide
aagatcggaggcggagggtttagcgcgcaaggcgtgagtgctgtgaggga

SEQ ID NO: 277614 - DNA, 55 bp, Artificial
  Synthetic oligonucleotide
gcggtaagatcatcggggacaaatgtgacctgaaggcggaaccaatatacgccat

SEQ ID NO: 277615 - DNA, 50 bp, Artificial
  Synthetic oligonucleotide
aagcaaccatgaggctcccgctcatacgcacccccagtattctgctggcc

SEQ ID NO: 277616 - DNA, 50 bp, Artificial
  Synthetic oligonucleotide
aagcatgcgtcccgccagcatatggggaacgtatcttcggacggcctgct

SEQ ID NO: 277617 - DNA, 50 bp, Artificial
  Synthetic oligonucleotide
ttcctaacaagctactaggagtagttggaatgctaggatcgctactaatc

SEQ ID NO: 277618 - DNA, 50 bp, Artificial
  Synthetic oligonucleotide
aagcgcgttaacagctgccgggatcgggattttggcaacagtttggccgg

SEQ ID NO: 277619 - DNA, 50 bp, Artificial
  Synthetic oligonucleotide
aagcgttggagtggttgctaagagctgtgtggccgatgggctgtctcggg

SEQ ID NO: 277620 - DNA, 50 bp, Artificial
  Synthetic oligonucleotide
aagctccctgcgtgagctctccattgtgctgcctaagtctccttggcgga

SEQ ID NO: 277621 - DNA, 50 bp, Artificial
  Synthetic oligonucleotide
ttattggatttcttcttgtgggaggcagtaagttcatccgagcgtctctg

SEQ ID NO: 277622 - DNA, 50 bp, Artificial
  Synthetic oligonucleotide
aaggaccgaggatccagagaagcagaccattcgcccacgacgagagatcc

SEQ ID NO: 277623 - DNA, 50 bp, Artificial
  Synthetic oligonucleotide
aaggacgaacggcgtaaggcgtctgtcggggcgtgttaccggcagaatgt

SEQ ID NO: 277624 - DNA, 50 bp, Artificial
  Synthetic oligonucleotide
aaggagcgaagggcgcagggatctcgggactcaccgcccatccgggaata

SEQ ID NO: 277625 - DNA, 55 bp, Artificial
  Synthetic oligonucleotide
gcgggaatacggacaagttgctttccggatgcaaattcaggtgagcggccatacc

SEQ ID NO: 277626 - DNA, 50 bp, Artificial
  Synthetic oligonucleotide
aaggagtgcgcgtacgtacgttgtggcgtcaagggtggaatagccccacc

SEQ ID NO: 277627 - DNA, 50 bp, Artificial
  Synthetic oligonucleotide
aaggatcggtcggatggcggataagtcaaatcaccggatgtgtgggtggc

SEQ ID NO: 277628 - DNA, 50 bp, Artificial
  Synthetic oligonucleotide
aaggccagtgccggttggaactttagccgctgtctatgccgcagaaggct

SEQ ID NO: 277629 - DNA, 50 bp, Artificial
  Synthetic oligonucleotide
aagggaacgcagggcttctacgggctcgcccattcgctccgtgcctagga

SEQ ID NO: 277630 - DNA, 50 bp, Artificial
  Synthetic oligonucleotide
actgacgcgtcccgctaggtgtcgcaaggggccacagaagctttgacagg

SEQ ID NO: 277631 - DNA, 50 bp, Artificial
  Synthetic oligonucleotide
actgccacggctttggggtgaagcacttccgagctggccatatctgcgac

SEQ ID NO: 277632 - DNA, 50 bp, Artificial
  Synthetic oligonucleotide
actgggctgtgttgaccgcagctgccaatggcaagggattgcacctcgga

SEQ ID NO: 277633 - DNA, 50 bp, Artificial
  Synthetic oligonucleotide
actgtaaacgagctttcagtccccattccgccgcgcctagcgagggcaga

SEQ ID NO: 277634 - DNA, 50 bp, Artificial
  Synthetic oligonucleotide
acttcttgggccggcgtcattcgatccgacctctgtccggctcgcatcca

SEQ ID NO: 277635 - DNA, 50 bp, Artificial
  Synthetic oligonucleotide
agaaactggggagcgcggggtcggggaatggatgttaggctggcgcgtgt

SEQ ID NO: 277636 - DNA, 55 bp, Artificial
  Synthetic oligonucleotide
gcggagtgaacagcgcaatgtggttgtacccttggttagggacgatgtcgaggta

SEQ ID NO: 277637 - DNA, 50 bp, Artificial
  Synthetic oligonucleotide
agaacgctctcaatgtctgcccctgccgttgaggccaacttgcacaagga

SEQ ID NO: 277638 - DNA, 50 bp, Artificial
  Synthetic oligonucleotide
tcatatataagtggaaggacggaggatgtgtcacgatgacgcagtgaaac

SEQ ID NO: 277639 - DNA, 50 bp, Artificial
  Synthetic oligonucleotide
agacaacatcggaagtgactgccgtccacaaggaatctgtgagaggcgga

SEQ ID NO: 277640 - DNA, 50 bp, Artificial
  Synthetic oligonucleotide
agactcccccaccgtactcctggcacgccgctctagttcaacacacccga

SEQ ID NO: 277641 - DNA, 50 bp, Artificial
  Synthetic oligonucleotide
agactcggggtatgctggagctgggacggtaaacgggggttgcgaggaga

SEQ ID NO: 277642 - DNA, 50 bp, Artificial
  Synthetic oligonucleotide
agagacaggtggctcggctgcgtggtttgggtcttatgaatgggccgctc

SEQ ID NO: 277643 - DNA, 50 bp, Artificial
  Synthetic oligonucleotide
agagactttgtcagcgtcgcggtcccttcacggcagaccatcgtcttgcc

SEQ ID NO: 277644 - DNA, 50 bp, Artificial
  Synthetic oligonucleotide
agagaggtttgtggagtgcggtctcgctcttttgagggtcggtggcggca

SEQ ID NO: 277645 - DNA, 50 bp, Artificial
  Synthetic oligonucleotide
agagcgtggtgaacggaggggcatgccagttgcaattcggaagatggcgg

SEQ ID NO: 277646 - DNA, 50 bp, Artificial
  Synthetic oligonucleotide
agaggctggagcacaacgagtttgacgccgtacctccttgccaggcggac

SEQ ID NO: 277647 - DNA, 55 bp, Artificial
  Synthetic oligonucleotide
cgccgtgataatgtgcccaggggtttcgcagtccgttaggcatgacactgcctgg

SEQ ID NO: 277648 - DNA, 50 bp, Artificial
  Synthetic oligonucleotide
agagtttgcgcaatcttgtctacggccagaatcgtgggtcgggcggtcga

SEQ ID NO: 277649 - DNA, 50 bp, Artificial
  Synthetic oligonucleotide
agatcccgaagtccccatgcgaggctccagtccgaaaccggatttgctcc

SEQ ID NO: 277650 - DNA, 50 bp, Artificial
  Synthetic oligonucleotide
agattcacggccacgacctaatgccctgcctcggacctgcaccgtcattc

SEQ ID NO: 277651 - DNA, 50 bp, Artificial
  Synthetic oligonucleotide
agattgggatccgctcttgcaggctttagcacgttgcggggtctgagcga

SEQ ID NO: 277652 - DNA, 50 bp, Artificial
  Synthetic oligonucleotide
agcaagcaagatgcggaaggatcttcctcttccgtcccgccacaccaccc

SEQ ID NO: 277653 - DNA, 50 bp, Artificial
  Synthetic oligonucleotide
agcacgctcgagaatggtaacagccttgacccagcggatgctacgcgagg

SEQ ID NO: 277654 - DNA, 50 bp, Artificial
  Synthetic oligonucleotide
agccagcgcctaccgccggtcaacagccaatcaccggattctcaacacga

SEQ ID NO: 277655 - DNA, 50 bp, Artificial
  Synthetic oligonucleotide
agccaggtgccgtcacgggggaaagcttactgtctccgtcccgacatgct

SEQ ID NO: 277656 - DNA, 50 bp, Artificial
  Synthetic oligonucleotide
agcccatccgagaaacgcgtcccaccaccccttgtctcgcctctttcctc

SEQ ID NO: 277657 - DNA, 50 bp, Artificial
  Synthetic oligonucleotide
tagtgacgtcacactgtagaacccgcggccggccctttagtcggttgtct

SEQ ID NO: 277658 - DNA, 55 bp, Artificial
  Synthetic oligonucleotide
cgccgttgttagccgatcattggctgtagctcatcacgcctcacgcccattcacc

SEQ ID NO: 277659 - DNA, 50 bp, Artificial
  Synthetic oligonucleotide
agcccctgcctcgttggggcgaactttttggcccgtgtccgagtgctgcc

SEQ ID NO: 277660 - DNA, 50 bp, Artificial
  Synthetic oligonucleotide
agccgcgataagctcggggcggaagcatcattggtcgttgttccccgcat

SEQ ID NO: 277661 - DNA, 50 bp, Artificial
  Synthetic oligonucleotide
tcttgttgctcaacgtcctcctttatcgacgaaagttctcacctcatata

SEQ ID NO: 277662 - DNA, 50 bp, Artificial
  Synthetic oligonucleotide
tcttggcctcaaaggctacacggcgtactgggcatccgttgtcctccgtt

SEQ ID NO: 277663 - DNA, 50 bp, Artificial
  Synthetic oligonucleotide
accctcaagacgtctggggtccggagctctctgtttgcgcgggccttcac

SEQ ID NO: 277664 - DNA, 50 bp, Artificial
  Synthetic oligonucleotide
accgagaagcggggagctgggcgatgtccgttgtttaccttgcgacgtgg

SEQ ID NO: 277665 - DNA, 50 bp, Artificial
  Synthetic oligonucleotide
accgatgtctaccctcttatccgtcctactaacaaggtctccaaaggttt

SEQ ID NO: 277666 - DNA, 50 bp, Artificial
  Synthetic oligonucleotide
accgcaccggctcgtacaacacctgtccccggtacgcccgctacagatgt

SEQ ID NO: 277667 - DNA, 50 bp, Artificial
  Synthetic oligonucleotide
tctcgagcaaccccggtcatgctgactacgatgggcttgggaggttacgg

SEQ ID NO: 277668 - DNA, 50 bp, Artificial
  Synthetic oligonucleotide
acctgggccctgtacacttcgccaagcgccccctcagtaggcaaagcaag

SEQ ID NO: 277669 - DNA, 55 bp, Artificial
  Synthetic oligonucleotide
cgcctccacaattgacaacatagatcagacttccaatatcggtactagcctgtac

SEQ ID NO: 277670 - DNA, 50 bp, Artificial
  Synthetic oligonucleotide
acgacgtgttatcagtcgcgcccctgacgcaatgtccgctctcgctcagc

SEQ ID NO: 277671 - DNA, 50 bp, Artificial
  Synthetic oligonucleotide
acgagcgtcaacagacccggaaggagcacggacggtttcgatagcgaggc

SEQ ID NO: 277672 - DNA, 50 bp, Artificial
  Synthetic oligonucleotide
acgcgttagggtggggaaactcggagggaacggaggggtctttgcgtcaa

SEQ ID NO: 277673 - DNA, 50 bp, Artificial
  Synthetic oligonucleotide
acgctccaccagcagacctctcgatggggatctgtctcctttcgccacgc

SEQ ID NO: 277674 - DNA, 50 bp, Artificial
  Synthetic oligonucleotide
acggccccgttgatccttgatccggtgttccagtgcaagtcgggcgagac

SEQ ID NO: 277675 - DNA, 50 bp, Artificial
  Synthetic oligonucleotide
acggcgctatgcaaggctcaggcgacacggaagctcctcgctgtaccgtc

SEQ ID NO: 277676 - DNA, 50 bp, Artificial
  Synthetic oligonucleotide
acggcggtagcgatagccatgtcttggtgagggacggagccttggacacc

SEQ ID NO: 277677 - DNA, 50 bp, Artificial
  Synthetic oligonucleotide
acggctggggacacgcccagcaatggggtggttattatggcgcccaacaa

SEQ ID NO: 277678 - DNA, 50 bp, Artificial
  Synthetic oligonucleotide
tcggacttggatcggtagtcgtgggtgaagatgacagaacaaccctttcg

SEQ ID NO: 277679 - DNA, 50 bp, Artificial
  Synthetic oligonucleotide
acgggaaacttgcgccagaagggcctgtggacggtgggccgatgtatgga

SEQ ID NO: 277680 - DNA, 56 bp, Artificial
  Synthetic oligonucleotide
tctttgtggtaccgagtacttcggggctggaaaggacacctgtgagtcacggccaa

SEQ ID NO: 277681 - DNA, 54 bp, Artificial
  Synthetic oligonucleotide
gcggaacatacctttaagacgtaaagcaatttggcgggtaggcttccatcccag

SEQ ID NO: 277682 - DNA, 50 bp, Artificial
  Synthetic oligonucleotide
acggggttcgggtgttcctatctccggcggaagtccctggtgaacgacac

SEQ ID NO: 277683 - DNA, 50 bp, Artificial
  Synthetic oligonucleotide
acggtacagcgaggagcttccgtgtcgcctgagccttgcatagcgccgta

SEQ ID NO: 277684 - DNA, 50 bp, Artificial
  Synthetic oligonucleotide
acggtcgggtctccgccaaattcggcttcgtttcacgatgcggctgtcac

SEQ ID NO: 277685 - DNA, 50 bp, Artificial
  Synthetic oligonucleotide
tcctcggagactgattgtatccggcaggtcgtctctgcccttgcggtcga

SEQ ID NO: 277686 - DNA, 50 bp, Artificial
  Synthetic oligonucleotide
acgtacctcacccgagacgcaaacgggagcgccttccgagtcctgggtaa

SEQ ID NO: 277687 - DNA, 50 bp, Artificial
  Synthetic oligonucleotide
acgtcgttgtcccttctatcgcacagcccaaccgccatcccatcgctggt

SEQ ID NO: 277688 - DNA, 50 bp, Artificial
  Synthetic oligonucleotide
acgttggaaacagcggactagggcttgggtagctctcgccttctgggccg

SEQ ID NO: 277689 - DNA, 50 bp, Artificial
  Synthetic oligonucleotide
actaattctcccttggcaggcgggaggtgaggcttctccgtcgctccctt

SEQ ID NO: 277690 - DNA, 50 bp, Artificial
  Synthetic oligonucleotide
actacgatgtatcggggagcaggccgctagggaagcgggatcgctggggg

SEQ ID NO: 277691 - DNA, 50 bp, Artificial
  Synthetic oligonucleotide
actccgaccgccaaggaagtcactgggcggagcatcacccctgtcttggg

SEQ ID NO: 277692 - DNA, 55 bp, Artificial
  Synthetic oligonucleotide
gcgctattcctcgagatttggacccggaggccccttacgagagtatggacatccg

SEQ ID NO: 277693 - DNA, 50 bp, Artificial
  Synthetic oligonucleotide
actccttgttgcttgtgctcgcacccagcccccgcctatggcttcagtca

SEQ ID NO: 277694 - DNA, 50 bp, Artificial
  Synthetic oligonucleotide
actgaagccataggcgggggctgggtgcgagcacaagcaacaaggagttt

SEQ ID NO: 277695 - DNA, 50 bp, Artificial
  Synthetic oligonucleotide
tcccgagtccggccatagctcgctacctaccggctcttcccatggcatgt

SEQ ID NO: 277696 - DNA, 50 bp, Artificial
  Synthetic oligonucleotide
cgcggagggcagcgtcttagcatcagcgcatccacagcacagtacaaggg

SEQ ID NO: 277697 - DNA, 50 bp, Artificial
  Synthetic oligonucleotide
cgcgggtataccaggagtgggggcgggagtcgtcttgccaggaggtctgt

SEQ ID NO: 277698 - DNA, 50 bp, Artificial
  Synthetic oligonucleotide
cgcgtacgtaccggtgtctatgcgcgggatgaccacagaatgcggcagag

SEQ ID NO: 277699 - DNA, 50 bp, Artificial
  Synthetic oligonucleotide
cgcgtttgtcctgcgtggtcgactgtcgctgttgccacccaaaacagtga

SEQ ID NO: 277700 - DNA, 50 bp, Artificial
  Synthetic oligonucleotide
gcgactgcacaagaaaggaacttacggagccaatatctcgagaagcacca

SEQ ID NO: 277701 - DNA, 50 bp, Artificial
  Synthetic oligonucleotide
cgctcgatgcagaccactggccactcggcatcctcagactgtctccgttg

SEQ ID NO: 277702 - DNA, 50 bp, Artificial
  Synthetic oligonucleotide
cgcttgaccctgtccctatcgacccttccgccgagagaccgcccatgtac

SEQ ID NO: 277703 - DNA, 55 bp, Artificial
  Synthetic oligonucleotide
gcgccagtaagctcaggatttgcttcgggtagggaagtggcagggtcgtttgatg

SEQ ID NO: 277704 - DNA, 50 bp, Artificial
  Synthetic oligonucleotide
cgcttgagggagggttgttccgggacgatatggtggctgaagggcggggt

SEQ ID NO: 277705 - DNA, 50 bp, Artificial
  Synthetic oligonucleotide
cgctttgcccatgcatgtgctggctcggaagctgagtcggggttaagtgc

SEQ ID NO: 277706 - DNA, 50 bp, Artificial
  Synthetic oligonucleotide
cggaacgaagggcacagtcgcccctaaggcaagggaggaccgtgacgcta

SEQ ID NO: 277707 - DNA, 50 bp, Artificial
  Synthetic oligonucleotide
cggcatcgcatcctacagtacttccgcgcaatcctacacgctaccggccg

SEQ ID NO: 277708 - DNA, 50 bp, Artificial
  Synthetic oligonucleotide
cggcatttgggaccggactagcgaccgacggactctcatgcaccccacct

SEQ ID NO: 277709 - DNA, 50 bp, Artificial
  Synthetic oligonucleotide
cggcgtcggctttaggcagtggactcggagcgtacaccggccctccaaag

SEQ ID NO: 277710 - DNA, 50 bp, Artificial
  Synthetic oligonucleotide
cggctatcaaccccgcccatgagatttggttccgcgcccaataacgggtg

SEQ ID NO: 277711 - DNA, 50 bp, Artificial
  Synthetic oligonucleotide
gcctctctggctatcgccttgtacctcggcaagcgtcgaggctacggcac

SEQ ID NO: 277712 - DNA, 50 bp, Artificial
  Synthetic oligonucleotide
gcctcggtacctccccactcgaggaccctagggggttcacccgggattga

SEQ ID NO: 277713 - DNA, 50 bp, Artificial
  Synthetic oligonucleotide
cgggaagaggtagggggccagtctccgcggccggtagaagtgaactggaa

SEQ ID NO: 277714 - DNA, 55 bp, Artificial
  Synthetic oligonucleotide
cgaaatcgcctctcgatccgacccaactagcataatggtccgtatcccatgcgtc

SEQ ID NO: 277715 - DNA, 50 bp, Artificial
  Synthetic oligonucleotide
cgggagtatgccccagctaacagggccagtgtagcgagcacctgcccttg

SEQ ID NO: 277716 - DNA, 50 bp, Artificial
  Synthetic oligonucleotide
cgggagtcttggcctcgcgggtaggaatgaattcactgctcggcctagga

SEQ ID NO: 277717 - DNA, 50 bp, Artificial
  Synthetic oligonucleotide
cgggtttcgacgcccgctctcggcttgcttgtaacggtgcgtgtcaccaa

SEQ ID NO: 277718 - DNA, 50 bp, Artificial
  Synthetic oligonucleotide
cggtgcgcgcttaaacgcttccgaggctatgctcccaggatcgacagaga

SEQ ID NO: 277719 - DNA, 50 bp, Artificial
  Synthetic oligonucleotide
cggtggatgatacgttcgggccatgaccgacaggactcgccaccttgggt

SEQ ID NO: 277720 - DNA, 50 bp, Artificial
  Synthetic oligonucleotide
gccgggaggacccttcgaagctttcgccttcgttggagggaggcggtcgg

SEQ ID NO: 277721 - DNA, 50 bp, Artificial
  Synthetic oligonucleotide
cgtaccctttccgcgcgcccgtgcaatcgacaactggatgttgtgcggca

SEQ ID NO: 277722 - DNA, 50 bp, Artificial
  Synthetic oligonucleotide
cgtattgagtgcggcgaggttcctgttggccgtgatgaggagggatcggc

SEQ ID NO: 277723 - DNA, 50 bp, Artificial
  Synthetic oligonucleotide
cgtcgacccgaacactcgcgcacccaagagactcatcctccgattcgccc

SEQ ID NO: 277724 - DNA, 50 bp, Artificial
  Synthetic oligonucleotide
gccgagggaacgccttgagggtctgaaggcagactgggttacgtggggtg

SEQ ID NO: 277725 - DNA, 55 bp, Artificial
  Synthetic oligonucleotide
gctagagctgacatctcagatgaggagtatcgatcccgactaccggtaagacgcg

SEQ ID NO: 277726 - DNA, 50 bp, Artificial
  Synthetic oligonucleotide
cgtcgctcgtccctgggcacagcgatgcgtctttctttaccgccccagcg

SEQ ID NO: 277727 - DNA, 50 bp, Artificial
  Synthetic oligonucleotide
cgtggtcagcacttgtctatcctcagcccacgcccatacgtggcagcgag

SEQ ID NO: 277728 - DNA, 50 bp, Artificial
  Synthetic oligonucleotide
ctacctgcggaggtctctggattgccccgggatcacgtagcacctgcacg

SEQ ID NO: 277729 - DNA, 50 bp, Artificial
  Synthetic oligonucleotide
cctttccggcccaccagtcactcgcctctcgcccttcttccgggattaca

SEQ ID NO: 277730 - DNA, 50 bp, Artificial
  Synthetic oligonucleotide
cgaacacaacctccaggctatgcgaccttctcccgagcccgagcgatcct

SEQ ID NO: 277731 - DNA, 50 bp, Artificial
  Synthetic oligonucleotide
cgaaggattgggccccgaaccacgtcgttggtttgttaagccccttggcg

SEQ ID NO: 277732 - DNA, 50 bp, Artificial
  Synthetic oligonucleotide
gctacggcccttgagccgtcgagaactaaggcaggggagaagtcgccaga

SEQ ID NO: 277733 - DNA, 50 bp, Artificial
  Synthetic oligonucleotide
gctaatcgctcccatcccggcactcgtcaaaccaagggttatcacactga

SEQ ID NO: 277734 - DNA, 50 bp, Artificial
  Synthetic oligonucleotide
cgaccgaccgacagccctgagcgggagatatgggccgatgaccggtaaat

SEQ ID NO: 277735 - DNA, 50 bp, Artificial
  Synthetic oligonucleotide
cgagagtgtacatgggcggtctctcggcggaagggtcgatagggacaggg

SEQ ID NO: 277736 - DNA, 55 bp, Artificial
  Synthetic oligonucleotide
cgaacgaatctaccgttagcaagtaacgactagtaagagtgttgatcacctgatt

SEQ ID NO: 277737 - DNA, 50 bp, Artificial
  Synthetic oligonucleotide
gcgttcgcttgtcatcccaaatggccaagagctcgcaggccccacccagt

SEQ ID NO: 277738 - DNA, 50 bp, Artificial
  Synthetic oligonucleotide
cgaggaccctagggggttcacccgggattgacgccgcagtgctctggtca

SEQ ID NO: 277739 - DNA, 50 bp, Artificial
  Synthetic oligonucleotide
cgagggggcacctcagggtcccaatgcggggccttggcagactttatggg

SEQ ID NO: 277740 - DNA, 50 bp, Artificial
  Synthetic oligonucleotide
cgcaacaacgtccttctcaactctaccgccgcacctcccaagcgcgaacc

SEQ ID NO: 277741 - DNA, 50 bp, Artificial
  Synthetic oligonucleotide
cgcaacagagacccatccatccgctccccaacggccactctcccaagttc

SEQ ID NO: 277742 - DNA, 50 bp, Artificial
  Synthetic oligonucleotide
cgcactccaatgcccgtagtacagccacccgcagacgacctacgtccatc

SEQ ID NO: 277743 - DNA, 50 bp, Artificial
  Synthetic oligonucleotide
cgcaggagccagggagcattcatagggagcatggacaccgaagcagggcg

SEQ ID NO: 277744 - DNA, 50 bp, Artificial
  Synthetic oligonucleotide
cgcatattgcgccctctggcctatgccgacacaacaccaatgccgacgga

SEQ ID NO: 277745 - DNA, 50 bp, Artificial
  Synthetic oligonucleotide
cgcccccgactttgagggccgcacctggttcacccgtccagcgtgatacc

SEQ ID NO: 277746 - DNA, 50 bp, Artificial
  Synthetic oligonucleotide
cgccctccacccaattgtttcgtgcgacctgtttttgtgccgcggcttgc

SEQ ID NO: 277747 - DNA, 55 bp, Artificial
  Synthetic oligonucleotide
cgaaggattcaatttcaggtaccccagagccatcagaacgaagagacacaactga

SEQ ID NO: 277748 - DNA, 50 bp, Artificial
  Synthetic oligonucleotide
gcggcgaggttcctgttggccgtgatgaggagggatcggccgatggatct

SEQ ID NO: 277749 - DNA, 50 bp, Artificial
  Synthetic oligonucleotide
gcggccagaggtagacaagggagtcgtgcttggggctacgaatgctgacg

SEQ ID NO: 277750 - DNA, 50 bp, Artificial
  Synthetic oligonucleotide
gcggcagagtaggatggagacggcccaagggcggtgggaggccaaacgga

SEQ ID NO: 277751 - DNA, 50 bp, Artificial
  Synthetic oligonucleotide
cgccgcagaccggcggaacattccgaccgccacactcaggtcaatcacaa

SEQ ID NO: 277752 - DNA, 50 bp, Artificial
  Synthetic oligonucleotide
cgcctctcgggcggcccaaggatcacggtaaaggggacctggcatctgga

SEQ ID NO: 277753 - DNA, 50 bp, Artificial
  Synthetic oligonucleotide
gcgctccgctcttctcgacctcaccagtagatcgggtgtcgcgagccaag

SEQ ID NO: 277754 - DNA, 50 bp, Artificial
  Synthetic oligonucleotide
cgcctgaaaacgctgtagctaccccgccatacctcgagctcgcttggcct

SEQ ID NO: 277755 - DNA, 50 bp, Artificial
  Synthetic oligonucleotide
gcgcgagcacaaggacaagatagtggggcgaggcgggaataacgcaaggt

SEQ ID NO: 277756 - DNA, 50 bp, Artificial
  Synthetic oligonucleotide
gcgcctgcgtgggcgtatttggcccaaccgaacgaagcatagggctcgat

SEQ ID NO: 277757 - DNA, 50 bp, Artificial
  Synthetic oligonucleotide
cgcctgggtccaaaccgaggtcagtcgagctgtcgaccaaccaaccgaaa

SEQ ID NO: 277758 - DNA, 55 bp, Artificial
  Synthetic oligonucleotide
cgaataatttgagctgacgaagacggctaggcatcctatttgtctcaaaagacca

SEQ ID NO: 277759 - DNA, 50 bp, Artificial
  Synthetic oligonucleotide
cgccttggggacagggaacgtagaagaggcggcccaaccacctccgactg

SEQ ID NO: 277760 - DNA, 50 bp, Artificial
  Synthetic oligonucleotide
cgcctttcgctagggagccactctcgcctccttggcctactacccgttcg

SEQ ID NO: 277761 - DNA, 50 bp, Artificial
  Synthetic oligonucleotide
gcgcactggacagggaggtagatatccgcaatggtgccgcccaccaatgt

SEQ ID NO: 277762 - DNA, 50 bp, Artificial
  Synthetic oligonucleotide
cttgtagtcttggcggacacgggcggaggtgagaggacgcgagggaggtt

SEQ ID NO: 277763 - DNA, 50 bp, Artificial
  Synthetic oligonucleotide
ctttccctcgctcgcttagacacggcagtacccaacggcgccacatccct

SEQ ID NO: 277764 - DNA, 50 bp, Artificial
  Synthetic oligonucleotide
gcacaattggttctacacctcctggggatttgacgccgagttggtaaggt

SEQ ID NO: 277765 - DNA, 50 bp, Artificial
  Synthetic oligonucleotide
ctttcgcaaggggaccgcatggtcgaagaggctgtcacgctcgacctgtt

SEQ ID NO: 277766 - DNA, 50 bp, Artificial
  Synthetic oligonucleotide
ctttcggggattccgacagtggccacagggtatggcctgcagaaggcagc

SEQ ID NO: 277767 - DNA, 49 bp, Artificial
  Synthetic oligonucleotide
gaacaacccactcccggacccacctacccaccgcccggtaacggtgttg

SEQ ID NO: 277768 - DNA, 50 bp, Artificial
  Synthetic oligonucleotide
gaaccaccgagcggcccattcataagacccaaaccacgcagccgagccac

SEQ ID NO: 277769 - DNA, 55 bp, Artificial
  Synthetic oligonucleotide
cgaatgggaacggacgacaattggcggtgggtcgtcagctgtcgggtcaagggct

SEQ ID NO: 277770 - DNA, 50 bp, Artificial
  Synthetic oligonucleotide
gaagcaccctgcgacgtcccatctttcgcttccgttcgcagcatcggact

SEQ ID NO: 277771 - DNA, 50 bp, Artificial
  Synthetic oligonucleotide
gaaggaatggctgggggcgggtcaccccatgccgcacaaggaaatagagg

SEQ ID NO: 277772 - DNA, 50 bp, Artificial
  Synthetic oligonucleotide
gatgggaccattatcttcgcccctcttgctcatatgtggctcagcacact

SEQ ID NO: 277773 - DNA, 50 bp, Artificial
  Synthetic oligonucleotide
gatgcgccgtacccgctgcgttaaggtgatctgccgccacatgtgccaaa

SEQ ID NO: 277774 - DNA, 50 bp, Artificial
  Synthetic oligonucleotide
gacaggcatgcggtgttctcagcttttggccgtccgctagggaatggccc

SEQ ID NO: 277775 - DNA, 50 bp, Artificial
  Synthetic oligonucleotide
gacagtgtggtggctgtaggaaggacgaggttaggatcgggcgcaggggc

SEQ ID NO: 277776 - DNA, 50 bp, Artificial
  Synthetic oligonucleotide
gacccagggcagtccctcacatttgcccgataattgcccgacagcgctct

SEQ ID NO: 277777 - DNA, 50 bp, Artificial
  Synthetic oligonucleotide
gaccttcccagtcgtgcttatcgggacggtgtggacatgcggctagggta

SEQ ID NO: 277778 - DNA, 50 bp, Artificial
  Synthetic oligonucleotide
gacgtctgggaacaggcgcatggcacacatcttgctgtcacgcccatgga

SEQ ID NO: 277779 - DNA, 50 bp, Artificial
  Synthetic oligonucleotide
gactctcccattgtctacgctagtccgaatttcaccaggttgactggtta

SEQ ID NO: 277780 - DNA, 55 bp, Artificial
  Synthetic oligonucleotide
cgaattctgtcctcaacgcgtctctccttaagcctggactagcttgccatggtcg

SEQ ID NO: 277781 - DNA, 50 bp, Artificial
  Synthetic oligonucleotide
gagagcggtctgctcgtcaacacctcgagtaccgacacccctcctcctgg

SEQ ID NO: 277782 - DNA, 50 bp, Artificial
  Synthetic oligonucleotide
gatagaggtgtcgaggggccgaggccgtatgggacgagtgtacgccggtg

SEQ ID NO: 277783 - DNA, 50 bp, Artificial
  Synthetic oligonucleotide
gagccactaaatacccggatcggcagtcgcggcctgacatacggtgcctg

SEQ ID NO: 277784 - DNA, 50 bp, Artificial
  Synthetic oligonucleotide
gagccccgttcaggaaggacgcagtccctctcggcggaagtaggcggttc

SEQ ID NO: 277785 - DNA, 50 bp, Artificial
  Synthetic oligonucleotide
gagcctccggtaccgctcgacatgtcgcacgcctcactaaagtcgtccga

SEQ ID NO: 277786 - DNA, 50 bp, Artificial
  Synthetic oligonucleotide
gagcgtcctttggtcggtgttgcgcctctcttccgtgttgcgccctccac

SEQ ID NO: 277787 - DNA, 50 bp, Artificial
  Synthetic oligonucleotide
gagcgtctcggtggcttgggaagaccgccggaatgcggtacttgcgacca

SEQ ID NO: 277788 - DNA, 50 bp, Artificial
  Synthetic oligonucleotide
gagtggttggggacgtctccgcctgaggatgtgaagcgcttggctcgtgt

SEQ ID NO: 277789 - DNA, 50 bp, Artificial
  Synthetic oligonucleotide
gagctaccgctcacggtctctcggctgcctccggtaaactcggtgccctc

SEQ ID NO: 277790 - DNA, 50 bp, Artificial
  Synthetic oligonucleotide
gagtcaattcattccatcgctgattcccccacgccacgggtgctgacgcg

SEQ ID NO: 277791 - DNA, 54 bp, Artificial
  Synthetic oligonucleotide
cccgccgccgattaattttcgtcccctaaaatacacgtgcatcccacgtgcact

SEQ ID NO: 277792 - DNA, 55 bp, Artificial
  Synthetic oligonucleotide
cgacaaccttatgcaagtcgaaaagttcagtcacgttatacacttgacaagtcag

SEQ ID NO: 277793 - DNA, 50 bp, Artificial
  Synthetic oligonucleotide
gaggaccatgggtccccgaatctcgcgcgtgtttgatatccccaacggcc

SEQ ID NO: 277794 - DNA, 50 bp, Artificial
  Synthetic oligonucleotide
gagggtcgcagcactgtcacacccgacagccacactctggcaaaaagggt

SEQ ID NO: 277795 - DNA, 50 bp, Artificial
  Synthetic oligonucleotide
gagggacaacggccgcctctcgcaccaccatctcgtacaggggatgaact

SEQ ID NO: 277796 - DNA, 50 bp, Artificial
  Synthetic oligonucleotide
ctcaagccagggtgactaaaccctttcaggcccagcgctcgccactcacc

SEQ ID NO: 277797 - DNA, 50 bp, Artificial
  Synthetic oligonucleotide
ctcattttgatcgatttgcggcaaaggcgcacccattgtggcccgccgag

SEQ ID NO: 277798 - DNA, 50 bp, Artificial
  Synthetic oligonucleotide
ctccaacggacgccgccaacctgtggtcatcctctgcgatttgaggagta

SEQ ID NO: 277799 - DNA, 50 bp, Artificial
  Synthetic oligonucleotide
ctccacgttcgtccgctcggcactttccctcgctcgcttagacacggcag

SEQ ID NO: 277800 - DNA, 50 bp, Artificial
  Synthetic oligonucleotide
ctccggtgcagggaaggaatcatcgctgaccgtagggctagggggcgcag

SEQ ID NO: 277801 - DNA, 50 bp, Artificial
  Synthetic oligonucleotide
ctcctgcgctgcagattgaggcagatgaagttgcgaggggaaggtcgggc

SEQ ID NO: 277802 - DNA, 50 bp, Artificial
  Synthetic oligonucleotide
ctcgcaacccccgtttaccgtcccagctccagcataccccgagtctcgta

SEQ ID NO: 277803 - DNA, 55 bp, Artificial
  Synthetic oligonucleotide
cgacacttccatcgatgtcaagagtctcattgggacatatgtttcctcgcctacc

SEQ ID NO: 277804 - DNA, 50 bp, Artificial
  Synthetic oligonucleotide
ctcgcaaggggtgcatccagccttcaagaccgcagaaagtaatggcgccg

SEQ ID NO: 277805 - DNA, 50 bp, Artificial
  Synthetic oligonucleotide
gcccaagtcaccttccctcggtgtaccttcggtcaactcgcgagcccgtc

SEQ ID NO: 277806 - DNA, 50 bp, Artificial
  Synthetic oligonucleotide
gcccaaggtgtatcgcataggaagtaaccgaaccgaggcgcagggacgga

SEQ ID NO: 277807 - DNA, 50 bp, Artificial
  Synthetic oligonucleotide
gccatgtcgatctgattagcgctaacttgcacaccggatcaccattgtga

SEQ ID NO: 277808 - DNA, 50 bp, Artificial
  Synthetic oligonucleotide
gccatgcggccggatttgggggagacccactgagagcccaaatggtgggg

SEQ ID NO: 277809 - DNA, 50 bp, Artificial
  Synthetic oligonucleotide
ctcgctcttcagcggttgacgctggcatggcgacaaaccctgagaaccta

SEQ ID NO: 277810 - DNA, 50 bp, Artificial
  Synthetic oligonucleotide
ctcggcccggcctatttggtaacctgggccctgtacacttcgccaagcgc

SEQ ID NO: 277811 - DNA, 50 bp, Artificial
  Synthetic oligonucleotide
ctcggctgcgtggtttgggtcttatgaatgggccgctcggtggttcatgg

SEQ ID NO: 277812 - DNA, 50 bp, Artificial
  Synthetic oligonucleotide
ctcgggctcgggagaaggtcgcatagcctggaggttgtgttcgccagagt

SEQ ID NO: 277813 - DNA, 50 bp, Artificial
  Synthetic oligonucleotide
ctcgggtgccgcgtacccaaagctaccagccgcgtcgacacattcctcat

SEQ ID NO: 277814 - DNA, 55 bp, Artificial
  Synthetic oligonucleotide
cgacccagctatgccaaattcactgggacaagaactcatgacggactggaatccg

SEQ ID NO: 277815 - DNA, 50 bp, Artificial
  Synthetic oligonucleotide
ctcgtcccgcggctctgcttctgggtcagccttgggtttaggtcccgaag

SEQ ID NO: 277816 - DNA, 50 bp, Artificial
  Synthetic oligonucleotide
ctctcagagcttcgccttgtgtcgtcccgttgggcgtccgactcggttct

SEQ ID NO: 277817 - DNA, 50 bp, Artificial
  Synthetic oligonucleotide
ctgactctggcgaacacaacctccaggctatgcgaccttctcccgagccc

SEQ ID NO: 277818 - DNA, 50 bp, Artificial
  Synthetic oligonucleotide
ctgaggggccatgtaggggtgactgacggtcttgtgggctgcggcgatag

SEQ ID NO: 277819 - DNA, 50 bp, Artificial
  Synthetic oligonucleotide
gcagggtcaccaaccccgctgccaagctcaggaccgaggaggcttaattt

SEQ ID NO: 277820 - DNA, 50 bp, Artificial
  Synthetic oligonucleotide
ctggaacactgggggctcatatgccaccttggggataggctgggggatcg

SEQ ID NO: 277821 - DNA, 50 bp, Artificial
  Synthetic oligonucleotide
ctgggacgcatcccatccaagctctgacgagcccgacctagagtggctgc

SEQ ID NO: 277822 - DNA, 50 bp, Artificial
  Synthetic oligonucleotide
gcagagccagattgattgcgccatgcggccggatttgggggagacccact

SEQ ID NO: 277823 - DNA, 50 bp, Artificial
  Synthetic oligonucleotide
gcagaaggcagctacggcccttgagccgtcgagaactaaggcaggggaga

SEQ ID NO: 277824 - DNA, 50 bp, Artificial
  Synthetic oligonucleotide
gcactgtgcagggaacagaggaggtctagggttgaggagcgccagaaggc

SEQ ID NO: 277825 - DNA, 55 bp, Artificial
  Synthetic oligonucleotide
gctaatcattattcacatgttgccctggctagcgtaacgaggatctatatacgtc

SEQ ID NO: 277826 - DNA, 50 bp, Artificial
  Synthetic oligonucleotide
cttcggactaagacgcagggccgcgcgaggtgtgttaccgcttgggactg

SEQ ID NO: 277827 - DNA, 50 bp, Artificial
  Synthetic oligonucleotide
cttgattgccacaggagggaccgccatcgcagccttgaacatgctcaccg

SEQ ID NO: 277828 - DNA, 50 bp, Artificial
  Synthetic oligonucleotide
cagcgggcagggtacaaccgactcttacggctctggtctccctagctcac

SEQ ID NO: 277829 - DNA, 50 bp, Artificial
  Synthetic oligonucleotide
caggagcagcatttgacatctccacgctcgtctctgccgctcccgacgca

SEQ ID NO: 277830 - DNA, 50 bp, Artificial
  Synthetic oligonucleotide
caggcaaaaggggtctttcgccgggggacgagaggggataatccgatggg

SEQ ID NO: 277831 - DNA, 50 bp, Artificial
  Synthetic oligonucleotide
cagtctcctcctcagcggactcttcgtctcttcgcgctcgcaggcccatc

SEQ ID NO: 277832 - DNA, 50 bp, Artificial
  Synthetic oligonucleotide
cagtctgttcctgcacccgtgtcggaggttcggctgagcggctaggtcgc

SEQ ID NO: 277833 - DNA, 50 bp, Artificial
  Synthetic oligonucleotide
gggcgggtgcgaatttgcgtggctcgggggtaagccgaaaggtgattgag

SEQ ID NO: 277834 - DNA, 50 bp, Artificial
  Synthetic oligonucleotide
gggccggcgtcattcgatccgacctctgtccggctcgcatccactcgagg

SEQ ID NO: 277835 - DNA, 50 bp, Artificial
  Synthetic oligonucleotide
gggcccctgagcagcaatgttcgctccgacccgacctctaggaattcgag

SEQ ID NO: 277836 - DNA, 55 bp, Artificial
  Synthetic oligonucleotide
cgaccgcccgacccacgatgctggccgtagacaagattgcgcaaactctccagac

SEQ ID NO: 277837 - DNA, 50 bp, Artificial
  Synthetic oligonucleotide
catggtcgaagaggctgtcacgctcgacctgttggatgcgcacacgaggg

SEQ ID NO: 277838 - DNA, 50 bp, Artificial
  Synthetic oligonucleotide
cattgccgagtcgtaccacaccccgcgaagcaccatcgtgtgctacccaa

SEQ ID NO: 277839 - DNA, 50 bp, Artificial
  Synthetic oligonucleotide
cattggcagcgagacgaccccatagcttggtgttcggtgtggcaaccaga

SEQ ID NO: 277840 - DNA, 50 bp, Artificial
  Synthetic oligonucleotide
gggccagcgacactcaacggagtagggctaccttcgcgcttgtgcgccaa

SEQ ID NO: 277841 - DNA, 50 bp, Artificial
  Synthetic oligonucleotide
gggcagctgagcgagcaatcaaaggcgcagtgaacggccatcacacctat

SEQ ID NO: 277842 - DNA, 50 bp, Artificial
  Synthetic oligonucleotide
ccaaacgccaacgagcatgtgcgtccgtgtgccgtcggatgcagaggata

SEQ ID NO: 277843 - DNA, 50 bp, Artificial
  Synthetic oligonucleotide
ccaacgcaggacagggcagaagggttacgagggcagcgccgctcctagcc

SEQ ID NO: 277844 - DNA, 50 bp, Artificial
  Synthetic oligonucleotide
ccaacgccactgctacaggccctagttccgagcctaaacctctgacggcc

SEQ ID NO: 277845 - DNA, 50 bp, Artificial
  Synthetic oligonucleotide
ccaacgctgccccgccagtctcagcacccacaaaccacgaaatcggtggt

SEQ ID NO: 277846 - DNA, 50 bp, Artificial
  Synthetic oligonucleotide
ccaagccgggctgagtttccgtcgcgttcccagagtgtgacgacgaggtg

SEQ ID NO: 277847 - DNA, 55 bp, Artificial
  Synthetic oligonucleotide
cgacgacgaacaattagaagcgatgcgactcgtcgggagcatttccaccgtagcg

SEQ ID NO: 277848 - DNA, 50 bp, Artificial
  Synthetic oligonucleotide
ccaagcgggaatagcccccagagctcgcttgcggagtcccatgccgggct

SEQ ID NO: 277849 - DNA, 50 bp, Artificial
  Synthetic oligonucleotide
ccaagtccaaacggccatggttcacgcgcgacccgtcgtcctacaacgcc

SEQ ID NO: 277850 - DNA, 50 bp, Artificial
  Synthetic oligonucleotide
ccaccaacgggtgcaccgcctagcataccagagtttgctgtccccgctcc

SEQ ID NO: 277851 - DNA, 50 bp, Artificial
  Synthetic oligonucleotide
ccaccacgcttgggatcgtttcctctacatgggtagccgacccggtgcta

SEQ ID NO: 277852 - DNA, 50 bp, Artificial
  Synthetic oligonucleotide
ccacgatgagcatggactgcctcatgggggcacaaaaagcagcggatgga

SEQ ID NO: 277853 - DNA, 50 bp, Artificial
  Synthetic oligonucleotide
ccagcgtgcagagtgcttgcatacggcatccgacatgcccacccgagcga

SEQ ID NO: 277854 - DNA, 50 bp, Artificial
  Synthetic oligonucleotide
ggcggcaccagacatgggcaccgtgagcgtagctgaggagttggtcaagc

SEQ ID NO: 277855 - DNA, 50 bp, Artificial
  Synthetic oligonucleotide
ccagctgcccgagatgaatccgttgagccacacatgccaatcgagccaga

SEQ ID NO: 277856 - DNA, 50 bp, Artificial
  Synthetic oligonucleotide
ggcgctcctgccgaggtcccacatgcgatgcatccacaagccgtatctca

SEQ ID NO: 277857 - DNA, 50 bp, Artificial
  Synthetic oligonucleotide
ggcgccaggtgtacgatcgcccaatctaggtgagtgcccctgaggagccc

SEQ ID NO: 277858 - DNA, 55 bp, Artificial
  Synthetic oligonucleotide
cgacggagatatggtccgcccaatggcagaggcgagagcgagagtcgaggctgcg

SEQ ID NO: 277859 - DNA, 50 bp, Artificial
  Synthetic oligonucleotide
ccaggacccttacgctgctccccctagtgcttccgcggcatacaaatgct

SEQ ID NO: 277860 - DNA, 50 bp, Artificial
  Synthetic oligonucleotide
ccaggacgcctagtgcgaggatcgacaggtgcacgagggtcgaggggcac

SEQ ID NO: 277861 - DNA, 50 bp, Artificial
  Synthetic oligonucleotide
caactcgcttgggttcaacacggagcgtctttgggtgtgccttcgcacga

SEQ ID NO: 277862 - DNA, 50 bp, Artificial
  Synthetic oligonucleotide
caaggggcttcgagagttagaggacgcaggtcgggagacttcggccccag

SEQ ID NO: 277863 - DNA, 50 bp, Artificial
  Synthetic oligonucleotide
caagtcagacgttccttgtgggccggtcaatgggcgcaactcacagtgcc

SEQ ID NO: 277864 - DNA, 50 bp, Artificial
  Synthetic oligonucleotide
caagtgccccgcagagtcggttccagaattgggtcgctggacagccgagt

SEQ ID NO: 277865 - DNA, 50 bp, Artificial
  Synthetic oligonucleotide
caatgtctcggggccagtcctcggcatcgcatcctacagtacttccgcgc

SEQ ID NO: 277866 - DNA, 50 bp, Artificial
  Synthetic oligonucleotide
cacacctacccgggcgacaagtccgctaaagacgtagcttccaaccccga

SEQ ID NO: 277867 - DNA, 50 bp, Artificial
  Synthetic oligonucleotide
cacacgcggagccgctcgccccatggtatagaagtcggctgacacatgtt

SEQ ID NO: 277868 - DNA, 50 bp, Artificial
  Synthetic oligonucleotide
cacataggccccctaccggcgttatctcctctcgaaaccccgccgcggtt

SEQ ID NO: 277869 - DNA, 55 bp, Artificial
  Synthetic oligonucleotide
cgactatccaaccaagaggtcgccacaggtctccatgaccgaactctggtagggt

SEQ ID NO: 277870 - DNA, 50 bp, Artificial
  Synthetic oligonucleotide
caccagctgagtgctccgtgcggtcataagacgggcccaaagcccctaca

SEQ ID NO: 277871 - DNA, 50 bp, Artificial
  Synthetic oligonucleotide
caccatgcaagagttgcagggctttccagcctggtcggaggtcggccaat

SEQ ID NO: 277872 - DNA, 50 bp, Artificial
  Synthetic oligonucleotide
cacccttggcagacgggaggcgacgacccagcgacaaggcgaccactgac

SEQ ID NO: 277873 - DNA, 50 bp, Artificial
  Synthetic oligonucleotide
cacctccttggttgattcgcactatacggtaggggcctcgccacctgggc

SEQ ID NO: 277874 - DNA, 50 bp, Artificial
  Synthetic oligonucleotide
cacgacctaatgccctgcctcggacctgcaccgtcattctgggcccattc

SEQ ID NO: 277875 - DNA, 50 bp, Artificial
  Synthetic oligonucleotide
cacggcgagatgccccaaggaggactgttcggggaaaggtgcggccttga

SEQ ID NO: 277876 - DNA, 50 bp, Artificial
  Synthetic oligonucleotide
cactacgaggcctgttgtcccgagcagcttgcatctctgcgggtctgcgg

SEQ ID NO: 277877 - DNA, 50 bp, Artificial
  Synthetic oligonucleotide
cactgaaccccaacacgtccgccctgcgacgtctcgagcctgtacaagct

SEQ ID NO: 277878 - DNA, 50 bp, Artificial
  Synthetic oligonucleotide
cacttccccgcccatggatgcaagatcggaggcggagggtttagcgcgca

SEQ ID NO: 277879 - DNA, 50 bp, Artificial
  Synthetic oligonucleotide
gggtttacctccacgtcctgccgtgtatcccgaaccctaccatgcggcgc

SEQ ID NO: 277880 - DNA, 55 bp, Artificial
  Synthetic oligonucleotide
cgactcactgtctaagcctcggatagtcattgcagactgctgcctagttgacgga

SEQ ID NO: 277881 - DNA, 50 bp, Artificial
  Synthetic oligonucleotide
cacttctctcacaccacgccccgcagccctccagtcgaacctcgaaaacc

SEQ ID NO: 277882 - DNA, 50 bp, Artificial
  Synthetic oligonucleotide
gggttcccaagcggtacgaatggggcccgctttctcgcgtaactcgttcg

SEQ ID NO: 277883 - DNA, 50 bp, Artificial
  Synthetic oligonucleotide
cacttgcgtgatcccgtactcacgaccatcacataggttgcggcccagag

SEQ ID NO: 277884 - DNA, 50 bp, Artificial
  Synthetic oligonucleotide
cagaaataggctctcaggaaacctcgtgcggactgggctgtgttgaccgc

SEQ ID NO: 277885 - DNA, 50 bp, Artificial
  Synthetic oligonucleotide
gggtccgaagccacagtggagcctcttgcctatcgagtggaccccgcaca

SEQ ID NO: 277886 - DNA, 50 bp, Artificial
  Synthetic oligonucleotide
cagaggggatgcgcctctccagagccttgactcctggcggtaaccctgta

SEQ ID NO: 277887 - DNA, 50 bp, Artificial
  Synthetic oligonucleotide
cagcacgggtggtcctatggctgaaagcggtactggtaggctggcaggac

SEQ ID NO: 277888 - DNA, 50 bp, Artificial
  Synthetic oligonucleotide
ggggtgctgctgacttaccttccgcgaaagcctccgtcaaggcgagacca

SEQ ID NO: 277889 - DNA, 50 bp, Artificial
  Synthetic oligonucleotide
cagcatggctagctaggacagacgagaggggaagtcacccgacgcgagcg

SEQ ID NO: 277890 - DNA, 50 bp, Artificial
  Synthetic oligonucleotide
cagcctcgtcccgccaatgggcctaatgccgtcaatgggagaccggctcc

SEQ ID NO: 277891 - DNA, 55 bp, Artificial
  Synthetic oligonucleotide
cgactccaccagcagtttaacaacagacacgtgcttttatctagaattggaacga

SEQ ID NO: 277892 - DNA, 50 bp, Artificial
  Synthetic oligonucleotide
ggggtagggaacacggttaaggcgggacaagaagccggcgtcacaagcat

SEQ ID NO: 277893 - DNA, 50 bp, Artificial
  Synthetic oligonucleotide
cagcgcaatggcctgactggtgtgtcgccgttgaaggcgcttatgaccca

SEQ ID NO: 277894 - DNA, 50 bp, Artificial
  Synthetic oligonucleotide
ccctacgcctccacctcctgttccggctatcttgactatgcccgagccgc

SEQ ID NO: 277895 - DNA, 50 bp, Artificial
  Synthetic oligonucleotide
ccctcaatgtaggcgtgaggctcattggccccaaggaaagcagcttcgcc

SEQ ID NO: 277896 - DNA, 50 bp, Artificial
  Synthetic oligonucleotide
ccctcgtacgctcccagcggtgcactcgcggcaccatatgaccgtctagc

SEQ ID NO: 277897 - DNA, 50 bp, Artificial
  Synthetic oligonucleotide
ccctgcctttcgggcgtgtggcaatttacacgtggcatttcgggccacta

SEQ ID NO: 277898 - DNA, 50 bp, Artificial
  Synthetic oligonucleotide
ggagacgggagggcgtatacaggggctctggatatagcgcagagggtcgc

SEQ ID NO: 277899 - DNA, 50 bp, Artificial
  Synthetic oligonucleotide
ccgaagagcggctacacggtatgtgccctgcgatctgcggttttgtggga

SEQ ID NO: 277900 - DNA, 50 bp, Artificial
  Synthetic oligonucleotide
ccgcaagaaccggtgtgggcacccgacgagcagtcagcggaagagcgagc

SEQ ID NO: 277901 - DNA, 50 bp, Artificial
  Synthetic oligonucleotide
ggaccgtcgacctttggaacattagaagcggcaggcaccaaagtcgccgc

SEQ ID NO: 277902 - DNA, 56 bp, Artificial
  Synthetic oligonucleotide
atcggggtgtttcactatgtagtctgcctcccgttcgccgcaggtgtattctaccc

SEQ ID NO: 277903 - DNA, 55 bp, Artificial
  Synthetic oligonucleotide
cgagaaatgacgtatccgttccaaccctgtacaagctccactgatcgatacacac

SEQ ID NO: 277904 - DNA, 50 bp, Artificial
  Synthetic oligonucleotide
ccgcctctgacggcgtgtccaagaaacgagcggccatctcgccattgact

SEQ ID NO: 277905 - DNA, 50 bp, Artificial
  Synthetic oligonucleotide
ccgcggtcccctgcaatgtgcctgagctgcgtatgccggggtccatgggc

SEQ ID NO: 277906 - DNA, 50 bp, Artificial
  Synthetic oligonucleotide
ccgctactcctccaacatctgcggggacagcgcacatcgcaccaacactt

SEQ ID NO: 277907 - DNA, 50 bp, Artificial
  Synthetic oligonucleotide
ccgctgttggtctctctaccgaggccgcgattaccgtgctcggtcccaag

SEQ ID NO: 277908 - DNA, 50 bp, Artificial
  Synthetic oligonucleotide
ccggacacagtgaagacgcgatgcgcttcgggggaggtaggatggacatg

SEQ ID NO: 277909 - DNA, 50 bp, Artificial
  Synthetic oligonucleotide
ccggcatgtcccacgtctcactaaagtcatccgagctcccgacccagcgc

SEQ ID NO: 277910 - DNA, 50 bp, Artificial
  Synthetic oligonucleotide
ccgtaccagtccttccgcgtagtccctcccacagctcagacatccaccga

SEQ ID NO: 277911 - DNA, 50 bp, Artificial
  Synthetic oligonucleotide
ccgtgtgccttccagtgcgcatctctctgtcttcggcctcaccgctgtat

SEQ ID NO: 277912 - DNA, 50 bp, Artificial
  Synthetic oligonucleotide
cctaactcacagtcccatagcgcatcggctgcgggcccataagcgggtct

SEQ ID NO: 277913 - DNA, 50 bp, Artificial
  Synthetic oligonucleotide
cctacagagatgccatggacgagttgacactatgggacccgcggcggctt

SEQ ID NO: 277914 - DNA, 55 bp, Artificial
  Synthetic oligonucleotide
cgagacactaatccgtccgtctagtgaatctccatgagcacccctagcgcgtaga

SEQ ID NO: 277915 - DNA, 50 bp, Artificial
  Synthetic oligonucleotide
cctacgatcgcctccccacgcttcttcgtcccgtctacgtccgtggcgaa

SEQ ID NO: 277916 - DNA, 50 bp, Artificial
  Synthetic oligonucleotide
cctagacggaccgccaatcaagcgcgtagggggcaaggcaaacgtctcat

SEQ ID NO: 277917 - DNA, 50 bp, Artificial
  Synthetic oligonucleotide
cctagcaccctcttcaccccgaggagggaagggggcagtcgcgagcacag

SEQ ID NO: 277918 - DNA, 50 bp, Artificial
  Synthetic oligonucleotide
gctgagtaagtagcagcctgacgagcagtgatgcccgccgcactagcgct

SEQ ID NO: 277919 - DNA, 50 bp, Artificial
  Synthetic oligonucleotide
gctgagcgtgatcgggcaggctccacgttgatagactgagcgacgccaat

SEQ ID NO: 277920 - DNA, 50 bp, Artificial
  Synthetic oligonucleotide
gctgacgcgtagcagacccagccgccactatccgcacagctcaacaaggt

SEQ ID NO: 277921 - DNA, 50 bp, Artificial
  Synthetic oligonucleotide
cctccacttctacttcaaggggtagatcgcctacccgtgtccccggccct

SEQ ID NO: 277922 - DNA, 50 bp, Artificial
  Synthetic oligonucleotide
gctcggaggccgggaggacccttcgaagctttcgccttcgttggagggag

SEQ ID NO: 277923 - DNA, 50 bp, Artificial
  Synthetic oligonucleotide
ccttctcgcttcgcgggatgcttgtaccaatctcccacctggccctcgtt

SEQ ID NO: 277924 - DNA, 50 bp, Artificial
  Synthetic oligonucleotide
ccttgccctgttccgactcgactcgcatctcccgcgtcttgctcaactgc

SEQ ID NO: 277925 - DNA, 55 bp, Artificial
  Synthetic oligonucleotide
cgagactgtaacgcctagggctacaagacaacagagtcgtcaagtagacgcaagg

SEQ ID NO: 277926 - DNA, 50 bp, Artificial
  Synthetic oligonucleotide
ccttgggcaaagcggccccttcaactgcgttaccttcaacgtcctcgacc

SEQ ID NO: 277927 - DNA, 50 bp, Artificial
  Synthetic oligonucleotide
ccatctgtcggcactctccaaccagcattcgtcccggccacccctcctct

SEQ ID NO: 277928 - DNA, 50 bp, Artificial
  Synthetic oligonucleotide
ccatggttcacgcgcgacccgtcgtcctacaacgccagctcgtaccagtc

SEQ ID NO: 277929 - DNA, 50 bp, Artificial
  Synthetic oligonucleotide
ggccgtgccaccccggggcccaagtcaccttccctcggtgtaccttcggt

SEQ ID NO: 277930 - DNA, 50 bp, Artificial
  Synthetic oligonucleotide
cccaacgctcttgcgattctgggacggacatatccccctggcttcacccg

SEQ ID NO: 277931 - DNA, 50 bp, Artificial
  Synthetic oligonucleotide
cccaagggagattgggatccgctcttgcaggctttagcacgttgcggggt

SEQ ID NO: 277932 - DNA, 50 bp, Artificial
  Synthetic oligonucleotide
cccacgcgagagtcacgcggaaaccacgtgcgagtctccgacttgctact

SEQ ID NO: 277933 - DNA, 50 bp, Artificial
  Synthetic oligonucleotide
cccagaggacttacttgccgtggggcagggatgagacccgattcggtccc

SEQ ID NO: 277934 - DNA, 50 bp, Artificial
  Synthetic oligonucleotide
cccagctgcgtggtgtcgggaataagcggcccaatgagaagccgtctggt

SEQ ID NO: 277935 - DNA, 50 bp, Artificial
  Synthetic oligonucleotide
ggccaccaacacgactagcggattgagcgttccgcctcgcatctcgttcc

SEQ ID NO: 277936 - DNA, 55 bp, Artificial
  Synthetic oligonucleotide
cgagagactatccccggtatcaagacgcatgctatccccaccggtttgcaagtcc

SEQ ID NO: 277937 - DNA, 50 bp, Artificial
  Synthetic oligonucleotide
cccaggcgacgctggaccctcctctctcgactgggtgctcctgggtgaca

SEQ ID NO: 277938 - DNA, 50 bp, Artificial
  Synthetic oligonucleotide
ggcattcctatggagcgtacacacaacggtgcgacaaattaggtatcatg

SEQ ID NO: 277939 - DNA, 50 bp, Artificial
  Synthetic oligonucleotide
cccaggcggtacggcccggttggttgaggtggacgtgtgtgctgggagag

SEQ ID NO: 277940 - DNA, 50 bp, Artificial
  Synthetic oligonucleotide
cccataagcgctcccccgacttctatctccccggaggaccatgcccaact

SEQ ID NO: 277941 - DNA, 50 bp, Artificial
  Synthetic oligonucleotide
cccatacggccctcacgacgaacgtcagcctctcctgggtgcgatcacca

SEQ ID NO: 277942 - DNA, 50 bp, Artificial
  Synthetic oligonucleotide
ccccattggtaccaagcccgctcgtgcttctccattacccggctcgtcgc

SEQ ID NO: 277943 - DNA, 50 bp, Artificial
  Synthetic oligonucleotide
ccccgtctacgctgaccaaggcgccctgccaatgctctacgcggctctta

SEQ ID NO: 277944 - DNA, 50 bp, Artificial
  Synthetic oligonucleotide
cccctgaatccgcgcccgcgtgccattagcggcccgtccgtgtctaccaa

SEQ ID NO: 277945 - DNA, 50 bp, Artificial
  Synthetic oligonucleotide
ggcacgtctcgtccccctgggacatcattggtcctaacgtccgtgctgtc

SEQ ID NO: 277946 - DNA, 50 bp, Artificial
  Synthetic oligonucleotide
ggcaagttgagctagtgccgcagctcgtgtcgacgcgcattctcgttcct

SEQ ID NO: 277947 - DNA, 55 bp, Artificial
  Synthetic oligonucleotide
gcgttgtaaaggcggatggcaataagcgaagatgtgcgatggaatcagctgacgg

SEQ ID NO: 277948 - DNA, 50 bp, Artificial
  Synthetic oligonucleotide
cccctttggcacccccgctttgcacgtccgtaagccaggctcagacgtcg

SEQ ID NO: 277949 - DNA, 50 bp, Artificial
  Synthetic oligonucleotide
cccgacacacctttccgacgtggccatctggggttcctccaacgaccgtg

SEQ ID NO: 277950 - DNA, 50 bp, Artificial
  Synthetic oligonucleotide
cccgccagtctcagcacccacaaaccacgaaatcggtggtttcatgccgg

SEQ ID NO: 277951 - DNA, 50 bp, Artificial
  Synthetic oligonucleotide
cccgcctatgacctatcggcatttacacgtccacccgcgcacctctcacc

SEQ ID NO: 277952 - DNA, 50 bp, Artificial
  Synthetic oligonucleotide
cccgctaacccccgtaaagtccggcatgcccctcggccatttaccgtacg

SEQ ID NO: 277953 - DNA, 50 bp, Artificial
  Synthetic oligonucleotide
cccggaggctctcttgggaagtgttgttctgcctgtcaccctaggtggga

SEQ ID NO: 277954 - DNA, 50 bp, Artificial
  Synthetic oligonucleotide
ggatggtagtctcaacagggccggggacacgggtaggcgatctacccctt

SEQ ID NO: 277955 - DNA, 50 bp, Artificial
  Synthetic oligonucleotide
cccggcacttgtcaccctcataccggttatttcgatgggctggccgccag

SEQ ID NO: 277956 - DNA, 50 bp, Artificial
  Synthetic oligonucleotide
ggatcgacggaaagagcagcgccacttactcaacaggccagccatcccct

SEQ ID NO: 277957 - DNA, 50 bp, Artificial
  Synthetic oligonucleotide
ggatcccctccccgtcggtcttcgatccttaagccgtgctccatcgccca

SEQ ID NO: 277958 - DNA, 55 bp, Artificial
  Synthetic oligonucleotide
cgagccaaggatgcacgaggttgctgggctttaccgaaagtacaccgggcacggt

SEQ ID NO: 277959 - DNA, 50 bp, Artificial
  Synthetic oligonucleotide
cccgtggaacgggccatcccatcgactgtgcccctacaagcatcccactc

SEQ ID NO: 277960 - DNA, 50 bp, Artificial
  Synthetic oligonucleotide
ggagtcgaaccctacttgtacagatttgcaatccgtcagtgagtaaccgc

SEQ ID NO: 277961 - DNA, 55 bp, Artificial
  Synthetic oligonucleotide
cgagcgcgcatgcccggttgagtacccagaattatccggatttcgcctctggcga

SEQ ID NO: 277962 - DNA, 55 bp, Artificial
  Synthetic oligonucleotide
gcgttcgcgacctacacctattcagtgtacaagcccgaaaccgtcactcagactg

SEQ ID NO: 277963 - DNA, 55 bp, Artificial
  Synthetic oligonucleotide
cccagtgagcatgaattaacgatccttaaataatccgagcatacccttcgcggcg

SEQ ID NO: 277964 - DNA, 55 bp, Artificial
  Synthetic oligonucleotide
ggcatagaagacggcggtggacagtacgaagtaaactagagcgaggaacgcgcag

SEQ ID NO: 277965 - DNA, 60 bp, Artificial
  Synthetic oligonucleotide
atcctatactggcactttgtttgacgttgtatggctattcctatacgcagcagtttatat

SEQ ID NO: 277966 - DNA, 55 bp, Artificial
  Synthetic oligonucleotide
ccccaaagtacacacttgaagtactcgacctatttggaccgagagatggacgtgg

SEQ ID NO: 277967 - DNA, 55 bp, Artificial
  Synthetic oligonucleotide
ccccaaggcaagaatcggtactgagttggcgataagggagaggaccttggatcga

SEQ ID NO: 277968 - DNA, 55 bp, Artificial
  Synthetic oligonucleotide
ccccacggtatgcgttgtaggatagccagtgatgctggaagcgtttgtagtgaat

SEQ ID NO: 277969 - DNA, 55 bp, Artificial
  Synthetic oligonucleotide
ggcagtagatacaggcggaggtctcagaaaggaaatgtaccagtacattctgacc

SEQ ID NO: 277970 - DNA, 55 bp, Artificial
  Synthetic oligonucleotide
ccccgaagattcttggatacgcttgtggatgtacgaaggtgcaacatcaagctgc

SEQ ID NO: 277971 - DNA, 55 bp, Artificial
  Synthetic oligonucleotide
ccccgaggaatcttttgcccatggcaatcaagggtatggacactcgcctgctagc

SEQ ID NO: 277972 - DNA, 55 bp, Artificial
  Synthetic oligonucleotide
ccccgtgtacaaatgtacgtcttccgagtcttgctcaaatacacgccaagatggg

SEQ ID NO: 277973 - DNA, 54 bp, Artificial
  Synthetic oligonucleotide
cccctatggttttaatcgctaaccgcaacaacaggctattacctaaccaagcac

SEQ ID NO: 277974 - DNA, 55 bp, Artificial
  Synthetic oligonucleotide
ggcagctgcgtacactctccgccttttgatctcggacattacagactgaacggcg

SEQ ID NO: 277975 - DNA, 55 bp, Artificial
  Synthetic oligonucleotide
ggcaagctggcggtgtatacttcaagaacactgtcaagagactttggtctgggga

SEQ ID NO: 277976 - DNA, 59 bp, Artificial
  Synthetic oligonucleotide
tctatacaattctacggtcaattcctaacaagctactaggagtagttggaatgctagga

SEQ ID NO: 277977 - DNA, 55 bp, Artificial
  Synthetic oligonucleotide
ggcaagaggcgggcaagttggatagaccgacttggggtggatatcagacagagca

SEQ ID NO: 277978 - DNA, 55 bp, Artificial
  Synthetic oligonucleotide
cccgacccgactgacggctgactcttgttcgacagtctggaaggattcctctgct

SEQ ID NO: 277979 - DNA, 55 bp, Artificial
  Synthetic oligonucleotide
cccgagagtacactccagaggttttcatggtacttggcgttccagtcgtgtcgga

SEQ ID NO: 277980 - DNA, 55 bp, Artificial
  Synthetic oligonucleotide
ggcaacctaacctcgaagcggtgtcgcaggtcggagaatcatataaccccgcctg

SEQ ID NO: 277981 - DNA, 55 bp, Artificial
  Synthetic oligonucleotide
ggcaaacggccaatggcaaattctgcagggtatcaccttgggatggtacggtggc

SEQ ID NO: 277982 - DNA, 55 bp, Artificial
  Synthetic oligonucleotide
cccgcctttccgccagctaacctaactctcatccgtacggcacctgtcttcaccg

SEQ ID NO: 277983 - DNA, 55 bp, Artificial
  Synthetic oligonucleotide
cccgcgatacgatttctaccaaactcccaacgagcttatccttgctctgtacatt

SEQ ID NO: 277984 - DNA, 55 bp, Artificial
  Synthetic oligonucleotide
ggattggagagtcatcagacgaagaaaagtatggtcattgatggctacgttgttc

SEQ ID NO: 277985 - DNA, 55 bp, Artificial
  Synthetic oligonucleotide
ggattcagaaaagtcggagggactctggagagcgaggtcgcactctttcgcgtga

SEQ ID NO: 277986 - DNA, 55 bp, Artificial
  Synthetic oligonucleotide
ggatgcgctgcagggtccatggtgttatctatcggctgctctgtcaaaattaccc

SEQ ID NO: 277987 - DNA, 53 bp, Artificial
  Synthetic oligonucleotide
gttgactacgtccacccccgaaagttccctgtccttggccccatcacccgatg

SEQ ID NO: 277988 - DNA, 55 bp, Artificial
  Synthetic oligonucleotide
cccgtccagatcccactgctgatattcgatcagaatttgatggctatcatgagcg

SEQ ID NO: 277989 - DNA, 55 bp, Artificial
  Synthetic oligonucleotide
ggatataaccccatcgattgatagaatgccatagatgtcggtgagaactcgccag

SEQ ID NO: 277990 - DNA, 53 bp, Artificial
  Synthetic oligonucleotide
cccgtttaaggggtccgacaatgcagcaagccccggttaccgattatggaatg

SEQ ID NO: 277991 - DNA, 55 bp, Artificial
  Synthetic oligonucleotide
ccagcgtagggtacgagaaacacttgactagtcacctacgacagacaggatagga

SEQ ID NO: 277992 - DNA, 55 bp, Artificial
  Synthetic oligonucleotide
ggcggactacgatgcgaagatgtctcgcgagatgacttggattgttgactatgtg

SEQ ID NO: 277993 - DNA, 55 bp, Artificial
  Synthetic oligonucleotide
ggcgcagcattccttttaaacctgtataccgcgcaagctcgaggtgtcaccaagc

SEQ ID NO: 277994 - DNA, 55 bp, Artificial
  Synthetic oligonucleotide
ggcgagctttagcttatttcgcattgactttcaattggaaacatactcgaaggag

SEQ ID NO: 277995 - DNA, 55 bp, Artificial
  Synthetic oligonucleotide
ccagtatctgggttggtaccaaaataccccagagcatcctggggcgtaaatgtcc

SEQ ID NO: 277996 - DNA, 55 bp, Artificial
  Synthetic oligonucleotide
ccataacaacgaccgacgattgttcgctattgctcacgccatgcttaacctcgac

SEQ ID NO: 277997 - DNA, 55 bp, Artificial
  Synthetic oligonucleotide
ccatatgaaagtgtataaggagacttggatcgaagatgcttggactgttgagccc

SEQ ID NO: 277998 - DNA, 60 bp, Artificial
  Synthetic oligonucleotide
taaggattgtgctggcaagttgatcgcacagggatgaatcacactgcccggttcctgcgg

SEQ ID NO: 277999 - DNA, 55 bp, Artificial
  Synthetic oligonucleotide
ccatcctcttacaaactctgacctgtagacgcttttccccagccttggccatagc

SEQ ID NO: 278000 - DNA, 55 bp, Artificial
  Synthetic oligonucleotide
ccatctctcccaaggcgtcattctgataagcgtctagaacacttcgattggttcg

SEQ ID NO: 278001 - DNA, 55 bp, Artificial
  Synthetic oligonucleotide
ggcctgtaggagaagagtacgatccggagagggatggggacgacccagaaatgtc

SEQ ID NO: 278002 - DNA, 55 bp, Artificial
  Synthetic oligonucleotide
ccatgaaaaggctccattactcacttctgtagcctcatgctcttgtatcttccac

SEQ ID NO: 278003 - DNA, 55 bp, Artificial
  Synthetic oligonucleotide
ccatggcctctactaatgggaaatgcactactttcaatgatggttagcgcagtac

SEQ ID NO: 278004 - DNA, 55 bp, Artificial
  Synthetic oligonucleotide
ggcctggatttacctttttcgcaggtggccctatctggggccttgactggtgtcc

SEQ ID NO: 278005 - DNA, 55 bp, Artificial
  Synthetic oligonucleotide
ggcctcggagactgtatatcatctcagttcgcgaccttttctgataagggcagac

SEQ ID NO: 278006 - DNA, 55 bp, Artificial
  Synthetic oligonucleotide
ccattggagggtgaaatggtcgcaataaacgtggaccggtaccccataaagcagc

SEQ ID NO: 278007 - DNA, 55 bp, Artificial
  Synthetic oligonucleotide
cccaaatcccttctatccaacgtgaaccaaagcacacttctaccattgcgcgaac

SEQ ID NO: 278008 - DNA, 55 bp, Artificial
  Synthetic oligonucleotide
ggcccttgggagcaccaccgtaaatggcagtgttcctaattcgggaagattgacc

SEQ ID NO: 278009 - DNA, 60 bp, Artificial
  Synthetic oligonucleotide
gccaatctagcagggcgtcagtagtggacgcaaggtacacagacggagaactcgcctgaa

SEQ ID NO: 278010 - DNA, 55 bp, Artificial
  Synthetic oligonucleotide
ggcccggactgtccctgatggagtggtggcattctttcccagttatctgtatatg

SEQ ID NO: 278011 - DNA, 55 bp, Artificial
  Synthetic oligonucleotide
ggcccgctcgttagagacggcatacccatgacttgactcgggctcgtcatacagg

SEQ ID NO: 278012 - DNA, 55 bp, Artificial
  Synthetic oligonucleotide
cccaccttcaaccatgaaccatcttgcgcttctaaagcgtatcacgaatattctc

SEQ ID NO: 278013 - DNA, 55 bp, Artificial
  Synthetic oligonucleotide
ggcccgcaaagaagctagagtgagtctccttcctttgtcaattggtgaggcacgc

SEQ ID NO: 278014 - DNA, 55 bp, Artificial
  Synthetic oligonucleotide
ggccattgctggaatgtcaatacttgatccttgttggactgtatccttatcttaa

SEQ ID NO: 278015 - DNA, 55 bp, Artificial
  Synthetic oligonucleotide
cccagctaaactcggattctctcttcagcccgaacgtatcaagtcggaaacagcc

SEQ ID NO: 278016 - DNA, 55 bp, Artificial
  Synthetic oligonucleotide
ggccactgtcgctcctcggaagtgtaccgcctgaagtagcaccgcccaatacgct

SEQ ID NO: 278017 - DNA, 55 bp, Artificial
  Synthetic oligonucleotide
ggccaaggaactattaggtctgtctcatcagcccaggaatggctcagaaagtggg

SEQ ID NO: 278018 - DNA, 55 bp, Artificial
  Synthetic oligonucleotide
cccagtctcatctgccaagaagggaggtgtcgaagcatagagccatagtacaccc

SEQ ID NO: 278019 - DNA, 55 bp, Artificial
  Synthetic oligonucleotide
ccgctggatccgatcgattcgcctatctccccgccactcacccatgactcactcc

SEQ ID NO: 278020 - DNA, 60 bp, Artificial
  Synthetic oligonucleotide
agtcgaaagaccgaaacgtcaatgattagaccgttcttaggcacatggagtgaagcatgc

SEQ ID NO: 278021 - DNA, 55 bp, Artificial
  Synthetic oligonucleotide
ccgcttggaacgtcctcaaccactcttctattccacctctgatcaggcgtctcca

SEQ ID NO: 278022 - DNA, 55 bp, Artificial
  Synthetic oligonucleotide
ggaatgaatacttgtgagagttctaatcactatatttcgttccctacgcgcgggc

SEQ ID NO: 278023 - DNA, 55 bp, Artificial
  Synthetic oligonucleotide
ccggaaacatgggtaatttacacttacatccagacagcttctgcgacactttcca

SEQ ID NO: 278024 - DNA, 55 bp, Artificial
  Synthetic oligonucleotide
ggaagttggacgagcccaagaatagtctgtggaggacgtagggagacatgtgaga

SEQ ID NO: 278025 - DNA, 55 bp, Artificial
  Synthetic oligonucleotide
ccggagaggcatgatctccgttctgtcctcgaaagtggatggggaggagcagtgt

SEQ ID NO: 278026 - DNA, 55 bp, Artificial
  Synthetic oligonucleotide
ggaagtgctgcgtaggatggcgggtgtgtactggttaggtttggtagcgtcatga

SEQ ID NO: 278027 - DNA, 55 bp, Artificial
  Synthetic oligonucleotide
ccggcattgactggtcatcgaatggtacctttccgcacaccaagacgtagatgac

SEQ ID NO: 278028 - DNA, 55 bp, Artificial
  Synthetic oligonucleotide
ccggcgaggaaaaggatgtcgttaccctccgcgtagaatggcataaggacaccac

SEQ ID NO: 278029 - DNA, 53 bp, Artificial
  Synthetic oligonucleotide
ccggtaggcgttctacgagcggagaggaggttccggtcaagaccagggaccac

SEQ ID NO: 278030 - DNA, 55 bp, Artificial
  Synthetic oligonucleotide
ccggtcgcgactgtcaaaatcatgtggcgtgagtttctaatgtctctgcttttat

SEQ ID NO: 278031 - DNA, 60 bp, Artificial
  Synthetic oligonucleotide
tacacgcatattattcgatataagacttggtcttatatcaatcgtaagaagaagcatgta

SEQ ID NO: 278032 - DNA, 56 bp, Artificial
  Synthetic oligonucleotide
ctgcgagagtccattcggcctgtgtgggaagggaagcccgggtgaacggaggagga

SEQ ID NO: 278033 - DNA, 55 bp, Artificial
  Synthetic oligonucleotide
gcttttcaacgctatcctcgtggcttccaagaacgccgaagctgctcagactact

SEQ ID NO: 278034 - DNA, 55 bp, Artificial
  Synthetic oligonucleotide
ccgtccgtctagtgaatctccatgagcacccctagcgcgtagaataatctgacgt

SEQ ID NO: 278035 - DNA, 55 bp, Artificial
  Synthetic oligonucleotide
gctttcgagacttgtagttccgcaaaatgttcgacactttaggcgataaccctca

SEQ ID NO: 278036 - DNA, 55 bp, Artificial
  Synthetic oligonucleotide
gcttcggacactattactacactcgtagtcgccctctggataattagagtcccga

SEQ ID NO: 278037 - DNA, 55 bp, Artificial
  Synthetic oligonucleotide
ccgtgtgcgtactctttcaagaagtagtatcgccaaagagcatgctaaccctcgt

SEQ ID NO: 278038 - DNA, 55 bp, Artificial
  Synthetic oligonucleotide
ccgttaacgcactttccaagtacaagtgggacagaatctgatgccaactgcagaa

SEQ ID NO: 278039 - DNA, 55 bp, Artificial
  Synthetic oligonucleotide
ccgttcaagctagagctgacatctcagatgaggagtatcgatcccgactaccggt

SEQ ID NO: 278040 - DNA, 54 bp, Artificial
  Synthetic oligonucleotide
ccgtttgtataccctcattaccggtgggacttccagatccctcgagttcatagg

SEQ ID NO: 278041 - DNA, 55 bp, Artificial
  Synthetic oligonucleotide
gcttaacactctcgggagtgccagagcaatcgtggtagactgtaatttcgggagt

SEQ ID NO: 278042 - DNA, 55 bp, Artificial
  Synthetic oligonucleotide
gctggaccgattggaggtggcctttcggtaccaagagcctgtctaaagattgagc

SEQ ID NO: 278043 - DNA, 60 bp, Artificial
  Synthetic oligonucleotide
tcatcccaaggagtccgccagggggatccattcggccctctgttcttctcgattgctctc

SEQ ID NO: 278044 - DNA, 55 bp, Artificial
  Synthetic oligonucleotide
cctacgtagatggctgtgacatcctacttgtgagagcaagtacgtcaatacgcct

SEQ ID NO: 278045 - DNA, 55 bp, Artificial
  Synthetic oligonucleotide
gctgatcctattctcttaggcccatatccttcccgttttcacgcccgaatacgtc

SEQ ID NO: 278046 - DNA, 55 bp, Artificial
  Synthetic oligonucleotide
gctgaagcttgcactttgttggaagttcctattcgactattgcaacttgagtatg

SEQ ID NO: 278047 - DNA, 55 bp, Artificial
  Synthetic oligonucleotide
cctattattgcacggaatgtactagactagaaaaggatcgagatgggtgtccgcg

SEQ ID NO: 278048 - DNA, 55 bp, Artificial
  Synthetic oligonucleotide
cctcaaaacaacgcttcaccgaatctatggtaaattcctgaatctacgagcattc

SEQ ID NO: 278049 - DNA, 55 bp, Artificial
  Synthetic oligonucleotide
ccctaacacgattaccgacggtctcaaatacgctcttgctacaggcaactggggc

SEQ ID NO: 278050 - DNA, 55 bp, Artificial
  Synthetic oligonucleotide
ggagtagacatcgaagtctgagatcacatgccttgtaaagcgtcgggcctttgct

SEQ ID NO: 278051 - DNA, 55 bp, Artificial
  Synthetic oligonucleotide
ggaggtcacaagagcttgccaagagtaaatgcccaatctctctcgtgcaaggaac

SEQ ID NO: 278052 - DNA, 55 bp, Artificial
  Synthetic oligonucleotide
ggaggggcatgccagttgcaattcggaagatggcggtttgagacgcatagatagg

SEQ ID NO: 278053 - DNA, 55 bp, Artificial
  Synthetic oligonucleotide
ccctcatattcctccgggttagaccgggtgataatgtgggactgagggcggggca

SEQ ID NO: 278054 - DNA, 55 bp, Artificial
  Synthetic oligonucleotide
tcccggtgactctatgggccttccaaaaacctatggacttgagatccggaagttg

SEQ ID NO: 278055 - DNA, 55 bp, Artificial
  Synthetic oligonucleotide
ccctcgagcgcccgacccacgattctggccgtagacaagattgcgcaaactctcc

SEQ ID NO: 278056 - DNA, 55 bp, Artificial
  Synthetic oligonucleotide
ccctcggcaggaggcgcttccgctcgcacaatacctggagaaatttcgttgaggg

SEQ ID NO: 278057 - DNA, 55 bp, Artificial
  Synthetic oligonucleotide
ggagggaattgatttgtccaccagagcctttgagctacggttagactcgtcttcg

SEQ ID NO: 278058 - DNA, 55 bp, Artificial
  Synthetic oligonucleotide
ccctgccagcgaggagtcctccaacgtccttctcgtctacaccggacctgccggt

SEQ ID NO: 278059 - DNA, 55 bp, Artificial
  Synthetic oligonucleotide
ccctggtgttgactggattctggcatcctttcttcctcgctattatctgagaccg

SEQ ID NO: 278060 - DNA, 55 bp, Artificial
  Synthetic oligonucleotide
cccttagcacccgagttgtttgggatcttgacgggaagtagcaataactggatgc

SEQ ID NO: 278061 - DNA, 53 bp, Artificial
  Synthetic oligonucleotide
ggagcagcacctccgggaaggtagggctttacgactcggttaccgttgaccca

SEQ ID NO: 278062 - DNA, 55 bp, Artificial
  Synthetic oligonucleotide
ccgaactaggctgacaagactacagcgctcgacactaatagtcccttggctctcc

SEQ ID NO: 278063 - DNA, 55 bp, Artificial
  Synthetic oligonucleotide
ccgacggtggtcacaagcatagctgcttatgaaatcgccctatggggctcccaat

SEQ ID NO: 278064 - DNA, 52 bp, Artificial
  Synthetic oligonucleotide
ccgactttcgtactccaagaactctctcggccaacgaggtaacaaccacccg

SEQ ID NO: 278065 - DNA, 53 bp, Artificial
  Synthetic oligonucleotide
aacaccgtaggatggccttcggggacgaaccatttgacagggaggccgaccat

SEQ ID NO: 278066 - DNA, 55 bp, Artificial
  Synthetic oligonucleotide
ccgagaacgaatggcacaagtacaagttatctagatgtagaacagcgtttaggcc

SEQ ID NO: 278067 - DNA, 55 bp, Artificial
  Synthetic oligonucleotide
ggacgagacatccaacaccatctagatatgcacgagcgggaaacaagggatacgg

SEQ ID NO: 278068 - DNA, 55 bp, Artificial
  Synthetic oligonucleotide
ccgcagtgtcacaagagattaggcatgtctgccattgcagtgcacgcaccgaggt

SEQ ID NO: 278069 - DNA, 55 bp, Artificial
  Synthetic oligonucleotide
ccgccgacgaggtatccttgactttcggatttggcgagttgaccttcgaggacag

SEQ ID NO: 278070 - DNA, 55 bp, Artificial
  Synthetic oligonucleotide
ggacccttcttagaatatgtggtacgaaatcctttggtcaaattggactcgcgcg

SEQ ID NO: 278071 - DNA, 55 bp, Artificial
  Synthetic oligonucleotide
ccgccttcaaatggagtggcacattctcgcaattcacgaaatcccagagcacacc

SEQ ID NO: 278072 - DNA, 55 bp, Artificial
  Synthetic oligonucleotide
ccgcgggccgcttgttgttagtgattcgtcaacacaagtaggttagaaacgcacg

SEQ ID NO: 278073 - DNA, 55 bp, Artificial
  Synthetic oligonucleotide
ggaccccgatataagcttgaagttttgcccaccaatgccgtagatcataatcccc

SEQ ID NO: 278074 - DNA, 55 bp, Artificial
  Synthetic oligonucleotide
ggacatatgctctgtggagtcgcaagactatctgtacggtcaatcgtagcaaccg

SEQ ID NO: 278075 - DNA, 55 bp, Artificial
  Synthetic oligonucleotide
ccgctcaacatctaaacccataatcgggactctaattatccagagggcgaccacg

SEQ ID NO: 278076 - DNA, 59 bp, Artificial
  Synthetic oligonucleotide
tctgcgaccgatccgactgtacccgaccatgatccctataacctaccttgtcgcaccca

SEQ ID NO: 278077 - DNA, 55 bp, Artificial
  Synthetic oligonucleotide
ccgctgctctgacctcccgtcacaaccgctttctgggtacttgcgctttccagcg

SEQ ID NO: 278078 - DNA, 55 bp, Artificial
  Synthetic oligonucleotide
ctgctggcacggtaagttgggtctcgatcgcccaatatcatcgctgcttgacgtg

SEQ ID NO: 278079 - DNA, 55 bp, Artificial
  Synthetic oligonucleotide
gcagcaccgaacgggaaaggacgcactcaaatcagcgcatatgtcattcctatgc

SEQ ID NO: 278080 - DNA, 55 bp, Artificial
  Synthetic oligonucleotide
ctggatttagcaccgtggaaccagcctagtggagcaaattgggacgatgcctaac

SEQ ID NO: 278081 - DNA, 55 bp, Artificial
  Synthetic oligonucleotide
ctggggacagtacggtggtcactatggatctaggaactattctcactggcagcag

SEQ ID NO: 278082 - DNA, 55 bp, Artificial
  Synthetic oligonucleotide
ctggttgtaactggagggtgacaatacgggatgaaaattacaagccgcaccgtta

SEQ ID NO: 278083 - DNA, 55 bp, Artificial
  Synthetic oligonucleotide
ctgtggaaggctaggtaagttcactattcggcgataataaactcgtatgcagtat

SEQ ID NO: 278084 - DNA, 55 bp, Artificial
  Synthetic oligonucleotide
ctgttcgccaagctttgttagcttgcgatatccattgcaaagcctccactcacac

SEQ ID NO: 278085 - DNA, 55 bp, Artificial
  Synthetic oligonucleotide
ctgttggctgttgtcggaaggtagggaaggccattcctacgtaatcggtagatct

SEQ ID NO: 278086 - DNA, 55 bp, Artificial
  Synthetic oligonucleotide
gcagacggcaaaaggacgtactgagggacggaataacgtcgagtgggtccttgga

SEQ ID NO: 278087 - DNA, 55 bp, Artificial
  Synthetic oligonucleotide
ccattcggcctgtgtgggaagggaagcccgggtgaacggaggaggacgagccaga

SEQ ID NO: 278088 - DNA, 55 bp, Artificial
  Synthetic oligonucleotide
cttacagcctgtggtcgatccaatcacttgatcgaataagctactcaacatgctc

SEQ ID NO: 278089 - DNA, 55 bp, Artificial
  Synthetic oligonucleotide
cttacgtcgctgcccctcatccacacatagcacctcccatcgagggatggcagag

SEQ ID NO: 278090 - DNA, 55 bp, Artificial
  Synthetic oligonucleotide
gcactttgtttgacgttgtatggctattcctatacgcagcagtttatatctgggg

SEQ ID NO: 278091 - DNA, 55 bp, Artificial
  Synthetic oligonucleotide
cttcatatactaaccaccccttagcacggtgtacgcctcagtcgggttctcaacc

SEQ ID NO: 278092 - DNA, 55 bp, Artificial
  Synthetic oligonucleotide
cttcctctagtcagcactaatactcgaatgtctactgtgtaggccgcttgtgtag

SEQ ID NO: 278093 - DNA, 55 bp, Artificial
  Synthetic oligonucleotide
cttcgaacgaccttcagtaggctggcgagtaagattagctcgtggaccagtaggt

SEQ ID NO: 278094 - DNA, 55 bp, Artificial
  Synthetic oligonucleotide
gcactgggcgtgacaatggtattgccaggtgcccttcacgctaggatcctggcta

SEQ ID NO: 278095 - DNA, 55 bp, Artificial
  Synthetic oligonucleotide
cttcgtacaaacagtctcgtagaacagtgtactagatagtgatacatacctggtc

SEQ ID NO: 278096 - DNA, 55 bp, Artificial
  Synthetic oligonucleotide
gcacgttttacgcgatattgcggctactggacggacagttataggtatgcgccca

SEQ ID NO: 278097 - DNA, 55 bp, Artificial
  Synthetic oligonucleotide
cttgccgtaccttccatcaggcaagcggtttgaagggaagataaggtgttcaaat

SEQ ID NO: 278098 - DNA, 60 bp, Artificial
  Synthetic oligonucleotide
gctgcacatgcgcgaatcaggcacatgacagtgtttgcgtatgaaaggtgactcgggggc

SEQ ID NO: 278099 - DNA, 55 bp, Artificial
  Synthetic oligonucleotide
cttggagtccacggaaaggaccatggcgccaacttcttctcggaagtaaactgtg

SEQ ID NO: 278100 - DNA, 55 bp, Artificial
  Synthetic oligonucleotide
cttggtactgacaaattgcctacctttcgattctgcgtagctgtaacgtgcaagc

SEQ ID NO: 278101 - DNA, 55 bp, Artificial
  Synthetic oligonucleotide
gcacctcatagctgacaaactatgcaggaatacacaggttctacccgcacttttg

SEQ ID NO: 278102 - DNA, 55 bp, Artificial
  Synthetic oligonucleotide
cttgtgctagttcggtcacacctccataagtcgggccggcattctgcgaggaagg

SEQ ID NO: 278103 - DNA, 55 bp, Artificial
  Synthetic oligonucleotide
gccatctggcatcttggatcgaccttactttcggttataaacaaagggacccggc

SEQ ID NO: 278104 - DNA, 55 bp, Artificial
  Synthetic oligonucleotide
gccagtgagaataggtcctagatccatagtgaccaccgtactgtccccagtcctg

SEQ ID NO: 278105 - DNA, 55 bp, Artificial
  Synthetic oligonucleotide
ctcggcacacgttatcgtaggggcggatagtaaggtattcggagacctcataagg

SEQ ID NO: 278106 - DNA, 54 bp, Artificial
  Synthetic oligonucleotide
gccagaatcaaggtcgtaaactcggacccaagggtcagacgtactaccggccac

SEQ ID NO: 278107 - DNA, 55 bp, Artificial
  Synthetic oligonucleotide
gccaaggaaatccgccattccctgtgaaataccaatgacggccgctaaactgtca

SEQ ID NO: 278108 - DNA, 55 bp, Artificial
  Synthetic oligonucleotide
gccaagagtttacataggaccaataagggtctgtatacgcagcgacccagtcaca

SEQ ID NO: 278109 - DNA, 59 bp, Artificial
  Synthetic oligonucleotide
acgcgtcatcctttcgcagtcctaacgcagataggttcgcgcctccagcctccaatagg

SEQ ID NO: 278110 - DNA, 55 bp, Artificial
  Synthetic oligonucleotide
gccaaactaacgaacgcttacgacatctgaacctccatgtaagcgagaccacttg

SEQ ID NO: 278111 - DNA, 55 bp, Artificial
  Synthetic oligonucleotide
ctcgttggtagaggcgaatatgtcttactccgcagagagcccaccaacaagtggg

SEQ ID NO: 278112 - DNA, 55 bp, Artificial
  Synthetic oligonucleotide
ctctacactctcctccctactaactttctcgaccttacccaccactctgacttgc

SEQ ID NO: 278113 - DNA, 55 bp, Artificial
  Synthetic oligonucleotide
gcatgttcgttggtctcccgtcctgaagagcgcagcctataataggccagttccc

SEQ ID NO: 278114 - DNA, 55 bp, Artificial
  Synthetic oligonucleotide
ctctcattttcggtggcacatactccggtcaagtgctcctgtgggatactcgagc

SEQ ID NO: 278115 - DNA, 54 bp, Artificial
  Synthetic oligonucleotide
ctctggcgatacgaaaactttggaaggttagtccgctggaaagattgggacgga

SEQ ID NO: 278116 - DNA, 55 bp, Artificial
  Synthetic oligonucleotide
ctcttatacttggggtgcatggtaacgattaatctgtcgagattcttgacaaacc

SEQ ID NO: 278117 - DNA, 55 bp, Artificial
  Synthetic oligonucleotide
ctcttgcgcaacgttgaatagctgggacaccgttaatcatcttttgaacggtacg

SEQ ID NO: 278118 - DNA, 55 bp, Artificial
  Synthetic oligonucleotide
ctgaacgttcttccccaggactcttgccaggatggccactgacgcgagaccatac

SEQ ID NO: 278119 - DNA, 55 bp, Artificial
  Synthetic oligonucleotide
ctgacagtgggaaattcgctatataggaagcgggatagcatacgtagtgtagggt

SEQ ID NO: 278120 - DNA, 60 bp, Artificial
  Synthetic oligonucleotide
tccagaccagccgtgcgacgcactcaaccaagagagcaatcagtacgggagagaaatgga

SEQ ID NO: 278121 - DNA, 55 bp, Artificial
  Synthetic oligonucleotide
ctgacgaacaaagtagacgctggtttacagcgcttactcgcctgtagccagtcgt

SEQ ID NO: 278122 - DNA, 55 bp, Artificial
  Synthetic oligonucleotide
gcatcttagtaagtcgcagagttccaagagggctctcgaaagtagtcacatctcg

SEQ ID NO: 278123 - DNA, 55 bp, Artificial
  Synthetic oligonucleotide
gcagtcatggttctaggacttcactcgaggttgacgagtctggtatgcgatcact

SEQ ID NO: 278124 - DNA, 55 bp, Artificial
  Synthetic oligonucleotide
ctgattggaagcgtccttcggtcttggatcgaactcggttgacgtatatttccgg

SEQ ID NO: 278125 - DNA, 55 bp, Artificial
  Synthetic oligonucleotide
ctgcaaccgtgcaggctatgcacttgatgggtacgtacatcctcaatgataaacg

SEQ ID NO: 278126 - DNA, 55 bp, Artificial
  Synthetic oligonucleotide
ctgcaacggtgcatctttccggccagaaggtgagtcgtcgattgtagagttgaag

SEQ ID NO: 278127 - DNA, 55 bp, Artificial
  Synthetic oligonucleotide
ctgccgaaagatctcacataggatatatgcggatggggatatctgtttgaacgag

SEQ ID NO: 278128 - DNA, 55 bp, Artificial
  Synthetic oligonucleotide
ctgcgaccatcgtctatgagcagctaaacagggattcatactacgtcgacttacc

SEQ ID NO: 278129 - DNA, 55 bp, Artificial
  Synthetic oligonucleotide
ctgctattggtctcgcgtgctctaacgccattcaagacccctacctcatttggcc

SEQ ID NO: 278130 - DNA, 55 bp, Artificial
  Synthetic oligonucleotide
gacgattgtcaatacgagggaaggcgacgagctccagtagacccgaactgagggg

SEQ ID NO: 278131 - DNA, 60 bp, Artificial
  Synthetic oligonucleotide
actatcaagtggtgctacagtaacatatgcacaccacgctctaatttatggaaaccgacg

SEQ ID NO: 278132 - DNA, 55 bp, Artificial
  Synthetic oligonucleotide
gacggtcgttgagaatcacaagaagagtgagcatacgctgtgaaggattggaacc

SEQ ID NO: 278133 - DNA, 55 bp, Artificial
  Synthetic oligonucleotide
gacgtctcggagcttgggagtaagaccagcgcgaactacattgtcggatgtagcc

SEQ ID NO: 278134 - DNA, 55 bp, Artificial
  Synthetic oligonucleotide
gacgttcagtttgcgagggttgctttgcctacgaggcttgataaccgcgtgatgg

SEQ ID NO: 278135 - DNA, 55 bp, Artificial
  Synthetic oligonucleotide
gacgtttgtagtgtgttgaaagagtggataagtgatgtctaggcgaggacgccag

SEQ ID NO: 278136 - DNA, 55 bp, Artificial
  Synthetic oligonucleotide
gactcgagactgactcgacgacagccaatgtggccagggatgggtaccgaaatcg

SEQ ID NO: 278137 - DNA, 55 bp, Artificial
  Synthetic oligonucleotide
gatcatcgcatctataatttcggacagataccgcaacagaggatggcccacgcaa

SEQ ID NO: 278138 - DNA, 55 bp, Artificial
  Synthetic oligonucleotide
gatatgtatgactactatcccgctatgatgtgaggccatatccatgcgagaccac

SEQ ID NO: 278139 - DNA, 55 bp, Artificial
  Synthetic oligonucleotide
gagacgttgactcagttcattaaccctgagggtgcctcgcgtgagatccttatcc

SEQ ID NO: 278140 - DNA, 55 bp, Artificial
  Synthetic oligonucleotide
gagagaagctgtcacgacaactttggcaggtccgcaaggatcagacattcggcgg

SEQ ID NO: 278141 - DNA, 55 bp, Artificial
  Synthetic oligonucleotide
gatatgagcacagtgcctttaatgaagatcgcatgactgactagctgaaaagtgg

SEQ ID NO: 278142 - DNA, 60 bp, Artificial
  Synthetic oligonucleotide
atggtagaatcatctccatggcctctactaatgggaaatgcactactttcaatgatggtt

SEQ ID NO: 278143 - DNA, 60 bp, Artificial
  Synthetic oligonucleotide
actagtaggatcagtactatatgacatttatcatactcgagtcatccgatactatcgagg

SEQ ID NO: 278144 - DNA, 55 bp, Artificial
  Synthetic oligonucleotide
gagcagcgacagtaagctgatactgcccctgaggcttgcccttactttgagcgag

SEQ ID NO: 278145 - DNA, 55 bp, Artificial
  Synthetic oligonucleotide
gatacgtcaatccctatcgtactccccgctgacagctccgtagtcaccttcaccc

SEQ ID NO: 278146 - DNA, 55 bp, Artificial
  Synthetic oligonucleotide
gagccgggatttcgcgcctgtacagcttgtcccagtcgacttctgcgaaccaccc

SEQ ID NO: 278147 - DNA, 55 bp, Artificial
  Synthetic oligonucleotide
gagcgctaaagtgtataatgccacgaaccacggtaattcaggtgtgcaagagggg

SEQ ID NO: 278148 - DNA, 55 bp, Artificial
  Synthetic oligonucleotide
gagtttgaagactatgaagctcgtgccgaagcgactttcctcagcatgggacctc

SEQ ID NO: 278149 - DNA, 55 bp, Artificial
  Synthetic oligonucleotide
gagttccctgaataggcacctccttgaccgtggggacggttgtactgggctccgc

SEQ ID NO: 278150 - DNA, 55 bp, Artificial
  Synthetic oligonucleotide
gagtcttgtagcgaggtacattctgagcggcctctcccatcgcttgggcccatcg

SEQ ID NO: 278151 - DNA, 55 bp, Artificial
  Synthetic oligonucleotide
gagctcagacggcaaaacgtgagttcattcgaaccgactcagaaacttatcatgc

SEQ ID NO: 278152 - DNA, 55 bp, Artificial
  Synthetic oligonucleotide
gagctcgggcctgttatctcatgctcgcaaaatgggtttcggcgggctcaacgca

SEQ ID NO: 278153 - DNA, 55 bp, Artificial
  Synthetic oligonucleotide
gagtatttgaccgtatcgaccactgtacaaccgaaatcttgtgaccgtccaacgc

SEQ ID NO: 278154 - DNA, 52 bp, Artificial
  Synthetic oligonucleotide
ccctaccttactcccgatggagggtctcgcgttcccgtctccaataacgaaa

SEQ ID NO: 278155 - DNA, 55 bp, Artificial
  Synthetic oligonucleotide
gaggaggttagtctctggtcgctcatcagtggccgatggttggactgatgatagg

SEQ ID NO: 278156 - DNA, 55 bp, Artificial
  Synthetic oligonucleotide
gaggctactacatgggtatgacatggatcagtgacgtacgtctttcctatacccc

SEQ ID NO: 278157 - DNA, 53 bp, Artificial
  Synthetic oligonucleotide
gagggtcatgcgggaactattactatagtcggtttacctgtaatttccggacc

SEQ ID NO: 278158 - DNA, 54 bp, Artificial
  Synthetic oligonucleotide
gcacccaggcccttgtccctatcccattttccacccgtcccgatcactctaagg

SEQ ID NO: 278159 - DNA, 55 bp, Artificial
  Synthetic oligonucleotide
gcacaacgtcacacttggatcggtctgcgagcgattagtcagcataattgagtct

SEQ ID NO: 278160 - DNA, 55 bp, Artificial
  Synthetic oligonucleotide
gcaatccaattcggccttcatgcaaatcgatgctgcaaccctccaagctctcgag

SEQ ID NO: 278161 - DNA, 55 bp, Artificial
  Synthetic oligonucleotide
gcaagggcaccaacacgtcccgagtgaccagacataacacgaatacgtttgcagt

SEQ ID NO: 278162 - DNA, 55 bp, Artificial
  Synthetic oligonucleotide
gaacgtacgcatagagcagactcagataggtatgtcgattcgattttcgcccaga

SEQ ID NO: 278163 - DNA, 55 bp, Artificial
  Synthetic oligonucleotide
gcaaacggctactgcgttgtctcttaatccgtttaattgtccgacccagctttgg

SEQ ID NO: 278164 - DNA, 55 bp, Artificial
  Synthetic oligonucleotide
gaagcgtactggcctccgatacacttgtggggaccgctaccccagacaaggtagt

SEQ ID NO: 278165 - DNA, 59 bp, Artificial
  Synthetic oligonucleotide
ggtcgagcagagtcatagtagccctgttggtagccatagcccgcagacgaactgggtct

SEQ ID NO: 278166 - DNA, 55 bp, Artificial
  Synthetic oligonucleotide
gattgagggataatcctaaagaggtgtaccgatttaaagacaggctcgctgcacc

SEQ ID NO: 278167 - DNA, 55 bp, Artificial
  Synthetic oligonucleotide
gaaggccctcattcccagccccagtacctacatcagaaaccccgcatcctgcagc

SEQ ID NO: 278168 - DNA, 55 bp, Artificial
  Synthetic oligonucleotide
gacaaggccccagtaatattcacaacttgcgacgcgactgacatcactctggacc

SEQ ID NO: 278169 - DNA, 55 bp, Artificial
  Synthetic oligonucleotide
gacacaggtgctggagatatgggcgtatcgatgtacactgggaacggtaatgctg

SEQ ID NO: 278170 - DNA, 55 bp, Artificial
  Synthetic oligonucleotide
gacacccgtaagagggatgggagcgtcattgagaatgagtcgtagcttcttctcg

SEQ ID NO: 278171 - DNA, 55 bp, Artificial
  Synthetic oligonucleotide
gacagcgagtaccgcctatgctatgggttctcttgtcgctatcatctctcccgtt

SEQ ID NO: 278172 - DNA, 55 bp, Artificial
  Synthetic oligonucleotide
gatgattcgcggacacccatctcgatccttttctagtctagtacattccgtgcaa

SEQ ID NO: 278173 - DNA, 55 bp, Artificial
  Synthetic oligonucleotide
gacagtagtgcaactgctacgtagctgggtggataggcatggcacctcttgggtt

SEQ ID NO: 278174 - DNA, 55 bp, Artificial
  Synthetic oligonucleotide
gatgagctagtccacgcgtccgttcattcgggcctaagagcatcaagggtacccc

SEQ ID NO: 278175 - DNA, 55 bp, Artificial
  Synthetic oligonucleotide
gacagttattaagacatcgcacgtaccgaatggacacctgtacagcctcagtctc

SEQ ID NO: 278176 - DNA, 59 bp, Artificial
  Synthetic oligonucleotide
tctttaggagcagcggagataccgggaggagagtcggccatgagacgttcagtctcctg

SEQ ID NO: 278177 - DNA, 55 bp, Artificial
  Synthetic oligonucleotide
gacatagctagagttgattagcgttcggcgcatcaatgtactcacgttgtgaggt

SEQ ID NO: 278178 - DNA, 55 bp, Artificial
  Synthetic oligonucleotide
gaccgtctagctgtccttgacacacgcctcttccaatcatggttcaagagactgg

SEQ ID NO: 278179 - DNA, 55 bp, Artificial
  Synthetic oligonucleotide
gaccgttacgtaagacatatcctgtccatacgcctgctcactcgaagcatccgcc

SEQ ID NO: 278180 - DNA, 54 bp, Artificial
  Synthetic oligonucleotide
gacctaccatccaatacgagattaccgagaacacgcgtttaaccaggttccgtc

SEQ ID NO: 278181 - DNA, 55 bp, Artificial
  Synthetic oligonucleotide
gacctactgaagtcaggttgtccaacatgaacgcggcgaagggtatgctcggatt

SEQ ID NO: 278182 - DNA, 55 bp, Artificial
  Synthetic oligonucleotide
gatctaccagcggtcgatcgtagcttccaacagatgtccttgcgtggcgctagcg

SEQ ID NO: 278183 - DNA, 55 bp, Artificial
  Synthetic oligonucleotide
gacgactattgaaggtcacttacaagctgtgaaatccatgcgacatgaaggtccg

SEQ ID NO: 278184 - DNA, 55 bp, Artificial
  Synthetic oligonucleotide
gcgaaagttgtcccgcataatgcaacaaagcactgaccggtttgcgcctcacagc

SEQ ID NO: 278185 - DNA, 54 bp, Artificial
  Synthetic oligonucleotide
cggaatcttaacctcgcttaataattctcaccctcctcggttgggtcactcttc

SEQ ID NO: 278186 - DNA, 55 bp, Artificial
  Synthetic oligonucleotide
cggactcgtacgttacgtgatagttttcgacgattgtcttccacttgttgagttc

SEQ ID NO: 278187 - DNA, 59 bp, Artificial
  Synthetic oligonucleotide
gtctgagagcaatcgagaagaacagagggccgaatggatccccctggcggactccttgg

SEQ ID NO: 278188 - DNA, 55 bp, Artificial
  Synthetic oligonucleotide
cggatacacgaactctattttctcagtcactgttggcgcggtagataggaaagga

SEQ ID NO: 278189 - DNA, 55 bp, Artificial
  Synthetic oligonucleotide
cggattctggggtcatgcggagtagttgggctacttcagggatcatgggttcccc

SEQ ID NO: 278190 - DNA, 55 bp, Artificial
  Synthetic oligonucleotide
gcctttcccagatgtccactcaaggccttcaccaaattaaatcctcgttcccgcc

SEQ ID NO: 278191 - DNA, 55 bp, Artificial
  Synthetic oligonucleotide
cggcaatcgagtgattccccgcgagcagactctgatcagtgttgaacaagtaggt

SEQ ID NO: 278192 - DNA, 55 bp, Artificial
  Synthetic oligonucleotide
cggcagtaaccgacccaagagttagcatgtgttctcgagttgcctcgagacatcc

SEQ ID NO: 278193 - DNA, 55 bp, Artificial
  Synthetic oligonucleotide
gcctgtagcaagagcgtatttgagaccgtcggtaaccgtgttagggcgaatagcc

SEQ ID NO: 278194 - DNA, 55 bp, Artificial
  Synthetic oligonucleotide
gcctgtagaaggtttacgcttaagccactcggtcgttacaacaggtacacgaggc

SEQ ID NO: 278195 - DNA, 55 bp, Artificial
  Synthetic oligonucleotide
gcctggggcaatgtagtaatgagatgatgggtcctgaaatttagcgtatatctcc

SEQ ID NO: 278196 - DNA, 55 bp, Artificial
  Synthetic oligonucleotide
gcctgcctagtctcagttatggccataggttgtcaggacgtacaaatgaacaccc

SEQ ID NO: 278197 - DNA, 55 bp, Artificial
  Synthetic oligonucleotide
cggctctcatagtaactcacagccaacccaatcatcgtcgcttcgaacaaagtga

SEQ ID NO: 278198 - DNA, 56 bp, Artificial
  Synthetic oligonucleotide
acgatactaggaatcaatgcgtccaccggggaatgctcgcccataatccccgcccg

SEQ ID NO: 278199 - DNA, 55 bp, Artificial
  Synthetic oligonucleotide
cggcttgactcccaacggtaacaaggcaggtgtaagtgctggtgattccctgccc

SEQ ID NO: 278200 - DNA, 55 bp, Artificial
  Synthetic oligonucleotide
gcctcgggcgataacaggacgggcaagggaagtaccgaggaggtacacgttctca

SEQ ID NO: 278201 - DNA, 55 bp, Artificial
  Synthetic oligonucleotide
gcctcgctgatcaggagtaacgatggtaggatcgggagagtacgtatcggatagt

SEQ ID NO: 278202 - DNA, 55 bp, Artificial
  Synthetic oligonucleotide
gcctcgagagtgtttctgtatcgtgcttgatcagatggacctacttgggcctagc

SEQ ID NO: 278203 - DNA, 55 bp, Artificial
  Synthetic oligonucleotide
cggggtaaggcttcatgtaagtctcaaggtacctcttgtggtccctgtagacagt

SEQ ID NO: 278204 - DNA, 55 bp, Artificial
  Synthetic oligonucleotide
cgggtaggaggtgtaggcttgaatctcttcacaaggtaggctacaggcaatgagc

SEQ ID NO: 278205 - DNA, 55 bp, Artificial
  Synthetic oligonucleotide
gcctcccgagttccgaagacgaaactccatctcgttgggtgtagcttcccgtcga

SEQ ID NO: 278206 - DNA, 52 bp, Artificial
  Synthetic oligonucleotide
cggtaggcccgggaagagggtttgtaccatcatacccactaaggacgtgtcc

SEQ ID NO: 278207 - DNA, 55 bp, Artificial
  Synthetic oligonucleotide
cggtatgcgatgtgtccatatataagtgagcatttcgtacacaggaatcctgagg

SEQ ID NO: 278208 - DNA, 55 bp, Artificial
  Synthetic oligonucleotide
cggtccacgtccaaggcacagcgtcgagtgagggatcaacgagaggtagtggagt

SEQ ID NO: 278209 - DNA, 58 bp, Artificial
  Synthetic oligonucleotide
acgatagacgtcgaagcgtggatagccccggcgtcaggaggctaggaagaaggagcga

SEQ ID NO: 278210 - DNA, 55 bp, Artificial
  Synthetic oligonucleotide
cggtccatggaagggcggtggactacggtaggcatgtgaagcacggctgccatag

SEQ ID NO: 278211 - DNA, 55 bp, Artificial
  Synthetic oligonucleotide
gcgccactgcttgagatggtccgttttgaagaggacgtattgcatatcggcggag

SEQ ID NO: 278212 - DNA, 55 bp, Artificial
  Synthetic oligonucleotide
gcgcatactatctcgacaccttgcacattgatttcactgcctataatggtaccga

SEQ ID NO: 278213 - DNA, 55 bp, Artificial
  Synthetic oligonucleotide
cgcgacttcagcagatgtgggcgtccctggtacaggaggtgcaaacttcgctgcg

SEQ ID NO: 278214 - DNA, 55 bp, Artificial
  Synthetic oligonucleotide
cgcgaggatttcaagttcgaacaacgattaacttgctattagccgtggtctgata

SEQ ID NO: 278215 - DNA, 55 bp, Artificial
  Synthetic oligonucleotide
cgcgcattgccccttctgcgggttcgtcccaatcaactgaggtgcgaatctttcc

SEQ ID NO: 278216 - DNA, 55 bp, Artificial
  Synthetic oligonucleotide
gcgatcggagtcgtttatctcagtaacagccggtaactgaatgccgagagatgac

SEQ ID NO: 278217 - DNA, 55 bp, Artificial
  Synthetic oligonucleotide
cgcgggaatcacgagtctgcagagcaggttaacaacatacgtgataagcatcaac

SEQ ID NO: 278218 - DNA, 55 bp, Artificial
  Synthetic oligonucleotide
gcgatactcattgtttcctaacaagtggcgaatgaattgaccgagtatataaaga

SEQ ID NO: 278219 - DNA, 55 bp, Artificial
  Synthetic oligonucleotide
cgcggtacaagcaccctccggcgcaaagacaagtgatgagggttctcctcatgcc

SEQ ID NO: 278220 - DNA, 59 bp, Artificial
  Synthetic oligonucleotide
tatcctcaaccttgctatccactcgcgaatgcttaggctgcataggccgtggttgtcga

SEQ ID NO: 278221 - DNA, 55 bp, Artificial
  Synthetic oligonucleotide
gcgagtcaaaccctggtatctcgaatcacagtacgtccgaaatttagccgagtgc

SEQ ID NO: 278222 - DNA, 54 bp, Artificial
  Synthetic oligonucleotide
cgcgtaggcaacgagagaagggtttcctaatagtttcgagacactaatccgtcc

SEQ ID NO: 278223 - DNA, 55 bp, Artificial
  Synthetic oligonucleotide
gcgagaaacttcatgggccgatgcattctatttactcgaagggactactcattgt

SEQ ID NO: 278224 - DNA, 55 bp, Artificial
  Synthetic oligonucleotide
cgctaggtatgccacgccagtaatctgtatattccacccgtggagctttgaaaag

SEQ ID NO: 278225 - DNA, 55 bp, Artificial
  Synthetic oligonucleotide
cgctattctatgacagttcaacttttatgcaggctccggaataggctcggtcaaa

SEQ ID NO: 278226 - DNA, 55 bp, Artificial
  Synthetic oligonucleotide
cgctcctcattactttaacaagtcggagattgatcagcttatgggaagtgcaagt

SEQ ID NO: 278227 - DNA, 55 bp, Artificial
  Synthetic oligonucleotide
gcgactcttgtctgcgccatccttgtctggctcaacatcttttaccaatccgacg

SEQ ID NO: 278228 - DNA, 55 bp, Artificial
  Synthetic oligonucleotide
cgctgaaaagcttcagtacaataagagtctgttcgttcgcatggcaaaacgtgac

SEQ ID NO: 278229 - DNA, 55 bp, Artificial
  Synthetic oligonucleotide
cgctgaattctacggtacatcgcacagtcctaaagcgccaccctttatgtcgacg

SEQ ID NO: 278230 - DNA, 55 bp, Artificial
  Synthetic oligonucleotide
gcgaatggtctccttgtggtcgatacgttctaactgccaccctgtctcctcgtct

SEQ ID NO: 278231 - DNA, 57 bp, Artificial
  Synthetic oligonucleotide
cgcttttgacccgtgccctcaaggagcgttccaccgacactcaacgaatgacctgtg

SEQ ID NO: 278232 - DNA, 53 bp, Artificial
  Synthetic oligonucleotide
gcgaagcggaaacttttccaagggtcccagggtaacagaagccaacatcgtgg

SEQ ID NO: 278233 - DNA, 55 bp, Artificial
  Synthetic oligonucleotide
cgcttgctccatgtcgtttgaaattcgtcccagtggagtttatctcgctcttcct

SEQ ID NO: 278234 - DNA, 55 bp, Artificial
  Synthetic oligonucleotide
cgctttcaggcgagtatgtgcatgtggtagtacaggtgacgaaggatggggtacc

SEQ ID NO: 278235 - DNA, 55 bp, Artificial
  Synthetic oligonucleotide
gcgaacattgagttgcgaaatagtatctcctgcagcgaagagctgtcttgaggtt

SEQ ID NO: 278236 - DNA, 55 bp, Artificial
  Synthetic oligonucleotide
gcgaaatacacagtccaactgtgagagacgcttttgggccatcgcgaagacttct

SEQ ID NO: 278237 - DNA, 55 bp, Artificial
  Synthetic oligonucleotide
ctaagccgggaacgaaggcctttgcatcagggaagtcggtcaaagatgccctcgc

SEQ ID NO: 278238 - DNA, 55 bp, Artificial
  Synthetic oligonucleotide
ctacccttctccgcacgaagcgtatgtctaagcttgcacttggcgcctctcgggc

SEQ ID NO: 278239 - DNA, 54 bp, Artificial
  Synthetic oligonucleotide
gccgacctgtagaaggtttacgcttaagccattcggtcgttacaacaggtacac

SEQ ID NO: 278240 - DNA, 55 bp, Artificial
  Synthetic oligonucleotide
ctacgctacatcctcacgcgagagtcatgggctaaaatgctttcggctggtattg

SEQ ID NO: 278241 - DNA, 55 bp, Artificial
  Synthetic oligonucleotide
ctaggctcgctccaccctcctaaggtggaataggcgtgtaatctgtacacctctc

SEQ ID NO: 278242 - DNA, 54 bp, Artificial
  Synthetic oligonucleotide
agtggacctgtgtcttctttggaggcccgactgaaggactgcgttcgggggagg

SEQ ID NO: 278243 - DNA, 55 bp, Artificial
  Synthetic oligonucleotide
ctagggcaagtacgggaatgtctggggtcgagtctcgagagagatacacaacccg

SEQ ID NO: 278244 - DNA, 55 bp, Artificial
  Synthetic oligonucleotide
ctatccaggcgatcgttcccttcggagtgtcaccgatcgttcgcattccggcagg

SEQ ID NO: 278245 - DNA, 55 bp, Artificial
  Synthetic oligonucleotide
ctatgtggaggcaatctgacagtttgtacaggtccgcctaagcgagtcgtcgagg

SEQ ID NO: 278246 - DNA, 55 bp, Artificial
  Synthetic oligonucleotide
gccctgttatggcaggtccagtcatctatgataccccttttgacccagctatgcc

SEQ ID NO: 278247 - DNA, 55 bp, Artificial
  Synthetic oligonucleotide
ctcagggtgtcaatggagacagtcctcactcgtttctgccatgtaccaatatcgc

SEQ ID NO: 278248 - DNA, 55 bp, Artificial
  Synthetic oligonucleotide
ctcagttcggttcatctatcacgctcaaaggtctataactcagctggggattcct

SEQ ID NO: 278249 - DNA, 55 bp, Artificial
  Synthetic oligonucleotide
gccctgtgagcttccaagacagcgaatctggtctcatgatggactgggcggacag

SEQ ID NO: 278250 - DNA, 54 bp, Artificial
  Synthetic oligonucleotide
gccctccaaggcgagaacagacaacggtaggtccagaatcttttgaaaccggtc

SEQ ID NO: 278251 - DNA, 55 bp, Artificial
  Synthetic oligonucleotide
ctccaagatgcctcgtgaatctaggggtatggtcggggacgttattggtcactgg

SEQ ID NO: 278252 - DNA, 55 bp, Artificial
  Synthetic oligonucleotide
gcccggagtttcccaacgttatcaactgccttgcctacgtctgcaggtagtctgc

SEQ ID NO: 278253 - DNA, 60 bp, Artificial
  Synthetic oligonucleotide
cgcaatgacttacgggtacgaggcaggtgcgggctccatgcgactgactacgacctcaaa

SEQ ID NO: 278254 - DNA, 58 bp, Artificial
  Synthetic oligonucleotide
aggcgacaatgccaatctagcagggcgtcagtagtggacgcaaggtacacagacggag

SEQ ID NO: 278255 - DNA, 55 bp, Artificial
  Synthetic oligonucleotide
ctccgaacgcagaagagacgagtgactacaaaatcagttagctcttactcaccag

SEQ ID NO: 278256 - DNA, 53 bp, Artificial
  Synthetic oligonucleotide
ctccgctagatacgacaattttccccgaaacctttggtccccgcgatgaagac

SEQ ID NO: 278257 - DNA, 55 bp, Artificial
  Synthetic oligonucleotide
gcccgctttcgcaagctgcacaaaattatacaccgtctttggcgcacggtcccca

SEQ ID NO: 278258 - DNA, 55 bp, Artificial
  Synthetic oligonucleotide
ctcctcctagccttgataatacgtcaaacaccgggcccgagtcacaacacatcat

SEQ ID NO: 278259 - DNA, 55 bp, Artificial
  Synthetic oligonucleotide
ctccttcctttgtgcacataccgcccgaccgggaatacaactcacctagaggcgg

SEQ ID NO: 278260 - DNA, 55 bp, Artificial
  Synthetic oligonucleotide
gcccagattgcgtacaggatcgttgtgcacttcctcctaagtgcccctcgccttg

SEQ ID NO: 278261 - DNA, 55 bp, Artificial
  Synthetic oligonucleotide
ctcgccaacgtctgcaataaggtcctcgtctgacccgaaggagagctcgtcttcg

SEQ ID NO: 278262 - DNA, 55 bp, Artificial
  Synthetic oligonucleotide
ctcgcctaatggaggcggtttatggttgacgatagagcatgaccccgctttgctc

SEQ ID NO: 278263 - DNA, 55 bp, Artificial
  Synthetic oligonucleotide
ctcgcctcgacggttcatcatacgcttcatagtagatttggcagaatgcgatggc

SEQ ID NO: 278264 - DNA, 55 bp, Artificial
  Synthetic oligonucleotide
gccggtatctacgcaaggcgaaggctcggcaaacggtcagcaatctcagcaacag

SEQ ID NO: 278265 - DNA, 58 bp, Artificial
  Synthetic oligonucleotide
taggtgtcaacgctccgcggtctatccgagaagtggacgatgagcgagggacataggc

SEQ ID NO: 278266 - DNA, 55 bp, Artificial
  Synthetic oligonucleotide
gccgggtgagccatcaggacaggtaaaactgtcgtcaagtataggcaggaacttg

SEQ ID NO: 278267 - DNA, 52 bp, Artificial
  Synthetic oligonucleotide
cggttagttgctattgcgtaaacggcggacgaaagaaggggcaaggggacca

SEQ ID NO: 278268 - DNA, 55 bp, Artificial
  Synthetic oligonucleotide
cgtaattagtcctcgagcctgtagcgttcagcatttgatttggtccgccggggta

SEQ ID NO: 278269 - DNA, 55 bp, Artificial
  Synthetic oligonucleotide
gccggatggacatgagcgccacatcttgcaacatcctgctcaccgtacacgtcaa

SEQ ID NO: 278270 - DNA, 55 bp, Artificial
  Synthetic oligonucleotide
cgtagccacactactatccctcctccacctcttattacccgcattcccacggact

SEQ ID NO: 278271 - DNA, 55 bp, Artificial
  Synthetic oligonucleotide
cgtaggtcggagcaacataagttacatgctgcaaaatacactcgaaggactccgg

SEQ ID NO: 278272 - DNA, 55 bp, Artificial
  Synthetic oligonucleotide
cgtatgaacatactcctgagatgcataaatatcgaatggtacccgtgcccaagca

SEQ ID NO: 278273 - DNA, 55 bp, Artificial
  Synthetic oligonucleotide
gccggactaccttggctaaacaaactatccatactgccctgtatacgatgttcga

SEQ ID NO: 278274 - DNA, 55 bp, Artificial
  Synthetic oligonucleotide
cgtcaatacgccttatcatagcatttaagatgatcccagattgcgcacaggatcg

SEQ ID NO: 278275 - DNA, 55 bp, Artificial
  Synthetic oligonucleotide
gccgattccaatcgctaagatgatagcgcagattagtgtaatgcctagttcggca

SEQ ID NO: 278276 - DNA, 58 bp, Artificial
  Synthetic oligonucleotide
gatctccgtgtggtgtagcctagtagcggagacaagctccgaaggggacgcgtcatcc

SEQ ID NO: 278277 - DNA, 55 bp, Artificial
  Synthetic oligonucleotide
gccgaggagccgtcttttgatggcactgtttcaagtcagttaagtcacactgagc

SEQ ID NO: 278278 - DNA, 55 bp, Artificial
  Synthetic oligonucleotide
gccgagaggaggtcgaaatttagtgtcggagggagcagagtaggttgaggaactg

SEQ ID NO: 278279 - DNA, 55 bp, Artificial
  Synthetic oligonucleotide
cgtcggagatgtgtatgcggaagaatatagagcggattgtgagaaggaaatggcg

SEQ ID NO: 278280 - DNA, 55 bp, Artificial
  Synthetic oligonucleotide
cgtgagtgttggaatggtaatggtgctgtcgatacatcgggaatcgccatgcggg

SEQ ID NO: 278281 - DNA, 55 bp, Artificial
  Synthetic oligonucleotide
cgtgcacggtcatcacagacgggacggttgtgggaattgggacgttactgagggg

SEQ ID NO: 278282 - DNA, 55 bp, Artificial
  Synthetic oligonucleotide
cgtgctatgtatccttgcaagtgtcgagcatggggcttagtgttatcgacccatg

SEQ ID NO: 278283 - DNA, 55 bp, Artificial
  Synthetic oligonucleotide
cgtggctatgatggttattggacaatgtatgtccgcaatcaccctcgcccaggca

SEQ ID NO: 278284 - DNA, 55 bp, Artificial
  Synthetic oligonucleotide
cgtgggataagactgcgtgccaggtgccgtattagcgcagctaacaggatgccgc

SEQ ID NO: 278285 - DNA, 55 bp, Artificial
  Synthetic oligonucleotide
gccgagaggaataatgttcgtccagtccatcggtgcagaaagttgtagtgctcat

SEQ ID NO: 278286 - DNA, 55 bp, Artificial
  Synthetic oligonucleotide
cgttatctgcctctagggcaagtacgggaatgtccggggtcgagtctcgatagag

SEQ ID NO: 278287 - DNA, 56 bp, Artificial
  Synthetic oligonucleotide
tatacggtacatgtttctacttcgctacaggattccacggggttcacgttattgta

SEQ ID NO: 278288 - DNA, 55 bp, Artificial
  Synthetic oligonucleotide
cgttcccatgcctctacgtcgaaatagtgactgttcatccttttagccctattgt

SEQ ID NO: 278289 - DNA, 55 bp, Artificial
  Synthetic oligonucleotide
cgttcgtgctgtcttcaatacctgtgctactgagaccagggcagcatctgcacac

SEQ ID NO: 278290 - DNA, 55 bp, Artificial
  Synthetic oligonucleotide
cgtttacaaggaaggactatcacatttccaacgttgacgagagcggagcacaagc

SEQ ID NO: 278291 - DNA, 55 bp, Artificial
  Synthetic oligonucleotide
cgttttgtcgtgttacctgagctactgacttgttacagtctccatagttgacggg

SEQ ID NO: 278292 - DNA, 55 bp, Artificial
  Synthetic oligonucleotide
tagactaatggaccatcttgcctcaactccgaatttcacccttcaacatctgcga

SEQ ID NO: 278293 - DNA, 55 bp, Artificial
  Synthetic oligonucleotide
tactgcatcgcattcggttattatagcagcagctcatctgaagaaaacacgatac

SEQ ID NO: 278294 - DNA, 55 bp, Artificial
  Synthetic oligonucleotide
tacggcactcgaatcacggaaattaatcagattacggtccatctggcttgtcgcc

SEQ ID NO: 278295 - DNA, 55 bp, Artificial
  Synthetic oligonucleotide
tacgatacttacacacgtgaacacctctccgctctcgtagacagtattgctgtcg

SEQ ID NO: 278296 - DNA, 55 bp, Artificial
  Synthetic oligonucleotide
tacctcaatcccgctcttatcctcttttgtcgaccaacgccataatgcagacccc

SEQ ID NO: 278297 - DNA, 55 bp, Artificial
  Synthetic oligonucleotide
taccgttctgagccatcattcgcgcgactaccaaagggtcatgccctgtttaccc

SEQ ID NO: 278298 - DNA, 58 bp, Artificial
  Synthetic oligonucleotide
ctcgactggacacgttcccgcgtcaggagggaacatctcatctcaatgggtgtacccg

SEQ ID NO: 278299 - DNA, 55 bp, Artificial
  Synthetic oligonucleotide
tacattgttgtcacccgaaatggggtcgacttgagataacattacgacgtagggc

SEQ ID NO: 278300 - DNA, 55 bp, Artificial
  Synthetic oligonucleotide
aggaactgggcagggcgcttcagtttatcccatctatcaagattttataagtcaa

SEQ ID NO: 278301 - DNA, 54 bp, Artificial
  Synthetic oligonucleotide
aggaagtaacacactgggatcaggacacttttgtccaggattaaggtacgaacc

SEQ ID NO: 278302 - DNA, 55 bp, Artificial
  Synthetic oligonucleotide
taatacgagatatatgattggccgagaagagttaggatggatgaaagctaccgcg

SEQ ID NO: 278303 - DNA, 55 bp, Artificial
  Synthetic oligonucleotide
taaggtagtacaactcgaccgtgcggactccgaaacatatcaaagctacacaaac

SEQ ID NO: 278304 - DNA, 55 bp, Artificial
  Synthetic oligonucleotide
aggataatactgccccttgttgatcctacggtataatcaaacaccgcattactag

SEQ ID NO: 278305 - DNA, 55 bp, Artificial
  Synthetic oligonucleotide
aggatgccttgctgtcgccagcagtagtaggtgtcgactctgagcgcatggtcct

SEQ ID NO: 278306 - DNA, 55 bp, Artificial
  Synthetic oligonucleotide
gttgacatatgtcgcgcgatagtacgaccgagtatactgcagcgagtattaggcc

SEQ ID NO: 278307 - DNA, 55 bp, Artificial
  Synthetic oligonucleotide
aggcgagcacctatcggggattaaaagttaaagcaagacgcggccataatgagag

SEQ ID NO: 278308 - DNA, 55 bp, Artificial
  Synthetic oligonucleotide
gttcgtgtcataagacttcccttacttacctaaaactccgtgctggctcacccac

SEQ ID NO: 278309 - DNA, 58 bp, Artificial
  Synthetic oligonucleotide
aggggtttgtgttcggccaaccagctgtacaagacctcctcatggcgcacagtgtcga

SEQ ID NO: 278310 - DNA, 55 bp, Artificial
  Synthetic oligonucleotide
gttcacttccttgcccttttggacaatggttcccacaacctcatgtcccatagta

SEQ ID NO: 278311 - DNA, 55 bp, Artificial
  Synthetic oligonucleotide
gtgtgtagcgcaaacaaatcatgtactggccgataattgtgtgtctctgcatcgg

SEQ ID NO: 278312 - DNA, 55 bp, Artificial
  Synthetic oligonucleotide
gtggtattatccgtgctatcatcgcccctcgccaatcatgttggacactcccggt

SEQ ID NO: 278313 - DNA, 55 bp, Artificial
  Synthetic oligonucleotide
gtgggcggacgagatactcgagaaacccgggagaagatacggagtgccacgtcgc

SEQ ID NO: 278314 - DNA, 55 bp, Artificial
  Synthetic oligonucleotide
gtggctcactcgacgtagcatggatagggctttcacgatatccgggtgaagtttc

SEQ ID NO: 278315 - DNA, 55 bp, Artificial
  Synthetic oligonucleotide
agagactggttgggtcgggagtttcgctttccgcgcttgtgcccgaggattcggc

SEQ ID NO: 278316 - DNA, 55 bp, Artificial
  Synthetic oligonucleotide
tcacagcctgttactacttagcttgggctgactcggtcttgaagtctgtggatgc

SEQ ID NO: 278317 - DNA, 55 bp, Artificial
  Synthetic oligonucleotide
agagagcacaaaccagcgagtcaaggtgttttcagtcctcattatctgctgcacc

SEQ ID NO: 278318 - DNA, 55 bp, Artificial
  Synthetic oligonucleotide
tattctacgtcctctggcgcgcgtggtcacactacaaggcatggagaggtgctac

SEQ ID NO: 278319 - DNA, 55 bp, Artificial
  Synthetic oligonucleotide
tattacggaggcccattccaacttgtccacggatgtggctgtttcgctggccaaa

SEQ ID NO: 278320 - DNA, 56 bp, Artificial
  Synthetic oligonucleotide
aggttgaaatctcgggcagtagaaatgttgcccaagcagctacgtacgcccaaggg

SEQ ID NO: 278321 - DNA, 55 bp, Artificial
  Synthetic oligonucleotide
tatgtggtggcgccttatgaggcagacgcgcagttatgtttccttgagcgcgagg

SEQ ID NO: 278322 - DNA, 55 bp, Artificial
  Synthetic oligonucleotide
tatgaccataaccttcgcctgtactctgttacataaggatccagtccaagtgtct

SEQ ID NO: 278323 - DNA, 55 bp, Artificial
  Synthetic oligonucleotide
tatcgtgaaattcccatgatctcactctgcaagtccgcaggcaaaggtaaccgac

SEQ ID NO: 278324 - DNA, 55 bp, Artificial
  Synthetic oligonucleotide
tatcctctatcggaccgtcccattaatatgtcaggccttggtcacttgtcccgac

SEQ ID NO: 278325 - DNA, 55 bp, Artificial
  Synthetic oligonucleotide
agcatagtctcagcgacgttaagaatatcttgccaggaattgggaaactcaaaac

SEQ ID NO: 278326 - DNA, 55 bp, Artificial
  Synthetic oligonucleotide
tatcactcttaaagtcgaaaagtttatcgaagccggacgattacctcatctcttg

SEQ ID NO: 278327 - DNA, 55 bp, Artificial
  Synthetic oligonucleotide
agcccccggagtaggcggaaggtacatcatgcgattcggtggtagaggggcattg

SEQ ID NO: 278328 - DNA, 55 bp, Artificial
  Synthetic oligonucleotide
tagtcaggtttgcgatcggcagggttgtagacaacattttcgaggatggaaccaa

SEQ ID NO: 278329 - DNA, 55 bp, Artificial
  Synthetic oligonucleotide
tagtatgcaagtaatgcaagtggcacagcccttgtggtaggactgtaagcccgca

SEQ ID NO: 278330 - DNA, 55 bp, Artificial
  Synthetic oligonucleotide
taggtgatagcgtccccgactactgatagttgaccactaaccgtgcgctaccgcg

SEQ ID NO: 278331 - DNA, 58 bp, Artificial
  Synthetic oligonucleotide
tatgtagtctgcctcccgttcgccgcaggtgtattctaccctgctgaggggataaggc

SEQ ID NO: 278332 - DNA, 55 bp, Artificial
  Synthetic oligonucleotide
taggaccgtagacagacacctgtaaagaagtagtgagaaccactaaaaggcagct

SEQ ID NO: 278333 - DNA, 55 bp, Artificial
  Synthetic oligonucleotide
tagcggggagcttttcaggcatgtaccatctcgcaaacttggtgtaacctatgtg

SEQ ID NO: 278334 - DNA, 55 bp, Artificial
  Synthetic oligonucleotide
tagccgggcataatgattactgacataccgttcgtgcggctcatgctcatggtcg

SEQ ID NO: 278335 - DNA, 55 bp, Artificial
  Synthetic oligonucleotide
tagcagagagtcgcacgactgataagctcaaatcacgctctgtccaacggggcga

SEQ ID NO: 278336 - DNA, 55 bp, Artificial
  Synthetic oligonucleotide
agcgatgaaacccaggctaccaatcataagcaactcacttgcaccccgtcactcc

SEQ ID NO: 278337 - DNA, 55 bp, Artificial
  Synthetic oligonucleotide
tagcactatggcagccgcgcttcacatgcctaccgtaggccaccgcccttccatg

SEQ ID NO: 278338 - DNA, 55 bp, Artificial
  Synthetic oligonucleotide
agcgccttccagatatgaatagaggcctgtctgacgacacccacagcgtcctgtc

SEQ ID NO: 278339 - DNA, 55 bp, Artificial
  Synthetic oligonucleotide
gtcgtccttacacccgccactatgggcgaggaaagtcgcacgaccgtggatgtgc

SEQ ID NO: 278340 - DNA, 55 bp, Artificial
  Synthetic oligonucleotide
atacgagagacaaccacggaagatggttggattcagtattggcgaaaccgatatg

SEQ ID NO: 278341 - DNA, 55 bp, Artificial
  Synthetic oligonucleotide
gtcgtagttgggtgctcaatgtctcaagccattcattggctccatgatccctggc

SEQ ID NO: 278342 - DNA, 57 bp, Artificial
  Synthetic oligonucleotide
accgaagtggacgatagacgtcgaagcgtggatagccccggcgtcaggaggctagga

SEQ ID NO: 278343 - DNA, 55 bp, Artificial
  Synthetic oligonucleotide
gtcggccactcgctaccatctctctgattactagaatactctttcaccatgatcg

SEQ ID NO: 278344 - DNA, 55 bp, Artificial
  Synthetic oligonucleotide
gtcgcacgactgataagctcaaatcacgctctgtccaacggggcgagactgggtc

SEQ ID NO: 278345 - DNA, 55 bp, Artificial
  Synthetic oligonucleotide
atagccacgccagtctcattcaccgtaccaggcaaagcaccgacaccatcagaat

SEQ ID NO: 278346 - DNA, 55 bp, Artificial
  Synthetic oligonucleotide
gtcgagtagactcattacgcagatctgtcgatttgtgtcggtcaatggagggcac

SEQ ID NO: 278347 - DNA, 55 bp, Artificial
  Synthetic oligonucleotide
gtcgacatccggcgaggatggcagatcccttctaactataagtgcgctggacacc

SEQ ID NO: 278348 - DNA, 55 bp, Artificial
  Synthetic oligonucleotide
gtcctctggatgtatttatcctggaaggatggtccatgggtttcgcacccctgtc

SEQ ID NO: 278349 - DNA, 55 bp, Artificial
  Synthetic oligonucleotide
atatataaagcgtgaatttgaggtcattcgcactgcaagtgtcaataacggtggg

SEQ ID NO: 278350 - DNA, 55 bp, Artificial
  Synthetic oligonucleotide
gtccgttgtgtgcatgaggatggggcacgttgtggggattcgactcggaatgggc

SEQ ID NO: 278351 - DNA, 55 bp, Artificial
  Synthetic oligonucleotide
gtccgagagtttgcaccttttaccctccacagggagtatactggtcatcacgacg

SEQ ID NO: 278352 - DNA, 54 bp, Artificial
  Synthetic oligonucleotide
atcagaaagcccgctccagcccacggtcgctcccataccttccccggagggttg

SEQ ID NO: 278353 - DNA, 55 bp, Artificial
  Synthetic oligonucleotide
caccgccttcctttttcgctcccaaccacgtgtccgcctcgcataacgctaatcc

SEQ ID NO: 278354 - DNA, 55 bp, Artificial
  Synthetic oligonucleotide
gtccccacatggccgtactaaccgtcttcgcagtacttgttggtcaaagagtttg

SEQ ID NO: 278355 - DNA, 55 bp, Artificial
  Synthetic oligonucleotide
atcatatgggaggtacgggtcgcttagagggatgatgcgcgctcctagtcacgcg

SEQ ID NO: 278356 - DNA, 55 bp, Artificial
  Synthetic oligonucleotide
atcatgtgggagcgcaggaccacgtatctttcgtgccctcttccgattatggtcc

SEQ ID NO: 278357 - DNA, 55 bp, Artificial
  Synthetic oligonucleotide
gtcccagttttgaagagaacataagtactgcagccgactgtcgatggacctaggt

SEQ ID NO: 278358 - DNA, 55 bp, Artificial
  Synthetic oligonucleotide
gtccaaggtaaagaacgaacaccagccatcctatacagcagttagcgctatgaca

SEQ ID NO: 278359 - DNA, 55 bp, Artificial
  Synthetic oligonucleotide
gtcatgcgaagacatgtgcaagccgacaggcggattcctcgacacttcttactcc

SEQ ID NO: 278360 - DNA, 55 bp, Artificial
  Synthetic oligonucleotide
atcctgtacgagacagtcttaactgtattggagattgaggcggatagtggattgc

SEQ ID NO: 278361 - DNA, 55 bp, Artificial
  Synthetic oligonucleotide
gtggcaataaggatatcgggtagagtacggagtgtatgtgcttgggcattgaggg

SEQ ID NO: 278362 - DNA, 55 bp, Artificial
  Synthetic oligonucleotide
gtggaggctttgcaatggatatcgcaagctaacaaagcttggcgaacagaagcgt

SEQ ID NO: 278363 - DNA, 55 bp, Artificial
  Synthetic oligonucleotide
gtgctgtacccaacatacatcctgacacaatagcgagaatgactggggccagtac

SEQ ID NO: 278364 - DNA, 58 bp, Artificial
  Synthetic oligonucleotide
gtgtactaaaggcgtaagcattctactaagtattgactgactgtaaggtacgaaagca

SEQ ID NO: 278365 - DNA, 56 bp, Artificial
  Synthetic oligonucleotide
gccgaatcctcgggcacaagcgcggaaagcgaaactcccgacccaaccagtctctc

SEQ ID NO: 278366 - DNA, 55 bp, Artificial
  Synthetic oligonucleotide
aggtaacccttcgctgtacatatcgaaaacccgtctgtctatccggcagttgccc

SEQ ID NO: 278367 - DNA, 55 bp, Artificial
  Synthetic oligonucleotide
gtgcgcgggctatgatagcgctcaaagtccctgtaatggactgatccagcccctg

SEQ ID NO: 278368 - DNA, 55 bp, Artificial
  Synthetic oligonucleotide
gtgcgcgcaagctcatctgcggctgcttgagaccgctgagattttcgatacgcca

SEQ ID NO: 278369 - DNA, 55 bp, Artificial
  Synthetic oligonucleotide
gtgcctagcgtaccaaaacgccccggccaagtcacaggtattggttcctctgacc

SEQ ID NO: 278370 - DNA, 55 bp, Artificial
  Synthetic oligonucleotide
aggtgtacaaaactctcctggtccgtaaggctaaatatgtgagttagctacctgg

SEQ ID NO: 278371 - DNA, 55 bp, Artificial
  Synthetic oligonucleotide
gtgccgtatggatgagagttaggttagctggcggaaaggcgggtcccatagtcac

SEQ ID NO: 278372 - DNA, 55 bp, Artificial
  Synthetic oligonucleotide
gtgcccttgatcgctgaggccgatcgacggacgtatagtcgaggacaggagggtg

SEQ ID NO: 278373 - DNA, 55 bp, Artificial
  Synthetic oligonucleotide
gtgccagcccctatagtgcttcaagtcatacactctctgcgaaacttgcggcccc

SEQ ID NO: 278374 - DNA, 55 bp, Artificial
  Synthetic oligonucleotide
gtgagtagtgagatgacgacgaaatgatgttccatattgagtggccctggtgtgg

SEQ ID NO: 278375 - DNA, 55 bp, Artificial
  Synthetic oligonucleotide
agtcaagatactgatatttcgtagatggctctcttacccgacaacatgtgcgaga

SEQ ID NO: 278376 - DNA, 57 bp, Artificial
  Synthetic oligonucleotide
gcgacgctaagcatgccgatatagcccctgttggtgcctcgatgcatgtcctgttta

SEQ ID NO: 278377 - DNA, 55 bp, Artificial
  Synthetic oligonucleotide
gtgagactaaaaccgttcacgcgctaattaatgacaggtgtttgaccgacacgcc

SEQ ID NO: 278378 - DNA, 55 bp, Artificial
  Synthetic oligonucleotide
gtgacgtaggtggggatactcctcgaatcgtactagcatctacaaagtgccactt

SEQ ID NO: 278379 - DNA, 54 bp, Artificial
  Synthetic oligonucleotide
agtctggctcgttctcctccgttcacccgggcttcccttcccacacaggccgaa

SEQ ID NO: 278380 - DNA, 55 bp, Artificial
  Synthetic oligonucleotide
gtgaatggcgcagtggcttgtttgtaagacatggagattcacgtgctaatgtgtg

SEQ ID NO: 278381 - DNA, 55 bp, Artificial
  Synthetic oligonucleotide
gtctcctagggtcgctcgtattgtcgtttgcccaggtaacggcggtactgcgctc

SEQ ID NO: 278382 - DNA, 55 bp, Artificial
  Synthetic oligonucleotide
gtctcctacctcatgaagctccagctacagcaactcgaaaccgaaactctatcgg

SEQ ID NO: 278383 - DNA, 55 bp, Artificial
  Synthetic oligonucleotide
agttatgatcttagatgccgggctagcatacccaaatccgacggccggagtcgtg

SEQ ID NO: 278384 - DNA, 55 bp, Artificial
  Synthetic oligonucleotide
gtctccagcgagcccttatttgtcggtgttggaatcgagattgcgtactggttcg

SEQ ID NO: 278385 - DNA, 55 bp, Artificial
  Synthetic oligonucleotide
gtctcagtgtcagccagacgtcaagcacgcaacgtgaaggattacctaaaagccc

SEQ ID NO: 278386 - DNA, 55 bp, Artificial
  Synthetic oligonucleotide
ttagcaggccgtccgaagatacgttccccatatgctggagggacgcatgcttgac

SEQ ID NO: 278387 - DNA, 56 bp, Artificial
  Synthetic oligonucleotide
gcgtggatagccccggcgtcaggaggctaggaagaaggagcgagactttacccgac

SEQ ID NO: 278388 - DNA, 55 bp, Artificial
  Synthetic oligonucleotide
aaggatcgttgtgaagactaccagggaaagtggatccacgaagacccgagccgat

SEQ ID NO: 278389 - DNA, 55 bp, Artificial
  Synthetic oligonucleotide
ttacaacgattggtgactcttctcttcgtcggtcggttcaacgagcaaagagttg

SEQ ID NO: 278390 - DNA, 55 bp, Artificial
  Synthetic oligonucleotide
aaggctcggggatatttcgttgggtcgtctccaccaatcttggaagcatggggcc

SEQ ID NO: 278391 - DNA, 55 bp, Artificial
  Synthetic oligonucleotide
tgttagtaagactagtgggcacagatgacccatctatcggtcgggttcatttcgc

SEQ ID NO: 278392 - DNA, 55 bp, Artificial
  Synthetic oligonucleotide
tgtgaaggctcgactgcgaataccgcatgtgcaagggataaggcggccgagtgct

SEQ ID NO: 278393 - DNA, 55 bp, Artificial
  Synthetic oligonucleotide
aaggtacgcggtatcctgacactagggttcacttcgatcaatacaccctttgccg

SEQ ID NO: 278394 - DNA, 55 bp, Artificial
  Synthetic oligonucleotide
tgtaaccgttaacggctattcaattcgcctgccagtatcaagcgacttacgaaga

SEQ ID NO: 278395 - DNA, 55 bp, Artificial
  Synthetic oligonucleotide
tggggtggatgcctccacgatgtaccggtcgcacttacgtctggccgactgagag

SEQ ID NO: 278396 - DNA, 55 bp, Artificial
  Synthetic oligonucleotide
aatgacggtatgatcaacgaaaatactcgagaggggtaggtgacgttaatcgatg

SEQ ID NO: 278397 - DNA, 55 bp, Artificial
  Synthetic oligonucleotide
tggagcgaaccctgaggccagatccgaccttctcttaaactgagcaccactcccc

SEQ ID NO: 278398 - DNA, 57 bp, Artificial
  Synthetic oligonucleotide
tcaccggaagccatgtcggcacacgtagatgtacttgagcatgggtataggctgcga

SEQ ID NO: 278399 - DNA, 55 bp, Artificial
  Synthetic oligonucleotide
tgctgtcacggtggagggattctcgaggtttacccgaaaagtcagtagacttggg

SEQ ID NO: 278400 - DNA, 55 bp, Artificial
  Synthetic oligonucleotide
tgcccaaggcggtatcctccagactcctgctatcattcgcatgtgcgaaactcac

SEQ ID NO: 278401 - DNA, 55 bp, Artificial
  Synthetic oligonucleotide
tgcagaactgttcgtaacgacctcttaccacgccccttatcgaaaggtatcctgg

SEQ ID NO: 278402 - DNA, 55 bp, Artificial
  Synthetic oligonucleotide
acaaggtgcaactagaaacggtcactatcgcagctcgacttgccaattcgacaac

SEQ ID NO: 278403 - DNA, 55 bp, Artificial
  Synthetic oligonucleotide
tgattgtcctttgaccactaaccggtgagcgaagacaatgtccactggaggagac

SEQ ID NO: 278404 - DNA, 55 bp, Artificial
  Synthetic oligonucleotide
tgatcgatcattcgtaacttacccgaaaggtatggatgcaagctctaaagagacc

SEQ ID NO: 278405 - DNA, 55 bp, Artificial
  Synthetic oligonucleotide
acattcttcacgacctgagcgaagaatggctccatatcccttcccttggacatcc

SEQ ID NO: 278406 - DNA, 55 bp, Artificial
  Synthetic oligonucleotide
accacgcagccgagccacctgtctctcgtagaagcgtacctgtttgaccaagcca

SEQ ID NO: 278407 - DNA, 50 bp, Artificial
  Synthetic oligonucleotide
acccaccatcggttcccctaaacagtggggttaccgtaccaagatcaccc

SEQ ID NO: 278408 - DNA, 55 bp, Artificial
  Synthetic oligonucleotide
tgaggtgtcaaacccttcttaagtacatcttgtagactagtcagcctagatgtcg

SEQ ID NO: 278409 - DNA, 57 bp, Artificial
  Synthetic oligonucleotide
ggcatgcacggctgaacctatgtgcccggaagaggattctctttaggcgttcccgag

SEQ ID NO: 278410 - DNA, 55 bp, Artificial
  Synthetic oligonucleotide
ttttcccgatatagacactcattccaagccctctagagaacggcagtaccatatt

SEQ ID NO: 278411 - DNA, 52 bp, Artificial
  Synthetic oligonucleotide
aaaagggtggcaaggtcccgaagagggttgcttgggaaattatcttgggatg

SEQ ID NO: 278412 - DNA, 55 bp, Artificial
  Synthetic oligonucleotide
aaacacgtctctcaccgcgaatctgaaaccaaccttggtacatccagtaatgagc

SEQ ID NO: 278413 - DNA, 55 bp, Artificial
  Synthetic oligonucleotide
aaaccgccgattgagcggaacgaccgcgtcgacttatcagatacgggtgaagttc

SEQ ID NO: 278414 - DNA, 55 bp, Artificial
  Synthetic oligonucleotide
tttgtcgcaatgcctggtagctgttgaggtaagagcattccggatgtggtatacg

SEQ ID NO: 278415 - DNA, 55 bp, Artificial
  Synthetic oligonucleotide
tttggagattgactaacaagtctgccaaggtccgaatgttggccgctgatcttac

SEQ ID NO: 278416 - DNA, 55 bp, Artificial
  Synthetic oligonucleotide
tttagtgtggcctccgattacattgtcgctctcaattccgatcagtacgggtccg

SEQ ID NO: 278417 - DNA, 55 bp, Artificial
  Synthetic oligonucleotide
aaagtgtaagttggagatgctggggaacactattcgccatgggaattagctgcat

SEQ ID NO: 278418 - DNA, 55 bp, Artificial
  Synthetic oligonucleotide
tttaggtggtgaatgcgtttacttcggtgatattggacctgattccaaggtcttg

SEQ ID NO: 278419 - DNA, 55 bp, Artificial
  Synthetic oligonucleotide
aacaccctcgacgttcctccatgcaagtttattcactgcgctcacatgtgatact

SEQ ID NO: 278420 - DNA, 56 bp, Artificial
  Synthetic oligonucleotide
gtaccagccgaccgaggatgagattcgcatccgtgagtgcgaggggaccgccttta

SEQ ID NO: 278421 - DNA, 55 bp, Artificial
  Synthetic oligonucleotide
aacaccgtcaactccatcgcaaattaacaatggcttagtgaacttacatagcggt

SEQ ID NO: 278422 - DNA, 55 bp, Artificial
  Synthetic oligonucleotide
ttggcgacgtgggatacgtccgagtttgtggaatcgtccgagtttgagaggacgg

SEQ ID NO: 278423 - DNA, 55 bp, Artificial
  Synthetic oligonucleotide
ttgcatcgggcggtattaacagcacggcgcaagtccagccttcgaataagctggg

SEQ ID NO: 278424 - DNA, 55 bp, Artificial
  Synthetic oligonucleotide
ttgattagccggttgtcacgggctttcgtcacaataagaacgttttggattcgcg

SEQ ID NO: 278425 - DNA, 55 bp, Artificial
  Synthetic oligonucleotide
aacgcttacatatataagcccgtggtacgagttctcaacgagtaatcttcgctgg

SEQ ID NO: 278426 - DNA, 55 bp, Artificial
  Synthetic oligonucleotide
aagacatcaccctagatggatcactcctcatttcgacatttatccctttcgaggg

SEQ ID NO: 278427 - DNA, 55 bp, Artificial
  Synthetic oligonucleotide
ttctgaccaactaatcgattttgagaggagtgctcttcaaacttccatgtacctc

SEQ ID NO: 278428 - DNA, 55 bp, Artificial
  Synthetic oligonucleotide
aagacgggctgtcaataatgctcgagagcaattagcatcatcaggagggacgttg

SEQ ID NO: 278429 - DNA, 55 bp, Artificial
  Synthetic oligonucleotide
ttctctcttgaatgagatggacggtgtagaagagttatcgggtgtgacagtagtg

SEQ ID NO: 278430 - DNA, 55 bp, Artificial
  Synthetic oligonucleotide
aagccgaacttgcgagctgccccgctgccgtccctaccaaactcgtcggtgttcc

SEQ ID NO: 278431 - DNA, 56 bp, Artificial
  Synthetic oligonucleotide
gcccgagaggcgccaagtgcaagcttagacatacgcttcgtgcggagaagggtagg

SEQ ID NO: 278432 - DNA, 55 bp, Artificial
  Synthetic oligonucleotide
ttccgacccaagtgcatctacctcgccaccatgacgcgaagggttctcatggcca

SEQ ID NO: 278433 - DNA, 55 bp, Artificial
  Synthetic oligonucleotide
ttatggagctcatcaccaatggatccatgtactttgacccacgccttcacaccct

SEQ ID NO: 278434 - DNA, 55 bp, Artificial
  Synthetic oligonucleotide
tccttatcgagagagtagtgtgaaaggtagaatgaacggtcgagagaggtgggac

SEQ ID NO: 278435 - DNA, 55 bp, Artificial
  Synthetic oligonucleotide
tccgtaagaatccagttcgtgattctccggcattgctccctgtggtgggtcagtc

SEQ ID NO: 278436 - DNA, 55 bp, Artificial
  Synthetic oligonucleotide
tccgccgagagaccgcccatgtatactctcgtagctgacccttctcaaaacccgg

SEQ ID NO: 278437 - DNA, 55 bp, Artificial
  Synthetic oligonucleotide
actaaccggaaataggctgcgatgcctgtcgctctagaaagattcggtgtgaacg

SEQ ID NO: 278438 - DNA, 55 bp, Artificial
  Synthetic oligonucleotide
actaattactgcgggtccatcatacattacctaggtaacacatcagttcagatcc

SEQ ID NO: 278439 - DNA, 55 bp, Artificial
  Synthetic oligonucleotide
tccctcgcaaccgtatcagacgccccagtcaggcattatggcggactcaaggatc

SEQ ID NO: 278440 - DNA, 55 bp, Artificial
  Synthetic oligonucleotide
actgaaaacgtatcggaacaggtttaatcaatggggctccctacttatgttgtgc

SEQ ID NO: 278441 - DNA, 55 bp, Artificial
  Synthetic oligonucleotide
tccccttcggagcttgtctccgctactaggctacaccacacggagatccacccgg

SEQ ID NO: 278442 - DNA, 56 bp, Artificial
  Synthetic oligonucleotide
tccgatccactcaggccatcaaccccctccgaagcgtcgctgtaggttcacccctt

SEQ ID NO: 278443 - DNA, 55 bp, Artificial
  Synthetic oligonucleotide
tcccattgagcaggcttaggttattctatgaaaggccgttgaaggctcacgccct

SEQ ID NO: 278444 - DNA, 55 bp, Artificial
  Synthetic oligonucleotide
actggataattgtgaaccgaactagttgctgttattgttcgtgagttattgacct

SEQ ID NO: 278445 - DNA, 55 bp, Artificial
  Synthetic oligonucleotide
tccattcgtccagacgaggattaaattccgtcatgagagcagagatatcggacca

SEQ ID NO: 278446 - DNA, 55 bp, Artificial
  Synthetic oligonucleotide
tccatataaccccaagaatcgcatacgataaagtctgtcctactgtaaggttggg

SEQ ID NO: 278447 - DNA, 55 bp, Artificial
  Synthetic oligonucleotide
tccatactccatctataaacagcaaaatggccgaggacaagtgagtagatgccgt

SEQ ID NO: 278448 - DNA, 55 bp, Artificial
  Synthetic oligonucleotide
acttacaatgagtggtgtgatcaatgtttcccaatgcgtcgctaccatcgtagca

SEQ ID NO: 278449 - DNA, 54 bp, Artificial
  Synthetic oligonucleotide
acttcctcgtcgagtgtaccacctgtaggtctcctcgtaccaatcgggaacctg

SEQ ID NO: 278450 - DNA, 55 bp, Artificial
  Synthetic oligonucleotide
acttgtctcgcattaccgtttgccggtgaagtctgtaccccgaatgattatccct

SEQ ID NO: 278451 - DNA, 55 bp, Artificial
  Synthetic oligonucleotide
tcatggtgttatctctcagccgctctgtcaaaattacccaaagtagaaggagggg

SEQ ID NO: 278452 - DNA, 55 bp, Artificial
  Synthetic oligonucleotide
tcatcatctcagtgaacgcattgcgaactggagctttagacgtcgagggcgtgct

SEQ ID NO: 278453 - DNA, 56 bp, Artificial
  Synthetic oligonucleotide
aagcggccgaggattatgcgcccttcaacgcagtatggaacaagcccgacggagga

SEQ ID NO: 278454 - DNA, 51 bp, Artificial
  Synthetic oligonucleotide
agaagcgtaaagggcgtggttaaggtcgtggtagtagttataaacctgtac

SEQ ID NO: 278455 - DNA, 55 bp, Artificial
  Synthetic oligonucleotide
agaagtctctaatgacatgccttctcgcctatttgtactcaaactcagtctggac

SEQ ID NO: 278456 - DNA, 55 bp, Artificial
  Synthetic oligonucleotide
agaataagatgagccttgcaatgcgtcagtttgtagacttgtcagtgcctgacag

SEQ ID NO: 278457 - DNA, 55 bp, Artificial
  Synthetic oligonucleotide
tgagcgagactgttctaccgttggcatttaaaggcggccatagatggttgggaac

SEQ ID NO: 278458 - DNA, 55 bp, Artificial
  Synthetic oligonucleotide
tgagcattccacgggacaagagatcgataccggtattacgagttcgtctggtctg

SEQ ID NO: 278459 - DNA, 55 bp, Artificial
  Synthetic oligonucleotide
tgactcttcacgccgatttaataggtccagagtgatatcagtcgcgtcgcaagtc

SEQ ID NO: 278460 - DNA, 55 bp, Artificial
  Synthetic oligonucleotide
acccgatcgcaaataggacaccagcaaccatagaagcccataaacgagcttcagt

SEQ ID NO: 278461 - DNA, 55 bp, Artificial
  Synthetic oligonucleotide
tctttacagatcactgtatctcaatcgctcagataaattctatccgggatccgcg

SEQ ID NO: 278462 - DNA, 55 bp, Artificial
  Synthetic oligonucleotide
tctctatatacctaccggtcccgcgttatacttctaggtgtcgtgcaaggcctac

SEQ ID NO: 278463 - DNA, 55 bp, Artificial
  Synthetic oligonucleotide
tctctagtgaggggcccaggatgagttaacatcaagacctgtcgcctgtaggtca

SEQ ID NO: 278464 - DNA, 56 bp, Artificial
  Synthetic oligonucleotide
cgagaggtcgtgcgattaagagcagcaccagccgagtgctcagtgcggtcataaga

SEQ ID NO: 278465 - DNA, 55 bp, Artificial
  Synthetic oligonucleotide
tctcgctagagcccgcaaacgcctgggatgcagccgcaatgaagatccatgtggg

SEQ ID NO: 278466 - DNA, 55 bp, Artificial
  Synthetic oligonucleotide
tctcctgctgcgaggttcttccactgcaagaattgttccttgcgctatgattaga

SEQ ID NO: 278467 - DNA, 55 bp, Artificial
  Synthetic oligonucleotide
accttactaccatgcgtggattgacacgactcgattctctgagtaagttcctcac

SEQ ID NO: 278468 - DNA, 55 bp, Artificial
  Synthetic oligonucleotide
acgatcggcagcgggaatgttaggtttggcggtgagacatatctattaggtttgc

SEQ ID NO: 278469 - DNA, 55 bp, Artificial
  Synthetic oligonucleotide
acgatggcagtgcctacagtgatgtgtccgatcgggtttccaggcgtcgcaccgt

SEQ ID NO: 278470 - DNA, 55 bp, Artificial
  Synthetic oligonucleotide
acgcacgcatccactatgccgcagccgaaggatctttcaggtggatcggcagccc

SEQ ID NO: 278471 - DNA, 54 bp, Artificial
  Synthetic oligonucleotide
tcgttattggagacgggaacgcgagaccctccatcgggagtaaggtagggaatc

SEQ ID NO: 278472 - DNA, 55 bp, Artificial
  Synthetic oligonucleotide
acgctacatcgtcatagactttggactagtactaggggccgatcatctgtgaccg

SEQ ID NO: 278473 - DNA, 55 bp, Artificial
  Synthetic oligonucleotide
acgctgaggtatagaacttgtaacctgcagtagctacaaatacactcgccaggct

SEQ ID NO: 278474 - DNA, 55 bp, Artificial
  Synthetic oligonucleotide
acgctgctgggataagagccgcgtagagcattggcagggcgccttggtcagcgta

SEQ ID NO: 278475 - DNA, 55 bp, Artificial
  Synthetic oligonucleotide
ggggccaacttccggatctcaagtccataggtttttggaaggcccatagagtcac

SEQ ID NO: 278476 - DNA, 56 bp, Artificial
  Synthetic oligonucleotide
ggcaggtcgtctctgcccttgcggtcgacccttctggtgcccgtatcgctaccggt

SEQ ID NO: 278477 - DNA, 55 bp, Artificial
  Synthetic oligonucleotide
tcgtgatacgtacaagtccgatggagatttcgatgatccttgctttggcgttcga

SEQ ID NO: 278478 - DNA, 55 bp, Artificial
  Synthetic oligonucleotide
tcgtaccccactcgaaccgcctacttccgccgagagggactgcgtccttcctgaa

SEQ ID NO: 278479 - DNA, 55 bp, Artificial
  Synthetic oligonucleotide
tcggataccaggataataagttgggatcacactcggcgcaacattcataaccgca

SEQ ID NO: 278480 - DNA, 54 bp, Artificial
  Synthetic oligonucleotide
acggcgtctcgaaagagggaggggtcatattgtgtcgtatggtggggacggaac

SEQ ID NO: 278481 - DNA, 53 bp, Artificial
  Synthetic oligonucleotide
tcggagacgggtgtttcgctaatcaaaagacggttggatttcgggactaacaa

SEQ ID NO: 278482 - DNA, 55 bp, Artificial
  Synthetic oligonucleotide
gggttctcagaatagtgttctcagggcgatgagtagtttggaactaagggacacg

SEQ ID NO: 278483 - DNA, 55 bp, Artificial
  Synthetic oligonucleotide
gggtccggagagtgttagcgtggaggaacttgatgggtggttaccgacagtcaag

SEQ ID NO: 278484 - DNA, 55 bp, Artificial
  Synthetic oligonucleotide
cagaagacgaattgcggttcctgagtgaacgacaagctttgaaaccgtattaacc

SEQ ID NO: 278485 - DNA, 55 bp, Artificial
  Synthetic oligonucleotide
cagagaccgggacgggagatacggctgataaggacgtttgatacgatctgataag

SEQ ID NO: 278486 - DNA, 55 bp, Artificial
  Synthetic oligonucleotide
cagagagataatctcagcacgagcgctttccaaagcttgaatgcttctcttctcg

SEQ ID NO: 278487 - DNA, 56 bp, Artificial
  Synthetic oligonucleotide
tataagggggagcccccggagtaggcggaaggtacatcatgcgattcggtggtaga

SEQ ID NO: 278488 - DNA, 55 bp, Artificial
  Synthetic oligonucleotide
gggtcatccatccgattgcagtcgccccatgcataccaaactgcgagtctcccat

SEQ ID NO: 278489 - DNA, 55 bp, Artificial
  Synthetic oligonucleotide
cagatatgttggcgtggagatattgagcaatagagaattgtcgcatcagctagca

SEQ ID NO: 278490 - DNA, 55 bp, Artificial
  Synthetic oligonucleotide
gggtcaaaaggggtatcatagatgactggacctgccataacagggctccgatagc

SEQ ID NO: 278491 - DNA, 55 bp, Artificial
  Synthetic oligonucleotide
cagcagccacgcagttacccaatttgtgtccgagataataataagcgtactccta

SEQ ID NO: 278492 - DNA, 55 bp, Artificial
  Synthetic oligonucleotide
ggggtgatgaatgtcggaagcccagactcacaaggctcgcacatccccggcttag

SEQ ID NO: 278493 - DNA, 55 bp, Artificial
  Synthetic oligonucleotide
cagccaaagtatccgtcaagtgcgaatcaagcagagacataccgtcttgtctccg

SEQ ID NO: 278494 - DNA, 55 bp, Artificial
  Synthetic oligonucleotide
ggggtcgttattgagaattgtgaagggatgcgactggaaccaggatagctcggga

SEQ ID NO: 278495 - DNA, 55 bp, Artificial
  Synthetic oligonucleotide
cagcctttgactcattgcacgtatagtaggaaagtcgatcgtactcacacggcgg

SEQ ID NO: 278496 - DNA, 55 bp, Artificial
  Synthetic oligonucleotide
ggggcgtgttagtgactaaccgggcgtcatgttcattgtccggcttccgtcttcg

SEQ ID NO: 278497 - DNA, 55 bp, Artificial
  Synthetic oligonucleotide
cagcggcttccgagtactctgcacttcgtaacctcgacgaaacatatgcaagcgt

SEQ ID NO: 278498 - DNA, 56 bp, Artificial
  Synthetic oligonucleotide
ggaggcatgaggagaaccctcatcacttgtctttgcgccggagggtgcttgtaccg

SEQ ID NO: 278499 - DNA, 55 bp, Artificial
  Synthetic oligonucleotide
ggggccgttcactgacagctggatatttagcggcgaaacttgtagattttacgag

SEQ ID NO: 278500 - DNA, 55 bp, Artificial
  Synthetic oligonucleotide
cagctgaaggaggtgtgctgaatgactggaacccagaagtctctgggccggagcc

SEQ ID NO: 278501 - DNA, 55 bp, Artificial
  Synthetic oligonucleotide
caggaacacctaagcaccaagagtatgctaggcttatcatgccagtccggtacgt

SEQ ID NO: 278502 - DNA, 55 bp, Artificial
  Synthetic oligonucleotide
ggggcacgggtcttgaccataatgtacagcagtagatgcgggtattatttctccg

SEQ ID NO: 278503 - DNA, 55 bp, Artificial
  Synthetic oligonucleotide
caggagtcgagataagcataatgcgcggtcgataagtacccaaagtaaccacacc

SEQ ID NO: 278504 - DNA, 55 bp, Artificial
  Synthetic oligonucleotide
gggcttttacaaattactctggacatgccaatctgtcctgtctgcgacacatcgg

SEQ ID NO: 278505 - DNA, 55 bp, Artificial
  Synthetic oligonucleotide
caggctcgtctgcatctttgggtcgtttaggattaggtacgacaaggaagggatc

SEQ ID NO: 278506 - DNA, 55 bp, Artificial
  Synthetic oligonucleotide
ggtagcggagcgaccgcatgatgatgtagatcagtgtggacgagggtggatgtga

SEQ ID NO: 278507 - DNA, 55 bp, Artificial
  Synthetic oligonucleotide
cacatagtgatcaaccttgtcgtgggtggtacatatgaagccgactccacttgtt

SEQ ID NO: 278508 - DNA, 55 bp, Artificial
  Synthetic oligonucleotide
ggtagaggcgaatatgttttactccgcagagagcccaccaacaagtgggatagca

SEQ ID NO: 278509 - DNA, 56 bp, Artificial
  Synthetic oligonucleotide
tgtacagacggcggacggggaaagttctgggagtcgtgagtcatggcttgtgcaga

SEQ ID NO: 278510 - DNA, 54 bp, Artificial
  Synthetic oligonucleotide
ggtactaccgttgctcttttcaaccgtatcaaatcgcaaacgacgtcaactcgt

SEQ ID NO: 278511 - DNA, 55 bp, Artificial
  Synthetic oligonucleotide
caccctgtcggtaggagaacgataagattcggatactagcagagcactttcgcaa

SEQ ID NO: 278512 - DNA, 55 bp, Artificial
  Synthetic oligonucleotide
ggtaccattcgatagctatgcaacgtaggagtgtgtacataccaacgtatggagt

SEQ ID NO: 278513 - DNA, 55 bp, Artificial
  Synthetic oligonucleotide
ggtaccacatgctgggagttatcagaggaccgacagcttcgttactacgatggtg

SEQ ID NO: 278514 - DNA, 55 bp, Artificial
  Synthetic oligonucleotide
cacctgtacatagtaggagcattagtatgcctatgctaccttgggttagtggccg

SEQ ID NO: 278515 - DNA, 55 bp, Artificial
  Synthetic oligonucleotide
cacctgtcagatttcaagggtgcactcccgttttgtgggcagctattgcggaagt

SEQ ID NO: 278516 - DNA, 51 bp, Artificial
  Synthetic oligonucleotide
ggtacaagagaacatttgggcctttggaggtaaccccgagaaggtaaggct

SEQ ID NO: 278517 - DNA, 55 bp, Artificial
  Synthetic oligonucleotide
cacgacgacctgtgcacttcttgcacactacagccctaacatcgcgaagaggttc

SEQ ID NO: 278518 - DNA, 55 bp, Artificial
  Synthetic oligonucleotide
ggtaaccggacccgtattgattggagttgagagcgacaatgtaatcggaggccac

SEQ ID NO: 278519 - DNA, 55 bp, Artificial
  Synthetic oligonucleotide
cacgtctttacaaaccttgtttgcttgtcagatcacggtatgcaaatacccgtgg

SEQ ID NO: 278520 - DNA, 55 bp, Artificial
  Synthetic oligonucleotide
gctagccgagttctgtcgaacaagtggtggggcatagtgcataccgttaacagat

SEQ ID NO: 278521 - DNA, 55 bp, Artificial
  Synthetic oligonucleotide
ggtaacccacagggcatggtaacagccggtttcaaaactctattgacagatacgc

SEQ ID NO: 278522 - DNA, 55 bp, Artificial
  Synthetic oligonucleotide
cactccgcgtgcatctattgaacagcctacaatcactccggtatctacggacaac

SEQ ID NO: 278523 - DNA, 55 bp, Artificial
  Synthetic oligonucleotide
cactctcatagagctccctaggggtcattatgtcgctttcctgacatgtctccca

SEQ ID NO: 278524 - DNA, 55 bp, Artificial
  Synthetic oligonucleotide
ggtaaatgtagctgggtgaatgttacactcattacgaatatggatccggaaggcc

SEQ ID NO: 278525 - DNA, 55 bp, Artificial
  Synthetic oligonucleotide
cactgagcatagagtattccgatagtatgagcagtatgctaagattgtctggctg

SEQ ID NO: 278526 - DNA, 55 bp, Artificial
  Synthetic oligonucleotide
cactgccaagggtgatctcgacttcctcaacaagtggacttataagcttggcgct

SEQ ID NO: 278527 - DNA, 55 bp, Artificial
  Synthetic oligonucleotide
cactggtatcatcggagcagccttaccaatggtgggtaccgcgctcggtcacacc

SEQ ID NO: 278528 - DNA, 55 bp, Artificial
  Synthetic oligonucleotide
cactgttctacgagactgtttgtacgaaggtgctaagtaaagaccagttcgacac

SEQ ID NO: 278529 - DNA, 55 bp, Artificial
  Synthetic oligonucleotide
gggtttgcgataggggttatcttctgtgtaagcaccaatcgtctgttatgggata

SEQ ID NO: 278530 - DNA, 55 bp, Artificial
  Synthetic oligonucleotide
catttgtggcggcaatgaagactctcataggtgagatcgatttcgctaaggagtg

SEQ ID NO: 278531 - DNA, 55 bp, Artificial
  Synthetic oligonucleotide
gctagcgaaactgccacatccgtggacaagttggaatgggcctccgtaatataac

SEQ ID NO: 278532 - DNA, 55 bp, Artificial
  Synthetic oligonucleotide
ccaaacacagtaatgcctcaccccatacgggacacaatacggccaatcattcggt

SEQ ID NO: 278533 - DNA, 55 bp, Artificial
  Synthetic oligonucleotide
ccaaatcgttagcaattgatcgcgcatgggcccacttagcatacgcttttgagga

SEQ ID NO: 278534 - DNA, 54 bp, Artificial
  Synthetic oligonucleotide
ccaacaaagggaggaactagagaaaggcggaaggagagtaaccaacatcttgcc

SEQ ID NO: 278535 - DNA, 55 bp, Artificial
  Synthetic oligonucleotide
ccaacgagaaccaaatgtacaagcatcaggcacgatacctcgttaagcgacgcga

SEQ ID NO: 278536 - DNA, 55 bp, Artificial
  Synthetic oligonucleotide
gggagtcgtatttgagaccctgtttgatagagagggactttaagagcttccgagc

SEQ ID NO: 278537 - DNA, 55 bp, Artificial
  Synthetic oligonucleotide
gggagggtaatgtcgtaggcgcataatcctgctcatttcattagcgctgaccaag

SEQ ID NO: 278538 - DNA, 55 bp, Artificial
  Synthetic oligonucleotide
gggagccaacgatgaggcaagtatgttgtaaagatcagggtggttggagagctcg

SEQ ID NO: 278539 - DNA, 55 bp, Artificial
  Synthetic oligonucleotide
ccaagcaggacccttgtgagccggccagttgtcagaataggttcctatgaaggtc

SEQ ID NO: 278540 - DNA, 55 bp, Artificial
  Synthetic oligonucleotide
gggagatagacgaggtctgtatttgagcgcagaacgactgccatagctcgatccg

SEQ ID NO: 278541 - DNA, 55 bp, Artificial
  Synthetic oligonucleotide
gggagataatcatggcgaacactacgtcgcgttagttgctggactgattaggaaa

SEQ ID NO: 278542 - DNA, 52 bp, Artificial
  Synthetic oligonucleotide
cctttctaggaacgaggaaatgaaggccgaatacttttcgaaattccctggc

SEQ ID NO: 278543 - DNA, 55 bp, Artificial
  Synthetic oligonucleotide
ccaaggcgtcagttgaaggcttcctgttgtaagcgaaccggctcgcagagctgac

SEQ ID NO: 278544 - DNA, 55 bp, Artificial
  Synthetic oligonucleotide
gggacggatgggcgagacatgttgatcggtagatcttgtatgtgcaactacagcc

SEQ ID NO: 278545 - DNA, 55 bp, Artificial
  Synthetic oligonucleotide
gggacatggaaatgcaaatacgccacagcgttgaattaccgaaacaccgtagtgg

SEQ ID NO: 278546 - DNA, 55 bp, Artificial
  Synthetic oligonucleotide
ccacactctcggtacttactcgtttgtaaaggaatggtaccacttgcgtgagact

SEQ ID NO: 278547 - DNA, 55 bp, Artificial
  Synthetic oligonucleotide
gggaaacgtctacgtacatctcatgttactccatacgttggtatgtacacactcc

SEQ ID NO: 278548 - DNA, 55 bp, Artificial
  Synthetic oligonucleotide
ggcttgaggagtgacgtcccattgcgggttctggatagacatttgcctagatggt

SEQ ID NO: 278549 - DNA, 55 bp, Artificial
  Synthetic oligonucleotide
ccaccgaggtttactagcgttcaacggagtgaacagcgcaatgtggttgtaccct

SEQ ID NO: 278550 - DNA, 55 bp, Artificial
  Synthetic oligonucleotide
ccacctaggcgtcacgtcagctcaggcggagggtgatttgcgaaatagtcggctc

SEQ ID NO: 278551 - DNA, 55 bp, Artificial
  Synthetic oligonucleotide
ggctgacgggtgaagagcgatttgtcggcctagcaggatggcgctaccccatgtt

SEQ ID NO: 278552 - DNA, 55 bp, Artificial
  Synthetic oligonucleotide
ccactctggccgaagctttcaaccgatcagagtctgatatatcccaagcagtcac

SEQ ID NO: 278553 - DNA, 55 bp, Artificial
  Synthetic oligonucleotide
ccttttactctcgatgctctatcggcgagaatcgtccgggatgggtcgttgagga

SEQ ID NO: 278554 - DNA, 55 bp, Artificial
  Synthetic oligonucleotide
ccagactcctacctgttgcatcgacaatgcatagtgaagagcacaagccccgaaa

SEQ ID NO: 278555 - DNA, 55 bp, Artificial
  Synthetic oligonucleotide
cagggactaccgtttcacatgggtccgagactctagctttacgctatatgcattg

SEQ ID NO: 278556 - DNA, 55 bp, Artificial
  Synthetic oligonucleotide
cagggccctttgggctgaaagctgcaaacgtgggatagactcggtaagaagttgg

SEQ ID NO: 278557 - DNA, 55 bp, Artificial
  Synthetic oligonucleotide
cagggtgtacggtgtcaatttacacacctgctagagagctgctgtctgcaatgag

SEQ ID NO: 278558 - DNA, 55 bp, Artificial
  Synthetic oligonucleotide
cagggttggcttgatgatatctgacagatttgggagtaggaaaagcaacatccga

SEQ ID NO: 278559 - DNA, 54 bp, Artificial
  Synthetic oligonucleotide
caggtcattcgttgagtgtcggtggaacgttccttgagggcacgggtcaaaagg

SEQ ID NO: 278560 - DNA, 55 bp, Artificial
  Synthetic oligonucleotide
cagtccgtcatgagttcttgtcccagtgaatttggcatagctgggtcaaaagggg

SEQ ID NO: 278561 - DNA, 55 bp, Artificial
  Synthetic oligonucleotide
gggcttcgattagcactcagtcgtcaagtgcgatgcgacagaaactcacaaactc

SEQ ID NO: 278562 - DNA, 55 bp, Artificial
  Synthetic oligonucleotide
gggctcttctgttctgtgaaactgcgaatactaacattgggcctcaagctattcg

SEQ ID NO: 278563 - DNA, 55 bp, Artificial
  Synthetic oligonucleotide
cagtgcgcgagcagttcgcttggtgtaaaccaaaccaatgagttcatcgcgtgtg

SEQ ID NO: 278564 - DNA, 55 bp, Artificial
  Synthetic oligonucleotide
cctcaagatccagagcgctagtgcggcgggcatcactgctcgtcaggctgctact

SEQ ID NO: 278565 - DNA, 55 bp, Artificial
  Synthetic oligonucleotide
cagtggagcttgtacagggttggaacggatacgtcatttctcgtggtatgtcaag

SEQ ID NO: 278566 - DNA, 55 bp, Artificial
  Synthetic oligonucleotide
catacacctggtccatgtgctccgaataagccctattccaatgctggtaatcccc

SEQ ID NO: 278567 - DNA, 55 bp, Artificial
  Synthetic oligonucleotide
catacctggtctttacttagcaccttcgtacaaacagtctcgtagaacagtgtac

SEQ ID NO: 278568 - DNA, 55 bp, Artificial
  Synthetic oligonucleotide
catactaccttgtacggcttcagtgtgaccttccagagttccttcaccccatcca

SEQ ID NO: 278569 - DNA, 55 bp, Artificial
  Synthetic oligonucleotide
catattgcatacaatttgacgggagctgaacttggatgcgctctagtgcgatgaa

SEQ ID NO: 278570 - DNA, 55 bp, Artificial
  Synthetic oligonucleotide
catgagcgctgggagagtcttctcgccaggtaggtctcacgctcaggtcagacca

SEQ ID NO: 278571 - DNA, 55 bp, Artificial
  Synthetic oligonucleotide
catgatagggacattgtgccgatctgctcacgactagaagagttccgcccatcct

SEQ ID NO: 278572 - DNA, 55 bp, Artificial
  Synthetic oligonucleotide
gggctcaaaagcggtggtatggacgtaagcacttgccattgctctctgccggacg

SEQ ID NO: 278573 - DNA, 55 bp, Artificial
  Synthetic oligonucleotide
gggctagggtacaaagattggaagagcggaggagtgcaggtggcgtatcatggct

SEQ ID NO: 278574 - DNA, 55 bp, Artificial
  Synthetic oligonucleotide
catgctttgactccataaagtgcttttcgaaagcctttcggccgttatacgtcgc

SEQ ID NO: 278575 - DNA, 55 bp, Artificial
  Synthetic oligonucleotide
cctcaatagatttgcgcatccaatggaggtcgacttcgtaagggacattgtccga

SEQ ID NO: 278576 - DNA, 55 bp, Artificial
  Synthetic oligonucleotide
gggccccacaagcggtacgggcctcgcacacctcacccaaataaacctctcattc

SEQ ID NO: 278577 - DNA, 55 bp, Artificial
  Synthetic oligonucleotide
gggccatcctctgttgcggtatctgtccgaaattatagatgcgatgatcatgcac

SEQ ID NO: 278578 - DNA, 55 bp, Artificial
  Synthetic oligonucleotide
gggccatcacgacagttgtacctggggtttcgcgttgagtcaagcaagttgggga

SEQ ID NO: 278579 - DNA, 55 bp, Artificial
  Synthetic oligonucleotide
atggtaccagtaacttaagagtcgttgacgtttctattgctcccttgcagctctc

SEQ ID NO: 278580 - DNA, 55 bp, Artificial
  Synthetic oligonucleotide
gtagaaatacgaatgtactttcacgtgttgaagactggctcggatttgtcgacaa

SEQ ID NO: 278581 - DNA, 55 bp, Artificial
  Synthetic oligonucleotide
gtacgctcatcagcgtctagggtgcgattcgtagatgtgttatcttgaggggcag

SEQ ID NO: 278582 - DNA, 55 bp, Artificial
  Synthetic oligonucleotide
gtaaaggagcgggctctaggattcctgaggataccgagggttgaggcagggccct

SEQ ID NO: 278583 - DNA, 55 bp, Artificial
  Synthetic oligonucleotide
atgtgcccaggggtttcgcagtccgttaggcatgacactgcctggaatgtggcgt

SEQ ID NO: 278584 - DNA, 55 bp, Artificial
  Synthetic oligonucleotide
ggtttacagcgcttactcgtctgtagccagtcgtctagttcaatcctaggctacg

SEQ ID NO: 278585 - DNA, 55 bp, Artificial
  Synthetic oligonucleotide
atgttaaaggacatcatcgattatacggtgatagactcacggttgactccccata

SEQ ID NO: 278586 - DNA, 60 bp, Artificial
  Synthetic oligonucleotide
ttcatggggaccgtgcgccaaagacggtgtataattttgtgcagcttgcgaaagcgggca

SEQ ID NO: 278587 - DNA, 55 bp, Artificial
  Synthetic oligonucleotide
cctccacctcatcacaagtgcggtgcctggatacgtcgaacctatgcggacctgg

SEQ ID NO: 278588 - DNA, 55 bp, Artificial
  Synthetic oligonucleotide
attacttgccacttctcgttctattgtccagcggtccccaccaacttggcagtct

SEQ ID NO: 278589 - DNA, 55 bp, Artificial
  Synthetic oligonucleotide
ggttcggtccgcccgagaataacaagcctggggcaacagcagagtttagaagtcc

SEQ ID NO: 278590 - DNA, 55 bp, Artificial
  Synthetic oligonucleotide
ggttccgccttcaggtcacatttgtccccgatgatcttaccgcttctgcttatac

SEQ ID NO: 278591 - DNA, 55 bp, Artificial
  Synthetic oligonucleotide
ggtgggaggctgttcattgtcgtcgctggggacagggtaagagagcgttcctagg

SEQ ID NO: 278592 - DNA, 55 bp, Artificial
  Synthetic oligonucleotide
attgatagagggacaatagagcttacgggagaagtcactagaagttcagcagtcc

SEQ ID NO: 278593 - DNA, 55 bp, Artificial
  Synthetic oligonucleotide
attggccccagaacgcatcgcactgcctcttggccgaggaatgtgtccgccaagc

SEQ ID NO: 278594 - DNA, 55 bp, Artificial
  Synthetic oligonucleotide
ggtggcatatcgggtgaggttaacaccctgtattgtgacgacgacagttcccaga

SEQ ID NO: 278595 - DNA, 55 bp, Artificial
  Synthetic oligonucleotide
ggtgagacatacaggtggcatcacgcattatgatgctatccgggactggatttct

SEQ ID NO: 278596 - DNA, 55 bp, Artificial
  Synthetic oligonucleotide
ggtgacgatgctaatagtggtatctcaccagtcttactagaaacctctcgtcctc

SEQ ID NO: 278597 - DNA, 55 bp, Artificial
  Synthetic oligonucleotide
caaaccccaagcatagctgcttgagtcatgtactgttgtccttctcatgtctctc

SEQ ID NO: 278598 - DNA, 55 bp, Artificial
  Synthetic oligonucleotide
gctctttggagacgcctgatcagaggtggaatagaagagtggttgaggacattcc

SEQ ID NO: 278599 - DNA, 55 bp, Artificial
  Synthetic oligonucleotide
ggtgacagcgagttcgctttcaggcgagtatgttcatgtggtagtacaggtgacg

SEQ ID NO: 278600 - DNA, 55 bp, Artificial
  Synthetic oligonucleotide
ggtgaagagcgatttgtcgacctagcaggatggcgctaccccatgtctggacgcc

SEQ ID NO: 278601 - DNA, 55 bp, Artificial
  Synthetic oligonucleotide
ggtgaaccgcttggaccgggattccacgtacgaccagagactccgccatgtgcta

SEQ ID NO: 278602 - DNA, 54 bp, Artificial
  Synthetic oligonucleotide
caacagtgttcctcctcctccgtacgtccaataacttttctacgtggcttcgta

SEQ ID NO: 278603 - DNA, 55 bp, Artificial
  Synthetic oligonucleotide
ggtcgggtgttttgtagctaatagggttgaatgggatacctgaatgtctgtaggc

SEQ ID NO: 278604 - DNA, 55 bp, Artificial
  Synthetic oligonucleotide
gtcatcgagacaccaactgttactcatcaggctaggttgaaacgtggatccaggc

SEQ ID NO: 278605 - DNA, 55 bp, Artificial
  Synthetic oligonucleotide
gtcatacatatcgcctccatgcgtgctacattgtacgtacgtactgtagaaagac

SEQ ID NO: 278606 - DNA, 55 bp, Artificial
  Synthetic oligonucleotide
gtcagtctcgtttctggcacgagttacaagacccttctatgttaagccatttagc

SEQ ID NO: 278607 - DNA, 55 bp, Artificial
  Synthetic oligonucleotide
atcgtgaattgttgttacgcgccgcgtttgttattcaacccatgtcttgtccgtt

SEQ ID NO: 278608 - DNA, 55 bp, Artificial
  Synthetic oligonucleotide
gtcaggtacacagcgtaatcgacagattctttaggtactcacgcgttgacacccg

SEQ ID NO: 278609 - DNA, 55 bp, Artificial
  Synthetic oligonucleotide
cctcccaactgcggcctgagaggcataggcccatacctaggccatccgtaaggga

SEQ ID NO: 278610 - DNA, 55 bp, Artificial
  Synthetic oligonucleotide
atctacactccttttgttgtgtgacgatctgattcgtcgtaccgaccaaccaact

SEQ ID NO: 278611 - DNA, 55 bp, Artificial
  Synthetic oligonucleotide
gtcagagtctcgagagaaggcgagaccggcgtgggaaatgatgccagaggcgatg

SEQ ID NO: 278612 - DNA, 55 bp, Artificial
  Synthetic oligonucleotide
gtcagaaatcgtcattcgaaaatatgcgccgacgtactacgaccgcgtttctacc

SEQ ID NO: 278613 - DNA, 55 bp, Artificial
  Synthetic oligonucleotide
atctcgctcaagaggtcctcagtccgttttaaacaaaccacaatctgttgaaggc

SEQ ID NO: 278614 - DNA, 55 bp, Artificial
  Synthetic oligonucleotide
atgacggggtcgaggactaggtggtccattgtggtttctgtaggcggacgttgag

SEQ ID NO: 278615 - DNA, 55 bp, Artificial
  Synthetic oligonucleotide
atgagagtgaaataaggcctcaccgatggattgattgacggctctcatacacaga

SEQ ID NO: 278616 - DNA, 55 bp, Artificial
  Synthetic oligonucleotide
gtcaatctcgtatcgaatagtcgatcgtaccgaacgtgaggtaccaagccgaagc

SEQ ID NO: 278617 - DNA, 55 bp, Artificial
  Synthetic oligonucleotide
gtatgacaagtcagcgtctcgattaaacagtggaacctttgaggggacgaacgta

SEQ ID NO: 278618 - DNA, 55 bp, Artificial
  Synthetic oligonucleotide
atgataccaactcggctgctcttgacttggcgtcagtcgaccagtctgtcagggg

SEQ ID NO: 278619 - DNA, 55 bp, Artificial
  Synthetic oligonucleotide
gtatctctgtagtgggatagcagttagggtggggtatatcttgccgattacagca

SEQ ID NO: 278620 - DNA, 51 bp, Artificial
  Synthetic oligonucleotide
cctccgggaaggtagggctttacgacgcggttaccgttgacccagcttcca

SEQ ID NO: 278621 - DNA, 55 bp, Artificial
  Synthetic oligonucleotide
atgatgccgtctctcacatggtcgaagaaatgcctttacctcacatcaacgcccc

SEQ ID NO: 278622 - DNA, 55 bp, Artificial
  Synthetic oligonucleotide
gtagtcccgaatgaccttgagctagattagcaatgaaggtcccctggagaagcca

SEQ ID NO: 278623 - DNA, 55 bp, Artificial
  Synthetic oligonucleotide
atgcccaagcacatacactccgcactctacccgatatccttattgccactcccgg

SEQ ID NO: 278624 - DNA, 55 bp, Artificial
  Synthetic oligonucleotide
gtagtagtcaacaacggggccagtctgggcgtgataagtgtccaatcgcttcctg

SEQ ID NO: 278625 - DNA, 55 bp, Artificial
  Synthetic oligonucleotide
gtaggttatcacccgatgagcgtgattcaccgcattcgtatacaaggccaagaga

SEQ ID NO: 278626 - DNA, 55 bp, Artificial
  Synthetic oligonucleotide
gtagcctggtgagggccttggagaatacgaggcggaccattatggggtttaggga

SEQ ID NO: 278627 - DNA, 55 bp, Artificial
  Synthetic oligonucleotide
gtagactcaccaaataacaatagggtctcccaatttcacaccagccctgtcaaga

SEQ ID NO: 278628 - DNA, 55 bp, Artificial
  Synthetic oligonucleotide
atgggccagactacgagcttgatgttcgctcttccaatatgacagatcagaacac

SEQ ID NO: 278629 - DNA, 55 bp, Artificial
  Synthetic oligonucleotide
caatgacagttctggcacaagatcgatcgcaacataaactgggagattaggaggg

SEQ ID NO: 278630 - DNA, 55 bp, Artificial
  Synthetic oligonucleotide
caagcaattgtcggaacaacgctatcccacattataagagctcgcgcaaaagtgc

SEQ ID NO: 278631 - DNA, 54 bp, Artificial
  Synthetic oligonucleotide
cctcgactagttttacgacgtagatgtactgtcccgggtcgtctttctcgagta

SEQ ID NO: 278632 - DNA, 55 bp, Artificial
  Synthetic oligonucleotide
ggtcagctatttactggcaggaggataaatggtatggccctcctgatgcgctcca

SEQ ID NO: 278633 - DNA, 55 bp, Artificial
  Synthetic oligonucleotide
caatggataaccgaaatacctcccgttactcgagcatgggtagctggctctatcg

SEQ ID NO: 278634 - DNA, 55 bp, Artificial
  Synthetic oligonucleotide
caagcacttcttgacacagatggaccctcctcaatatatcttcgagtgtcgcctc

SEQ ID NO: 278635 - DNA, 55 bp, Artificial
  Synthetic oligonucleotide
cacacccttttcacaatgacccgctttgaagtagacacaaagcacctgaacaatg

SEQ ID NO: 278636 - DNA, 55 bp, Artificial
  Synthetic oligonucleotide
ggtccaacgctggagtgatggtacaagatgcgacaaaactggtcgtcctcgagag

SEQ ID NO: 278637 - DNA, 55 bp, Artificial
  Synthetic oligonucleotide
ggtcgctcggtgtcggttccgtttcgttgtgcacttcgtggtacatgccctaaca

SEQ ID NO: 278638 - DNA, 55 bp, Artificial
  Synthetic oligonucleotide
ggtatgcgggagtacataccacaggggatggaagacgaggacctagatggggagt

SEQ ID NO: 278639 - DNA, 53 bp, Artificial
  Synthetic oligonucleotide
ggtagggaaccaaggtcggtcactgatttggtactctttgaacttgacgaacc

SEQ ID NO: 278640 - DNA, 55 bp, Artificial
  Synthetic oligonucleotide
ggtcgctcgtaactagaacagtgcaatttagctccgactgtatgtcaagacgcgt

SEQ ID NO: 278641 - DNA, 55 bp, Artificial
  Synthetic oligonucleotide
ggtccatctacgctagctcgtcagccagtgtcaatcaaatgcgcaactatgctgc

SEQ ID NO: 278642 - DNA, 55 bp, Artificial
  Synthetic oligonucleotide
cctcgctacacaatggatgttgagcgaaacatcaaacaggcttctcaagacgtcg

SEQ ID NO: 278643 - DNA, 55 bp, Artificial
  Synthetic oligonucleotide
cacatacggccttctgccacgttgggaaccagccctgtagaaaggtaatgtaaga

SEQ ID NO: 278644 - DNA, 55 bp, Artificial
  Synthetic oligonucleotide
caagtaacagtggcaacgccttacgtaacactatatcatgcaaaagtcgactacc

SEQ ID NO: 278645 - DNA, 55 bp, Artificial
  Synthetic oligonucleotide
cacatactcgaccacaatactaggaatcaacgcgtccaccggggaatgctcgccc

SEQ ID NO: 278646 - DNA, 54 bp, Artificial
  Synthetic oligonucleotide
ccccagtagccatagaccgatcgagaagtgatagcgaatggcgtgtggagctac

SEQ ID NO: 278647 - DNA, 54 bp, Artificial
  Synthetic oligonucleotide
gctgttccacgatacctgttccgcacaatgtcggcccaagcagctaccggtgct

SEQ ID NO: 278648 - DNA, 54 bp, Artificial
  Synthetic oligonucleotide
cagtgaaggtcaatggctggggtgtctaccaatcgtcacgtacatatttcgtga

SEQ ID NO: 278649 - DNA, 54 bp, Artificial
  Synthetic oligonucleotide
cacgtacactgggtagaactgtagtaaactccgtctgcaactgattgtgttact

SEQ ID NO: 278650 - DNA, 54 bp, Artificial
  Synthetic oligonucleotide
aatcccagtcgagtgggtccacaaccgtgtctagtggtcaagacgcgccacgca

SEQ ID NO: 278651 - DNA, 54 bp, Artificial
  Synthetic oligonucleotide
gcaactcccacttcaaaaccagatctaattcgtttgctaatgtgccgaccaaac

SEQ ID NO: 278652 - DNA, 54 bp, Artificial
  Synthetic oligonucleotide
tgagtgcactggtgcggcctctagtatcaacgctgcgtgctatgtgagtaacac

SEQ ID NO: 278653 - DNA, 55 bp, Artificial
  Synthetic oligonucleotide
cctctggacgccttggactcggaagaggatggttgtcggaacacgagggcatgag

SEQ ID NO: 278654 - DNA, 54 bp, Artificial
  Synthetic oligonucleotide
tgtaggcagggattgcggtcgagctagcgtaaggaggcaaggtcgcattggtct

SEQ ID NO: 278655 - DNA, 54 bp, Artificial
  Synthetic oligonucleotide
gatgtttgacgtcaacctcgttgcccctttgttcctcgctcgtgcattcaccag

SEQ ID NO: 278656 - DNA, 54 bp, Artificial
  Synthetic oligonucleotide
cgagctcggacgggtacgattaaagggatggactactctgattcaaacgttctt

SEQ ID NO: 278657 - DNA, 54 bp, Artificial
  Synthetic oligonucleotide
gcgttagtgctctcacttgcgtccctaaagtttgcctcgacttcacgcatatag

SEQ ID NO: 278658 - DNA, 54 bp, Artificial
  Synthetic oligonucleotide
ccgtatgtacaccactcctctgtatcaaaccccggaacatgacaccaactacct

SEQ ID NO: 278659 - DNA, 54 bp, Artificial
  Synthetic oligonucleotide
tttcgagtacgtgagctaatcaacagatctcctggctatggcttaactttggtt

SEQ ID NO: 278660 - DNA, 54 bp, Artificial
  Synthetic oligonucleotide
atcgtgaatggggtcaagttcaggagcgggactacggaatgagtcaaagtactg

SEQ ID NO: 278661 - DNA, 54 bp, Artificial
  Synthetic oligonucleotide
gatacattcgcatgaccgacatatcaatggatcagatacgatatccgagcaatt

SEQ ID NO: 278662 - DNA, 54 bp, Artificial
  Synthetic oligonucleotide
ttggtcgtcgcctcccaattgtctgatcagcgaccgtgccaacgccactttgaa

SEQ ID NO: 278663 - DNA, 54 bp, Artificial
  Synthetic oligonucleotide
atctccgtgcggacccccatgcgtatagctataccactctgccagacgatgccc

SEQ ID NO: 278664 - DNA, 55 bp, Artificial
  Synthetic oligonucleotide
cctgacacctacaggaagctaaatcttcaccagttatcaatcgcacaaatggccg

SEQ ID NO: 278665 - DNA, 54 bp, Artificial
  Synthetic oligonucleotide
caccggacatagccactcgtattcggctcatcatagttcaataagccgagaccc

SEQ ID NO: 278666 - DNA, 54 bp, Artificial
  Synthetic oligonucleotide
ttgagagggtgctggatagttcggaactggtccatcctggggaggtggtggaca

SEQ ID NO: 278667 - DNA, 54 bp, Artificial
  Synthetic oligonucleotide
ggtcaccccgaactgttggctgcggatgtcgattgggactctagcgcatcaatg

SEQ ID NO: 278668 - DNA, 54 bp, Artificial
  Synthetic oligonucleotide
atacttacgacattccctcctcgctcgaggactgtatgggcagcggaaagacct

SEQ ID NO: 278669 - DNA, 54 bp, Artificial
  Synthetic oligonucleotide
ttctctatccaagttgacgtcgtatctccacttagctcgccggctatttattgg

SEQ ID NO: 278670 - DNA, 54 bp, Artificial
  Synthetic oligonucleotide
ggacagtcgattaacaaaaggctacgtcggccgaaagacaccagatcgcattag

SEQ ID NO: 278671 - DNA, 54 bp, Artificial
  Synthetic oligonucleotide
ttagacgacatagtggtcgggctccatctaccgaacgaccccagatcagagggg

SEQ ID NO: 278672 - DNA, 54 bp, Artificial
  Synthetic oligonucleotide
tcaattgctagcgttatgaggttttggaacgcgaatggaatacttagcatcgga

SEQ ID NO: 278673 - DNA, 54 bp, Artificial
  Synthetic oligonucleotide
agtttgcctatgtaggaggaagcatacatgctctcactaccacttacacttgcg

SEQ ID NO: 278674 - DNA, 54 bp, Artificial
  Synthetic oligonucleotide
accgtccaatgctacggttctcatatggaaacgtgcgagcaggatacattcgtt

SEQ ID NO: 278675 - DNA, 55 bp, Artificial
  Synthetic oligonucleotide
cctgataggtcgtgaggaggaatgtcttgccaacttggctaagctccgacagtct

SEQ ID NO: 278676 - DNA, 54 bp, Artificial
  Synthetic oligonucleotide
tacaccctttctcgatgcccgagcgacgcatccaaatacccgagatacgtgggg

SEQ ID NO: 278677 - DNA, 54 bp, Artificial
  Synthetic oligonucleotide
cggacgacaactcggtccacgtccaaggcacagcgtcgagtgagggatcaacga

SEQ ID NO: 278678 - DNA, 54 bp, Artificial
  Synthetic oligonucleotide
attcaagtgggagtctggatgtcgtgagtaatggaacctcagatgtcgaacata

SEQ ID NO: 278679 - DNA, 53 bp, Artificial
  Synthetic oligonucleotide
acggcgttggaagatggggttgggctagtttcctcgaaaagacttcttctgta

SEQ ID NO: 278680 - DNA, 54 bp, Artificial
  Synthetic oligonucleotide
acgctattgtgggcctctatcgtttggcaaccgatccttcgattagaactccgg

SEQ ID NO: 278681 - DNA, 54 bp, Artificial
  Synthetic oligonucleotide
acgagaagtgtgagttcggagagcctttcggagggtgacgattcgcttaacggg

SEQ ID NO: 278682 - DNA, 54 bp, Artificial
  Synthetic oligonucleotide
acgctataaacgacgaaacactctatgtggctccttccgactcccgaactgact

SEQ ID NO: 278683 - DNA, 54 bp, Artificial
  Synthetic oligonucleotide
cactttaccctgactattgtttgacgctcatcacgcactctgggaatataaaag

SEQ ID NO: 278684 - DNA, 54 bp, Artificial
  Synthetic oligonucleotide
cactggagcgagttaagattgatcttgccaaaatcttcgttgaaggtacgtata

SEQ ID NO: 278685 - DNA, 54 bp, Artificial
  Synthetic oligonucleotide
ggttgttgattcgcagacatcccattctttatcctgagtgatatttgcatgctt

SEQ ID NO: 278686 - DNA, 55 bp, Artificial
  Synthetic oligonucleotide
cctgcagagcgccacctctggaccgcaaagacaacatcctcccatatctccccga

SEQ ID NO: 278687 - DNA, 54 bp, Artificial
  Synthetic oligonucleotide
taactggttggcaagttagggcggctctaggcggttattcgaagagacatcgtt

SEQ ID NO: 278688 - DNA, 54 bp, Artificial
  Synthetic oligonucleotide
accccgttgctcctcgatactgggccattgcggaggacaggatgtacgtatctt

SEQ ID NO: 278689 - DNA, 54 bp, Artificial
  Synthetic oligonucleotide
tgagatcgactttgtcgtaagcctgcctttgcatatacacagcgattcgcggaa

SEQ ID NO: 278690 - DNA, 54 bp, Artificial
  Synthetic oligonucleotide
cagtatcactaggtatccggctattcgcaaatatgacagctggacacacactac

SEQ ID NO: 278691 - DNA, 54 bp, Artificial
  Synthetic oligonucleotide
gccccagttcatccgcgtacaccctatccttcattggacatactcggatgtatg

SEQ ID NO: 278692 - DNA, 54 bp, Artificial
  Synthetic oligonucleotide
gccccatgattaccgccgtccaagaagggaaacgtacaggctacgtgcccacaa

SEQ ID NO: 278693 - DNA, 53 bp, Artificial
  Synthetic oligonucleotide
gaccttgcgctgtacccgaggagccccagttacccgtaggtgtggcattgacg

SEQ ID NO: 278694 - DNA, 53 bp, Artificial
  Synthetic oligonucleotide
gggtctcgggagaaggtgcttgcacaactgtgcgtgtcgtctatgagtcggcg

SEQ ID NO: 278695 - DNA, 53 bp, Artificial
  Synthetic oligonucleotide
ttcggcttcatgagtggtacgccgttcgtaacgcgcgtgtatagcatcgacta

SEQ ID NO: 278696 - DNA, 53 bp, Artificial
  Synthetic oligonucleotide
ctccgagtggttaaggggcgggacttgaatggatcacgtaatccaagaaatcc

SEQ ID NO: 278697 - DNA, 60 bp, Artificial
  Synthetic oligonucleotide
gacccactcacgggaactgtcgtgcgcagtagaatgacgaatgacgccacggaacttctc

SEQ ID NO: 278698 - DNA, 55 bp, Artificial
  Synthetic oligonucleotide
gctcgtgtgtcgaccgaagtgtcttctcaaacacgtatatcttgacgaaatcgac

SEQ ID NO: 278699 - DNA, 53 bp, Artificial
  Synthetic oligonucleotide
tcgtgcccatcgcagctccactgtccattcgagcccctgctgatgatagggaa

SEQ ID NO: 278700 - DNA, 53 bp, Artificial
  Synthetic oligonucleotide
tatctccaaccgtattcaaaccccaagcatagctgcttgagtcgtgtaccgtt

SEQ ID NO: 278701 - DNA, 53 bp, Artificial
  Synthetic oligonucleotide
tccctttgcgccggcaacaatcgaggggtgattacacctgccttgtacctagc

SEQ ID NO: 278702 - DNA, 53 bp, Artificial
  Synthetic oligonucleotide
atctccctcgcctgccgttcatcttgcggcaagggccttggagctttcgtgtt

SEQ ID NO: 278703 - DNA, 53 bp, Artificial
  Synthetic oligonucleotide
ttgggcgaatatcctccacgagaacatttcgagggcgaacgaaggcggattac

SEQ ID NO: 278704 - DNA, 53 bp, Artificial
  Synthetic oligonucleotide
aggccagtttgtacccgatacaattcctcgcgcctcccagaaaactcaacatg

SEQ ID NO: 278705 - DNA, 53 bp, Artificial
  Synthetic oligonucleotide
tagcagtggcgctttgggcatgttcgacggtttgtcaggggtgggtcttgttt

SEQ ID NO: 278706 - DNA, 53 bp, Artificial
  Synthetic oligonucleotide
tcggaaatataagggtcggaagtagcgagttgagacaattgaatgcgggtaat

SEQ ID NO: 278707 - DNA, 53 bp, Artificial
  Synthetic oligonucleotide
cgtccaggttggtccattcgccgtcagtcaggtatgcgaaacgtggctgatac

SEQ ID NO: 278708 - DNA, 53 bp, Artificial
  Synthetic oligonucleotide
tcgcgatcggtagtttgcaggtcgcttgatgatcggtcgggaccaagcctgga

SEQ ID NO: 278709 - DNA, 55 bp, Artificial
  Synthetic oligonucleotide
ccttaatcaagtccgtcccagacccacgccccaatatacactagtggccgccaca

SEQ ID NO: 278710 - DNA, 53 bp, Artificial
  Synthetic oligonucleotide
tcgcacgctcgtcaaaggggatctttggactgatggatccttatcacaccaag

SEQ ID NO: 278711 - DNA, 53 bp, Artificial
  Synthetic oligonucleotide
aggatgaggtcgggattggatctttctagtaagcgagacaaccgcagaccaca

SEQ ID NO: 278712 - DNA, 53 bp, Artificial
  Synthetic oligonucleotide
ttttcaaactcccaacctatctgcttactcgaccacctacatccaggacaaac

SEQ ID NO: 278713 - DNA, 53 bp, Artificial
  Synthetic oligonucleotide
ggcgggatcaaattcaggctcctcaaaacccggcatgaactcttacgcttcaa

SEQ ID NO: 278714 - DNA, 53 bp, Artificial
  Synthetic oligonucleotide
agctaattacagagtcgggcacaaacgatacgcacctcatttcgatgggtcat

SEQ ID NO: 278715 - DNA, 53 bp, Artificial
  Synthetic oligonucleotide
agctgatcggacgagtagtacgtagcttctatcatattcagtccctatgcttg

SEQ ID NO: 278716 - DNA, 53 bp, Artificial
  Synthetic oligonucleotide
gtgagtaagtcctgcgctccgcatttagcacagcccttgaggagaaaccagat

SEQ ID NO: 278717 - DNA, 53 bp, Artificial
  Synthetic oligonucleotide
tacagacgctcttaataagcacaaacgtacagtacacgctgatgtcacaaatc

SEQ ID NO: 278718 - DNA, 53 bp, Artificial
  Synthetic oligonucleotide
tgcgaataagatatcgacaggcgtcatataatgggcggagaggatgtacatag

SEQ ID NO: 278719 - DNA, 53 bp, Artificial
  Synthetic oligonucleotide
gtctgccgagtttcagcggatagtgccttagagtctgatgatcatcaatatcc

SEQ ID NO: 278720 - DNA, 55 bp, Artificial
  Synthetic oligonucleotide
ccttatgtcgcgtacggattacctaaaggtttcattagcgatgatttgcgacacc

SEQ ID NO: 278721 - DNA, 53 bp, Artificial
  Synthetic oligonucleotide
ctttgccttccaaagcgtccctcacgtccttcactcgtctgcccaccacctcc

SEQ ID NO: 278722 - DNA, 53 bp, Artificial
  Synthetic oligonucleotide
tgggcaccggataagacaggcctcggtatcctggggatcagtctcctcgcagt

SEQ ID NO: 278723 - DNA, 53 bp, Artificial
  Synthetic oligonucleotide
tctctagacccctttcctgcatcgattctggccgcaagagcacacttggccga

SEQ ID NO: 278724 - DNA, 53 bp, Artificial
  Synthetic oligonucleotide
atgcctggcattgtagctaggcaggcgaagtgtggcctgtggggttagcaggt

SEQ ID NO: 278725 - DNA, 53 bp, Artificial
  Synthetic oligonucleotide
tgtcaacgtctacaagactctccagtctactcccttcgacaagattgaccgag

SEQ ID NO: 278726 - DNA, 53 bp, Artificial
  Synthetic oligonucleotide
tctcctagcacttcaagacgtgtactcgatctgatcacatctctcctcattac

SEQ ID NO: 278727 - DNA, 53 bp, Artificial
  Synthetic oligonucleotide
ttagcttctcgatcggacagtcccctctcgagggattggtataccctcttacg

SEQ ID NO: 278728 - DNA, 53 bp, Artificial
  Synthetic oligonucleotide
cgtgtacggcttgtggatgtgtcgcgagaacgccttgtgcgttgaatgggcat

SEQ ID NO: 278729 - DNA, 53 bp, Artificial
  Synthetic oligonucleotide
tcccgcgtcaggagggaacatctcatctcaatgggtgtacccgtcaacctgga

SEQ ID NO: 278730 - DNA, 53 bp, Artificial
  Synthetic oligonucleotide
ttacgcttatacatttgactagacgttactcaatatcctgtgttcccatgggt

SEQ ID NO: 278731 - DNA, 55 bp, Artificial
  Synthetic oligonucleotide
ccttcggtctcaacaaggaaggacttcaaactaaggagtactggctatgagtcca

SEQ ID NO: 278732 - DNA, 53 bp, Artificial
  Synthetic oligonucleotide
ttacgagcgggaccaatgtaaagtatcgccatggcacgcatctagggacacat

SEQ ID NO: 278733 - DNA, 53 bp, Artificial
  Synthetic oligonucleotide
cccttgtgagccggccagttgtcggaataggttcctatgaaggtcggagacgt

SEQ ID NO: 278734 - DNA, 52 bp, Artificial
  Synthetic oligonucleotide
gggcaagtgcccgagaggcgccaagtgcaagcttagacatacgcttcgtgcg

SEQ ID NO: 278735 - DNA, 52 bp, Artificial
  Synthetic oligonucleotide
ttcagccattagtagggtgggtttgggcttttcagtgggctctgttgtgcct

SEQ ID NO: 278736 - DNA, 52 bp, Artificial
  Synthetic oligonucleotide
tgcacaagccatgactcacgactcccagaactttccccgtccgccgtctgta

SEQ ID NO: 278737 - DNA, 52 bp, Artificial
  Synthetic oligonucleotide
tgcagaaagacttggtactcttttgttcttcggttcgagacagtttaggcac

SEQ ID NO: 278738 - DNA, 52 bp, Artificial
  Synthetic oligonucleotide
tagcacagcgaagtttgatgaagacttacgatgcccgaaagagaccagacta

SEQ ID NO: 278739 - DNA, 52 bp, Artificial
  Synthetic oligonucleotide
gatcgactatggcgaactatttgcggctgttgcacacaaggattcaatccga

SEQ ID NO: 278740 - DNA, 52 bp, Artificial
  Synthetic oligonucleotide
tcttaccggcgatctatcacttgtgtcagtgttattcaagccgcctgtcaac

SEQ ID NO: 278741 - DNA, 52 bp, Artificial
  Synthetic oligonucleotide
tcatagtgcgatagggacctccgaaggcgtataagaaaagttcctggtgtac

SEQ ID NO: 278742 - DNA, 55 bp, Artificial
  Synthetic oligonucleotide
gctcgatacaagctatagtgaactggtgataccgagagtccagcagctgtaatgg

SEQ ID NO: 278743 - DNA, 52 bp, Artificial
  Synthetic oligonucleotide
tcagagctacataccggtggtcttctgtcagtcaaagcctgtgcgacagtag

SEQ ID NO: 278744 - DNA, 52 bp, Artificial
  Synthetic oligonucleotide
ttcgatgaataattggtcctcgacagtcaattgtaacagggtcaagaggctg

SEQ ID NO: 278745 - DNA, 52 bp, Artificial
  Synthetic oligonucleotide
tgggagtatttagtgatgggtgatacgacacgactcacaactctattcattt

SEQ ID NO: 278746 - DNA, 52 bp, Artificial
  Synthetic oligonucleotide
gatacccatgacaccgaccattggccactacacgttaattacttggttagct

SEQ ID NO: 278747 - DNA, 52 bp, Artificial
  Synthetic oligonucleotide
ttgagggtgcgctctaagggcgggctgaataacgtgccataatgataagcca

SEQ ID NO: 278748 - DNA, 52 bp, Artificial
  Synthetic oligonucleotide
tattggtctgagaggccgtctgtacagtttctgcacccgctgaagttccact

SEQ ID NO: 278749 - DNA, 52 bp, Artificial
  Synthetic oligonucleotide
gctactagcatcagtattcctaaagctagctacatatggtttcctacgaatt

SEQ ID NO: 278750 - DNA, 52 bp, Artificial
  Synthetic oligonucleotide
gttcttcaatcccttgttcgcagctctcatgttcttcctggagtgtgaaacc

SEQ ID NO: 278751 - DNA, 52 bp, Artificial
  Synthetic oligonucleotide
tacacctggtgattgttagccaaaaggcaaggatgattaatgtaaaggactc

SEQ ID NO: 278752 - DNA, 52 bp, Artificial
  Synthetic oligonucleotide
tccgagtggctagaccattccattgggcccccggacaaagcgttctccttta

SEQ ID NO: 278753 - DNA, 55 bp, Artificial
  Synthetic oligonucleotide
ccttgacccgaagcatctcggtcccataatcagcccgcactcgactgggtatgcc

SEQ ID NO: 278754 - DNA, 52 bp, Artificial
  Synthetic oligonucleotide
atgtaacagaagcctttgtcggcgactgggatcctcgtcggaggtatctcag

SEQ ID NO: 278755 - DNA, 52 bp, Artificial
  Synthetic oligonucleotide
atggtgcgtagctcaagtgccatgcctggaacccatgattccagttcttggc

SEQ ID NO: 278756 - DNA, 52 bp, Artificial
  Synthetic oligonucleotide
agcgtccacaggcctttgagtcaactccaagcgtctcctcctaacctcgcgc

SEQ ID NO: 278757 - DNA, 52 bp, Artificial
  Synthetic oligonucleotide
caggaccgaggaggcttaatctggtcaactgggttaggatatgggcgatgta

SEQ ID NO: 278758 - DNA, 52 bp, Artificial
  Synthetic oligonucleotide
actgtcatgcttgttacccacgcccctaatggccgtttgcatggacgtgtaa

SEQ ID NO: 278759 - DNA, 52 bp, Artificial
  Synthetic oligonucleotide
atcgtatgagctcgcagtcgacacttggaccgataccgattcgattgaaatt

SEQ ID NO: 278760 - DNA, 52 bp, Artificial
  Synthetic oligonucleotide
catgctaaagtgggaaggcgaagatatggtgaataataggtcttggatctac

SEQ ID NO: 278761 - DNA, 52 bp, Artificial
  Synthetic oligonucleotide
ctcgctacggcgggcaacgcaaggaacgagatctaataaccacgctagttat

SEQ ID NO: 278762 - DNA, 52 bp, Artificial
  Synthetic oligonucleotide
acaaggggtggtagtcttacagagtacgagctttcgcccaaagatgaagatc

SEQ ID NO: 278763 - DNA, 52 bp, Artificial
  Synthetic oligonucleotide
ctcaacctctttcagactgggctcccacgaaaagactcaatcttccagcaag

SEQ ID NO: 278764 - DNA, 55 bp, Artificial
  Synthetic oligonucleotide
gctccggtctgagtctgagataactgagccgaagagtggcgacgcttcgaagggg

SEQ ID NO: 278765 - DNA, 52 bp, Artificial
  Synthetic oligonucleotide
atacaacgtataacgcgacgtgtggtaaagtcaaggtcctccgttcccaacc

SEQ ID NO: 278766 - DNA, 52 bp, Artificial
  Synthetic oligonucleotide
ccaataggaggcagtaagcgcggtagcttctcctcattaagcgagcatggga

SEQ ID NO: 278767 - DNA, 52 bp, Artificial
  Synthetic oligonucleotide
agggtcgtaacatgtacgatgtccgaaagacctgtgacaagtctcccgagaa

SEQ ID NO: 278768 - DNA, 52 bp, Artificial
  Synthetic oligonucleotide
acctcctaaccagagatgtcagcacgacgcacgctagcataacagatgagga

SEQ ID NO: 278769 - DNA, 52 bp, Artificial
  Synthetic oligonucleotide
cgcttgatcaaatggtcccgccaaagggagatctcgccactcccaagaaagg

SEQ ID NO: 278770 - DNA, 52 bp, Artificial
  Synthetic oligonucleotide
cccaagatgacgggtcttagactttaccgcataaggacgacatatacccacc

SEQ ID NO: 278771 - DNA, 52 bp, Artificial
  Synthetic oligonucleotide
cggaacgtttctcatgacagtatcctcgacgaatctcgcaactcttattttc

SEQ ID NO: 278772 - DNA, 52 bp, Artificial
  Synthetic oligonucleotide
ccgcttgtagcgcttaccatcgcttttgttctctcccgttccgaagacggac

SEQ ID NO: 278773 - DNA, 52 bp, Artificial
  Synthetic oligonucleotide
atttcttgcgtgcgagagcgcactagtggtggggaaatggacctactgggag

SEQ ID NO: 278774 - DNA, 52 bp, Artificial
  Synthetic oligonucleotide
ccgtcgaccaaatggtcaatcaatgcgcgattgtcgaggacgcgatgtaccc

SEQ ID NO: 278775 - DNA, 55 bp, Artificial
  Synthetic oligonucleotide
ccttgccttgcatcctacgtaataaacatgcgttcactagttacagagcccatcc

SEQ ID NO: 278776 - DNA, 52 bp, Artificial
  Synthetic oligonucleotide
aaaagcagtcaggtcctcgttacatggtgacggaatgaagtcatctatctga

SEQ ID NO: 278777 - DNA, 51 bp, Artificial
  Synthetic oligonucleotide
catgcctagaaataagattccgaatacatccgtctctgttcgtctgtgcga

SEQ ID NO: 278778 - DNA, 51 bp, Artificial
  Synthetic oligonucleotide
cggcaacaatcgaggggtgattacacctgccttgtacctagcgggagggcc

SEQ ID NO: 278779 - DNA, 51 bp, Artificial
  Synthetic oligonucleotide
tgctcatcggacaataatgcaacattgacccgttcgacctatgagtctggc

SEQ ID NO: 278780 - DNA, 51 bp, Artificial
  Synthetic oligonucleotide
taactgagagtagtagtgatcccgtatgaagccgctatagactgtgtggcg

SEQ ID NO: 278781 - DNA, 51 bp, Artificial
  Synthetic oligonucleotide
tgcgattcggcgtagcggagcactggcaattaatgcttaggagcatactcc

SEQ ID NO: 278782 - DNA, 51 bp, Artificial
  Synthetic oligonucleotide
gttgattccactggtcgaccttgcatccgcccaccccagtctattcatgac

SEQ ID NO: 278783 - DNA, 51 bp, Artificial
  Synthetic oligonucleotide
cctatcgacccttccgccgagagaccgcccatgtacactctcgtggctgac

SEQ ID NO: 278784 - DNA, 51 bp, Artificial
  Synthetic oligonucleotide
atatcccatcacttgcgcagggagcaagagtgcagtaaaggatgtggttag

SEQ ID NO: 278785 - DNA, 51 bp, Artificial
  Synthetic oligonucleotide
ctccttggaagcgctcactccaccagtctcgaggtctaccacgttgggcct

SEQ ID NO: 278786 - DNA, 55 bp, Artificial
  Synthetic oligonucleotide
cgagggacgtaagtgaaggatggaaactcggtggtcaaggctggagattggtgac

SEQ ID NO: 278787 - DNA, 51 bp, Artificial
  Synthetic oligonucleotide
gggatgctctatataatggtctaattattgaatcaggtctacggattggtc

SEQ ID NO: 278788 - DNA, 51 bp, Artificial
  Synthetic oligonucleotide
atagcctcctactcataatatgcaatacgatgtactcaaggctactttcga

SEQ ID NO: 278789 - DNA, 51 bp, Artificial
  Synthetic oligonucleotide
tccgaaagacgactcgctgttgtcgaccctacccgactttagagtgtttgg

SEQ ID NO: 278790 - DNA, 51 bp, Artificial
  Synthetic oligonucleotide
tgagcttacgctaagtagaaggtgagcaatccgcattgtgcggaaggaaaa

SEQ ID NO: 278791 - DNA, 51 bp, Artificial
  Synthetic oligonucleotide
agccaaactggtaagttggcgccacatctgcgccatagctatacgatggca

SEQ ID NO: 278792 - DNA, 51 bp, Artificial
  Synthetic oligonucleotide
cgtcgagctttcacggtcatcttcagagtcgtctttgatcgaagagggcta

SEQ ID NO: 278793 - DNA, 51 bp, Artificial
  Synthetic oligonucleotide
ccattctccctcacaggctcgaaactaagacatttccgcgaaatccaccgg

SEQ ID NO: 278794 - DNA, 51 bp, Artificial
  Synthetic oligonucleotide
accgacaggttaagtatcaagctcaacctctctatcgcctatcaccctcaa

SEQ ID NO: 278795 - DNA, 51 bp, Artificial
  Synthetic oligonucleotide
cgctcgtttctgcctgcggtccgctgccgtatgcatacgctctcaactctg

SEQ ID NO: 278796 - DNA, 51 bp, Artificial
  Synthetic oligonucleotide
caagccccagcgatgtatgtaccgaccgacgaccaattctggtccacgacg

SEQ ID NO: 278797 - DNA, 53 bp, Artificial
  Synthetic oligonucleotide
cgaggggaagtggagttattatgggataagtacaggaatgggccgggtaaaga

SEQ ID NO: 278798 - DNA, 51 bp, Artificial
  Synthetic oligonucleotide
gaagtgacatcggccccgacacttctcccacgatcctgttctcgtgaacga

SEQ ID NO: 278799 - DNA, 51 bp, Artificial
  Synthetic oligonucleotide
atgatcagcattcgttatctatgcacgacatcggatgtacccacctgcata

SEQ ID NO: 278800 - DNA, 51 bp, Artificial
  Synthetic oligonucleotide
aaggcagtcatatgaggcttgtaggccaagtcaatggcaacaccgctggga

SEQ ID NO: 278801 - DNA, 51 bp, Artificial
  Synthetic oligonucleotide
agctgtggggttgtggtattttgccggagctacagcgctagccccagcgtc

SEQ ID NO: 278802 - DNA, 51 bp, Artificial
  Synthetic oligonucleotide
ccctagcgccgggcttggggcaagtaggtgaggaatcgaagagcggtgtaa

SEQ ID NO: 278803 - DNA, 51 bp, Artificial
  Synthetic oligonucleotide
gtcaaagcgacagcaggccatccggcaaccacggttcgttcacaaagacac

SEQ ID NO: 278804 - DNA, 51 bp, Artificial
  Synthetic oligonucleotide
aagggcacagtcgcccctaaggcaagggaggaccgtgacgctatacagtac

SEQ ID NO: 278805 - DNA, 51 bp, Artificial
  Synthetic oligonucleotide
cttaaatgtgttagtgggaaggtgattacctgtcagcccggcgtaataagt

SEQ ID NO: 278806 - DNA, 51 bp, Artificial
  Synthetic oligonucleotide
gcaacgcggaaggagccgctctgggactggcttgaaacgacggaatcagac

SEQ ID NO: 278807 - DNA, 51 bp, Artificial
  Synthetic oligonucleotide
gacttggtcttatatcaatcgtaagaagaagcatgtagctgtagaccattg

SEQ ID NO: 278808 - DNA, 55 bp, Artificial
  Synthetic oligonucleotide
tcaccccctaacttaagaagaggagagccgccgaggaaacaggccaagcgaagac

SEQ ID NO: 278809 - DNA, 55 bp, Artificial
  Synthetic oligonucleotide
cgagtcggagtattcgtagatggaacctgtggcgtaaaagagctaacgcaaacta

SEQ ID NO: 278810 - DNA, 51 bp, Artificial
  Synthetic oligonucleotide
ccgaaagcaacgcctgtccttctggtacactcgacccacccggaccgagaa

SEQ ID NO: 278811 - DNA, 50 bp, Artificial
  Synthetic oligonucleotide
aggggcacatcagggtcgatcggagcacgagaagcaaagagcgcacgagg

SEQ ID NO: 278812 - DNA, 50 bp, Artificial
  Synthetic oligonucleotide
aggggatgtgctgtcagcgggcaaaagaggacgcgacacagcgggaaaag

SEQ ID NO: 278813 - DNA, 50 bp, Artificial
  Synthetic oligonucleotide
agggggcgatccaaccgagaatctccagaacatccacggaatcgcgtcga

SEQ ID NO: 278814 - DNA, 50 bp, Artificial
  Synthetic oligonucleotide
agggtacttgcacgcgttagcaggccgacgcacggatacttgcctgtgtg

SEQ ID NO: 278815 - DNA, 50 bp, Artificial
  Synthetic oligonucleotide
agggaaggaatcatcgctgaccgtagggctagggggcgcagatgtaccga

SEQ ID NO: 278816 - DNA, 50 bp, Artificial
  Synthetic oligonucleotide
agcgaccgcgacagaggtttctttggactcgggtataggtaggcccgggg

SEQ ID NO: 278817 - DNA, 50 bp, Artificial
  Synthetic oligonucleotide
agggaaagcacactcggtcatgcctcggagcacttgtccacagccggaac

SEQ ID NO: 278818 - DNA, 50 bp, Artificial
  Synthetic oligonucleotide
aggtcagatcgacaatgggtctacggacaggaggggtggctgccgagtga

SEQ ID NO: 278819 - DNA, 50 bp, Artificial
  Synthetic oligonucleotide
agcggtaagcaaggccagctgaacttccgcgggctcctccttgaaggtaa

SEQ ID NO: 278820 - DNA, 55 bp, Artificial
  Synthetic oligonucleotide
cgagtgacacgatctgcgaggcagaagatgcgagtcatgtacgggtatgggttcg

SEQ ID NO: 278821 - DNA, 50 bp, Artificial
  Synthetic oligonucleotide
aggtctctggattgccccgggatcacgtagcacctgcacggcccgacgaa

SEQ ID NO: 278822 - DNA, 50 bp, Artificial
  Synthetic oligonucleotide
agccgcggtcgctttatgagggccatggaatggtaaggtcccgctggagg

SEQ ID NO: 278823 - DNA, 50 bp, Artificial
  Synthetic oligonucleotide
aggtggggatggttcggtatgagggtctggcgctttggcctcattgtcgc

SEQ ID NO: 278824 - DNA, 50 bp, Artificial
  Synthetic oligonucleotide
agcgggaaatcggagtggactggtgcggacggcctgttattctcagcgct

SEQ ID NO: 278825 - DNA, 50 bp, Artificial
  Synthetic oligonucleotide
agcgcccagcacacatgttgtgtcatcggagggaggtgcgaaacggtcag

SEQ ID NO: 278826 - DNA, 50 bp, Artificial
  Synthetic oligonucleotide
aggtgtctgaccgggtgtcagcaatgaactcggcgggcattccaagcgtc

SEQ ID NO: 278827 - DNA, 50 bp, Artificial
  Synthetic oligonucleotide
tagtaagcggccttgtccgtcttgcaaacaacaagcgcccctaaccgccg

SEQ ID NO: 278828 - DNA, 50 bp, Artificial
  Synthetic oligonucleotide
agcggactccgagtcgccttctgacactacctcccgccaggcgctcattg

SEQ ID NO: 278829 - DNA, 50 bp, Artificial
  Synthetic oligonucleotide
agcgctcgcgaccgattccttgcgcccaacggtctcatggctccttctca

SEQ ID NO: 278830 - DNA, 50 bp, Artificial
  Synthetic oligonucleotide
aggaatggggccgcttggctcggtctgacctggatcctcggaacttcaga

SEQ ID NO: 278831 - DNA, 55 bp, Artificial
  Synthetic oligonucleotide
gcgtccatccaaagctcaagagggctagagcccgataaaccaagaagagcgatgt

SEQ ID NO: 278832 - DNA, 50 bp, Artificial
  Synthetic oligonucleotide
agcctgaggatccctctctccgggaccataccggcttggaccagcacctt

SEQ ID NO: 278833 - DNA, 50 bp, Artificial
  Synthetic oligonucleotide
aggaatgtacacttccccgcccatggatgcaagatcggaggcggagggtt

SEQ ID NO: 278834 - DNA, 50 bp, Artificial
  Synthetic oligonucleotide
aggaatcagttcggaaggaatggctgggggcgggtcaccccatgccgcac

SEQ ID NO: 278835 - DNA, 50 bp, Artificial
  Synthetic oligonucleotide
aggacgcgaccgtcacccaatgccactctcgtaccaagaacgttgagcga

SEQ ID NO: 278836 - DNA, 50 bp, Artificial
  Synthetic oligonucleotide
aggagaggcactgatcgctgagcccgtgccgcaagtcgatcttgcaccca

SEQ ID NO: 278837 - DNA, 50 bp, Artificial
  Synthetic oligonucleotide
aggatacggtgcgagagtggtgtaagggaccatggcccgggagcagctgt

SEQ ID NO: 278838 - DNA, 50 bp, Artificial
  Synthetic oligonucleotide
agctgtgtgacgaagcagtgaccttgcgaggacggccgccagtactagca

SEQ ID NO: 278839 - DNA, 50 bp, Artificial
  Synthetic oligonucleotide
agcctcgtgcggactgggctgtgttgaccgcagctgccaatggcaaggga

SEQ ID NO: 278840 - DNA, 50 bp, Artificial
  Synthetic oligonucleotide
aggatctttgtggggtgcacggactgtatgagagcggctaacgccagggg

SEQ ID NO: 278841 - DNA, 50 bp, Artificial
  Synthetic oligonucleotide
aggcgacggattgcttcgttgaatccgtgggctgtgccatgcgcgggtac

SEQ ID NO: 278842 - DNA, 55 bp, Artificial
  Synthetic oligonucleotide
cgcaatctgggatcatcttaaatgctatgataaggcgtattgacgtactgctctc

SEQ ID NO: 278843 - DNA, 50 bp, Artificial
  Synthetic oligonucleotide
agctgtggggttgtggtattttgccgagctacagcgctagccccagcgtc

SEQ ID NO: 278844 - DNA, 50 bp, Artificial
  Synthetic oligonucleotide
agcgtgggggagagtcttcaggcgtgggcgatggttcttggatgcgcacc

SEQ ID NO: 278845 - DNA, 50 bp, Artificial
  Synthetic oligonucleotide
agcgtcgagagacggaggatgggcggaaagagcgctgggtggaacgtctg

SEQ ID NO: 278846 - DNA, 50 bp, Artificial
  Synthetic oligonucleotide
aggcgagtggaagacataccgtcgcagtgaaaggtgcccgagtgtgtgcc

SEQ ID NO: 278847 - DNA, 50 bp, Artificial
  Synthetic oligonucleotide
agcgaaagggttggcggtggggacagacgaggggaatgcggagaacggtg

SEQ ID NO: 278848 - DNA, 50 bp, Artificial
  Synthetic oligonucleotide
aggcgtacttgcgcttgcagcgaagtttgcacctcctgtaccggggacgc

SEQ ID NO: 278849 - DNA, 50 bp, Artificial
  Synthetic oligonucleotide
aggcgtgtgtcaaggacagctagacggtcatatggtgccgcgagtgcacc

SEQ ID NO: 278850 - DNA, 50 bp, Artificial
  Synthetic oligonucleotide
agcctcaggctctggaccggagatatccccagtgtcggtagtcgcatcgg

SEQ ID NO: 278851 - DNA, 50 bp, Artificial
  Synthetic oligonucleotide
agccgggagttttgttccacctagtaaccacaggacgagcggcggggaaa

SEQ ID NO: 278852 - DNA, 50 bp, Artificial
  Synthetic oligonucleotide
atctagggactcaccgcccatccgggaatatggtgcaggcacctggttgc

SEQ ID NO: 278853 - DNA, 55 bp, Artificial
  Synthetic oligonucleotide
gcgtcatatccatcgatgcatgcttcaggtcccatcgatcccgcacgtcagccac

SEQ ID NO: 278854 - DNA, 50 bp, Artificial
  Synthetic oligonucleotide
atctatttccccagcgatcttgtgcggtgaccccttgctctgcgctcccg

SEQ ID NO: 278855 - DNA, 50 bp, Artificial
  Synthetic oligonucleotide
atgaggcacatgttgggccctgtgtcgccgcagtctgtgtctggtcggac

SEQ ID NO: 278856 - DNA, 50 bp, Artificial
  Synthetic oligonucleotide
atgagggatttcgcgggttgggatggggcgaggactgtgctgggcacgga

SEQ ID NO: 278857 - DNA, 50 bp, Artificial
  Synthetic oligonucleotide
atgcaaggtgggccatgcagggggcatgcaaaagtgtcccgatctcagtg

SEQ ID NO: 278858 - DNA, 50 bp, Artificial
  Synthetic oligonucleotide
atgccgctactgaagtgacgtctgggagcgatgccgtcgtggacaagcgt

SEQ ID NO: 278859 - DNA, 50 bp, Artificial
  Synthetic oligonucleotide
atggacgccaggggttggaaagggcggacagggtctcgagagagtaccaa

SEQ ID NO: 278860 - DNA, 50 bp, Artificial
  Synthetic oligonucleotide
atggcgaccgcaggatacgaccctagggccgcaagcgacttgtgggagct

SEQ ID NO: 278861 - DNA, 50 bp, Artificial
  Synthetic oligonucleotide
atggctcggcgcgaagtgggttggagtacgccaaggctctgcaacgggac

SEQ ID NO: 278862 - DNA, 50 bp, Artificial
  Synthetic oligonucleotide
atggtcggcctccctgtcaaatggttcgtccccgaaggccatcctacggt

SEQ ID NO: 278863 - DNA, 50 bp, Artificial
  Synthetic oligonucleotide
atggttcggccaaagtggaggccgcttgtttcttgagcaggggcacctct

SEQ ID NO: 278864 - DNA, 55 bp, Artificial
  Synthetic oligonucleotide
cgcactccagtgcacaccagtacatagcacaggccaatcggaagatcacagtgtg

SEQ ID NO: 278865 - DNA, 50 bp, Artificial
  Synthetic oligonucleotide
gtacagcttggtagggggcctcgggatgtctagcaggcgagcacatcgcg

SEQ ID NO: 278866 - DNA, 50 bp, Artificial
  Synthetic oligonucleotide
atgtggagcctctggcgggatcattagcgaagtacgcgtcacggctgaga

SEQ ID NO: 278867 - DNA, 50 bp, Artificial
  Synthetic oligonucleotide
atgttctcctgtggcaccattcctcgcgagatggcgagtatggacccaaa

SEQ ID NO: 278868 - DNA, 50 bp, Artificial
  Synthetic oligonucleotide
ggttcgtgtcagcccacgtctcttgccacgcaccacgcacgttctccatt

SEQ ID NO: 278869 - DNA, 50 bp, Artificial
  Synthetic oligonucleotide
attagttacgagggggcacctcagggtcccaatgcggggccttggcagac

SEQ ID NO: 278870 - DNA, 50 bp, Artificial
  Synthetic oligonucleotide
attcatctagtgaacaacccactcccggacccacctacccaccgcccggt

SEQ ID NO: 278871 - DNA, 50 bp, Artificial
  Synthetic oligonucleotide
attccaagggacgtgttgtccgagcttgccccaggcagggtctcggtggc

SEQ ID NO: 278872 - DNA, 50 bp, Artificial
  Synthetic oligonucleotide
atttccccaccgtaccctttccgcgcgcccgtgcaatcgacaactggatg

SEQ ID NO: 278873 - DNA, 50 bp, Artificial
  Synthetic oligonucleotide
atttggtaacctgggccctgtacacttcgccaagcgccccctcagtaggc

SEQ ID NO: 278874 - DNA, 50 bp, Artificial
  Synthetic oligonucleotide
caaaccccatgcaagcacgcccgggagagaaaaccagtctccccctgcgc

SEQ ID NO: 278875 - DNA, 55 bp, Artificial
  Synthetic oligonucleotide
cgcagcatcacggatctctaaagacagtcagctctggtctattgtagcttcatag

SEQ ID NO: 278876 - DNA, 50 bp, Artificial
  Synthetic oligonucleotide
ggtgaagttctaagtaatgtttggggacaagcagtagaactccgactagt

SEQ ID NO: 278877 - DNA, 50 bp, Artificial
  Synthetic oligonucleotide
caaaccggcctaaccccttgggaatctcggacgacttgcgggttgcggac

SEQ ID NO: 278878 - DNA, 50 bp, Artificial
  Synthetic oligonucleotide
caacaccggcaactaacgctggggcgcaattcggttggggatcggaggag

SEQ ID NO: 278879 - DNA, 50 bp, Artificial
  Synthetic oligonucleotide
caacccctcggttcatacgatgctcgtcacagtgacagcgacccagccgc

SEQ ID NO: 278880 - DNA, 50 bp, Artificial
  Synthetic oligonucleotide
ggtcggagatctcggtagagacttttctggtgaataagagggttgtgggg

SEQ ID NO: 278881 - DNA, 50 bp, Artificial
  Synthetic oligonucleotide
caacgtgagccatctgtcggcactctccaaccagcattcgtcccggccac

SEQ ID NO: 278882 - DNA, 50 bp, Artificial
  Synthetic oligonucleotide
aggttttacgcgcccgctatccctcttcccaacgcgtggagcttgtgagc

SEQ ID NO: 278883 - DNA, 50 bp, Artificial
  Synthetic oligonucleotide
gtgcccctttcgtctgggagggtgcgcgtagaggtcatcgggtttgacga

SEQ ID NO: 278884 - DNA, 50 bp, Artificial
  Synthetic oligonucleotide
agtagcagcctgacgagcagtgatgcccgccgcactagcgctctggatct

SEQ ID NO: 278885 - DNA, 50 bp, Artificial
  Synthetic oligonucleotide
agtatcccccgccgcacaagcccacaaaacacgtcaactcaagccactgg

SEQ ID NO: 278886 - DNA, 49 bp, Artificial
  Synthetic oligonucleotide
gcgtaactaccgatttaccgggccccttcgacccgtttaccctttatca

SEQ ID NO: 278887 - DNA, 49 bp, Artificial
  Synthetic oligonucleotide
agtccctcggttggctaggggcgtgaaaccaaaacccgataccgtccgg

SEQ ID NO: 278888 - DNA, 50 bp, Artificial
  Synthetic oligonucleotide
gtgagaggtgcgcgggtggacgtgtaaatgccgataggtcataggcggga

SEQ ID NO: 278889 - DNA, 50 bp, Artificial
  Synthetic oligonucleotide
agtcggagagccctgtacttgacgttaccgcctcgggttcggacctcgtg

SEQ ID NO: 278890 - DNA, 50 bp, Artificial
  Synthetic oligonucleotide
agtctacgctccttggcggatgcccagagctcgtagaggtcggaaagggg

SEQ ID NO: 278891 - DNA, 50 bp, Artificial
  Synthetic oligonucleotide
agtgacgtctgggagcgatgccgtcgtggacaagcgtttctatgccagct

SEQ ID NO: 278892 - DNA, 50 bp, Artificial
  Synthetic oligonucleotide
agtgccgtttgaagccacgctcctcccgtgtcgcgaggtccgcggttgag

SEQ ID NO: 278893 - DNA, 50 bp, Artificial
  Synthetic oligonucleotide
agtgcgaacagagcgtggtgaacggaggggcatgccagttgcaattcgga

SEQ ID NO: 278894 - DNA, 50 bp, Artificial
  Synthetic oligonucleotide
agtgcgagcggtatttcccggagagtatggaggccgtaggggagagtccg

SEQ ID NO: 278895 - DNA, 50 bp, Artificial
  Synthetic oligonucleotide
agtggacagaacgaatgagatgcgtgtgcgatgggcgggcgagacaggct

SEQ ID NO: 278896 - DNA, 50 bp, Artificial
  Synthetic oligonucleotide
ataagtcctggcggctaccttgacccctccgagtcagacgcagaaggcct

SEQ ID NO: 278897 - DNA, 55 bp, Artificial
  Synthetic oligonucleotide
cgcagtcctaacgcagataggttcgcgcctccagcctccaataggtgaacaaggg

SEQ ID NO: 278898 - DNA, 50 bp, Artificial
  Synthetic oligonucleotide
atacccttgttttccctttccggcccaccagtcactcgcctctcgccctt

SEQ ID NO: 278899 - DNA, 50 bp, Artificial
  Synthetic oligonucleotide
atacgtaggggatggcacctagactcgcgcctacagaacatcgagcgagc

SEQ ID NO: 278900 - DNA, 50 bp, Artificial
  Synthetic oligonucleotide
atacgttcttgagcgacacgagaagcgacgcccatggcggctacacgacg

SEQ ID NO: 278901 - DNA, 50 bp, Artificial
  Synthetic oligonucleotide
atactgcccccggcacctgaccacccacacagatcaacccgtcttcgtct

SEQ ID NO: 278902 - DNA, 50 bp, Artificial
  Synthetic oligonucleotide
atagcttctggtaagtggtgtacgttcatcggcgggggaggcgcgacccc

SEQ ID NO: 278903 - DNA, 50 bp, Artificial
  Synthetic oligonucleotide
atataaatcctggctcgcatgtgctggcttctattcttgggatccgcgca

SEQ ID NO: 278904 - DNA, 50 bp, Artificial
  Synthetic oligonucleotide
atcacttgtctttgcgccggagggtgcttgtaccgcgtggcatgcatggt

SEQ ID NO: 278905 - DNA, 50 bp, Artificial
  Synthetic oligonucleotide
atcatactccgcctctgacggcgtgtccaagaaacgagcggccatctcgc

SEQ ID NO: 278906 - DNA, 50 bp, Artificial
  Synthetic oligonucleotide
atccagtgacgggcgagtaaggagtaggagggtgcgagggcgttgtcggt

SEQ ID NO: 278907 - DNA, 50 bp, Artificial
  Synthetic oligonucleotide
atcccggaagaagagcgagaggcgagtgactggtgggccggaaagggaaa

SEQ ID NO: 278908 - DNA, 55 bp, Artificial
  Synthetic oligonucleotide
cgcagtggcttgtttgtaagacatggagattcacgtgctaatgtgtgaatgtagc

SEQ ID NO: 278909 - DNA, 50 bp, Artificial
  Synthetic oligonucleotide
atccgagtcctccacgttcgtccgctcggcactttccctcgctcgcttag

SEQ ID NO: 278910 - DNA, 50 bp, Artificial
  Synthetic oligonucleotide
atcgaaacccaagtccaaacggccatggttcacgcgcgacccgtcgtcct

SEQ ID NO: 278911 - DNA, 50 bp, Artificial
  Synthetic oligonucleotide
atcggcacaccagttgccgagctggttccgcgttttgtgtctgcagtcgt

SEQ ID NO: 278912 - DNA, 50 bp, Artificial
  Synthetic oligonucleotide
atcgttgcgacgacgcagttcagagaccgagtgttcgattgcccggcaga

SEQ ID NO: 278913 - DNA, 50 bp, Artificial
  Synthetic oligonucleotide
tgtgcaattcccgttcgcactactcacatgtcctgcaagtagagtcacgg

SEQ ID NO: 278914 - DNA, 50 bp, Artificial
  Synthetic oligonucleotide
aaggggtccgaggcagggaaggcgggaccattgttacgcgagccatggac

SEQ ID NO: 278915 - DNA, 50 bp, Artificial
  Synthetic oligonucleotide
aaggtcgaggctcctctcaacgccgtgttggatcatcgtgcgatgggtga

SEQ ID NO: 278916 - DNA, 50 bp, Artificial
  Synthetic oligonucleotide
aagtccgagctttgggactaatcgcgtgcaacgagacagaggggcgcctg

SEQ ID NO: 278917 - DNA, 50 bp, Artificial
  Synthetic oligonucleotide
aagtttgcacctcctgtaccagggacgcccacatctgctgaagtcgcgag

SEQ ID NO: 278918 - DNA, 50 bp, Artificial
  Synthetic oligonucleotide
aataccctcgggtgtcggccggggctattcgtggggccggacaaagcagt

SEQ ID NO: 278919 - DNA, 60 bp, Artificial
  Synthetic oligonucleotide
gagcctaggggctcgagggatttgacggcccgcaagacgtcgtcactgatagacacatcg

SEQ ID NO: 278920 - DNA, 56 bp, Artificial
  Synthetic oligonucleotide
tatggtcccgaaagatttgctacatgagggtatgtttgtccccgaatttgacaacc

SEQ ID NO: 278921 - DNA, 60 bp, Artificial
  Synthetic oligonucleotide
gggcaagggaccattgacatcgagagctgccatgatggagggctgtgacgatgatctcta

SEQ ID NO: 278922 - DNA, 54 bp, Artificial
  Synthetic oligonucleotide
ggtgggttagatcggcgaaagggggtgatttatgttcgtcggcatggttaggtg

SEQ ID NO: 278923 - DNA, 60 bp, Artificial
  Synthetic oligonucleotide
tttacgtcgcaatggtatgactccatgaggggtcatataatcttgtccgacagtgatatc

SEQ ID NO: 278924 - DNA, 60 bp, Artificial
  Synthetic oligonucleotide
cctatacctgtaatatgtgtaaattctactaatgaactatctcatcctttactgctagca

SEQ ID NO: 278925 - DNA, 59 bp, Artificial
  Synthetic oligonucleotide
agttggtatagccccttgaagtggctcgtcaggaatactccctggataacagtcagcta

SEQ ID NO: 278926 - DNA, 60 bp, Artificial
  Synthetic oligonucleotide
aagttggcgacaactcagtccggctccgtcaatcagtcagtcacgggcagctcttagtct

SEQ ID NO: 278927 - DNA, 59 bp, Artificial
  Synthetic oligonucleotide
aagttgtacctgccagtaaagtcgtgtctgagtgccctacactgggctctaggaacaca

SEQ ID NO: 278928 - DNA, 60 bp, Artificial
  Synthetic oligonucleotide
tctgagggccaccgtcggatgaacagtccaacagagataagcaatcccggggatttatga

SEQ ID NO: 278929 - DNA, 60 bp, Artificial
  Synthetic oligonucleotide
atcttagtatcgttgcagtgccagctattggtgcggaccccgggaggacatggctcgatg

SEQ ID NO: 278930 - DNA, 57 bp, Artificial
  Synthetic oligonucleotide
gcccccgtcaaagagatcaaatcccagcgcccaaccgtcaccatgttatcccacgtc

SEQ ID NO: 278931 - DNA, 58 bp, Artificial
  Synthetic oligonucleotide
gcttttcgtacgagatatggcctttttgaatggcttgttacaccatttggcctggcaa

SEQ ID NO: 278932 - DNA, 60 bp, Artificial
  Synthetic oligonucleotide
tagctccttgatcctcgtatgcctctcggtatagtaagcagtagttaggtgaacgtccgc

SEQ ID NO: 278933 - DNA, 56 bp, Artificial
  Synthetic oligonucleotide
aaacaattatgctcgtagtgttctactacgtataaaagtatcataaagtttgcttc

SEQ ID NO: 278934 - DNA, 60 bp, Artificial
  Synthetic oligonucleotide
atacgggttccggagacgtggtggttgcgtgcactatcgtgcttgcggcaagtcgagatc

SEQ ID NO: 278935 - DNA, 60 bp, Artificial
  Synthetic oligonucleotide
cctaccatcatactgctagttactattactaactctcgggctacactagtatggagtcaa

SEQ ID NO: 278936 - DNA, 54 bp, Artificial
  Synthetic oligonucleotide
gtatggtgggaggttatatatgtagtatcttcgaggtatatcggggttaagggg

SEQ ID NO: 278937 - DNA, 58 bp, Artificial
  Synthetic oligonucleotide
cccttgttaggtatcgatctgctaacaacccatggagctagctacaagtaagggccgc

SEQ ID NO: 278938 - DNA, 55 bp, Artificial
  Synthetic oligonucleotide
ggggtaccgtgtcttaagacaggataatcggccaaaggctgcccctctgaggctt

SEQ ID NO: 278939 - DNA, 56 bp, Artificial
  Synthetic oligonucleotide
cgttaggcagacctcggcgactaaggcaaccaactcactagtgagtagtaggttgt

SEQ ID NO: 278940 - DNA, 54 bp, Artificial
  Synthetic oligonucleotide
gccctaatcggtcaccccggacgagaacagacctatttggtggtgagccgaacc

SEQ ID NO: 278941 - DNA, 60 bp, Artificial
  Synthetic oligonucleotide
tcttgtgctgttcactgcatgtatgtacgttaccgttatatgcctgtaagtatgttctgc

SEQ ID NO: 278942 - DNA, 59 bp, Artificial
  Synthetic oligonucleotide
aaggtaggctcccctgccattaagcaacgcgagacatcggcatttctcggtgcctgtcg

SEQ ID NO: 278943 - DNA, 60 bp, Artificial
  Synthetic oligonucleotide
tagctgccattcgctctagcatagcaggttcatgtcttagtgtcttccaaaccagaaccg

SEQ ID NO: 278944 - DNA, 55 bp, Artificial
  Synthetic oligonucleotide
gccctaaccggtccggcatactcgctaaggccatcggcgggtaagggctgaggac

SEQ ID NO: 278945 - DNA, 60 bp, Artificial
  Synthetic oligonucleotide
tcgtcctagtggggcaggtccgacctgtctttactatctcactcgcactgagaacctgca

SEQ ID NO: 278946 - DNA, 60 bp, Artificial
  Synthetic oligonucleotide
aaggtcattgctgtggactgcttgggaccgtgcgatattcagtgtagttgacttcattct

SEQ ID NO: 278947 - DNA, 58 bp, Artificial
  Synthetic oligonucleotide
aaggtgagctcggtctctatttcctccaccattcgaaataagacacggttcagacaca

SEQ ID NO: 278948 - DNA, 59 bp, Artificial
  Synthetic oligonucleotide
tcttgcgcttcacaaccacacaaacaaagtaaagaagtcctactgtcaccgataatatg

SEQ ID NO: 278949 - DNA, 60 bp, Artificial
  Synthetic oligonucleotide
tcttgataccatggtcgccagtagatgacactatcagtaggacgatcctacaatcgagac

SEQ ID NO: 278950 - DNA, 60 bp, Artificial
  Synthetic oligonucleotide
tcttgaaggctacagagcagtgttgcatctatttagtatgctgttcagctttagtccatg

SEQ ID NO: 278951 - DNA, 58 bp, Artificial
  Synthetic oligonucleotide
atctcgccgcaagctattttcgacgcgtcctgtatccgtgacacccctcaagaaaagc

SEQ ID NO: 278952 - DNA, 58 bp, Artificial
  Synthetic oligonucleotide
tcttctagacccagatatggagtcaaccgatttccgggacgaggaattagagagagta

SEQ ID NO: 278953 - DNA, 58 bp, Artificial
  Synthetic oligonucleotide
tcttcgtcctccctatggacaagcgtgtacctaagatccgcgtccgtactagacaagc

SEQ ID NO: 278954 - DNA, 57 bp, Artificial
  Synthetic oligonucleotide
taggacagggcaacccgaaataggccattccttactcttctcttgcgacgtccgtca

SEQ ID NO: 278955 - DNA, 60 bp, Artificial
  Synthetic oligonucleotide
aaacgctacgctacgcttcgccacatcaccaaaacagcaccgaaccacacactgcaccta

SEQ ID NO: 278956 - DNA, 57 bp, Artificial
  Synthetic oligonucleotide
atcgttctcggtttctgattgtccttaagattggcccttgcacttaataatctgtcc

SEQ ID NO: 278957 - DNA, 60 bp, Artificial
  Synthetic oligonucleotide
gcccgtcgtcgcagcatggctgccaacaaccacaagtcccagcagcagcattcctccttc

SEQ ID NO: 278958 - DNA, 60 bp, Artificial
  Synthetic oligonucleotide
gtatggtccaatccgatatccaacgcgcgcgactttttctgacgccatgcctattcgagt

SEQ ID NO: 278959 - DNA, 58 bp, Artificial
  Synthetic oligonucleotide
gtatgggggcacccaaggctgaagacgcattcggggagggcgaggtatgtcgctataa

SEQ ID NO: 278960 - DNA, 60 bp, Artificial
  Synthetic oligonucleotide
cattacagatatgcgtactcgatccggtatcgagaatccatcggtcatgtagagagggct

SEQ ID NO: 278961 - DNA, 60 bp, Artificial
  Synthetic oligonucleotide
tcttagccaatcgcggtgtgtcattcgccacacgcatcgctccgtagtgcaatcagcggc

SEQ ID NO: 278962 - DNA, 60 bp, Artificial
  Synthetic oligonucleotide
gtcggagactagttcgaatgtctcggactccgatacctgacctgcagtctgactgcttat

SEQ ID NO: 278963 - DNA, 59 bp, Artificial
  Synthetic oligonucleotide
cctactcgagaattgctcgggagaacgacttaaggcattgacaaatgacttcctgtcgc

SEQ ID NO: 278964 - DNA, 54 bp, Artificial
  Synthetic oligonucleotide
tctgtaccgttaaagattccctatgaacccagtgagtattcgtaagggtacagg

SEQ ID NO: 278965 - DNA, 54 bp, Artificial
  Synthetic oligonucleotide
acgcgagcgtaggtagtttcgtaggttcctttgccatattaaccagttagcctg

SEQ ID NO: 278966 - DNA, 59 bp, Artificial
  Synthetic oligonucleotide
cctactcgatttgcatatacttgtagagtactctatgtttcacctagtcccctaaatca

SEQ ID NO: 278967 - DNA, 59 bp, Artificial
  Synthetic oligonucleotide
catttgtccactatatataacgtcactaaatgatacaccgttatttagtggctccatac

SEQ ID NO: 278968 - DNA, 56 bp, Artificial
  Synthetic oligonucleotide
catttcgtaccgtcgttaatttacatatctacgatatgttatattccgaaaagata

SEQ ID NO: 278969 - DNA, 56 bp, Artificial
  Synthetic oligonucleotide
ggaacaccgcggagagtctctatcgttgtacgtggatcgaaggccaaataggaagg

SEQ ID NO: 278970 - DNA, 60 bp, Artificial
  Synthetic oligonucleotide
tctacatgatacaactcttgaactccgatcagcctataccactacccgaatcatacctgt

SEQ ID NO: 278971 - DNA, 60 bp, Artificial
  Synthetic oligonucleotide
cctcctatgctttgcatcaccgcacttccaaagtattgcgtgaagagaacagtcgctatc

SEQ ID NO: 278972 - DNA, 60 bp, Artificial
  Synthetic oligonucleotide
cattgtaggcaaaggagcgagtcatggcttatccagtctaggtatacattgcgcttcatc

SEQ ID NO: 278973 - DNA, 57 bp, Artificial
  Synthetic oligonucleotide
cattggagatatgggactttctacgccccctcggtatggcaatccgaccctgcgtta

SEQ ID NO: 278974 - DNA, 56 bp, Artificial
  Synthetic oligonucleotide
cctcctagtccggggatgtagtataagagttctaggcctgcctttgaggtagagta

SEQ ID NO: 278975 - DNA, 60 bp, Artificial
  Synthetic oligonucleotide
tctcctcgcagatgggacattgagaaatctcgaaatggtactccccaagacgacttggct

SEQ ID NO: 278976 - DNA, 57 bp, Artificial
  Synthetic oligonucleotide
ggggaaggtagctcccctgttgcaaatgacgtgtcgtctgtgacgggtgcttggaaa

SEQ ID NO: 278977 - DNA, 59 bp, Artificial
  Synthetic oligonucleotide
ggaccatgtccagacagttgggacctccccgacgtagtgatgactgctcgtccgtggag

SEQ ID NO: 278978 - DNA, 60 bp, Artificial
  Synthetic oligonucleotide
cctccgatccaaactctacgtatcacctcgattgtgatcaggatactgagccattcaggt

SEQ ID NO: 278979 - DNA, 60 bp, Artificial
  Synthetic oligonucleotide
aatgaatggtccaagcggtctccattccaggcacctctccatggattacagtggttagac

SEQ ID NO: 278980 - DNA, 55 bp, Artificial
  Synthetic oligonucleotide
tctccctagtgtagaccgaaacctctcccgcccacttttcttgatcggtgtgtag

SEQ ID NO: 278981 - DNA, 58 bp, Artificial
  Synthetic oligonucleotide
gccaccttcggggggttagtgacgagttcatagcagtatcaaatgtccgattgaagcg

SEQ ID NO: 278982 - DNA, 60 bp, Artificial
  Synthetic oligonucleotide
aatgaatgctgcagcagtcggcgtcatgaaagacctacctgatctttgcatcgcctacgg

SEQ ID NO: 278983 - DNA, 60 bp, Artificial
  Synthetic oligonucleotide
tctccaacgaatctctccacaaccgctcctctccctccggccaatatgtataactcacga

SEQ ID NO: 278984 - DNA, 59 bp, Artificial
  Synthetic oligonucleotide
ggaaccggactcagacctcatcgtctcatgcaagttacaaatcagggccgtgcgttagt

SEQ ID NO: 278985 - DNA, 60 bp, Artificial
  Synthetic oligonucleotide
gtatggaatggtgacatgcatgcaaactatgcacttagccagcactatagcacccatgcc

SEQ ID NO: 278986 - DNA, 60 bp, Artificial
  Synthetic oligonucleotide
tctcagctaacttgattgcaaatctagccagtagcatgctactgggaattgatcttctcc

SEQ ID NO: 278987 - DNA, 60 bp, Artificial
  Synthetic oligonucleotide
taggattcacctgagctggccaaccgtagggccgctgtggacggatcaacctcatgcact

SEQ ID NO: 278988 - DNA, 56 bp, Artificial
  Synthetic oligonucleotide
aatgaatcttagagcacgaagaggggggggctagttacttagtagtttgcatctta

SEQ ID NO: 278989 - DNA, 58 bp, Artificial
  Synthetic oligonucleotide
tctcaagtcatcttatcgcgtactccgtgcggagaattaagtcgccttaggggggatg

SEQ ID NO: 278990 - DNA, 60 bp, Artificial
  Synthetic oligonucleotide
gccacacagtgcttgtagcaattggccacttcaaaagtctcgatatgtctggtacctatg

SEQ ID NO: 278991 - DNA, 60 bp, Artificial
  Synthetic oligonucleotide
tctattcaccaaggaagctgtcagaacgacacgtacgatggagcctcttcttaagcagat

SEQ ID NO: 278992 - DNA, 60 bp, Artificial
  Synthetic oligonucleotide
tctatagattttacgcttataattatactgcgcgtataagcgctttactctatagtattc

SEQ ID NO: 278993 - DNA, 56 bp, Artificial
  Synthetic oligonucleotide
aatctcggatcatgagctctccgatacggtaccgtaaagggggcaattaaggacta

SEQ ID NO: 278994 - DNA, 60 bp, Artificial
  Synthetic oligonucleotide
tctagctatataacagaggctttactatagtaattagctttagtaactgctacaatagtg

SEQ ID NO: 278995 - DNA, 53 bp, Artificial
  Synthetic oligonucleotide
gtcgctttcccccgacgtggaagcctgtaacgtatgggtagaaattggtacga

SEQ ID NO: 278996 - DNA, 59 bp, Artificial
  Synthetic oligonucleotide
aatctgcttggaaccacgtctcttacagtacaggaactgtctggtttgctggtccacga

SEQ ID NO: 278997 - DNA, 55 bp, Artificial
  Synthetic oligonucleotide
aatctttacgggagattttagggacgcgagattgaagcagctcgaccgtaactcc

SEQ ID NO: 278998 - DNA, 51 bp, Artificial
  Synthetic oligonucleotide
ggccacgcgggcctttccccggatgttctcgtcccttgggggtaatccgat

SEQ ID NO: 278999 - DNA, 56 bp, Artificial
  Synthetic oligonucleotide
agtttgagccgagtgcttggtatagataccacctcggccccaagttggtagttgag

SEQ ID NO: 279000 - DNA, 55 bp, Artificial
  Synthetic oligonucleotide
aatacaagtttggctagaaaacagtttaaagcgcttcttagatactatacattat

SEQ ID NO: 279001 - DNA, 60 bp, Artificial
  Synthetic oligonucleotide
ggattttaagatgctgtaggggtatacgaatcgagtaaacacaccatgtagtcagcatat

SEQ ID NO: 279002 - DNA, 60 bp, Artificial
  Synthetic oligonucleotide
tcgttggccatcagacggagcatatctgcacgctgattgggggtgagtggcgagtttcca

SEQ ID NO: 279003 - DNA, 60 bp, Artificial
  Synthetic oligonucleotide
cctcacatggcaccgttcccacattcccggtagataagttgtctcgcgagcattcctctc

SEQ ID NO: 279004 - DNA, 57 bp, Artificial
  Synthetic oligonucleotide
ggtggcctcaagtcggcccgtggcgatagcgaatcgtattgaggcccgtaccgcctc

SEQ ID NO: 279005 - DNA, 59 bp, Artificial
  Synthetic oligonucleotide
cattatagcctctccgcggataggtttgataattgggagtcatgcagtacgtttggtgg

SEQ ID NO: 279006 - DNA, 60 bp, Artificial
  Synthetic oligonucleotide
ggtggcgtggctaggccaccaggaactagagatcattaccctgcttaaaggcagcaatat

SEQ ID NO: 279007 - DNA, 58 bp, Artificial
  Synthetic oligonucleotide
tttaggagaccacgtggtagtcctcagagcacggtctcttctacattgtacgtctttc

SEQ ID NO: 279008 - DNA, 56 bp, Artificial
  Synthetic oligonucleotide
tttaggtcgactgtagtggtttgtcaagacgttactatttgtgctccggataatct

SEQ ID NO: 279009 - DNA, 60 bp, Artificial
  Synthetic oligonucleotide
gactcagacagaccaaacaagtagtggtggagcgaagcccaccccactggcgatacaagc

SEQ ID NO: 279010 - DNA, 60 bp, Artificial
  Synthetic oligonucleotide
tcgtttccatctccgtatttagaccgctctgcttcatattaccttcgcgacttgcacata

SEQ ID NO: 279011 - DNA, 54 bp, Artificial
  Synthetic oligonucleotide
gccatccccgaaaactctcccccctcgaaacactgcgacttcgcccttgtccgc

SEQ ID NO: 279012 - DNA, 60 bp, Artificial
  Synthetic oligonucleotide
gccataaggcctacccctagaagcaccactccaagcatcgacgcatacgggctggtctgt

SEQ ID NO: 279013 - DNA, 60 bp, Artificial
  Synthetic oligonucleotide
cggtgacacgacttctatgaatcatgaagagtgcataatgatcttactaccagcaagccg

SEQ ID NO: 279014 - DNA, 58 bp, Artificial
  Synthetic oligonucleotide
gtcggaaatacgggttccggagacgtggtggttgcgtgcactatcgtgcttgcggcaa

SEQ ID NO: 279015 - DNA, 48 bp, Artificial
  Synthetic oligonucleotide
tttcctaaggggaaagtattgaagaaggggtaaacgaaaatacgttta

SEQ ID NO: 279016 - DNA, 58 bp, Artificial
  Synthetic oligonucleotide
ggtgggcttcgctccaccactacttgtttggtctgtctgagtcgacccccggagcata

SEQ ID NO: 279017 - DNA, 60 bp, Artificial
  Synthetic oligonucleotide
aatagctctatagttgaggaacctactcaggatgtaggtatggagcctctagataattca

SEQ ID NO: 279018 - DNA, 60 bp, Artificial
  Synthetic oligonucleotide
ggtgggactgatacttgtagagacgcagtcgtggtggattcagtatcacaccgcttagat

SEQ ID NO: 279019 - DNA, 60 bp, Artificial
  Synthetic oligonucleotide
aatatataacctgctttggatgcggtgtgattccccttgcaccgcgtctgccgcttgtag

SEQ ID NO: 279020 - DNA, 60 bp, Artificial
  Synthetic oligonucleotide
taggccttccataacggagcgatgaaaggagacgcgccagaggaacgccagagagatatg

SEQ ID NO: 279021 - DNA, 53 bp, Artificial
  Synthetic oligonucleotide
gtcggaaagcgactttcctcctaggaagagggatatatttcctcggtgggtgt

SEQ ID NO: 279022 - DNA, 58 bp, Artificial
  Synthetic oligonucleotide
tttcccttggccgactcactacagttctgctgactggtagttccttgaactcggatat

SEQ ID NO: 279023 - DNA, 59 bp, Artificial
  Synthetic oligonucleotide
aaaccccgtgacatgacatgctcaactactacttagtgtagtctgaggactctttagga

SEQ ID NO: 279024 - DNA, 56 bp, Artificial
  Synthetic oligonucleotide
aatatcaggaagacccgggatagggtagcactcgataagccattcttccgggcgcg

SEQ ID NO: 279025 - DNA, 59 bp, Artificial
  Synthetic oligonucleotide
tttatagtatacatcgtggaccagcaaaccagacagttcctgtactgtaagagacgtgg

SEQ ID NO: 279026 - DNA, 55 bp, Artificial
  Synthetic oligonucleotide
aatcaccgggggcttcgtcggaggcagttggcgaacagtgacgtcggacctctcc

SEQ ID NO: 279027 - DNA, 60 bp, Artificial
  Synthetic oligonucleotide
cgttgcgagacaagtgctgttgatcggtcgctccattgctcttttcgaccggaagaacag

SEQ ID NO: 279028 - DNA, 59 bp, Artificial
  Synthetic oligonucleotide
atgggtcagaacatcctcaaaccccattgcctacatgaagaatgcgtggttgggtagga

SEQ ID NO: 279029 - DNA, 60 bp, Artificial
  Synthetic oligonucleotide
gtccaaaagcgacgataggaaggatatcctaactaatctaatattggctaagcatcctga

SEQ ID NO: 279030 - DNA, 60 bp, Artificial
  Synthetic oligonucleotide
ggatggaatgtagatcgggatttgaaccatctcgcatgccttgactgcggacatgtccct

SEQ ID NO: 279031 - DNA, 60 bp, Artificial
  Synthetic oligonucleotide
cgacaggcaccgagaaatgccgatgtctcgcgttgcttaatggcaggggagcctaccttc

SEQ ID NO: 279032 - DNA, 59 bp, Artificial
  Synthetic oligonucleotide
gaccctcccgagcctttcgggccagtctgatagtacgcgaggatactcggatatgtcgc

SEQ ID NO: 279033 - DNA, 57 bp, Artificial
  Synthetic oligonucleotide
ggaaatcactgcctccgagaagccgttaatgggctccaagtaatgtttcagtagcgt

SEQ ID NO: 279034 - DNA, 60 bp, Artificial
  Synthetic oligonucleotide
atggtatcccggaaaggatgatcccacatatacgccgaagcacctcgccggattcagcgc

SEQ ID NO: 279035 - DNA, 60 bp, Artificial
  Synthetic oligonucleotide
tctacatcggagctgattccgaattactcgggcgcttcgatcgagtatcagatttgttcc

SEQ ID NO: 279036 - DNA, 60 bp, Artificial
  Synthetic oligonucleotide
gcttatgcaagatggcgctgagatatgtccagcgagacatgtgctaatcactctgaatgt

SEQ ID NO: 279037 - DNA, 60 bp, Artificial
  Synthetic oligonucleotide
agttgagagccagccaaggctggggggctaaaatatgatgtgatcggatcacgagtatat

SEQ ID NO: 279038 - DNA, 60 bp, Artificial
  Synthetic oligonucleotide
aaggatggatgctagtcaggttagcggttggtggtccagtgtcaatactagatagaggca

SEQ ID NO: 279039 - DNA, 60 bp, Artificial
  Synthetic oligonucleotide
aaaacgggcagatgtagattgccaccacgttgagcgatttgattgcaaatccagcgttat

SEQ ID NO: 279040 - DNA, 58 bp, Artificial
  Synthetic oligonucleotide
gcttcctttagtaggcgccttaggagtagaatgttatcagtaatagagtccgagccta

SEQ ID NO: 279041 - DNA, 60 bp, Artificial
  Synthetic oligonucleotide
aatggtccaagctatatactttgtcgtctatcaagtggagtaccaccgtctcgcagcacc

SEQ ID NO: 279042 - DNA, 60 bp, Artificial
  Synthetic oligonucleotide
ggaatcttcacctgtggagatggagaacatgatgtgctcgattatctaaagtgcgattcg

SEQ ID NO: 279043 - DNA, 60 bp, Artificial
  Synthetic oligonucleotide
tagacttcctacgcgtattcggatgtcgtgcctaccaacacatcccgcaggaagatcgag

SEQ ID NO: 279044 - DNA, 60 bp, Artificial
  Synthetic oligonucleotide
ttggatgtgcattgggaagagcgacaggaagtcatttgtcaatgccttaagtcgttctcc

SEQ ID NO: 279045 - DNA, 59 bp, Artificial
  Synthetic oligonucleotide
tttgggtgacagccgccacgtcgttcgaagcagataaataaagagcgaaagattgtatc

SEQ ID NO: 279046 - DNA, 60 bp, Artificial
  Synthetic oligonucleotide
tcggtacgggtgccgagactcgaaatgaagtgacatacgagatgagtagaccgtcaattc

SEQ ID NO: 279047 - DNA, 60 bp, Artificial
  Synthetic oligonucleotide
agttccccgcagcataggctctgcgtccaacaactgtgtctcgcaggataggctctgcgt

SEQ ID NO: 279048 - DNA, 56 bp, Artificial
  Synthetic oligonucleotide
atactcgtttcaagacaagacgtggaccaccattcaacccccgcaatcggtcatgg

SEQ ID NO: 279049 - DNA, 60 bp, Artificial
  Synthetic oligonucleotide
gtccaatgtgtttagcaaggctaatgctcctcaggtgggagtctatggctacggaaggaa

SEQ ID NO: 279050 - DNA, 60 bp, Artificial
  Synthetic oligonucleotide
gcagtatggttcagcttcagccgaattctaggcctcaccgggtcgagcattaccgtattg

SEQ ID NO: 279051 - DNA, 54 bp, Artificial
  Synthetic oligonucleotide
ccgacgagcgttggaggacgatcaacttacttacccagtctaagacgtgggtct

SEQ ID NO: 279052 - DNA, 60 bp, Artificial
  Synthetic oligonucleotide
atggtgatgcctatcacagatttatcaaaattaagaggagtacaattcagaccattaagt

SEQ ID NO: 279053 - DNA, 59 bp, Artificial
  Synthetic oligonucleotide
ccaccgcattcgctccgactgttccctagcttcttttgcttagacagttgttgctacca

SEQ ID NO: 279054 - DNA, 60 bp, Artificial
  Synthetic oligonucleotide
tagagcacgaaagtacagtcgtgctgctctctttcgtggctggagcctaatccaagccgg

SEQ ID NO: 279055 - DNA, 60 bp, Artificial
  Synthetic oligonucleotide
ccgacgctgtcggagacaatgggtcgcatcaattggttgtgcgatatcggacatgtcgtc

SEQ ID NO: 279056 - DNA, 55 bp, Artificial
  Synthetic oligonucleotide
gtcgactatggccggtttcgatgctttagcggttagcttttgcggttaagtggag

SEQ ID NO: 279057 - DNA, 53 bp, Artificial
  Synthetic oligonucleotide
ccaccgaagtgagggggcaatttcgggacttttcccgacgtgatggagccgaa

SEQ ID NO: 279058 - DNA, 54 bp, Artificial
  Synthetic oligonucleotide
aaagcccatcttgggtggtagtcgttgaattaccggatcgaagagaataaccga

SEQ ID NO: 279059 - DNA, 60 bp, Artificial
  Synthetic oligonucleotide
gcttctccgtatcctatcggctgtccgatcgtgactgggcgcaagtacatgatgtggcgt

SEQ ID NO: 279060 - DNA, 57 bp, Artificial
  Synthetic oligonucleotide
cctgaaccgtgggcctatttctgcgtcttcattgagcctccgcggtttctaagagac

SEQ ID NO: 279061 - DNA, 60 bp, Artificial
  Synthetic oligonucleotide
gcttagatggatatcttctacaggcggaaaactcacatgctcctggtgttcaacggtgtt

SEQ ID NO: 279062 - DNA, 60 bp, Artificial
  Synthetic oligonucleotide
ccctaccatctctcctagccacatcctgatctgcgtctgtggtggtctactgcatgactt

SEQ ID NO: 279063 - DNA, 60 bp, Artificial
  Synthetic oligonucleotide
ccaccttgccacctagaacttacaccagaatgcgctagaccatgttacgtgcagataaag

SEQ ID NO: 279064 - DNA, 57 bp, Artificial
  Synthetic oligonucleotide
aaggaaaccacagtatcgggagatcgtagccacggcagcgttccttctttgccactc

SEQ ID NO: 279065 - DNA, 52 bp, Artificial
  Synthetic oligonucleotide
acgggtgaagcttgggtgggtcccgccagccttaaggggcgcttccaggcct

SEQ ID NO: 279066 - DNA, 60 bp, Artificial
  Synthetic oligonucleotide
cctgagattgcaagtatgccaaggcctacgcgcccagggagtagagatttagtaaagaca

SEQ ID NO: 279067 - DNA, 60 bp, Artificial
  Synthetic oligonucleotide
gcttccaatccctcatctagtttcagtccacgagcacagatttatattgggggatcgacc

SEQ ID NO: 279068 - DNA, 60 bp, Artificial
  Synthetic oligonucleotide
gtatgttcatggtggaatcctgactttctggagcgtctgtccctgactgtcgtctgccct

SEQ ID NO: 279069 - DNA, 60 bp, Artificial
  Synthetic oligonucleotide
ttggctgcatgtggtgttatgcaacaagacttatctaatagaagattggttcttagccaa

SEQ ID NO: 279070 - DNA, 60 bp, Artificial
  Synthetic oligonucleotide
ccgttacctgctatgtatttagattacctcacgatcaaagcggctatgctgatgcccaag

SEQ ID NO: 279071 - DNA, 56 bp, Artificial
  Synthetic oligonucleotide
aaacttgatctcgctaccctccggttactcctagctaggttttatagccgagatgc

SEQ ID NO: 279072 - DNA, 58 bp, Artificial
  Synthetic oligonucleotide
ccgtggttaaaatggggacatgtagaatgcaagcgcgttgagcgatttaattgcaaat

SEQ ID NO: 279073 - DNA, 60 bp, Artificial
  Synthetic oligonucleotide
atactcgccgtttttcgtctcaataacgacattgatggctcccagatgtctcataatgcg

SEQ ID NO: 279074 - DNA, 58 bp, Artificial
  Synthetic oligonucleotide
agttgacttagaacagagtctcatagtcggactaaacaactcacctttagcacgcaag

SEQ ID NO: 279075 - DNA, 54 bp, Artificial
  Synthetic oligonucleotide
aaggagtttgagtagaaggttctgcgtttcgattgcaaatcgaaataaagggat

SEQ ID NO: 279076 - DNA, 60 bp, Artificial
  Synthetic oligonucleotide
gtaccactggcctacgggtgcgtcgttgattatcagtcccgtccatgtagaatgcttctg

SEQ ID NO: 279077 - DNA, 60 bp, Artificial
  Synthetic oligonucleotide
tgacgatgtactgtgtagtactagccggctagcgagttcacaagcgcggtggtatgagcc

SEQ ID NO: 279078 - DNA, 54 bp, Artificial
  Synthetic oligonucleotide
aaacttatagcttaatagagggttaaatagaaaataattcgtcggcgcgcgcac

SEQ ID NO: 279079 - DNA, 59 bp, Artificial
  Synthetic oligonucleotide
ccaccgtattgagatcggtatttcttgacgtgcgccacggatcccactgtgcaccaaag

SEQ ID NO: 279080 - DNA, 60 bp, Artificial
  Synthetic oligonucleotide
gcttcaagtgcggctagccgattcaatcacggaggtcagaaccgatgcaattatgaacgg

SEQ ID NO: 279081 - DNA, 60 bp, Artificial
  Synthetic oligonucleotide
gcagggttgttcagaacaatcgtaatgtgtattgtccacggcgacatctggatgtgaggg

SEQ ID NO: 279082 - DNA, 57 bp, Artificial
  Synthetic oligonucleotide
tgacgcagggggaggggtagacccctagctgattcatgacgaacgttggccagtagt

SEQ ID NO: 279083 - DNA, 60 bp, Artificial
  Synthetic oligonucleotide
ttttcatcgcaaatgtagacattgagacatgactaaatgttgtggctgctgtcttgcctt

SEQ ID NO: 279084 - DNA, 59 bp, Artificial
  Synthetic oligonucleotide
gcttcaaccttatatttcttaggtcaaatctaagtgctctggaagtgtatatagataat

SEQ ID NO: 279085 - DNA, 60 bp, Artificial
  Synthetic oligonucleotide
tgacgccagccccaagcaagcaacgactggcgcgaagtcgtggccaataattgaccatac

SEQ ID NO: 279086 - DNA, 60 bp, Artificial
  Synthetic oligonucleotide
tcgggggtgcgctctcataggtacagtctgtgtgccacgaaaacccttgcatggtttctg

SEQ ID NO: 279087 - DNA, 57 bp, Artificial
  Synthetic oligonucleotide
cgatcggaatgccaatgcgactttctaaaacccgtagaaggcccagttggatcagac

SEQ ID NO: 279088 - DNA, 60 bp, Artificial
  Synthetic oligonucleotide
agttctctgcaggagaccgctgcattaacaagttctccgcagcctaggccctgcgtcaac

SEQ ID NO: 279089 - DNA, 60 bp, Artificial
  Synthetic oligonucleotide
aaagagacggaagctatcaagcgagccagagtctgcggcagcttctttgtaatggcggcc

SEQ ID NO: 279090 - DNA, 58 bp, Artificial
  Synthetic oligonucleotide
atctgagccgcaaccccctatcgcccgtcccaagtcttcgtccggtcatcagcccatg

SEQ ID NO: 279091 - DNA, 60 bp, Artificial
  Synthetic oligonucleotide
ccacagcaaacgcaacccattctactcccccgcacgcgcattcccgcaattctcacacaa

SEQ ID NO: 279092 - DNA, 60 bp, Artificial
  Synthetic oligonucleotide
aaggctgtctcgtacatcaggacgctgctccctcacatccagatgtcgccgtggaaaata

SEQ ID NO: 279093 - DNA, 59 bp, Artificial
  Synthetic oligonucleotide
ggaatatgtgctattacttcaaccgtgcccccataactggcttcgcgtgccaggcgcct

SEQ ID NO: 279094 - DNA, 59 bp, Artificial
  Synthetic oligonucleotide
aaggctttgaaacttctctacgcccggcgtagactcgcacaagtggctctgtctatgga

SEQ ID NO: 279095 - DNA, 54 bp, Artificial
  Synthetic oligonucleotide
atagaccgggtcttgttaaaacttcactacaattacatcgtcactgaaccaaat

SEQ ID NO: 279096 - DNA, 60 bp, Artificial
  Synthetic oligonucleotide
cctaacgctttgactcgcatcgtggactaccgcataatccgacgacgccagaagaaatgc

SEQ ID NO: 279097 - DNA, 60 bp, Artificial
  Synthetic oligonucleotide
catgtgcatcggcttcgcgcgcagaaatccggtccgtgtcttcttggctgagggtttggt

SEQ ID NO: 279098 - DNA, 60 bp, Artificial
  Synthetic oligonucleotide
tagaggccattgtgaaccatatcaagctggcttgtacgctggtagatacaggctgtcttg

SEQ ID NO: 279099 - DNA, 60 bp, Artificial
  Synthetic oligonucleotide
tcgggaacatttgtcttcgcggtctgcttgttcgcaatgttcaagggcttcacaggctgg

SEQ ID NO: 279100 - DNA, 56 bp, Artificial
  Synthetic oligonucleotide
ttggtccttacaaaggccatacaactcgcctttataatgctcaagcgggaaatttg

SEQ ID NO: 279101 - DNA, 58 bp, Artificial
  Synthetic oligonucleotide
gcttacatacggttctctccaacaggcttcattcccgcgggcactagctggtctttag

SEQ ID NO: 279102 - DNA, 60 bp, Artificial
  Synthetic oligonucleotide
ggaatagaatcacctcatggggcgaccaaatggcatcgctggctctagaacattgcatct

SEQ ID NO: 279103 - DNA, 58 bp, Artificial
  Synthetic oligonucleotide
cctaatagttattatattctgtagatgtgtctttattccgggacttgtacatacatag

SEQ ID NO: 279104 - DNA, 60 bp, Artificial
  Synthetic oligonucleotide
tgaactcataccagacatgacgctacggacactggacacggagtggatagagtcccggtc

SEQ ID NO: 279105 - DNA, 60 bp, Artificial
  Synthetic oligonucleotide
tgagactaaaggcggttatgatccaattcagctcatcgaactggtctagaaacagcgtac

SEQ ID NO: 279106 - DNA, 59 bp, Artificial
  Synthetic oligonucleotide
gccgaaggaatacctcaatacacgctgacatgagttgctcgtttccctggtagtcgtcc

SEQ ID NO: 279107 - DNA, 60 bp, Artificial
  Synthetic oligonucleotide
cctaatattgtcccgtcattctctgtcagtgctcagcaataataagcccatcgcagtgct

SEQ ID NO: 279108 - DNA, 57 bp, Artificial
  Synthetic oligonucleotide
tgagactaattccccagagtcatagaacccgggggctatactcaatggggagaagtc

SEQ ID NO: 279109 - DNA, 60 bp, Artificial
  Synthetic oligonucleotide
aggtctgcaggatttcaggtctccgtaccaagtgcggatactgtgtcgcgtcgattatgt

SEQ ID NO: 279110 - DNA, 60 bp, Artificial
  Synthetic oligonucleotide
cctacacagatcaccgaaggtggatggagacgtatcacgggcacgtccgcactcctgcgg

SEQ ID NO: 279111 - DNA, 59 bp, Artificial
  Synthetic oligonucleotide
aatggccatatctctccgcgaaagtatgtgctaattcgaacctcctcgttctcgttgga

SEQ ID NO: 279112 - DNA, 58 bp, Artificial
  Synthetic oligonucleotide
gtcggccccgatgagagccccgatgtcataggggccctccaactcctcggcaaggatc

SEQ ID NO: 279113 - DNA, 55 bp, Artificial
  Synthetic oligonucleotide
aaaaacttcccctgatagtcaccaaggcttgacgccaccagatagcccaacgaag

SEQ ID NO: 279114 - DNA, 54 bp, Artificial
  Synthetic oligonucleotide
cgggttgtttaaatagtctaaaatatcttagttattgtcatcgatatctagttt

SEQ ID NO: 279115 - DNA, 57 bp, Artificial
  Synthetic oligonucleotide
cctctttcgaggacaatttgcgcaagtacaggttgttgtccctcacgaaggcgacca

SEQ ID NO: 279116 - DNA, 60 bp, Artificial
  Synthetic oligonucleotide
aaggccatgcgagtatcctccgatctcgagacgcctgtgaccgccgtcagcggaatggaa

SEQ ID NO: 279117 - DNA, 53 bp, Artificial
  Synthetic oligonucleotide
ccgacgtaccgtcgatgtaaacgagtcgaaggtctcccgtggtcgcgtaggtg

SEQ ID NO: 279118 - DNA, 57 bp, Artificial
  Synthetic oligonucleotide
aatggctataagttaatggtagactgtttaccttccaagtaaagtgtgctgattcga

SEQ ID NO: 279119 - DNA, 60 bp, Artificial
  Synthetic oligonucleotide
gcttgacatgtgaacattgcgccaggtgatacaacttcaaagctctgcgctgctattatt

SEQ ID NO: 279120 - DNA, 53 bp, Artificial
  Synthetic oligonucleotide
gacctcatagggggggccaagggttgaggatttattacctattattgggccga

SEQ ID NO: 279121 - DNA, 60 bp, Artificial
  Synthetic oligonucleotide
tttggcctcatggtcgggattggcggaggagtcccgtctgctgtcgatgtcagactggga

SEQ ID NO: 279122 - DNA, 60 bp, Artificial
  Synthetic oligonucleotide
ccctagagtgcgaagcatgctcgctaggcaaggccacacgcctcgtttcaagggacccaa

SEQ ID NO: 279123 - DNA, 59 bp, Artificial
  Synthetic oligonucleotide
tgacaaaaaatgttacgcgccaggtgcgggaacgcatcgaaacattgcgtgaccgaaga

SEQ ID NO: 279124 - DNA, 60 bp, Artificial
  Synthetic oligonucleotide
tgacagagcctgtccttgctccatttgacccagatcgagagactatagtggaaacagact

SEQ ID NO: 279125 - DNA, 56 bp, Artificial
  Synthetic oligonucleotide
gccgttgggttcggtggcagcggtagtgcaaaatgggcgaagggtatttggctcaa

SEQ ID NO: 279126 - DNA, 60 bp, Artificial
  Synthetic oligonucleotide
cgtgtcagctaagaagtcgacggtcacaagacatcagtctttgctagtggctcgctgcac

SEQ ID NO: 279127 - DNA, 60 bp, Artificial
  Synthetic oligonucleotide
tgactcggatgactaacgcgatggagtccaacgaggcgcagtgactggttgctcgaacca

SEQ ID NO: 279128 - DNA, 60 bp, Artificial
  Synthetic oligonucleotide
catgtccactagcagtatgaacttacttgccttggggatgcagcaagttagtaacgacta

SEQ ID NO: 279129 - DNA, 58 bp, Artificial
  Synthetic oligonucleotide
gtatgtgctaattcgaacctcctcgttctcgttggactgtaagttatccagctaccaa

SEQ ID NO: 279130 - DNA, 60 bp, Artificial
  Synthetic oligonucleotide
ccgtttacacgtagctgctgaacagctgctcactatgcaagtattccatcatggactcgt

SEQ ID NO: 279131 - DNA, 60 bp, Artificial
  Synthetic oligonucleotide
ctattgcccagaccatagttcccccaaggcaccgcttattggcatagtccatcttcatcc

SEQ ID NO: 279132 - DNA, 57 bp, Artificial
  Synthetic oligonucleotide
ggtcgggtacgctcccgtaacaaatcactacggtcgcatgcgcccgctccgttggca

SEQ ID NO: 279133 - DNA, 59 bp, Artificial
  Synthetic oligonucleotide
tatggatccactggctatacgcgttcaggcaacaacgccgccagagtaaagattgcggc

SEQ ID NO: 279134 - DNA, 55 bp, Artificial
  Synthetic oligonucleotide
ccgagcttgggtgtacccctccaatggagcgtaatactacgtttgagttaatctg

SEQ ID NO: 279135 - DNA, 59 bp, Artificial
  Synthetic oligonucleotide
gatgtgtgaagattaagacactctattgaattacaattggccaatcatgaacatagtgc

SEQ ID NO: 279136 - DNA, 59 bp, Artificial
  Synthetic oligonucleotide
cgaagcttccatcgtgccatggatcttggacagggccagactttcgctatcatggcggg

SEQ ID NO: 279137 - DNA, 59 bp, Artificial
  Synthetic oligonucleotide
ggtaggcgctcacgcaaccctcaagacccatgagaggatctgtcaccagccgacaccac

SEQ ID NO: 279138 - DNA, 53 bp, Artificial
  Synthetic oligonucleotide
agtccaacggacttaattcccgctccgtggcggagttattcgtttgcgtctcc

SEQ ID NO: 279139 - DNA, 57 bp, Artificial
  Synthetic oligonucleotide
cgtaccggatatccgtcccagacccaagacatcatcgtactagaatccgacagaagg

SEQ ID NO: 279140 - DNA, 59 bp, Artificial
  Synthetic oligonucleotide
atcacgtaatccggtgtttatacatatccgatgatcatagtcactcgggaagtgatttg

SEQ ID NO: 279141 - DNA, 59 bp, Artificial
  Synthetic oligonucleotide
taccctccatatgcacccaattgtcggcaagttacatcgctaatgggtattcacagcat

SEQ ID NO: 279142 - DNA, 60 bp, Artificial
  Synthetic oligonucleotide
agtcaaatctctatagcagcatatacaacgagcttaatggagacctcgcaagacgcttcg

SEQ ID NO: 279143 - DNA, 56 bp, Artificial
  Synthetic oligonucleotide
gaccttcggaattataaaggccatctgtggtcaagttgaacgccgaggcaaaccac

SEQ ID NO: 279144 - DNA, 57 bp, Artificial
  Synthetic oligonucleotide
cggtggcagcggtagtgcaaaatgggcgaagggtatttggctcaagcgtcggtactc

SEQ ID NO: 279145 - DNA, 59 bp, Artificial
  Synthetic oligonucleotide
atcggtccgctcctcatgtgtttcttgtctgctttctttcagcttgacaatttgctccg

SEQ ID NO: 279146 - DNA, 59 bp, Artificial
  Synthetic oligonucleotide
gagggaacatcaggagaggtaatgtcagaggggcaagtatcagagggtgagtggatgtt

SEQ ID NO: 279147 - DNA, 59 bp, Artificial
  Synthetic oligonucleotide
ctagctcgtaggccgtggatgcatcagttcacatggttgtcctggaaactagacccagt

SEQ ID NO: 279148 - DNA, 59 bp, Artificial
  Synthetic oligonucleotide
atcaggtatatgtctatcagcccggattaggtcgaggagcttataggaaggaattctcg

SEQ ID NO: 279149 - DNA, 59 bp, Artificial
  Synthetic oligonucleotide
tggtatcaggcatgttagctaccggtgtgtccggcacgactgccacctgcgaagctgtc

SEQ ID NO: 279150 - DNA, 56 bp, Artificial
  Synthetic oligonucleotide
actgaccttgaaacacacgacgattgttttctcgccccgctgccaagaccttagcg

SEQ ID NO: 279151 - DNA, 57 bp, Artificial
  Synthetic oligonucleotide
agcgtcgggggaagcctagtcaacagagaatgtgccgagagactcgaatacggtagg

SEQ ID NO: 279152 - DNA, 59 bp, Artificial
  Synthetic oligonucleotide
tctcatctacatggcgcgagagaagattccgggcaaaccacaccacttcaaagcgggta

SEQ ID NO: 279153 - DNA, 56 bp, Artificial
  Synthetic oligonucleotide
atcagggacctggtaggcagccaggtttcaatcgatcccgtccaaacgagagggaa

SEQ ID NO: 279154 - DNA, 58 bp, Artificial
  Synthetic oligonucleotide
tagatctagttctagaaataataatggagtaaacaataataacagtcctaatataaca

SEQ ID NO: 279155 - DNA, 53 bp, Artificial
  Synthetic oligonucleotide
ggtcgacagaacccacaccgtccgtaccaaccggattatcgttagagttagtg

SEQ ID NO: 279156 - DNA, 59 bp, Artificial
  Synthetic oligonucleotide
aaggattgttagtatacatatccaatactgtacatggctaattatctatataaacagca

SEQ ID NO: 279157 - DNA, 56 bp, Artificial
  Synthetic oligonucleotide
cgatcgtgtaaaatactatacacttaccaaatgcgaagaatttagactaacttcac

SEQ ID NO: 279158 - DNA, 59 bp, Artificial
  Synthetic oligonucleotide
cgcggaagcagttggctaccatgcggagacggacgaggtttgattcagttatgcctcgt

SEQ ID NO: 279159 - DNA, 59 bp, Artificial
  Synthetic oligonucleotide
tcgtctcgtagttatattcaggcgtcagctgagcccaacacgactcagcgatgctggca

SEQ ID NO: 279160 - DNA, 59 bp, Artificial
  Synthetic oligonucleotide
ttgtttgcccggcaagggattcatgctcgacaagagaacggcctcctgttcgcacagct

SEQ ID NO: 279161 - DNA, 56 bp, Artificial
  Synthetic oligonucleotide
agatgtacctgggtcttacctattatacagatccgggcacttcccgtcaacgtcag

SEQ ID NO: 279162 - DNA, 59 bp, Artificial
  Synthetic oligonucleotide
cgctcaatgcgtcagcatgctgcgctaaagttgttatgatcatgatcctctcacgagtt

SEQ ID NO: 279163 - DNA, 59 bp, Artificial
  Synthetic oligonucleotide
tatagcaccagtgtactagtaatatctgcgattggtaccgtgccaaagacaggagtgcc

SEQ ID NO: 279164 - DNA, 59 bp, Artificial
  Synthetic oligonucleotide
cagcatgtacctctgcacaggatcaacagatcaaggattgagaggggggcgacggagat

SEQ ID NO: 279165 - DNA, 59 bp, Artificial
  Synthetic oligonucleotide
tagatggagaggatatcatggcccggaacagtcggggaagaggcccctcccagattcga

SEQ ID NO: 279166 - DNA, 59 bp, Artificial
  Synthetic oligonucleotide
ttacagactggatcaacaagggttaggctcgcccatcccggcgtactttcatgtgggca

SEQ ID NO: 279167 - DNA, 59 bp, Artificial
  Synthetic oligonucleotide
tcatgtctaccatgccaacatacatccgcacgcacccccttcgacaaagcgacgacatt

SEQ ID NO: 279168 - DNA, 59 bp, Artificial
  Synthetic oligonucleotide
gtctgactctctaactggttacggagcgtctgaatctccatacgataccgctccaggag

SEQ ID NO: 279169 - DNA, 59 bp, Artificial
  Synthetic oligonucleotide
atgtctagcgctgctaggaaaacgcacaactgtgcacaaatattaggatgtgtatgata

SEQ ID NO: 279170 - DNA, 54 bp, Artificial
  Synthetic oligonucleotide
aaatctaattaagagtttctgtattattacaaaacgggaggtttatgagctata

SEQ ID NO: 279171 - DNA, 59 bp, Artificial
  Synthetic oligonucleotide
tcttagtaggagccactatctaggtcctgtatgaactaactaaatctaggcccattcta

SEQ ID NO: 279172 - DNA, 58 bp, Artificial
  Synthetic oligonucleotide
tgcgaaaacaagactaccccgcaggataggtctgcgtgaacaacaagcctcgcagggg

SEQ ID NO: 279173 - DNA, 55 bp, Artificial
  Synthetic oligonucleotide
agttacgccagttaaggtttgcgttcctcagtcgcaaagtgtggttgcgattttc

SEQ ID NO: 279174 - DNA, 57 bp, Artificial
  Synthetic oligonucleotide
ttaacattctcattaagtttcacagttgttttaggtgcaacattcttaggattccaa

SEQ ID NO: 279175 - DNA, 59 bp, Artificial
  Synthetic oligonucleotide
ttggttcccatctagcggtctgctgcgataatcagagcaactctgatacgtggcgcgac

SEQ ID NO: 279176 - DNA, 59 bp, Artificial
  Synthetic oligonucleotide
tagcaaagtataacgggcgccacccctcggcgagtcaggcttgtaggctagtaagcagc

SEQ ID NO: 279177 - DNA, 59 bp, Artificial
  Synthetic oligonucleotide
ctatgggcggtcagtctcaatgaatctcacacttggcagacagggaggtagactgactg

SEQ ID NO: 279178 - DNA, 55 bp, Artificial
  Synthetic oligonucleotide
gggtctcgacaaatagcacgtttctgctggtcggtaagacctgacggggcaaggg

SEQ ID NO: 279179 - DNA, 59 bp, Artificial
  Synthetic oligonucleotide
ttgacgattaataatagctatgccatgcgaaatgatgttactcagctgttgtgcagtcg

SEQ ID NO: 279180 - DNA, 51 bp, Artificial
  Synthetic oligonucleotide
cttaacttaagtttaagtgacgcaagtcgtaaacgttcgaatcgtttctcg

SEQ ID NO: 279181 - DNA, 59 bp, Artificial
  Synthetic oligonucleotide
tccaatcctaaaccagaatatagaaaacggctcattgcatatagctctagtccagagaa

SEQ ID NO: 279182 - DNA, 59 bp, Artificial
  Synthetic oligonucleotide
tgcggagctctaacagtctactccgtcatctctttaacgctatacaaccgtcggcagcg

SEQ ID NO: 279183 - DNA, 59 bp, Artificial
  Synthetic oligonucleotide
tagtagcgcttcccgctgagcatacaccagaccgtgagaggtaccttctttgtcctcga

SEQ ID NO: 279184 - DNA, 59 bp, Artificial
  Synthetic oligonucleotide
cgattagagcggatgacatcgctccaggtgatataggagccggaaggacgagttgttct

SEQ ID NO: 279185 - DNA, 56 bp, Artificial
  Synthetic oligonucleotide
ccagcagatagttacgcggattaataccgccttatgcccgtactttgccaggaccc

SEQ ID NO: 279186 - DNA, 58 bp, Artificial
  Synthetic oligonucleotide
tactaagcctatttaagaattctatcgttatatacgggatattaagctactatctaga

SEQ ID NO: 279187 - DNA, 60 bp, Artificial
  Synthetic oligonucleotide
cgatagggttggcttgattgagcatccctccctgaagcactcagtactctcgagtcacga

SEQ ID NO: 279188 - DNA, 58 bp, Artificial
  Synthetic oligonucleotide
aacgagcttaatggagacctcgcaagacgcttcgaaacagctggcgacctcgcttcct

SEQ ID NO: 279189 - DNA, 59 bp, Artificial
  Synthetic oligonucleotide
catggctggcgtttgtctaggactcgatgctgtggaattcctcgagaaatacgatcgcg

SEQ ID NO: 279190 - DNA, 54 bp, Artificial
  Synthetic oligonucleotide
agggtccgttgttaaatccagttgttcgtcaactcagcttcgttcccttgtcta

SEQ ID NO: 279191 - DNA, 53 bp, Artificial
  Synthetic oligonucleotide
atgggggttgacccgagcgtttcgcttagatgtcacggcgaaccggtagttag

SEQ ID NO: 279192 - DNA, 57 bp, Artificial
  Synthetic oligonucleotide
acagtcacttccgcccaggttccgtgtggacgtgcgaatcaaggagggaacgcatag

SEQ ID NO: 279193 - DNA, 59 bp, Artificial
  Synthetic oligonucleotide
aatgcactcgccacatactcaatattcttctcgttcagcccacagatactcactctccc

SEQ ID NO: 279194 - DNA, 54 bp, Artificial
  Synthetic oligonucleotide
aggactccgaccgatggatttttggcgagaagtggtccaacccgatcgtgttcc

SEQ ID NO: 279195 - DNA, 59 bp, Artificial
  Synthetic oligonucleotide
cactcttctgcgactcgggccctttgtgatggccgggtcctttctgctcgcgccaggca

SEQ ID NO: 279196 - DNA, 59 bp, Artificial
  Synthetic oligonucleotide
gatgctacgcgaagtgggtgccaactatggacgagaggccgtgccactgtcaatgggat

SEQ ID NO: 279197 - DNA, 59 bp, Artificial
  Synthetic oligonucleotide
atagctccccgtagcgcaggacggcactcggttacctatccgcgaatgctgtggcgcct

SEQ ID NO: 279198 - DNA, 60 bp, Artificial
  Synthetic oligonucleotide
aggtgactcgtcccttgttgtatcacctgtagcgctgctggacacactgccggtatcctc

SEQ ID NO: 279199 - DNA, 59 bp, Artificial
  Synthetic oligonucleotide
cggtaccataagaggatcatataccagcaccggttctgatgaccatagtctctttccga

SEQ ID NO: 279200 - DNA, 59 bp, Artificial
  Synthetic oligonucleotide
acttgttggctatatcccggagcactgatctcctagtctcgtactcctatgttgggaat

SEQ ID NO: 279201 - DNA, 59 bp, Artificial
  Synthetic oligonucleotide
ttacttagcagctgtatagcgatagctcctcttatactgtagcagcccctaccacgcta

SEQ ID NO: 279202 - DNA, 58 bp, Artificial
  Synthetic oligonucleotide
ataactgttagcgtgtatttctaatcgcgatttagtactacaaagctaatcgcgtaga

SEQ ID NO: 279203 - DNA, 59 bp, Artificial
  Synthetic oligonucleotide
ccatttcgagggactccatgtacaggcgtttgatctccctaccctgcttagcgattcaa

SEQ ID NO: 279204 - DNA, 59 bp, Artificial
  Synthetic oligonucleotide
ctcggatatgtcgcttggaaaccctcagatgagccctcgtgccgacgcacttctcccgt

SEQ ID NO: 279205 - DNA, 59 bp, Artificial
  Synthetic oligonucleotide
gagcacactcaacctccgagttggcacgctcattgttggagacccaattaacccgcctg

SEQ ID NO: 279206 - DNA, 55 bp, Artificial
  Synthetic oligonucleotide
ctattgcttaggtataaaggaaacaccgggcacttacgttctgtccattaatata

SEQ ID NO: 279207 - DNA, 58 bp, Artificial
  Synthetic oligonucleotide
aacactcgaccggccgactataacaagaacgctgaaggcaggcccatgtccgctgcag

SEQ ID NO: 279208 - DNA, 58 bp, Artificial
  Synthetic oligonucleotide
tcgctcatgaaaacccccaaacgcaacgagtcatccgtgattggactggcaccgatga

SEQ ID NO: 279209 - DNA, 59 bp, Artificial
  Synthetic oligonucleotide
gacgatgtcatatagtggatcccgagtcaggacccagaaccgacaggagtactccgtag

SEQ ID NO: 279210 - DNA, 58 bp, Artificial
  Synthetic oligonucleotide
ctcgttggactgtaagttatccagctaccaaactgtatgacaagtcagtacctgtgct

SEQ ID NO: 279211 - DNA, 58 bp, Artificial
  Synthetic oligonucleotide
ggtaccatggacggtagtgcggccgcactggggtcggagaacgagctgtctaagagac

SEQ ID NO: 279212 - DNA, 56 bp, Artificial
  Synthetic oligonucleotide
ctaacgccaaacaaagtaacggacttaatacagccactccacggtagctcctgcca

SEQ ID NO: 279213 - DNA, 58 bp, Artificial
  Synthetic oligonucleotide
gcagccttacggcgttgaagttacccttggagctaagatgtttaccacagcatggttg

SEQ ID NO: 279214 - DNA, 58 bp, Artificial
  Synthetic oligonucleotide
gcgtccggtatttcctataatagagtgagccactgaggtagcgaataatgactaacgg

SEQ ID NO: 279215 - DNA, 58 bp, Artificial
  Synthetic oligonucleotide
taccatcggggagtcgggtctgctgtggatcacccatctgtcccaagtcaaatgcccc

SEQ ID NO: 279216 - DNA, 58 bp, Artificial
  Synthetic oligonucleotide
tctaatttgaagttgcactaacgtatttccaaagcgagtcggccacgcctgtatccca

SEQ ID NO: 279217 - DNA, 57 bp, Artificial
  Synthetic oligonucleotide
gcagtttcttcccacggacttggcgcactaagcgaaattggccgtccaaggacatac

SEQ ID NO: 279218 - DNA, 58 bp, Artificial
  Synthetic oligonucleotide
agacggtcgctgtctgtcaagcagccaagtggacgtcggtcgagggtatctatccgaa

SEQ ID NO: 279219 - DNA, 58 bp, Artificial
  Synthetic oligonucleotide
acaatcgtcttgatggggtcacccggtggcttagaatgattgcagctgactccttgtg

SEQ ID NO: 279220 - DNA, 57 bp, Artificial
  Synthetic oligonucleotide
tagccagtaaggcgattgttcccctgctgggccagcactaccacggacggggagaat

SEQ ID NO: 279221 - DNA, 58 bp, Artificial
  Synthetic oligonucleotide
ttgggtaggttggatgacatgatgacagggcggtgttttctcggattcagaacgtgca

SEQ ID NO: 279222 - DNA, 58 bp, Artificial
  Synthetic oligonucleotide
acccatatgtgcgtgaaaacaagatctggtgtaaatcataaagaggaacaaggcaacc

SEQ ID NO: 279223 - DNA, 58 bp, Artificial
  Synthetic oligonucleotide
ttgagcaatgccactggggccggaaacgctgtttctagcggaggcactactattgacg

SEQ ID NO: 279224 - DNA, 57 bp, Artificial
  Synthetic oligonucleotide
ggtaatgaaatatctaactgagtaccctatctagattgaatcaaactaaacctacgc

SEQ ID NO: 279225 - DNA, 58 bp, Artificial
  Synthetic oligonucleotide
gcttggtcgacgttgcaagaaatataacggtcatcagaagcccttgtgctgcacagac

SEQ ID NO: 279226 - DNA, 58 bp, Artificial
  Synthetic oligonucleotide
gggtcgcatccttgttatgaagtgtagcttagtgggcttgcgcatattgtttcgtaga

SEQ ID NO: 279227 - DNA, 58 bp, Artificial
  Synthetic oligonucleotide
ccagtggactgtatacagtgctcgaaaaggtcctagagaatctaatagctagtacatc

SEQ ID NO: 279228 - DNA, 58 bp, Artificial
  Synthetic oligonucleotide
ttgaattccatatcaaagagtggcttacttgatgaggcaggtattcaggtcgagttcc

SEQ ID NO: 279229 - DNA, 58 bp, Artificial
  Synthetic oligonucleotide
gtgcactggatagaatttcgatttgtgcgatttgaccgagtatctgatgggactatag

SEQ ID NO: 279230 - DNA, 58 bp, Artificial
  Synthetic oligonucleotide
gtccttctatcgccgccccccccgctatccattggtgaggccatgctatgattggggc

SEQ ID NO: 279231 - DNA, 56 bp, Artificial
  Synthetic oligonucleotide
ggccaggtcgagacttggctctgtaggccacaaagtctccaaacaccccttcaacg

SEQ ID NO: 279232 - DNA, 58 bp, Artificial
  Synthetic oligonucleotide
ccctatctaccctgtgaatcttcggctggttgtaccctatcctatcatgactggttgt

SEQ ID NO: 279233 - DNA, 57 bp, Artificial
  Synthetic oligonucleotide
ccgggcggttgcgttcagccggctatggtcaaagctagaggggtagtgctggattag

SEQ ID NO: 279234 - DNA, 58 bp, Artificial
  Synthetic oligonucleotide
tgctgactgtgaactaggccgcttgcacttcgctttggaacggctccactgacaccgc

SEQ ID NO: 279235 - DNA, 58 bp, Artificial
  Synthetic oligonucleotide
ctcgtcccatggcaacttaatgaacatgagcggggcaccatcagtcctacgcatgcgc

SEQ ID NO: 279236 - DNA, 58 bp, Artificial
  Synthetic oligonucleotide
ggggccatcatattgccaaggcggacagggatccacgggcactcagtcgaagcatcat

SEQ ID NO: 279237 - DNA, 58 bp, Artificial
  Synthetic oligonucleotide
tctgcgtatgacttgggctggcgcgcaccgtagtcctggaacacccaggggatgagat

SEQ ID NO: 279238 - DNA, 58 bp, Artificial
  Synthetic oligonucleotide
tcacggtctcccgggatagaggatgatgatggctgacaagacgggaatgataggtgtc

SEQ ID NO: 279239 - DNA, 58 bp, Artificial
  Synthetic oligonucleotide
tcaatacgtctacgtcgagtcattcaccgtcacgcaaaagcagattctcggggctctc

SEQ ID NO: 279240 - DNA, 58 bp, Artificial
  Synthetic oligonucleotide
aggatacactgggcaaaggcgcatcttcttcatccttgaccgcgcaactcgcaagttt

SEQ ID NO: 279241 - DNA, 58 bp, Artificial
  Synthetic oligonucleotide
atcggctgcagaagtccagatccgacggggtttgcgatcggaggccaaacaacgtgga

SEQ ID NO: 279242 - DNA, 54 bp, Artificial
  Synthetic oligonucleotide
cacttacgcgtcaagtaaggaagggtcttgtcggtcgttgtgtggagttagaaa

SEQ ID NO: 279243 - DNA, 58 bp, Artificial
  Synthetic oligonucleotide
ctagacatccaacgtccctccacgtcgactgatgggctttccaacccatctgtttctc

SEQ ID NO: 279244 - DNA, 57 bp, Artificial
  Synthetic oligonucleotide
acctaatccagcactacccctctagctttgaccatagccggctgaacgcaaccgccc

SEQ ID NO: 279245 - DNA, 58 bp, Artificial
  Synthetic oligonucleotide
cgacatgtcaagcagtcatgccagagggaattactttgtacctgaattctccattggg

SEQ ID NO: 279246 - DNA, 56 bp, Artificial
  Synthetic oligonucleotide
gtaaccaagcggggttggctattgcgtctttcttagcattagtacttgccgcttcg

SEQ ID NO: 279247 - DNA, 58 bp, Artificial
  Synthetic oligonucleotide
gataaaagcgctggtcgaataatagctttcggaatgttaatagcttatccagacctcg

SEQ ID NO: 279248 - DNA, 57 bp, Artificial
  Synthetic oligonucleotide
ggtaatcccacgttcacaacgctttattggcgtaatacctcttcacgcaccatggcg

SEQ ID NO: 279249 - DNA, 58 bp, Artificial
  Synthetic oligonucleotide
ttgatttagcgatagtgtgtatagtatacgcattccctactggttaggtggcatcaat

SEQ ID NO: 279250 - DNA, 58 bp, Artificial
  Synthetic oligonucleotide
gcctttatgaggcggtaatcagccgaatagatactccttgtgtcacgagtaccgtccg

SEQ ID NO: 279251 - DNA, 55 bp, Artificial
  Synthetic oligonucleotide
acccccttaacaggaataatggctcccgttattgcaggagtgtgaaactaggcca

SEQ ID NO: 279252 - DNA, 58 bp, Artificial
  Synthetic oligonucleotide
ctgtgcaccttggatcgtcgaccgctggacagacggccgggtacgctcaaacgattaa

SEQ ID NO: 279253 - DNA, 60 bp, Artificial
  Synthetic oligonucleotide
gagcgttcccaatcatgagctatgcaggcaatcacgcattagcacagctctcatagcaaa

SEQ ID NO: 279254 - DNA, 60 bp, Artificial
  Synthetic oligonucleotide
ctattccggtaaggggtgtctatatatgtgaatagctccaggactgatcaaacactgaac

SEQ ID NO: 279255 - DNA, 57 bp, Artificial
  Synthetic oligonucleotide
gatgggggcgattggttagtaggggacgtgagtgcgcatacgggatagaagggatcc

SEQ ID NO: 279256 - DNA, 58 bp, Artificial
  Synthetic oligonucleotide
gacatctcgaccgcccccgatgtggccccgccatcgacgtcactagacacgccgcctc

SEQ ID NO: 279257 - DNA, 54 bp, Artificial
  Synthetic oligonucleotide
ggaggggacacagtatatcccattgtactttaagttgttgccccgtagtttaga

SEQ ID NO: 279258 - DNA, 57 bp, Artificial
  Synthetic oligonucleotide
gctcgtggcctccactcccggcagatgcctcaactcggggtcggttgggatccaaac

SEQ ID NO: 279259 - DNA, 58 bp, Artificial
  Synthetic oligonucleotide
ttcgagtggtcacgatcatgcaccatctggcctactaagcaggagacccgaatggggc

SEQ ID NO: 279260 - DNA, 58 bp, Artificial
  Synthetic oligonucleotide
agatagaggtatgcggcgtcgcggaagcagttggctaccatgcggagacggacgaggt

SEQ ID NO: 279261 - DNA, 58 bp, Artificial
  Synthetic oligonucleotide
catagccacgagtgatggcctatgggaattttgacgtactctgggactaggatcacgg

SEQ ID NO: 279262 - DNA, 55 bp, Artificial
  Synthetic oligonucleotide
actcaaacaccgccgatctggctaccttggctgaccccaacgagttgtttttgcc

SEQ ID NO: 279263 - DNA, 58 bp, Artificial
  Synthetic oligonucleotide
gccaggtaccagctcgagtgtatgggttaacgcatcttcacaagtctaaaggaaccag

SEQ ID NO: 279264 - DNA, 58 bp, Artificial
  Synthetic oligonucleotide
gacaaacgcagccgcattatgttcactccgtataggaaatgttccagagaattgggca

SEQ ID NO: 279265 - DNA, 60 bp, Artificial
  Synthetic oligonucleotide
gacttcatagcttcagcaacgatatcatgtctaccatgccaacatacatccgcacgcacc

SEQ ID NO: 279266 - DNA, 53 bp, Artificial
  Synthetic oligonucleotide
gcggccaccttacgcgtttttcgccgtgtgtaaacctcgtcgatttcaactac

SEQ ID NO: 279267 - DNA, 58 bp, Artificial
  Synthetic oligonucleotide
acagactcggtttggtcatcttgtcatgaggtctacacacagtcccaaggatcggtta

SEQ ID NO: 279268 - DNA, 58 bp, Artificial
  Synthetic oligonucleotide
cacgggcaggtcccaaccgatgacgattgagggggaccttacagacgatggcagtgct

SEQ ID NO: 279269 - DNA, 58 bp, Artificial
  Synthetic oligonucleotide
ggcacccaagcttcgaaagtggtatcgcaagcgacaggacgccaggcctgatcaaccg

SEQ ID NO: 279270 - DNA, 58 bp, Artificial
  Synthetic oligonucleotide
aatctttatcacctcgctattccgataatgtctaacgaatctcctcctcgattcacca

SEQ ID NO: 279271 - DNA, 57 bp, Artificial
  Synthetic oligonucleotide
cccatgtgaacgtcatgggggttgacccgagcgtttcgcttagatgtcacggcgaac

SEQ ID NO: 279272 - DNA, 58 bp, Artificial
  Synthetic oligonucleotide
tggctgacctactcttcagagaaacatgcgttaggctttgtaacggacaattatgatt

SEQ ID NO: 279273 - DNA, 57 bp, Artificial
  Synthetic oligonucleotide
acggtgtgtacaatgttgacgaccgaggcggctcggagtgcgtgggctcggacggta

SEQ ID NO: 279274 - DNA, 58 bp, Artificial
  Synthetic oligonucleotide
ggagtaattttggctacccatcgccatagactgagacagctagattagtattgtacaa

SEQ ID NO: 279275 - DNA, 58 bp, Artificial
  Synthetic oligonucleotide
tggcttgactagtagttatgtaggaggtggttgtttgttcatctggtcagaccttcta

SEQ ID NO: 279276 - DNA, 60 bp, Artificial
  Synthetic oligonucleotide
gtaatatagatacaaaacgatggtcaaatacacatgatatatgctattcgctaagaaggg

SEQ ID NO: 279277 - DNA, 58 bp, Artificial
  Synthetic oligonucleotide
ggtattccgcaagagtcacaacgtcatacgaattgttgtttcgttcctcttatgtata

SEQ ID NO: 279278 - DNA, 58 bp, Artificial
  Synthetic oligonucleotide
tccgaatcctcaggcagcgtttggcacacatcgctcacggttgcgtctgcaccccaga

SEQ ID NO: 279279 - DNA, 58 bp, Artificial
  Synthetic oligonucleotide
cctcagtcgccttcaactcaatagtcccgtgcgacgagtctataatctcgtcgcgagg

SEQ ID NO: 279280 - DNA, 58 bp, Artificial
  Synthetic oligonucleotide
gatgatgtactgtgtggttatctcgattgcgaaacctaaacctccgtcgtgtcgccta

SEQ ID NO: 279281 - DNA, 58 bp, Artificial
  Synthetic oligonucleotide
agtggagctcgccgccatcccagagacaggtgacaagggcaagggtagccaggtcgcc

SEQ ID NO: 279282 - DNA, 57 bp, Artificial
  Synthetic oligonucleotide
gttagaatgagtgtcctgcagaggagcgtggaacatcccgcgcgtctctgtgcgttg

SEQ ID NO: 279283 - DNA, 57 bp, Artificial
  Synthetic oligonucleotide
ggaagctaaacaatgcggtccatggtaaggattgatgttccttctacctgagcaatt

SEQ ID NO: 279284 - DNA, 57 bp, Artificial
  Synthetic oligonucleotide
ctgtaggatattgctgattgagagcgtaagtactagatactaagtagacagaatccg

SEQ ID NO: 279285 - DNA, 56 bp, Artificial
  Synthetic oligonucleotide
ctgggaccgcatttctactccccgggcggttgcgttcagccggctatggtcaaagc

SEQ ID NO: 279286 - DNA, 57 bp, Artificial
  Synthetic oligonucleotide
atcctgatggtactacatgtactatatacgatatagctacaatggctgctcatatag

SEQ ID NO: 279287 - DNA, 60 bp, Artificial
  Synthetic oligonucleotide
gacttcggtcctcacactttgatgcatcatagtgtccctttcttgtctgcaggcttggga

SEQ ID NO: 279288 - DNA, 57 bp, Artificial
  Synthetic oligonucleotide
ggtacaataagcgactgtgcaggcccggaaccaacggatgttctctcatcgtggggg

SEQ ID NO: 279289 - DNA, 57 bp, Artificial
  Synthetic oligonucleotide
cttctccctccgcagaagacctctcacatcgtggctactcagggcttcatgcatgtg

SEQ ID NO: 279290 - DNA, 56 bp, Artificial
  Synthetic oligonucleotide
ccctctagctttgaccatagccggctgaacgcaaccgcccggggagtagaaatgcg

SEQ ID NO: 279291 - DNA, 57 bp, Artificial
  Synthetic oligonucleotide
agctttgatgacttgcatatcacgagaatagtggacatatcatgttctgagaagcaa

SEQ ID NO: 279292 - DNA, 57 bp, Artificial
  Synthetic oligonucleotide
ttccgtgctctcactctgcgccgtcgtttgtcgttgctgcaccccgggggctagcgg

SEQ ID NO: 279293 - DNA, 56 bp, Artificial
  Synthetic oligonucleotide
ttgttcctgccgaggcccacaagccaggtacgcggacgccacggtataaaggtatc

SEQ ID NO: 279294 - DNA, 57 bp, Artificial
  Synthetic oligonucleotide
caatcgcttcaggtacaaatttgccgggagcatccttctcccccgcagtattacgtc

SEQ ID NO: 279295 - DNA, 54 bp, Artificial
  Synthetic oligonucleotide
ggcgctaagagtaaggagacggttctccactgggttattagtcgggatggggaa

SEQ ID NO: 279296 - DNA, 55 bp, Artificial
  Synthetic oligonucleotide
aaaagtttcgcgccaaagaaaattagtcgccctgcttatagttatgctacagtcc

SEQ ID NO: 279297 - DNA, 57 bp, Artificial
  Synthetic oligonucleotide
agcagtcccttagatctataccctgcagtagcacgtaaacaatattaaccagttaat

SEQ ID NO: 279298 - DNA, 54 bp, Artificial
  Synthetic oligonucleotide
tagttaggaaggcggaagtaaaaacaactagcgtagaatgtggggcaacgcaaa

SEQ ID NO: 279299 - DNA, 55 bp, Artificial
  Synthetic oligonucleotide
ctcgcccgttcgtttcacgccgaactgcctgaggtatgccctggacctttccttc

SEQ ID NO: 279300 - DNA, 57 bp, Artificial
  Synthetic oligonucleotide
ctgacccaagtggtctgacgagaattccaacatgtccactctctaaccgagcatgtc

SEQ ID NO: 279301 - DNA, 57 bp, Artificial
  Synthetic oligonucleotide
gctcggatacaaggagtatccgacggtctcaatgtgctctcatgcgagccggtaatc

SEQ ID NO: 279302 - DNA, 57 bp, Artificial
  Synthetic oligonucleotide
agccaccgggcgcactgaggccctagtgaggctgaagccgagtcatgggtcttgggg

SEQ ID NO: 279303 - DNA, 57 bp, Artificial
  Synthetic oligonucleotide
caacgcggagattacttacaatgttgcggcgactcccaaatgtaggagccgatcgga

SEQ ID NO: 279304 - DNA, 57 bp, Artificial
  Synthetic oligonucleotide
ggcggaaagactcgcgacacctttttgcttgccggcaccagccacacataaccagga

SEQ ID NO: 279305 - DNA, 57 bp, Artificial
  Synthetic oligonucleotide
gtgtcgtcgcatcggggcctcacgtacgtgcaccgttattctggccataactgtagc

SEQ ID NO: 279306 - DNA, 57 bp, Artificial
  Synthetic oligonucleotide
caaggttattctattacactgagtatcatgaattatcgtagaccaactaactgtcgg

SEQ ID NO: 279307 - DNA, 57 bp, Artificial
  Synthetic oligonucleotide
acgctacggacactggacacggagtggatagagtcccggtcacccctggatcgctga

SEQ ID NO: 279308 - DNA, 56 bp, Artificial
  Synthetic oligonucleotide
cagaaacccagtattaggacagaaaggtagaacatacgcggataccagtgttggta

SEQ ID NO: 279309 - DNA, 60 bp, Artificial
  Synthetic oligonucleotide
gactttcaatgaagcatgatagatgggccgatggacggtgtaagtttgatgcgacatccc

SEQ ID NO: 279310 - DNA, 57 bp, Artificial
  Synthetic oligonucleotide
attaggtctactagagatttatagattcagtccatattaccgacagagttctagctc

SEQ ID NO: 279311 - DNA, 57 bp, Artificial
  Synthetic oligonucleotide
ctattgacaacgcattacctgccaagtacaccagacggctctacgggcctttaacga

SEQ ID NO: 279312 - DNA, 57 bp, Artificial
  Synthetic oligonucleotide
gtacatgtactatttacgatatagctacaatggcaagacatataagatatcataagg

SEQ ID NO: 279313 - DNA, 57 bp, Artificial
  Synthetic oligonucleotide
atgctatactgacttgcgttgactcttcgcagtagccactaggcggccgagaggggc

SEQ ID NO: 279314 - DNA, 57 bp, Artificial
  Synthetic oligonucleotide
cagtaagcttcaccccccttccgatgtggctcagttcccttcgagtggtgaaatgtg

SEQ ID NO: 279315 - DNA, 57 bp, Artificial
  Synthetic oligonucleotide
tcatgcaccatctggcctactaagcaggagacccgaatggggcggcgtaatgtcacc

SEQ ID NO: 279316 - DNA, 56 bp, Artificial
  Synthetic oligonucleotide
ggtctaaaggatagacgcggaagatgttaacctataaacgtgtaagatataacatc

SEQ ID NO: 279317 - DNA, 57 bp, Artificial
  Synthetic oligonucleotide
gataacaccgccaagtaaaccgggaagcgtactatctatgatgaggggcgagtagca

SEQ ID NO: 279318 - DNA, 55 bp, Artificial
  Synthetic oligonucleotide
ccgttccgcgcgtcctccgaataatgacacgcaatccgcttacggacaaccgacc

SEQ ID NO: 279319 - DNA, 57 bp, Artificial
  Synthetic oligonucleotide
ggatccgcgagtgtaggccaacagagccatgatgctcgtgaaggtagttatggccag

SEQ ID NO: 279320 - DNA, 57 bp, Artificial
  Synthetic oligonucleotide
tagttatctacccttgcaaagtagcaagggaccattaattacacgctaggaatagac

SEQ ID NO: 279321 - DNA, 56 bp, Artificial
  Synthetic oligonucleotide
tacgttctcgaccctgctcgaattgctccttcgcggtccgacgctaatagtaacgg

SEQ ID NO: 279322 - DNA, 57 bp, Artificial
  Synthetic oligonucleotide
tacgtctttcgtcgggagaggccatttgccaaaaacttcgcggccactgagctacga

SEQ ID NO: 279323 - DNA, 57 bp, Artificial
  Synthetic oligonucleotide
gccgccactcctcagtcgttacggagagcagatgcgaatgaggagtgcgtttgctaa

SEQ ID NO: 279324 - DNA, 57 bp, Artificial
  Synthetic oligonucleotide
tacggacgggcggtactctggcgctagtcacggattcattgtggggcatattgtccc

SEQ ID NO: 279325 - DNA, 57 bp, Artificial
  Synthetic oligonucleotide
gacacaatttgcactatgctgggacatctgactatgaacctaagaataagtccgcat

SEQ ID NO: 279326 - DNA, 57 bp, Artificial
  Synthetic oligonucleotide
acccaatgggtagcacggagtacgcttggtgttggttggagtgtgctctgtgcacta

SEQ ID NO: 279327 - DNA, 57 bp, Artificial
  Synthetic oligonucleotide
tcttccgtcgtatcaaatgcgcagtcagtcacctttgcgactctgtgttccgagtcc

SEQ ID NO: 279328 - DNA, 55 bp, Artificial
  Synthetic oligonucleotide
tccccgaagactcctcgggtgagggtacctctcaaagagatcccgatcgtttcat

SEQ ID NO: 279329 - DNA, 54 bp, Artificial
  Synthetic oligonucleotide
gtaacccggtcccgtggactcccaataacaaggtccactagatcccgctccaca

SEQ ID NO: 279330 - DNA, 55 bp, Artificial
  Synthetic oligonucleotide
gcgaacctgcggttaggactccgaccgatggatttttggcgagaagtggtccaac

SEQ ID NO: 279331 - DNA, 60 bp, Artificial
  Synthetic oligonucleotide
tagttatctccactaagggcgggcctactatttttgcacgttacatgcgtgcagctctta

SEQ ID NO: 279332 - DNA, 57 bp, Artificial
  Synthetic oligonucleotide
ataggtctcgcgagaaactccgggtagtctattgtgaggcgttcttgccaaggccgc

SEQ ID NO: 279333 - DNA, 55 bp, Artificial
  Synthetic oligonucleotide
ataggttatggtcctcttctaggtgttggtacggtcggggagagggatcttgctc

SEQ ID NO: 279334 - DNA, 57 bp, Artificial
  Synthetic oligonucleotide
ctatatggggatatgtatgatcaattcagttgaatattccgcggtgactttattctc

SEQ ID NO: 279335 - DNA, 55 bp, Artificial
  Synthetic oligonucleotide
ctatattccaatgggggcctaatacttataagtaccgtctattagctactagtac

SEQ ID NO: 279336 - DNA, 56 bp, Artificial
  Synthetic oligonucleotide
aagagcatagtttaataggcaaaactgtaagcttcaaccttatatttcttagttca

SEQ ID NO: 279337 - DNA, 57 bp, Artificial
  Synthetic oligonucleotide
cgagaatgtgactccggcgaaggaggataagatgcgctttttgactaaaaactcgtc

SEQ ID NO: 279338 - DNA, 57 bp, Artificial
  Synthetic oligonucleotide
ctagttccaaaaaattgggcgatgcccgcatggtgataagaccgccctgcgggctag

SEQ ID NO: 279339 - DNA, 57 bp, Artificial
  Synthetic oligonucleotide
ataggacgagggacggagataggatggactcgcaagaagctggatgtctagctgcga

SEQ ID NO: 279340 - DNA, 57 bp, Artificial
  Synthetic oligonucleotide
tgcactatattggggttggcagctttcatagggcccaaaaaaccagtccttatgtgc

SEQ ID NO: 279341 - DNA, 52 bp, Artificial
  Synthetic oligonucleotide
ggggacgacggagaggaagtattggtacttgtagtagtgggtttcggtggtg

SEQ ID NO: 279342 - DNA, 60 bp, Artificial
  Synthetic oligonucleotide
gtaatacctggtccttcaaatagtcaatctggtccttcatatagtcaatctggtccttca

SEQ ID NO: 279343 - DNA, 57 bp, Artificial
  Synthetic oligonucleotide
gagccagaaatcgtaacttgactcagctacgggcgagataatatgcaattcctgctc

SEQ ID NO: 279344 - DNA, 54 bp, Artificial
  Synthetic oligonucleotide
tagtatagaagtttagtaaaattttcattagtacgttaatgagctatttaatag

SEQ ID NO: 279345 - DNA, 57 bp, Artificial
  Synthetic oligonucleotide
atagctatgagaggatagtatgggtgtccaaaggagactaacgacggttcaactact

SEQ ID NO: 279346 - DNA, 57 bp, Artificial
  Synthetic oligonucleotide
tgatctctccggcgaaaaacctcaggatagcaagaagttgaaggttccggcgaatct

SEQ ID NO: 279347 - DNA, 57 bp, Artificial
  Synthetic oligonucleotide
gactccccagtcgataaaatgagatctgacatgtaacggctaggatcagatccaatg

SEQ ID NO: 279348 - DNA, 57 bp, Artificial
  Synthetic oligonucleotide
tgatcgctcctatcgtgtcattcgcctgccgaacaaactagaggctcttctcgtaca

SEQ ID NO: 279349 - DNA, 57 bp, Artificial
  Synthetic oligonucleotide
ccagacatgacgctacggacactggacacggagtggatagagtcccggtcacccctg

SEQ ID NO: 279350 - DNA, 57 bp, Artificial
  Synthetic oligonucleotide
cgaatgcgtgtcgcgaagtgtataacgattcaaccgatcaaggcatgaataaggggg

SEQ ID NO: 279351 - DNA, 57 bp, Artificial
  Synthetic oligonucleotide
tgctcgcgtgcccctcgacagacgaggcgacttgaagaacctggtctttgaatacgg

SEQ ID NO: 279352 - DNA, 57 bp, Artificial
  Synthetic oligonucleotide
tatttagtgatacattccaagtgttattcactagaaataatagctctttagagtgat

SEQ ID NO: 279353 - DNA, 58 bp, Artificial
  Synthetic oligonucleotide
cgagagaggaaaagacctggtgatggtttgaccatgtgggactggggatgtatatctt

SEQ ID NO: 279354 - DNA, 50 bp, Artificial
  Synthetic oligonucleotide
tcccgtccccgctaacggtcccaatttgtaccggccggttccactggccc

SEQ ID NO: 279355 - DNA, 57 bp, Artificial
  Synthetic oligonucleotide
ataagtaatagagatctaacgtgtatctgcagaagattcgggttcagggaacatcaa

SEQ ID NO: 279356 - DNA, 57 bp, Artificial
  Synthetic oligonucleotide
gatgctttgttttatgacatgaccctggtattatgcgaaagttagtgtacatagcca

SEQ ID NO: 279357 - DNA, 57 bp, Artificial
  Synthetic oligonucleotide
agtggcgataacttcgcgtgagccaccgggagcatggtgatcgttccgtatcccacg

SEQ ID NO: 279358 - DNA, 57 bp, Artificial
  Synthetic oligonucleotide
tcgctccccataccatcgcatacttgaatgtctccttcaacgtgcggtggatgttat

SEQ ID NO: 279359 - DNA, 55 bp, Artificial
  Synthetic oligonucleotide
aatatcctccaaggaacggccggcagtttccggaaataggctggcatccgagtta

SEQ ID NO: 279360 - DNA, 57 bp, Artificial
  Synthetic oligonucleotide
tgttgcttcgcgtgctaggctatgcgttcgtgctgtatgctcattgtcctcttccgt

SEQ ID NO: 279361 - DNA, 57 bp, Artificial
  Synthetic oligonucleotide
gaactgcgtagtcaagctacttcggcttatgcaagccagtctcgtggtacatgcact

SEQ ID NO: 279362 - DNA, 54 bp, Artificial
  Synthetic oligonucleotide
agaaactaatccgctggggttctacttagtcttgggactcttgtcctggtggag

SEQ ID NO: 279363 - DNA, 54 bp, Artificial
  Synthetic oligonucleotide
cggggagaattctggaatttgcccgaggggtaggtatccgtggagaaagcgcac

SEQ ID NO: 279364 - DNA, 60 bp, Artificial
  Synthetic oligonucleotide
atgtttactgaactattcattctcacggctatctagccatacgcaacggcgtcatatggg

SEQ ID NO: 279365 - DNA, 59 bp, Artificial
  Synthetic oligonucleotide
agtaccgcaatagtaatccatactgctagcctaagagaactcgtagccaatcgaggaac

SEQ ID NO: 279366 - DNA, 57 bp, Artificial
  Synthetic oligonucleotide
tgttacgtgagtttcgaatcgactcccgccagtgaagctagacagttgacagaagcc

SEQ ID NO: 279367 - DNA, 57 bp, Artificial
  Synthetic oligonucleotide
gcattaaacccgattcaagaacgggcattgagatcttgcgttatttctgtacataga

SEQ ID NO: 279368 - DNA, 57 bp, Artificial
  Synthetic oligonucleotide
gaagcatccctgcgcgtctaggtcactgacggtggttcatagattgagtacccgcct

SEQ ID NO: 279369 - DNA, 57 bp, Artificial
  Synthetic oligonucleotide
cctgtaaggttgaaggcctgagcaaccgctagtcatgtagttagttagttggagaac

SEQ ID NO: 279370 - DNA, 57 bp, Artificial
  Synthetic oligonucleotide
catgccgtcaacagtttgtatgtaagcgctgtggctcatcggcctcatcttacgaca

SEQ ID NO: 279371 - DNA, 56 bp, Artificial
  Synthetic oligonucleotide
gaaacgtcaacagggatatatagaacaagtaacacaattctccgtagtacttagta

SEQ ID NO: 279372 - DNA, 57 bp, Artificial
  Synthetic oligonucleotide
tgtcattattcgggtcccgcggtgtggacgcactgccgctcattcctgacgtacacc

SEQ ID NO: 279373 - DNA, 57 bp, Artificial
  Synthetic oligonucleotide
gcggcgtcgcggaagcagttggctaccatgcggagacggacgaggtttgattcagtt

SEQ ID NO: 279374 - DNA, 57 bp, Artificial
  Synthetic oligonucleotide
aagtcgtatatctatcatcgggactgtatagatggtcacaattatcgataacctgac

SEQ ID NO: 279375 - DNA, 57 bp, Artificial
  Synthetic oligonucleotide
taatcagtcagaagccgttgctgggaacttggctccaaggcatagcaagaagacgtg

SEQ ID NO: 279376 - DNA, 60 bp, Artificial
  Synthetic oligonucleotide
tagttggatcatagggatagtagccagtagaccccatcgtgttgcgagtggagtattaga

SEQ ID NO: 279377 - DNA, 54 bp, Artificial
  Synthetic oligonucleotide
ccccgtaacaagttcggtctagctagtgccagtcgccaaccccagactggggga

SEQ ID NO: 279378 - DNA, 57 bp, Artificial
  Synthetic oligonucleotide
actgcacacgaggtagtaagggaacaaatctctagtatattagaagtgttaagtcat

SEQ ID NO: 279379 - DNA, 57 bp, Artificial
  Synthetic oligonucleotide
atacatatcagctaactttcgactgaatactcgagcacgtgtgcgatgtgcaatagg

SEQ ID NO: 279380 - DNA, 53 bp, Artificial
  Synthetic oligonucleotide
ggacagggtaaaccaactacaaaatgaggtccaacatgcgaagaacgggttgg

SEQ ID NO: 279381 - DNA, 56 bp, Artificial
  Synthetic oligonucleotide
catgacgcagaatgcgtcaaagctcgcctggcaagttttgtcaaaatccaggtata

SEQ ID NO: 279382 - DNA, 56 bp, Artificial
  Synthetic oligonucleotide
catgcgcccttagtcgaatgaagggtttctcgtcatatgtcggttctctacatcta

SEQ ID NO: 279383 - DNA, 56 bp, Artificial
  Synthetic oligonucleotide
gagctccgagtggtacaagtgtacgacttacacaccgtgcgatgtacgcagtccac

SEQ ID NO: 279384 - DNA, 56 bp, Artificial
  Synthetic oligonucleotide
cggattcaatttacgcggattcggtgcctatcttgtagcagttgcgccaaacttct

SEQ ID NO: 279385 - DNA, 56 bp, Artificial
  Synthetic oligonucleotide
tcgccgttgcctccggactagccgtcctctatctctaccacgttaatcgtggtatg

SEQ ID NO: 279386 - DNA, 56 bp, Artificial
  Synthetic oligonucleotide
ttgcgcgtattttgtgggctcgttatcctatagccaattgcgtgctcgttacggtg

SEQ ID NO: 279387 - DNA, 57 bp, Artificial
  Synthetic oligonucleotide
acgactctaccgccccccaagattgataccagcctgtcgaagacgccatctccggaa

SEQ ID NO: 279388 - DNA, 52 bp, Artificial
  Synthetic oligonucleotide
cccggtgggaattgggggaggcgcccaaacgaaagacaggagcggaagggca

SEQ ID NO: 279389 - DNA, 56 bp, Artificial
  Synthetic oligonucleotide
gcagcgcgggggagaatagctagtgattagcagttagcacacgtactacagtttag

SEQ ID NO: 279390 - DNA, 56 bp, Artificial
  Synthetic oligonucleotide
accgtctctctatcacggtcaaggagacgtgcctcacgaacgacatcctcctcacg

SEQ ID NO: 279391 - DNA, 56 bp, Artificial
  Synthetic oligonucleotide
ccgtatagtcactctattcgcccgagaccccgaaaggcttcgcatatacagcgttc

SEQ ID NO: 279392 - DNA, 56 bp, Artificial
  Synthetic oligonucleotide
ctagtattccaactaattacgtttctctgtgtcgatgtttgtttaactgatttggc

SEQ ID NO: 279393 - DNA, 56 bp, Artificial
  Synthetic oligonucleotide
agcttgatgaccagcaatcacctggctgttcaatttagctacgtgacgcacagtct

SEQ ID NO: 279394 - DNA, 56 bp, Artificial
  Synthetic oligonucleotide
ctgtatgtagtacttcgcgtgtaggacttcatgtgtgtttgacattcggtcggtgc

SEQ ID NO: 279395 - DNA, 56 bp, Artificial
  Synthetic oligonucleotide
atggtccccgaacctcgtcaatctaggaatgagctagtttcgcatctattgccctg

SEQ ID NO: 279396 - DNA, 56 bp, Artificial
  Synthetic oligonucleotide
tcgcgtgagagtatgatgcagggcacggctgctaatagaccaggggagttcggccc

SEQ ID NO: 279397 - DNA, 56 bp, Artificial
  Synthetic oligonucleotide
ctaacttgagtttagctaaaggtaaaactttcatatgttcgaatcatatactctct

SEQ ID NO: 279398 - DNA, 57 bp, Artificial
  Synthetic oligonucleotide
agtacctgtagctgtaattaatgtagcttacgtaatgggtttatgatttagagatgt

SEQ ID NO: 279399 - DNA, 56 bp, Artificial
  Synthetic oligonucleotide
gcagaaggtaatagaatacgagaaggatatattgaaggtaatctacctcagataga

SEQ ID NO: 279400 - DNA, 56 bp, Artificial
  Synthetic oligonucleotide
tatagcctagggtatagggttcgccagtgtaggctcgctgagaccataaaagcgta

SEQ ID NO: 279401 - DNA, 56 bp, Artificial
  Synthetic oligonucleotide
tgcatatcgaccctgtcaaaagctaactgttagcaagatcgactaccactgtccaa

SEQ ID NO: 279402 - DNA, 54 bp, Artificial
  Synthetic oligonucleotide
aagattgtaacggcaccgtggggagccgcgatagggcctcgtaccggatatccg

SEQ ID NO: 279403 - DNA, 56 bp, Artificial
  Synthetic oligonucleotide
agccacgggaacaaatcttgctttagctggccccttgactaccccttgcgcatcta

SEQ ID NO: 279404 - DNA, 56 bp, Artificial
  Synthetic oligonucleotide
atcgcggtttcaacactcgaccggccgactataacaagaacgctgaaggcaggccc

SEQ ID NO: 279405 - DNA, 54 bp, Artificial
  Synthetic oligonucleotide
ccacctcctccacctaataacccacaacgtcttccgcgccctatacaccaacaa

SEQ ID NO: 279406 - DNA, 56 bp, Artificial
  Synthetic oligonucleotide
ccgttatctccataggcatgccgtgggttcgaccactcttccctcgcaacgagtgg

SEQ ID NO: 279407 - DNA, 55 bp, Artificial
  Synthetic oligonucleotide
ctacccaaggcggccgagacttctacgtccgaatccaaggttgtgtcagaagccc

SEQ ID NO: 279408 - DNA, 54 bp, Artificial
  Synthetic oligonucleotide
acccgaattcccacgtgcgtttagtgcgtcatttgcccgtctcaaggagtaccg

SEQ ID NO: 279409 - DNA, 60 bp, Artificial
  Synthetic oligonucleotide
acgacactgcatgttctcggcgacaagcatgtaactattggcgttgaacaattgaaccga

SEQ ID NO: 279410 - DNA, 56 bp, Artificial
  Synthetic oligonucleotide
ccaactactcacaccgccagatttcctcgatgagcatcctggcggtccacaggtga

SEQ ID NO: 279411 - DNA, 56 bp, Artificial
  Synthetic oligonucleotide
gataagtgattactttacaataggtcgtatactacttccgacttcagatcttgtgc

SEQ ID NO: 279412 - DNA, 56 bp, Artificial
  Synthetic oligonucleotide
gtgtcgagaattagcatcggatctaacgaatgcttgggacctggactcattactgg

SEQ ID NO: 279413 - DNA, 56 bp, Artificial
  Synthetic oligonucleotide
ttgggatatatttgttcctgccgaggcccacaagccaggtacgcggacgccacggt

SEQ ID NO: 279414 - DNA, 56 bp, Artificial
  Synthetic oligonucleotide
gataatttagacttactaatagctgaataccaagcgttggaagcaacagaaagagc

SEQ ID NO: 279415 - DNA, 56 bp, Artificial
  Synthetic oligonucleotide
tcattggtgacaggagagtcccgccggtgtttcggggcacccgcacactgaaaccc

SEQ ID NO: 279416 - DNA, 56 bp, Artificial
  Synthetic oligonucleotide
gatgagtcccaaagtctatgcagtgcttgacgtggttgtgacctgaactggtggtt

SEQ ID NO: 279417 - DNA, 56 bp, Artificial
  Synthetic oligonucleotide
gtcgtctctcggaccaacgattgccacgctttccctgggtgccaagtcggtcatgt

SEQ ID NO: 279418 - DNA, 55 bp, Artificial
  Synthetic oligonucleotide
gcccctcacagtgagccaatctcgcaaaaattcttttagaacccttttactcgcc

SEQ ID NO: 279419 - DNA, 56 bp, Artificial
  Synthetic oligonucleotide
gatactttactagaccataaccagaccgatcataaaatagactaactaactcaccg

SEQ ID NO: 279420 - DNA, 59 bp, Artificial
  Synthetic oligonucleotide
attagagcgagggtgagctgactgcatttgggggccgttccttgcttgtcgggagacta

SEQ ID NO: 279421 - DNA, 56 bp, Artificial
  Synthetic oligonucleotide
ccctatcaagactggaagagtaccgtaaccaagtcctcgaaatgcgagagaacgca

SEQ ID NO: 279422 - DNA, 56 bp, Artificial
  Synthetic oligonucleotide
tctggtgccgacgctggctatagcggagagattgcacgcaagacggtttgatcaga

SEQ ID NO: 279423 - DNA, 55 bp, Artificial
  Synthetic oligonucleotide
agcggatatcctgccccgggttgatctgtgctcaggggttcggtccggacggccc

SEQ ID NO: 279424 - DNA, 56 bp, Artificial
  Synthetic oligonucleotide
gatcgtctctaagcgagcagcagggtatctggctacggcaattcacagtatgtggt

SEQ ID NO: 279425 - DNA, 56 bp, Artificial
  Synthetic oligonucleotide
accggcgctctgctatacaaccattcttgcaggggccgcgggactgtattggtcag

SEQ ID NO: 279426 - DNA, 56 bp, Artificial
  Synthetic oligonucleotide
gcatgatgtatcacagacgtctaacgttcgcggcgagagagagccttcgcctgact

SEQ ID NO: 279427 - DNA, 56 bp, Artificial
  Synthetic oligonucleotide
agccgcgatagggcctcgtaccggatatccgtcccagacccaagacatcatcgtac

SEQ ID NO: 279428 - DNA, 56 bp, Artificial
  Synthetic oligonucleotide
cagctatcagcctccacccgcccgagctaccactgatggtcccatggactgggagc

SEQ ID NO: 279429 - DNA, 56 bp, Artificial
  Synthetic oligonucleotide
catcacttataagctccactcagtagaaccactgcgagtagttaatgtgagacgcg

SEQ ID NO: 279430 - DNA, 56 bp, Artificial
  Synthetic oligonucleotide
ccgtctctcattgtcagagggcattcgtcagcggaaagctttctttcccgtcgttt

SEQ ID NO: 279431 - DNA, 53 bp, Artificial
  Synthetic oligonucleotide
attagacctaaagagtcccacgcccctcctgcggagggacgaggtacggagtc

SEQ ID NO: 279432 - DNA, 56 bp, Artificial
  Synthetic oligonucleotide
caggaagtagcaatctcgtacattcgtatttgctgtggtctagtatgtcaaaccgc

SEQ ID NO: 279433 - DNA, 56 bp, Artificial
  Synthetic oligonucleotide
gtctcaccgaaatgtgcagcacggacagcattcttcaccgtgtctctttgtcagga

SEQ ID NO: 279434 - DNA, 56 bp, Artificial
  Synthetic oligonucleotide
ccgtgccaggttccggactgcgttgcgggcttcgcttgacggtagatcctgtaaat

SEQ ID NO: 279435 - DNA, 56 bp, Artificial
  Synthetic oligonucleotide
ggcagggtaggtctgcttcagagagacggttaatacttaaactcgcgactcggctt

SEQ ID NO: 279436 - DNA, 54 bp, Artificial
  Synthetic oligonucleotide
acacgggttctttctcccccgcgcagcccccaagctaggtgtatctcgccccca

SEQ ID NO: 279437 - DNA, 56 bp, Artificial
  Synthetic oligonucleotide
ctagcgcaacggacggtttatcctttgatgggccttggccgaagcttggagtgctt

SEQ ID NO: 279438 - DNA, 56 bp, Artificial
  Synthetic oligonucleotide
ataaataatatacctgttactatagatgtagctagatgaatagatgctgaagcatt

SEQ ID NO: 279439 - DNA, 56 bp, Artificial
  Synthetic oligonucleotide
ggggtgaggatgtaagttggagtccgccatagagccactgccccatgaaagagcga

SEQ ID NO: 279440 - DNA, 54 bp, Artificial
  Synthetic oligonucleotide
cgaactactcctactaccatccgtgaacacgggttctttctcccccgcgcagcc

SEQ ID NO: 279441 - DNA, 54 bp, Artificial
  Synthetic oligonucleotide
agtcgccttgaccttcccggcaacgaccgccatctcggcataaaaccctcccaa

SEQ ID NO: 279442 - DNA, 59 bp, Artificial
  Synthetic oligonucleotide
agtagccaatgatcactggagccccgtcatgtggtggccctggaaccttatgggaagga

SEQ ID NO: 279443 - DNA, 56 bp, Artificial
  Synthetic oligonucleotide
cagggcgaattgttagttgtatagagcagggcacatgatatctagaccgcccttcc

SEQ ID NO: 279444 - DNA, 56 bp, Artificial
  Synthetic oligonucleotide
gtctacaactgatgccataatgagtcacttggattaatatgctgacatttagactc

SEQ ID NO: 279445 - DNA, 56 bp, Artificial
  Synthetic oligonucleotide
gctatagtgagaaacgacggttcgctgtccgattacgttagctctacagcgcgagt

SEQ ID NO: 279446 - DNA, 56 bp, Artificial
  Synthetic oligonucleotide
agcacctccattcgaaagcagagggttctatgaaagctccgtatctctggccatag

SEQ ID NO: 279447 - DNA, 56 bp, Artificial
  Synthetic oligonucleotide
ggccactaagggattgtggtgaagacctgtagattgctgccgtagtaatctgcttg

SEQ ID NO: 279448 - DNA, 56 bp, Artificial
  Synthetic oligonucleotide
cttcatgcgcaacggtatcaagacatttggtgaacggaaaggccagatctacgcat

SEQ ID NO: 279449 - DNA, 56 bp, Artificial
  Synthetic oligonucleotide
attagagggccgtgaaggattcaacagtcagccaacgtttcttgaccgactcagca

SEQ ID NO: 279450 - DNA, 56 bp, Artificial
  Synthetic oligonucleotide
gtgactttatcacgtagacggttagacagaagaaaatgctatttatagatcagacc

SEQ ID NO: 279451 - DNA, 56 bp, Artificial
  Synthetic oligonucleotide
gctgaccgttagtccgagtcaccaaacaattgtaccttgcttgaagcagaccgaat

SEQ ID NO: 279452 - DNA, 56 bp, Artificial
  Synthetic oligonucleotide
gacggagagactgtcctccaaccaacttgcggttcgcttatgcgggagtcaaaatc

SEQ ID NO: 279453 - DNA, 55 bp, Artificial
  Synthetic oligonucleotide
acctttctcgggtctcccaagctgtcggaagtacggcgctaccaggaatctacca

SEQ ID NO: 279454 - DNA, 56 bp, Artificial
  Synthetic oligonucleotide
ccatcttcacagacggcctgttgctcgctaccaggtcacttgacatcccactgcga

SEQ ID NO: 279455 - DNA, 56 bp, Artificial
  Synthetic oligonucleotide
cttcctcaggtagatttctcgtcggagtgctgccatggttcgatcaggactcatga

SEQ ID NO: 279456 - DNA, 56 bp, Artificial
  Synthetic oligonucleotide
attctagtggaagtggaggtcaaggatctagtggtgataatggtccatctggacct

SEQ ID NO: 279457 - DNA, 56 bp, Artificial
  Synthetic oligonucleotide
acggagtcgatcctgattaggcgttcctcttgccgccagccgatctctcatcccac

SEQ ID NO: 279458 - DNA, 56 bp, Artificial
  Synthetic oligonucleotide
cttgaccctattcaatgagcaaccccacggatgctccccccgatcggtccaataca

SEQ ID NO: 279459 - DNA, 56 bp, Artificial
  Synthetic oligonucleotide
tggggttgttggttgagagaacgccaacgaggagaaataatgggcgggggctgcgc

SEQ ID NO: 279460 - DNA, 56 bp, Artificial
  Synthetic oligonucleotide
tacagggatgggacgcttaagctgctagtgagggccagagtgggaattcgtggccc

SEQ ID NO: 279461 - DNA, 56 bp, Artificial
  Synthetic oligonucleotide
gtatactacaaattcaacttcgggttacctgctactatacattacaattcaatcct

SEQ ID NO: 279462 - DNA, 56 bp, Artificial
  Synthetic oligonucleotide
tactagtactagtcagctaggattggtagtaccagagctaaggagtaccagagttt

SEQ ID NO: 279463 - DNA, 55 bp, Artificial
  Synthetic oligonucleotide
cccactactactcgctcctcccggcttactgcgacggtggcttacccacctcact

SEQ ID NO: 279464 - DNA, 60 bp, Artificial
  Synthetic oligonucleotide
agtagccagacgaaaccgggaagacctctccacattgttagagctgagagacatcgtgga

SEQ ID NO: 279465 - DNA, 56 bp, Artificial
  Synthetic oligonucleotide
tagagtatcgcacgggcagttctaacaggtgcctatcggtgcccaaaggttggcac

SEQ ID NO: 279466 - DNA, 56 bp, Artificial
  Synthetic oligonucleotide
aggctgccactgccgatttcaaataggcgaagccagagtgggcgagtcttctacat

SEQ ID NO: 279467 - DNA, 56 bp, Artificial
  Synthetic oligonucleotide
atattacgtgttctgcattataatagaccctatagaatactagtggtctagatcta

SEQ ID NO: 279468 - DNA, 53 bp, Artificial
  Synthetic oligonucleotide
ggcgagcgtacaagggcgaaaatgtcgtcagttttggcccgaaagggtcactt

SEQ ID NO: 279469 - DNA, 56 bp, Artificial
  Synthetic oligonucleotide
cactgcctggatccctagtattgggtcggattgaaggctgtggtcgccgttccagg

SEQ ID NO: 279470 - DNA, 56 bp, Artificial
  Synthetic oligonucleotide
cacccaataccttcggagggtatacaatgcattcccgatcccccagctattgtgaa

SEQ ID NO: 279471 - DNA, 56 bp, Artificial
  Synthetic oligonucleotide
cccaacgccatcgcgtgagagtatgatgcagggcacggctgctaatagaccagggg

SEQ ID NO: 279472 - DNA, 56 bp, Artificial
  Synthetic oligonucleotide
atgattcgcgtgcggcatggtttgcaaaggagtcggacaggtggccttcactctcg

SEQ ID NO: 279473 - DNA, 56 bp, Artificial
  Synthetic oligonucleotide
taccagtcgagaccatggtgggtttctgcggcacaggctggtacaagggaacctga

SEQ ID NO: 279474 - DNA, 56 bp, Artificial
  Synthetic oligonucleotide
ctcggaaacaggactagctttgcggccatggaaacgcctcccccttgcattccttc

SEQ ID NO: 279475 - DNA, 58 bp, Artificial
  Synthetic oligonucleotide
tattaactcctgagggttctgcctggctgtattgatttttaggtagacggcgtatcta

SEQ ID NO: 279476 - DNA, 60 bp, Artificial
  Synthetic oligonucleotide
gagactgaaatgctacacagtggagacaggagcgtaggtatgaagtgtgcaaagtagggg

SEQ ID NO: 279477 - DNA, 56 bp, Artificial
  Synthetic oligonucleotide
ctgttagtcaaccgttatctacctacaattctatagttgagagcctacgtatagaa

SEQ ID NO: 279478 - DNA, 56 bp, Artificial
  Synthetic oligonucleotide
gtcccttggacacctttggtaggtgcgcagggatcagatatccttcccttatcaat

SEQ ID NO: 279479 - DNA, 56 bp, Artificial
  Synthetic oligonucleotide
actccggaccaagtggacgagcttgagccagaagacatcatgttcccgccgtcagt

SEQ ID NO: 279480 - DNA, 56 bp, Artificial
  Synthetic oligonucleotide
tagttaacatgcatttcatatacttggttcgtttcaaaggaggctatttggagtgg

SEQ ID NO: 279481 - DNA, 56 bp, Artificial
  Synthetic oligonucleotide
aacaatatggccccatctctggttgaggacactcctctgtcgctccgggcggcacc

SEQ ID NO: 279482 - DNA, 53 bp, Artificial
  Synthetic oligonucleotide
agagtagtgcttcttcgtcctgtgagaaggtgggtgggtttggttaggagggt

SEQ ID NO: 279483 - DNA, 56 bp, Artificial
  Synthetic oligonucleotide
ttactctcacagactacgcccggataattgcaacggagggtggaggacgcggatac

SEQ ID NO: 279484 - DNA, 54 bp, Artificial
  Synthetic oligonucleotide
ttaatcttaacgaaacctaagtatactaaagtactacagattgtgcaaccttag

SEQ ID NO: 279485 - DNA, 56 bp, Artificial
  Synthetic oligonucleotide
gactgcttgccagggaaccgtggcctctaggccttccataacggagcgatgaaagg

SEQ ID NO: 279486 - DNA, 56 bp, Artificial
  Synthetic oligonucleotide
cttcaactctgagacattctacccacctaccaacaaatagtcgactaactaggata

SEQ ID NO: 279487 - DNA, 60 bp, Artificial
  Synthetic oligonucleotide
cagcactgtcatgacttctagacctgggtatacgtaccataattgaagggagaatccgcg

SEQ ID NO: 279488 - DNA, 56 bp, Artificial
  Synthetic oligonucleotide
aggttgcaacctgaagacgtggatgacggaagccatatagaggccccagcccttcc

SEQ ID NO: 279489 - DNA, 56 bp, Artificial
  Synthetic oligonucleotide
ttccccgcgggacgcacatcggtatctgtccgaaggcaatcaactgtagtcgtgaa

SEQ ID NO: 279490 - DNA, 56 bp, Artificial
  Synthetic oligonucleotide
attcccgctccgtggcggagttattcgtttgcgtctccccactccacgactgtgag

SEQ ID NO: 279491 - DNA, 54 bp, Artificial
  Synthetic oligonucleotide
aactcccgctgcacgtatgggattttacccccagagactagtcctattttcgtc

SEQ ID NO: 279492 - DNA, 56 bp, Artificial
  Synthetic oligonucleotide
gactctttcgggcattgtcgccgctctaggaagcctagctacgcctacgctgcaat

SEQ ID NO: 279493 - DNA, 56 bp, Artificial
  Synthetic oligonucleotide
gttgaggacatatataaggtggacgcagctaagatatatcaaatcatgctaaacac

SEQ ID NO: 279494 - DNA, 55 bp, Artificial
  Synthetic oligonucleotide
cggccatgaacctcctgtcaatggtgacaactccgccctttcctcatgacggtgg

SEQ ID NO: 279495 - DNA, 55 bp, Artificial
  Synthetic oligonucleotide
cggctaacggagggatttaaacagaccctgcatctaccatgcgagactttgtgta

SEQ ID NO: 279496 - DNA, 55 bp, Artificial
  Synthetic oligonucleotide
gggcatcaaatgcatgtcagagcaatcgaccgagaaagaaagcgcagtcgatctc

SEQ ID NO: 279497 - DNA, 51 bp, Artificial
  Synthetic oligonucleotide
cggaggtcgggggtaattgtgggctgttagggccggttgagtgtacttccg

SEQ ID NO: 279498 - DNA, 53 bp, Artificial
  Synthetic oligonucleotide
agtaggcggattctgcgaccgcgaaaacgtggggtgggacttcgagtcggttc

SEQ ID NO: 279499 - DNA, 55 bp, Artificial
  Synthetic oligonucleotide
cgggctctcatctcgtgtcccagagtgaagaacaaagggtaccgggattgatgtc

SEQ ID NO: 279500 - DNA, 55 bp, Artificial
  Synthetic oligonucleotide
cggggctccgcatacgttctcacacttggacgggattttgaagactggtgaagag

SEQ ID NO: 279501 - DNA, 55 bp, Artificial
  Synthetic oligonucleotide
gggcagctggcagattaactggcacagcagaatcagccacaagtgacgtcgactc

SEQ ID NO: 279502 - DNA, 55 bp, Artificial
  Synthetic oligonucleotide
gggagtatgtggaggctcgtcattcggacaaagcattatgcattgcatacgacgc

SEQ ID NO: 279503 - DNA, 55 bp, Artificial
  Synthetic oligonucleotide
cggaggagacgatctctaggagtacgaagacagcccgttcttcgttaccggcgaa

SEQ ID NO: 279504 - DNA, 55 bp, Artificial
  Synthetic oligonucleotide
cgggctgccccgtcctatagtggcgatatagaaatactacaagcggcagacgcgg

SEQ ID NO: 279505 - DNA, 55 bp, Artificial
  Synthetic oligonucleotide
gggcgcgtccaatccatcgatgaatctgtgatgtagaagttagccttagggcgga

SEQ ID NO: 279506 - DNA, 55 bp, Artificial
  Synthetic oligonucleotide
cggccagtcgaaatcgaatcgacacacttcgtgtggaaaacgaacagtctaccat

SEQ ID NO: 279507 - DNA, 54 bp, Artificial
  Synthetic oligonucleotide
cggtatactccgggactccctaaacacccaatcgaataggtgattgtttcctga

SEQ ID NO: 279508 - DNA, 55 bp, Artificial
  Synthetic oligonucleotide
cggggcgttacccaggagctcatgcgaggtgcacggtggatgggtgaccaaggac

SEQ ID NO: 279509 - DNA, 53 bp, Artificial
  Synthetic oligonucleotide
agtaaacacgcgaactactcctactaccatccgtgaacacgggttctttctcc

SEQ ID NO: 279510 - DNA, 54 bp, Artificial
  Synthetic oligonucleotide
cggtataactacgagcgtgcgaaatgcgaagacccgaaggttattagggagtgg

SEQ ID NO: 279511 - DNA, 55 bp, Artificial
  Synthetic oligonucleotide
gggcatgtgaccagagagaggatagctcataaaacagggtgatatgtacccttgt

SEQ ID NO: 279512 - DNA, 55 bp, Artificial
  Synthetic oligonucleotide
cggcgaatgtgtataaacttggccgaactaatgttttcagtgcatcgaggcttat

SEQ ID NO: 279513 - DNA, 55 bp, Artificial
  Synthetic oligonucleotide
cggtagttttatgcggaccgattccggtatgtgtcctaagggatcagggtagtca

SEQ ID NO: 279514 - DNA, 55 bp, Artificial
  Synthetic oligonucleotide
cggcgccccattgctcggagtcacataccataccgggtcctattgatgttggtcg

SEQ ID NO: 279515 - DNA, 55 bp, Artificial
  Synthetic oligonucleotide
cggcgaaccattgtggctcattcccatgcacttgagcctactcgcagacctggag

SEQ ID NO: 279516 - DNA, 52 bp, Artificial
  Synthetic oligonucleotide
cggggcaattgtccccacgcccgactataatatcccgcgaacccttttacac

SEQ ID NO: 279517 - DNA, 55 bp, Artificial
  Synthetic oligonucleotide
cggcgcgggatttgctgggtccagtccagacgccagctagtcgaggatatcactt

SEQ ID NO: 279518 - DNA, 55 bp, Artificial
  Synthetic oligonucleotide
cggtaggaagaaccataacggctcatgtcaggctagtgccgatcactgccaacct

SEQ ID NO: 279519 - DNA, 55 bp, Artificial
  Synthetic oligonucleotide
cggcctgggagtattctggtaagagaacccggccacatgttaacagcgagttctg

SEQ ID NO: 279520 - DNA, 57 bp, Artificial
  Synthetic oligonucleotide
gtaattcaggaccgcgtttgatagactttttgcgggccattacatccacgatgcttt

SEQ ID NO: 279521 - DNA, 55 bp, Artificial
  Synthetic oligonucleotide
gggagctacgtacgcacatgacatacgatgatggaagttgtgctaacagaccaag

SEQ ID NO: 279522 - DNA, 55 bp, Artificial
  Synthetic oligonucleotide
gggcaactttcgaggatcagctaacgtgtaatgctaagatgttgggtaaacgcag

SEQ ID NO: 279523 - DNA, 55 bp, Artificial
  Synthetic oligonucleotide
gggatcacacaaggagtgtccaccaccctcggatgttgtcccgctttggctgcgg

SEQ ID NO: 279524 - DNA, 55 bp, Artificial
  Synthetic oligonucleotide
gggatctgtcaaggtggccttttaaggcatgctgggacacggcagtctgtatccc

SEQ ID NO: 279525 - DNA, 55 bp, Artificial
  Synthetic oligonucleotide
cggagctgctgggttagcaacgccagaggagtcggctgactattcgagacggtcg

SEQ ID NO: 279526 - DNA, 55 bp, Artificial
  Synthetic oligonucleotide
gggatcttgactggcacatcttcgaagtaactgtttcgcagtgggaaaatctcgg

SEQ ID NO: 279527 - DNA, 55 bp, Artificial
  Synthetic oligonucleotide
cggcctcggtaggaagttcgatttccacaggtcctatcaaggcaaatgttagcag

SEQ ID NO: 279528 - DNA, 55 bp, Artificial
  Synthetic oligonucleotide
cggccgttcacactcatagtcgtgatatcagcaagcacaccgctgttcgagccac

SEQ ID NO: 279529 - DNA, 55 bp, Artificial
  Synthetic oligonucleotide
cggggagactcaggtggacgggagaatgtgaggggtatcctggagacgactcaac

SEQ ID NO: 279530 - DNA, 55 bp, Artificial
  Synthetic oligonucleotide
cggcggccgtcaagagtcacgttacggagattgtactcgtgaagatgccttttct

SEQ ID NO: 279531 - DNA, 60 bp, Artificial
  Synthetic oligonucleotide
cagactagggatcgcccacagtgttctgactgcgtgtctgtatggtgagagaacaatcgg

SEQ ID NO: 279532 - DNA, 54 bp, Artificial
  Synthetic oligonucleotide
cggcggtttcccgaggttatcacttattatcacgaccgtgactctgttttcgac

SEQ ID NO: 279533 - DNA, 55 bp, Artificial
  Synthetic oligonucleotide
gggcaactggattcaacagtggagcttttgacgtcgccttagtgttcttcttgga

SEQ ID NO: 279534 - DNA, 55 bp, Artificial
  Synthetic oligonucleotide
cggcccattcagcctatgcacttaaatgttccttcgtgcttttagccagtcctga

SEQ ID NO: 279535 - DNA, 54 bp, Artificial
  Synthetic oligonucleotide
cggactaagcttgtcgttcggaaactcgactttccacctcaaaccacagtcaaa

SEQ ID NO: 279536 - DNA, 55 bp, Artificial
  Synthetic oligonucleotide
cggcaaagccgttggatgtcatgacggattgctccttccaagcggtcctcgtaca

SEQ ID NO: 279537 - DNA, 55 bp, Artificial
  Synthetic oligonucleotide
cggactaatggggagatgtcttgggcggcctattacccggactgcacccgttgac

SEQ ID NO: 279538 - DNA, 55 bp, Artificial
  Synthetic oligonucleotide
cgggatgggtattgctttgagcttgcggcccaggcaacatggttgacgcagatgg

SEQ ID NO: 279539 - DNA, 55 bp, Artificial
  Synthetic oligonucleotide
cggagagctacgtcggtggattagagacacggatctaaacgagagatctcacacc

SEQ ID NO: 279540 - DNA, 55 bp, Artificial
  Synthetic oligonucleotide
cggggtgccacttgtgtcgcaaacggaaaatcaaggtaggacagatctgcagcct

SEQ ID NO: 279541 - DNA, 55 bp, Artificial
  Synthetic oligonucleotide
gggcaagtacctcattgactccggtagcgcatgggacgatgcacaacccatggca

SEQ ID NO: 279542 - DNA, 60 bp, Artificial
  Synthetic oligonucleotide
gtaattagatcggtgacatgaattgatttaggcgatgagtaatggtactcgtcagtggct

SEQ ID NO: 279543 - DNA, 55 bp, Artificial
  Synthetic oligonucleotide
gggcctcgcccgcgttaacctgacgaccagattttatctcgttaattgtgccagt

SEQ ID NO: 279544 - DNA, 55 bp, Artificial
  Synthetic oligonucleotide
cgggatggcactagcggtggcccggcggagtgtctggacatacgaaatgaagata

SEQ ID NO: 279545 - DNA, 55 bp, Artificial
  Synthetic oligonucleotide
cggatttattcacggcgacgtcaaatgcgagaacgtgctcattttcccggccaga

SEQ ID NO: 279546 - DNA, 55 bp, Artificial
  Synthetic oligonucleotide
cggggttgccagtctacttccaccggatgtattgagttgggacccagtagcaccg

SEQ ID NO: 279547 - DNA, 55 bp, Artificial
  Synthetic oligonucleotide
cggctctcagcatgaaaagacttggccatcaattgaacgagggcaacatactaag

SEQ ID NO: 279548 - DNA, 55 bp, Artificial
  Synthetic oligonucleotide
cggactggcatcccaggtccgggcccaaagtcagggatcttatgccctgctgagt

SEQ ID NO: 279549 - DNA, 55 bp, Artificial
  Synthetic oligonucleotide
cgggatctgacgtggagttgcccgagataacagaattcgcagtgaatggcccaga

SEQ ID NO: 279550 - DNA, 55 bp, Artificial
  Synthetic oligonucleotide
cgggagggcctaggtagtcggttagtcctttctgcaaacatatcgcagccaacgc

SEQ ID NO: 279551 - DNA, 55 bp, Artificial
  Synthetic oligonucleotide
cggatgctaaggcgcccgttgtttctgagggcgattgggtatccacagagggccg

SEQ ID NO: 279552 - DNA, 55 bp, Artificial
  Synthetic oligonucleotide
cggagacctccgagcagggcaggatccgagcagagctacttactccttcgggata

SEQ ID NO: 279553 - DNA, 60 bp, Artificial
  Synthetic oligonucleotide
cagagccagcgtatagaacacgcatacttagatacgctgttatccaaggtagaacgtctt

SEQ ID NO: 279554 - DNA, 55 bp, Artificial
  Synthetic oligonucleotide
gggattcgatcctttcacgtcttgatagaactttgtgggcttgatcgaggagccg

SEQ ID NO: 279555 - DNA, 55 bp, Artificial
  Synthetic oligonucleotide
cggatgtcaaacgagcctggatgttcctacccatgggtactgagccggtcaagtc

SEQ ID NO: 279556 - DNA, 55 bp, Artificial
  Synthetic oligonucleotide
cgggtagctagcagcttgtgaggatgctacttgtcaagatagaaggcctgttgac

SEQ ID NO: 279557 - DNA, 55 bp, Artificial
  Synthetic oligonucleotide
gggccttcagagacagatactaccgttctgcgggtcaagaatagagcctgttggc

SEQ ID NO: 279558 - DNA, 55 bp, Artificial
  Synthetic oligonucleotide
cggctgtccgatcgtgactgggcgcaagtacatgatgtggcgtaacgctctacca

SEQ ID NO: 279559 - DNA, 55 bp, Artificial
  Synthetic oligonucleotide
cggcttgtggacaatttgaatgctgagatctcgcttggcaccgttacctccgtcc

SEQ ID NO: 279560 - DNA, 54 bp, Artificial
  Synthetic oligonucleotide
cgggacccagacccggagcgaagaccgataactccgaggtatttcaatcccgca

SEQ ID NO: 279561 - DNA, 55 bp, Artificial
  Synthetic oligonucleotide
cgggtcagtgcagtttcaaggatttgtgggcccatatacctacagtgtgagcagt

SEQ ID NO: 279562 - DNA, 55 bp, Artificial
  Synthetic oligonucleotide
gggattctcacggctattagcaaggatctgccaagtaaggctgagaggatcttcg

SEQ ID NO: 279563 - DNA, 55 bp, Artificial
  Synthetic oligonucleotide
cggagtagaatcggtccctcagattgggcgcttccatggatcatcgtcgatggat

SEQ ID NO: 279564 - DNA, 56 bp, Artificial
  Synthetic oligonucleotide
cagagcgttggggtgattatcgaaccatattccgttgcccaaccggaactcctcac

SEQ ID NO: 279565 - DNA, 55 bp, Artificial
  Synthetic oligonucleotide
cggccaaccgacataccaacgcagacgggattgatcacacgcaagacacacctcg

SEQ ID NO: 279566 - DNA, 55 bp, Artificial
  Synthetic oligonucleotide
cggagtagcttggggtggtgtcgagaaaaccgcaacaatccatgggttcgctgtg

SEQ ID NO: 279567 - DNA, 55 bp, Artificial
  Synthetic oligonucleotide
cggctatactcttgaacagcttgttggtagctttcagcgtccaatccattgtgtg

SEQ ID NO: 279568 - DNA, 55 bp, Artificial
  Synthetic oligonucleotide
cggctcaagtcttttcctctgttgctgacgagaagttaggacgagtcttcgtcac

SEQ ID NO: 279569 - DNA, 55 bp, Artificial
  Synthetic oligonucleotide
cggcaggatggatctgggaacgcgcctaatacgccagagagctctacactcgacg

SEQ ID NO: 279570 - DNA, 55 bp, Artificial
  Synthetic oligonucleotide
cggcagctctttagagtatgggataaattcgggagcgcccgggatatactttctc

SEQ ID NO: 279571 - DNA, 55 bp, Artificial
  Synthetic oligonucleotide
gggaggtcgcgcaaatattggccatgaatagggtaattcatacgaggcgggtccg

SEQ ID NO: 279572 - DNA, 55 bp, Artificial
  Synthetic oligonucleotide
gggcgagcatagagaatttgcagcatacggttcccgtggtccacgttacgtaggt

SEQ ID NO: 279573 - DNA, 55 bp, Artificial
  Synthetic oligonucleotide
cggagtgagaagtcaaaaccactccggatcgaagtgagtcgtcaatatcacttcc

SEQ ID NO: 279574 - DNA, 55 bp, Artificial
  Synthetic oligonucleotide
gggatgtaggtaccggatgagcgggttagagagcgtttcggctatcctttgaacg

SEQ ID NO: 279575 - DNA, 54 bp, Artificial
  Synthetic oligonucleotide
ggggacatgaaatacggaattgagtaacgctcccgtgtcatccggttaggcccc

SEQ ID NO: 279576 - DNA, 55 bp, Artificial
  Synthetic oligonucleotide
cgggctaggtgatcgggtctctcgtaggccctgtcacactcggggcactgatgta

SEQ ID NO: 279577 - DNA, 53 bp, Artificial
  Synthetic oligonucleotide
cggctcacccgggcacatccgttcccaacaacacgtacttctacaaccgggcg

SEQ ID NO: 279578 - DNA, 55 bp, Artificial
  Synthetic oligonucleotide
cggagccgtcaccgtagtgtatcggtcagggttgttgcgagtctgggatcgcgtc

SEQ ID NO: 279579 - DNA, 55 bp, Artificial
  Synthetic oligonucleotide
gggaggcgttcatccctagttaacatgtagtacttatcatgtcgtgacgggtcat

SEQ ID NO: 279580 - DNA, 55 bp, Artificial
  Synthetic oligonucleotide
cgggctaagagttcgagtggtggcaacacgtcgcatactcccaaccgcgtgaaac

SEQ ID NO: 279581 - DNA, 55 bp, Artificial
  Synthetic oligonucleotide
cggcagcctcggaactttgagcctggtttcctagcgctcgctcacgaagtctctt

SEQ ID NO: 279582 - DNA, 53 bp, Artificial
  Synthetic oligonucleotide
cggggtaccgacgcactagcgtctccgtcgcttttccatcctaatgggtaagg

SEQ ID NO: 279583 - DNA, 55 bp, Artificial
  Synthetic oligonucleotide
cggctcgcccagacgtatgattcgaagcttgaggaagatattacctggtctgctg

SEQ ID NO: 279584 - DNA, 55 bp, Artificial
  Synthetic oligonucleotide
cgggcgaggccctagatcatcatgacacgatagcagtagcagacgcgttgtcgca

SEQ ID NO: 279585 - DNA, 55 bp, Artificial
  Synthetic oligonucleotide
gggccaaatctgaggtagctagggtttgtaagagagtgagttcgtttagtagccg

SEQ ID NO: 279586 - DNA, 59 bp, Artificial
  Synthetic oligonucleotide
gagctagatacaagggccgtcgtttaatcggcactagtagtagtaacctgattgactga

SEQ ID NO: 279587 - DNA, 60 bp, Artificial
  Synthetic oligonucleotide
agtaaagacaacataagtcagctgcgagtagaaatgaaagtcagcggcgcgagcctagag

SEQ ID NO: 279588 - DNA, 55 bp, Artificial
  Synthetic oligonucleotide
cggggtcactccagtgggatctgacgactcgaaaggcgggtctccactgcagtca

SEQ ID NO: 279589 - DNA, 55 bp, Artificial
  Synthetic oligonucleotide
gggatgtatcttatggtcgatgtggttgctaaccatatggttcgtggtcctttgc

SEQ ID NO: 279590 - DNA, 55 bp, Artificial
  Synthetic oligonucleotide
cggcacgtctcggcggctatgctcctgtgcccttgccttcgatgtctaatctcaa

SEQ ID NO: 279591 - DNA, 55 bp, Artificial
  Synthetic oligonucleotide
gggatgttcgcataattccccactcgaatcatgtaatggaagacttctgtcggcc

SEQ ID NO: 279592 - DNA, 55 bp, Artificial
  Synthetic oligonucleotide
cggcaccagtcccgagaggacgtatatggggcggaatccatctccagtgtcttcg

SEQ ID NO: 279593 - DNA, 54 bp, Artificial
  Synthetic oligonucleotide
gggccggtggtaagccttctggagacggcttgtggagggacgaggggtaagcaa

SEQ ID NO: 279594 - DNA, 55 bp, Artificial
  Synthetic oligonucleotide
gggatttcagcgttcatcggaacgtgtcatacgaatgctgtagtagtacacacca

SEQ ID NO: 279595 - DNA, 55 bp, Artificial
  Synthetic oligonucleotide
gggtccctgtaatccgtataagcacttcagaccgcgccattcgactagggcagac

SEQ ID NO: 279596 - DNA, 55 bp, Artificial
  Synthetic oligonucleotide
ccggttttgtatatgctcatgacggccgggaatgccaaggtaggtggccggtcca

SEQ ID NO: 279597 - DNA, 54 bp, Artificial
  Synthetic oligonucleotide
ccgtaaaggagaaggtatatagcaaacccctactactagtacctatataggaga

SEQ ID NO: 279598 - DNA, 57 bp, Artificial
  Synthetic oligonucleotide
agtaaggctcacatactatagacagctttgcgcaattgggggtactttacaccctta

SEQ ID NO: 279599 - DNA, 55 bp, Artificial
  Synthetic oligonucleotide
ccgtaagtgtcgcggctggatcacaatctttccgattgactcatgtatcttagcg

SEQ ID NO: 279600 - DNA, 54 bp, Artificial
  Synthetic oligonucleotide
ccgtacagaactcccggtaatatgctcctccgcttgttagacaaagccccgagg

SEQ ID NO: 279601 - DNA, 55 bp, Artificial
  Synthetic oligonucleotide
ccgtagagaaggtagtacctgaccacccgttagtgattgtctgtgatgcggccgc

SEQ ID NO: 279602 - DNA, 55 bp, Artificial
  Synthetic oligonucleotide
ccgtcaattgggctagggcgtagataaaccaactgctagaggagtggagcaccca

SEQ ID NO: 279603 - DNA, 55 bp, Artificial
  Synthetic oligonucleotide
ccgtccaccatcaacaggtcccctccataaggaccgagagtgctcttgatcgtgg

SEQ ID NO: 279604 - DNA, 55 bp, Artificial
  Synthetic oligonucleotide
ccgtcctagacttctgcaaaccctcgcgcattggcactgttacgatcacaactac

SEQ ID NO: 279605 - DNA, 55 bp, Artificial
  Synthetic oligonucleotide
ccgtcctgcatcccggcacgactgtaggtatgagaccatgtattcgttggcttcg

SEQ ID NO: 279606 - DNA, 55 bp, Artificial
  Synthetic oligonucleotide
gggtcatgaatgcatatttgatgaagtgcgcaagaaaagcggtcccaagcggggt

SEQ ID NO: 279607 - DNA, 55 bp, Artificial
  Synthetic oligonucleotide
ccgtctaagctgcgtaacctgctagtgttatagctcaagcacgagggtgactaga

SEQ ID NO: 279608 - DNA, 55 bp, Artificial
  Synthetic oligonucleotide
ccgtgctcgtgagcttgtaatgagacatgcgcgccctatcagttgcctcgaagac

SEQ ID NO: 279609 - DNA, 60 bp, Artificial
  Synthetic oligonucleotide
agtacagtgaaacaaactctctgttgaacctcggaatcattattcgcagtggaagccaca

SEQ ID NO: 279610 - DNA, 55 bp, Artificial
  Synthetic oligonucleotide
ccgtgctttgcttgcccatcgcactgatgcgtgcgtcattcagcagttgggatta

SEQ ID NO: 279611 - DNA, 55 bp, Artificial
  Synthetic oligonucleotide
ccgtggattgtcagagttcctcgttgcggcaccagctgtccgtcgtgaaccgcgt

SEQ ID NO: 279612 - DNA, 55 bp, Artificial
  Synthetic oligonucleotide
ccgtgggatgacgtggaggctacccattcgggaacaatcaacgagaaatgagtgc

SEQ ID NO: 279613 - DNA, 55 bp, Artificial
  Synthetic oligonucleotide
ccgtgggtggagttcctatgatcaacaacggatccacggcttctcgtaacgacgg

SEQ ID NO: 279614 - DNA, 53 bp, Artificial
  Synthetic oligonucleotide
ccgtggtgaggtcctgatttccaagtttggtcggtctagtaaaccttctccac

SEQ ID NO: 279615 - DNA, 55 bp, Artificial
  Synthetic oligonucleotide
ccgtgtaactccgaagaacaacaggatacgctcgggaagcatcattgacgctacc

SEQ ID NO: 279616 - DNA, 55 bp, Artificial
  Synthetic oligonucleotide
gggtcaatgatattcaatatgcgagcgagaccttaatttccctctggaaagcctg

SEQ ID NO: 279617 - DNA, 55 bp, Artificial
  Synthetic oligonucleotide
gggtattcagcagtcgctatcatcttattactgaagcctgagacagcggctcgga

SEQ ID NO: 279618 - DNA, 52 bp, Artificial
  Synthetic oligonucleotide
gggtagtggtgaacgctttctcaaactcgtgaccgtaaccccggaactcgtg

SEQ ID NO: 279619 - DNA, 55 bp, Artificial
  Synthetic oligonucleotide
gggtagtaacgacaataatgcatgagcgtactgcatgactctccagcacacgcac

SEQ ID NO: 279620 - DNA, 60 bp, Artificial
  Synthetic oligonucleotide
acgcacgagtccaccaatcactgtcttgatacgcatttagctacgccacactgtacgaag

SEQ ID NO: 279621 - DNA, 55 bp, Artificial
  Synthetic oligonucleotide
ccggcgagcctagattagacgatagtgcgttctaccatctcccttgcgcaacaca

SEQ ID NO: 279622 - DNA, 55 bp, Artificial
  Synthetic oligonucleotide
ccggcgcaaggcagggtaagcacccagcccgagaagataaatgcaatctgacgcc

SEQ ID NO: 279623 - DNA, 55 bp, Artificial
  Synthetic oligonucleotide
ccggcgcatcccgccccaaccgatccattaacgctcgcatttcctcttttgacgc

SEQ ID NO: 279624 - DNA, 55 bp, Artificial
  Synthetic oligonucleotide
ccggcgcgagcctagttgcccgtagtactacttccgctgatttccgcaccgaact

SEQ ID NO: 279625 - DNA, 55 bp, Artificial
  Synthetic oligonucleotide
ccggcgtccaatgagtggccccacgctgttatcggatgacatctggcgtcttttc

SEQ ID NO: 279626 - DNA, 55 bp, Artificial
  Synthetic oligonucleotide
ccggctacccgtgcaaacatagctgagacctgggccgaagttcgtgcgaagttcg

SEQ ID NO: 279627 - DNA, 55 bp, Artificial
  Synthetic oligonucleotide
ccggctgtcccttaggcctcgtacggaatccctaccgtattcgagtctctcggca

SEQ ID NO: 279628 - DNA, 55 bp, Artificial
  Synthetic oligonucleotide
ccgggaggcctgcatgcgcagaacacgagtagggaacatggcgaatggctttgag

SEQ ID NO: 279629 - DNA, 55 bp, Artificial
  Synthetic oligonucleotide
gggtctttggtctcgtattgccgtacatattcaacccggaccaggggaatctgcg

SEQ ID NO: 279630 - DNA, 55 bp, Artificial
  Synthetic oligonucleotide
ccgggccacacactcgttgctcgcagagcatgcactacattttgctctgctttgg

SEQ ID NO: 279631 - DNA, 56 bp, Artificial
  Synthetic oligonucleotide
tagtacaaattttgtacaagactattctacaaaaacaaatactaattcagataatc

SEQ ID NO: 279632 - DNA, 55 bp, Artificial
  Synthetic oligonucleotide
gggtcttgatatcgggtacattgagattgagatagcgttccagggagggaacatc

SEQ ID NO: 279633 - DNA, 55 bp, Artificial
  Synthetic oligonucleotide
ccgggcggacaattgtttgttagcgccgtcgtacacctagcaccatgcacgtaga

SEQ ID NO: 279634 - DNA, 55 bp, Artificial
  Synthetic oligonucleotide
ccggggagggcattgatgcacagccactaccattatggaaatagacctgggtctg

SEQ ID NO: 279635 - DNA, 55 bp, Artificial
  Synthetic oligonucleotide
gggtctaagggttgagagtcaagatcaacacgaagagtatatctcgagcgagcat

SEQ ID NO: 279636 - DNA, 55 bp, Artificial
  Synthetic oligonucleotide
ccgggtatcactccccaagcctcgtgtttcaggtcaggtgaatatccacctcccc

SEQ ID NO: 279637 - DNA, 55 bp, Artificial
  Synthetic oligonucleotide
ccgggttcctataggctgcaaggacatacgggagagaggtgcttgcgattgacgc

SEQ ID NO: 279638 - DNA, 54 bp, Artificial
  Synthetic oligonucleotide
ccgggttcgcattacttgtgtatggaaccttcctgtttaacgacattgtacgcc

SEQ ID NO: 279639 - DNA, 55 bp, Artificial
  Synthetic oligonucleotide
ccgggttgcggctcccttgcgcgtacccaacctggactccattaacccagacatg

SEQ ID NO: 279640 - DNA, 55 bp, Artificial
  Synthetic oligonucleotide
ccggtagtacccagtcaagggctcccatcgtttagctagtatggagtagatggtt

SEQ ID NO: 279641 - DNA, 55 bp, Artificial
  Synthetic oligonucleotide
gggtcctagtgtcggtgtggagcatccaaatgtgccttagaagtccgagataggg

SEQ ID NO: 279642 - DNA, 60 bp, Artificial
  Synthetic oligonucleotide
gactgcgacttcgttttaacccgcgcatgcgatgcaacactggacgagaaactagcgcga

SEQ ID NO: 279643 - DNA, 54 bp, Artificial
  Synthetic oligonucleotide
ccggtcttttacgaactctgcggaatgagaatccccacttggaactaccccagc

SEQ ID NO: 279644 - DNA, 55 bp, Artificial
  Synthetic oligonucleotide
ccggtgcgaaaccatgacacctggatggcaacggtcagtagtcgatcaccaggac

SEQ ID NO: 279645 - DNA, 55 bp, Artificial
  Synthetic oligonucleotide
ccggtgctcggcaaagaatgcgctgtaaccaccctccagaatgtacatatcgggg

SEQ ID NO: 279646 - DNA, 55 bp, Artificial
  Synthetic oligonucleotide
gggtccgtgtagccgcaccccataacctcaaagaacaactgctcaggcggcatgt

SEQ ID NO: 279647 - DNA, 53 bp, Artificial
  Synthetic oligonucleotide
gggtccgagaaaggttgtgtgcggtttgttccgttgtggttgcaaagtgttaa

SEQ ID NO: 279648 - DNA, 55 bp, Artificial
  Synthetic oligonucleotide
cctcgccaggtagtcctctgcagacgaatcaattgagatattgcgtagaagggtg

SEQ ID NO: 279649 - DNA, 55 bp, Artificial
  Synthetic oligonucleotide
cctcgcgtatcgctaccacgctggaattggggctcctagagattgcgatcaagcg

SEQ ID NO: 279650 - DNA, 55 bp, Artificial
  Synthetic oligonucleotide
ggggtccactgccgctagcgctaggtcagggtcttttgtcctgacgaaaagcacg

SEQ ID NO: 279651 - DNA, 55 bp, Artificial
  Synthetic oligonucleotide
ggggtacgcacagatcaacataacaggtgcgacgtcgctggaaggttggctcaat

SEQ ID NO: 279652 - DNA, 55 bp, Artificial
  Synthetic oligonucleotide
cctcgtgcactggaagggatacactgaacgacagtgggaccgggtcgaccttacc

SEQ ID NO: 279653 - DNA, 56 bp, Artificial
  Synthetic oligonucleotide
gactgcgcttgtttctggaatctgtgggtgggagacggaaagggtgacaacgtacc

SEQ ID NO: 279654 - DNA, 55 bp, Artificial
  Synthetic oligonucleotide
cctcgtgcttgagctataacactagcaggttacgcagcttagacggataccaggg

SEQ ID NO: 279655 - DNA, 55 bp, Artificial
  Synthetic oligonucleotide
cctctcagtgacgggcttcaattcttagcgatcctcacgctctcacttgctactt

SEQ ID NO: 279656 - DNA, 55 bp, Artificial
  Synthetic oligonucleotide
cctctcccagattcttgtgaaatataccgagggcacatatctccacgtctgtgag

SEQ ID NO: 279657 - DNA, 55 bp, Artificial
  Synthetic oligonucleotide
cctctggagaaacgactccattcttcaagggagcaccgtaatgggtgcatttagg

SEQ ID NO: 279658 - DNA, 55 bp, Artificial
  Synthetic oligonucleotide
cctctgtatcgtaacgacgaatatagcaaatcagctatttaatcatgcgttaagg

SEQ ID NO: 279659 - DNA, 55 bp, Artificial
  Synthetic oligonucleotide
cctgaagcggtcaatgtgggcacgtataaaagctaataccatacatcagttccca

SEQ ID NO: 279660 - DNA, 55 bp, Artificial
  Synthetic oligonucleotide
cctgaccacgggtatgatacccaatgcgcaatgcttctttatttctcacgccatc

SEQ ID NO: 279661 - DNA, 55 bp, Artificial
  Synthetic oligonucleotide
cctgacccctcctgtatgtcatcggggaagaatgtactggaccagccaacactaa

SEQ ID NO: 279662 - DNA, 55 bp, Artificial
  Synthetic oligonucleotide
cctgacggtctggccgatctagattccgcgtcggtagatccgtgacattgcggga

SEQ ID NO: 279663 - DNA, 55 bp, Artificial
  Synthetic oligonucleotide
cctgacgtaccggggttacatgagtcgcgttaactgtgtggccgcgggagttgac

SEQ ID NO: 279664 - DNA, 56 bp, Artificial
  Synthetic oligonucleotide
gactggggtccctttcatagtaattccaattacgtctgatgctgctaaaggttttg

SEQ ID NO: 279665 - DNA, 55 bp, Artificial
  Synthetic oligonucleotide
cctgatcgtatcgtgccggcgccagtcttctacctgttgaacgctgcgcatagta

SEQ ID NO: 279666 - DNA, 55 bp, Artificial
  Synthetic oligonucleotide
cctgcataatgcccctgtcaatctggggtccctgaaatgctatccttcctagccc

SEQ ID NO: 279667 - DNA, 55 bp, Artificial
  Synthetic oligonucleotide
cctgccatatagtgtcggacaatctcctaaccaaatattggaggaatccgcctcc

SEQ ID NO: 279668 - DNA, 55 bp, Artificial
  Synthetic oligonucleotide
cctgcccatgctacaacagagctgagtggtcagcgctaacgtatcgcagtactct

SEQ ID NO: 279669 - DNA, 55 bp, Artificial
  Synthetic oligonucleotide
cctgccgcttatccaaattccccactgcaattatacttcaatgagacaggcagag

SEQ ID NO: 279670 - DNA, 55 bp, Artificial
  Synthetic oligonucleotide
cctgctaattgggagattggacaggacctggtttgtgaccaaaccgtgcaagtct

SEQ ID NO: 279671 - DNA, 55 bp, Artificial
  Synthetic oligonucleotide
cctgctaccagcgtggctctggtttgggttaattcttatcgtgtgtataaccggc

SEQ ID NO: 279672 - DNA, 55 bp, Artificial
  Synthetic oligonucleotide
cctgctgacgcaatctccatcgagggatatacgctttaaccgaggtcatgatctg

SEQ ID NO: 279673 - DNA, 55 bp, Artificial
  Synthetic oligonucleotide
cctggacaaagatgccgaactacgtttcactacctatgatgtacgcttgcatggg

SEQ ID NO: 279674 - DNA, 55 bp, Artificial
  Synthetic oligonucleotide
cctggacccaatgatatccgaggaccaggtcctagctatggcccaaacgtgctca

SEQ ID NO: 279675 - DNA, 59 bp, Artificial
  Synthetic oligonucleotide
acgatggcccacggctctgggcgctgacgcgactcccttacatgctcgcctttcggtcg

SEQ ID NO: 279676 - DNA, 54 bp, Artificial
  Synthetic oligonucleotide
cctaccgaggcatgaaagaactagcttacttaggaccacccctccctactgtag

SEQ ID NO: 279677 - DNA, 55 bp, Artificial
  Synthetic oligonucleotide
cctaccgctggttcatcccaagatcggtctctgatatttgcccgaaataagtcgg

SEQ ID NO: 279678 - DNA, 55 bp, Artificial
  Synthetic oligonucleotide
cctacgccaacacgaggaaatggagtgtatacgaccctaactaatgcgacggaag

SEQ ID NO: 279679 - DNA, 55 bp, Artificial
  Synthetic oligonucleotide
gggtagaatgaagatagaggtatgcggcgtcgcggaagcagttggctaccatgcg

SEQ ID NO: 279680 - DNA, 55 bp, Artificial
  Synthetic oligonucleotide
cctacgtcaatgacacgtgtgggaagagaatgcgctccatctttgtatccttcgc

SEQ ID NO: 279681 - DNA, 55 bp, Artificial
  Synthetic oligonucleotide
cctactccgccatcatgtcaggtacaatgtacgacgagcacgtttatgcaccctc

SEQ ID NO: 279682 - DNA, 55 bp, Artificial
  Synthetic oligonucleotide
cctactggggtggcaaacatactagagacttggcaactgcacgttctgacgtgaa

SEQ ID NO: 279683 - DNA, 55 bp, Artificial
  Synthetic oligonucleotide
gggtacagtgtctaccccaccagcccattcacgagatctcgctactagtgacctc

SEQ ID NO: 279684 - DNA, 55 bp, Artificial
  Synthetic oligonucleotide
cctagcgtcatccacctcttcgctacatatccggcgcacgttggatcagttcttc

SEQ ID NO: 279685 - DNA, 55 bp, Artificial
  Synthetic oligonucleotide
cctaggcatttccgtcgtcaaattccctcagcagtcgaacatccgaaagcatggc

SEQ ID NO: 279686 - DNA, 60 bp, Artificial
  Synthetic oligonucleotide
ggctgctataagtggcttctcgtagggctcatcataaggactcatgcacggaagcgccgc

SEQ ID NO: 279687 - DNA, 55 bp, Artificial
  Synthetic oligonucleotide
cctagggatcgcgcgatatcagctacggatgaggactcgagggcctctcgagacg

SEQ ID NO: 279688 - DNA, 55 bp, Artificial
  Synthetic oligonucleotide
cctagtctatatcacaaaatccgtagagagtagaattagtgttagactcggagcc

SEQ ID NO: 279689 - DNA, 55 bp, Artificial
  Synthetic oligonucleotide
cctatatgcggaaaccccgtgccgattgagtcgcttctccgtatcctatcggctg

SEQ ID NO: 279690 - DNA, 55 bp, Artificial
  Synthetic oligonucleotide
cctcacgaaggcagctcggcttactgtgttggcctagcttcgcacgaggggatgc

SEQ ID NO: 279691 - DNA, 54 bp, Artificial
  Synthetic oligonucleotide
cctcacgtggtaaacctgacattgacagcgtaggtcgtaaagtacacccctaag

SEQ ID NO: 279692 - DNA, 55 bp, Artificial
  Synthetic oligonucleotide
cctccactgggtagtgagaacctgtacaatcaagaaaacgagtacagtcacaacc

SEQ ID NO: 279693 - DNA, 55 bp, Artificial
  Synthetic oligonucleotide
cctccaggctgagctagttgatatgatgaagctagggtccctgcctgaggttcca

SEQ ID NO: 279694 - DNA, 55 bp, Artificial
  Synthetic oligonucleotide
cctcccagcctcgtctctgcaagtgggaccctgaagggctctcctgcacgtcatt

SEQ ID NO: 279695 - DNA, 55 bp, Artificial
  Synthetic oligonucleotide
ggggtcttgacgagtccggacgtaagtagcagttgtagtgacatgtaggtcggat

SEQ ID NO: 279696 - DNA, 55 bp, Artificial
  Synthetic oligonucleotide
cctccgatcaaaggaggtagcgacattgaaactggagtcttcaccattggtcggc

SEQ ID NO: 279697 - DNA, 59 bp, Artificial
  Synthetic oligonucleotide
cgacacactcccagtgagatgggaaaggtccctcggggcagtaccaactcaggctgcaa

SEQ ID NO: 279698 - DNA, 57 bp, Artificial
  Synthetic oligonucleotide
tagtggagtagtgtaaagtataggttggtgaactagaacatacgggtgagccagacg

SEQ ID NO: 279699 - DNA, 55 bp, Artificial
  Synthetic oligonucleotide
cctccgtacggtaaagggcgccatcttcgactacaatcctctgatgcgtgacacg

SEQ ID NO: 279700 - DNA, 55 bp, Artificial
  Synthetic oligonucleotide
cctcctacgcatctagattagacttcatgaaaggctactgtcacttgactcgcgc

SEQ ID NO: 279701 - DNA, 55 bp, Artificial
  Synthetic oligonucleotide
cctcgacgaccatgacaactcagaacgcaaatccagagtactgggtcggaccgag

SEQ ID NO: 279702 - DNA, 55 bp, Artificial
  Synthetic oligonucleotide
ccgagtccttctacgaatgctgccccgagtagcagaacgagaaataggagtcggc

SEQ ID NO: 279703 - DNA, 55 bp, Artificial
  Synthetic oligonucleotide
ccgagtgcggggaaaatgacagggtaatggtctactcaagtaccttattcctgcg

SEQ ID NO: 279704 - DNA, 55 bp, Artificial
  Synthetic oligonucleotide
ccgagtgggtgatcttgcaatgtctcgtgggtctcggacatggattgctcttgac

SEQ ID NO: 279705 - DNA, 55 bp, Artificial
  Synthetic oligonucleotide
ccgataacaacatgcaagggtttcaagatgtcctgttcagcgccttcatgctcac

SEQ ID NO: 279706 - DNA, 50 bp, Artificial
  Synthetic oligonucleotide
ccgatactacgaatcaaaccggtacctttcccggaggtgggacaagtaac

SEQ ID NO: 279707 - DNA, 55 bp, Artificial
  Synthetic oligonucleotide
ggtaagctatctcaatgacagtttgtgtgcgtatcgactaacggatttcctgtgc

SEQ ID NO: 279708 - DNA, 55 bp, Artificial
  Synthetic oligonucleotide
ccgatcatttgcttcgcgatgtgatgtctcctggtttaggcttgccgtcaagggc

SEQ ID NO: 279709 - DNA, 60 bp, Artificial
  Synthetic oligonucleotide
tagtggatattgatacatgggagacggctggcgatataaattctagttaccaacgcggag

SEQ ID NO: 279710 - DNA, 55 bp, Artificial
  Synthetic oligonucleotide
ccgatccaaccaaacttttgcgccgacagggtccgtccatgcggggatcatgatc

SEQ ID NO: 279711 - DNA, 55 bp, Artificial
  Synthetic oligonucleotide
ccgatgctttacacacggaggcgacctccgcttgggaaatattctgtccagcagc

SEQ ID NO: 279712 - DNA, 55 bp, Artificial
  Synthetic oligonucleotide
ccgcaaaagcggggactggaggtccgacaggagtttatcaaattctaccaggcgc

SEQ ID NO: 279713 - DNA, 55 bp, Artificial
  Synthetic oligonucleotide
ccgcaaggcttgtgattgctcgaagaaacatcaggagagaccaggtgcgttgaag

SEQ ID NO: 279714 - DNA, 55 bp, Artificial
  Synthetic oligonucleotide
ccgcaatagcgtaccacatgcggatatatcttccgatgacgttgtacgtgtactg

SEQ ID NO: 279715 - DNA, 55 bp, Artificial
  Synthetic oligonucleotide
ccgcactcacacgtcgtccgaaatacttccttgacgcgttccgcagactgcgtcg

SEQ ID NO: 279716 - DNA, 55 bp, Artificial
  Synthetic oligonucleotide
ccgcagatactgtgctccgtctctctcatctgacagcagattgtcgatcccactc

SEQ ID NO: 279717 - DNA, 55 bp, Artificial
  Synthetic oligonucleotide
ccgcagcggcattccatccgtgtagcatggcaacagcgaatgcagcccagttccc

SEQ ID NO: 279718 - DNA, 55 bp, Artificial
  Synthetic oligonucleotide
ggtaagatcccattgtcgtgaacgagaattcaagcaatcggatactgcgctctcg

SEQ ID NO: 279719 - DNA, 55 bp, Artificial
  Synthetic oligonucleotide
ccgcaggctgacagcgctccaacttgagagacaagcattcaggatcaggctccca

SEQ ID NO: 279720 - DNA, 57 bp, Artificial
  Synthetic oligonucleotide
acgatcataagttagcggtagactactcgtttaccaaacgaggtgcgctgattcgaa

SEQ ID NO: 279721 - DNA, 55 bp, Artificial
  Synthetic oligonucleotide
ccgcagtccagcagaggattatgctacacaccactatgaagcgataatgcaaacc

SEQ ID NO: 279722 - DNA, 54 bp, Artificial
  Synthetic oligonucleotide
ccgcagtgaacccttgagtctccaccgtaatcaagaaatgaccggggttggtac

SEQ ID NO: 279723 - DNA, 54 bp, Artificial
  Synthetic oligonucleotide
ggtaagatcattgattagccttcggtaaggaacccttttgaggcgacaaccgcc

SEQ ID NO: 279724 - DNA, 55 bp, Artificial
  Synthetic oligonucleotide
ccgccaccggctattccccgactgaactctcctggtatgaatcggagggcggaac

SEQ ID NO: 279725 - DNA, 53 bp, Artificial
  Synthetic oligonucleotide
ccgccacctggagaaaacacccgacgttaccattacggtcctcaccggcacag

SEQ ID NO: 279726 - DNA, 55 bp, Artificial
  Synthetic oligonucleotide
ccgccacgtcgttcgaagcagataaataaagagcgaaagattgtatcccatgcac

SEQ ID NO: 279727 - DNA, 55 bp, Artificial
  Synthetic oligonucleotide
ggtaactaattcgtacagccaattgcaagggaggcatgtcaccttggggctgaaa

SEQ ID NO: 279728 - DNA, 54 bp, Artificial
  Synthetic oligonucleotide
ggtaacctacccgaaaacctatataggcagattagctaggcctgaaaacctgcc

SEQ ID NO: 279729 - DNA, 55 bp, Artificial
  Synthetic oligonucleotide
ccctgtgcggcaaggctacgtacgagaatggcggaagcctcttacgactagtacg

SEQ ID NO: 279730 - DNA, 55 bp, Artificial
  Synthetic oligonucleotide
cccttccgagttgattcggtgcacgagggaagagtggtcggatacagtgccattg

SEQ ID NO: 279731 - DNA, 59 bp, Artificial
  Synthetic oligonucleotide
tagtgtgccgacgaatagcaagatactatcatgacggtgaacggatattgtaaccccgg

SEQ ID NO: 279732 - DNA, 55 bp, Artificial
  Synthetic oligonucleotide
ggtacaggcccacttactgaattcggtaatcgagacaccattcgtacggcaagat

SEQ ID NO: 279733 - DNA, 55 bp, Artificial
  Synthetic oligonucleotide
cccttcgtatctcaagtcgtgtaggacagccccggtgcacgatatccgctctcct

SEQ ID NO: 279734 - DNA, 55 bp, Artificial
  Synthetic oligonucleotide
cccttgaacgtcattgggcatgtatacgccatgaattgataagaccttcgtactc

SEQ ID NO: 279735 - DNA, 55 bp, Artificial
  Synthetic oligonucleotide
cccttgaagcggaggcactggatcgagagagtatcgcgtggccgggtaaccaact

SEQ ID NO: 279736 - DNA, 55 bp, Artificial
  Synthetic oligonucleotide
cccttgttgctagcaaagtggaactcgtgacttaggctaccgcccatgttcccgg

SEQ ID NO: 279737 - DNA, 54 bp, Artificial
  Synthetic oligonucleotide
ccgaaacctctcccgcccacttttcttgatcggtgtgtagggacaatgctccgg

SEQ ID NO: 279738 - DNA, 50 bp, Artificial
  Synthetic oligonucleotide
ccgaaaggtcctcctttccgtctccagttcggagagtacccgtcctcgtt

SEQ ID NO: 279739 - DNA, 55 bp, Artificial
  Synthetic oligonucleotide
ccgaacgtagagaggtttggcctatattcactcgaggacgcaagtatactccgga

SEQ ID NO: 279740 - DNA, 55 bp, Artificial
  Synthetic oligonucleotide
ccgaagtccgaggatttagtagcattatgcggagaacttaactagctacacatgc

SEQ ID NO: 279741 - DNA, 55 bp, Artificial
  Synthetic oligonucleotide
ccgacacaggcgaccacttcaacagctgcgtttactatcacgccgcgacggggtc

SEQ ID NO: 279742 - DNA, 53 bp, Artificial
  Synthetic oligonucleotide
acgagtcggtattgtctcggaagagcttgtacccgagctcgaagaacccgggt

SEQ ID NO: 279743 - DNA, 55 bp, Artificial
  Synthetic oligonucleotide
ccgacagaaaagatgtaacgactctgctcactaaagccggtcctttcgccatctc

SEQ ID NO: 279744 - DNA, 55 bp, Artificial
  Synthetic oligonucleotide
ccgacatcgcatgtgtctaactagccaaagcggacaacatccacttttctcgggc

SEQ ID NO: 279745 - DNA, 55 bp, Artificial
  Synthetic oligonucleotide
ccgaccaccgactatgatagggtgctaccgaccttaatacgctccgcttcgaaga

SEQ ID NO: 279746 - DNA, 55 bp, Artificial
  Synthetic oligonucleotide
ccgacgacgagaagcttagtccgtgctctggtgaatgcgacattgacgcgtctcc

SEQ ID NO: 279747 - DNA, 55 bp, Artificial
  Synthetic oligonucleotide
ccgagacatcgcagtggctcgatgctggtatgatactcaggcaagatcaatcacg

SEQ ID NO: 279748 - DNA, 55 bp, Artificial
  Synthetic oligonucleotide
ccgagacgatgagctcttaggacgagctagctcaggtacaatatcgccagaccga

SEQ ID NO: 279749 - DNA, 55 bp, Artificial
  Synthetic oligonucleotide
ccgaggctatgctcacgagctatccgcaggtccgggatgattcttccgggttcgg

SEQ ID NO: 279750 - DNA, 55 bp, Artificial
  Synthetic oligonucleotide
ccgagtaaacttacctcgtcgcaatgcatggctgtcagtttatgaagtaacccaa

SEQ ID NO: 279751 - DNA, 55 bp, Artificial
  Synthetic oligonucleotide
ccgagtcagcacttctgtagggcgagctatcggacgttgcgtttcttgaatctgt

SEQ ID NO: 279752 - DNA, 55 bp, Artificial
  Synthetic oligonucleotide
ccgagtccttagacttggtagcagcaggagccttggtgacgggaggctcaggagg

SEQ ID NO: 279753 - DNA, 60 bp, Artificial
  Synthetic oligonucleotide
cgagataagagaacacccttctgggtgtaggcaggcagtatctgataacgttgatcacgg

SEQ ID NO: 279754 - DNA, 55 bp, Artificial
  Synthetic oligonucleotide
ccgctccaacaacgaacgagcgtatctaatcgtcaaacagcccggcttagctcct

SEQ ID NO: 279755 - DNA, 55 bp, Artificial
  Synthetic oligonucleotide
ccgctccaggacccgtactcccagctgaagcacgaagactgtgtcttgtacaccg

SEQ ID NO: 279756 - DNA, 55 bp, Artificial
  Synthetic oligonucleotide
gggttcagcgtaagggattcctagaaatgctcgcactttgtgggctgtgtcgttg

SEQ ID NO: 279757 - DNA, 55 bp, Artificial
  Synthetic oligonucleotide
ccgctccttgtgctccatactacctcttcctgttcacacgatgctgatttcaggc

SEQ ID NO: 279758 - DNA, 55 bp, Artificial
  Synthetic oligonucleotide
ccgctctagcgcatcccagaccctttacaaggttgtaacgctagccatgtagtag

SEQ ID NO: 279759 - DNA, 55 bp, Artificial
  Synthetic oligonucleotide
gggttagctgcatacgctgacaatctacgctaatgaagtgcacgatggcagcggg

SEQ ID NO: 279760 - DNA, 53 bp, Artificial
  Synthetic oligonucleotide
gggttacgatacctttataccgtggcgtccgcgtacctggcttgtgggcctcg

SEQ ID NO: 279761 - DNA, 55 bp, Artificial
  Synthetic oligonucleotide
gggtgttggaagagtcggattcgatgaagttgtgcgagccaatcagtccctgggg

SEQ ID NO: 279762 - DNA, 55 bp, Artificial
  Synthetic oligonucleotide
ccgctgtccccttgctgtccgttggacgcaacccgtaatacagcagctgcgtcgt

SEQ ID NO: 279763 - DNA, 55 bp, Artificial
  Synthetic oligonucleotide
gggtgtccatgtacagcacgaatttcattggctgttgcgtgtagggcagcagttg

SEQ ID NO: 279764 - DNA, 59 bp, Artificial
  Synthetic oligonucleotide
catatgctccgggggtcgactcagacagaccaaacaagtagtggtggagcgaagcccac

SEQ ID NO: 279765 - DNA, 55 bp, Artificial
  Synthetic oligonucleotide
ccgctgttcataacaagcaaatatgcctcatcacagcacgcctctaacaccatgc

SEQ ID NO: 279766 - DNA, 55 bp, Artificial
  Synthetic oligonucleotide
gggtgtcagcgactgaagggcagaacaactaccctgcaccaacatacatcctgag

SEQ ID NO: 279767 - DNA, 55 bp, Artificial
  Synthetic oligonucleotide
ccggacagtacgagacactctattcgaactgcgaccgtgtcagggaatataggag

SEQ ID NO: 279768 - DNA, 55 bp, Artificial
  Synthetic oligonucleotide
ccggataatcctctgtacacaaggcagattccccgagagtcgcttcccgcatggc

SEQ ID NO: 279769 - DNA, 55 bp, Artificial
  Synthetic oligonucleotide
ccggatgcagcgttagatgcagacttccgtcgctgggatgcgcgtggcacacttc

SEQ ID NO: 279770 - DNA, 55 bp, Artificial
  Synthetic oligonucleotide
ccggatggtgacaatcacctaagcttggcggttgctatcagcattggcatacttg

SEQ ID NO: 279771 - DNA, 55 bp, Artificial
  Synthetic oligonucleotide
ccggcaacatacccatagccataaggacgaacgtggcggctttggagcccgttgc

SEQ ID NO: 279772 - DNA, 55 bp, Artificial
  Synthetic oligonucleotide
gggtggccataaaggcgtctgtggctctccgcaagacaagtgacctgcaccctgg

SEQ ID NO: 279773 - DNA, 55 bp, Artificial
  Synthetic oligonucleotide
ccggcaggggatgtaatcacgcaaggggagcataactgacgttatgaggaacaag

SEQ ID NO: 279774 - DNA, 55 bp, Artificial
  Synthetic oligonucleotide
gggtggcagactgactctcacacacggagtttaacccatccaggaagtaggtacc

SEQ ID NO: 279775 - DNA, 60 bp, Artificial
  Synthetic oligonucleotide
tcctgtcgctcttcccaatgcacatccaacgccccactagccgaaatcaacatgaggtgt

SEQ ID NO: 279776 - DNA, 55 bp, Artificial
  Synthetic oligonucleotide
gggtgctgatcttgactattgcagggatgctgtacaggccttacagggctcaggt

SEQ ID NO: 279777 - DNA, 55 bp, Artificial
  Synthetic oligonucleotide
ccggccattactggcggaacagactacgcctccttcatacaggcgcaagtagagc

SEQ ID NO: 279778 - DNA, 55 bp, Artificial
  Synthetic oligonucleotide
gggtttgttcactctcaacggaacagactggattggaagtagtaaggcgacctac

SEQ ID NO: 279779 - DNA, 54 bp, Artificial
  Synthetic oligonucleotide
ccgcccgaacagccacttttcaataggaaaccgcctgtggtagccgattcggac

SEQ ID NO: 279780 - DNA, 53 bp, Artificial
  Synthetic oligonucleotide
ccgccctggaatcggaaggccagtgttgtcgttccgtgggcaagtttaatggg

SEQ ID NO: 279781 - DNA, 55 bp, Artificial
  Synthetic oligonucleotide
ccgccggattatctgattactccgatcgggcttagcaaggctcggcagtcggcaa

SEQ ID NO: 279782 - DNA, 55 bp, Artificial
  Synthetic oligonucleotide
ccgccggcaccgtagcaagtaaccatagcatagtccgcacccctttgtggtggaa

SEQ ID NO: 279783 - DNA, 55 bp, Artificial
  Synthetic oligonucleotide
ccgccgtatcaggatcaacattcggaacctgacacctagcgcacctagccacgac

SEQ ID NO: 279784 - DNA, 55 bp, Artificial
  Synthetic oligonucleotide
ccgcctatagattcacctagtggtattctctccttaggagttcttcggttcttac

SEQ ID NO: 279785 - DNA, 55 bp, Artificial
  Synthetic oligonucleotide
ccgcctcttgagcggatgcaactgtgccggcggtaactggacggacgatgtcaag

SEQ ID NO: 279786 - DNA, 60 bp, Artificial
  Synthetic oligonucleotide
tccttccatactactgcccagcgtctagctgactgagccaggggcgtccctcactccatc

SEQ ID NO: 279787 - DNA, 55 bp, Artificial
  Synthetic oligonucleotide
ccgcctgactgtacgtgcacagaccaggtttcccaatcacgtatagcgtggctcc

SEQ ID NO: 279788 - DNA, 55 bp, Artificial
  Synthetic oligonucleotide
gggttggcgcagtagtgtaagttactgttcgtggcttcttgggtactagtaggtg

SEQ ID NO: 279789 - DNA, 55 bp, Artificial
  Synthetic oligonucleotide
ccgcgatgcttgctataggaggggaatgttgagtgcgtctaggatcggtatgcgg

SEQ ID NO: 279790 - DNA, 55 bp, Artificial
  Synthetic oligonucleotide
ccgcggcatggtgaacgatatcaagcgacgagcgccgtactactggagcgattgg

SEQ ID NO: 279791 - DNA, 55 bp, Artificial
  Synthetic oligonucleotide
ccgcgggacgcagaaacctggagactatgacgctatcttgccgacggtcaaagga

SEQ ID NO: 279792 - DNA, 54 bp, Artificial
  Synthetic oligonucleotide
ccgcgggatccaaatcccctcaaaacacgactacttcacctccggcttcgctta

SEQ ID NO: 279793 - DNA, 55 bp, Artificial
  Synthetic oligonucleotide
ccgcgggccctagcttagaggagccgactaggtcttatatatcttagcggaaggt

SEQ ID NO: 279794 - DNA, 55 bp, Artificial
  Synthetic oligonucleotide
ccgcggttgcggtcgctagctggccttggggcatatatttggtactcgagccagg

SEQ ID NO: 279795 - DNA, 55 bp, Artificial
  Synthetic oligonucleotide
ccgcgtcccaagaccctcagacacccaagctgtttacgccgctgcgtattcgagg

SEQ ID NO: 279796 - DNA, 55 bp, Artificial
  Synthetic oligonucleotide
gggttgacagaacgaatagtgaggcatctgcaggcacacgttagctttccgcacg

SEQ ID NO: 279797 - DNA, 55 bp, Artificial
  Synthetic oligonucleotide
ggcacattctctgttgactaggcttcccccgacgctatccctgaacccacggttt

SEQ ID NO: 279798 - DNA, 55 bp, Artificial
  Synthetic oligonucleotide
ccgctaagcctcctcaaaactatcgtcgatgctggtgcgttagtcccatgccagg

SEQ ID NO: 279799 - DNA, 55 bp, Artificial
  Synthetic oligonucleotide
gggttgaaatggctcggtcgccaaagtatgtcttgttactacttcgtgttgcgaa

SEQ ID NO: 279800 - DNA, 55 bp, Artificial
  Synthetic oligonucleotide
gggttctggagagccctaagaggccgtagtgacatctgattagttggatcttgac

SEQ ID NO: 279801 - DNA, 55 bp, Artificial
  Synthetic oligonucleotide
ccgctagcggtgtcttccctggtgagctcagttgcgagaactgctatgctaaggg

SEQ ID NO: 279802 - DNA, 55 bp, Artificial
  Synthetic oligonucleotide
ccgctaggactaaacatgaagtgtgttacgcagtcaagtgcatagcaatgtagat

SEQ ID NO: 279803 - DNA, 55 bp, Artificial
  Synthetic oligonucleotide
cgcattatctcaacgctgtgacctgctcgcgtgttcgaaaacggtaactgacggc

SEQ ID NO: 279804 - DNA, 55 bp, Artificial
  Synthetic oligonucleotide
gggctctcttggcaggcggacagggaagtagatcacatcacgcagggactccccc

SEQ ID NO: 279805 - DNA, 55 bp, Artificial
  Synthetic oligonucleotide
gggctcagatactatccgtggacaaggcttgggtagacaggggttgtctcacctg

SEQ ID NO: 279806 - DNA, 55 bp, Artificial
  Synthetic oligonucleotide
cgccagcaatatggtatttgaactcattgtcccagatgcttagacatcgcttctc

SEQ ID NO: 279807 - DNA, 55 bp, Artificial
  Synthetic oligonucleotide
gggctattggcttgttaagaatcggccaagtatgaccccaacggctacactcagg

SEQ ID NO: 279808 - DNA, 56 bp, Artificial
  Synthetic oligonucleotide
ctagggatgtccatcacggtaattaggggccctgacaagaagagaacgaaagcgtc

SEQ ID NO: 279809 - DNA, 59 bp, Artificial
  Synthetic oligonucleotide
acactcgctcttgcgatcgcagttcgaggtgcaatttttcccgcagaactcgggaccaa

SEQ ID NO: 279810 - DNA, 55 bp, Artificial
  Synthetic oligonucleotide
cgccatattgtggcagtccgggagggactaacagcatggagtccggaacagaaga

SEQ ID NO: 279811 - DNA, 55 bp, Artificial
  Synthetic oligonucleotide
cgcccatggtacagagtagcacaagagctgtcgctgatgtcagttggtgccgagg

SEQ ID NO: 279812 - DNA, 55 bp, Artificial
  Synthetic oligonucleotide
cgccgctcttcatccagactacgggctcgatcaagtcaccggacacttcgtagtg

SEQ ID NO: 279813 - DNA, 55 bp, Artificial
  Synthetic oligonucleotide
cgccggtagaaggtcgactgtgcttgtagtatagccgagtgccccgagtactact

SEQ ID NO: 279814 - DNA, 55 bp, Artificial
  Synthetic oligonucleotide
cgccggtcccgtgaatacgtctggaaataccgctcgcagtcggtccgaacatacg

SEQ ID NO: 279815 - DNA, 55 bp, Artificial
  Synthetic oligonucleotide
cgcctaacagtctaggcgatctagttgttcgcttgtcatcctcctaagtacctac

SEQ ID NO: 279816 - DNA, 55 bp, Artificial
  Synthetic oligonucleotide
cgcctacccaacccattctcctactactatatatagtctcagcgcctaatgcaac

SEQ ID NO: 279817 - DNA, 53 bp, Artificial
  Synthetic oligonucleotide
cgcctccaaagtgccgaaagtaacggtatacgagggtgggccacgcgaaacac

SEQ ID NO: 279818 - DNA, 55 bp, Artificial
  Synthetic oligonucleotide
gggctattaggagcggaaatcacgtatggcatgaaaccggaagtacaaacggatc

SEQ ID NO: 279819 - DNA, 55 bp, Artificial
  Synthetic oligonucleotide
cgcctcttccgactaagtttcctccctcaatggaggtagctagcgcgcaacagcc

SEQ ID NO: 279820 - DNA, 60 bp, Artificial
  Synthetic oligonucleotide
gcaactctgatggcgctgaataggtatgctcgataccaaatcatccgcgcggaaatcata

SEQ ID NO: 279821 - DNA, 55 bp, Artificial
  Synthetic oligonucleotide
cgccttgctgtactaagagccttaccacatcgagatgaccatgtgaaaccgctcg

SEQ ID NO: 279822 - DNA, 55 bp, Artificial
  Synthetic oligonucleotide
cgcgaagtggaggaagtgtgatctagcaagctaggagggatcttggtatatcggg

SEQ ID NO: 279823 - DNA, 55 bp, Artificial
  Synthetic oligonucleotide
cgcgacatgcccaatttaggacaattctcccagtatccccaaagaacgcggcagt

SEQ ID NO: 279824 - DNA, 55 bp, Artificial
  Synthetic oligonucleotide
gggctatcgctaggaactacaacaccgcggaatctggtcgctgtgcaaagcctgc

SEQ ID NO: 279825 - DNA, 55 bp, Artificial
  Synthetic oligonucleotide
cgcgattggtgtgcagagatatccgcgagaaaatctaggttagacgagagtcccc

SEQ ID NO: 279826 - DNA, 55 bp, Artificial
  Synthetic oligonucleotide
cgcgcagttgtttccacttcgtggaaaatcttagtgggtattcgtgagcgccaga

SEQ ID NO: 279827 - DNA, 55 bp, Artificial
  Synthetic oligonucleotide
cgcgccaggtgcgggaacgcatcgaaacattgcgtgaccgaagattgattgagaa

SEQ ID NO: 279828 - DNA, 55 bp, Artificial
  Synthetic oligonucleotide
cgcgccgcagggatctaacaagaaatctcgcatcccttgaggcgttcaccgtctc

SEQ ID NO: 279829 - DNA, 55 bp, Artificial
  Synthetic oligonucleotide
cgcgcttcggcggactgacgagaccacgcgacacttctgggattgacgcgatgtt

SEQ ID NO: 279830 - DNA, 55 bp, Artificial
  Synthetic oligonucleotide
cgcggataaactttggcccacttctgaattgaacgatggcgtggggatgcaagag

SEQ ID NO: 279831 - DNA, 60 bp, Artificial
  Synthetic oligonucleotide
catattgtgaacaagatctaatctccaaatcagaattaaacccacataaaataactgcta

SEQ ID NO: 279832 - DNA, 55 bp, Artificial
  Synthetic oligonucleotide
cgatgtgttccagtacgacaacccggagccataccacataaatgcgcatatcttg

SEQ ID NO: 279833 - DNA, 54 bp, Artificial
  Synthetic oligonucleotide
cgattaacgttcatacagcccactgccaaccttaacgttccggctgaccccgtc

SEQ ID NO: 279834 - DNA, 55 bp, Artificial
  Synthetic oligonucleotide
cgattatggagggtgcgagcaacaggtccgcacaaatatgtacgttggtgcatac

SEQ ID NO: 279835 - DNA, 55 bp, Artificial
  Synthetic oligonucleotide
cgattcaaggcaacagctataaggtctggaacatcaggtaagccactatcaagtg

SEQ ID NO: 279836 - DNA, 55 bp, Artificial
  Synthetic oligonucleotide
cgattcatgctatttggaacgtggtgttgtgctgaattccaacggtcggcgaaac

SEQ ID NO: 279837 - DNA, 54 bp, Artificial
  Synthetic oligonucleotide
cgattcctaagttctttataagcgaaagagtccgggcacttcagactagttcct

SEQ ID NO: 279838 - DNA, 55 bp, Artificial
  Synthetic oligonucleotide
cgattgatacagtacccgagaattgtctgcgcctgtggcaatggaatgtcgcgtg

SEQ ID NO: 279839 - DNA, 55 bp, Artificial
  Synthetic oligonucleotide
gggctttctatcccacaagccatggactatcactattctgatgggcctagggtgt

SEQ ID NO: 279840 - DNA, 55 bp, Artificial
  Synthetic oligonucleotide
cgatttgtccgagttgactatcgccaaagtgcacacggcattccgccgcggagac

SEQ ID NO: 279841 - DNA, 55 bp, Artificial
  Synthetic oligonucleotide
cgcaaacgaccggcgctctgctatacaaccattcttgcaggggccgcgggactgt

SEQ ID NO: 279842 - DNA, 60 bp, Artificial
  Synthetic oligonucleotide
gcaagagttaaaatacaggatgattgcgagtgtataaggtagttgtatgataacaatgaa

SEQ ID NO: 279843 - DNA, 55 bp, Artificial
  Synthetic oligonucleotide
gggctgggaggtcgctaccattcggtctaccttacctatcgactaactaggtcgc

SEQ ID NO: 279844 - DNA, 55 bp, Artificial
  Synthetic oligonucleotide
cgcacaattttgagaggaagtaggccaggtcgagacttggctctgtaggccacaa

SEQ ID NO: 279845 - DNA, 55 bp, Artificial
  Synthetic oligonucleotide
gggctggaggcaagaatggcagcggcttcacatgggtagctgacaccaatgtcct

SEQ ID NO: 279846 - DNA, 55 bp, Artificial
  Synthetic oligonucleotide
cgcaccccgctaactgactgccactaccctaagcgccaacgtcgcggagtagaac

SEQ ID NO: 279847 - DNA, 55 bp, Artificial
  Synthetic oligonucleotide
cgcacctcttgggacactgcccagaagatcaaacatcgggttatccttgcggtga

SEQ ID NO: 279848 - DNA, 55 bp, Artificial
  Synthetic oligonucleotide
cgcacgccaggagtacggaaaggtacatgcagcactggcaccatactataatgac

SEQ ID NO: 279849 - DNA, 55 bp, Artificial
  Synthetic oligonucleotide
gggctgccggctgtttcctgggaactactagcgcctggtaagttgtctggaatgg

SEQ ID NO: 279850 - DNA, 55 bp, Artificial
  Synthetic oligonucleotide
cgcacttgtgcgctatttaactcataatatagtgaaccttggggctaagcctccc

SEQ ID NO: 279851 - DNA, 55 bp, Artificial
  Synthetic oligonucleotide
cgcagcatacgtcgacgcggcatatcgaggtcaggggtgccattactccatgctt

SEQ ID NO: 279852 - DNA, 55 bp, Artificial
  Synthetic oligonucleotide
cgcagcgggttcccctcacgatctccttagactcggaataccgtgactcgtgctc

SEQ ID NO: 279853 - DNA, 60 bp, Artificial
  Synthetic oligonucleotide
ctacacctctgagattgtcgcgtaactgtcagtccctcatgcggcggccaactgaagaca

SEQ ID NO: 279854 - DNA, 55 bp, Artificial
  Synthetic oligonucleotide
cgcaggatgatagtacttcagggctgagtgggactggcgagccaacccacgagac

SEQ ID NO: 279855 - DNA, 55 bp, Artificial
  Synthetic oligonucleotide
cgcatgcaagaggtccctctgtagtcggggtggaggatctagggttacaagacgg

SEQ ID NO: 279856 - DNA, 55 bp, Artificial
  Synthetic oligonucleotide
cgctcgtggaagtttaacctacggcccgagctcctgatccgccaactagcttgcg

SEQ ID NO: 279857 - DNA, 55 bp, Artificial
  Synthetic oligonucleotide
cgctcgttatggacacggtagtagccatggttgcgagggctgtacaatgattgcc

SEQ ID NO: 279858 - DNA, 55 bp, Artificial
  Synthetic oligonucleotide
cgctctcgttgggccgcgactcgaacgaagattgtcgctgctacgtatgtggcgt

SEQ ID NO: 279859 - DNA, 55 bp, Artificial
  Synthetic oligonucleotide
cgctgaaatatcgagaccatgagcgtgtaactgtcgcccgcgtcttgtcaggtga

SEQ ID NO: 279860 - DNA, 55 bp, Artificial
  Synthetic oligonucleotide
cgctgaagcgcctgtttagactgcaattgagccaacagatgcgataacacggtcg

SEQ ID NO: 279861 - DNA, 55 bp, Artificial
  Synthetic oligonucleotide
cgctgagtcatcgggtgttcctgagatgaggtgcagtctggttatctacagttag

SEQ ID NO: 279862 - DNA, 55 bp, Artificial
  Synthetic oligonucleotide
cgctgataagtagactactagtcatgcactacggcaagtccatgagtcccataag

SEQ ID NO: 279863 - DNA, 55 bp, Artificial
  Synthetic oligonucleotide
cgctgccgacgagaacttcggtgacactctctccctgtatagcggctctgcctct

SEQ ID NO: 279864 - DNA, 60 bp, Artificial
  Synthetic oligonucleotide
tcgactggcacagcaactgactcgtcagtcgacacggttctctgtcagcaacaatgcgga

SEQ ID NO: 279865 - DNA, 55 bp, Artificial
  Synthetic oligonucleotide
cgctgcctcatgggtcatgtagtatgagccaccagagaccctgatcggaatccgg

SEQ ID NO: 279866 - DNA, 55 bp, Artificial
  Synthetic oligonucleotide
cgctgctcacacgtatgccaaacataccgaacactgcgaagcctgtcgccgacag

SEQ ID NO: 279867 - DNA, 55 bp, Artificial
  Synthetic oligonucleotide
cgctgtagagttcggccgtaagggtgcactgggaatcggttctcgcattggaggt

SEQ ID NO: 279868 - DNA, 53 bp, Artificial
  Synthetic oligonucleotide
cgcttagaagaggaccgtccagttaaccgggagccccaggcagaccacccaag

SEQ ID NO: 279869 - DNA, 55 bp, Artificial
  Synthetic oligonucleotide
cgcttattaccactttggagtagtgcgagcgctactggataatggggttctgccg

SEQ ID NO: 279870 - DNA, 55 bp, Artificial
  Synthetic oligonucleotide
cgcttcgatggcccagatagtgtctatcgggcagttatttcggatctgcgctagg

SEQ ID NO: 279871 - DNA, 55 bp, Artificial
  Synthetic oligonucleotide
cgcttctccacgaggaagcttcgtctctagctcgcgaaacgaagtgacgaccgtc

SEQ ID NO: 279872 - DNA, 55 bp, Artificial
  Synthetic oligonucleotide
cgcttgttcctcatcgtacctgtacaagttaagggcaatctaacaatatacagac

SEQ ID NO: 279873 - DNA, 55 bp, Artificial
  Synthetic oligonucleotide
cggaaaggcgagactatcaggttgctttcaccgcttgactaccaaactgcatgta

SEQ ID NO: 279874 - DNA, 55 bp, Artificial
  Synthetic oligonucleotide
cggaacatggcgattgtctcgctaagcacagcttgtgtatgtacgagcacaaaac

SEQ ID NO: 279875 - DNA, 60 bp, Artificial
  Synthetic oligonucleotide
ctacaattgatcgattttggatggtagatcggaacccatggagcagtgaacttcactatg

SEQ ID NO: 279876 - DNA, 55 bp, Artificial
  Synthetic oligonucleotide
cggaacgatcccggcttgataaacgagttgctactcctcacacgccccagttgga

SEQ ID NO: 279877 - DNA, 54 bp, Artificial
  Synthetic oligonucleotide
cggaagatgtttggaggcgcaactcgacaggtaaattccgtacagtacaaaccg

SEQ ID NO: 279878 - DNA, 55 bp, Artificial
  Synthetic oligonucleotide
cggaaggccaccgatcgacccgtcaccacaacttgaacgcgggcgcaagactacc

SEQ ID NO: 279879 - DNA, 55 bp, Artificial
  Synthetic oligonucleotide
cggaagttgcgaaacctaacgagtttgaccctttcaccaaatcactcatccagac

SEQ ID NO: 279880 - DNA, 55 bp, Artificial
  Synthetic oligonucleotide
cggacaaggctgacaattagcagcacggtagccaggactgtatggaccttaggcg

SEQ ID NO: 279881 - DNA, 55 bp, Artificial
  Synthetic oligonucleotide
cggacagtggttatcagtatgcctatctccatgacgcctgccgaacaccgaacga

SEQ ID NO: 279882 - DNA, 55 bp, Artificial
  Synthetic oligonucleotide
cgcgggagcctttgttgcctccggttgaggtacagtaggggcaacttgggtctga

SEQ ID NO: 279883 - DNA, 55 bp, Artificial
  Synthetic oligonucleotide
cgcgggttgactgggtagatgggcgaatggggttgtggatagaatcaactctagg

SEQ ID NO: 279884 - DNA, 55 bp, Artificial
  Synthetic oligonucleotide
cgcggtcacgtctcgatgatactggtttcccttctcgcgccagagtcgccagacg

SEQ ID NO: 279885 - DNA, 55 bp, Artificial
  Synthetic oligonucleotide
cgcggtccctttcaagccgctcagcgcgactgtcacgacatctcctaggaccaca

SEQ ID NO: 279886 - DNA, 55 bp, Artificial
  Synthetic oligonucleotide
tcgagagccctgtctagggccctttctaagccctattaaagaccctctgcccctc

SEQ ID NO: 279887 - DNA, 55 bp, Artificial
  Synthetic oligonucleotide
cgcggtggcatgttcaccacactatccgagggtctttcgtttgtttccagactgc

SEQ ID NO: 279888 - DNA, 55 bp, Artificial
  Synthetic oligonucleotide
cgcggttttaacacattcgtcttgaggccacactgtggcgaggctggggatcccg

SEQ ID NO: 279889 - DNA, 55 bp, Artificial
  Synthetic oligonucleotide
cgcgtactgaagtcggctgagcggcaatacccagtccttgagtccgtgaacgtgc

SEQ ID NO: 279890 - DNA, 55 bp, Artificial
  Synthetic oligonucleotide
cgcgtctcatctaggcaagcctactgctaaccctgcatatacgcgcggagagcag

SEQ ID NO: 279891 - DNA, 55 bp, Artificial
  Synthetic oligonucleotide
cgcgtctcctcacggcccatggattctgatcatgtgagagtaggtctcgaaccaa

SEQ ID NO: 279892 - DNA, 55 bp, Artificial
  Synthetic oligonucleotide
cgcgtgagcagccttctgcaggtgatagcgggcaagaagggagaccagaaccgac

SEQ ID NO: 279893 - DNA, 55 bp, Artificial
  Synthetic oligonucleotide
cgcgttggtaactagaatttatatcgccagccgtctcccatgtatcaatatccac

SEQ ID NO: 279894 - DNA, 55 bp, Artificial
  Synthetic oligonucleotide
cgctaccctaggcccggaaacaatcctgcttacgcagtctggtgatgtcaagact

SEQ ID NO: 279895 - DNA, 55 bp, Artificial
  Synthetic oligonucleotide
cgctactcacgcatatcgtatccacgaaaggtatccctcgggctcaaatcaatat

SEQ ID NO: 279896 - DNA, 53 bp, Artificial
  Synthetic oligonucleotide
gggcgttaacacagtattaattacctcgacaaaagggagattaactaggatcc

SEQ ID NO: 279897 - DNA, 60 bp, Artificial
  Synthetic oligonucleotide
gcaatatacccaatgcagtaatcgcacagtgacatttccgatcgtccgtcggagattcca

SEQ ID NO: 279898 - DNA, 55 bp, Artificial
  Synthetic oligonucleotide
cgctagtactagggacggacagggctccgaaattataccatgcgtagggagtagg

SEQ ID NO: 279899 - DNA, 55 bp, Artificial
  Synthetic oligonucleotide
cgctatacgtattcgcttaccggtactaagctatcttaggtgagtttcgcttata

SEQ ID NO: 279900 - DNA, 55 bp, Artificial
  Synthetic oligonucleotide
cgctatctcattgaacggaatccccgaaaacaactcctcccacattatatccgcc

SEQ ID NO: 279901 - DNA, 55 bp, Artificial
  Synthetic oligonucleotide
cgctcactgatcttgttctctccgtcagctatgagattgagatatgatcgttgtc

SEQ ID NO: 279902 - DNA, 55 bp, Artificial
  Synthetic oligonucleotide
cgctcatctgccacttacatctcttgataacactgctgtatgaggatgcgacgcg

SEQ ID NO: 279903 - DNA, 55 bp, Artificial
  Synthetic oligonucleotide
cgctcatgcatgaggtacctcggtagtaatcaatgatcgtcgtctagtgtacatg

SEQ ID NO: 279904 - DNA, 55 bp, Artificial
  Synthetic oligonucleotide
cgctcgccttctgtgccttctatctactggtctggcgaacttgagcaccagccag

SEQ ID NO: 279905 - DNA, 55 bp, Artificial
  Synthetic oligonucleotide
cgctcgcggccattcattccccgacaacatttcgagtgatcctggacgctttggt

SEQ ID NO: 279906 - DNA, 55 bp, Artificial
  Synthetic oligonucleotide
cgctcgtacgaacttccccaggatatccggacagcggaagcctcagcatcaactt

SEQ ID NO: 279907 - DNA, 55 bp, Artificial
  Synthetic oligonucleotide
ccttgagcaaggaatcagggaacttggaaatcaaggctctaacctgatcggctcg

SEQ ID NO: 279908 - DNA, 57 bp, Artificial
  Synthetic oligonucleotide
acacgagagggaagcttaagcatgtcagtaaatgcggaccgaaatcttaggaacaac

SEQ ID NO: 279909 - DNA, 55 bp, Artificial
  Synthetic oligonucleotide
ccttgcctttctcggagataacctgatcgtatccattagctagactacggagtgc

SEQ ID NO: 279910 - DNA, 55 bp, Artificial
  Synthetic oligonucleotide
ccttgctcactgccagagacgagagctaacggaacagattgtcgaacggctgggc

SEQ ID NO: 279911 - DNA, 55 bp, Artificial
  Synthetic oligonucleotide
ccttgctcccatcagcctgaggttcgtccgatgttgaaagattagcgtttcggag

SEQ ID NO: 279912 - DNA, 55 bp, Artificial
  Synthetic oligonucleotide
ccttgcttgtcgggagactatcagatgattatcttgtctagtagatagatattgt

SEQ ID NO: 279913 - DNA, 55 bp, Artificial
  Synthetic oligonucleotide
ccttgtcctgtgagtcccagctttgacgaagtttggcctaaatgactgacaattc

SEQ ID NO: 279914 - DNA, 55 bp, Artificial
  Synthetic oligonucleotide
cctttgggacacgtcagaaggcggggcagtgggtgagtttagaggcttcaggtac

SEQ ID NO: 279915 - DNA, 55 bp, Artificial
  Synthetic oligonucleotide
ccttttataccttgatctcactctgagaaacgatgtattagaccagggagggttg

SEQ ID NO: 279916 - DNA, 53 bp, Artificial
  Synthetic oligonucleotide
cgaaaacgggcagccgatgggcccagctcccggtcgggaaaggaacaaagaga

SEQ ID NO: 279917 - DNA, 55 bp, Artificial
  Synthetic oligonucleotide
cgaaaaggctgccctaagaagtcgtcttcggtgccttccaaacgaacagtagctc

SEQ ID NO: 279918 - DNA, 55 bp, Artificial
  Synthetic oligonucleotide
cgaaatatgagatcaatgaggaggaaatggatcgcatatcgaagcttgcgcgtat

SEQ ID NO: 279919 - DNA, 60 bp, Artificial
  Synthetic oligonucleotide
tattagaggttgattgaactacttttgtatctagctcgctttcaaatgcatctcatattt

SEQ ID NO: 279920 - DNA, 60 bp, Artificial
  Synthetic oligonucleotide
cctgtgctatctcgtagagctttaagttatgacttatgacagaataatgcctcgtctagc

SEQ ID NO: 279921 - DNA, 55 bp, Artificial
  Synthetic oligonucleotide
cgaaattctatccagtgcacctctttagggaaaaggagcgctgacatgtggagga

SEQ ID NO: 279922 - DNA, 55 bp, Artificial
  Synthetic oligonucleotide
ggggccatatcagtggattaagagcaaggccgtggtggcatttatctaggaccgc

SEQ ID NO: 279923 - DNA, 55 bp, Artificial
  Synthetic oligonucleotide
cgaacctcctcgttctcgttggactgtaagttatccagctaccaaactgtatgac

SEQ ID NO: 279924 - DNA, 55 bp, Artificial
  Synthetic oligonucleotide
cgaacgagccatgtacggaattgggtgcaacgttatgtgaagatcatgtccagca

SEQ ID NO: 279925 - DNA, 55 bp, Artificial
  Synthetic oligonucleotide
cgaacgccggccctctgatatcctgtcctgctaaaccacagtaaaacaccgcacc

SEQ ID NO: 279926 - DNA, 55 bp, Artificial
  Synthetic oligonucleotide
cgaacgtctcaggtttgtgcggagctctggtgagggtgtcgtgtgaggactctcc

SEQ ID NO: 279927 - DNA, 55 bp, Artificial
  Synthetic oligonucleotide
cgaagaccaagtgctctcgagcctgtctcactagacttccggcccacgagccgtc

SEQ ID NO: 279928 - DNA, 55 bp, Artificial
  Synthetic oligonucleotide
cgaagacggctacatgcgagactcgatcaattgaccccagggttggagcaccgcc

SEQ ID NO: 279929 - DNA, 55 bp, Artificial
  Synthetic oligonucleotide
ggggcacagacctactaggctagttcattgattaatttagattgacctccatcca

SEQ ID NO: 279930 - DNA, 55 bp, Artificial
  Synthetic oligonucleotide
cgaagattcactgattcgacccttaatccgaccctagacgaccctaggaatgctg

SEQ ID NO: 279931 - DNA, 60 bp, Artificial
  Synthetic oligonucleotide
ctacaaaaaactcagcaaatacggaacataatagaattaatatatcagacatgcttaata

SEQ ID NO: 279932 - DNA, 53 bp, Artificial
  Synthetic oligonucleotide
cgaagcacttcaaccctcattaagaaatggtaaccgtggttaaaatggggaca

SEQ ID NO: 279933 - DNA, 55 bp, Artificial
  Synthetic oligonucleotide
ggggattcccagcgtaatcaatagcgtccatatacccatgtaccgtgctcggtcc

SEQ ID NO: 279934 - DNA, 55 bp, Artificial
  Synthetic oligonucleotide
cgaaggacagtatggggactacaagtctacaattgacctcgtcctagcctccgac

SEQ ID NO: 279935 - DNA, 55 bp, Artificial
  Synthetic oligonucleotide
cctggagctacactttgacgtgaatggaacaagtcatttcggctgcaatgggccc

SEQ ID NO: 279936 - DNA, 55 bp, Artificial
  Synthetic oligonucleotide
cctggatcctctatcagtggctagtctcggtcaaacatcccggaggctcaacggt

SEQ ID NO: 279937 - DNA, 55 bp, Artificial
  Synthetic oligonucleotide
ggggcttatacggttgtacttgagtctttctccatcactcccgatgctacttgga

SEQ ID NO: 279938 - DNA, 55 bp, Artificial
  Synthetic oligonucleotide
cctggcgaccacctgctgtgacatggatattgcgtagtgatgggtccaattctgg

SEQ ID NO: 279939 - DNA, 55 bp, Artificial
  Synthetic oligonucleotide
ggggctcattctggttctactgtgcagacttcaaacgacacgaggggtactagct

SEQ ID NO: 279940 - DNA, 55 bp, Artificial
  Synthetic oligonucleotide
cctggttaagctcgaatctgcaaacatgaggctccggatacgagaggtatgcggg

SEQ ID NO: 279941 - DNA, 55 bp, Artificial
  Synthetic oligonucleotide
cctgtagcgattttagtcttcaacccaccgacgtgcgagatgtggaacactcacc

SEQ ID NO: 279942 - DNA, 60 bp, Artificial
  Synthetic oligonucleotide
acacgaagaccgtggcttgtgaggcccgaatgtcgggccagaagttgcgcacactgaatc

SEQ ID NO: 279943 - DNA, 55 bp, Artificial
  Synthetic oligonucleotide
cctgtatgagcgctgcctggtcacttgtgcctattatgaagagttctggttccga

SEQ ID NO: 279944 - DNA, 55 bp, Artificial
  Synthetic oligonucleotide
cctgtgcattggaaccagtgtaggtacgtacgccgagtggccgagtcttttattg

SEQ ID NO: 279945 - DNA, 55 bp, Artificial
  Synthetic oligonucleotide
ggggcggcccatgatagcgcgataccgataggcagagaatgcaccaggcaagaca

SEQ ID NO: 279946 - DNA, 55 bp, Artificial
  Synthetic oligonucleotide
cctgttcaggacgggccgtgagctccagatgcgagatgaacacactcaggttgcg

SEQ ID NO: 279947 - DNA, 54 bp, Artificial
  Synthetic oligonucleotide
ggggcgccgacagagttcaggtactatgcgtgggcggggaagggttgacgtctt

SEQ ID NO: 279948 - DNA, 55 bp, Artificial
  Synthetic oligonucleotide
ccttaagcgatgacacggcactggtgggttgtgatcttgcctgagtagcgacacg

SEQ ID NO: 279949 - DNA, 55 bp, Artificial
  Synthetic oligonucleotide
ccttacaactactatggcacctatggccaatcccaggatgctaccgtagcccaga

SEQ ID NO: 279950 - DNA, 55 bp, Artificial
  Synthetic oligonucleotide
ccttacatccccatgttcacttgtgttcgtttacttacaagctctcctcgttcct

SEQ ID NO: 279951 - DNA, 55 bp, Artificial
  Synthetic oligonucleotide
ccttatagtcatacgccaccgttactcccttacgcggtactggatcttcccatgc

SEQ ID NO: 279952 - DNA, 55 bp, Artificial
  Synthetic oligonucleotide
ccttatgcaaccttccagggcaccttgctggaggctagtaagactagtattggtg

SEQ ID NO: 279953 - DNA, 57 bp, Artificial
  Synthetic oligonucleotide
gcaattccactcagaagttttcgggacttttttcataggataggcgcaacgtataga

SEQ ID NO: 279954 - DNA, 55 bp, Artificial
  Synthetic oligonucleotide
ccttcaaatgcattcgcagatgggtcatcctttctgtcacatgccggcaatattc

SEQ ID NO: 279955 - DNA, 55 bp, Artificial
  Synthetic oligonucleotide
ccttccttttgaatggagttggtatggtgctaacctggtggtgatagtttctttg

SEQ ID NO: 279956 - DNA, 55 bp, Artificial
  Synthetic oligonucleotide
ccttcgcccacctagagccggagactctatattaggtctctatgaagccagcccc

SEQ ID NO: 279957 - DNA, 55 bp, Artificial
  Synthetic oligonucleotide
ggggccattcgtgggcatcaatacctcctatagtgtcgactttgtatgcagcccg

SEQ ID NO: 279958 - DNA, 55 bp, Artificial
  Synthetic oligonucleotide
ccttgacacgatacctgccatgtttgcacttacgttcttcggggtacttcacgtg

SEQ ID NO: 279959 - DNA, 55 bp, Artificial
  Synthetic oligonucleotide
ccttgacatactgttgaagaatctactactcaagataattagggcacgtggtagc

SEQ ID NO: 279960 - DNA, 55 bp, Artificial
  Synthetic oligonucleotide
cgagcacacactttactttttctacgggtccgaagactgagtcctgagagaatgg

SEQ ID NO: 279961 - DNA, 55 bp, Artificial
  Synthetic oligonucleotide
cgagcaccatgtgcagtagttcgaggggtaatctgtctagcatcgtgagatcgat

SEQ ID NO: 279962 - DNA, 55 bp, Artificial
  Synthetic oligonucleotide
cgagcagcgtacatcttccgccacttgcgttgactgagaatcttttgtccgctct

SEQ ID NO: 279963 - DNA, 55 bp, Artificial
  Synthetic oligonucleotide
ggggacatggctatctggtgtagttttatctagacttagaacctcggttggttct

SEQ ID NO: 279964 - DNA, 60 bp, Artificial
  Synthetic oligonucleotide
gcaattccatgccgtaatgcgatttacacatttgtggcagttccaaaccttcgtgtgctc

SEQ ID NO: 279965 - DNA, 55 bp, Artificial
  Synthetic oligonucleotide
cgagccacccagagacgtcagcaagcgaccgtgagtggcctatcgtcccatgcac

SEQ ID NO: 279966 - DNA, 55 bp, Artificial
  Synthetic oligonucleotide
cgagccacccatggtgagacaccacggggacatccaaacatcgaggtgtgctgag

SEQ ID NO: 279967 - DNA, 55 bp, Artificial
  Synthetic oligonucleotide
cgagctatctcttcctctgcccgaccacgcttaattcgtggcgggtctatgtcta

SEQ ID NO: 279968 - DNA, 55 bp, Artificial
  Synthetic oligonucleotide
cgagctatggcgcgtcggtatatgatcttgagtgtcgctagggaagagaaagatt

SEQ ID NO: 279969 - DNA, 55 bp, Artificial
  Synthetic oligonucleotide
cgagctcccctatacaaatactgtcgcatgctctccgtcccttccacatgactac

SEQ ID NO: 279970 - DNA, 55 bp, Artificial
  Synthetic oligonucleotide
cgagctggactagtaccctataggtcttaagacgatgatcaactgaaatcgtagg

SEQ ID NO: 279971 - DNA, 55 bp, Artificial
  Synthetic oligonucleotide
cgaggagtaagtcttcgctccgtgctttctgcactatcacattcagtgcgtcgca

SEQ ID NO: 279972 - DNA, 55 bp, Artificial
  Synthetic oligonucleotide
cgagggaattggacgtgcagagtttgtaacggccactgcgacagtacgggcagac

SEQ ID NO: 279973 - DNA, 55 bp, Artificial
  Synthetic oligonucleotide
cgaggtgtattcgtttattggagatgcaaagcggttcgtcctgaaaatgggcaag

SEQ ID NO: 279974 - DNA, 55 bp, Artificial
  Synthetic oligonucleotide
cgagtcagggtaacttgctcactggttacgacgcagcccagtgtacgccaccacg

SEQ ID NO: 279975 - DNA, 60 bp, Artificial
  Synthetic oligonucleotide
gcacaaatcgaaccagctctcgttgcacaaacagagactagggcgcgaagtatcctgacc

SEQ ID NO: 279976 - DNA, 55 bp, Artificial
  Synthetic oligonucleotide
ggggaaatcagcgatacatcggacacgtctttgccactaaacataaacgacgtcg

SEQ ID NO: 279977 - DNA, 55 bp, Artificial
  Synthetic oligonucleotide
cgagtgtcaaggggtgctgctcgagtcttctataccacaatctccgctggcagtg

SEQ ID NO: 279978 - DNA, 55 bp, Artificial
  Synthetic oligonucleotide
cgatcgcatgctccctatcccttccacatgactactatcgactatgagtcaccag

SEQ ID NO: 279979 - DNA, 55 bp, Artificial
  Synthetic oligonucleotide
cgatcgtttgtcgtatgaatagaagcacgcgaagacctgactcaagatttcggga

SEQ ID NO: 279980 - DNA, 55 bp, Artificial
  Synthetic oligonucleotide
cgatgatataatgcggttatattgcccatgcacggagtatagtggccactcaccg

SEQ ID NO: 279981 - DNA, 55 bp, Artificial
  Synthetic oligonucleotide
cgatggaaggtgaacttcagtgtatagccgggtggtgcataggggtacggagtgc

SEQ ID NO: 279982 - DNA, 55 bp, Artificial
  Synthetic oligonucleotide
cgatggaagtgttcctatgagctcctcgagcctaatcactgagtagatgcagtgc

SEQ ID NO: 279983 - DNA, 55 bp, Artificial
  Synthetic oligonucleotide
cgatgggtctcgtactgagtcaccaatgtgccaaggaaagttggccaaatcttgg

SEQ ID NO: 279984 - DNA, 55 bp, Artificial
  Synthetic oligonucleotide
ggggatccacatcgatctcaagctacgagcgcttatccccgaggcttgctcgcca

SEQ ID NO: 279985 - DNA, 55 bp, Artificial
  Synthetic oligonucleotide
cgaaggattcatatggcgagacggataagggttgcttaatggaggtaaagggcga

SEQ ID NO: 279986 - DNA, 60 bp, Artificial
  Synthetic oligonucleotide
catcatggatagggtgtaatggaagggtcgacatatgcgcttgctggtccgggtaggctc

SEQ ID NO: 279987 - DNA, 55 bp, Artificial
  Synthetic oligonucleotide
cgaatcttgccctggttccgatccttcgctgctccaactactgcgcttcaaaggc

SEQ ID NO: 279988 - DNA, 55 bp, Artificial
  Synthetic oligonucleotide
cgaattcctcctgctaaactacgactaatctccctcgggtccaatccgtgcttcc

SEQ ID NO: 279989 - DNA, 55 bp, Artificial
  Synthetic oligonucleotide
cgacaagaagcagattggacctactgctggtggtcttattgattccattcacgag

SEQ ID NO: 279990 - DNA, 55 bp, Artificial
  Synthetic oligonucleotide
cgacaaggagccgggaaatctacaggcggcaagtctgcggactctgattgatgat

SEQ ID NO: 279991 - DNA, 55 bp, Artificial
  Synthetic oligonucleotide
ggggaggccgggttagcccatcaacagggcaacactagttgcgatagccctgcag

SEQ ID NO: 279992 - DNA, 55 bp, Artificial
  Synthetic oligonucleotide
cgacagaggagagatgatttcgtgaactacgagagacatcttgagcggcggaagg

SEQ ID NO: 279993 - DNA, 55 bp, Artificial
  Synthetic oligonucleotide
cgacagctaaagaaaccgtgattagccgagcctaatatggaggagctactaaggc

SEQ ID NO: 279994 - DNA, 55 bp, Artificial
  Synthetic oligonucleotide
cgacccaggtccgattggtacatgacggaactgccctcgataccgacagcacaag

SEQ ID NO: 279995 - DNA, 55 bp, Artificial
  Synthetic oligonucleotide
cgaccttgtggcaccctacgtcgcagagagaattattccatggtagcctaaactt

SEQ ID NO: 279996 - DNA, 55 bp, Artificial
  Synthetic oligonucleotide
cgacgagcgaatctgatgcttgttggcaagtttattactagacatcatctgacga

SEQ ID NO: 279997 - DNA, 54 bp, Artificial
  Synthetic oligonucleotide
agtgtcgctattcgaacggccaactaggacaagggaaccgtccttccgcaagta

SEQ ID NO: 279998 - DNA, 55 bp, Artificial
  Synthetic oligonucleotide
cgacgagtcagaagttggagcgtcaagcctgcacttattgatgcccgaggaagag

SEQ ID NO: 279999 - DNA, 55 bp, Artificial
  Synthetic oligonucleotide
cgacgcccaaccgaattcgaacatcattgcagaccacattgtatcctgaccacgg

SEQ ID NO: 280000 - DNA, 55 bp, Artificial
  Synthetic oligonucleotide
cgacggaccccaacttgcggcatgtgcgtcctcagaagggcctttatccggagtc

SEQ ID NO: 280001 - DNA, 55 bp, Artificial
  Synthetic oligonucleotide
cgacgtcaccaccaaagttggagtcaatttactctcgcgtagctaaaactggccc

SEQ ID NO: 280002 - DNA, 55 bp, Artificial
  Synthetic oligonucleotide
cgactacgaatcagacggggtaggtttctggatggatacactctgcatccccgcc

SEQ ID NO: 280003 - DNA, 55 bp, Artificial
  Synthetic oligonucleotide
cgactccgctgaagtcgagccctctgacgaccattcattccaccggagaagcctc

SEQ ID NO: 280004 - DNA, 55 bp, Artificial
  Synthetic oligonucleotide
cgactctccaccctaggaccctaagccggtcgcccataagtccctgtgacagcga

SEQ ID NO: 280005 - DNA, 53 bp, Artificial
  Synthetic oligonucleotide
cgactgacaggggtttcccggtccgcataacagggtcgccaaccgtcaaacca

SEQ ID NO: 280006 - DNA, 55 bp, Artificial
  Synthetic oligonucleotide
cgactgcagatccgatgtcgtagccgtttaatcccattcggggctagttcccctc

SEQ ID NO: 280007 - DNA, 55 bp, Artificial
  Synthetic oligonucleotide
cgactgctattcgctgtgagacgtgaagaaccgagctgtaaaacaccgaggcgag

SEQ ID NO: 280008 - DNA, 56 bp, Artificial
  Synthetic oligonucleotide
catatccatcccggtcataatagtccctccggattggaatgggggagcgttcccga

SEQ ID NO: 280009 - DNA, 55 bp, Artificial
  Synthetic oligonucleotide
cgactgctgtttacgtcggggtgatgacgcacgactatgagactgtctcaacccg

SEQ ID NO: 280010 - DNA, 55 bp, Artificial
  Synthetic oligonucleotide
cgactggccattatcccgcaatatctagttctcttctgaggtaccgtccgatcaa

SEQ ID NO: 280011 - DNA, 55 bp, Artificial
  Synthetic oligonucleotide
cgagaacttctggcgaggctatgatatctgtgaaggctatgtccagtggcgggtc

SEQ ID NO: 280012 - DNA, 55 bp, Artificial
  Synthetic oligonucleotide
cgagaattgcgcctacatccggacaatgtgcacttagggttcaactccttcacgt

SEQ ID NO: 280013 - DNA, 55 bp, Artificial
  Synthetic oligonucleotide
gcatcatacttcgcttggcggaaaatagtctcttgcatgacgagatgggacagtt

SEQ ID NO: 280014 - DNA, 55 bp, Artificial
  Synthetic oligonucleotide
gcatccatctttatgccacttcaagacggctagttctttcatcgtcttgcacgag

SEQ ID NO: 280015 - DNA, 55 bp, Artificial
  Synthetic oligonucleotide
gcatcgcggggcgtagatagcctgagaagaccagcaacatgagctaacttctgga

SEQ ID NO: 280016 - DNA, 55 bp, Artificial
  Synthetic oligonucleotide
gcatcgggcccgtagctgtgatgcatttcgtgagaatggtgaatcgttcgaacgg

SEQ ID NO: 280017 - DNA, 55 bp, Artificial
  Synthetic oligonucleotide
gcatctatcagatcccgagctctatcagaccctacgcgacctacagagccaatgg

SEQ ID NO: 280018 - DNA, 55 bp, Artificial
  Synthetic oligonucleotide
gcatctcctaggaaggacctcatatccctagaagtcatagactggtgctttccgc

SEQ ID NO: 280019 - DNA, 60 bp, Artificial
  Synthetic oligonucleotide
gattgggtcccttgaaacgaggcgtgtggccttgcctagcgagcatgcttcgcactctag

SEQ ID NO: 280020 - DNA, 55 bp, Artificial
  Synthetic oligonucleotide
gcatctctacggggaccttatagtaagctgcaatccgccagaagtgcagcacgag

SEQ ID NO: 280021 - DNA, 55 bp, Artificial
  Synthetic oligonucleotide
gcatcttcagcgttacaacagataatgcgaccaataatgagaccttgattcgcgc

SEQ ID NO: 280022 - DNA, 55 bp, Artificial
  Synthetic oligonucleotide
gcatgaaacattacggagcactggttgtccgtcatgctgctaatagccgagtagc

SEQ ID NO: 280023 - DNA, 55 bp, Artificial
  Synthetic oligonucleotide
gcatgggtggatatgacattactacttctacgatcttgagcacccgtgtaatcac

SEQ ID NO: 280024 - DNA, 55 bp, Artificial
  Synthetic oligonucleotide
gcatgtacagtatgatcacgctcgttccagctccgcagtaatggagtaccagggg

SEQ ID NO: 280025 - DNA, 55 bp, Artificial
  Synthetic oligonucleotide
gcatgtgaggaatgacgtatacctccaacttctctcgcaaacgtgctggggtggg

SEQ ID NO: 280026 - DNA, 55 bp, Artificial
  Synthetic oligonucleotide
gcattctcgttgagttagggtggggtcccgagtttcagccttagcgctggtcgct

SEQ ID NO: 280027 - DNA, 55 bp, Artificial
  Synthetic oligonucleotide
ggattgttcagggatggaatgtgtctggtgctttaggttcggaatgttaggtagg

SEQ ID NO: 280028 - DNA, 55 bp, Artificial
  Synthetic oligonucleotide
ggattgggctccggaggatgcgccgccttttgcttgtgctcgaggggcaacgaaa

SEQ ID NO: 280029 - DNA, 55 bp, Artificial
  Synthetic oligonucleotide
gccaaggcctacgcgcccagggagtagagatttagtaaagacaacataagtcagc

SEQ ID NO: 280030 - DNA, 60 bp, Artificial
  Synthetic oligonucleotide
gagcgagagtttcttggtcacggactctcgtttgcagcgtgtcacttcactgttcgtcag

SEQ ID NO: 280031 - DNA, 60 bp, Artificial
  Synthetic oligonucleotide
cgaattcgaagacgtgacgagttctctcaatttcgacactgccgattgccacattgtcgg

SEQ ID NO: 280032 - DNA, 56 bp, Artificial
  Synthetic oligonucleotide
tccgggggtcgactcagacagaccaaacaagtagtggtggagcgaagaccacccca

SEQ ID NO: 280033 - DNA, 55 bp, Artificial
  Synthetic oligonucleotide
gccaaggttcctcatttggatgttaacgctgacttaggaaactttgtctacgcgg

SEQ ID NO: 280034 - DNA, 55 bp, Artificial
  Synthetic oligonucleotide
ggattagtagtagcttagtacgtagtttaccaactgggattggtattagccagcc

SEQ ID NO: 280035 - DNA, 55 bp, Artificial
  Synthetic oligonucleotide
ggatggggtatctactagcagaattagcaacgtggggtctgtccaaccacattcg

SEQ ID NO: 280036 - DNA, 55 bp, Artificial
  Synthetic oligonucleotide
ggatgggagtgttggtccgtatagacgcaattggatggaaccctgtagcgacgca

SEQ ID NO: 280037 - DNA, 55 bp, Artificial
  Synthetic oligonucleotide
gccacgcaagagggtctcccgtgtgcgcgcctattctaccgccaggagatatacg

SEQ ID NO: 280038 - DNA, 55 bp, Artificial
  Synthetic oligonucleotide
gccactagcagaagcagtggtccggatgacggtctgatgcgacacccgtttgcga

SEQ ID NO: 280039 - DNA, 55 bp, Artificial
  Synthetic oligonucleotide
gccactgcctgagtaccttactaacctgtggcgcagtccaacacccggcatgatg

SEQ ID NO: 280040 - DNA, 55 bp, Artificial
  Synthetic oligonucleotide
gccagacaacgctggatcctccgctacttaaccctcgttagtactttccacttcg

SEQ ID NO: 280041 - DNA, 55 bp, Artificial
  Synthetic oligonucleotide
gccagctatatcggaggctcggctccctcggcctacagtgacgacccagaggata

SEQ ID NO: 280042 - DNA, 55 bp, Artificial
  Synthetic oligonucleotide
gcagaaacccgcgcaggcgaacggggctgactgattgctgcgaaaccaggcacta

SEQ ID NO: 280043 - DNA, 60 bp, Artificial
  Synthetic oligonucleotide
ccttaaggtacgcacaatccctcgcatgtctacaataagcactaacatgtctagattctc

SEQ ID NO: 280044 - DNA, 55 bp, Artificial
  Synthetic oligonucleotide
gcagaagaactgctatagtccagtttaggagctatccggtcgggagtcggaactc

SEQ ID NO: 280045 - DNA, 55 bp, Artificial
  Synthetic oligonucleotide
gcagaagttcccaatagacgtgccatgactggtcaatgggtcctatttccgggtg

SEQ ID NO: 280046 - DNA, 55 bp, Artificial
  Synthetic oligonucleotide
gcagacacattggccgatctcatgacgggctttcaacaacactggcagaatgctg

SEQ ID NO: 280047 - DNA, 55 bp, Artificial
  Synthetic oligonucleotide
ggcaatcatatagcatcttcgtgtgaggtcctgggagagctgaatccagctggcg

SEQ ID NO: 280048 - DNA, 55 bp, Artificial
  Synthetic oligonucleotide
gcagagtgctgtgccgattccaattccgggcgtcaagggtgacagtggcgtgtcc

SEQ ID NO: 280049 - DNA, 55 bp, Artificial
  Synthetic oligonucleotide
gcagatcctctacccgtgatgtgtatgtcgatggggaaaagtccggaacgagtag

SEQ ID NO: 280050 - DNA, 55 bp, Artificial
  Synthetic oligonucleotide
gcagatgaaatccgtacgccaaccagactagacgctatccgagccaattgaccag

SEQ ID NO: 280051 - DNA, 55 bp, Artificial
  Synthetic oligonucleotide
gcagcactcgtggaatcggcttcgaattggtccgccaattatcagaaaagtcccc

SEQ ID NO: 280052 - DNA, 55 bp, Artificial
  Synthetic oligonucleotide
gcagcctgttatccaaacgtatgaacatcggctatctaacatgaagagacggctg

SEQ ID NO: 280053 - DNA, 55 bp, Artificial
  Synthetic oligonucleotide
gcagcgataatcggggtgtcttgcttgaattggttggccccggcttgaagaactc

SEQ ID NO: 280054 - DNA, 60 bp, Artificial
  Synthetic oligonucleotide
tccgggtctctggggagggatgcggattgggctacttcataaactgacagccatgcattg

SEQ ID NO: 280055 - DNA, 55 bp, Artificial
  Synthetic oligonucleotide
gcagcgtcaactagatgctggtcgcatggaagttgcgagtgatcattacatggcc

SEQ ID NO: 280056 - DNA, 55 bp, Artificial
  Synthetic oligonucleotide
gcagctgcatgcacaaataagtcttgtacacatacccagccagtcacgttcgccc

SEQ ID NO: 280057 - DNA, 55 bp, Artificial
  Synthetic oligonucleotide
gcagctgcatgcccgagggacagtatatctaaccgactatcttctagggtatcac

SEQ ID NO: 280058 - DNA, 55 bp, Artificial
  Synthetic oligonucleotide
gcagctgtggtatcctcaacatatccttggcctcgccaactttactgtgcaggac

SEQ ID NO: 280059 - DNA, 55 bp, Artificial
  Synthetic oligonucleotide
gcagcttaaagagccgctcaaaagtgtgagactcatgtgattccatggctaggtc

SEQ ID NO: 280060 - DNA, 55 bp, Artificial
  Synthetic oligonucleotide
gcaggacctccaaagagcgacggaaagaatagcacataaccagcatagtctagta

SEQ ID NO: 280061 - DNA, 55 bp, Artificial
  Synthetic oligonucleotide
gcagggaggagtgagtaagtacgtagtaccacccaaagtaagtcgcagtcggagt

SEQ ID NO: 280062 - DNA, 55 bp, Artificial
  Synthetic oligonucleotide
gcagggccaacaggatccctggtagctggtcaaacatgtctttccacccgttgac

SEQ ID NO: 280063 - DNA, 55 bp, Artificial
  Synthetic oligonucleotide
gcagggctgcactacacgctctgtggcggcatcatatgccctcgagtcagcctgt

SEQ ID NO: 280064 - DNA, 55 bp, Artificial
  Synthetic oligonucleotide
gcagggttttgtaccgcttcgtccccttctaggactcgccacagtcgtgagagtg

SEQ ID NO: 280065 - DNA, 60 bp, Artificial
  Synthetic oligonucleotide
tccggtatgctccactaagcaacacaaatgactgtcactatctctaacagctatacggca

SEQ ID NO: 280066 - DNA, 55 bp, Artificial
  Synthetic oligonucleotide
gcagtagcgttactggcgactccgctgtcttctcctactcggagatggactacgg

SEQ ID NO: 280067 - DNA, 55 bp, Artificial
  Synthetic oligonucleotide
gcagtctggattagcactgtatgtacgtgttcgctgggcgtttaggaggtggtac

SEQ ID NO: 280068 - DNA, 55 bp, Artificial
  Synthetic oligonucleotide
ggcaagcacgcgatagaaccgatagacgatgcatgggctcggcaggaggactcgg

SEQ ID NO: 280069 - DNA, 55 bp, Artificial
  Synthetic oligonucleotide
ggcaaataggcatcaccttaacgtagtctgtatggcgtgcctatagattcgaccg

SEQ ID NO: 280070 - DNA, 55 bp, Artificial
  Synthetic oligonucleotide
gcatatcctcgagatcagcgtctgtcggccatttaaggcgttggtgatcggtcat

SEQ ID NO: 280071 - DNA, 55 bp, Artificial
  Synthetic oligonucleotide
gcatcaactccgttcggatcggcacaccgaattttcgaactctgacaacccgcgg

SEQ ID NO: 280072 - DNA, 55 bp, Artificial
  Synthetic oligonucleotide
gcatcaagtgcagctaatcagatcgagggtgattataccgcggatcgtgtcttcc

SEQ ID NO: 280073 - DNA, 55 bp, Artificial
  Synthetic oligonucleotide
gccctgaggttgaaattaggttctcctgtcgttagaatatggttgcagacgggtg

SEQ ID NO: 280074 - DNA, 55 bp, Artificial
  Synthetic oligonucleotide
gccctgcgtgccgattgcattaggctctccgagtgccacgaagagctcttactac

SEQ ID NO: 280075 - DNA, 55 bp, Artificial
  Synthetic oligonucleotide
gccctgttgctcatggtctactacatatggtccatgctacaaaacctgtgaattg

SEQ ID NO: 280076 - DNA, 54 bp, Artificial
  Synthetic oligonucleotide
tccgtcaacccggccaaattgggactgtaggggtagttccagtcatcgagtagg

SEQ ID NO: 280077 - DNA, 55 bp, Artificial
  Synthetic oligonucleotide
gcccttgattaggcgagttgtacaggctagtcgtggccgtagcatgcttcagagt

SEQ ID NO: 280078 - DNA, 55 bp, Artificial
  Synthetic oligonucleotide
gccgaacccaaatgtcagacgtgcattacatctcacgtgttggaatgtcggcagc

SEQ ID NO: 280079 - DNA, 55 bp, Artificial
  Synthetic oligonucleotide
gccgaagtcatatctgtctccgagcgtatcgaatactccgccatttacagtaagc

SEQ ID NO: 280080 - DNA, 55 bp, Artificial
  Synthetic oligonucleotide
gccgatcaatcttcgctaaccttatacaactctatagtcacccacccaagcatgg

SEQ ID NO: 280081 - DNA, 55 bp, Artificial
  Synthetic oligonucleotide
gccgatgtgataaaggggtactatgtagaacctcataaggacgatagtcggcagt

SEQ ID NO: 280082 - DNA, 55 bp, Artificial
  Synthetic oligonucleotide
gccgcacgtatggagggatcggaccttccgattggatttaattatggcatgaagc

SEQ ID NO: 280083 - DNA, 55 bp, Artificial
  Synthetic oligonucleotide
gccgccaagagctcgatatgaacatgccgtagcgcgactggggtgagtttctggc

SEQ ID NO: 280084 - DNA, 55 bp, Artificial
  Synthetic oligonucleotide
gccgccagtatgcatagatagagcctcggtctcagactcatgtggtcccaacgag

SEQ ID NO: 280085 - DNA, 55 bp, Artificial
  Synthetic oligonucleotide
gccgcgctgaggacgaatcccagatagtcgagtcgcgttaagcgtttgcgaagag

SEQ ID NO: 280086 - DNA, 55 bp, Artificial
  Synthetic oligonucleotide
gccgcgggctatgtcctcttctatgtgggctactcgggtatctatctcgtgctgg

SEQ ID NO: 280087 - DNA, 59 bp, Artificial
  Synthetic oligonucleotide
ctacactgcatctattggtgtcccgcctttttacccaatcgcaagacggatgcaaccta

SEQ ID NO: 280088 - DNA, 55 bp, Artificial
  Synthetic oligonucleotide
gccggaggcgcgcaagaacagtcttcgaagtactgcacagctgacagggtgcgga

SEQ ID NO: 280089 - DNA, 54 bp, Artificial
  Synthetic oligonucleotide
gccggagtctggggattacgagaagtttatcctgggacgggccctgtcaccggc

SEQ ID NO: 280090 - DNA, 55 bp, Artificial
  Synthetic oligonucleotide
gccggatgagaggcctccaggataccgctacgactgtctacgcaaatgcaagggg

SEQ ID NO: 280091 - DNA, 55 bp, Artificial
  Synthetic oligonucleotide
ggatccacggtactatgagcgttcccatagagagataggacagggtagcaagact

SEQ ID NO: 280092 - DNA, 55 bp, Artificial
  Synthetic oligonucleotide
gccgggagaggattcgttttcgagactcatagatcgttgacagcgagagcagcgc

SEQ ID NO: 280093 - DNA, 55 bp, Artificial
  Synthetic oligonucleotide
ggatcagctacacaattcgaactctactagccaatgtactcgacaacaagagagt

SEQ ID NO: 280094 - DNA, 55 bp, Artificial
  Synthetic oligonucleotide
gccggtaattgatagaactgcccgttactcaacattgtacacgggtccgcgatat

SEQ ID NO: 280095 - DNA, 55 bp, Artificial
  Synthetic oligonucleotide
gccggtgctaagcgacgctagacccgatagagtagcatgacttcacgtgttgcgg

SEQ ID NO: 280096 - DNA, 53 bp, Artificial
  Synthetic oligonucleotide
gccgtacgaagtagaataactcctgggccttggttgtagtcaacgtaacggcg

SEQ ID NO: 280097 - DNA, 55 bp, Artificial
  Synthetic oligonucleotide
gccgtataatgcggcttttgtgttgattcttagtatgcagaccgctaacactgcc

SEQ ID NO: 280098 - DNA, 60 bp, Artificial
  Synthetic oligonucleotide
acagatccccaaatacccgcaagccttgtcatcttggtatcatataggcctagtgatctg

SEQ ID NO: 280099 - DNA, 55 bp, Artificial
  Synthetic oligonucleotide
gccgtcgagtcgcggcgtgtattgcgactcacaagatattagtcaccagaatggc

SEQ ID NO: 280100 - DNA, 55 bp, Artificial
  Synthetic oligonucleotide
gccgttaacgcgggtgtcataattgcgagcaaagtctccgacgccaggtcgttcg

SEQ ID NO: 280101 - DNA, 55 bp, Artificial
  Synthetic oligonucleotide
gcctacacactcacccgcgtttacatcttcctgtatgagcagtgggtaacatggc

SEQ ID NO: 280102 - DNA, 55 bp, Artificial
  Synthetic oligonucleotide
gcctacgctgataggccttcaagcctccgcttattttgggaacgtggtcgggctt

SEQ ID NO: 280103 - DNA, 55 bp, Artificial
  Synthetic oligonucleotide
gccagtaggctatagattcgtgccacagtgcgatcgataggttcgaagtagcgag

SEQ ID NO: 280104 - DNA, 55 bp, Artificial
  Synthetic oligonucleotide
gccagttaaccttacaacttacggtgacgttctgggagttaatacatgtagctga

SEQ ID NO: 280105 - DNA, 55 bp, Artificial
  Synthetic oligonucleotide
gccagttaacttgtactagatcgatgagcgtttggtagtacctgattgggctgtc

SEQ ID NO: 280106 - DNA, 55 bp, Artificial
  Synthetic oligonucleotide
gccagttgcctgttcttgggaaacaggagcaagggtttggcattgcgacagcgcg

SEQ ID NO: 280107 - DNA, 55 bp, Artificial
  Synthetic oligonucleotide
gccatcgcgggctacttagatgtcatccgaggaggaaattcgagcggaaagcgtg

SEQ ID NO: 280108 - DNA, 55 bp, Artificial
  Synthetic oligonucleotide
gccatgcccataatacgagataccactcataagtcatgaccagagccgatagccg

SEQ ID NO: 280109 - DNA, 60 bp, Artificial
  Synthetic oligonucleotide
gatttacagagcgcaggtaagcagctccaccctggaccggagggtttatgatgcttagct

SEQ ID NO: 280110 - DNA, 55 bp, Artificial
  Synthetic oligonucleotide
gccattgacgggagcttgattgattgaatgtgctgacaatatgtctactgcagtt

SEQ ID NO: 280111 - DNA, 55 bp, Artificial
  Synthetic oligonucleotide
gccattgctatgtaccttgatcaatgtgactggtcacgacagatctgcgctcaga

SEQ ID NO: 280112 - DNA, 55 bp, Artificial
  Synthetic oligonucleotide
ggatgcccctacaccttgaggagtgtttttccaagataatgcttcacctcaaatg

SEQ ID NO: 280113 - DNA, 55 bp, Artificial
  Synthetic oligonucleotide
gcccaagaggtccaagaggaccccaacgaggattccgaagcaagttcctgccatt

SEQ ID NO: 280114 - DNA, 55 bp, Artificial
  Synthetic oligonucleotide
ggatgcaccatacgcctagattctcccctatattaagaagggaattaatactctt

SEQ ID NO: 280115 - DNA, 55 bp, Artificial
  Synthetic oligonucleotide
gcccatcaggcagggtagaattatttcgaaacttgcactagaatcggttctgtga

SEQ ID NO: 280116 - DNA, 54 bp, Artificial
  Synthetic oligonucleotide
gccccattaaacttgcccacggaacgacgacactggccttccgattccagggcg

SEQ ID NO: 280117 - DNA, 55 bp, Artificial
  Synthetic oligonucleotide
gccccgacaaagctccgccggcgatatgctatcattccccgctgtacacgagagc

SEQ ID NO: 280118 - DNA, 55 bp, Artificial
  Synthetic oligonucleotide
ggatcttccaatgatcgagactactggtcctagcgaacagcccgctcctggaccg

SEQ ID NO: 280119 - DNA, 55 bp, Artificial
  Synthetic oligonucleotide
ggatcggttcgttgttccccggtgtgtggtcgcgagatcgattgtttgtgagggc

SEQ ID NO: 280120 - DNA, 55 bp, Artificial
  Synthetic oligonucleotide
tccgtctattcactcgtattccccaagccgttgggaagtctccgtgtttgtcctc

SEQ ID NO: 280121 - DNA, 55 bp, Artificial
  Synthetic oligonucleotide
gcccctctacacatcctcgaccactatactgcttcaactatacggttgtcaccgt

SEQ ID NO: 280122 - DNA, 55 bp, Artificial
  Synthetic oligonucleotide
gcccgactgacacgctctcgttgggccgcgactcgaacgaagattgtcgctgcta

SEQ ID NO: 280123 - DNA, 55 bp, Artificial
  Synthetic oligonucleotide
gcccgcacgtcaggtacagaacggtggtgtcagggttacattggaggaagtcaga

SEQ ID NO: 280124 - DNA, 55 bp, Artificial
  Synthetic oligonucleotide
ggatcgggactcatgttcgtgttgagccttaggtctggtatctactcgagtcatg

SEQ ID NO: 280125 - DNA, 55 bp, Artificial
  Synthetic oligonucleotide
gcccggcaaccctctcccttgtggtctgtctattacccgcatacacaaccggacc

SEQ ID NO: 280126 - DNA, 55 bp, Artificial
  Synthetic oligonucleotide
gcccgggatcggtatgttcccgattgaagcaaggctaggtgtacggactactatc

SEQ ID NO: 280127 - DNA, 51 bp, Artificial
  Synthetic oligonucleotide
gcccggggaaattccggttttacgtcggtggattctcggcaacaactcgtc

SEQ ID NO: 280128 - DNA, 55 bp, Artificial
  Synthetic oligonucleotide
ggatcgactcttctcgggccatcgttggtccgcctcaatgtctctcgcgtctccg

SEQ ID NO: 280129 - DNA, 55 bp, Artificial
  Synthetic oligonucleotide
gcccgtggtagataccttgcgaactgagccatgcgaactcattctccggctgacc

SEQ ID NO: 280130 - DNA, 55 bp, Artificial
  Synthetic oligonucleotide
gcccgttaatgacgtcgctgctacgctgagtgaccttctacttctatctccgcac

SEQ ID NO: 280131 - DNA, 58 bp, Artificial
  Synthetic oligonucleotide
gatttcgaggtgttatattcgcgaaggccaagagtttgaccatcattctccgaaccca

SEQ ID NO: 280132 - DNA, 55 bp, Artificial
  Synthetic oligonucleotide
gcccgttctacgcgtgacgacttttgtctggatggccacatggacccggatagtg

SEQ ID NO: 280133 - DNA, 55 bp, Artificial
  Synthetic oligonucleotide
gccctacccaaaggatcaaagcggcctagtgcgggacaagccaaccgcggaatcg

SEQ ID NO: 280134 - DNA, 55 bp, Artificial
  Synthetic oligonucleotide
gagtcactccgttcctgcgtttactcgaacgctccactattcatccctggagtct

SEQ ID NO: 280135 - DNA, 55 bp, Artificial
  Synthetic oligonucleotide
gagtcgactgtcgttagatgccagaggagagcgacgaaagaggtttagttgaggc

SEQ ID NO: 280136 - DNA, 55 bp, Artificial
  Synthetic oligonucleotide
gagtcgcgatcagtgttgcgaagacatacgcgtggctatacacggcctgtcactc

SEQ ID NO: 280137 - DNA, 55 bp, Artificial
  Synthetic oligonucleotide
gagtcgtctggaggttggagagtgttgctagattaggactgactgttgcggcagg

SEQ ID NO: 280138 - DNA, 55 bp, Artificial
  Synthetic oligonucleotide
gagtctcaatcttgacccgaacatgacaccagctttccaacatgatccctatgcc

SEQ ID NO: 280139 - DNA, 55 bp, Artificial
  Synthetic oligonucleotide
gagtctggcacagcattacttatagattgactaactccaacaagacttgagatcg

SEQ ID NO: 280140 - DNA, 55 bp, Artificial
  Synthetic oligonucleotide
gagtgaaggacctggtgatagctgtgacaagcctatgagtttcggtttccgggag

SEQ ID NO: 280141 - DNA, 55 bp, Artificial
  Synthetic oligonucleotide
gagtgcaaagactaagtatcaagcgctccaggtatcggctttcgtcatcgggaaa

SEQ ID NO: 280142 - DNA, 54 bp, Artificial
  Synthetic oligonucleotide
ggtttcttagtatatcaaccacaataaaagactcggccactcggcgtacgtacc

SEQ ID NO: 280143 - DNA, 57 bp, Artificial
  Synthetic oligonucleotide
tccgtgcaaccgacactggcttccgactatccctttggcctcgtacggaatctctac

SEQ ID NO: 280144 - DNA, 55 bp, Artificial
  Synthetic oligonucleotide
gagtgcatacgccgactcgattttcgcagcgacgaaatactgtgtgttccacccg

SEQ ID NO: 280145 - DNA, 55 bp, Artificial
  Synthetic oligonucleotide
gagtggccgtccgcatggtatctggctcccactagcaatctcgagcacacgacga

SEQ ID NO: 280146 - DNA, 55 bp, Artificial
  Synthetic oligonucleotide
gagtgtttcgacgcggctaaaccacaagccaagctatgtatctgtgtcagactgg

SEQ ID NO: 280147 - DNA, 55 bp, Artificial
  Synthetic oligonucleotide
gagttcagaccttcgggtatatccagggacgtgagtagcttacacaagaagaatg

SEQ ID NO: 280148 - DNA, 55 bp, Artificial
  Synthetic oligonucleotide
gagttgccgtttcatatcagaggctccattggggagatttcacgatgacgagagc

SEQ ID NO: 280149 - DNA, 55 bp, Artificial
  Synthetic oligonucleotide
gagttgctcgctgggatatcgcgctacgaagtcaccgtccactgtgggcctccag

SEQ ID NO: 280150 - DNA, 55 bp, Artificial
  Synthetic oligonucleotide
gataaagacgcccgtgttgcctgtaccgaagagtacacctgcgagaatcggtaca

SEQ ID NO: 280151 - DNA, 55 bp, Artificial
  Synthetic oligonucleotide
gataaatgtcgatgaacatgtatcccgtgagattcgtgagtttggggaacagaac

SEQ ID NO: 280152 - DNA, 55 bp, Artificial
  Synthetic oligonucleotide
gataaccgtgggtcgattagaaacatgctattgctacccaagtcctcacatgaga

SEQ ID NO: 280153 - DNA, 55 bp, Artificial
  Synthetic oligonucleotide
gatacacgatcacaaattcgctcaatttgtcccatttgaggccgatgagagtaac

SEQ ID NO: 280154 - DNA, 56 bp, Artificial
  Synthetic oligonucleotide
catatcgcggtattggtaccgaaaggctgcggaccaaaatcccaatctcggtagaa

SEQ ID NO: 280155 - DNA, 55 bp, Artificial
  Synthetic oligonucleotide
gataccgctctgtatggacaccccatgacaagcccactgcccacttgtcctatcg

SEQ ID NO: 280156 - DNA, 55 bp, Artificial
  Synthetic oligonucleotide
gataccttccgagcatccgaggttagctctgctcgttctagaccagacatggatc

SEQ ID NO: 280157 - DNA, 55 bp, Artificial
  Synthetic oligonucleotide
ggcaggggttatcggcgtagccgtaactgaacgatgcttctccagaaggaatgtt

SEQ ID NO: 280158 - DNA, 55 bp, Artificial
  Synthetic oligonucleotide
gatacttctggcaagtgtgtctgctctggggcattacgcatctgtaatccgactg

SEQ ID NO: 280159 - DNA, 55 bp, Artificial
  Synthetic oligonucleotide
ggcaggaccgcccaagcttagcgtgaactcccctaccgatgccggggaacgcact

SEQ ID NO: 280160 - DNA, 55 bp, Artificial
  Synthetic oligonucleotide
gatagacagactaaaacggcgacggtaaatgacaatgctgtggtcgaaactagcg

SEQ ID NO: 280161 - DNA, 55 bp, Artificial
  Synthetic oligonucleotide
gataggaccacgtaagatatagcgggagacaccgagcaatcttcagacgttgtcc

SEQ ID NO: 280162 - DNA, 55 bp, Artificial
  Synthetic oligonucleotide
gatagggtgaacgaattccccgactctggctgttcgttgtatacagccgacccga

SEQ ID NO: 280163 - DNA, 55 bp, Artificial
  Synthetic oligonucleotide
gagctactgtgggcgtcttagcttccccgagtacgcaagtataagcaaatgcggc

SEQ ID NO: 280164 - DNA, 55 bp, Artificial
  Synthetic oligonucleotide
gagctagactagttgccattaaaatccaagacaacgttcgatagtccagccagtt

SEQ ID NO: 280165 - DNA, 58 bp, Artificial
  Synthetic oligonucleotide
tcctattcagatgcagataaaataaaattactttagcgtatttaatctcgaattacta

SEQ ID NO: 280166 - DNA, 55 bp, Artificial
  Synthetic oligonucleotide
gagctgaactggtactactccgtaggtactaggtagtaacatccctggtctacgg

SEQ ID NO: 280167 - DNA, 55 bp, Artificial
  Synthetic oligonucleotide
gagctgctatcagagatgttccttacgactatgccatgtttaacagaatgtggcg

SEQ ID NO: 280168 - DNA, 55 bp, Artificial
  Synthetic oligonucleotide
ggcagttccgagctccgattcgatatgcatttgcctatggatccggtgtcttcca

SEQ ID NO: 280169 - DNA, 55 bp, Artificial
  Synthetic oligonucleotide
ggcagtcaaggacctccctgcaatagcgaaggcgtattctgcttactcgggagaa

SEQ ID NO: 280170 - DNA, 55 bp, Artificial
  Synthetic oligonucleotide
ggcaggtgggctacctagggtattgtatccgactgagaagttggcaggtagcaag

SEQ ID NO: 280171 - DNA, 55 bp, Artificial
  Synthetic oligonucleotide
gaggaaactccgacagatcgctccctgatatacctctaccgcaaaccagacgctt

SEQ ID NO: 280172 - DNA, 55 bp, Artificial
  Synthetic oligonucleotide
gaggaacgtggcaattacttccaaagtacgtgggagcagtagatctactcccgag

SEQ ID NO: 280173 - DNA, 55 bp, Artificial
  Synthetic oligonucleotide
gaggagtggatagtaactggttttagccgtttcgttaggagatgagacttgcaag

SEQ ID NO: 280174 - DNA, 55 bp, Artificial
  Synthetic oligonucleotide
gaggatcaatcagccttcggtattcaatcggtcaagttgtcagagacaaccaccc

SEQ ID NO: 280175 - DNA, 55 bp, Artificial
  Synthetic oligonucleotide
gaggccaaagtaagggtgtctggggatgaagaacagcactggaacaatggagaca

SEQ ID NO: 280176 - DNA, 55 bp, Artificial
  Synthetic oligonucleotide
gatttggtcagtgcggggagaattctggaatttgcccgaggggtaggtatccgtg

SEQ ID NO: 280177 - DNA, 55 bp, Artificial
  Synthetic oligonucleotide
gaggcccacaagccaggtacgcggacgccacggtataaaggtatcgtaacccagc

SEQ ID NO: 280178 - DNA, 55 bp, Artificial
  Synthetic oligonucleotide
gaggcgaagaaactctcccaacagcgtgcagacaattactcgcagcggaaaggcg

SEQ ID NO: 280179 - DNA, 55 bp, Artificial
  Synthetic oligonucleotide
gaggcggagggtatattccaatggcgaggtggatcctagggttgatgcgcccacc

SEQ ID NO: 280180 - DNA, 55 bp, Artificial
  Synthetic oligonucleotide
gagggacaaacttggaatgaactattgacggacacaatttgcactatgctgggac

SEQ ID NO: 280181 - DNA, 55 bp, Artificial
  Synthetic oligonucleotide
gagggattagaatctatttcgatctattctgggtccgaacataccgaatcaccgc

SEQ ID NO: 280182 - DNA, 55 bp, Artificial
  Synthetic oligonucleotide
gagggccatcttctactatctgagtccagctcctaatttataccttgcaagcgag

SEQ ID NO: 280183 - DNA, 55 bp, Artificial
  Synthetic oligonucleotide
gaggggcagcgggattacattctcccgtggccttatcgatcatcccggcccatcg

SEQ ID NO: 280184 - DNA, 55 bp, Artificial
  Synthetic oligonucleotide
gagggtacgtgtgaagagtatacgccgatggtcttagctaactcggctttaccgg

SEQ ID NO: 280185 - DNA, 55 bp, Artificial
  Synthetic oligonucleotide
gaggtgggaacgatagtcctgcatccaatttgtttggcgctctatgcagcgatgg

SEQ ID NO: 280186 - DNA, 55 bp, Artificial
  Synthetic oligonucleotide
gaggtttcgtatgtaaagtgcgtaagtacgtttgtgcaacagtgacagggcttac

SEQ ID NO: 280187 - DNA, 60 bp, Artificial
  Synthetic oligonucleotide
gcaaactgagtcagcaaagccaagcgagacaccaactatagacaatatgaatgagggcag

SEQ ID NO: 280188 - DNA, 54 bp, Artificial
  Synthetic oligonucleotide
gaggttttccgggtggaagattacttaatcatcccgctcgacttaacgtctcaa

SEQ ID NO: 280189 - DNA, 55 bp, Artificial
  Synthetic oligonucleotide
gagtaagcccagcgcccctgtactttggctgcttgatagaatgcatgcacctaac

SEQ ID NO: 280190 - DNA, 55 bp, Artificial
  Synthetic oligonucleotide
gagtacccaacctcacttcaactgcttgctcgcagagacacaccagttattccac

SEQ ID NO: 280191 - DNA, 55 bp, Artificial
  Synthetic oligonucleotide
gagtagtggaggtctgcaacgtgtgaggcatggctgtatccagtcggccgatacc

SEQ ID NO: 280192 - DNA, 55 bp, Artificial
  Synthetic oligonucleotide
gagtatcatctctcacgtggaaggcttcccaactaagctagccccagacataccg

SEQ ID NO: 280193 - DNA, 55 bp, Artificial
  Synthetic oligonucleotide
gagtcacaggtcactggggtagcgaggggtggtgctatgtgtctataaggcgggg

SEQ ID NO: 280194 - DNA, 55 bp, Artificial
  Synthetic oligonucleotide
ggcacgggaccttcggtcgctgcaggtacccattgcagggagacgatagaatccc

SEQ ID NO: 280195 - DNA, 55 bp, Artificial
  Synthetic oligonucleotide
gcaaagccacttgacgcagttacgcgacgggctgacaccgtagcagcttctatgc

SEQ ID NO: 280196 - DNA, 55 bp, Artificial
  Synthetic oligonucleotide
gcaacaagacttatctaatagaagattggttcttagccaatcgcggtgtgtcatt

SEQ ID NO: 280197 - DNA, 55 bp, Artificial
  Synthetic oligonucleotide
gcaacttccatgcgaccagcatctagttgacgctgcaacgaccatgttggccagg

SEQ ID NO: 280198 - DNA, 56 bp, Artificial
  Synthetic oligonucleotide
ccttaaaggggtccagccatccaagaccttgacccgctcattgcgcagtcgttagg

SEQ ID NO: 280199 - DNA, 55 bp, Artificial
  Synthetic oligonucleotide
gcaaggctctacatgtgccattggtctccttagcaactgtgctgatgcagtgaca

SEQ ID NO: 280200 - DNA, 55 bp, Artificial
  Synthetic oligonucleotide
ggcacagtggcccttaacccaaccgactggaggcatattgacttcgtcccaagca

SEQ ID NO: 280201 - DNA, 55 bp, Artificial
  Synthetic oligonucleotide
ggcacagtactgtagggtggctgggctccttcgagctatcactggctgaggccca

SEQ ID NO: 280202 - DNA, 55 bp, Artificial
  Synthetic oligonucleotide
gcaatggactactgcatactactaggtacttggtatggagcgtgtggaatcatcc

SEQ ID NO: 280203 - DNA, 55 bp, Artificial
  Synthetic oligonucleotide
gcaattagttgacaacagtagaacttggctctatttcggcccgagcctaccactc

SEQ ID NO: 280204 - DNA, 55 bp, Artificial
  Synthetic oligonucleotide
gcacacagcgtctcagatttcccgaataactatggcatgacaaacgaattacaac

SEQ ID NO: 280205 - DNA, 55 bp, Artificial
  Synthetic oligonucleotide
gcacacgcattctgcctaaagcccacacccgcacttgcactaccaaccggtgagg

SEQ ID NO: 280206 - DNA, 55 bp, Artificial
  Synthetic oligonucleotide
gcacactttccttgacgccactattcttgattgaagctgagacgctaacggatct

SEQ ID NO: 280207 - DNA, 55 bp, Artificial
  Synthetic oligonucleotide
ggcaatgcgtgcctcagggcctatttaggtaataatccaatcaggaggccgagtg

SEQ ID NO: 280208 - DNA, 55 bp, Artificial
  Synthetic oligonucleotide
gcaccaggccatcctcctgataacgtgtccgacgactgtctttgctgggaaagtg

SEQ ID NO: 280209 - DNA, 59 bp, Artificial
  Synthetic oligonucleotide
gcaaagggcaatcggaagtcgctgggctaggttgccgtgtctgcagggtaatcgcgtag

SEQ ID NO: 280210 - DNA, 55 bp, Artificial
  Synthetic oligonucleotide
gcacccctgtactaccggatgtgaataccacatagagagtatcactggggttgac

SEQ ID NO: 280211 - DNA, 55 bp, Artificial
  Synthetic oligonucleotide
gcacgacttccatgctaggctgtcctttgatctgcgcgttgtctcggtaggctgc

SEQ ID NO: 280212 - DNA, 55 bp, Artificial
  Synthetic oligonucleotide
gcacgcgttattcctatccgcatggcttacatagtaagacttctgtgcatgatcc

SEQ ID NO: 280213 - DNA, 55 bp, Artificial
  Synthetic oligonucleotide
gcacgctgtgagtgcaccaaatctaagctaatgaccctcttatgcaccatctgac

SEQ ID NO: 280214 - DNA, 55 bp, Artificial
  Synthetic oligonucleotide
gcactaagattgagattagagcgtagagtggccttaggattgtatcgacctccga

SEQ ID NO: 280215 - DNA, 55 bp, Artificial
  Synthetic oligonucleotide
gcactaccgcatagcatcttgctttcagaactggaccaatatatcatacctcgaa

SEQ ID NO: 280216 - DNA, 55 bp, Artificial
  Synthetic oligonucleotide
gcactagtaggtcgggttaattgtctcgtctcagcccatatccccacagatagtc

SEQ ID NO: 280217 - DNA, 55 bp, Artificial
  Synthetic oligonucleotide
gcactcgtcgccggttatctgtgtctagtaggtaaacaatcccgagtctcgcctg

SEQ ID NO: 280218 - DNA, 55 bp, Artificial
  Synthetic oligonucleotide
gcactgtaatgccgtttgtactctgagcgtagtcaccgtaacctgcggtccttcg

SEQ ID NO: 280219 - DNA, 55 bp, Artificial
  Synthetic oligonucleotide
gcacttatgaggacttctccttgcaagttgagtcgtcttcgcaggcagtgactag

SEQ ID NO: 280220 - DNA, 57 bp, Artificial
  Synthetic oligonucleotide
gcaaagtcttgtacaaacccgtgcacacttcgccagattacttagcaagacgaacgg

SEQ ID NO: 280221 - DNA, 55 bp, Artificial
  Synthetic oligonucleotide
gcacttctacagcctccgttaagtagtctgatatagtgccatgggtgcaaaggcc

SEQ ID NO: 280222 - DNA, 55 bp, Artificial
  Synthetic oligonucleotide
gcacttgccagcttgatggcaaatcgcatcaaccaactttacacggcacagcatc

SEQ ID NO: 280223 - DNA, 55 bp, Artificial
  Synthetic oligonucleotide
gcactttgggagctattagttggctagctggtatattctgtaattgccgcaacac

SEQ ID NO: 280224 - DNA, 55 bp, Artificial
  Synthetic oligonucleotide
gatagtcgaatctccctccagaaacctgctgtagaaggcgcatttccctcaagac

SEQ ID NO: 280225 - DNA, 55 bp, Artificial
  Synthetic oligonucleotide
gatatcgggtatcgatgtgcctcccatcatctcgtggttgctttgaagctcaccc

SEQ ID NO: 280226 - DNA, 55 bp, Artificial
  Synthetic oligonucleotide
gatcatgttggaaagctggtgtcatgttcgggtcaagattgagactctctagggg

SEQ ID NO: 280227 - DNA, 55 bp, Artificial
  Synthetic oligonucleotide
gatcccgctcgagtcaagtcaacgcgatgcagaatccattccgtcctcgcttggg

SEQ ID NO: 280228 - DNA, 55 bp, Artificial
  Synthetic oligonucleotide
gatcctgagacattcactccccgaaaagcatgccatatcatacgatttcggctct

SEQ ID NO: 280229 - DNA, 55 bp, Artificial
  Synthetic oligonucleotide
gatcctgtctcattgtgcacgtggtgatagaggagccaaacggttgcccctccga

SEQ ID NO: 280230 - DNA, 55 bp, Artificial
  Synthetic oligonucleotide
gatcgcaatgaataagtttcgcgtatgcaaaaccccgtttggatcgtcgttggtc

SEQ ID NO: 280231 - DNA, 57 bp, Artificial
  Synthetic oligonucleotide
acactggcttgaaccgatgctttacacacggaggcgacctccgcttgggaaatattc

SEQ ID NO: 280232 - DNA, 55 bp, Artificial
  Synthetic oligonucleotide
gatcggccattcaatcgaggctgtttccccgcacgcgttgggacactcacagtca

SEQ ID NO: 280233 - DNA, 55 bp, Artificial
  Synthetic oligonucleotide
gatcggctcctacatttgggagtcgccgcaacattgtaagtaatctccgcgttgg

SEQ ID NO: 280234 - DNA, 55 bp, Artificial
  Synthetic oligonucleotide
gatctacgggcggtatacgatgtatggaaacccatttcaactactggctggttac

SEQ ID NO: 280235 - DNA, 55 bp, Artificial
  Synthetic oligonucleotide
gatctcgcttcatcctaatactgacgattgtcggcatgtgcagtctccgtagcca

SEQ ID NO: 280236 - DNA, 55 bp, Artificial
  Synthetic oligonucleotide
gatgactaccagccgaatgggtgactaccctcctcatccgtacccgcaaagcagg

SEQ ID NO: 280237 - DNA, 55 bp, Artificial
  Synthetic oligonucleotide
ggcagcacagtcgtacgttctggagtcgcagaatgcggatttgatgtacgctccc

SEQ ID NO: 280238 - DNA, 55 bp, Artificial
  Synthetic oligonucleotide
gatgcatcaatacagtcctgaccattccattagtacttcatgaagaacccgcccg

SEQ ID NO: 280239 - DNA, 55 bp, Artificial
  Synthetic oligonucleotide
gatgcgactgcaattatcgccgggagctacggcttgtcgacataccctgcttgtc

SEQ ID NO: 280240 - DNA, 55 bp, Artificial
  Synthetic oligonucleotide
gatgctatacctccgttgtctcatgtgcatattgtatgcctgagatgtaccactg

SEQ ID NO: 280241 - DNA, 55 bp, Artificial
  Synthetic oligonucleotide
gatgcttggaacagtctttcatgctctgtagggtcacctgctaacagcttctccg

SEQ ID NO: 280242 - DNA, 60 bp, Artificial
  Synthetic oligonucleotide
acaaccgctccatcaaacggccgggtacacagtgggcagcaacgtgcactctggatgcag

SEQ ID NO: 280243 - DNA, 55 bp, Artificial
  Synthetic oligonucleotide
gatggcgaggaaattttcgtatgacacggttttgaggttcgcgctctggtccgtg

SEQ ID NO: 280244 - DNA, 55 bp, Artificial
  Synthetic oligonucleotide
gatgtgatccggaatccgaaggcaataccgcgagtgcacgacgaagcgcgttcga

SEQ ID NO: 280245 - DNA, 55 bp, Artificial
  Synthetic oligonucleotide
gatgtgatgcattgtggcattgtacgtctacactactctactggatctccgttcc

SEQ ID NO: 280246 - DNA, 55 bp, Artificial
  Synthetic oligonucleotide
gatgtgtttcagatggttatttgtgccgtcttcgtgggttttgggtctagggttg

SEQ ID NO: 280247 - DNA, 55 bp, Artificial
  Synthetic oligonucleotide
gattagtcctcagatacgcatgaattagccggagactaatctgtttgaggtctaa

SEQ ID NO: 280248 - DNA, 55 bp, Artificial
  Synthetic oligonucleotide
gattccagcacagtgtgcgtgtgctttatgctgatagcagagcaggacaaggtgg

SEQ ID NO: 280249 - DNA, 55 bp, Artificial
  Synthetic oligonucleotide
ggcactaatccatactggatggtggcctaaaagggtataggcttcccgcagatag

SEQ ID NO: 280250 - DNA, 55 bp, Artificial
  Synthetic oligonucleotide
gattgaactcatgtagcttgcagcactcatgatagcggtttgctctccgtatccc

SEQ ID NO: 280251 - DNA, 55 bp, Artificial
  Synthetic oligonucleotide
gattgatccatgtcggcgagggtatgaatacccgctttgggcgaagatgatgtgc

SEQ ID NO: 280252 - DNA, 54 bp, Artificial
  Synthetic oligonucleotide
gattgtatccgtttccaacccagcgggacgtatatgttacccctcgtgacttgg

SEQ ID NO: 280253 - DNA, 60 bp, Artificial
  Synthetic oligonucleotide
tattctatcctgcctcatgacttccattccgattcaggagccgcgaatctggaaacgtca

SEQ ID NO: 280254 - DNA, 60 bp, Artificial
  Synthetic oligonucleotide
cctgctggcgccgccttctggttgtatggcatgctactcaggtcggtatgccctgcctaa

SEQ ID NO: 280255 - DNA, 55 bp, Artificial
  Synthetic oligonucleotide
gattgttagtgttagatagtggggtacattggttaagggcttgcagcgctaaaca

SEQ ID NO: 280256 - DNA, 55 bp, Artificial
  Synthetic oligonucleotide
gctatccgcgttgtgagcttaacatatacttcatcaccgaaaggttgtacgtgta

SEQ ID NO: 280257 - DNA, 55 bp, Artificial
  Synthetic oligonucleotide
gctatcgtcccgtttgctgccccatgaaacgaacagcagatatactgtgctggtt

SEQ ID NO: 280258 - DNA, 55 bp, Artificial
  Synthetic oligonucleotide
gctcaacagtattagtgggccaggtccgccaattgcatatctcatacggtgccgc

SEQ ID NO: 280259 - DNA, 55 bp, Artificial
  Synthetic oligonucleotide
gctcagcgtttccgtcgaccacaaagtctgcagcccattatttcggcatctgtcg

SEQ ID NO: 280260 - DNA, 55 bp, Artificial
  Synthetic oligonucleotide
ggactgtgagtcccaccatgctaccaccattgcaatccctgttgtaggggagacc

SEQ ID NO: 280261 - DNA, 55 bp, Artificial
  Synthetic oligonucleotide
gctcatccattggctccatatacgtccctgtggatcctgtgggcaaggtatcgga

SEQ ID NO: 280262 - DNA, 55 bp, Artificial
  Synthetic oligonucleotide
gctcatgagtcgtcccatccgtctacattctttcggtgatgcttggttttacggc

SEQ ID NO: 280263 - DNA, 55 bp, Artificial
  Synthetic oligonucleotide
gctcattaccgaatttcacgacaccagacacctccagaacgtgaccacctgtcgg

SEQ ID NO: 280264 - DNA, 55 bp, Artificial
  Synthetic oligonucleotide
gctccaaatgttcgcatggaacagacatctgccctgccatacgccggtgtctaca

SEQ ID NO: 280265 - DNA, 60 bp, Artificial
  Synthetic oligonucleotide
agttagcgtactacgcaacgtgcgctattacatatcgagcttagcgcactgttcagatgc

SEQ ID NO: 280266 - DNA, 55 bp, Artificial
  Synthetic oligonucleotide
gctccgaaatgaaacgtcttcagtgtccatcggaaacgaatgaggtgccggcaga

SEQ ID NO: 280267 - DNA, 55 bp, Artificial
  Synthetic oligonucleotide
gctccgcaaaagcctactacatctttagtggcctggaggggaaggctagccgacg

SEQ ID NO: 280268 - DNA, 55 bp, Artificial
  Synthetic oligonucleotide
gctccgggaaagtactagatgcgtccgatggaatgttctgccgctagagcgcacg

SEQ ID NO: 280269 - DNA, 55 bp, Artificial
  Synthetic oligonucleotide
gctcctgtactagtgcttttactgactgcgctgacttgtcttcgccactgcagtt

SEQ ID NO: 280270 - DNA, 55 bp, Artificial
  Synthetic oligonucleotide
gctcgagtcgcgtattacatcgccacaattcgacattgtcacactacacgactaa

SEQ ID NO: 280271 - DNA, 55 bp, Artificial
  Synthetic oligonucleotide
gctcgccttcataatttcgagatcctttctctccccgtctgactcctgcattccg

SEQ ID NO: 280272 - DNA, 55 bp, Artificial
  Synthetic oligonucleotide
ggactagattagggacaatcctttctagggcataatcgaatagaggcacaaaatc

SEQ ID NO: 280273 - DNA, 55 bp, Artificial
  Synthetic oligonucleotide
gctcgtggcggattccttggttgatacttgtgagagtcatgtcctcgaacgcctc

SEQ ID NO: 280274 - DNA, 55 bp, Artificial
  Synthetic oligonucleotide
gctctagaggcggctcgtcaattaggatagagctatcttcgagctccagaggagc

SEQ ID NO: 280275 - DNA, 55 bp, Artificial
  Synthetic oligonucleotide
gctctccggactttgcaactcgcgccatgagtcgagagccatctcagatggaggg

SEQ ID NO: 280276 - DNA, 59 bp, Artificial
  Synthetic oligonucleotide
acaacaggcggaatcctaggagcaactgggaatgccacatccctcaccgttcttagatc

SEQ ID NO: 280277 - DNA, 55 bp, Artificial
  Synthetic oligonucleotide
gctctgactccccagacacaattcggctgggtgggagacgagtgtatatagactc

SEQ ID NO: 280278 - DNA, 55 bp, Artificial
  Synthetic oligonucleotide
gctctgactgggctctagcgcagggcttatacgagactgtgtgtccagtggatgg

SEQ ID NO: 280279 - DNA, 55 bp, Artificial
  Synthetic oligonucleotide
gctctgcgcaacggcctacccgtgtgtcacccaggataagcatacattcgagcct

SEQ ID NO: 280280 - DNA, 55 bp, Artificial
  Synthetic oligonucleotide
gctcttagtcccttgtagctccgtactgtgtcacaccctcattctgtgctgtcag

SEQ ID NO: 280281 - DNA, 55 bp, Artificial
  Synthetic oligonucleotide
gctcttcgtatgtgagctgcggaaccccttcctgttgcgagctggtgtctggaga

SEQ ID NO: 280282 - DNA, 55 bp, Artificial
  Synthetic oligonucleotide
gctgaacaccagtaagaacctgattggtagtgccatggcgggaagtttgggtggc

SEQ ID NO: 280283 - DNA, 55 bp, Artificial
  Synthetic oligonucleotide
gctgacctagctcaacagtgggtctctccagtgtccgctggtctagaagacccgc

SEQ ID NO: 280284 - DNA, 55 bp, Artificial
  Synthetic oligonucleotide
gcgtaagctgtaccccaataggcgccctatatagaagattagatcgactgaatgc

SEQ ID NO: 280285 - DNA, 55 bp, Artificial
  Synthetic oligonucleotide
gcgtacatgggcctggccaggtttcaggcctcgtttaacctactgggaagaatct

SEQ ID NO: 280286 - DNA, 55 bp, Artificial
  Synthetic oligonucleotide
gcgtagggtcaggtccttagtggtagcgtagatgccaaggtctgtacgtaggcgg

SEQ ID NO: 280287 - DNA, 51 bp, Artificial
  Synthetic oligonucleotide
tcggatagttccgttttagtataaccctaaggctaaccttaaggtccacca

SEQ ID NO: 280288 - DNA, 55 bp, Artificial
  Synthetic oligonucleotide
gcgtatcattgggacacgattgcaggatcagccttgcggttgtcatgatgcaatc

SEQ ID NO: 280289 - DNA, 55 bp, Artificial
  Synthetic oligonucleotide
gcgtcaagatgggaacatagatctagattgccgtgtctactgacagagtaactcc

SEQ ID NO: 280290 - DNA, 55 bp, Artificial
  Synthetic oligonucleotide
gcgtcagatcattgttcgttctctaacagccgccgtttaatcagactgctcaaca

SEQ ID NO: 280291 - DNA, 55 bp, Artificial
  Synthetic oligonucleotide
gcgtccctggacggactgtggtattcaaggcacggagccggatagagagggatcg

SEQ ID NO: 280292 - DNA, 55 bp, Artificial
  Synthetic oligonucleotide
gcgtcgaaggtaaaagacgaaaattgaagcatccgtgtctcatcgacagacccca

SEQ ID NO: 280293 - DNA, 55 bp, Artificial
  Synthetic oligonucleotide
gcgtcgccgagcaattgcttagggctctcaactactagactagtatagatatgta

SEQ ID NO: 280294 - DNA, 55 bp, Artificial
  Synthetic oligonucleotide
gcgtctacattgcgaaccattctatgatttgtggcaagattgaagcgatgtcaag

SEQ ID NO: 280295 - DNA, 55 bp, Artificial
  Synthetic oligonucleotide
gcgtctccgatcgaccaggtaccctaacgaaacagtcttagctttgattcggtcg

SEQ ID NO: 280296 - DNA, 55 bp, Artificial
  Synthetic oligonucleotide
gcgtctcgaagctggagttgacgagtttcttgggatgcgctatgcatctccgcct

SEQ ID NO: 280297 - DNA, 55 bp, Artificial
  Synthetic oligonucleotide
gcgtgagtttcaagggcggagatcacaataatggggaactagatacggagtaggc

SEQ ID NO: 280298 - DNA, 58 bp, Artificial
  Synthetic oligonucleotide
cctgctacccccatgtgaacgtcatgggggttgacccgagcgtttcgcttagatgtca

SEQ ID NO: 280299 - DNA, 55 bp, Artificial
  Synthetic oligonucleotide
ggagcactaagaggatgcgactgactcgaacggtctgcgaaaagctatgccgttc

SEQ ID NO: 280300 - DNA, 55 bp, Artificial
  Synthetic oligonucleotide
ggagcaacggagcagccagctacacgttgaccattcccttgagcatcacccgata

SEQ ID NO: 280301 - DNA, 55 bp, Artificial
  Synthetic oligonucleotide
gcgttgatccaccggcacgatacatccgtgcccatagaatctatactgaggtcgg

SEQ ID NO: 280302 - DNA, 55 bp, Artificial
  Synthetic oligonucleotide
gcgttggcaacaaaagatgtcttccttgttagaagccaggtgtaagggcgaagct

SEQ ID NO: 280303 - DNA, 55 bp, Artificial
  Synthetic oligonucleotide
gcgttttgaccaagtccccgcatgcgattctgataagatagtaagtcgtagtacg

SEQ ID NO: 280304 - DNA, 55 bp, Artificial
  Synthetic oligonucleotide
ggagatggatgacttctgttgtgtaccctacattactaggaggaggcattaaggg

SEQ ID NO: 280305 - DNA, 55 bp, Artificial
  Synthetic oligonucleotide
gctacaggggtacttacttccgttggtacctctcttgctagctcaggggcctcta

SEQ ID NO: 280306 - DNA, 55 bp, Artificial
  Synthetic oligonucleotide
gctacattaattacagctactggcactaagtactcaaaaccttggaaaccgtgca

SEQ ID NO: 280307 - DNA, 55 bp, Artificial
  Synthetic oligonucleotide
gctaccggcactggtaggaagacgaagcttgtatgatgttgactcttcgctgctg

SEQ ID NO: 280308 - DNA, 55 bp, Artificial
  Synthetic oligonucleotide
gctaccttgaagctaatgctgtcagacgagggctatataccgatgaccgctcgcc

SEQ ID NO: 280309 - DNA, 58 bp, Artificial
  Synthetic oligonucleotide
acaaagatgaagctgggcgggttattctactggcatattggaggcgacgcacggggac

SEQ ID NO: 280310 - DNA, 55 bp, Artificial
  Synthetic oligonucleotide
gctagacgacaagtcccctttatcaggtaggcgacgaactctacgtgaacattgc

SEQ ID NO: 280311 - DNA, 55 bp, Artificial
  Synthetic oligonucleotide
gctagcctggtcaatgtctcaacaccgacacgatagctcgggccgaagaaggggt

SEQ ID NO: 280312 - DNA, 55 bp, Artificial
  Synthetic oligonucleotide
gctaggctacattgctttgagacccaccctatcacaaacgagagacggtttgtca

SEQ ID NO: 280313 - DNA, 55 bp, Artificial
  Synthetic oligonucleotide
gctatcagccttcttgaggattcctttcagtagcgctcgcctttctattgcgtct

SEQ ID NO: 280314 - DNA, 55 bp, Artificial
  Synthetic oligonucleotide
ggagacgcgatatccattggggcgagaaatgccattttgttggcgctcgtgggtg

SEQ ID NO: 280315 - DNA, 55 bp, Artificial
  Synthetic oligonucleotide
gcttagttatatcgcatgagcaggctaatggggccaggtgcactatttactggga

SEQ ID NO: 280316 - DNA, 55 bp, Artificial
  Synthetic oligonucleotide
gcttcctctacctggtagccggaggcttgttctctcgtggcatatggtacttcca

SEQ ID NO: 280317 - DNA, 55 bp, Artificial
  Synthetic oligonucleotide
gcttcgccgtcaatatctctcttatgactgcgacgtgtaggaagttgtggttgag

SEQ ID NO: 280318 - DNA, 55 bp, Artificial
  Synthetic oligonucleotide
gcttctttacattgatggagctggtgcattgagcgagtatttagaaatccggtct

SEQ ID NO: 280319 - DNA, 55 bp, Artificial
  Synthetic oligonucleotide
ggacctggatctggacctagattgcagttgggtggtgggtatcggagtgcccggg

SEQ ID NO: 280320 - DNA, 54 bp, Artificial
  Synthetic oligonucleotide
acaaaccgtccacttattttgccgcgcctacctacttatacgattccgaactgc

SEQ ID NO: 280321 - DNA, 55 bp, Artificial
  Synthetic oligonucleotide
gcttgacgggccgtgcatgagtttgtctaaacaccccaacaaagcaaataatcgg

SEQ ID NO: 280322 - DNA, 55 bp, Artificial
  Synthetic oligonucleotide
gcttgcaaacacaactgccgtcttgaatgccctgacatgtgacctggtcaggcgt

SEQ ID NO: 280323 - DNA, 54 bp, Artificial
  Synthetic oligonucleotide
gcttggttgcgtctttataataccgaagcccgggcggttacaaggagccgtaga

SEQ ID NO: 280324 - DNA, 55 bp, Artificial
  Synthetic oligonucleotide
ggaccgatgagaaactcaataggtccttcctaatcttgcaacggatccaagggca

SEQ ID NO: 280325 - DNA, 55 bp, Artificial
  Synthetic oligonucleotide
gcttgtcgctcggccatcccaagtcaggtatcggccaaggggtgccagcctcaat

SEQ ID NO: 280326 - DNA, 55 bp, Artificial
  Synthetic oligonucleotide
gctttatcttgaccgactgaaacggagtatgtggcaatgaacggagtcgcacctt

SEQ ID NO: 280327 - DNA, 55 bp, Artificial
  Synthetic oligonucleotide
gctttcgcatgatcggccctatcgcctgataccaattttagcccccctcgcccat

SEQ ID NO: 280328 - DNA, 55 bp, Artificial
  Synthetic oligonucleotide
gctttgcttcccgcggtaagaagcggtaatctggcatacgcaccggtatttattc

SEQ ID NO: 280329 - DNA, 55 bp, Artificial
  Synthetic oligonucleotide
ggaaaagcgagatgtggtgacctttctgaatcgcagccgagtgtttgtctccgtg

SEQ ID NO: 280330 - DNA, 55 bp, Artificial
  Synthetic oligonucleotide
ggaccccgagcagagagtagacgagacgatgaaacgaggccaaacccacgactga

SEQ ID NO: 280331 - DNA, 53 bp, Artificial
  Synthetic oligonucleotide
acaaaaaaccgtgggttcagggatagcgtcgggggaagcctagtcaacagaga

SEQ ID NO: 280332 - DNA, 55 bp, Artificial
  Synthetic oligonucleotide
ggaaccggttcgccagaaaggtgattgatcggttcgagggcaatttgcatggtcg

SEQ ID NO: 280333 - DNA, 55 bp, Artificial
  Synthetic oligonucleotide
ggaccacggttcaatctgatggcttcgtataggtctccattcgcacaatactcca

SEQ ID NO: 280334 - DNA, 55 bp, Artificial
  Synthetic oligonucleotide
ggaacgtgcaaatggtaccgttcgagcttcctactttggatagggcatatgcgtg

SEQ ID NO: 280335 - DNA, 55 bp, Artificial
  Synthetic oligonucleotide
ggacatccaataaggcctgctggacccgatacccacactgtctagcggagacccc

SEQ ID NO: 280336 - DNA, 55 bp, Artificial
  Synthetic oligonucleotide
ggaagtagctagaaaatgtcagcgtgttgaaatgtctcatggtgcttggactcac

SEQ ID NO: 280337 - DNA, 55 bp, Artificial
  Synthetic oligonucleotide
ggaagtcagacttgaaggacaaggggcggagagaaccatgcgggtattcctcggc

SEQ ID NO: 280338 - DNA, 54 bp, Artificial
  Synthetic oligonucleotide
ggaatagctactataaacggggaaataaggccgcaatacgtgtagtttagccag

SEQ ID NO: 280339 - DNA, 53 bp, Artificial
  Synthetic oligonucleotide
ggaatcagggacccggttgcctttactccgagcctaacggaacgctcgatttc

SEQ ID NO: 280340 - DNA, 55 bp, Artificial
  Synthetic oligonucleotide
ggaatcgtgatattagcttgcatgttcggaaagaatgtagcacatctgcatcgac

SEQ ID NO: 280341 - DNA, 55 bp, Artificial
  Synthetic oligonucleotide
ggaatggacacgcgttgatccatgctccaaccatctatagtccccgtcaccctcc

SEQ ID NO: 280342 - DNA, 57 bp, Artificial
  Synthetic oligonucleotide
ctaactgtccgactagttggtaactgagtcgagacgttcccagcgttcgactggctg

SEQ ID NO: 280343 - DNA, 55 bp, Artificial
  Synthetic oligonucleotide
ggacaatcatacgggagtgcttctattgaggtctctaaattcgaatgtaccgtcg

SEQ ID NO: 280344 - DNA, 55 bp, Artificial
  Synthetic oligonucleotide
ggacaggatccaccgcaagatatcggcatgccgggtcaggcatcggcctgagaca

SEQ ID NO: 280345 - DNA, 55 bp, Artificial
  Synthetic oligonucleotide
gctgacctgtatattctctatttggccaatcagagtccactatgtgacgaagtcc

SEQ ID NO: 280346 - DNA, 55 bp, Artificial
  Synthetic oligonucleotide
gctgataagaattcccaacagtgggaccaacaatttaatagcaaggcactagacc

SEQ ID NO: 280347 - DNA, 55 bp, Artificial
  Synthetic oligonucleotide
gctgattgttacagctactattcatcgattgccgctagcaaaccccgacatagcc

SEQ ID NO: 280348 - DNA, 55 bp, Artificial
  Synthetic oligonucleotide
gctgcctgccttcagacaaggcccgctgggtaattgcatgcttgagtgggtcata

SEQ ID NO: 280349 - DNA, 55 bp, Artificial
  Synthetic oligonucleotide
gctgcgaagagtgccaatcgaacacttccacaacatatcatgggatcaaaagacc

SEQ ID NO: 280350 - DNA, 55 bp, Artificial
  Synthetic oligonucleotide
gctgcgactcagaatgcaagttgttgttgtgataggcacagacaggcgcaccgac

SEQ ID NO: 280351 - DNA, 55 bp, Artificial
  Synthetic oligonucleotide
gctgcgtccctataccacaaggtatagttggcgatgcccgtgagggtccggtgct

SEQ ID NO: 280352 - DNA, 55 bp, Artificial
  Synthetic oligonucleotide
gctgctaaccacgcgccactcttccgcggaatcatgaaccgactcgtgtcacgtc

SEQ ID NO: 280353 - DNA, 54 bp, Artificial
  Synthetic oligonucleotide
ggtgttcttaaattaggtggtcaaacatctaagagtttagataaaggtactgta

SEQ ID NO: 280354 - DNA, 55 bp, Artificial
  Synthetic oligonucleotide
gctggccggggtgggttttggtcggaggccatgcggtgtcaatgggcgttatggt

SEQ ID NO: 280355 - DNA, 55 bp, Artificial
  Synthetic oligonucleotide
gctgggcaagtgtcggcggaccaaggtagtactgagccagactaagctcgctacg

SEQ ID NO: 280356 - DNA, 55 bp, Artificial
  Synthetic oligonucleotide
ggacggagggccccaggatgaatggggaaacgtcatcagtaacgggagcttcagc

SEQ ID NO: 280357 - DNA, 55 bp, Artificial
  Synthetic oligonucleotide
gctgggttatatggttcgtagactgccaatccacccccgtgacctaagcacatgg

SEQ ID NO: 280358 - DNA, 55 bp, Artificial
  Synthetic oligonucleotide
ggacgcggatccggcggtacctatcatgaggcggcgggattcataagagcgggtt

SEQ ID NO: 280359 - DNA, 55 bp, Artificial
  Synthetic oligonucleotide
gctggttctctatggcgacgtgatcgttacttggaccgggccactcctcgtggtc

SEQ ID NO: 280360 - DNA, 55 bp, Artificial
  Synthetic oligonucleotide
gctgtaaatgatgagcgcaatagataattaggtgtctgcaaccctggcacaacac

SEQ ID NO: 280361 - DNA, 55 bp, Artificial
  Synthetic oligonucleotide
ggacgcctagaaaacaggaacgttctctccttgcatgaatgctacatgcacgaag

SEQ ID NO: 280362 - DNA, 54 bp, Artificial
  Synthetic oligonucleotide
gctgtcctccggtggtaaaccgtaagatctcgcttggtgccggagtaccgaaac

SEQ ID NO: 280363 - DNA, 55 bp, Artificial
  Synthetic oligonucleotide
gctgtcttgggaaatgtgagcatggaaggtattgagtatatgacttactccgcag

SEQ ID NO: 280364 - DNA, 60 bp, Artificial
  Synthetic oligonucleotide
gtatatatgatgtgtgaagattaagacactctattgaattacaattggccaatcatgaac

SEQ ID NO: 280365 - DNA, 60 bp, Artificial
  Synthetic oligonucleotide
aatttcctttgtcggccttgcatcgaccatcatactgtgatttgctattatactccagtt

SEQ ID NO: 280366 - DNA, 55 bp, Artificial
  Synthetic oligonucleotide
gctgtgacaacagagtctacttgggcgtcaattgtgatagagcggtggctggacc

SEQ ID NO: 280367 - DNA, 55 bp, Artificial
  Synthetic oligonucleotide
gctgtgattggggatagaccctgtgatatccgttctgatcaaggtcaccagtgcc

SEQ ID NO: 280368 - DNA, 55 bp, Artificial
  Synthetic oligonucleotide
gctgttctagggctatggaagtcactggtcgaggtaatcgagagtcagttgacgc

SEQ ID NO: 280369 - DNA, 55 bp, Artificial
  Synthetic oligonucleotide
gcttaacgcgtccccggaatcccgaggcctttctatgcgttgcatctcgacggta

SEQ ID NO: 280370 - DNA, 55 bp, Artificial
  Synthetic oligonucleotide
ggacgaggcaatgtgttcttggatcgaccggtagcaatctgggagctgattggac

SEQ ID NO: 280371 - DNA, 55 bp, Artificial
  Synthetic oligonucleotide
gcttagcacagaatccgaaatcggctaagaggtcgtcagcatcaatctcccttgg

SEQ ID NO: 280372 - DNA, 55 bp, Artificial
  Synthetic oligonucleotide
gcttagtgcccgggagattaattattgaggttcagacttcagccgatgatcttcg

SEQ ID NO: 280373 - DNA, 55 bp, Artificial
  Synthetic oligonucleotide
gcgacatgactcgggcgtttcatacgcctaggttatctttctgcacgtgacgacg

SEQ ID NO: 280374 - DNA, 55 bp, Artificial
  Synthetic oligonucleotide
gcgacatggtgacaattgcagtcattgcgtttgtagctgcgtaacttttggtggc

SEQ ID NO: 280375 - DNA, 55 bp, Artificial
  Synthetic oligonucleotide
gcgacccatgcatcgggatacacgtgatactgcgttcccatgacaacttcagacg

SEQ ID NO: 280376 - DNA, 60 bp, Artificial
  Synthetic oligonucleotide
ctaactcaatcacaaatagcaatctctcaactactaggcacattgaactactctactagt

SEQ ID NO: 280377 - DNA, 55 bp, Artificial
  Synthetic oligonucleotide
ggatactcaaggctcgcttcgcagagtatcaagacaaagatggcgtcccgtggtc

SEQ ID NO: 280378 - DNA, 55 bp, Artificial
  Synthetic oligonucleotide
gcgacctgcatagttacgacttcttccatgcgagtaccaccggatcattctagga

SEQ ID NO: 280379 - DNA, 55 bp, Artificial
  Synthetic oligonucleotide
gcgacgaatagcatcccacgcggatgcccactcccgtgtcaggtcgataccatgg

SEQ ID NO: 280380 - DNA, 55 bp, Artificial
  Synthetic oligonucleotide
gcgacgactgatcggtgggtgactatctagatcgcgtgcgctggttgtacccgcg

SEQ ID NO: 280381 - DNA, 55 bp, Artificial
  Synthetic oligonucleotide
gcgacgcctgtacacagacgcgactatcgtcaaggcctgtctcaatatatgccac

SEQ ID NO: 280382 - DNA, 55 bp, Artificial
  Synthetic oligonucleotide
gcgacggttcaattatcaaggagtggagaccaccgtctcaacagacgggtacgcc

SEQ ID NO: 280383 - DNA, 55 bp, Artificial
  Synthetic oligonucleotide
gcgactcagcttcgcaactctactgaccacctatgccacactcatcggtgacctg

SEQ ID NO: 280384 - DNA, 55 bp, Artificial
  Synthetic oligonucleotide
gcgactcattacctcgcctgtcgtcgagtcataattggttagaactacgtgtgca

SEQ ID NO: 280385 - DNA, 55 bp, Artificial
  Synthetic oligonucleotide
gcgactccgacacaaatggcccagtaccgaccgacatatacgtcggcccacctga

SEQ ID NO: 280386 - DNA, 55 bp, Artificial
  Synthetic oligonucleotide
gcgactttagcagatgcagtcaaccagacggtatgtcgctgttacagaagatgct

SEQ ID NO: 280387 - DNA, 60 bp, Artificial
  Synthetic oligonucleotide
tcggccaagcgcagagattagagatgcacatactaaggatacctggacgagtggaatcga

SEQ ID NO: 280388 - DNA, 55 bp, Artificial
  Synthetic oligonucleotide
gcgagaatgtggcgccatactttcccgaatatgcgataagatgttgacacagtag

SEQ ID NO: 280389 - DNA, 55 bp, Artificial
  Synthetic oligonucleotide
gcgagaccaatccggcttgttccctactgtatgcgacaaatagatgaagggttcg

SEQ ID NO: 280390 - DNA, 55 bp, Artificial
  Synthetic oligonucleotide
gcgagacgcagggactgagattaggctagggaaagactgcggaaataggccaagt

SEQ ID NO: 280391 - DNA, 55 bp, Artificial
  Synthetic oligonucleotide
gcgagagtctcgagggtggtgatatactcggggttcgacccatcatcggagtcag

SEQ ID NO: 280392 - DNA, 55 bp, Artificial
  Synthetic oligonucleotide
gcgagattcatggcctatgatacagatcaagatcgaatccagtgctaccttgcgc

SEQ ID NO: 280393 - DNA, 55 bp, Artificial
  Synthetic oligonucleotide
gcgagcgccagtatgtcgactttcgatttagtaacgagtacaacgaaacctgtga

SEQ ID NO: 280394 - DNA, 55 bp, Artificial
  Synthetic oligonucleotide
gcgagctaattcagtatgcaatgtgtcgctatacaccccatctctcaaagaagca

SEQ ID NO: 280395 - DNA, 55 bp, Artificial
  Synthetic oligonucleotide
gcgagtcagacctttgggttgtcagagacgctgcaagggattgcgggttagggcg

SEQ ID NO: 280396 - DNA, 55 bp, Artificial
  Synthetic oligonucleotide
gcgagtgtggcgcgtggagggaagacaaaggcctccttgtagaattgattaatcg

SEQ ID NO: 280397 - DNA, 55 bp, Artificial
  Synthetic oligonucleotide
gcgatagtcgtgactcattgctgtactgccacctgctctaaacttcatttagatc

SEQ ID NO: 280398 - DNA, 57 bp, Artificial
  Synthetic oligonucleotide
gcagccactacgaaactaacagaacctcacggccgcggtagattgaaggttgtcacg

SEQ ID NO: 280399 - DNA, 55 bp, Artificial
  Synthetic oligonucleotide
gcgatcatgacgcctcgtgtacttccatcgcgcaatgtgtctaatccgtatctcc

SEQ ID NO: 280400 - DNA, 55 bp, Artificial
  Synthetic oligonucleotide
gcgatgtagtagctcatgacttggtgagtcgagtttattttgagacacagatttc

SEQ ID NO: 280401 - DNA, 55 bp, Artificial
  Synthetic oligonucleotide
gcgcaaaggtctggacctgatctatagcatgtgcgacaccacaaatgcggctccc

SEQ ID NO: 280402 - DNA, 55 bp, Artificial
  Synthetic oligonucleotide
gcgcaagcttcctggtatgttgcgccaaccacgagcgaactgcactcgttccatc

SEQ ID NO: 280403 - DNA, 55 bp, Artificial
  Synthetic oligonucleotide
gcctacggaatcttgatctattaccgcggagggcccacatcatccagtcattcgg

SEQ ID NO: 280404 - DNA, 55 bp, Artificial
  Synthetic oligonucleotide
gcctactagcggcgatttagtccgagcgactatcgtagctaagaccgagtagcca

SEQ ID NO: 280405 - DNA, 55 bp, Artificial
  Synthetic oligonucleotide
gcctagagcataccgaagcgtgttttgtcaaacagacggacagcgagaggtaagc

SEQ ID NO: 280406 - DNA, 55 bp, Artificial
  Synthetic oligonucleotide
gcctagatactagccacctcgcatcggatcgagagtcgagacacgagggccgacc

SEQ ID NO: 280407 - DNA, 55 bp, Artificial
  Synthetic oligonucleotide
gcctagatctccgtgacgtcatgcacatggctgctactctgaacagagtatgtag

SEQ ID NO: 280408 - DNA, 55 bp, Artificial
  Synthetic oligonucleotide
gcctagatgaggaggcgcattagcatgaccatagtcacccagcggaatcccacca

SEQ ID NO: 280409 - DNA, 60 bp, Artificial
  Synthetic oligonucleotide
gcagcccacaagtgtaacccgctgtagcttattccaacatgaatggtcaatctactttaa

SEQ ID NO: 280410 - DNA, 55 bp, Artificial
  Synthetic oligonucleotide
gcctagggaacgaatgtaattggatcactcggttcgacactgcgcccttaggccg

SEQ ID NO: 280411 - DNA, 55 bp, Artificial
  Synthetic oligonucleotide
gcctaggggtataaaagacataccgcgggcaggatatccccagagaatgtgaggc

SEQ ID NO: 280412 - DNA, 55 bp, Artificial
  Synthetic oligonucleotide
gcctcgatgcgagagtatcgagccaggagtacggcaaggtattcggaggcttccc

SEQ ID NO: 280413 - DNA, 55 bp, Artificial
  Synthetic oligonucleotide
ggatcaaaacagctacgaacatgatcctatctggacgtacttgtctcacactcca

SEQ ID NO: 280414 - DNA, 55 bp, Artificial
  Synthetic oligonucleotide
ggatattggttcatgaaatgcgagtcccgagacagctgcggggtatttatctgga

SEQ ID NO: 280415 - DNA, 55 bp, Artificial
  Synthetic oligonucleotide
gcctctcgggatcgcacctgtcgggtctccatcatgttccaatgttggaggagcg

SEQ ID NO: 280416 - DNA, 55 bp, Artificial
  Synthetic oligonucleotide
gcctctcgtccgaggagtgtacgtattaagagtcttcattgcatcctgcttgtac

SEQ ID NO: 280417 - DNA, 55 bp, Artificial
  Synthetic oligonucleotide
gcctgacgctatgcacccgctctgggtatcaccgtagttgaccgtccacggcgta

SEQ ID NO: 280418 - DNA, 55 bp, Artificial
  Synthetic oligonucleotide
gcctgagatgttcgaatgagggcggagtgagctaatcgtctcctggttatcacgt

SEQ ID NO: 280419 - DNA, 55 bp, Artificial
  Synthetic oligonucleotide
ggatatccctgtgccagacatcctacagcatattgtcggacactctggtatttct

SEQ ID NO: 280420 - DNA, 60 bp, Artificial
  Synthetic oligonucleotide
catgatgatattcattctgcgtcgtaaaggacgatggaagtaccgaggcgagcaatcggt

SEQ ID NO: 280421 - DNA, 55 bp, Artificial
  Synthetic oligonucleotide
gcctgcttagcgtgtcttgagactgtctttctactgccgagtgccgattagttgg

SEQ ID NO: 280422 - DNA, 55 bp, Artificial
  Synthetic oligonucleotide
gcctgtactagcactaagatcatcctgtagattggagagacagtcccagacgatg

SEQ ID NO: 280423 - DNA, 55 bp, Artificial
  Synthetic oligonucleotide
ggatatcacgatagatgtcttcgaatggcgacaagtcaggacgggcttcctcgag

SEQ ID NO: 280424 - DNA, 55 bp, Artificial
  Synthetic oligonucleotide
gcctgtctttattctgatagaatggattccacggtaggcttactagacccctttc

SEQ ID NO: 280425 - DNA, 55 bp, Artificial
  Synthetic oligonucleotide
gccttgcacaacccagattaagaccctagtgtcattagggaataagcaatgacac

SEQ ID NO: 280426 - DNA, 55 bp, Artificial
  Synthetic oligonucleotide
gccttgcgtagtcgaagtcagagcttcagtcggcgattgcaagtcactcaagcct

SEQ ID NO: 280427 - DNA, 55 bp, Artificial
  Synthetic oligonucleotide
gccttgttctgagacttcacatgttgcgacatggagaagaatcgctgctgaggca

SEQ ID NO: 280428 - DNA, 55 bp, Artificial
  Synthetic oligonucleotide
gccttttatagctcccctgacaacgaaacttccctagtgtcacatagccgagggg

SEQ ID NO: 280429 - DNA, 55 bp, Artificial
  Synthetic oligonucleotide
gcgaagagcacgggccctagaggttggcggattcgtcgtgatagaaggagtgtca

SEQ ID NO: 280430 - DNA, 55 bp, Artificial
  Synthetic oligonucleotide
gcgaagtctacttcacgccgacgttggttctcactatcactcgaaggacgacatg

SEQ ID NO: 280431 - DNA, 60 bp, Artificial
  Synthetic oligonucleotide
aattgccgagccaacggagactagcaatgacctggacgactacgctgagtacgcattcgt

SEQ ID NO: 280432 - DNA, 55 bp, Artificial
  Synthetic oligonucleotide
gcgctgtggatcaaggccaaattataggtctgtcgtactatcggtccgctcctca

SEQ ID NO: 280433 - DNA, 55 bp, Artificial
  Synthetic oligonucleotide
gcgcttgggtagacagaacgatactaggcgattacacaggtgcccgggatactac

SEQ ID NO: 280434 - DNA, 55 bp, Artificial
  Synthetic oligonucleotide
gcggaaaattggtatactccgtgcgactgtagtcgtttgctcccgcgagtcgtgt

SEQ ID NO: 280435 - DNA, 51 bp, Artificial
  Synthetic oligonucleotide
gcggacggggaaagtcacggggagtttagcggacgggttgacgtctccaaa

SEQ ID NO: 280436 - DNA, 55 bp, Artificial
  Synthetic oligonucleotide
ggagggagattgagaatgcggcacatctcgcgagaatgggaatatattcggaggg

SEQ ID NO: 280437 - DNA, 55 bp, Artificial
  Synthetic oligonucleotide
gcggagcgcccaactccagcggagaccgaccctcgatcatcgagcttttaatcgc

SEQ ID NO: 280438 - DNA, 54 bp, Artificial
  Synthetic oligonucleotide
gcggatacggctctagtctattttcactcccgaaccgtctacgataaaccctag

SEQ ID NO: 280439 - DNA, 55 bp, Artificial
  Synthetic oligonucleotide
gcggatcttgtgacgccacgtgcgtatttgactcttttatcgtccgtgaaggtcg

SEQ ID NO: 280440 - DNA, 54 bp, Artificial
  Synthetic oligonucleotide
ggaggagtgctttcctaacctaataaagaagggcgttagtatcctatcgctttc

SEQ ID NO: 280441 - DNA, 55 bp, Artificial
  Synthetic oligonucleotide
gcggcattacctatctactcctcggtaccccacgcgaggtacgctggctgtccgt

SEQ ID NO: 280442 - DNA, 60 bp, Artificial
  Synthetic oligonucleotide
catgcaagtgggttgtatagcacacctctatgcgtgtacattccccctgcgggctcgtgg

SEQ ID NO: 280443 - DNA, 55 bp, Artificial
  Synthetic oligonucleotide
gcggccaaggaccaccgttttgatttgcagtcggcgggtagaaagttcagcgacc

SEQ ID NO: 280444 - DNA, 55 bp, Artificial
  Synthetic oligonucleotide
ggagctgttggggtcatcatgggctgttgatggataacgattaggatggcgctgc

SEQ ID NO: 280445 - DNA, 55 bp, Artificial
  Synthetic oligonucleotide
gcggcgaacctagatttccgaggtcagcttccttcacgtgggaccacagagccgc

SEQ ID NO: 280446 - DNA, 55 bp, Artificial
  Synthetic oligonucleotide
gcggctgcgcaaacggaataccagcaaatcgaaaagtcaaatgatcacggaggcc

SEQ ID NO: 280447 - DNA, 55 bp, Artificial
  Synthetic oligonucleotide
gcggcttacgaaacaacaccgaagcgcccgagtatctaagtcggatcggtagcga

SEQ ID NO: 280448 - DNA, 55 bp, Artificial
  Synthetic oligonucleotide
ggagctgtgtaggtactatgagtaaggctcgcaagttagggtggacgggctatgc

SEQ ID NO: 280449 - DNA, 55 bp, Artificial
  Synthetic oligonucleotide
gcggcttggtgactcagatttgagcagcacggaccaatcatagttaccctgacgc

SEQ ID NO: 280450 - DNA, 55 bp, Artificial
  Synthetic oligonucleotide
gcgggaagcctatacccttttaggccaccatccagtatagattagtgcctaaggc

SEQ ID NO: 280451 - DNA, 55 bp, Artificial
  Synthetic oligonucleotide
gcgggagaccgactcgctcagcggagacactgtactccgaagtatgttggtaggc

SEQ ID NO: 280452 - DNA, 55 bp, Artificial
  Synthetic oligonucleotide
gcgggagatcaggatcgctgttgcgtcacctgggttaaccgacgacgtgtcattt

SEQ ID NO: 280453 - DNA, 59 bp, Artificial
  Synthetic oligonucleotide
cctgcatcagttcaccttaagggtggccagtggtttgcgatgtcgcacccttggtacta

SEQ ID NO: 280454 - DNA, 55 bp, Artificial
  Synthetic oligonucleotide
ggagcgtttggttctttgctagcagcgggtattattcaaggcctagaaggagtgc

SEQ ID NO: 280455 - DNA, 55 bp, Artificial
  Synthetic oligonucleotide
gcgggttatatctcgtctgaatcagtaggtccaccgtcataccctgcaactcaag

SEQ ID NO: 280456 - DNA, 55 bp, Artificial
  Synthetic oligonucleotide
gcggtccaccttgcactgataaggatgacacgtgacttctactacgtataagtac

SEQ ID NO: 280457 - DNA, 55 bp, Artificial
  Synthetic oligonucleotide
gcggtgtacttcgattatacctcggatctcttcaccccactatgtcggtattccg

SEQ ID NO: 280458 - DNA, 55 bp, Artificial
  Synthetic oligonucleotide
gcggtgtcagtcaactctctctgacgtcgatgtcttgtccagtgcgcgtcactga

SEQ ID NO: 280459 - DNA, 55 bp, Artificial
  Synthetic oligonucleotide
gcggtgtgtcattcgccacacgcatcgctccgtagtgcaatcagcggccaagtcg

SEQ ID NO: 280460 - DNA, 55 bp, Artificial
  Synthetic oligonucleotide
gcggttcagagcgttctagagcgtggaaaccacactcatccacgagcctgatacc

SEQ ID NO: 280461 - DNA, 55 bp, Artificial
  Synthetic oligonucleotide
gcgcacaaagatataggcttctcgaggtcattaacaggtatctaagcacgaaccc

SEQ ID NO: 280462 - DNA, 55 bp, Artificial
  Synthetic oligonucleotide
gcgcacaatgctagtgtcgtatggatatgcgctgtcggccataacggagaccagc

SEQ ID NO: 280463 - DNA, 55 bp, Artificial
  Synthetic oligonucleotide
gcgcacccttcacaagcaatcggacggttagacggatcctagcgagcatgaagtg

SEQ ID NO: 280464 - DNA, 56 bp, Artificial
  Synthetic oligonucleotide
aattctttccgttaccacagggttatgccgcctctcccttggatgaacattccatc

SEQ ID NO: 280465 - DNA, 55 bp, Artificial
  Synthetic oligonucleotide
gcgcagacaccatttgagcggtggtagctggttgaggggcattgtaggaccagat

SEQ ID NO: 280466 - DNA, 55 bp, Artificial
  Synthetic oligonucleotide
gcgcagagcatacgtactcattccgtgaacgctggtctggtgtcagtctacgctt

SEQ ID NO: 280467 - DNA, 55 bp, Artificial
  Synthetic oligonucleotide
gcgcagtcattcctgttgataacgcgtggtcgactatttaggtgataggcaaggc

SEQ ID NO: 280468 - DNA, 55 bp, Artificial
  Synthetic oligonucleotide
gcgcagtctacaacgtcacaatccattcaactgtgggcctctcacaagccgtgtc

SEQ ID NO: 280469 - DNA, 55 bp, Artificial
  Synthetic oligonucleotide
gcgcataaccttcgtccgtaacagcgcatttctgtgattaggatgagtatcccgc

SEQ ID NO: 280470 - DNA, 55 bp, Artificial
  Synthetic oligonucleotide
gcgcatgagcgtagctaatacgcaggagttgtcgtatcctatgaaagtcagtcta

SEQ ID NO: 280471 - DNA, 55 bp, Artificial
  Synthetic oligonucleotide
gcgcattcctcagtcatggatatcttatcccgtcgttttgccgatctcccaattc

SEQ ID NO: 280472 - DNA, 55 bp, Artificial
  Synthetic oligonucleotide
gcgccacgattccaggatctggtggtatgtcttggttgctcggtctatgatttga

SEQ ID NO: 280473 - DNA, 55 bp, Artificial
  Synthetic oligonucleotide
ggaggtctggctggcagcatgacgagtttgcaagcactggggatttgggacagaa

SEQ ID NO: 280474 - DNA, 55 bp, Artificial
  Synthetic oligonucleotide
gcgcccgagtatctaagtcggatcggtagcgaatcactaacgtctaccctaggcg

SEQ ID NO: 280475 - DNA, 60 bp, Artificial
  Synthetic oligonucleotide
gagaggaatgattccaggtcgagacatgactatgggccacaaggtatccaaacaccattt

SEQ ID NO: 280476 - DNA, 58 bp, Artificial
  Synthetic oligonucleotide
tcgggaaacctaagcattcaactaggttaatgatagatagaagacaaacggcagaggc

SEQ ID NO: 280477 - DNA, 55 bp, Artificial
  Synthetic oligonucleotide
gcgccgctgggatgatgtctcggtgttatgacggaagtctcgtttcggccggacg

SEQ ID NO: 280478 - DNA, 55 bp, Artificial
  Synthetic oligonucleotide
gcgccgggagatgataaacgcaggatccactacattggtataaagcggtacaccg

SEQ ID NO: 280479 - DNA, 55 bp, Artificial
  Synthetic oligonucleotide
gcgccggtgtttactggccccgtgctctatacacagcccaacttggtaccgtcgc

SEQ ID NO: 280480 - DNA, 55 bp, Artificial
  Synthetic oligonucleotide
ggaggtccaaagattccggagtgcccaagaaatctgttcgtgctgcgtgcgtggg

SEQ ID NO: 280481 - DNA, 55 bp, Artificial
  Synthetic oligonucleotide
gcgcctagacccgcagaattcgtcatacacatgtttcgccctcctaacgggtcac

SEQ ID NO: 280482 - DNA, 55 bp, Artificial
  Synthetic oligonucleotide
ggaggtatacttcggcaaggctaaggatgtcgtgggtgaacttcggagtaagtgc

SEQ ID NO: 280483 - DNA, 55 bp, Artificial
  Synthetic oligonucleotide
gcgcgacgctaaagcggctctcacccatttctcacccggtcggcaggcacccgac

SEQ ID NO: 280484 - DNA, 55 bp, Artificial
  Synthetic oligonucleotide
gcgcgactctgctgcgagtatggtctcagaagtagcagaggcgtaccaagttgta

SEQ ID NO: 280485 - DNA, 55 bp, Artificial
  Synthetic oligonucleotide
gcgcgcaaaatccggatgcgcgaagtgaatcacgcatcgatgggtctgcgtggtg

SEQ ID NO: 280486 - DNA, 55 bp, Artificial
  Synthetic oligonucleotide
gcgcggtgttaaggattcgactctcggctgtgataggagatgccggcttcgactg

SEQ ID NO: 280487 - DNA, 58 bp, Artificial
  Synthetic oligonucleotide
gcacagtaacattggtcccgagtaatgcattgttgggttgagtaaacggcgaggcgaa

SEQ ID NO: 280488 - DNA, 55 bp, Artificial
  Synthetic oligonucleotide
gcgcgtgtttgtattctccactacgttggggctcttgagtaggatccggactccg

SEQ ID NO: 280489 - DNA, 55 bp, Artificial
  Synthetic oligonucleotide
gcgctatcagacctatcccggttgcaagattgttgtcgcctagcggcgtgcttat

SEQ ID NO: 280490 - DNA, 55 bp, Artificial
  Synthetic oligonucleotide
gcgctcagtgggtgtaggatctgtagccgtatgataagaagcaatctaggaaaac

SEQ ID NO: 280491 - DNA, 55 bp, Artificial
  Synthetic oligonucleotide
ggagggatcaaggctttacgtcacaccagtctcgagacaatttcctttgtcggcc

SEQ ID NO: 280492 - DNA, 55 bp, Artificial
  Synthetic oligonucleotide
ctccacagtggcgttccagggagtgaactggtacatatctatgctgtgccatgac

SEQ ID NO: 280493 - DNA, 55 bp, Artificial
  Synthetic oligonucleotide
ctccaccctccttacagcatgtcgttccataaatgctcttgttcccctgcggggt

SEQ ID NO: 280494 - DNA, 55 bp, Artificial
  Synthetic oligonucleotide
ctcccaatcgcccgctcataagaacgaaggtcccttgtgtcattctaaacagagt

SEQ ID NO: 280495 - DNA, 54 bp, Artificial
  Synthetic oligonucleotide
ctcccaccacaaggtcgccaggcggaactttctcaatactaacgtccaggttcc

SEQ ID NO: 280496 - DNA, 55 bp, Artificial
  Synthetic oligonucleotide
ggctctctacctttataaggtcaccacgtctatgctctgcgtcggttgaagcctt

SEQ ID NO: 280497 - DNA, 55 bp, Artificial
  Synthetic oligonucleotide
ctcccgatcaaaccgagtaagcgctctctgcgctgtaggcacgcaatccagcgcc

SEQ ID NO: 280498 - DNA, 59 bp, Artificial
  Synthetic oligonucleotide
catccagttcgcggctaaggcggttgacacaaagtagacgcaacttgggcatgtcgtaa

SEQ ID NO: 280499 - DNA, 55 bp, Artificial
  Synthetic oligonucleotide
ctcccgcgtcaatgtcccgtcaaatctcatcctagatctaaccttaaatgatccc

SEQ ID NO: 280500 - DNA, 55 bp, Artificial
  Synthetic oligonucleotide
ggctctagaagaacggttaatcaggtcagcctagtcgacaaagatattgcggcgt

SEQ ID NO: 280501 - DNA, 55 bp, Artificial
  Synthetic oligonucleotide
ctccgggcgcctacaagtgtggtacttgctcaccatctgcccgcacatcttactc

SEQ ID NO: 280502 - DNA, 55 bp, Artificial
  Synthetic oligonucleotide
ctccggttcgctctttaatgacactgctaacaatcacgcctagacttccgccctc

SEQ ID NO: 280503 - DNA, 55 bp, Artificial
  Synthetic oligonucleotide
ctcctgtacccatctaatccccgagtctggatcgctgatgctaacgcgtgtcgtc

SEQ ID NO: 280504 - DNA, 55 bp, Artificial
  Synthetic oligonucleotide
ctccttgtgcttgattccacgctgggagctcttctcttgtcgcttgacagaacag

SEQ ID NO: 280505 - DNA, 55 bp, Artificial
  Synthetic oligonucleotide
ctcgagaacgcaatcaaaggctcagaatccagcgtggagcctagcgagatatcta

SEQ ID NO: 280506 - DNA, 55 bp, Artificial
  Synthetic oligonucleotide
ctcgagcaagttatctccgttgaaattgtttgctatgcgacttgttagcatggag

SEQ ID NO: 280507 - DNA, 55 bp, Artificial
  Synthetic oligonucleotide
ggctcgccctgtttggacgatggtgtcggtagcatcgcttgtcaaaccccaccgc

SEQ ID NO: 280508 - DNA, 55 bp, Artificial
  Synthetic oligonucleotide
ctcgagggcactccggatcgattctttagagttcaggtccgcctagatggtctgt

SEQ ID NO: 280509 - DNA, 60 bp, Artificial
  Synthetic oligonucleotide
gcacattggctactctcaggtatgaaagtagcaagtcggctgttaagctgagaaaaccgt

SEQ ID NO: 280510 - DNA, 55 bp, Artificial
  Synthetic oligonucleotide
ctcgatataagaaagtgcgtttcttccacgcatcgtcatgtttggtggtctctcg

SEQ ID NO: 280511 - DNA, 55 bp, Artificial
  Synthetic oligonucleotide
ctcgattcgggtgttgggcggttcggtaattcacgggagtttgcatgttaacatg

SEQ ID NO: 280512 - DNA, 54 bp, Artificial
  Synthetic oligonucleotide
ctcgcaactttagactacgggactccactctcaccccgtcaaaaccaaagtcac

SEQ ID NO: 280513 - DNA, 55 bp, Artificial
  Synthetic oligonucleotide
ctcgcgagcgagctcctaatcggccgctatcagctcccgtctcccagagatccca

SEQ ID NO: 280514 - DNA, 55 bp, Artificial
  Synthetic oligonucleotide
ctcgcgtcgttcgcgtctatccgtgcggcagcaaaacaattccaggcagagtgcg

SEQ ID NO: 280515 - DNA, 55 bp, Artificial
  Synthetic oligonucleotide
ctcgctgtccgtctgtttgacaaaacacgcttcggtatgctctaggctttgcggt

SEQ ID NO: 280516 - DNA, 55 bp, Artificial
  Synthetic oligonucleotide
ctcggacaatacactgagtaccgtgcttgtagtccgtttcgaacttcgggctcgc

SEQ ID NO: 280517 - DNA, 55 bp, Artificial
  Synthetic oligonucleotide
ctcggaggattgtatgccgtttctcatgtgcccctttgtgaccaggctgatgcag

SEQ ID NO: 280518 - DNA, 55 bp, Artificial
  Synthetic oligonucleotide
ctagacacatggcattagagcgaggtacgtaacgttgcccttccctccgagccaa

SEQ ID NO: 280519 - DNA, 55 bp, Artificial
  Synthetic oligonucleotide
ctagagccgtctcccagtgtcgtacaaaggattcccattcgtaccagcgctctcc

SEQ ID NO: 280520 - DNA, 59 bp, Artificial
  Synthetic oligonucleotide
tcgcacactctaggggaaggtagctcccctgttgcaaatgacgtgtcgtctgtgacggg

SEQ ID NO: 280521 - DNA, 55 bp, Artificial
  Synthetic oligonucleotide
ctagatccattgcccactcgatacacaggacactatgcacacgtcgagattgccc

SEQ ID NO: 280522 - DNA, 55 bp, Artificial
  Synthetic oligonucleotide
ctagatgctaagttatcgaatgcgttgaacgtatcaacagcgtgcacgttggtac

SEQ ID NO: 280523 - DNA, 55 bp, Artificial
  Synthetic oligonucleotide
ctagcggtctgcgcagttagggctgacttcttcctaagcgatctgtcttcgccga

SEQ ID NO: 280524 - DNA, 55 bp, Artificial
  Synthetic oligonucleotide
ctaggagcgtcagagccacccgtgctaggaaatggcacacccataaccatgtcgc

SEQ ID NO: 280525 - DNA, 55 bp, Artificial
  Synthetic oligonucleotide
ctaggccaagacacagcagccggaaaatgctcaggccgatctgggatgtaactcg

SEQ ID NO: 280526 - DNA, 55 bp, Artificial
  Synthetic oligonucleotide
ctaggcgtccgaatctgtaaatcaatcttcgagcattctctttcccgtatgtccg

SEQ ID NO: 280527 - DNA, 55 bp, Artificial
  Synthetic oligonucleotide
ctaggtcgccggttattcgagaggggagctagttccattcgtctgcacatgcagt

SEQ ID NO: 280528 - DNA, 55 bp, Artificial
  Synthetic oligonucleotide
ctaggtgtagcgcgtgccatattgtagggcatatacgtactagatgtcctaatcg

SEQ ID NO: 280529 - DNA, 55 bp, Artificial
  Synthetic oligonucleotide
ctagtcagaagcgagctagccatggcctgggaaggaatagtggtctcgatacggg

SEQ ID NO: 280530 - DNA, 55 bp, Artificial
  Synthetic oligonucleotide
ctataagcgtctccttagttatatctaggaccgtataggcgaccggctagctagt

SEQ ID NO: 280531 - DNA, 58 bp, Artificial
  Synthetic oligonucleotide
cctgtacgaagtcatggacaggggtacccaggtagagctactcaactaagactatgga

SEQ ID NO: 280532 - DNA, 55 bp, Artificial
  Synthetic oligonucleotide
ctatactccacacttagcaacactccatgctcggttgtctatgtttaggtgttgg

SEQ ID NO: 280533 - DNA, 55 bp, Artificial
  Synthetic oligonucleotide
ctatcgaatcttacagcgcttctgagacaccgctctagtacgttcatgtctcagc

SEQ ID NO: 280534 - DNA, 55 bp, Artificial
  Synthetic oligonucleotide
ggctgctcaagaccgcaacacctttggagaaggggtgcgcgtcgggtatcgccat

SEQ ID NO: 280535 - DNA, 55 bp, Artificial
  Synthetic oligonucleotide
ggctgccgactgcatcacaggattcgaacgttagcgtgcggcttaaacgaagcgc

SEQ ID NO: 280536 - DNA, 55 bp, Artificial
  Synthetic oligonucleotide
ctatggttccgcttcatagattgagatccgatccatcgtagattacatacacatg

SEQ ID NO: 280537 - DNA, 55 bp, Artificial
  Synthetic oligonucleotide
ctatggttctcctatcccgcgtggaacagagctcgacctgagagacgtcggtatg

SEQ ID NO: 280538 - DNA, 55 bp, Artificial
  Synthetic oligonucleotide
ctatgtgaccaggtgcgtgcagagatcttggaaggtgtgtatcgaattagtgcga

SEQ ID NO: 280539 - DNA, 55 bp, Artificial
  Synthetic oligonucleotide
ctattcctgtcacttgagacaccgctgtacaagcatatgaagcattgtcagcagc

SEQ ID NO: 280540 - DNA, 55 bp, Artificial
  Synthetic oligonucleotide
ctcaacatggcatgcgcctcagatagtgacaatgtgttcgggccccgtatcaacc

SEQ ID NO: 280541 - DNA, 55 bp, Artificial
  Synthetic oligonucleotide
ctcaatactctatatcaccccgcagacaatgtgaagtatgagaacgacagaggcc

SEQ ID NO: 280542 - DNA, 60 bp, Artificial
  Synthetic oligonucleotide
tcgccagccaaccgatcccagcttcgagtcccacaatagcaagctggactgtcggaatgt

SEQ ID NO: 280543 - DNA, 55 bp, Artificial
  Synthetic oligonucleotide
ctcacataccttctttccgcgcttacccatggtgatcaagattaattgcgatgcg

SEQ ID NO: 280544 - DNA, 55 bp, Artificial
  Synthetic oligonucleotide
ggctgaacgttatgccccagcgttcacgtttaagctgcttgcctctcgtgacgcc

SEQ ID NO: 280545 - DNA, 55 bp, Artificial
  Synthetic oligonucleotide
ctcagcgatacattatatctgttccacctccgtagagcttctagcagattcggag

SEQ ID NO: 280546 - DNA, 55 bp, Artificial
  Synthetic oligonucleotide
ctcagctgacgctagacagagatagtggatagattgtctaggagtactccgtacc

SEQ ID NO: 280547 - DNA, 55 bp, Artificial
  Synthetic oligonucleotide
ctcagtgaatcgaggattcccttagattagtagacctaacacgccaaacggcaga

SEQ ID NO: 280548 - DNA, 55 bp, Artificial
  Synthetic oligonucleotide
ctccacagcttcaatggtgacaaatccatcgaacaaatgagtcaagccggctaaa

SEQ ID NO: 280549 - DNA, 55 bp, Artificial
  Synthetic oligonucleotide
ctgacgctgtacaacccctcgttaagagaacaattacctgagaccaccgctaccc

SEQ ID NO: 280550 - DNA, 55 bp, Artificial
  Synthetic oligonucleotide
ctgagatgagtggcgatatgatgcttcgtgtgcaatggtacatgttggaagccgt

SEQ ID NO: 280551 - DNA, 55 bp, Artificial
  Synthetic oligonucleotide
ctgagggcttcttcaggtgcgtgttattacgatggtaccatgatactccgggcca

SEQ ID NO: 280552 - DNA, 55 bp, Artificial
  Synthetic oligonucleotide
ctgagtgtctgtctgagcagtgcgagctaccactcatcttgcacgttgcatctct

SEQ ID NO: 280553 - DNA, 57 bp, Artificial
  Synthetic oligonucleotide
ctaatggtatacagtggtacgagggacaaacttggaatgaactattgacggacacaa

SEQ ID NO: 280554 - DNA, 55 bp, Artificial
  Synthetic oligonucleotide
ctgagttcgactagggcgagatcaagcaagctgacatccctaggcggatatccca

SEQ ID NO: 280555 - DNA, 55 bp, Artificial
  Synthetic oligonucleotide
ggctacgtgggtggctacgaggcgattggggattggctcagaaaagatcagcctg

SEQ ID NO: 280556 - DNA, 55 bp, Artificial
  Synthetic oligonucleotide
ggctacagctccgggaaaatggctagagtcttagaaccacttcgtatctagctca

SEQ ID NO: 280557 - DNA, 55 bp, Artificial
  Synthetic oligonucleotide
ctgcatggttatccctgtcatgccggcggaatttgaattcgcgcaaagatgggcg

SEQ ID NO: 280558 - DNA, 55 bp, Artificial
  Synthetic oligonucleotide
ctgccagtgttgttgaaagcccgtcatgagatcggccaatgtgtctgccttagtc

SEQ ID NO: 280559 - DNA, 55 bp, Artificial
  Synthetic oligonucleotide
ctgccatgaagctgagctcacacaactcttgtctactcacggatatggaccaagg

SEQ ID NO: 280560 - DNA, 55 bp, Artificial
  Synthetic oligonucleotide
ctgccgcgctgtttgtgaataatagacggactagtggctcagataacactatagt

SEQ ID NO: 280561 - DNA, 55 bp, Artificial
  Synthetic oligonucleotide
ctgcctccatatttgtgggatggctatgctccggcctgtgcgatcccatatgacg

SEQ ID NO: 280562 - DNA, 55 bp, Artificial
  Synthetic oligonucleotide
ctgcgccacgctaacaattagtggacccgcaatagaagtgaccaaaccaaggcaa

SEQ ID NO: 280563 - DNA, 55 bp, Artificial
  Synthetic oligonucleotide
ggcgtgatcgtatcgttggctgtatatggatccaactagggagaatgtgggctcc

SEQ ID NO: 280564 - DNA, 60 bp, Artificial
  Synthetic oligonucleotide
agtgtgtaagccatggctttgcgtggagcactgacggtagtacagggttatcagggccac

SEQ ID NO: 280565 - DNA, 55 bp, Artificial
  Synthetic oligonucleotide
ggcgtcacagaggatctctccagctacccgcgcacttgggacagcgatgttgcga

SEQ ID NO: 280566 - DNA, 55 bp, Artificial
  Synthetic oligonucleotide
ctgctgggactcatggtactgatgcgggtggatgttaccttgacgaggcgccaaa

SEQ ID NO: 280567 - DNA, 55 bp, Artificial
  Synthetic oligonucleotide
ggcgtagcgtactggctgttttgacgtccaacatggttctaacgatctatgcgcc

SEQ ID NO: 280568 - DNA, 55 bp, Artificial
  Synthetic oligonucleotide
ctggaccgttgactcaagcgtataagtaacctcgttcggtcctcctgtcaccttc

SEQ ID NO: 280569 - DNA, 55 bp, Artificial
  Synthetic oligonucleotide
ctggagaaacggaaggtctgtatggatggattgccgcaaactacttgctgggaag

SEQ ID NO: 280570 - DNA, 55 bp, Artificial
  Synthetic oligonucleotide
ctggagctcacagcacagtcaaagaacatcacattacgagaattatttatgggcg

SEQ ID NO: 280571 - DNA, 55 bp, Artificial
  Synthetic oligonucleotide
ctggataggaactggatatttccttccctcgccaggattgactttgccatgaccc

SEQ ID NO: 280572 - DNA, 55 bp, Artificial
  Synthetic oligonucleotide
ggcgtacttgagactataaacctgtcagtcctcctattccgatcctctctttcgg

SEQ ID NO: 280573 - DNA, 55 bp, Artificial
  Synthetic oligonucleotide
ctggcgagtatattactacagatcaaggttggtatgtacgactgagctatcagat

SEQ ID NO: 280574 - DNA, 55 bp, Artificial
  Synthetic oligonucleotide
ctggctagtacgcaagtctttagcttagctcacgcgtcatatgggatctcagcgc

SEQ ID NO: 280575 - DNA, 56 bp, Artificial
  Synthetic oligonucleotide
acacaacgacggacctacggccgaaccaactctctgtacaacaacggaggtgcatc

SEQ ID NO: 280576 - DNA, 55 bp, Artificial
  Synthetic oligonucleotide
ctggcttatacgcatactcgtaggaaacgtctgcccacgcatgctcgagtaaagt

SEQ ID NO: 280577 - DNA, 54 bp, Artificial
  Synthetic oligonucleotide
ggcggttttgatggaagactacgaggataagaactacatccgggaggtacttaa

SEQ ID NO: 280578 - DNA, 55 bp, Artificial
  Synthetic oligonucleotide
ctgggaaccaacggttgtcattgattgttcacgctagcagccgttatcagtacgt

SEQ ID NO: 280579 - DNA, 55 bp, Artificial
  Synthetic oligonucleotide
ctgggcacttgcggatcctggttcatgtaagtgattgagtatatgctattgcttg

SEQ ID NO: 280580 - DNA, 55 bp, Artificial
  Synthetic oligonucleotide
ctcggcggagatgatttgactggactgtttcggtgatactagtgcgccctgcaac

SEQ ID NO: 280581 - DNA, 55 bp, Artificial
  Synthetic oligonucleotide
ggctcccaatatcggagcagcatgggccgccatatcctatcaggaccacacatgg

SEQ ID NO: 280582 - DNA, 55 bp, Artificial
  Synthetic oligonucleotide
ggctcatttatgcattgttccctagcaaccgagatagtactctcagactgttgca

SEQ ID NO: 280583 - DNA, 55 bp, Artificial
  Synthetic oligonucleotide
ggctcatgtggaagcatgaaggagtctggtattcaggggtgcggatgcacaagga

SEQ ID NO: 280584 - DNA, 55 bp, Artificial
  Synthetic oligonucleotide
ctcgtagactgtcatgctataaggtatattgcatacggccacaactgatgagggg

SEQ ID NO: 280585 - DNA, 55 bp, Artificial
  Synthetic oligonucleotide
ctcgtagcttctcggaaattagcgatcgacacatgacataggtgaaaatccatcc

SEQ ID NO: 280586 - DNA, 57 bp, Artificial
  Synthetic oligonucleotide
atgtttttggggaaccccagattgatcgacgattgctcaagtctgggcgggaatgag

SEQ ID NO: 280587 - DNA, 60 bp, Artificial
  Synthetic oligonucleotide
ggctgtgccaatcacaaatgttagtcaggcattcaatcggagacagctgaatatgacaag

SEQ ID NO: 280588 - DNA, 55 bp, Artificial
  Synthetic oligonucleotide
ctcgtatctgtagcatcgtgcagaagcagaacaatccaacgtcgcaaattctcac

SEQ ID NO: 280589 - DNA, 55 bp, Artificial
  Synthetic oligonucleotide
ctcgtcaactgaagcggcgcagtggggtctcgggcagttaatcaccccgggagtt

SEQ ID NO: 280590 - DNA, 55 bp, Artificial
  Synthetic oligonucleotide
ctcgtccgatactggtaatagaggtctttccgctaggctgaattgctggccgggc

SEQ ID NO: 280591 - DNA, 55 bp, Artificial
  Synthetic oligonucleotide
ctcgtcgcaggagtagctccacaacttgcagacgtccttcatctgacgcttcatg

SEQ ID NO: 280592 - DNA, 55 bp, Artificial
  Synthetic oligonucleotide
ggctcagccgatagatgggtctaggcccaattggcctgccctctcgtcagataga

SEQ ID NO: 280593 - DNA, 55 bp, Artificial
  Synthetic oligonucleotide
ctcgttgcgtaagagatcgatataatgcatgcgacataaaacgctcatctgcgcg

SEQ ID NO: 280594 - DNA, 55 bp, Artificial
  Synthetic oligonucleotide
ctctacaagcaaagtcgatgaaatattagtaacgcctattctgtgcagccgctca

SEQ ID NO: 280595 - DNA, 55 bp, Artificial
  Synthetic oligonucleotide
ctctacctgttatatcgtggggacagcttacaatgtatcatttgggtgtcctaac

SEQ ID NO: 280596 - DNA, 55 bp, Artificial
  Synthetic oligonucleotide
ctctacttgcatcgaatggacccatcgctaacaaggctgaccctagtcgctaaat

SEQ ID NO: 280597 - DNA, 55 bp, Artificial
  Synthetic oligonucleotide
ctctagtatgcttactaggcagtcagacttggtaccaataccccttgaagtgggg

SEQ ID NO: 280598 - DNA, 60 bp, Artificial
  Synthetic oligonucleotide
gtatgctagatgcaccccctctggcagtgtatacccctggagttggcctataataatcgg

SEQ ID NO: 280599 - DNA, 55 bp, Artificial
  Synthetic oligonucleotide
ctctatcaaggtggctactgccgcctatgggcttttgaagagtcatccgagcttc

SEQ ID NO: 280600 - DNA, 55 bp, Artificial
  Synthetic oligonucleotide
ggctagattctgacccagtcgacagtcgtcccgtcggaagatagtcaccagtccg

SEQ ID NO: 280601 - DNA, 54 bp, Artificial
  Synthetic oligonucleotide
ctctcgagggcttagagaagtggagggataccttgggtctggttttgagtaacc

SEQ ID NO: 280602 - DNA, 55 bp, Artificial
  Synthetic oligonucleotide
ctctcggcgtagccgtaccctagtagggtgtcaattcgtcaactggcagtggtgt

SEQ ID NO: 280603 - DNA, 55 bp, Artificial
  Synthetic oligonucleotide
ctctgtcccagcgacgccccatgagaacccggaaaccgctcctagcattcccatg

SEQ ID NO: 280604 - DNA, 55 bp, Artificial
  Synthetic oligonucleotide
ctcttatatgaaacacgccacatacaagtggaatccgacaacccttgacctttcg

SEQ ID NO: 280605 - DNA, 55 bp, Artificial
  Synthetic oligonucleotide
ctcttatcctatttagattagaggtggtggagtaatccatagtaggctgtcctag

SEQ ID NO: 280606 - DNA, 55 bp, Artificial
  Synthetic oligonucleotide
ggctactctttcactgagccgtggtaacctcattgtggatttgtgggacttgcca

SEQ ID NO: 280607 - DNA, 55 bp, Artificial
  Synthetic oligonucleotide
ctgacacagggctgcccttgtacataagtagtggatctagatgtcctagctggct

SEQ ID NO: 280608 - DNA, 55 bp, Artificial
  Synthetic oligonucleotide
ctgacctaggggctaatttcggtcatactagctaccaaccgagaagacaagaccg

SEQ ID NO: 280609 - DNA, 60 bp, Artificial
  Synthetic oligonucleotide
ggcaatctcacggattacatgagcgctaacctctgattagtcgctagagagggcgcccat

SEQ ID NO: 280610 - DNA, 55 bp, Artificial
  Synthetic oligonucleotide
ctgacctctcctaagcgctgaaaagcgtgtccataaaagactccaacccgatcga

SEQ ID NO: 280611 - DNA, 55 bp, Artificial
  Synthetic oligonucleotide
cgtatccagccaccaactgcttcacaacaggactccgaagcaatcctggaagcgt

SEQ ID NO: 280612 - DNA, 55 bp, Artificial
  Synthetic oligonucleotide
gggacgccttagatgtggtgagatgagttccattggttgggttttagtcgaggtc

SEQ ID NO: 280613 - DNA, 55 bp, Artificial
  Synthetic oligonucleotide
cgtcacgttcaaggtctgctagcaccttcaagatgggttgaaatggctcggtcgc

SEQ ID NO: 280614 - DNA, 55 bp, Artificial
  Synthetic oligonucleotide
cgtcactcggtccatccccttgtatacgctctcacatggatgtgtaggcatggat

SEQ ID NO: 280615 - DNA, 55 bp, Artificial
  Synthetic oligonucleotide
cgtcagcgctccttttccctaaagaggtgcactggatagaatttcgatttgtgcg

SEQ ID NO: 280616 - DNA, 55 bp, Artificial
  Synthetic oligonucleotide
cgtcattagaccctgtagggattgacctcctgggacgcatgttgcaattatgccc

SEQ ID NO: 280617 - DNA, 55 bp, Artificial
  Synthetic oligonucleotide
cgtccaggaggatcctctagttaagtatataaacctgatctcgccagtaacgctg

SEQ ID NO: 280618 - DNA, 55 bp, Artificial
  Synthetic oligonucleotide
cgtcccgggatctctgccctatgagaccgtttgcgctggattcagaagtccacgg

SEQ ID NO: 280619 - DNA, 55 bp, Artificial
  Synthetic oligonucleotide
cgtccgaagctgaagattacacctcttcccaagcaagagtggactcgacgcatta

SEQ ID NO: 280620 - DNA, 60 bp, Artificial
  Synthetic oligonucleotide
catcgagcagcgcacatgagacccaaatagcagcgctcgaggagaagctatccggcagtg

SEQ ID NO: 280621 - DNA, 55 bp, Artificial
  Synthetic oligonucleotide
cgtccggtttccgatagcaaagagagtagtgcgcaagcatcatctgttgaacagg

SEQ ID NO: 280622 - DNA, 55 bp, Artificial
  Synthetic oligonucleotide
cgtccgtgaattctcggcggactccaaacgccatatctgcttctggtgcatttcc

SEQ ID NO: 280623 - DNA, 55 bp, Artificial
  Synthetic oligonucleotide
cgtcgacaggtctttactttcatagttgtacggcagagaccgttgagcttggaca

SEQ ID NO: 280624 - DNA, 55 bp, Artificial
  Synthetic oligonucleotide
cgtcgcgtctcccttatttacgatactctctagcaaatgcgtcaaatatgtcctg

SEQ ID NO: 280625 - DNA, 55 bp, Artificial
  Synthetic oligonucleotide
cgtcggaggcagttggcgaacagtgacgtcggacctctcctcgcagatgggacat

SEQ ID NO: 280626 - DNA, 55 bp, Artificial
  Synthetic oligonucleotide
cgtctatgctaggagattcccttctatcgtctcggcaagggtaggtagttgtcgg

SEQ ID NO: 280627 - DNA, 55 bp, Artificial
  Synthetic oligonucleotide
cgtctcaccgtaaaggccgcctgcgcgggaccgtatttgcctaccactagctgtg

SEQ ID NO: 280628 - DNA, 55 bp, Artificial
  Synthetic oligonucleotide
cgtctctacacaaaatgtctcgagggatcctcgggtattccgagctcaggcgcat

SEQ ID NO: 280629 - DNA, 55 bp, Artificial
  Synthetic oligonucleotide
cgtctctgcatgatggtacttattccaagactagaccggaaaatgcagttgcttc

SEQ ID NO: 280630 - DNA, 55 bp, Artificial
  Synthetic oligonucleotide
gggacaatctcaacttcgaggtgaggcggccaatcaatcttggtctatacgctac

SEQ ID NO: 280631 - DNA, 59 bp, Artificial
  Synthetic oligonucleotide
acaagtgcgcctccaaaaatgactgcatagtacgtccaggccaatgaacccggcaaaga

SEQ ID NO: 280632 - DNA, 55 bp, Artificial
  Synthetic oligonucleotide
cgtctgtgggcggctagaggtttcacctagagagctatctcgagaccaagagtcg

SEQ ID NO: 280633 - DNA, 55 bp, Artificial
  Synthetic oligonucleotide
cgtcttacaattcaattgcggtggtactgcagacgcttttcgccaattgggcagg

SEQ ID NO: 280634 - DNA, 55 bp, Artificial
  Synthetic oligonucleotide
cgtgaaaccaccataaacgttcgcgactggaccaagtgtagccatagcctcttcg

SEQ ID NO: 280635 - DNA, 55 bp, Artificial
  Synthetic oligonucleotide
cgtgaaaccctttctacttcggagaactattactagtcatcgtaaccacaatggc

SEQ ID NO: 280636 - DNA, 55 bp, Artificial
  Synthetic oligonucleotide
gggaattcctctaccctgtctgtctggataagagctatctcgcatccattattgg

SEQ ID NO: 280637 - DNA, 55 bp, Artificial
  Synthetic oligonucleotide
gggaatcttaccccgtgttagatagtggagacaagtcctgcagctgaaatttccc

SEQ ID NO: 280638 - DNA, 55 bp, Artificial
  Synthetic oligonucleotide
cgtgatatgctacacgacataccttccagaacgcttcagaacgcccacacttcgt

SEQ ID NO: 280639 - DNA, 55 bp, Artificial
  Synthetic oligonucleotide
cggtatactgcaactgaatagctcggatgcggcccaagtaatacaggtagcgagc

SEQ ID NO: 280640 - DNA, 55 bp, Artificial
  Synthetic oligonucleotide
cggtcacctatgatttctcccgggactgctgcacatacggagagggatcggctgg

SEQ ID NO: 280641 - DNA, 55 bp, Artificial
  Synthetic oligonucleotide
cggtcggaatggttctttgagatgtacttatatatatgacggagtatgcgtctga

SEQ ID NO: 280642 - DNA, 58 bp, Artificial
  Synthetic oligonucleotide
acaagtatctctgagcattgtgaccatggaattaacttaccacgtccttaccagggga

SEQ ID NO: 280643 - DNA, 54 bp, Artificial
  Synthetic oligonucleotide
cggtcggcctaacggtacgttcggagtgagagagagtaggcgggctcctaggtc

SEQ ID NO: 280644 - DNA, 55 bp, Artificial
  Synthetic oligonucleotide
cggtctaaaatagtagctaagactattgcgagttaactggctgtccgctgtcccc

SEQ ID NO: 280645 - DNA, 55 bp, Artificial
  Synthetic oligonucleotide
cggtctcctattgatcgcgtttaagccacacgccagcccgttagtagttgagtag

SEQ ID NO: 280646 - DNA, 55 bp, Artificial
  Synthetic oligonucleotide
cggtgagtgctagacgtgatcgttaatgactatctatatctgggacaggcggtac

SEQ ID NO: 280647 - DNA, 55 bp, Artificial
  Synthetic oligonucleotide
cggtgcttggcgcctcgcaaggagcttctcgagggaatactgggtgctaacctgg

SEQ ID NO: 280648 - DNA, 55 bp, Artificial
  Synthetic oligonucleotide
cggtggactcgagatcgctaatctaagatctcatctactgcccaacgggtgcaca

SEQ ID NO: 280649 - DNA, 55 bp, Artificial
  Synthetic oligonucleotide
cggtggatcaacagcagaggccgagcatatccgtgttcgcctattagttgctaac

SEQ ID NO: 280650 - DNA, 55 bp, Artificial
  Synthetic oligonucleotide
cggtgtatacagatagctagctataagctgtatgattatggtgtagtctgtatgt

SEQ ID NO: 280651 - DNA, 55 bp, Artificial
  Synthetic oligonucleotide
cggtgtccgcaagtcagccttttcggttgtccgtacttggccagaatctagatcg

SEQ ID NO: 280652 - DNA, 55 bp, Artificial
  Synthetic oligonucleotide
cggtgtggtagcagattgaaacggggtaagccctctcaattgacaaagatgaacg

SEQ ID NO: 280653 - DNA, 60 bp, Artificial
  Synthetic oligonucleotide
ctaatcagtgagcgctgtggatcaaggccaaattataggtctgtcgtactatcggtccgc

SEQ ID NO: 280654 - DNA, 55 bp, Artificial
  Synthetic oligonucleotide
cggtgttagactactgaaacgttcctcgaaggtattaccataggctgtagtatat

SEQ ID NO: 280655 - DNA, 55 bp, Artificial
  Synthetic oligonucleotide
cggttaccagcaggggtatcgaggatgtgcattcacgatgcagaatctcgggagg

SEQ ID NO: 280656 - DNA, 55 bp, Artificial
  Synthetic oligonucleotide
gggagacggctggcgatataaattctagttaccaacgcggagattacttacaatg

SEQ ID NO: 280657 - DNA, 55 bp, Artificial
  Synthetic oligonucleotide
cggttgaccatacttcggatcctcgctctcttagcgccagcatactccatagcga

SEQ ID NO: 280658 - DNA, 55 bp, Artificial
  Synthetic oligonucleotide
cggttggaggttattatagagtaaagcgaggctgctttctgcaagtctcgtagga

SEQ ID NO: 280659 - DNA, 55 bp, Artificial
  Synthetic oligonucleotide
gggactagtggaatggtggaagtatgaagagtcgagatccagtgacccactggtt

SEQ ID NO: 280660 - DNA, 55 bp, Artificial
  Synthetic oligonucleotide
cgtaacaaatacactagcgggctgggctattcctagtcagcttagcctgatgcct

SEQ ID NO: 280661 - DNA, 55 bp, Artificial
  Synthetic oligonucleotide
cgtaacgtacgagggcggagcagagtatgtgactttgaagagctatggtattgcg

SEQ ID NO: 280662 - DNA, 55 bp, Artificial
  Synthetic oligonucleotide
cgtaatgtgtattgtccacggcgacatctggatgtgagggagcagcgtcctgatg

SEQ ID NO: 280663 - DNA, 55 bp, Artificial
  Synthetic oligonucleotide
cgtaccggatcatgtttccaagccctccatctagcgctactagaagtgacatccg

SEQ ID NO: 280664 - DNA, 60 bp, Artificial
  Synthetic oligonucleotide
tcgcggcacacttcagcttgttcgatcaaccatgcgatgttcaaggctgacgtccaatca

SEQ ID NO: 280665 - DNA, 55 bp, Artificial
  Synthetic oligonucleotide
cgtaccttgcacatccgtctatccctactacacgagtcaatccttatttccgggg

SEQ ID NO: 280666 - DNA, 55 bp, Artificial
  Synthetic oligonucleotide
cgtactatcctagcctgtataccaagagtgctattgtcatgctatgaaacggcac

SEQ ID NO: 280667 - DNA, 55 bp, Artificial
  Synthetic oligonucleotide
cgtagtagactacatgctactagtagatagccaagtccacggtccgatatgtctc

SEQ ID NO: 280668 - DNA, 55 bp, Artificial
  Synthetic oligonucleotide
cgtagtctaccacaatgacgattttgtggcgatacacgacatgttcccaaagtca

SEQ ID NO: 280669 - DNA, 55 bp, Artificial
  Synthetic oligonucleotide
gggacgtaagatttggtaactcggattgttctcatatgaacctcggctataagac

SEQ ID NO: 280670 - DNA, 55 bp, Artificial
  Synthetic oligonucleotide
cgttgccaggtacgttctcccggttgcggtgggaatgactattgctgggaggatc

SEQ ID NO: 280671 - DNA, 55 bp, Artificial
  Synthetic oligonucleotide
cgttgccggagtaggtgaacttattgccagtgatagactgcttagtacggccgcc

SEQ ID NO: 280672 - DNA, 55 bp, Artificial
  Synthetic oligonucleotide
cgttgcggacattgtctatcccgaccggacgtgctatgctctcgtttagcggccg

SEQ ID NO: 280673 - DNA, 55 bp, Artificial
  Synthetic oligonucleotide
ggcttctactaagaccctcccggccgtatgtaacatgcgcctatgccgctggcta

SEQ ID NO: 280674 - DNA, 55 bp, Artificial
  Synthetic oligonucleotide
cgttggaggcggggcattaaggaccgagagaccgaaattggtggcttatagcttc

SEQ ID NO: 280675 - DNA, 60 bp, Artificial
  Synthetic oligonucleotide
catcgcacttgaagtgcaacgatccgcttgcccacctcccttgtactggacatttcgtcg

SEQ ID NO: 280676 - DNA, 55 bp, Artificial
  Synthetic oligonucleotide
cgtttaacaggcactatgtcgcaattgtgcgtaaggccgtgccaggaagtaatgg

SEQ ID NO: 280677 - DNA, 55 bp, Artificial
  Synthetic oligonucleotide
cgtttagtttgtatgtcagactccttggcgctgttggtcccgttttgtaagtatg

SEQ ID NO: 280678 - DNA, 55 bp, Artificial
  Synthetic oligonucleotide
ctaaactaagggatccctgacactgagtgttaaggcctgggcgatcggtgagcgg

SEQ ID NO: 280679 - DNA, 55 bp, Artificial
  Synthetic oligonucleotide
ctaacagcgctagtcgcggctgggtccctctccaatcccggccaattctggcccc

SEQ ID NO: 280680 - DNA, 55 bp, Artificial
  Synthetic oligonucleotide
ctaacctaggtactatgcttactctgctctgtaataacctcgacgggtcccacct

SEQ ID NO: 280681 - DNA, 54 bp, Artificial
  Synthetic oligonucleotide
ctaacctccaaaaggtttctgtcaccttggaaccgccagctgcttcggccccta

SEQ ID NO: 280682 - DNA, 55 bp, Artificial
  Synthetic oligonucleotide
ctaacgaggcccatgttggcaggatgcgaggtgacatgtgcggggtaagccagct

SEQ ID NO: 280683 - DNA, 55 bp, Artificial
  Synthetic oligonucleotide
ctaactctctattctaattagatagcttggtagtaaggcatctcgataggcatca

SEQ ID NO: 280684 - DNA, 53 bp, Artificial
  Synthetic oligonucleotide
ctaagagagaaaagccaacccttggttctgggtcggtcgcttggagaaaggac

SEQ ID NO: 280685 - DNA, 55 bp, Artificial
  Synthetic oligonucleotide
ctaagagcatgagttttcaattctcgttgcaagggattcagcgtatctttgagtt

SEQ ID NO: 280686 - DNA, 59 bp, Artificial
  Synthetic oligonucleotide
agttaatgcgactcacctcctgttcgcattgactgggacgaggacattctttcatacgt

SEQ ID NO: 280687 - DNA, 54 bp, Artificial
  Synthetic oligonucleotide
ctaatcggaattagtctggtccggtcgctggagggccaagtcccttagactggg

SEQ ID NO: 280688 - DNA, 55 bp, Artificial
  Synthetic oligonucleotide
ctaattcgtataatcgtatttaagtcgatttagttgcgctgctatgcgagctaac

SEQ ID NO: 280689 - DNA, 55 bp, Artificial
  Synthetic oligonucleotide
ctaattgtggacatcgtgggtaacgtcatggtaatctcgtcacgagccactgcgg

SEQ ID NO: 280690 - DNA, 55 bp, Artificial
  Synthetic oligonucleotide
ctacagggaatatgcactagccatggggattgcaagtgtctcgcgcgaatcatgc

SEQ ID NO: 280691 - DNA, 54 bp, Artificial
  Synthetic oligonucleotide
ctaccgggcggacgataaacccaaataccatcgcggaaattccgctctcatagg

SEQ ID NO: 280692 - DNA, 55 bp, Artificial
  Synthetic oligonucleotide
ggctgtacagggtaagatacatcttcctgacggggagtccagctgccttcgtgac

SEQ ID NO: 280693 - DNA, 55 bp, Artificial
  Synthetic oligonucleotide
ctacgcctatcggagtctcttcggcgcggggcgggatatagtgcggacagaggga

SEQ ID NO: 280694 - DNA, 54 bp, Artificial
  Synthetic oligonucleotide
ctacggtttatctccccgtcgggtttccgggtgagtgcatctgcaaacgtgtcc

SEQ ID NO: 280695 - DNA, 55 bp, Artificial
  Synthetic oligonucleotide
ctacgtgggacgtccgattgttggttctgcgccagatacctgaactgctcaggcg

SEQ ID NO: 280696 - DNA, 54 bp, Artificial
  Synthetic oligonucleotide
ctactcgacgactttcggccggacatggtcaaattggacaacgtataccggtgg

SEQ ID NO: 280697 - DNA, 59 bp, Artificial
  Synthetic oligonucleotide
tataggatgccttaggcactaatccatactggatggtggcctaaaagggtataggcttc

SEQ ID NO: 280698 - DNA, 55 bp, Artificial
  Synthetic oligonucleotide
ggttaagttaaagaacctataatatattcaagagcacttagatttgaactaagaa

SEQ ID NO: 280699 - DNA, 55 bp, Artificial
  Synthetic oligonucleotide
ctactggagatatcccaagacagaggattttaccgtctcccctcgaggccacccg

SEQ ID NO: 280700 - DNA, 55 bp, Artificial
  Synthetic oligonucleotide
gggaagccatgtaccatggttgccggaggggctctacttccggagggagccaatg

SEQ ID NO: 280701 - DNA, 55 bp, Artificial
  Synthetic oligonucleotide
cgtgccacggctgatttgaggttcaatgacccgacaattgatccttccaaccgga

SEQ ID NO: 280702 - DNA, 55 bp, Artificial
  Synthetic oligonucleotide
cgtgccctccgcatcctcgggtacgatcatgtcttccacggcttcgaaatgtggg

SEQ ID NO: 280703 - DNA, 53 bp, Artificial
  Synthetic oligonucleotide
gggaaccggggtggaccttccactattcgtttgcgatggggacggcttcacta

SEQ ID NO: 280704 - DNA, 55 bp, Artificial
  Synthetic oligonucleotide
cgtgctgacctctgcctcagacacgacggggccctcgggagcatatatgttcgag

SEQ ID NO: 280705 - DNA, 55 bp, Artificial
  Synthetic oligonucleotide
cgtggagttttacgcggagccaaagggcggccttgataaatatagcagcggtcgc

SEQ ID NO: 280706 - DNA, 55 bp, Artificial
  Synthetic oligonucleotide
cgtggattttcttggggaccatatagttacgtgacatgaggctggcgaaaagtgc

SEQ ID NO: 280707 - DNA, 55 bp, Artificial
  Synthetic oligonucleotide
gggaacaatagggtgcagaatgctgtcagataagcagcccatgattttcaatgcg

SEQ ID NO: 280708 - DNA, 55 bp, Artificial
  Synthetic oligonucleotide
cgtgggatcagagttctttgcaactgaacgcccattacagctttgcaagtctcct

SEQ ID NO: 280709 - DNA, 60 bp, Artificial
  Synthetic oligonucleotide
ctaagtagatagatgatagtactaactccccctgtttcacccagagcatactactagaca

SEQ ID NO: 280710 - DNA, 55 bp, Artificial
  Synthetic oligonucleotide
cgtgggccacgccatgcgctcattcaagactattgggagccactttaatacgcct

SEQ ID NO: 280711 - DNA, 55 bp, Artificial
  Synthetic oligonucleotide
gggaaagacatccgagaattgacgtgatccctaatccgtaggaagtatatcgcac

SEQ ID NO: 280712 - DNA, 55 bp, Artificial
  Synthetic oligonucleotide
cgtgggtgtcgctgatctctggtctaattaggacattgtgactaaactgcaggga

SEQ ID NO: 280713 - DNA, 55 bp, Artificial
  Synthetic oligonucleotide
cgtgggtgtgggcgtattcttaagtggagggctagactcttcggccattgcgggt

SEQ ID NO: 280714 - DNA, 55 bp, Artificial
  Synthetic oligonucleotide
cgtggtcgaccaaggatcacgctgagatacttgtccagggtgtaagagcaccaga

SEQ ID NO: 280715 - DNA, 55 bp, Artificial
  Synthetic oligonucleotide
cgtggttcccacgaagatagtagacggtatggcaaatatctcggtgcagtgtcgg

SEQ ID NO: 280716 - DNA, 55 bp, Artificial
  Synthetic oligonucleotide
cgtgtaacctatcttctaggccagatgcgcagccaattcctcggaaagtcaatcg

SEQ ID NO: 280717 - DNA, 55 bp, Artificial
  Synthetic oligonucleotide
cgtgtcacgagatacactagcctgaactgggttagtgcggtcagaggttcaagac

SEQ ID NO: 280718 - DNA, 55 bp, Artificial
  Synthetic oligonucleotide
ggcttgaatcagcggaagggacacttctggatatacttgccggcgcatttactgt

SEQ ID NO: 280719 - DNA, 55 bp, Artificial
  Synthetic oligonucleotide
cgtgtgagagagtaatccgcggtgtgtatgacggaccagcgtgcttttccatcga

SEQ ID NO: 280720 - DNA, 60 bp, Artificial
  Synthetic oligonucleotide
catcgtccgataagcctgacgctatgcacccgctctgggtatcaccgtagttgaccgtcc

SEQ ID NO: 280721 - DNA, 55 bp, Artificial
  Synthetic oligonucleotide
cgtgtgctcgttgtactaacatgacccagggacttaaggtgtactccaagtctct

SEQ ID NO: 280722 - DNA, 55 bp, Artificial
  Synthetic oligonucleotide
cgtgtgtcttacctccagctcttatgtgtcccgaactaaccctgtaggattgtac

SEQ ID NO: 280723 - DNA, 55 bp, Artificial
  Synthetic oligonucleotide
cgtgttagtgatgatcgtctacgtacgaacagtgtaactcaccatgcgatgtccc

SEQ ID NO: 280724 - DNA, 55 bp, Artificial
  Synthetic oligonucleotide
cgtgttcctacatgtcggacaacagttagcacgggtcagacactaggattctggc

SEQ ID NO: 280725 - DNA, 55 bp, Artificial
  Synthetic oligonucleotide
cgttatggcaagcgtctgcggttaagaagtcagtttgccccagtactggacaagg

SEQ ID NO: 280726 - DNA, 55 bp, Artificial
  Synthetic oligonucleotide
cgttcaggacattcgtaacccaattctgtgaagtacgacttcgcttggtcaattg

SEQ ID NO: 280727 - DNA, 55 bp, Artificial
  Synthetic oligonucleotide
cgttccggattgaagacatcaggcttcacccagtattgaggatcatggcccagcg

SEQ ID NO: 280728 - DNA, 55 bp, Artificial
  Synthetic oligonucleotide
cgttcgcgaactttacctcagacaagacattccttgctcgtctaagctctgctcg

SEQ ID NO: 280729 - DNA, 55 bp, Artificial
  Synthetic oligonucleotide
cgttgcagatctcaaatttcgcactgccctgagaatgctcgatgagtatccagca

SEQ ID NO: 280730 - DNA, 55 bp, Artificial
  Synthetic oligonucleotide
gacatgctgaacaatagtacgcgctgtttagtaggtagtacacctctaggatctg

SEQ ID NO: 280731 - DNA, 58 bp, Artificial
  Synthetic oligonucleotide
tcgcttgtgaccaagtactctaagctcgggtcttggcctcatttgttcctcccactac

SEQ ID NO: 280732 - DNA, 55 bp, Artificial
  Synthetic oligonucleotide
gacattgattctcatagggtatgtagcgcaaaaggacctatggctaaaggtcgac

SEQ ID NO: 280733 - DNA, 55 bp, Artificial
  Synthetic oligonucleotide
gaccacgctacgaacacggagactccacatctagatgtctcaactatcttctcgg

SEQ ID NO: 280734 - DNA, 55 bp, Artificial
  Synthetic oligonucleotide
gaccactattcgaggaccctgtcagaagacaaccaacgccaattaacctgtatga

SEQ ID NO: 280735 - DNA, 55 bp, Artificial
  Synthetic oligonucleotide
gaccaggatgcgagcgtccagaggtagcacatagggccgtgtgccggtcatgatg

SEQ ID NO: 280736 - DNA, 55 bp, Artificial
  Synthetic oligonucleotide
gaccaggcagcccggaaaccatagaaggacataccgtttgacggaagtatcttgc

SEQ ID NO: 280737 - DNA, 55 bp, Artificial
  Synthetic oligonucleotide
gaccagtagtgccttatcgacagtaagcagagtgtaggcctattcaaagtacgac

SEQ ID NO: 280738 - DNA, 55 bp, Artificial
  Synthetic oligonucleotide
gaccatagatccaatcgtgaacatcaggggtcatcatagtctgttggatattgcg

SEQ ID NO: 280739 - DNA, 55 bp, Artificial
  Synthetic oligonucleotide
gacccggatgcggtctatgacagctggctagaaggcgtgtcaaagaaggatatcc

SEQ ID NO: 280740 - DNA, 55 bp, Artificial
  Synthetic oligonucleotide
gaccgacttaagcgtgccagtgttacttcggcaggctttggagggaccaacggac

SEQ ID NO: 280741 - DNA, 52 bp, Artificial
  Synthetic oligonucleotide
gaccgagtgggttgggagggcctccgttaaaccggaactgttgcgcaaagtg

SEQ ID NO: 280742 - DNA, 57 bp, Artificial
  Synthetic oligonucleotide
gatagggaccgacctctatgatcatttcgtacggtagtttcggcagtgggaatgttg

SEQ ID NO: 280743 - DNA, 55 bp, Artificial
  Synthetic oligonucleotide
gaccgatctctaagaaccctgtaagtgaccagggtcacggcgtattgccatggac

SEQ ID NO: 280744 - DNA, 55 bp, Artificial
  Synthetic oligonucleotide
ggccatgaatcgaaaccttgggtccccgatcacactcgcgtctcgtcgctaggtc

SEQ ID NO: 280745 - DNA, 55 bp, Artificial
  Synthetic oligonucleotide
gacctacgagaatttcatatctcattcgcaggttgatggggaccaaagtaggtga

SEQ ID NO: 280746 - DNA, 55 bp, Artificial
  Synthetic oligonucleotide
gacctcgtccctggtgcccggctgactgatttctctacttgcccctgtgaccgat

SEQ ID NO: 280747 - DNA, 55 bp, Artificial
  Synthetic oligonucleotide
gacctggacctttcttattgcagtgatctactgagtaatttaagaagtggtcttg

SEQ ID NO: 280748 - DNA, 55 bp, Artificial
  Synthetic oligonucleotide
ggccagttgctccctcgaagctgttgactcctccgcaagccaacgaatcgtctcg

SEQ ID NO: 280749 - DNA, 53 bp, Artificial
  Synthetic oligonucleotide
gacgaagttggtagatgagttggtggagtccggaaccccgtacttgcccgagg

SEQ ID NO: 280750 - DNA, 55 bp, Artificial
  Synthetic oligonucleotide
gacgcagcccggaaagtaccctagttgaatcagctctgtggtactaaacgcaaaa

SEQ ID NO: 280751 - DNA, 55 bp, Artificial
  Synthetic oligonucleotide
gacgcataacaatatagctccaagtcagaagcaggttaggcaaagtcaccagtcg

SEQ ID NO: 280752 - DNA, 55 bp, Artificial
  Synthetic oligonucleotide
gacgcatatcttggccgcggggtatgccatgggatgggagaggttcgtggatata

SEQ ID NO: 280753 - DNA, 53 bp, Artificial
  Synthetic oligonucleotide
accagtgtaaagaaatggcgccatatttcctgtttgggggggaaagacgatcc

SEQ ID NO: 280754 - DNA, 55 bp, Artificial
  Synthetic oligonucleotide
gacgcatgtatgtctgccccgtacctcaagtctgaggtagctactagccggtgtg

SEQ ID NO: 280755 - DNA, 55 bp, Artificial
  Synthetic oligonucleotide
gacgccctgtccaaggtacatacatccgccaataatgatcttgtctgctcggtgt

SEQ ID NO: 280756 - DNA, 55 bp, Artificial
  Synthetic oligonucleotide
gacgcttgcattccaccttatctcgatcctaaatgccacctcagtcccaggtcgg

SEQ ID NO: 280757 - DNA, 55 bp, Artificial
  Synthetic oligonucleotide
gaatcccgaggccctaagtgtattactcagtgctcagatgtgctccgctgaacta

SEQ ID NO: 280758 - DNA, 55 bp, Artificial
  Synthetic oligonucleotide
gaatccgagtaacacacacttactttgtcgagcgactccggtaacctttgcgttc

SEQ ID NO: 280759 - DNA, 55 bp, Artificial
  Synthetic oligonucleotide
ggccctgtggtaccagagctgaagcataagaaggctaggtcgcttcttgtcgtat

SEQ ID NO: 280760 - DNA, 55 bp, Artificial
  Synthetic oligonucleotide
gaatcgacacgcgatggccgattgatatagagaccagctgatttgaggtaatcgg

SEQ ID NO: 280761 - DNA, 55 bp, Artificial
  Synthetic oligonucleotide
gaatcgattctagcagtggtacaccgtcccgcaacgatacccgtgatcccctggt

SEQ ID NO: 280762 - DNA, 55 bp, Artificial
  Synthetic oligonucleotide
ggccctcatcgagaatgtctccagtccatctactcctgcacatctccaaccgacc

SEQ ID NO: 280763 - DNA, 55 bp, Artificial
  Synthetic oligonucleotide
gaatggccactccggttctcgcttatcaatcttcacagggaataatctctggtcg

SEQ ID NO: 280764 - DNA, 58 bp, Artificial
  Synthetic oligonucleotide
accagtgggattacttgcggcgtattcagcaatcctccgtggggcctctcgtgtgtac

SEQ ID NO: 280765 - DNA, 55 bp, Artificial
  Synthetic oligonucleotide
gaatggccgagaggattttccccttcctgcggagaccagtggataggttggtaga

SEQ ID NO: 280766 - DNA, 55 bp, Artificial
  Synthetic oligonucleotide
gaatgtgggatgagcgtaagcatgaccggtctcaatcaacaatatattggcgcgc

SEQ ID NO: 280767 - DNA, 55 bp, Artificial
  Synthetic oligonucleotide
gaatgttcaccgctactttaacagtgttgatcacaagtggaacgtctggtttacc

SEQ ID NO: 280768 - DNA, 55 bp, Artificial
  Synthetic oligonucleotide
ggcccgtagaatgccagttcaatcaggtaaactgcatctcgtagagcgaacatgg

SEQ ID NO: 280769 - DNA, 55 bp, Artificial
  Synthetic oligonucleotide
ggcccgtagaatatacagaacccctgtgcctttgtaagagatattgccagggccc

SEQ ID NO: 280770 - DNA, 53 bp, Artificial
  Synthetic oligonucleotide
gaatttaggccggaccgatcgttaaatgacgatctccgggactggttggtggt

SEQ ID NO: 280771 - DNA, 55 bp, Artificial
  Synthetic oligonucleotide
gacaaagcgtaagaatgactatgtcacgggtcgagatgtgtggttggggcagtag

SEQ ID NO: 280772 - DNA, 55 bp, Artificial
  Synthetic oligonucleotide
gacaacccaagtaatgaaaactccggcactgttgccctctatgtaacgtaccaag

SEQ ID NO: 280773 - DNA, 55 bp, Artificial
  Synthetic oligonucleotide
gacaaccccgaacgaggactacgattcgttgaactagatgtacagaccctacggc

SEQ ID NO: 280774 - DNA, 55 bp, Artificial
  Synthetic oligonucleotide
gacaagaagtctttctacgacccactagttatttgcatgtcacgaaccacaacac

SEQ ID NO: 280775 - DNA, 60 bp, Artificial
  Synthetic oligonucleotide
gatagtggtttcgcgctcgtacacgacaggcggccggtcatagtcgtacgactgctgttc

SEQ ID NO: 280776 - DNA, 55 bp, Artificial
  Synthetic oligonucleotide
gacaagaccattcgtctctggtccttagacctctggcagtgtatggtagtctata

SEQ ID NO: 280777 - DNA, 55 bp, Artificial
  Synthetic oligonucleotide
ggcccctgctctacgtgaccaatataggtgactgcaaggtctttgtcatccgacc

SEQ ID NO: 280778 - DNA, 55 bp, Artificial
  Synthetic oligonucleotide
ggcccagtcttcggtgggcatggaagccagcttggtagctctcactcggagtgca

SEQ ID NO: 280779 - DNA, 55 bp, Artificial
  Synthetic oligonucleotide
gacaagtgcctactatcggaatccggaatatagggtagtgtgcttgtaacacagg

SEQ ID NO: 280780 - DNA, 55 bp, Artificial
  Synthetic oligonucleotide
gacacagtttgtgaggaaagtgttggactgtgcgggactgagctttcgtccccag

SEQ ID NO: 280781 - DNA, 55 bp, Artificial
  Synthetic oligonucleotide
gacacggggtttagccgaggattcttgataagacccaatgtcagacggcagctcc

SEQ ID NO: 280782 - DNA, 55 bp, Artificial
  Synthetic oligonucleotide
gacacgtatgtaggtgcaagcgcttcgcaatccggagaataccctgcaaagtgcc

SEQ ID NO: 280783 - DNA, 55 bp, Artificial
  Synthetic oligonucleotide
gacaggacaaccgtaaggacgcagcagctcaaatgcctaccaagaggattcgacg

SEQ ID NO: 280784 - DNA, 55 bp, Artificial
  Synthetic oligonucleotide
ggcccagccgaaacttatagaggaggagttgagcattttggacagtgcgataggg

SEQ ID NO: 280785 - DNA, 55 bp, Artificial
  Synthetic oligonucleotide
gacatctgattagatatccaccgtagattcggaagaatacggaatgtaaaaggca

SEQ ID NO: 280786 - DNA, 55 bp, Artificial
  Synthetic oligonucleotide
accagtccactggctctgtagctacaggggtacttacttccgttggtacctctct

SEQ ID NO: 280787 - DNA, 55 bp, Artificial
  Synthetic oligonucleotide
gacatgattgtcaaaagtgtcagaccatcaaagtggggactgtatccatagttag

SEQ ID NO: 280788 - DNA, 55 bp, Artificial
  Synthetic oligonucleotide
gagaccactatggcccgttatatcatgccactcaaagacgagcagcggctaccgg

SEQ ID NO: 280789 - DNA, 55 bp, Artificial
  Synthetic oligonucleotide
ggcattatcaggtaccccgaagtgaatcattttaagtggcagatatcagagcgac

SEQ ID NO: 280790 - DNA, 55 bp, Artificial
  Synthetic oligonucleotide
gagacccaggtccccatactctttgttagaaaccacctacctatatcgctgatcc

SEQ ID NO: 280791 - DNA, 55 bp, Artificial
  Synthetic oligonucleotide
gagaccctcttgggccagaactctttcccacagcaagcgtagtctggaagtcact

SEQ ID NO: 280792 - DNA, 55 bp, Artificial
  Synthetic oligonucleotide
ggcattagcctagcctatctctcttcacccctggtgatactaccttacccacggt

SEQ ID NO: 280793 - DNA, 55 bp, Artificial
  Synthetic oligonucleotide
gagacctccataatatctgttgagccagttagttctccgtatcaccctcaaacca

SEQ ID NO: 280794 - DNA, 55 bp, Artificial
  Synthetic oligonucleotide
gagactttgtgtcgcttgtatcgccggtggggtgggcttcgctccaccactactt

SEQ ID NO: 280795 - DNA, 55 bp, Artificial
  Synthetic oligonucleotide
gagagattaccatctcgcgtgactgcggctaataccaggtttactctggtcggtc

SEQ ID NO: 280796 - DNA, 55 bp, Artificial
  Synthetic oligonucleotide
gagagcatttgctgttagatggtgatgtgtagatagcccggggtaatactgttca

SEQ ID NO: 280797 - DNA, 60 bp, Artificial
  Synthetic oligonucleotide
gatatacagattcggacgcctagaaaacaggaacgttctctccttgcatgaatgctacat

SEQ ID NO: 280798 - DNA, 55 bp, Artificial
  Synthetic oligonucleotide
gagagcccattgtacaggaataagcgatctagctaattactagtggtaatcggtc

SEQ ID NO: 280799 - DNA, 55 bp, Artificial
  Synthetic oligonucleotide
gagagctgttgtcgcctaccatgttaagctccactccaatttactcgtcaatgtt

SEQ ID NO: 280800 - DNA, 55 bp, Artificial
  Synthetic oligonucleotide
ggcatgtctatttcgtggcttggatctatttccactgcaggcggctcgttacggc

SEQ ID NO: 280801 - DNA, 55 bp, Artificial
  Synthetic oligonucleotide
gagatagggagcgacaatcaatggagctcaaagctctcgtatggaggccgaggaa

SEQ ID NO: 280802 - DNA, 55 bp, Artificial
  Synthetic oligonucleotide
ggcatggtaggcgggcttcatatccagggtaaggtgctcgctcggggtggttagg

SEQ ID NO: 280803 - DNA, 55 bp, Artificial
  Synthetic oligonucleotide
gagatggagggtccaagcttccactccctgcgtcggggatacatcttgttgggtg

SEQ ID NO: 280804 - DNA, 55 bp, Artificial
  Synthetic oligonucleotide
gagattctttatcgaatgccatttctatcctgatctcgacagtctgtccgggttc

SEQ ID NO: 280805 - DNA, 55 bp, Artificial
  Synthetic oligonucleotide
gagcaaccgtcggggaccgggatatacctgatacaacctgaagggtagctggcag

SEQ ID NO: 280806 - DNA, 55 bp, Artificial
  Synthetic oligonucleotide
ggcataggtgcgtcgatttcgaattgagtcatagggcaatggtcaagtgccagag

SEQ ID NO: 280807 - DNA, 55 bp, Artificial
  Synthetic oligonucleotide
gagcagtaactcgattgtccaattccggtggcattactggccccggatgtattcg

SEQ ID NO: 280808 - DNA, 60 bp, Artificial
  Synthetic oligonucleotide
gagatgatcttcactgcaaggctgagacttggctgtgttggaggacgaaattatatcccc

SEQ ID NO: 280809 - DNA, 60 bp, Artificial
  Synthetic oligonucleotide
gatatcagttgttcagcgtactcatgatacaacgaaattcacgatggtccatcccttcga

SEQ ID NO: 280810 - DNA, 55 bp, Artificial
  Synthetic oligonucleotide
gagcccgacgagtatcctgaaatatactgtcccattggtgggaggctcggcaccg

SEQ ID NO: 280811 - DNA, 55 bp, Artificial
  Synthetic oligonucleotide
ggcatacggagagcggtcccggtgtatatgaggcggtaggttgcattgggtgacg

SEQ ID NO: 280812 - DNA, 55 bp, Artificial
  Synthetic oligonucleotide
gagccggacgttgtggaaattaccagtaggacgggatcaaaggctccatcatgtc

SEQ ID NO: 280813 - DNA, 55 bp, Artificial
  Synthetic oligonucleotide
ggcatacgagcctgtgctgtagttggggctttcaagcgatgacagcagacggcca

SEQ ID NO: 280814 - DNA, 55 bp, Artificial
  Synthetic oligonucleotide
gagcgcgtaacgaaatgatcaatgaatatcataccctgtcgagggaatgctctag

SEQ ID NO: 280815 - DNA, 55 bp, Artificial
  Synthetic oligonucleotide
gagcgggaaacggtaagagtaacttccttcacccaatattttagtgctgacgaca

SEQ ID NO: 280816 - DNA, 55 bp, Artificial
  Synthetic oligonucleotide
gacggaggtcattaggtgcacttcccgtatataacaagtctcgcacaattgggcc

SEQ ID NO: 280817 - DNA, 55 bp, Artificial
  Synthetic oligonucleotide
gacggatggcgcacgtccggcggtagtgtagaaagtcgcgttagcgtcaaatgcc

SEQ ID NO: 280818 - DNA, 55 bp, Artificial
  Synthetic oligonucleotide
gacggcgtctcaattccccaccctgatgcagtcgatgagaagtctgtcgtcacgg

SEQ ID NO: 280819 - DNA, 55 bp, Artificial
  Synthetic oligonucleotide
ggccaggtcagtagtcaatgcgcatgcttgtagtacctgctcatatctgaccgga

SEQ ID NO: 280820 - DNA, 60 bp, Artificial
  Synthetic oligonucleotide
accagtagctgctaaccccggcgctgtgagcacacctcccccagcttacaacgattcatc

SEQ ID NO: 280821 - DNA, 55 bp, Artificial
  Synthetic oligonucleotide
ggccagcgctcctcagaccaaggtcagcctcggaggcaagatcatcgcaagtacg

SEQ ID NO: 280822 - DNA, 55 bp, Artificial
  Synthetic oligonucleotide
gacggtgtagccttctcatgaatggctcgtgctattcttatcgaggagttgtcct

SEQ ID NO: 280823 - DNA, 55 bp, Artificial
  Synthetic oligonucleotide
gacgttcttagtcgtcattcacgctgggaatcaggtcactcacctgccagtcgac

SEQ ID NO: 280824 - DNA, 55 bp, Artificial
  Synthetic oligonucleotide
gactaccagcgtgtaaggagtatcgtaaatagaggttgtggcatcctcatgttac

SEQ ID NO: 280825 - DNA, 55 bp, Artificial
  Synthetic oligonucleotide
gactagaagagcgtagtacttgaggctgttgtttgttgcgaaggatttgtggggc

SEQ ID NO: 280826 - DNA, 55 bp, Artificial
  Synthetic oligonucleotide
gactcccgctctgaacaagaggcaatgcgttgagcctccgtaatggaacatgccc

SEQ ID NO: 280827 - DNA, 55 bp, Artificial
  Synthetic oligonucleotide
gactcgacacgttgcatgatgtctcgaatgttagtcttggctgtggagtaggtct

SEQ ID NO: 280828 - DNA, 55 bp, Artificial
  Synthetic oligonucleotide
gactcgagaactgtgccacacttagtcagtcccggaagtggcggtgcatttcaag

SEQ ID NO: 280829 - DNA, 55 bp, Artificial
  Synthetic oligonucleotide
gactcgatcttggccaacgtgggtgccccttaggcacaagacgccagactgaaag

SEQ ID NO: 280830 - DNA, 55 bp, Artificial
  Synthetic oligonucleotide
gactcgcttacgattgggtgggaagcgtctatatccatttcgtcgggttcggcag

SEQ ID NO: 280831 - DNA, 60 bp, Artificial
  Synthetic oligonucleotide
accagtacgagatgcggtggatgctggtggtagcttctagttcgtccagacagcatagcg

SEQ ID NO: 280832 - DNA, 55 bp, Artificial
  Synthetic oligonucleotide
gactcgttactggcagtcgatctgcgcaattggttcacaaagtccctgggtgtcg

SEQ ID NO: 280833 - DNA, 55 bp, Artificial
  Synthetic oligonucleotide
gactcttctctccagcgtttgttcagtcgaagctgtagccaagattagacaagta

SEQ ID NO: 280834 - DNA, 55 bp, Artificial
  Synthetic oligonucleotide
gactgagcgttgtggttacatacggactgtatatacatgctcgttccatgggtga

SEQ ID NO: 280835 - DNA, 55 bp, Artificial
  Synthetic oligonucleotide
ggccaagctagacgaatggatctcttcacgtctacagactcttgtctacgtcgtt

SEQ ID NO: 280836 - DNA, 55 bp, Artificial
  Synthetic oligonucleotide
gactgcaaaactctttcggccgcctcggatccgccaacggtcacgcctagtgagc

SEQ ID NO: 280837 - DNA, 55 bp, Artificial
  Synthetic oligonucleotide
gactgccaattattccataataattcccaaactatgcctagggcgccccttcaag

SEQ ID NO: 280838 - DNA, 55 bp, Artificial
  Synthetic oligonucleotide
gactgcctatatgttcgctggcatatcaactaatttcggggccagatatcaaacg

SEQ ID NO: 280839 - DNA, 55 bp, Artificial
  Synthetic oligonucleotide
gacttaaccagtttaccactagagtctgacgaaatatcctaatcgtgcagatcag

SEQ ID NO: 280840 - DNA, 55 bp, Artificial
  Synthetic oligonucleotide
gacttaggttttagtaaagttttcttcggatgtatttattatataatcgagcaga

SEQ ID NO: 280841 - DNA, 55 bp, Artificial
  Synthetic oligonucleotide
ggccaagatagggtgatatttctgtccgctccttatgcctggtctttcgcaagtc

SEQ ID NO: 280842 - DNA, 60 bp, Artificial
  Synthetic oligonucleotide
gatatcgaaccataggaacctcgaccaccgaaactgccgacgatagagctgatcgggatg

SEQ ID NO: 280843 - DNA, 55 bp, Artificial
  Synthetic oligonucleotide
gacttcccttgtatcgcgggttcccatggctccactcttcaccttggttgccgtg

SEQ ID NO: 280844 - DNA, 55 bp, Artificial
  Synthetic oligonucleotide
gactttcgagctagtacgtagactcttaccttgtcaagcaagaacaaacgagctc

SEQ ID NO: 280845 - DNA, 55 bp, Artificial
  Synthetic oligonucleotide
gagaactacacttgttgggaggcatatactaacgtatcatggataggtattatcg

SEQ ID NO: 280846 - DNA, 55 bp, Artificial
  Synthetic oligonucleotide
ggccaacaaaagcatgtctcaggccgcctccacaacatctagaaagccacggagg

SEQ ID NO: 280847 - DNA, 55 bp, Artificial
  Synthetic oligonucleotide
ggcgcggtttgaagtaggataagagtcgctgtcatttgttattagctacaacggc

SEQ ID NO: 280848 - DNA, 55 bp, Artificial
  Synthetic oligonucleotide
ctgttggggtactcccatatcatagtgcgaagtctgtaagtataaacccggggct

SEQ ID NO: 280849 - DNA, 54 bp, Artificial
  Synthetic oligonucleotide
ggcgcgacaaccggcttgtaggtcgggacgacaaaggcaggtaaggtaatgttc

SEQ ID NO: 280850 - DNA, 55 bp, Artificial
  Synthetic oligonucleotide
cttacagtccctcattgtttgcgtgtaggtgccaggcccgagtagctgcgatgcc

SEQ ID NO: 280851 - DNA, 55 bp, Artificial
  Synthetic oligonucleotide
cttacggaggaatcgcgtttgaggcctgatggtcttggtatacgtgatcgggtgt

SEQ ID NO: 280852 - DNA, 55 bp, Artificial
  Synthetic oligonucleotide
ggcgcctaagacatttgcgaatgcgattatggaagtttcacgtctgagtgcttcc

SEQ ID NO: 280853 - DNA, 60 bp, Artificial
  Synthetic oligonucleotide
ggcagctcggtatccacgacgtactctacagcattggatctgtacgcgcatatcaagcga

SEQ ID NO: 280854 - DNA, 55 bp, Artificial
  Synthetic oligonucleotide
cttcaactcagatctggagcataagcatatcccaagtcccgctcttgtcgacccc

SEQ ID NO: 280855 - DNA, 55 bp, Artificial
  Synthetic oligonucleotide
cttcactatccgagacaccgtacgtatagatccgccggggcgtgcgacctcgaaa

SEQ ID NO: 280856 - DNA, 55 bp, Artificial
  Synthetic oligonucleotide
ggcgccaacgtcactcattctcgagctcatctccagcttatcgctctactgccct

SEQ ID NO: 280857 - DNA, 55 bp, Artificial
  Synthetic oligonucleotide
cttcccagtctagcaatgtggaatcgcgaatgctccaacgactgcaaccaaaagc

SEQ ID NO: 280858 - DNA, 55 bp, Artificial
  Synthetic oligonucleotide
cttccctgcggactcatccttttgccggtgaagtctgtcaaagcgcacgattccg

SEQ ID NO: 280859 - DNA, 55 bp, Artificial
  Synthetic oligonucleotide
cttccgacagcacctccctcatacgtgctagcattccccgagccaacaagtgccc

SEQ ID NO: 280860 - DNA, 55 bp, Artificial
  Synthetic oligonucleotide
cttccgccggctctccaactacgattcttccaacgattcccgtattatcaggtcc

SEQ ID NO: 280861 - DNA, 55 bp, Artificial
  Synthetic oligonucleotide
cttccgtcgcagaatactgtagaccttctaggggcttggcgaacgacggtggccg

SEQ ID NO: 280862 - DNA, 55 bp, Artificial
  Synthetic oligonucleotide
ggcgcagctgaaccggatctacggagtagatgcctacgatttaccgcgggatggc

SEQ ID NO: 280863 - DNA, 55 bp, Artificial
  Synthetic oligonucleotide
cttcggcgcggggcgggatatagtgcggacagagggattccggggcctgttctcc

SEQ ID NO: 280864 - DNA, 60 bp, Artificial
  Synthetic oligonucleotide
tccatctaatggccctagtgtcatcacgttccagtgatacacgtaggcaggtacattcca

SEQ ID NO: 280865 - DNA, 55 bp, Artificial
  Synthetic oligonucleotide
cttcggtatatacttcctggtgattctatcggtgaagtcatacatcacacgttag

SEQ ID NO: 280866 - DNA, 55 bp, Artificial
  Synthetic oligonucleotide
cttcgtcgcttactcccgagttatgtagcgcatggatcatgatagtcgcgagcag

SEQ ID NO: 280867 - DNA, 55 bp, Artificial
  Synthetic oligonucleotide
cttcgtttcgtgaaccccgcgacattcgaactgataatgcttagcgagaggggaa

SEQ ID NO: 280868 - DNA, 55 bp, Artificial
  Synthetic oligonucleotide
cttctgcgacgccctacgaatacagtcctactactgaagcatatgcggctgtgca

SEQ ID NO: 280869 - DNA, 55 bp, Artificial
  Synthetic oligonucleotide
cttctggggtaatgggatgatgaaggtcgtctttacttcgacgatggagcatcac

SEQ ID NO: 280870 - DNA, 55 bp, Artificial
  Synthetic oligonucleotide
cttcttacaagtcccacaggagagttccgtgttattcaggagctcagacttctgt

SEQ ID NO: 280871 - DNA, 55 bp, Artificial
  Synthetic oligonucleotide
cttcttcaccgagaagtgctaatacggttgcattctgctatcgtctcggatgtca

SEQ ID NO: 280872 - DNA, 55 bp, Artificial
  Synthetic oligonucleotide
cttgaaaagacgccagatgccatccgataacaacgtggggccacccattggacgc

SEQ ID NO: 280873 - DNA, 55 bp, Artificial
  Synthetic oligonucleotide
cttgaaagggatagtctagacgatatgcagaggaagctacgtgtcctaaggtagc

SEQ ID NO: 280874 - DNA, 55 bp, Artificial
  Synthetic oligonucleotide
ggcgattccgtagagattcccttgacaccgctcgcgacaagttgcttcctcgcac

SEQ ID NO: 280875 - DNA, 60 bp, Artificial
  Synthetic oligonucleotide
tccatgtcgttctgtatatcagattgatgagtttactgttcccgagaagcaggactctca

SEQ ID NO: 280876 - DNA, 55 bp, Artificial
  Synthetic oligonucleotide
cttgaatgggccagaaaatgtgacggttatgtatgtcttcgagaatcgtgctgtc

SEQ ID NO: 280877 - DNA, 55 bp, Artificial
  Synthetic oligonucleotide
ctgggccattcgatggagttgttctaaacagtcaatgactgcatgtatctggggt

SEQ ID NO: 280878 - DNA, 55 bp, Artificial
  Synthetic oligonucleotide
ctgggccggagctagtccacacccttacatttggtggcaactcaataacatcgga

SEQ ID NO: 280879 - DNA, 55 bp, Artificial
  Synthetic oligonucleotide
ctgggccggtctgatcgatcaaagacccaagatccgtctggtccgagcgagtgcc

SEQ ID NO: 280880 - DNA, 55 bp, Artificial
  Synthetic oligonucleotide
ggcggtcataacatagtacattggcaggatgatcagacatcctagcaggttcaac

SEQ ID NO: 280881 - DNA, 55 bp, Artificial
  Synthetic oligonucleotide
ctgggctaaccagcccaagtaagtacgccgtcgctaagagtgtctgggatggccg

SEQ ID NO: 280882 - DNA, 55 bp, Artificial
  Synthetic oligonucleotide
ggcggcgaagaatggaaaagctgtagacgcaagtggaaaggtcactaaagacgcg

SEQ ID NO: 280883 - DNA, 55 bp, Artificial
  Synthetic oligonucleotide
ctgggtaatcgcatatctttgcgcacttcggtatgtacgctatggatgcttgcag

SEQ ID NO: 280884 - DNA, 55 bp, Artificial
  Synthetic oligonucleotide
ctgggtatgtacaatatccgcgaaaccaagcatgacagcgatccccaaatgcagc

SEQ ID NO: 280885 - DNA, 55 bp, Artificial
  Synthetic oligonucleotide
ctgggtctagtttccaggacaaccatgtgaactgatgcaaccaaggcccacgagc

SEQ ID NO: 280886 - DNA, 56 bp, Artificial
  Synthetic oligonucleotide
ctacgggctcctttcttccaaccgcctacgtacagaccttggcatctacgctacca

SEQ ID NO: 280887 - DNA, 55 bp, Artificial
  Synthetic oligonucleotide
ggcggagctaaagaaggagaccgaaggctacccacagtttgccaactacgatgac

SEQ ID NO: 280888 - DNA, 55 bp, Artificial
  Synthetic oligonucleotide
ggcggacatccggcgatagccattggattgggctgcgagcaagtcggtatctatg

SEQ ID NO: 280889 - DNA, 51 bp, Artificial
  Synthetic oligonucleotide
ctgtaacgttttcaacgggtaagtggtccacacgaacaagtggtctaattt

SEQ ID NO: 280890 - DNA, 55 bp, Artificial
  Synthetic oligonucleotide
ctgtagcaatacaaccatctaataaaccctccgctaataattgtcacgctacaaa

SEQ ID NO: 280891 - DNA, 55 bp, Artificial
  Synthetic oligonucleotide
ctgtagccttgatcggctattgacaaccgttcggatagtccagatgttcaacgct

SEQ ID NO: 280892 - DNA, 55 bp, Artificial
  Synthetic oligonucleotide
ctgtaggggtatacgaatcgagtaaacacaccatgtagtcagcatatcgactgag

SEQ ID NO: 280893 - DNA, 55 bp, Artificial
  Synthetic oligonucleotide
ctgtcaatctccgattattataggccaactccaggggtatacactgccagagggg

SEQ ID NO: 280894 - DNA, 55 bp, Artificial
  Synthetic oligonucleotide
ctgtcacatgtaggccgtcgttagggtcggacgagtcacctttcagacatcatcg

SEQ ID NO: 280895 - DNA, 55 bp, Artificial
  Synthetic oligonucleotide
ctgtcatcagttacgtctggtcgttgcttttaccctccgccttgttccgactgca

SEQ ID NO: 280896 - DNA, 55 bp, Artificial
  Synthetic oligonucleotide
ctgtcccatttaatcttgtaagcctgggatccatcgaagagctacacacgacggt

SEQ ID NO: 280897 - DNA, 60 bp, Artificial
  Synthetic oligonucleotide
gatcaaatatcgctgattccatgtcgccagaaatttgtcttccttgcagcgaacataccc

SEQ ID NO: 280898 - DNA, 55 bp, Artificial
  Synthetic oligonucleotide
ctgtcgtacaccgcaagcaagagtttggattttaacacgcgacgatttccgtgcg

SEQ ID NO: 280899 - DNA, 55 bp, Artificial
  Synthetic oligonucleotide
ctgtcgtgtatattcttagaactgcgtaacgtccgccgagatgaattgtgctgaa

SEQ ID NO: 280900 - DNA, 55 bp, Artificial
  Synthetic oligonucleotide
ggcgctggagtaacgatacaagatcgtgcggtcgccttctactatggtggatggc

SEQ ID NO: 280901 - DNA, 55 bp, Artificial
  Synthetic oligonucleotide
ctgtgcataagtgtgaggaagtatatctggtgctaatcttaatcccactcaagtc

SEQ ID NO: 280902 - DNA, 55 bp, Artificial
  Synthetic oligonucleotide
ctgtgccacgagtgtaagtgtgccggatacatcaagtccccttctgttcatagtc

SEQ ID NO: 280903 - DNA, 55 bp, Artificial
  Synthetic oligonucleotide
ctgtgcgtctcggagaatggttcaccggataaatagccgtcggtcccagctgctc

SEQ ID NO: 280904 - DNA, 55 bp, Artificial
  Synthetic oligonucleotide
ctgtggcagttgattctcgttgggtcaagggtgtaggcaaataggactgatcgtc

SEQ ID NO: 280905 - DNA, 55 bp, Artificial
  Synthetic oligonucleotide
ggcgctcatgcaactcactacagcttgagcactacgtcaatattcggaatgcctc

SEQ ID NO: 280906 - DNA, 55 bp, Artificial
  Synthetic oligonucleotide
gaaagtgaggtcgctccccaaatcagaagggacataaataccgtcgaatcatccg

SEQ ID NO: 280907 - DNA, 55 bp, Artificial
  Synthetic oligonucleotide
gaaatcagacaaatgctgccgtaggcttactgcacatcagcacttcttggttggc

SEQ ID NO: 280908 - DNA, 60 bp, Artificial
  Synthetic oligonucleotide
gatcagttactagatgaaatacgcgcagtggttgcaacaaaggtcaagaatacctgtgca

SEQ ID NO: 280909 - DNA, 55 bp, Artificial
  Synthetic oligonucleotide
ggcctgtgagtcgtgtaggcaacggaagacgaaatgtagcggtgacacgccggtg

SEQ ID NO: 280910 - DNA, 55 bp, Artificial
  Synthetic oligonucleotide
gaacatgcatctgcgccgttggtggattgtatcgccgtcggtcatccgtctctgc

SEQ ID NO: 280911 - DNA, 55 bp, Artificial
  Synthetic oligonucleotide
gaacctcgcagcactctgcaagagtggccagatgcggttccggagaatggactca

SEQ ID NO: 280912 - DNA, 53 bp, Artificial
  Synthetic oligonucleotide
gaacctgtgagtgaatcggggctgaagggccaaaggggtgggttgggtagttg

SEQ ID NO: 280913 - DNA, 55 bp, Artificial
  Synthetic oligonucleotide
gaacgaaatcagggttgtcctgctgggcgtaacagatcctccctccgtaaccctc

SEQ ID NO: 280914 - DNA, 55 bp, Artificial
  Synthetic oligonucleotide
gaacgagaaacccgagaactcagtcgcacgatccatccgtcatgtcatatgccgc

SEQ ID NO: 280915 - DNA, 54 bp, Artificial
  Synthetic oligonucleotide
gaacggatgccctaacgactttccaatagcggacctacctataagcttacccgc

SEQ ID NO: 280916 - DNA, 55 bp, Artificial
  Synthetic oligonucleotide
gaacgtatgaggtggtcgccgttcctcggagtgccaagaatagtcgtagtggttc

SEQ ID NO: 280917 - DNA, 55 bp, Artificial
  Synthetic oligonucleotide
gaactggatgtcggcacactagaagctgtcagtccgttgcttcttaatgtccagt

SEQ ID NO: 280918 - DNA, 55 bp, Artificial
  Synthetic oligonucleotide
gaactgtagatacgtcttgcgatcgcctgaatacttaccgttaaacccacactcc

SEQ ID NO: 280919 - DNA, 60 bp, Artificial
  Synthetic oligonucleotide
gagatgcactgaaatttctgggcttatagacataacgagttactatcatatgagaggcat

SEQ ID NO: 280920 - DNA, 60 bp, Artificial
  Synthetic oligonucleotide
ggttcgttggctctatcaggtcctctcgaaacctcattgccagcgattgatcaatctgat

SEQ ID NO: 280921 - DNA, 55 bp, Artificial
  Synthetic oligonucleotide
ggcctcgtacggaatccctaccgtattcgagtctctcgacacattccctgttgac

SEQ ID NO: 280922 - DNA, 55 bp, Artificial
  Synthetic oligonucleotide
ggccgggtacacagtgggcagcaacgtgcactctggatgcagctccgacagtaag

SEQ ID NO: 280923 - DNA, 55 bp, Artificial
  Synthetic oligonucleotide
gaagactttgacgcaagtgtacacagtgcacaagggcccttgacgggtacgtaag

SEQ ID NO: 280924 - DNA, 55 bp, Artificial
  Synthetic oligonucleotide
gaagcgcgttaaggtatgtgtttcttcgcatgcccatgtatctagtagagcttag

SEQ ID NO: 280925 - DNA, 55 bp, Artificial
  Synthetic oligonucleotide
gaaggcaccgaagacgacttcttagggcagccttttcggacatgataggccattg

SEQ ID NO: 280926 - DNA, 54 bp, Artificial
  Synthetic oligonucleotide
gaagggtcttgtcggtcgttgtgtggagttagaaactcgtaggcggtattggtg

SEQ ID NO: 280927 - DNA, 55 bp, Artificial
  Synthetic oligonucleotide
gaagtatacaatattcgtgacacctccaacgtggctacgtgatcctcagacgagc

SEQ ID NO: 280928 - DNA, 55 bp, Artificial
  Synthetic oligonucleotide
gaagtatttgagataaaccctggttgacccatacctttagcgtgcagcactcggg

SEQ ID NO: 280929 - DNA, 55 bp, Artificial
  Synthetic oligonucleotide
gaagtggtcgcgagagcgtggacaacatgaccgcaccgacaaatgtccgaggtac

SEQ ID NO: 280930 - DNA, 55 bp, Artificial
  Synthetic oligonucleotide
gaagtgtcaaatcttgcgtcggctggtcttcacggcgacccgcttttgttcaggg

SEQ ID NO: 280931 - DNA, 60 bp, Artificial
  Synthetic oligonucleotide
gatccaaagttgtagcaagaagtgaatgctagtacgagaaggcaagtcgataggagtgtc

SEQ ID NO: 280932 - DNA, 55 bp, Artificial
  Synthetic oligonucleotide
gaataatcatgagatcattaggcgatacagagtctttgggcatttcatcctcgca

SEQ ID NO: 280933 - DNA, 55 bp, Artificial
  Synthetic oligonucleotide
ggccggcctccagtcctgttactcagagacttccctcagagtcatacactacgaa

SEQ ID NO: 280934 - DNA, 55 bp, Artificial
  Synthetic oligonucleotide
gaataggccagatgtattctgtggatactccgtgcggtaattgtgggagtgtgcg

SEQ ID NO: 280935 - DNA, 55 bp, Artificial
  Synthetic oligonucleotide
gaatcacctcaacgcctatcaacgaggcagtgattatcgctaccatctgcgcaac

SEQ ID NO: 280936 - DNA, 55 bp, Artificial
  Synthetic oligonucleotide
ggccgatagggatggttgctcatagccccgtatcgcgccaactagccagtgaccc

SEQ ID NO: 280937 - DNA, 55 bp, Artificial
  Synthetic oligonucleotide
ggcgatacctgaaccaagtcgggtatgcaacgatcctatgtccccgcttgtccct

SEQ ID NO: 280938 - DNA, 55 bp, Artificial
  Synthetic oligonucleotide
cttgagagtcttaatccagttggcgcctgaagggatttccggattgaaggagggg

SEQ ID NO: 280939 - DNA, 55 bp, Artificial
  Synthetic oligonucleotide
cttgagccagctctgtggttaggcgcctctcgtagatcttggtagcttggattgg

SEQ ID NO: 280940 - DNA, 55 bp, Artificial
  Synthetic oligonucleotide
cttgatcggagtatgggctccgcaccagatcctcgtgtttatgactttgagcccg

SEQ ID NO: 280941 - DNA, 55 bp, Artificial
  Synthetic oligonucleotide
cttgcaagtctcatctcctaacgaaacggctaaaaccagttactatccactcctc

SEQ ID NO: 280942 - DNA, 60 bp, Artificial
  Synthetic oligonucleotide
atgtgaggcatagtgcgtgaactcttgctgaacgtctagtttcgtcgacgcccataggcc

SEQ ID NO: 280943 - DNA, 55 bp, Artificial
  Synthetic oligonucleotide
cttgcaattatcaggcagacgtaatggctgacattattgcctattcgggttagtc

SEQ ID NO: 280944 - DNA, 55 bp, Artificial
  Synthetic oligonucleotide
cttggacaccaagggccatcaactgggacttaatattgccttcgagcagcccact

SEQ ID NO: 280945 - DNA, 55 bp, Artificial
  Synthetic oligonucleotide
cttggtgcctcttatagacaatgcagacgcagatggctatagactgggttttacg

SEQ ID NO: 280946 - DNA, 55 bp, Artificial
  Synthetic oligonucleotide
cttggtgcgtcccaatacccgcagtttgcatgttagacagggcttgatactaacg

SEQ ID NO: 280947 - DNA, 55 bp, Artificial
  Synthetic oligonucleotide
cttgtcactctccaactcttcataacattctaacgtcggcacaattccacactgc

SEQ ID NO: 280948 - DNA, 55 bp, Artificial
  Synthetic oligonucleotide
ctttaaattcccggatggcaggcaagagactcacctcgtatgttggccgagttac

SEQ ID NO: 280949 - DNA, 55 bp, Artificial
  Synthetic oligonucleotide
ctttacgtacttagatgccatagccaacgggcattccctgctgagacccatgtgc

SEQ ID NO: 280950 - DNA, 55 bp, Artificial
  Synthetic oligonucleotide
ctttagatggtggtagaggaggtgtgttctcgtcttcttggtctcgtgggctatc

SEQ ID NO: 280951 - DNA, 55 bp, Artificial
  Synthetic oligonucleotide
ggcgaggacgacaagtaaggactccaccctacagcgacgaggcaactcaactggg

SEQ ID NO: 280952 - DNA, 55 bp, Artificial
  Synthetic oligonucleotide
ggcgagcatgggtctagcacaattagatctgtcggggagacctcgagatcaggca

SEQ ID NO: 280953 - DNA, 57 bp, Artificial
  Synthetic oligonucleotide
tcccctctacaacatggaccctcgcaataaaacctaccgcggattctatgtctatcc

SEQ ID NO: 280954 - DNA, 55 bp, Artificial
  Synthetic oligonucleotide
ctttcgctgtaactgtcatacataagcgcatgttgtacctcaaccatgtagacag

SEQ ID NO: 280955 - DNA, 55 bp, Artificial
  Synthetic oligonucleotide
ctttcggctgagtgcgaagctgacaagttgtccgcggtctgtgtatccacttact

SEQ ID NO: 280956 - DNA, 55 bp, Artificial
  Synthetic oligonucleotide
ctttcgtcgattgagtcgcaactcagcgccccaagcgagcattgaatcgggccaa

SEQ ID NO: 280957 - DNA, 55 bp, Artificial
  Synthetic oligonucleotide
ctttgcgacctctcaaacgatattggaatctcgaggtcttgtgtgtggatggtat

SEQ ID NO: 280958 - DNA, 55 bp, Artificial
  Synthetic oligonucleotide
gaaaagcggcgctagcgttgacggtcgtgaaactactcggtctctatctaggggt

SEQ ID NO: 280959 - DNA, 55 bp, Artificial
  Synthetic oligonucleotide
ggcgaccaaagttactatcctcaagagtatgatgagcatttggacgtagcaatgg

SEQ ID NO: 280960 - DNA, 55 bp, Artificial
  Synthetic oligonucleotide
gaaacagactcgtccggccatacaactggggggacactatcacagtatgacttgg

SEQ ID NO: 280961 - DNA, 55 bp, Artificial
  Synthetic oligonucleotide
ggcgaagtaagtgacaatataggctgccggctattagtgtatgtgcttgcctgaa

SEQ ID NO: 280962 - DNA, 55 bp, Artificial
  Synthetic oligonucleotide
ggcgaacacgaaagagctcacccaccgtcttacgagcgatcgtcattcagctccc

SEQ ID NO: 280963 - DNA, 55 bp, Artificial
  Synthetic oligonucleotide
gaaacgacaacgtttgctgctctctatttgaggtcgtcatatgcaaagcgagagt

SEQ ID NO: 280964 - DNA, 60 bp, Artificial
  Synthetic oligonucleotide
tcccctgttgcaaatgacgtgtcgtctgtgacgggtgcttggaaacctctcgctctcacc

SEQ ID NO: 280965 - DNA, 55 bp, Artificial
  Synthetic oligonucleotide
ggcgaaaattggcacaaattacgaagcttgcatggctccgtatggccgaatactc

SEQ ID NO: 280966 - DNA, 55 bp, Artificial
  Synthetic oligonucleotide
ggccttgcatcgaccatcatactgtgatttgctattatactccagttctccagtc

SEQ ID NO: 280967 - DNA, 55 bp, Artificial
  Synthetic oligonucleotide
gttaaaccgatctagacacgataatacgcagtgacgcaatttatgcctgaggccg

SEQ ID NO: 280968 - DNA, 55 bp, Artificial
  Synthetic oligonucleotide
gtgtttacacacccaccctccggcgtgtccacggatctccgctccagatacgctg

SEQ ID NO: 280969 - DNA, 55 bp, Artificial
  Synthetic oligonucleotide
gtgttcatgtctgctatcgttgcgatactctaagttgcacttccctggtcgcacg

SEQ ID NO: 280970 - DNA, 55 bp, Artificial
  Synthetic oligonucleotide
gtgttcatcgtagaagtcctgtcccatgagagtccgtacaatcacacggtggaca

SEQ ID NO: 280971 - DNA, 55 bp, Artificial
  Synthetic oligonucleotide
gtgttaggctgtggttggtgtgttagctccctctaagccttgttatgcgcgttcg

SEQ ID NO: 280972 - DNA, 55 bp, Artificial
  Synthetic oligonucleotide
gtgtggagttaactcaaacgatgccagctttggtgcttttgttctacctattggg

SEQ ID NO: 280973 - DNA, 55 bp, Artificial
  Synthetic oligonucleotide
agcgaaatcagaggcgccattgatggagtgggaagtaacgtgttcgcgacgttga

SEQ ID NO: 280974 - DNA, 55 bp, Artificial
  Synthetic oligonucleotide
agcgacatggccagctatatcaaacactctaccgacccttgtgactgcggttccc

SEQ ID NO: 280975 - DNA, 60 bp, Artificial
  Synthetic oligonucleotide
gataacgagcatccgcctattcatccagatcctagtatgttactggcgacccctactgaa

SEQ ID NO: 280976 - DNA, 55 bp, Artificial
  Synthetic oligonucleotide
agcgagctcagtgtttcgaatgaagaggcgttggcgtggtataggaatatgttaa

SEQ ID NO: 280977 - DNA, 55 bp, Artificial
  Synthetic oligonucleotide
gtgtcgaagtctcagtaaggcgggtgatcctctcgatgacggcaggctgcgcagt

SEQ ID NO: 280978 - DNA, 55 bp, Artificial
  Synthetic oligonucleotide
agcgatgtcggtggtactatgtaggaggtagggtgatcagagccagatgagctgg

SEQ ID NO: 280979 - DNA, 55 bp, Artificial
  Synthetic oligonucleotide
gtgtcactgccaaatggggcgacggggctgtacacgagcgaatgctacctctccg

SEQ ID NO: 280980 - DNA, 55 bp, Artificial
  Synthetic oligonucleotide
gtgtagatggcactgtcatctggacacgaagaccgctatgtccaaagacctcggc

SEQ ID NO: 280981 - DNA, 55 bp, Artificial
  Synthetic oligonucleotide
gtgtaaggggtaataggaagtgcttgtcgcatttacaggaatgtacagaagtgtc

SEQ ID NO: 280982 - DNA, 55 bp, Artificial
  Synthetic oligonucleotide
gtggttgacccggaaactcagtcctatactccacacgcttaggcaagtaattccc

SEQ ID NO: 280983 - DNA, 55 bp, Artificial
  Synthetic oligonucleotide
agcgcgggtgtgccgaaatacagggtcccgctagagtctactaatcatgatacca

SEQ ID NO: 280984 - DNA, 54 bp, Artificial
  Synthetic oligonucleotide
gtggtatggggaaagccgccggatatttggggagggcgtgattgttccggtggc

SEQ ID NO: 280985 - DNA, 55 bp, Artificial
  Synthetic oligonucleotide
gtggtatcacattactatcgtcgctataattcggaacaactccattgaaccaacc

SEQ ID NO: 280986 - DNA, 52 bp, Artificial
  Synthetic oligonucleotide
accccccgggtggacggcactcgtgggaagaaataaatcgtacattgtaggc

SEQ ID NO: 280987 - DNA, 55 bp, Artificial
  Synthetic oligonucleotide
gtgggtctcctatctattctccaaccgttctggagtcagagcacaacgggcgacc

SEQ ID NO: 280988 - DNA, 55 bp, Artificial
  Synthetic oligonucleotide
gtgggtatgtggatggttgagaagctcgcgggcagctattggtctaccgtgggcg

SEQ ID NO: 280989 - DNA, 55 bp, Artificial
  Synthetic oligonucleotide
gttctccgaccctcagactctcgtgatcaagggtcgcactgagcgcgaataccac

SEQ ID NO: 280990 - DNA, 55 bp, Artificial
  Synthetic oligonucleotide
gttctccatgtggccgatgatgttgcatgagtgatcgaagatgtaggcagcactc

SEQ ID NO: 280991 - DNA, 55 bp, Artificial
  Synthetic oligonucleotide
agcagtagtctcatcccgcctcacaacgactcccttgacgccctccttcgttccc

SEQ ID NO: 280992 - DNA, 55 bp, Artificial
  Synthetic oligonucleotide
agcagtcacataagtttcgacggttcgatgatactttctgaccccgtcaacgccc

SEQ ID NO: 280993 - DNA, 55 bp, Artificial
  Synthetic oligonucleotide
agcatacaccgtcgacatgggattcgctgccgtcacgatagggaatacactggca

SEQ ID NO: 280994 - DNA, 55 bp, Artificial
  Synthetic oligonucleotide
gttcggaactcatgactaaaggatctgttagcatccaacaaactgtaggtttcgg

SEQ ID NO: 280995 - DNA, 55 bp, Artificial
  Synthetic oligonucleotide
gttcgcctaaatatgattgccagtgcgtccgtcgatggatttagtactgtgcact

SEQ ID NO: 280996 - DNA, 55 bp, Artificial
  Synthetic oligonucleotide
gttcgacgggacttgtgaactgatcctcaaccattcagcatcgcaagctcccaag

SEQ ID NO: 280997 - DNA, 60 bp, Artificial
  Synthetic oligonucleotide
gataagatgagccgggcaactgaactttgccctgattagagacctatagatagctaggcg

SEQ ID NO: 280998 - DNA, 55 bp, Artificial
  Synthetic oligonucleotide
gttccgaaaaggtaggctgttccaagacttcattgaatacctcaatgcccttgtc

SEQ ID NO: 280999 - DNA, 55 bp, Artificial
  Synthetic oligonucleotide
agccaggcatctcccacgaatagatgaagctagagagttgttcagccatttcgta

SEQ ID NO: 281000 - DNA, 55 bp, Artificial
  Synthetic oligonucleotide
gttcatgttgggctctatactgtgattgcggccccacttcaacttatctggacct

SEQ ID NO: 281001 - DNA, 55 bp, Artificial
  Synthetic oligonucleotide
gttcagacaatccatgaccctgactatctttgtatgtcttcaccctccgtggtgc

SEQ ID NO: 281002 - DNA, 55 bp, Artificial
  Synthetic oligonucleotide
gttatcgatgaacatatgtctctcaaggagtgctccctctattcgttttcgccgg

SEQ ID NO: 281003 - DNA, 55 bp, Artificial
  Synthetic oligonucleotide
gttagctcgccaagagactttacatctaaacttgcatatgactagtccgtacggc

SEQ ID NO: 281004 - DNA, 55 bp, Artificial
  Synthetic oligonucleotide
agccgaagtcgacccaacgatcacagtctacaccaaggtcttcggtggatgtccc

SEQ ID NO: 281005 - DNA, 55 bp, Artificial
  Synthetic oligonucleotide
gttactgtgtattacatctcgatattcctacgggcgctggtcctttcgattccat

SEQ ID NO: 281006 - DNA, 55 bp, Artificial
  Synthetic oligonucleotide
agccgacgtcaaccagggcgactgactaattgaatgcttttcggtggaatatggg

SEQ ID NO: 281007 - DNA, 52 bp, Artificial
  Synthetic oligonucleotide
gttacgtaaccctattctccgggtccgaacctagtgcctcacttacttacgc

SEQ ID NO: 281008 - DNA, 60 bp, Artificial
  Synthetic oligonucleotide
cagtattaagctaatccggcagagacaaattcagtggtacgtgatcatattatacaaata

SEQ ID NO: 281009 - DNA, 55 bp, Artificial
  Synthetic oligonucleotide
gttaccctgcccttatctacaaccacagagctttgcttcaccactgagtcggtat

SEQ ID NO: 281010 - DNA, 55 bp, Artificial
  Synthetic oligonucleotide
agccgttcaggcaaagattcctagagaatcctgcagatccaaatgcgtttgaggg

SEQ ID NO: 281011 - DNA, 55 bp, Artificial
  Synthetic oligonucleotide
gtgctttcttacgggctgtccccatcattagggcgatgatctccccactcatcct

SEQ ID NO: 281012 - DNA, 55 bp, Artificial
  Synthetic oligonucleotide
gtgcttaaagcgctccccgatggccccaaatggtcggttgtggaggagctctccc

SEQ ID NO: 281013 - DNA, 55 bp, Artificial
  Synthetic oligonucleotide
aggaactttctttaacgttctcaatgggcaagtggcctatacagataactaatcc

SEQ ID NO: 281014 - DNA, 55 bp, Artificial
  Synthetic oligonucleotide
gtgctgcaggccctatcacacatcacactagttcgtgctctaagcgcccacgctc

SEQ ID NO: 281015 - DNA, 55 bp, Artificial
  Synthetic oligonucleotide
gtgctgagcatgccaccgtatcgttcgggcacaaatgtaggttgggaatgtcggg

SEQ ID NO: 281016 - DNA, 55 bp, Artificial
  Synthetic oligonucleotide
gtgcgtatcatagcagccaatttcttcggggaaggcattaattgtccattgaggg

SEQ ID NO: 281017 - DNA, 55 bp, Artificial
  Synthetic oligonucleotide
gtgcgcacggtctcgttgcataggattacggctaccgagtcaagtcagtgtatcc

SEQ ID NO: 281018 - DNA, 55 bp, Artificial
  Synthetic oligonucleotide
gtgcgcaaagctagtctccttcgaggtaaccgaacttcagattgtgagagaggcg

SEQ ID NO: 281019 - DNA, 52 bp, Artificial
  Synthetic oligonucleotide
acccatagacctgtaggcgacctaattagccccctaactaaaataggttcta

SEQ ID NO: 281020 - DNA, 55 bp, Artificial
  Synthetic oligonucleotide
gtgcgatcccttgacgactagcgacatcatctacatggacaccaaacactaggcg

SEQ ID NO: 281021 - DNA, 55 bp, Artificial
  Synthetic oligonucleotide
gtgcgactgtgagcccctcataccttgcagaccacaccagagcggtcgggactac

SEQ ID NO: 281022 - DNA, 55 bp, Artificial
  Synthetic oligonucleotide
aggatgagcgttttgtactgttggaactgcgtagtggctggaagcttatcctccg

SEQ ID NO: 281023 - DNA, 55 bp, Artificial
  Synthetic oligonucleotide
aggatgcgatgctagcccatcggatcattctctcctctaagccggtcttagtagg

SEQ ID NO: 281024 - DNA, 55 bp, Artificial
  Synthetic oligonucleotide
gtgccggggtgtgacacgtaaggaacttacagactttagcgcttttacaaggcaa

SEQ ID NO: 281025 - DNA, 55 bp, Artificial
  Synthetic oligonucleotide
gtgccgaataagctatacaatgcaactactaacgactgacggccttgttacccgc

SEQ ID NO: 281026 - DNA, 55 bp, Artificial
  Synthetic oligonucleotide
gtgccgaagactcgcaattgaaccacataatcttctctccataccttttgacctg

SEQ ID NO: 281027 - DNA, 55 bp, Artificial
  Synthetic oligonucleotide
gtgccatctgaccctcactcgcctacaatcttggccaactacctaacttcaccta

SEQ ID NO: 281028 - DNA, 55 bp, Artificial
  Synthetic oligonucleotide
gtgccaaccaccagtggagttgctaaccatacatcaccactagcaactcctacga

SEQ ID NO: 281029 - DNA, 55 bp, Artificial
  Synthetic oligonucleotide
aggccagaagagcacagacacgtcacgtcgcggattctgaacctggtaccctgag

SEQ ID NO: 281030 - DNA, 55 bp, Artificial
  Synthetic oligonucleotide
tataggctccaaacggcgacgctaggaacgattatccttgggaccgcggttgtag

SEQ ID NO: 281031 - DNA, 59 bp, Artificial
  Synthetic oligonucleotide
tccaaaccatgacccccgttacatctatcgatgagagccctctacccgatggtcgctgg

SEQ ID NO: 281032 - DNA, 55 bp, Artificial
  Synthetic oligonucleotide
gtgcatacaaacgaatagatctagatggaccccaatattatgtggcaagcgcgca

SEQ ID NO: 281033 - DNA, 55 bp, Artificial
  Synthetic oligonucleotide
gtggggctcttgttcagtatgtaaagtaagattacgctagtgtgttcgacatttg

SEQ ID NO: 281034 - DNA, 55 bp, Artificial
  Synthetic oligonucleotide
agcggggattcctggcgggaaggcgttgctcccaagtcacatgcccgaagctttc

SEQ ID NO: 281035 - DNA, 55 bp, Artificial
  Synthetic oligonucleotide
agcggggtagatcttagtcgccttgaccttcccggcaacgaccgccatctcggca

SEQ ID NO: 281036 - DNA, 55 bp, Artificial
  Synthetic oligonucleotide
gtgggctgtgtcagatggttggtgcgtaggggtaatgcaggcgcggtagactgcc

SEQ ID NO: 281037 - DNA, 55 bp, Artificial
  Synthetic oligonucleotide
gtgggaggttgaaagcatatcctactgttgcagagtgacgatcatttagagctag

SEQ ID NO: 281038 - DNA, 55 bp, Artificial
  Synthetic oligonucleotide
agcggtgtgatactgaatccaccacgactgcgtctctacaagtatcagtcccacc

SEQ ID NO: 281039 - DNA, 55 bp, Artificial
  Synthetic oligonucleotide
gtgggagaagcgagtggccctctggggagacaacaagcacgaggtcgtgcaaacc

SEQ ID NO: 281040 - DNA, 55 bp, Artificial
  Synthetic oligonucleotide
agcgtcaaccatcgtactatgatgtctactgaaccacgcacagagaagtcgccag

SEQ ID NO: 281041 - DNA, 55 bp, Artificial
  Synthetic oligonucleotide
agcgtcaggaagctcactccctgattgaacgaggctcccgcgtatttgcagctac

SEQ ID NO: 281042 - DNA, 55 bp, Artificial
  Synthetic oligonucleotide
cgaaaagagaaaggctgtcgatcgcaagccccagacgacgtataccttcaaaaac

SEQ ID NO: 281043 - DNA, 55 bp, Artificial
  Synthetic oligonucleotide
agcgtctcatctcaggcccaagtttgacgccagaggaaacgctcggcctccaaag

SEQ ID NO: 281044 - DNA, 55 bp, Artificial
  Synthetic oligonucleotide
agctacggcgctctatgtatcgagggctggattgatctggatcgctgacgtacac

SEQ ID NO: 281045 - DNA, 55 bp, Artificial
  Synthetic oligonucleotide
gtggctgacccactgtgagatccggttctaatcggaacactgctggatccaaggt

SEQ ID NO: 281046 - DNA, 55 bp, Artificial
  Synthetic oligonucleotide
agctcacttgaatgtagtgtagcttgtactccgcgaggagtagtaagacgttcag

SEQ ID NO: 281047 - DNA, 55 bp, Artificial
  Synthetic oligonucleotide
gtggctctcgtaggatcgagatagtggggtatgggtcgataagcgtgaatgggag

SEQ ID NO: 281048 - DNA, 55 bp, Artificial
  Synthetic oligonucleotide
gtggcctgtataccttgagtactgtagcgcgtggagaccgcttgggtatgtaata

SEQ ID NO: 281049 - DNA, 55 bp, Artificial
  Synthetic oligonucleotide
gtggcacacttgaactctgagtgccgtacttagcaagaggtcatgttgtctagtg

SEQ ID NO: 281050 - DNA, 55 bp, Artificial
  Synthetic oligonucleotide
agctgcatcgtaccatgactgaggtggtggactagcttgcatggtgttcagggtc

SEQ ID NO: 281051 - DNA, 55 bp, Artificial
  Synthetic oligonucleotide
agcttgccagcttaaaccctagaatgaaacacaccagccacgacggagtaaccca

SEQ ID NO: 281052 - DNA, 55 bp, Artificial
  Synthetic oligonucleotide
gtggaaatctccttccgtactgttcgcatcaaccccagcgttaggccaaatcgag

SEQ ID NO: 281053 - DNA, 60 bp, Artificial
  Synthetic oligonucleotide
ctacgttcgctggaaggtcattgctgtggactgcttgggaccgtgcgatattcagtgtag

SEQ ID NO: 281054 - DNA, 53 bp, Artificial
  Synthetic oligonucleotide
aggaaactaccgatcacggttgaagcatcgtttggttcgaaacctttctcgcc

SEQ ID NO: 281055 - DNA, 55 bp, Artificial
  Synthetic oligonucleotide
tacaagccccaactcattgtactgccgttacggatgcctgtcaaagtttactctg

SEQ ID NO: 281056 - DNA, 54 bp, Artificial
  Synthetic oligonucleotide
taatttcgcgataggatagtctcccggaagacgtccagtgtaaggcccacccct

SEQ ID NO: 281057 - DNA, 55 bp, Artificial
  Synthetic oligonucleotide
agaaagacctgaggtaagcttacgattcacgtggtgtagttgatatgttactcca

SEQ ID NO: 281058 - DNA, 55 bp, Artificial
  Synthetic oligonucleotide
agaacactcccatttctgtctcaggcgggtcggatgacgggttcgcctgtttcgc

SEQ ID NO: 281059 - DNA, 55 bp, Artificial
  Synthetic oligonucleotide
taattccggacgtaggagcgttgcagtcaggtagattgttgtgtaagggaaattg

SEQ ID NO: 281060 - DNA, 55 bp, Artificial
  Synthetic oligonucleotide
taatcggtcatacagctgccgggtgtgtttgcctgggagtgctgcatcaactcgt

SEQ ID NO: 281061 - DNA, 55 bp, Artificial
  Synthetic oligonucleotide
taatatacacatagggacgcattatatgaagacgttgtaaccaacatggctctag

SEQ ID NO: 281062 - DNA, 55 bp, Artificial
  Synthetic oligonucleotide
agaatctgtactttctcgatggcaagttgaagcattgtagtcccctgcgcgtttt

SEQ ID NO: 281063 - DNA, 55 bp, Artificial
  Synthetic oligonucleotide
agacaccggaatcgaccgttctctaccagccgactgtaactctgatgtgaatgag

SEQ ID NO: 281064 - DNA, 57 bp, Artificial
  Synthetic oligonucleotide
tccaaccgcctacgtacagaccttggcatctacgctaccactaaggacctgacccta

SEQ ID NO: 281065 - DNA, 55 bp, Artificial
  Synthetic oligonucleotide
taagtgctctagactcttgcccaatcaataggccgcattgccatctccccggacg

SEQ ID NO: 281066 - DNA, 55 bp, Artificial
  Synthetic oligonucleotide
agaccgcacttgtaactttatattgaatcggaagtgatacaacacccgatggcgt

SEQ ID NO: 281067 - DNA, 55 bp, Artificial
  Synthetic oligonucleotide
taaggctgttagcggattcaacaagtcgcaactgcgtctcgtaagatttgatgcc

SEQ ID NO: 281068 - DNA, 55 bp, Artificial
  Synthetic oligonucleotide
agaccgggtgactgaagatggagggaaaagcgtcctgtcgtcgtagtgagatctg

SEQ ID NO: 281069 - DNA, 55 bp, Artificial
  Synthetic oligonucleotide
taagctcgggtcttggcctcatttgttcctcccactactactcgctcctcccggc

SEQ ID NO: 281070 - DNA, 55 bp, Artificial
  Synthetic oligonucleotide
agagaccgtcgggtcatatgtgcctgatagcgccgagcgtgcagcgtgtgagttt

SEQ ID NO: 281071 - DNA, 55 bp, Artificial
  Synthetic oligonucleotide
taacggggttgcccactgcatagggttcctggttccaagtccaccagctgcgctc

SEQ ID NO: 281072 - DNA, 55 bp, Artificial
  Synthetic oligonucleotide
taacggcagtccgctagataagtagttcgctggaccatgctccgcatgattgtca

SEQ ID NO: 281073 - DNA, 53 bp, Artificial
  Synthetic oligonucleotide
taacgcccttctttattaggttaggaaagcactcctcctattccttagttcga

SEQ ID NO: 281074 - DNA, 55 bp, Artificial
  Synthetic oligonucleotide
actatctatctaacgtctgccacgctgtcttgtcgggcatggtctagttctacct

SEQ ID NO: 281075 - DNA, 55 bp, Artificial
  Synthetic oligonucleotide
gatactaaccaagcgtagtgtctccagaagccgtttaaaagggatttcctctcca

SEQ ID NO: 281076 - DNA, 55 bp, Artificial
  Synthetic oligonucleotide
tacgaggctatgaaacaaggggatccggaaatgtatctacacctgaggacgcttc

SEQ ID NO: 281077 - DNA, 55 bp, Artificial
  Synthetic oligonucleotide
actcatgatgcattcttcaggagctaacaacttcgtccccagggtcggatacctg

SEQ ID NO: 281078 - DNA, 55 bp, Artificial
  Synthetic oligonucleotide
tacgacagtgtaagatggtaccgtataactacgccgcatcttgcattagcagcgc

SEQ ID NO: 281079 - DNA, 55 bp, Artificial
  Synthetic oligonucleotide
tacgaagtgtccttacggtctatcagaacgtcacttgctacggtgttgctggaac

SEQ ID NO: 281080 - DNA, 55 bp, Artificial
  Synthetic oligonucleotide
taccttggtggcccggcctaagtatcagccggacttccatcacttgaactaatcg

SEQ ID NO: 281081 - DNA, 55 bp, Artificial
  Synthetic oligonucleotide
actctcggtagcttgatctcaacccggcacctaatgtgaaccgcgcccggtggct

SEQ ID NO: 281082 - DNA, 55 bp, Artificial
  Synthetic oligonucleotide
actcttggttgaaggcaacaaggtaaatccgaggtcttctgaattgggtccggca

SEQ ID NO: 281083 - DNA, 55 bp, Artificial
  Synthetic oligonucleotide
actgaagcccacgacgatgtcactgctagattcaacgagcgttttatcctatctc

SEQ ID NO: 281084 - DNA, 55 bp, Artificial
  Synthetic oligonucleotide
actgagcatattgtgcctgatgtcggaggaacgatgttccatgcctggatggatc

SEQ ID NO: 281085 - DNA, 55 bp, Artificial
  Synthetic oligonucleotide
tacctcccaacccatctctgagcgactccgctaccggttatgtagtgacccatcg

SEQ ID NO: 281086 - DNA, 60 bp, Artificial
  Synthetic oligonucleotide
cagtgagacgtagttgagcaatgccactggggccggaaacgctgtttctagcggaggcac

SEQ ID NO: 281087 - DNA, 55 bp, Artificial
  Synthetic oligonucleotide
taccgcaaaggacataccctgtgaccggtccaatcagtcagcctgagcgtgagtc

SEQ ID NO: 281088 - DNA, 55 bp, Artificial
  Synthetic oligonucleotide
taccgaagacgcgctgtcaatacgcgaatctggagcgtttctgtacagtattaac

SEQ ID NO: 281089 - DNA, 55 bp, Artificial
  Synthetic oligonucleotide
tacccagaagcgcgtagactatcacgaaatctactcatgttaatgccccgtcgtc

SEQ ID NO: 281090 - DNA, 55 bp, Artificial
  Synthetic oligonucleotide
taccagttacccatctagtttaatacggcgttacggagccttccagacactcctg

SEQ ID NO: 281091 - DNA, 55 bp, Artificial
  Synthetic oligonucleotide
actgtaagcccacattcgtcgttgacatgaagagtctgttgctgcgtaggagtgt

SEQ ID NO: 281092 - DNA, 55 bp, Artificial
  Synthetic oligonucleotide
actgttagacaagaactttaatagagtaagcagctcacctgctgctgctccggtc

SEQ ID NO: 281093 - DNA, 55 bp, Artificial
  Synthetic oligonucleotide
taccaagttctccgcagcctaggccctgcgtcaacaaagcgcctcgcaggggcat

SEQ ID NO: 281094 - DNA, 55 bp, Artificial
  Synthetic oligonucleotide
tacatgagcgctaacctctgattagtcgctagagagggcgcccattgggacatgc

SEQ ID NO: 281095 - DNA, 55 bp, Artificial
  Synthetic oligonucleotide
tacatctataaacacagacgcgaacacaactacacagccaccccatccagtcgca

SEQ ID NO: 281096 - DNA, 55 bp, Artificial
  Synthetic oligonucleotide
tacagcaagtgtcctatgaacggtcaatcctatgtggcgcaaagggagatgttgc

SEQ ID NO: 281097 - DNA, 59 bp, Artificial
  Synthetic oligonucleotide
tccaagcacccgtcacagacgacacgtcatttgcaacaggggagctaccttcccctaga

SEQ ID NO: 281098 - DNA, 53 bp, Artificial
  Synthetic oligonucleotide
gttgtgacactaacgacaaacttcccctctcaaaggtactaactaacccaaga

SEQ ID NO: 281099 - DNA, 55 bp, Artificial
  Synthetic oligonucleotide
agattggccgtggctacaagacacgcaaggccgacagtatgcatgtttgagacat

SEQ ID NO: 281100 - DNA, 55 bp, Artificial
  Synthetic oligonucleotide
gttggtttgtccttctgttagcttggcaccgctatactcgtacaggacctcattc

SEQ ID NO: 281101 - DNA, 55 bp, Artificial
  Synthetic oligonucleotide
agcaacactacgcgctgccaatgattcccctccatcctacgcctctagtctgtca

SEQ ID NO: 281102 - DNA, 55 bp, Artificial
  Synthetic oligonucleotide
gttggtcacctttctttgcagctttcggaggcaagtaaggggcgcgcatctagtg

SEQ ID NO: 281103 - DNA, 55 bp, Artificial
  Synthetic oligonucleotide
gttggtagtttggacggtagatctccacagcctcggtttgttcctagacaagtca

SEQ ID NO: 281104 - DNA, 54 bp, Artificial
  Synthetic oligonucleotide
gttggcaacttttgaggttttccgggtggaagattacttaatcatcccgctcga

SEQ ID NO: 281105 - DNA, 55 bp, Artificial
  Synthetic oligonucleotide
agcaccgagctgataaacacaacccatatcaccgagatccaattaatgtaaggtc

SEQ ID NO: 281106 - DNA, 55 bp, Artificial
  Synthetic oligonucleotide
gttggattccgactgaccgttgttccgacttacagtgatataatatctctccccg

SEQ ID NO: 281107 - DNA, 55 bp, Artificial
  Synthetic oligonucleotide
agcacgagacagagcagctttatacatgagctgaagctgacatgaggctgtagcc

SEQ ID NO: 281108 - DNA, 58 bp, Artificial
  Synthetic oligonucleotide
tccaagcgaacgacaactaaaacccagccgtctgcgtgcgatattccctgaaactcga

SEQ ID NO: 281109 - DNA, 55 bp, Artificial
  Synthetic oligonucleotide
gttggagcgataagctgactgatctagggtcctccatcctagcctcaacagtata

SEQ ID NO: 281110 - DNA, 55 bp, Artificial
  Synthetic oligonucleotide
gttgctgccgctacgccttttcatgtagcaggcggtactaagtccgtatagcggt

SEQ ID NO: 281111 - DNA, 55 bp, Artificial
  Synthetic oligonucleotide
gttgcgttgaatgggatagaatactcgatttgaccgaaattcacgcagcaaagcg

SEQ ID NO: 281112 - DNA, 54 bp, Artificial
  Synthetic oligonucleotide
gttgcgctaccccagctgtcttttcggggccgtcgtcccttggaaactcgacag

SEQ ID NO: 281113 - DNA, 55 bp, Artificial
  Synthetic oligonucleotide
agcactgactctcgtgtagataggtgaaagctagctatgtgggcctcgccctagt

SEQ ID NO: 281114 - DNA, 55 bp, Artificial
  Synthetic oligonucleotide
gttgaaggggtgggttcgactagtcagagagttatggtcgtgtatagacaaaagc

SEQ ID NO: 281115 - DNA, 55 bp, Artificial
  Synthetic oligonucleotide
gttgaaatgcctaataggagatggattgtgctaacttttcgtctagtttggagaa

SEQ ID NO: 281116 - DNA, 55 bp, Artificial
  Synthetic oligonucleotide
gttctgcgcaatcactaggcacgtcgtgacagggaatccgttcattgaccgctgc

SEQ ID NO: 281117 - DNA, 55 bp, Artificial
  Synthetic oligonucleotide
gttctgaggagagaattagttgccctccaaactatcggtcgcaaacatgggccag

SEQ ID NO: 281118 - DNA, 55 bp, Artificial
  Synthetic oligonucleotide
gttctgagctgggatgagtcgacgtggtatactacgcctgtgaactcttatgcga

SEQ ID NO: 281119 - DNA, 58 bp, Artificial
  Synthetic oligonucleotide
acccaacaacttccgatacgtggaagtattggctatactccttgactccacaagcatc

SEQ ID NO: 281120 - DNA, 55 bp, Artificial
  Synthetic oligonucleotide
agcaggcgacgggattgcgtaattggcgggctttgacgtcccgacatccgcttgg

SEQ ID NO: 281121 - DNA, 55 bp, Artificial
  Synthetic oligonucleotide
taacagtgcccttctacactgacccagacaccgaatcatccccgagagaggtcca

SEQ ID NO: 281122 - DNA, 55 bp, Artificial
  Synthetic oligonucleotide
taacagcattgtcactgtcagactatgtggccggcctagaggactcagacaggct

SEQ ID NO: 281123 - DNA, 55 bp, Artificial
  Synthetic oligonucleotide
taacaacagcccgatacgaggtgtgttgtaccccaggataaacagggaagagaaa

SEQ ID NO: 281124 - DNA, 55 bp, Artificial
  Synthetic oligonucleotide
taaagtatggtcagcttgtgttatcgttgcgcaatcgtgaagacataccatctcg

SEQ ID NO: 281125 - DNA, 55 bp, Artificial
  Synthetic oligonucleotide
agagtctttccctacctggtgtgcggaatccactgactaggtccagctgttgaaa

SEQ ID NO: 281126 - DNA, 55 bp, Artificial
  Synthetic oligonucleotide
agagtggctggctaacattttaccggtagggtgttgagtgcgttgtcccctcgcc

SEQ ID NO: 281127 - DNA, 55 bp, Artificial
  Synthetic oligonucleotide
agatagccgggagctcaataatttccgtccccagatcatagtatcatcggcctta

SEQ ID NO: 281128 - DNA, 55 bp, Artificial
  Synthetic oligonucleotide
agatagtactagacctgccccgcgagtagttactagatatcggctagcaccaatc

SEQ ID NO: 281129 - DNA, 55 bp, Artificial
  Synthetic oligonucleotide
taaaagtgaaatccgtactgctgctcggaacgataacagagccgctcgtttccgt

SEQ ID NO: 281130 - DNA, 60 bp, Artificial
  Synthetic oligonucleotide
accattggagatactgcagcgagggttgtttactcgtatgatatgagcatatacgccact

SEQ ID NO: 281131 - DNA, 55 bp, Artificial
  Synthetic oligonucleotide
agatatcgaggcgtctcagggcaaaggtaggacaggccatatgcgatgcccacag

SEQ ID NO: 281132 - DNA, 55 bp, Artificial
  Synthetic oligonucleotide
agatcaccctgggtttcggacttaccctatcacattctccccgttcgctgaccaa

SEQ ID NO: 281133 - DNA, 55 bp, Artificial
  Synthetic oligonucleotide
gtttggcatcttatccgtaagtctactatagacgcgacgcgtgcacattgcagac

SEQ ID NO: 281134 - DNA, 55 bp, Artificial
  Synthetic oligonucleotide
gtttctggctttctgcgtcaattcctggtagcgatggctggctcgaaggccgtgg

SEQ ID NO: 281135 - DNA, 52 bp, Artificial
  Synthetic oligonucleotide
agatccctctcgggaaaagggttatttgtcttagacgataatgggttggtac

SEQ ID NO: 281136 - DNA, 55 bp, Artificial
  Synthetic oligonucleotide
gtttctggcgacatcgcggaaggtagcaaaagcacgccttcactgtgagactgag

SEQ ID NO: 281137 - DNA, 54 bp, Artificial
  Synthetic oligonucleotide
gtttctatccgttgaagagaccgcgtaaaatcttaatcggagtccgaaatcgac

SEQ ID NO: 281138 - DNA, 55 bp, Artificial
  Synthetic oligonucleotide
gtttagtcaatgatgggctaggctgttcggagcttagtgagtctcaatttgggtg

SEQ ID NO: 281139 - DNA, 55 bp, Artificial
  Synthetic oligonucleotide
gtttaccgctgttgtgatccctattatccgcatattcgcacattctgcgtacgcc

SEQ ID NO: 281140 - DNA, 55 bp, Artificial
  Synthetic oligonucleotide
agatggatccgcacacgcagacaacgaaactaaaagcgcccagagtcaacccggg

SEQ ID NO: 281141 - DNA, 59 bp, Artificial
  Synthetic oligonucleotide
accgttgcagcactcattaacatcgttagactgatcattaggttaactcgtccacgaaa

SEQ ID NO: 281142 - DNA, 60 bp, Artificial
  Synthetic oligonucleotide
cagcattgacgcgcaagacaatctcctattccgaggacgaagatgggtcccccgcaacga

SEQ ID NO: 281143 - DNA, 59 bp, Artificial
  Synthetic oligonucleotide
cagtgcatcgaggcttattttcaagtttccgtggccatcggcttctcttttcttgcgct

SEQ ID NO: 281144 - DNA, 54 bp, Artificial
  Synthetic oligonucleotide
gtttaacttaatttctggtcgcatcgtaaccttcatttccctagagcataaacc

SEQ ID NO: 281145 - DNA, 55 bp, Artificial
  Synthetic oligonucleotide
gtttaactaaacagttggtttcacgagggagtagatgtgatcaattatgtagaac

SEQ ID NO: 281146 - DNA, 55 bp, Artificial
  Synthetic oligonucleotide
atccagcaagatgtacggagtaatagtccagagtccctggttcctagtcagtctc

SEQ ID NO: 281147 - DNA, 55 bp, Artificial
  Synthetic oligonucleotide
atccattgatatgtgctgcgagaggtcggggagttagtagtatggtatatctggc

SEQ ID NO: 281148 - DNA, 55 bp, Artificial
  Synthetic oligonucleotide
atccccacttgatcccgtcaaccaagtgcctaagagggtgaagtcattacaggca

SEQ ID NO: 281149 - DNA, 55 bp, Artificial
  Synthetic oligonucleotide
gtccgcggtggctaaggaatcaatggataagagagctcgcaaagccttcatggta

SEQ ID NO: 281150 - DNA, 55 bp, Artificial
  Synthetic oligonucleotide
gtccgaatcaggtatagtgctagcattcgcagaactaacacatgacgtagaggtg

SEQ ID NO: 281151 - DNA, 55 bp, Artificial
  Synthetic oligonucleotide
atcccttggtgaacctgataggggcaaccacatccgatgcctagatcggaccctt

SEQ ID NO: 281152 - DNA, 54 bp, Artificial
  Synthetic oligonucleotide
gtccgaataatgccggtggtaggtagtacaaaccggttcactacaggaacagac

SEQ ID NO: 281153 - DNA, 55 bp, Artificial
  Synthetic oligonucleotide
atccgaccggtgacacgtatgacggtgactggttcgacggtatctgccacggaca

SEQ ID NO: 281154 - DNA, 60 bp, Artificial
  Synthetic oligonucleotide
gatagactttagagaaccgggccatgaaggggggtcagcaggacatactgcatgcatgct

SEQ ID NO: 281155 - DNA, 55 bp, Artificial
  Synthetic oligonucleotide
atccgagcagttgctgcccgacgataaatcatgcgcgacaggggaaggaggggca

SEQ ID NO: 281156 - DNA, 55 bp, Artificial
  Synthetic oligonucleotide
gtcccaagacgaggagcatctgacatatatcggctgatttgtaccaccctctgcg

SEQ ID NO: 281157 - DNA, 55 bp, Artificial
  Synthetic oligonucleotide
gtccatcccacctgcaatggtgctgggatcccgtaactagtgagtctagatacga

SEQ ID NO: 281158 - DNA, 55 bp, Artificial
  Synthetic oligonucleotide
gtccactgtacagctctcgagtgctttctgtgtctagaatcgtctttggggcctc

SEQ ID NO: 281159 - DNA, 55 bp, Artificial
  Synthetic oligonucleotide
gtccactcgtttagtcgttcctcccgtcaaaatcccatcacgacgcactcgaagc

SEQ ID NO: 281160 - DNA, 55 bp, Artificial
  Synthetic oligonucleotide
atcgacagctctggacagcccgaccggacatccctagtcggtgtagctcaccagc

SEQ ID NO: 281161 - DNA, 55 bp, Artificial
  Synthetic oligonucleotide
atcgacctcgcctggacgaaggcacgattaaggcttttgctcctcaattacgccg

SEQ ID NO: 281162 - DNA, 55 bp, Artificial
  Synthetic oligonucleotide
atcgacgcgacacagtatccgcacttggtacggagtcctgaaatcctgcagacct

SEQ ID NO: 281163 - DNA, 55 bp, Artificial
  Synthetic oligonucleotide
atcgatggcgtatgtgtacaggcgagccgcctcagcgtggttcgatttgcggtat

SEQ ID NO: 281164 - DNA, 55 bp, Artificial
  Synthetic oligonucleotide
gtcatttcaccaacatgtgtggcgacaacccgaacaaccctgtcattggagcgac

SEQ ID NO: 281165 - DNA, 60 bp, Artificial
  Synthetic oligonucleotide
gatagagggcctataaacacccaattcagtatgatgcaactgctactgtgcggggtgtat

SEQ ID NO: 281166 - DNA, 55 bp, Artificial
  Synthetic oligonucleotide
atctcgcgccaacaagtatgcaccgaactctcgacataacgtaaatacggacgtc

SEQ ID NO: 281167 - DNA, 55 bp, Artificial
  Synthetic oligonucleotide
atctgagtgaccgacacatttcgaggattcctgatacgctgtctctcgttgaggg

SEQ ID NO: 281168 - DNA, 55 bp, Artificial
  Synthetic oligonucleotide
atagtgccaagatgcccggccttactgacttctgttgcccccttgtccacctgcg

SEQ ID NO: 281169 - DNA, 55 bp, Artificial
  Synthetic oligonucleotide
atagttccgcgtagggtagtcgtagaaagcatagcttaccccagcatgtcatata

SEQ ID NO: 281170 - DNA, 55 bp, Artificial
  Synthetic oligonucleotide
atatacaacgagcttaatggagacctcgcaagacgcttcgaaacagctggcgacc

SEQ ID NO: 281171 - DNA, 55 bp, Artificial
  Synthetic oligonucleotide
atatagcaatggatggaaggaccataccctgattcagtcaacctggtaaggccgc

SEQ ID NO: 281172 - DNA, 55 bp, Artificial
  Synthetic oligonucleotide
gtccttggatgagtcactcggcaatagatatcccgtgcacaccggtcacacgacc

SEQ ID NO: 281173 - DNA, 55 bp, Artificial
  Synthetic oligonucleotide
gtccttcaatggccatatctctccgcgaaagtatgtgctaattcgaacctcctcg

SEQ ID NO: 281174 - DNA, 55 bp, Artificial
  Synthetic oligonucleotide
atatgcggggagatagaccgtagttatcacgattgggctggggtgcggggtttta

SEQ ID NO: 281175 - DNA, 55 bp, Artificial
  Synthetic oligonucleotide
atatgttcgcttgagggatggtaagctgttccgcccaagcctctataccagagac

SEQ ID NO: 281176 - DNA, 54 bp, Artificial
  Synthetic oligonucleotide
cctttctgtgccgcattacgaacccactgttccaagtcaaagggccctttacga

SEQ ID NO: 281177 - DNA, 55 bp, Artificial
  Synthetic oligonucleotide
gtcctcttgtgttgcaacgtcacagtcgatgaatagtcactcatgagttgtatac

SEQ ID NO: 281178 - DNA, 55 bp, Artificial
  Synthetic oligonucleotide
gtcctactctaatcacgtcatactgtccccatccaatcgtaaagcaagttccgca

SEQ ID NO: 281179 - DNA, 55 bp, Artificial
  Synthetic oligonucleotide
atcaatctattttccttcgtacatctcaactagtgagatcatgatcgtcatccag

SEQ ID NO: 281180 - DNA, 55 bp, Artificial
  Synthetic oligonucleotide
atcactttcgagctcttcatttgtggtcgccctattacttgatagcgtctggacc

SEQ ID NO: 281181 - DNA, 55 bp, Artificial
  Synthetic oligonucleotide
atcagacatatatctactcgttttctcgtttgagcagggaggggtcatacttgca

SEQ ID NO: 281182 - DNA, 55 bp, Artificial
  Synthetic oligonucleotide
atcaggcaaccgtaagatttgactgtaataccgaatgaccggacggtttgcgacg

SEQ ID NO: 281183 - DNA, 55 bp, Artificial
  Synthetic oligonucleotide
atcatatggacgatcatgttacgctgccaggaatcgaggttccgagccattttgt

SEQ ID NO: 281184 - DNA, 55 bp, Artificial
  Synthetic oligonucleotide
atcatgcatttcgtttcaaacgaggttatcaatagccgcccgagaggtccgaatg

SEQ ID NO: 281185 - DNA, 55 bp, Artificial
  Synthetic oligonucleotide
atcatggcccggaacagtcggggaagaggcccctcccagattcgacccagtatgc

SEQ ID NO: 281186 - DNA, 54 bp, Artificial
  Synthetic oligonucleotide
gtccgtcattttgtttggcgggtataggacgtcgaagccagggagaggtaggac

SEQ ID NO: 281187 - DNA, 54 bp, Artificial
  Synthetic oligonucleotide
tccacgtagttcaaggtaggttctgtcctcgcgggcccccctgatatggacccg

SEQ ID NO: 281188 - DNA, 55 bp, Artificial
  Synthetic oligonucleotide
atccacggtaagtcgctctcggaaccaccaacccggttggcgctatagtcagcgt

SEQ ID NO: 281189 - DNA, 55 bp, Artificial
  Synthetic oligonucleotide
gtcagattccccacttatccccaatagggttacttgggcggacatcccaatacgc

SEQ ID NO: 281190 - DNA, 55 bp, Artificial
  Synthetic oligonucleotide
atgcgattaagaaggtacgtcgccgctgttggtgtgccacccatgccagccagct

SEQ ID NO: 281191 - DNA, 55 bp, Artificial
  Synthetic oligonucleotide
atgcgccagatctcgactgccttctcagagccgtggattccaatatagtccgctc

SEQ ID NO: 281192 - DNA, 55 bp, Artificial
  Synthetic oligonucleotide
gtcagactcgcttagcaacacgtcgtgtggaccgttagggacgtatatagaaggg

SEQ ID NO: 281193 - DNA, 55 bp, Artificial
  Synthetic oligonucleotide
gtcactgcatagactgactgctcgctcaccctcgctcgcccattccctcacaggc

SEQ ID NO: 281194 - DNA, 55 bp, Artificial
  Synthetic oligonucleotide
gtcactcgaagtacctagtttaccagacgtcaaatcggtcttaacaggctagatg

SEQ ID NO: 281195 - DNA, 55 bp, Artificial
  Synthetic oligonucleotide
atgcggtgtgaggaacgctctccgcatggcttgcaggtgaatgtgatttggtatg

SEQ ID NO: 281196 - DNA, 55 bp, Artificial
  Synthetic oligonucleotide
atgctagcacctacagtcattgcatagtcattctcttccggcttagcactcggcc

SEQ ID NO: 281197 - DNA, 55 bp, Artificial
  Synthetic oligonucleotide
gtcacaacgatggcacaaggaagcatccagcataagtttgagccgagtgcttggt

SEQ ID NO: 281198 - DNA, 60 bp, Artificial
  Synthetic oligonucleotide
gataggcgataaatctggggtacatggtttaatgcggctatacagcgatgcctcatgcta

SEQ ID NO: 281199 - DNA, 55 bp, Artificial
  Synthetic oligonucleotide
atgctcgcacttcccagtcaggtggtggcactcgggacatatctccgggtcaggc

SEQ ID NO: 281200 - DNA, 55 bp, Artificial
  Synthetic oligonucleotide
gtcaacaccattgcgtggcaggatacccaaatgttacgggtctgtgaactggtat

SEQ ID NO: 281201 - DNA, 55 bp, Artificial
  Synthetic oligonucleotide
gtcaaacagtgagaacaacacccgatactgtctagatgaaggagctacggttctc

SEQ ID NO: 281202 - DNA, 55 bp, Artificial
  Synthetic oligonucleotide
gtatttggtctgacgcttccagtccttatgcgaggcgttgagacccatgatccac

SEQ ID NO: 281203 - DNA, 55 bp, Artificial
  Synthetic oligonucleotide
gtattcctatccatagctacagcctagtcactgttacatcactagctaggacccc

SEQ ID NO: 281204 - DNA, 55 bp, Artificial
  Synthetic oligonucleotide
atggagcagctgggacgaatgtgccgggccgagaaatatcctctacttcaaggcc

SEQ ID NO: 281205 - DNA, 55 bp, Artificial
  Synthetic oligonucleotide
atggcagctcggggtgtctgtcgaagtagtttatggcttacggcgaggcctgcgt

SEQ ID NO: 281206 - DNA, 55 bp, Artificial
  Synthetic oligonucleotide
atggtagcagcggtcccaaactgattcacgagataccctacgccagtagtaaccc

SEQ ID NO: 281207 - DNA, 55 bp, Artificial
  Synthetic oligonucleotide
atggtcctgacactgcgagagttagcgcccctaatgcaattcgtatcacagccga

SEQ ID NO: 281208 - DNA, 55 bp, Artificial
  Synthetic oligonucleotide
atgtaacgctggcctacactgtactaacctgaagccacacaacacactgtcattc

SEQ ID NO: 281209 - DNA, 60 bp, Artificial
  Synthetic oligonucleotide
tccactcatatgtatccccggttagatacagtcggtagctagcaatcgtcgtctcgcgac

SEQ ID NO: 281210 - DNA, 55 bp, Artificial
  Synthetic oligonucleotide
atgtaccaaggcgcgattcccaatactacgccatatggctgcttgataaccattg

SEQ ID NO: 281211 - DNA, 55 bp, Artificial
  Synthetic oligonucleotide
atgtcaatccggttcagatggagtcttgacgtgatactcggctggctgtgttgcc

SEQ ID NO: 281212 - DNA, 55 bp, Artificial
  Synthetic oligonucleotide
gtcattgctgttggctgtcgagtccgtcgtattgggctgtgctagcagcggttga

SEQ ID NO: 281213 - DNA, 55 bp, Artificial
  Synthetic oligonucleotide
atctgccattcagcatttatccgctcttcaacaccagcagctgtttcatggtacg

SEQ ID NO: 281214 - DNA, 55 bp, Artificial
  Synthetic oligonucleotide
atctgctcagggttcgtttcgggttgtactatcggcaagatcatagttatcctcc

SEQ ID NO: 281215 - DNA, 55 bp, Artificial
  Synthetic oligonucleotide
gtcatgtttgtatgggattggacagttcatcgctattgttcccaggggacgatcg

SEQ ID NO: 281216 - DNA, 55 bp, Artificial
  Synthetic oligonucleotide
gtcatgggccagtgtctggatattgtcgaaggccgaccggacgtctttcgctccc

SEQ ID NO: 281217 - DNA, 55 bp, Artificial
  Synthetic oligonucleotide
atcttccgatgcacgtccaggatcataatcgaggatcacagtaaaatgcgatcct

SEQ ID NO: 281218 - DNA, 55 bp, Artificial
  Synthetic oligonucleotide
gtcatacagtttggtagctggataacttacagtccaacgagaacgaggaggttcg

SEQ ID NO: 281219 - DNA, 55 bp, Artificial
  Synthetic oligonucleotide
atgaacggttggacctcagcgcaaattgcctgtcagaactagtcgctgcatggga

SEQ ID NO: 281220 - DNA, 60 bp, Artificial
  Synthetic oligonucleotide
agtggcagctgttgctatatccagccacgttttgtcgatgagaattcacaacggtctata

SEQ ID NO: 281221 - DNA, 55 bp, Artificial
  Synthetic oligonucleotide
gtcagtccgcagctccaaatgtgttaggatcacataggttgctaatgctctcgac

SEQ ID NO: 281222 - DNA, 55 bp, Artificial
  Synthetic oligonucleotide
atgaccggtccattcagcgccgtgactagaaccttcgaatgagtgtagaacgctc

SEQ ID NO: 281223 - DNA, 55 bp, Artificial
  Synthetic oligonucleotide
atgacctcaatttgcgtaaacagagaccatagaccgctctcctcagcccggaccc

SEQ ID NO: 281224 - DNA, 55 bp, Artificial
  Synthetic oligonucleotide
atgactatgcacaaccttatctgactcagcatatgcacgagggattccgccaatg

SEQ ID NO: 281225 - DNA, 55 bp, Artificial
  Synthetic oligonucleotide
atgactctcagtgctctttgaccctcaatccagcgcttccaaatttcggcaccgc

SEQ ID NO: 281226 - DNA, 55 bp, Artificial
  Synthetic oligonucleotide
atgagtcgactgtatcgccgcgcctcagtctgggtcccttggcaaacttccggcg

SEQ ID NO: 281227 - DNA, 55 bp, Artificial
  Synthetic oligonucleotide
gtcagctgtttaactcctggccaaccgcccctacgatcctcctcgaccaatcccc

SEQ ID NO: 281228 - DNA, 55 bp, Artificial
  Synthetic oligonucleotide
atgatcagatatcgtcttttgcgttctattatgccaaccgaccgcagacatgtgc

SEQ ID NO: 281229 - DNA, 55 bp, Artificial
  Synthetic oligonucleotide
atgcagatcaccttcccgtttcccacttgctgtcccgcattaatcaacgttaaag

SEQ ID NO: 281230 - DNA, 55 bp, Artificial
  Synthetic oligonucleotide
gtcagctgcgagtagaaatgaaagtcagcggcgcgagcctagagatgaagggttg

SEQ ID NO: 281231 - DNA, 59 bp, Artificial
  Synthetic oligonucleotide
cataactcaacttcctcagaatcttgttacccttaacagcgctagggaatgatgtccac

SEQ ID NO: 281232 - DNA, 55 bp, Artificial
  Synthetic oligonucleotide
atgcatcgaggttgtaggttgtattagggagatgcacaggatgtcctactactac

SEQ ID NO: 281233 - DNA, 55 bp, Artificial
  Synthetic oligonucleotide
atgcattggccatcctttcgatgtacacttgggcactactcggacgcacctcgct

SEQ ID NO: 281234 - DNA, 55 bp, Artificial
  Synthetic oligonucleotide
atgcccttaggcgactcgcagtttgccagctatgccattccgcgaatgcacggtc

SEQ ID NO: 281235 - DNA, 55 bp, Artificial
  Synthetic oligonucleotide
aggtgcatgcattcatgaccgctagtatcaatccatatgaccgggaatcaggctt

SEQ ID NO: 281236 - DNA, 55 bp, Artificial
  Synthetic oligonucleotide
aggtgtctcctggcgcaactagatgccatttgtcgcaatttttgggctggccggg

SEQ ID NO: 281237 - DNA, 55 bp, Artificial
  Synthetic oligonucleotide
gtctcgttagtcaagacagtaggcatgctacggcaagagacctacggtgagtacg

SEQ ID NO: 281238 - DNA, 55 bp, Artificial
  Synthetic oligonucleotide
gtctcctctttgcggtcgctggacgtagggtcgtactaatcgaactaggaaagca

SEQ ID NO: 281239 - DNA, 55 bp, Artificial
  Synthetic oligonucleotide
agtagatatccgcaaacaactccaatccgtcccttgtgttgtagagaaccgtttg

SEQ ID NO: 281240 - DNA, 55 bp, Artificial
  Synthetic oligonucleotide
agtaggctcaatacattcgacttagtcttgccgtaaccttgtgaatagctatgcg

SEQ ID NO: 281241 - DNA, 55 bp, Artificial
  Synthetic oligonucleotide
gtctccacaatacattcgacttgcggtggagtcttagatcgtgatgctgttgaga

SEQ ID NO: 281242 - DNA, 60 bp, Artificial
  Synthetic oligonucleotide
tccctggttcagtctctccagggtagaatgaagatagaggtatgcggcgtcgcggaagca

SEQ ID NO: 281243 - DNA, 55 bp, Artificial
  Synthetic oligonucleotide
agtatcccttgggttgttcatctacatacagtgttatctaccaggcagtcttgcc

SEQ ID NO: 281244 - DNA, 55 bp, Artificial
  Synthetic oligonucleotide
agtattgtcgcgctgcgactgggtccttcttgacaccccagccgttacggaagca

SEQ ID NO: 281245 - DNA, 55 bp, Artificial
  Synthetic oligonucleotide
agtcaaagcctcagaggggcagcctttggccgattatcctgtcttaagacacggt

SEQ ID NO: 281246 - DNA, 55 bp, Artificial
  Synthetic oligonucleotide
agtcacgagaatttccgtgtccctggcattccgttgggcatcgcgaactgtgagc

SEQ ID NO: 281247 - DNA, 55 bp, Artificial
  Synthetic oligonucleotide
gtctcaggcgacgaatcacccatctcagatcctccagctgaactcctgtcgtcgg

SEQ ID NO: 281248 - DNA, 55 bp, Artificial
  Synthetic oligonucleotide
agtccacatatagctagcaacattcctagtcccaattattggccaactacgtgag

SEQ ID NO: 281249 - DNA, 55 bp, Artificial
  Synthetic oligonucleotide
agtcccattccaaggaatcaacaagacaagtattgatcggcggacgtcacccttg

SEQ ID NO: 281250 - DNA, 55 bp, Artificial
  Synthetic oligonucleotide
gtctataccgcctctacagtatttgttgggcatttgccgatgattatctatgtac

SEQ ID NO: 281251 - DNA, 55 bp, Artificial
  Synthetic oligonucleotide
gtctagtgctggtctggacgttcagtattctcttatacacggtataagtcacgcc

SEQ ID NO: 281252 - DNA, 55 bp, Artificial
  Synthetic oligonucleotide
agtcctgtacatgacactgacgagccgttcctgtaacgagggactagaggcacgg

SEQ ID NO: 281253 - DNA, 60 bp, Artificial
  Synthetic oligonucleotide
tatagtatagcagtatcacgtctaaaagacacagcattagatagtaataaacagaatatt

SEQ ID NO: 281254 - DNA, 60 bp, Artificial
  Synthetic oligonucleotide
gatgcgagacgcctgcaaccgacgtcttctcagaagacccccaaaatgcggttgcagagt

SEQ ID NO: 281255 - DNA, 55 bp, Artificial
  Synthetic oligonucleotide
gtctagtgaagtcgcccaaccagactgtgcctggacagacagtccgggacctctg

SEQ ID NO: 281256 - DNA, 55 bp, Artificial
  Synthetic oligonucleotide
agtcgagaagaatgctcgcttggttaatagcagtcagcggcctgcttatctcctc

SEQ ID NO: 281257 - DNA, 55 bp, Artificial
  Synthetic oligonucleotide
gtgcaggtcacttgtcttgcggagagccacagacgcctttatggccacccgcagc

SEQ ID NO: 281258 - DNA, 55 bp, Artificial
  Synthetic oligonucleotide
gtgcaagtgagatgagatcaatggacaccggccggaaaacgctgtgacaggcacc

SEQ ID NO: 281259 - DNA, 55 bp, Artificial
  Synthetic oligonucleotide
gtgatgcgcagcacttgttcgatgacatgcggtagacgaatgttgggactgcgtc

SEQ ID NO: 281260 - DNA, 55 bp, Artificial
  Synthetic oligonucleotide
gtgatctacctgagttcaagcgaggtggtgtggtcgtccagaagtggcagtaagc

SEQ ID NO: 281261 - DNA, 55 bp, Artificial
  Synthetic oligonucleotide
aggctgcctagagtcggctaatcgcctccgaatccggagcgaggacatgcctaga

SEQ ID NO: 281262 - DNA, 55 bp, Artificial
  Synthetic oligonucleotide
gtgagatcacgggtctgatctacaggcacagattacaggagcatcggtaccgaag

SEQ ID NO: 281263 - DNA, 55 bp, Artificial
  Synthetic oligonucleotide
gtgagacccctcatgcatataatttcactcgcagcatgtacctctgcacaggatc

SEQ ID NO: 281264 - DNA, 55 bp, Artificial
  Synthetic oligonucleotide
gtgacctgcttgtcaccacctgcattacgcaagcagtctgaaagccaagcaatcc

SEQ ID NO: 281265 - DNA, 60 bp, Artificial
  Synthetic oligonucleotide
tcccttgcatctgtgcggtacctcgtagtcgggactcgcttgttcggatcttgcttggtc

SEQ ID NO: 281266 - DNA, 55 bp, Artificial
  Synthetic oligonucleotide
gtgaattgttgtcgggtgctggtcgagtcccttaggagcgacttgatttggaaaa

SEQ ID NO: 281267 - DNA, 55 bp, Artificial
  Synthetic oligonucleotide
gtgaatcaacgataggatatagattggccgtatgatgagttagtagtacgcgtgc

SEQ ID NO: 281268 - DNA, 55 bp, Artificial
  Synthetic oligonucleotide
agggcggctgggcacaagtggctgcctcgaagagaagcaatccagctcttggtgc

SEQ ID NO: 281269 - DNA, 55 bp, Artificial
  Synthetic oligonucleotide
gtgaatacccttggactgagcaacggacaccgtgatacaagtgtgcgatgccacc

SEQ ID NO: 281270 - DNA, 55 bp, Artificial
  Synthetic oligonucleotide
gtgaagacgtactttgatccgacgggaccgacattgcgtacaaccggtgcgggat

SEQ ID NO: 281271 - DNA, 55 bp, Artificial
  Synthetic oligonucleotide
gtgaacatcggagtctcacccccgcttccgccggtgtgaaaacgtcgcatagcgg

SEQ ID NO: 281272 - DNA, 52 bp, Artificial
  Synthetic oligonucleotide
aggggtagtaaataactgtaagcgcgttctcaaactaattttcttacagtag

SEQ ID NO: 281273 - DNA, 55 bp, Artificial
  Synthetic oligonucleotide
gtcttcggcactgatgccttgactacctttgttaaagcgactaacctgtcctggt

SEQ ID NO: 281274 - DNA, 55 bp, Artificial
  Synthetic oligonucleotide
aggtagtagcagcgagctttcactaggaatccgatagagattccgaggtgtgcgc

SEQ ID NO: 281275 - DNA, 55 bp, Artificial
  Synthetic oligonucleotide
gtctggctgccagagatttgccgctgatctttataattgctctcccacccgggcc

SEQ ID NO: 281276 - DNA, 56 bp, Artificial
  Synthetic oligonucleotide
tccgaaagttctcgcccaagctctattggcccctggaaatggatcccccgaagata

SEQ ID NO: 281277 - DNA, 55 bp, Artificial
  Synthetic oligonucleotide
gtcggcgtaattgaggagcaaaagccttaatcgtgccttcgtccaggcgaggtcg

SEQ ID NO: 281278 - DNA, 55 bp, Artificial
  Synthetic oligonucleotide
agttgattattcgccacatcctgaactccccgtagttatcgaattcataagaacc

SEQ ID NO: 281279 - DNA, 55 bp, Artificial
  Synthetic oligonucleotide
agttgccatttcgtctagatacagatccggtttcgtaaggagatgctcgcaaagg

SEQ ID NO: 281280 - DNA, 55 bp, Artificial
  Synthetic oligonucleotide
agtttgggcgtacgacagactatcctaataactcgtatgttcccagattatttgg

SEQ ID NO: 281281 - DNA, 55 bp, Artificial
  Synthetic oligonucleotide
ataaaggccatctgtggtcaagttgaacgccgaggcaaaccaccggatacagcga

SEQ ID NO: 281282 - DNA, 55 bp, Artificial
  Synthetic oligonucleotide
gtcgcttatctgtccgacttgggtagatatttcttagcaggcgttctcacgggcc

SEQ ID NO: 281283 - DNA, 55 bp, Artificial
  Synthetic oligonucleotide
ataaccgcatctctgtgactaatgacagctgcagcatgcgagatttggacccgtc

SEQ ID NO: 281284 - DNA, 55 bp, Artificial
  Synthetic oligonucleotide
ataacgccaaattacctatgccgagtctgcagacgacagagctgtgcaatgagga

SEQ ID NO: 281285 - DNA, 55 bp, Artificial
  Synthetic oligonucleotide
ataacggcattgtgttgagtatagaaagggcacccagagaagatcgccaaaggag

SEQ ID NO: 281286 - DNA, 55 bp, Artificial
  Synthetic oligonucleotide
ataatcacgcccaccccgccataactacctactatggtagtagtccctctcaccg

SEQ ID NO: 281287 - DNA, 60 bp, Artificial
  Synthetic oligonucleotide
ccttcctaatcgagcatcttatcacgcttatcgcaggaccaaacagtgcaaatagcagga

SEQ ID NO: 281288 - DNA, 55 bp, Artificial
  Synthetic oligonucleotide
atacaatgacggaaagctcgctcgtaggatgtagtcctcttgcccaacacaatcg

SEQ ID NO: 281289 - DNA, 55 bp, Artificial
  Synthetic oligonucleotide
atacctactaaagctatctaggcagtaagagaggcggcagaatagctgccacctc

SEQ ID NO: 281290 - DNA, 55 bp, Artificial
  Synthetic oligonucleotide
gtcgccccgcaaatatagccgacaatccttccccagttggacatctacatcccgt

SEQ ID NO: 281291 - DNA, 54 bp, Artificial
  Synthetic oligonucleotide
gtcgagcgggatgattaagtaatcttccacccggaaaacctcaaaagttgccaa

SEQ ID NO: 281292 - DNA, 53 bp, Artificial
  Synthetic oligonucleotide
atactaataacgggtatgttctacggtagattcccctcctaactaaccatctc

SEQ ID NO: 281293 - DNA, 55 bp, Artificial
  Synthetic oligonucleotide
atagcgaaaatgaggcgtgcaagcgatcataatcttaaaggaggagccgcctcgg

SEQ ID NO: 281294 - DNA, 55 bp, Artificial
  Synthetic oligonucleotide
gtcgaattttcaagggaacccagtgcaacattttggcgctattcatgggctttcg

SEQ ID NO: 281295 - DNA, 55 bp, Artificial
  Synthetic oligonucleotide
ataggactcgaaaggtgtaagcacggagtataagtaaaggatgcacagccgcccc

SEQ ID NO: 281296 - DNA, 55 bp, Artificial
  Synthetic oligonucleotide
gtcgaaggtaacccgagaaatcccagagaaacgtctcaaagtattgacctaatgc

SEQ ID NO: 281297 - DNA, 55 bp, Artificial
  Synthetic oligonucleotide
gtctacatggtaatgcgctgccccgggtcgtgtgagttagggccgcactgttggc

SEQ ID NO: 281298 - DNA, 60 bp, Artificial
  Synthetic oligonucleotide
cataatttaggagcggtagcctagaccatcagtgcaagactatgtagagtgggcttatgg

SEQ ID NO: 281299 - DNA, 55 bp, Artificial
  Synthetic oligonucleotide
agtctccaaagtgtgtcctccatgccgtctaactctcgacgccggatatcgtgcg

SEQ ID NO: 281300 - DNA, 55 bp, Artificial
  Synthetic oligonucleotide
gtcgtgtctgagtgccctacactgggctctaggaacacacttaggaaccgccagt

SEQ ID NO: 281301 - DNA, 55 bp, Artificial
  Synthetic oligonucleotide
gtcgtgggatgcacaagcacgcgagcaagctgccttcctgggataagctattcac

SEQ ID NO: 281302 - DNA, 55 bp, Artificial
  Synthetic oligonucleotide
gtcgtgcaattctatagcgggctaaccaccggcctagtgatggtgaagccttcca

SEQ ID NO: 281303 - DNA, 55 bp, Artificial
  Synthetic oligonucleotide
gtcgtctttctgcagtcaatttagggcatggccaccactcaggatgacctgggga

SEQ ID NO: 281304 - DNA, 55 bp, Artificial
  Synthetic oligonucleotide
agtgagattgtggtggtctttcaccaagtaaagtaggttattgctatctggacgg

SEQ ID NO: 281305 - DNA, 55 bp, Artificial
  Synthetic oligonucleotide
gtcgtcggttcgaatgtatgctgggtaccgtggaccttgattttcgttctccatc

SEQ ID NO: 281306 - DNA, 55 bp, Artificial
  Synthetic oligonucleotide
agtgcctggcgtatcacgggtcatgactatgttgtggatggaggtccacgtcaag

SEQ ID NO: 281307 - DNA, 55 bp, Artificial
  Synthetic oligonucleotide
agtgcgaccagacaagcctgtatgctgtatagaaagcagagggttgcttggaact

SEQ ID NO: 281308 - DNA, 55 bp, Artificial
  Synthetic oligonucleotide
gtcgtactttgaataggcctacactctgcttactgtcgataaggcactactggtc

SEQ ID NO: 281309 - DNA, 60 bp, Artificial
  Synthetic oligonucleotide
gatggacgcgggacaattgtccaagtgcccaactagctaggtgatcatgggatggcccac

SEQ ID NO: 281310 - DNA, 51 bp, Artificial
  Synthetic oligonucleotide
gtcggttagttctattacggaactaagtacagcttatctagggccccggtt

SEQ ID NO: 281311 - DNA, 55 bp, Artificial
  Synthetic oligonucleotide
gtcggggtcagcgatcggaaagagaggtcggggtgctggattctactgctcggac

SEQ ID NO: 281312 - DNA, 55 bp, Artificial
  Synthetic oligonucleotide
agtgggttctgaaacgaatcaccagtggttttcatgacgatcatactctatctac

SEQ ID NO: 281313 - DNA, 55 bp, Artificial
  Synthetic oligonucleotide
agtggtttgacatagtaggcgctgcactgccctccaagtctccgtgtatactcgc

SEQ ID NO: 281314 - DNA, 55 bp, Artificial
  Synthetic oligonucleotide
agtgtaatgcagggcagcaccagtcgggagggtcttgcagacttcgagccacgtc

SEQ ID NO: 281315 - DNA, 55 bp, Artificial
  Synthetic oligonucleotide
gtcggggtcacacaaacgcgcgatcagttattgatctccgcctgcctgcaagtct

SEQ ID NO: 281316 - DNA, 55 bp, Artificial
  Synthetic oligonucleotide
gtcggggtagactgtccagtcgatgacttgaatgatgacttaactcggtcggcaa

SEQ ID NO: 281317 - DNA, 55 bp, Artificial
  Synthetic oligonucleotide
agtgtcatgggatcgatgacttctcaatgccggaggccttgcagtcttctcgcta

SEQ ID NO: 281318 - DNA, 55 bp, Artificial
  Synthetic oligonucleotide
gtcgggaacctctgtgcgcagtctcaaggggactcataacattctccatagactg

SEQ ID NO: 281319 - DNA, 55 bp, Artificial
  Synthetic oligonucleotide
agttagaatggcctatgtacccaatcaagcttcggagtaacctacggctgtgcgt

SEQ ID NO: 281320 - DNA, 60 bp, Artificial
  Synthetic oligonucleotide
catacacaagcatttgcttcaagagcatgaacacttcttctccatgtcccagatgccatc

SEQ ID NO: 281321 - DNA, 55 bp, Artificial
  Synthetic oligonucleotide
agttcactattctaaggtcgcacgctaacagcacaacccagatccacagcaataa

SEQ ID NO: 281322 - DNA, 55 bp, Artificial
  Synthetic oligonucleotide
agttccaccgaggcacgaggtcaaggtactagatgccctagtaatgatgaccacg

SEQ ID NO: 281323 - DNA, 55 bp, Artificial
  Synthetic oligonucleotide
tggactttgccacggggactgaccggcaggtgcatgcatcgggagagtccggcgg

SEQ ID NO: 281324 - DNA, 53 bp, Artificial
  Synthetic oligonucleotide
tggacccactggccgccttttgatcgcggtacccaacggtgaggccggttacc

SEQ ID NO: 281325 - DNA, 53 bp, Artificial
  Synthetic oligonucleotide
aacgggcgtcttgtataattcgaacagtttggcacggctaagattgtaggggt

SEQ ID NO: 281326 - DNA, 55 bp, Artificial
  Synthetic oligonucleotide
tggaatccccacgggatgtcgcctacctcgcttgtcgcaagaagcatgctttgcg

SEQ ID NO: 281327 - DNA, 55 bp, Artificial
  Synthetic oligonucleotide
tgctatgtgattggtcacgtctagccctgctttactaatcccatctgacaatcac

SEQ ID NO: 281328 - DNA, 55 bp, Artificial
  Synthetic oligonucleotide
tgctagctagctaactacgcgaggaggtgactaggtggctaggtccgagatcacg

SEQ ID NO: 281329 - DNA, 55 bp, Artificial
  Synthetic oligonucleotide
aactactctgctggcacgcagtcattaacagggtacaagagagctggggatacac

SEQ ID NO: 281330 - DNA, 55 bp, Artificial
  Synthetic oligonucleotide
aactagcctaaccctcaagtgcagcgaagctaggtcgagtctcgatgcgagtagg

SEQ ID NO: 281331 - DNA, 58 bp, Artificial
  Synthetic oligonucleotide
gatgtattataacaacactatttccattccatgtgaagtaataactaccaccaaaata

SEQ ID NO: 281332 - DNA, 55 bp, Artificial
  Synthetic oligonucleotide
aactcctccggccttgctagcctcttcatcatattctcagatgcccagagatctc

SEQ ID NO: 281333 - DNA, 54 bp, Artificial
  Synthetic oligonucleotide
aactggtctacgacccgggcgatgtcaaccaagccgaaatccctgtccagtggg

SEQ ID NO: 281334 - DNA, 55 bp, Artificial
  Synthetic oligonucleotide
aagaattccggtttcgtggtgaacaagatgcatgatgtataaaaggtgtggaagc

SEQ ID NO: 281335 - DNA, 55 bp, Artificial
  Synthetic oligonucleotide
tgcgcaaaactatctgcagatcgctcatgtacagctccctaatccgactgcgcct

SEQ ID NO: 281336 - DNA, 55 bp, Artificial
  Synthetic oligonucleotide
aagacatacggatcggtcgttcggaatggaacgcacggagatcgtgtgtagtaac

SEQ ID NO: 281337 - DNA, 55 bp, Artificial
  Synthetic oligonucleotide
tgcgatgatctcggacgctggccaaacttagtttgcggaactgacggctcgaggg

SEQ ID NO: 281338 - DNA, 55 bp, Artificial
  Synthetic oligonucleotide
tgcgatccagggtacttcacctatgccacaaacctcgccagtctcctgggataac

SEQ ID NO: 281339 - DNA, 55 bp, Artificial
  Synthetic oligonucleotide
aagactaccgctagcgacactggagtcatccgaaaagtcatactcggggtcggag

SEQ ID NO: 281340 - DNA, 55 bp, Artificial
  Synthetic oligonucleotide
tgcgacagctccccacatctacctgattgggcgcaacgaagcccaagcatcggag

SEQ ID NO: 281341 - DNA, 55 bp, Artificial
  Synthetic oligonucleotide
aagatgatgggagctctctttaataaggacacggcgaaccgccaaggattgcccg

SEQ ID NO: 281342 - DNA, 57 bp, Artificial
  Synthetic oligonucleotide
ctacccgcgagactcatacggcagccactacgaaactaacagaacctcacggccgcg

SEQ ID NO: 281343 - DNA, 55 bp, Artificial
  Synthetic oligonucleotide
tgcatccttgcgattctagttcctggatgaaccgtcggtcctgttccgagtttcc

SEQ ID NO: 281344 - DNA, 55 bp, Artificial
  Synthetic oligonucleotide
aagatgtgaaggtgcgcattgacatgtggagtgttgattctgttctaggaaagga

SEQ ID NO: 281345 - DNA, 55 bp, Artificial
  Synthetic oligonucleotide
tgcagcgatggagcaagacgaccaatctccgcaagtcgacgggaccccgacgtca

SEQ ID NO: 281346 - DNA, 54 bp, Artificial
  Synthetic oligonucleotide
tggttcttttcaagttagaagtactcttagtggtaaatatcctaaatacgaatg

SEQ ID NO: 281347 - DNA, 55 bp, Artificial
  Synthetic oligonucleotide
aacctcaggcagggaccctagcttcatcatatcaactagctcagcctggaggtgg

SEQ ID NO: 281348 - DNA, 55 bp, Artificial
  Synthetic oligonucleotide
tggtgtatatagcttaccgtagcttgctacctatcttatcgctcaaccgagctag

SEQ ID NO: 281349 - DNA, 55 bp, Artificial
  Synthetic oligonucleotide
tggtagactgtttaccttccaagtaaagtgtgctgattcgaattcagctagccat

SEQ ID NO: 281350 - DNA, 55 bp, Artificial
  Synthetic oligonucleotide
tggtaagtgttctcctcattgttaccactaagttgctaaagtcaggtagtgcgac

SEQ ID NO: 281351 - DNA, 55 bp, Artificial
  Synthetic oligonucleotide
tgggtagacagtctccgaggtagaatttggccagtaacaggattcgagcccatag

SEQ ID NO: 281352 - DNA, 55 bp, Artificial
  Synthetic oligonucleotide
tgggtaacataccgatatcattcgggtcattccacttgaaccgcacctgtagatc

SEQ ID NO: 281353 - DNA, 57 bp, Artificial
  Synthetic oligonucleotide
agtggcctatacagataactaatccaacttccccgtacatagataagaattcgatct

SEQ ID NO: 281354 - DNA, 55 bp, Artificial
  Synthetic oligonucleotide
tgggtaaagtgtgatcaacgcctagcatgatggctaagcattactaggtgggtgt

SEQ ID NO: 281355 - DNA, 55 bp, Artificial
  Synthetic oligonucleotide
tgggcttacttcgaactcaacctccggtcgattagcccagtagaatactccgata

SEQ ID NO: 281356 - DNA, 55 bp, Artificial
  Synthetic oligonucleotide
aacgatccggtttctcaataccaaccacgacggaagggatctgtatgagaacatc

SEQ ID NO: 281357 - DNA, 55 bp, Artificial
  Synthetic oligonucleotide
tgggcgccatatttagcattgggcgtggcactctgaattaccgggcgtgaagtca

SEQ ID NO: 281358 - DNA, 55 bp, Artificial
  Synthetic oligonucleotide
tgggcaccaatacgacattcggccccattcctggaccctgaattgaagaaacacg

SEQ ID NO: 281359 - DNA, 55 bp, Artificial
  Synthetic oligonucleotide
tgggagcacccgtcgactatacgttcaggctcgagcgtagcttgttagatattcg

SEQ ID NO: 281360 - DNA, 55 bp, Artificial
  Synthetic oligonucleotide
tgggaacctgcgcgggattttgcatggatcaagctcccgaaaacgaaccagacag

SEQ ID NO: 281361 - DNA, 55 bp, Artificial
  Synthetic oligonucleotide
tggctcttaacgtggctggagggctacagctatcacgcttgtgtcccgtggttct

SEQ ID NO: 281362 - DNA, 55 bp, Artificial
  Synthetic oligonucleotide
tggcggctttcagagctaagttcggtcgcagctgggatgtgaacacgcctctgga

SEQ ID NO: 281363 - DNA, 55 bp, Artificial
  Synthetic oligonucleotide
tggcctctgttagccttctgcgatctatcgtgctcggagcagctgcaagccccgc

SEQ ID NO: 281364 - DNA, 60 bp, Artificial
  Synthetic oligonucleotide
acctctctttattctgcccgtatgcgagcatacgcagcatcctgcttcccgtaacgctta

SEQ ID NO: 281365 - DNA, 60 bp, Artificial
  Synthetic oligonucleotide
tccgattgaatcgcaagagtccgatctgtatctgcgagcgttcggtgccactgtgcacta

SEQ ID NO: 281366 - DNA, 55 bp, Artificial
  Synthetic oligonucleotide
aacggacccatgacccgtctttcagcgcagataggctagccctcgcaggtgccgt

SEQ ID NO: 281367 - DNA, 55 bp, Artificial
  Synthetic oligonucleotide
tggattggcagactgactctctgctgccgccaatagtcatgacattgtcacagta

SEQ ID NO: 281368 - DNA, 55 bp, Artificial
  Synthetic oligonucleotide
tggagaacatgatgtgctcgattatctaaagtgcgattcggaaatccactgggct

SEQ ID NO: 281369 - DNA, 55 bp, Artificial
  Synthetic oligonucleotide
tgacaacaactatttcttcgctagttgatcgagcccactgactatcgctcaccaa

SEQ ID NO: 281370 - DNA, 55 bp, Artificial
  Synthetic oligonucleotide
tgaatgaagcctgtctggccctccaacgaggcgactgcgacgccgctatcgtcgg

SEQ ID NO: 281371 - DNA, 55 bp, Artificial
  Synthetic oligonucleotide
tgaagtaagacattgtcgcagccaaaggcgtcttgatgatgtgtgtgtcggtggg

SEQ ID NO: 281372 - DNA, 55 bp, Artificial
  Synthetic oligonucleotide
tgaacgtcattagaggtgggaggttgacccttgcaacgtccatgatcaaaatctg

SEQ ID NO: 281373 - DNA, 53 bp, Artificial
  Synthetic oligonucleotide
tcttttcgggaggttcctctccgactggtcgtcggactaagctacaccccgac

SEQ ID NO: 281374 - DNA, 55 bp, Artificial
  Synthetic oligonucleotide
tcttttcctaggggctagatggtcatcctttcagtacaagaacgggaaggtctag

SEQ ID NO: 281375 - DNA, 55 bp, Artificial
  Synthetic oligonucleotide
tctttgtccgactgtattcggccgtaagttagagaggtgcttcgtgcgactcgga

SEQ ID NO: 281376 - DNA, 60 bp, Artificial
  Synthetic oligonucleotide
tccgcaatgccctgttgttcactcccaccgtcctacatggtgctcgttcccttgagtcga

SEQ ID NO: 281377 - DNA, 55 bp, Artificial
  Synthetic oligonucleotide
aaggggtcagcatatggcactttcggatcagacggagagcgctctcgaccaacgg

SEQ ID NO: 281378 - DNA, 55 bp, Artificial
  Synthetic oligonucleotide
aaggtattagcatacgatatcatagcatgagcatagtagaggatcaacttacccc

SEQ ID NO: 281379 - DNA, 55 bp, Artificial
  Synthetic oligonucleotide
tcttcggtctactcgcgttaggtggttcgactatcatgttctggattgcccggac

SEQ ID NO: 281380 - DNA, 55 bp, Artificial
  Synthetic oligonucleotide
tcttcgcgaattcaagtgcgtagcatacaccagatagaacccgacacctaccgat

SEQ ID NO: 281381 - DNA, 55 bp, Artificial
  Synthetic oligonucleotide
aagtaccaagtaaggtaaagacaacctgcagtacagccgcggacatgagactggt

SEQ ID NO: 281382 - DNA, 55 bp, Artificial
  Synthetic oligonucleotide
tctgtaaacggggcgaccagggaattatctctctattcactttagctacttccca

SEQ ID NO: 281383 - DNA, 52 bp, Artificial
  Synthetic oligonucleotide
aagttcgggccctaagaactttcgggactagaaagcgataggatactaacgc

SEQ ID NO: 281384 - DNA, 55 bp, Artificial
  Synthetic oligonucleotide
aagttctaggggacatgatttgtctccgacgatctgacagtagccttctatgagg

SEQ ID NO: 281385 - DNA, 55 bp, Artificial
  Synthetic oligonucleotide
tctgagcgcagatctgtcgtgaccagtcacattgatcaagatacatagcagtggc

SEQ ID NO: 281386 - DNA, 55 bp, Artificial
  Synthetic oligonucleotide
aatacaagctagtgttaacgggtctacttctgctcgtttatgcaaatcggaatgc

SEQ ID NO: 281387 - DNA, 57 bp, Artificial
  Synthetic oligonucleotide
gatgtggcgtaacgctctaccaagaaacactgtagggttcctagcaaattcttttgc

SEQ ID NO: 281388 - DNA, 55 bp, Artificial
  Synthetic oligonucleotide
tctgagaaacgaaccgagtccgccatcagtcggcgctacttaccccatccatggg

SEQ ID NO: 281389 - DNA, 55 bp, Artificial
  Synthetic oligonucleotide
aatacgacctaaaggcaggtcccgacacaactagtatgaagcataactccgtgag

SEQ ID NO: 281390 - DNA, 55 bp, Artificial
  Synthetic oligonucleotide
tgcactcaaagccatagtcatcatacatctcggatggtctaacaacgctacagac

SEQ ID NO: 281391 - DNA, 55 bp, Artificial
  Synthetic oligonucleotide
tgcacacgatcaacaaaacgcgatccgtgtaggtcaagtggctgatctatgctta

SEQ ID NO: 281392 - DNA, 55 bp, Artificial
  Synthetic oligonucleotide
tgcaaccgcatacgccccgcttccgatattttgaatccagccacggttgaaagaa

SEQ ID NO: 281393 - DNA, 55 bp, Artificial
  Synthetic oligonucleotide
tgattttcgacgaaggtactcttatcaagttatcctgcaatggtaccactccctc

SEQ ID NO: 281394 - DNA, 55 bp, Artificial
  Synthetic oligonucleotide
tgatgtcttcaatggcataggaaggtatcgaaacgagaatagcgaagagggcccc

SEQ ID NO: 281395 - DNA, 55 bp, Artificial
  Synthetic oligonucleotide
aagccggatttgtctgtagaatatcagctgtaatacaactagttagcagcgagac

SEQ ID NO: 281396 - DNA, 55 bp, Artificial
  Synthetic oligonucleotide
aagccgttaccgagcccgcaagctaatgtcaaaatacaatgcacccattcccgac

SEQ ID NO: 281397 - DNA, 55 bp, Artificial
  Synthetic oligonucleotide
tgatcggcgtaagatgcgttggatcctggggattgggcgtatagattcggtggcc

SEQ ID NO: 281398 - DNA, 60 bp, Artificial
  Synthetic oligonucleotide
gattattcgtatactcatttcagtaaagaccacgataatgaataatgactatttggtgcc

SEQ ID NO: 281399 - DNA, 55 bp, Artificial
  Synthetic oligonucleotide
tgatccgagcattgttaaagtatgttggaatccctagatggtctagacccgttgc

SEQ ID NO: 281400 - DNA, 55 bp, Artificial
  Synthetic oligonucleotide
aagcgcagctgtgtaagtctatacgtgagcgagacgccttgcagtttgaacggac

SEQ ID NO: 281401 - DNA, 55 bp, Artificial
  Synthetic oligonucleotide
tgagcggccaccctaactaagcggccacctacccgctaattcctatctataggcc

SEQ ID NO: 281402 - DNA, 55 bp, Artificial
  Synthetic oligonucleotide
tgagaatgatgacctgtcatcaggccgattcgataggtataagcttactccgcgg

SEQ ID NO: 281403 - DNA, 55 bp, Artificial
  Synthetic oligonucleotide
tgacgttcttcggttgggtgtcttgcgcccggggagtggcgctgagaggtgattc

SEQ ID NO: 281404 - DNA, 55 bp, Artificial
  Synthetic oligonucleotide
tgacctcgctccatttatgtgtctctttcattcgcactgtcccttttgtagaaac

SEQ ID NO: 281405 - DNA, 55 bp, Artificial
  Synthetic oligonucleotide
tgacctcccaagtctcggctcgtggggataacaaggacggggtggagtggccgat

SEQ ID NO: 281406 - DNA, 55 bp, Artificial
  Synthetic oligonucleotide
tgaccgagtcactattctgcctcagaacggcaggattcggcactccagtgacagg

SEQ ID NO: 281407 - DNA, 55 bp, Artificial
  Synthetic oligonucleotide
tgacccgccgatccttcacttcttttctcggtccgcttccagaatttatatcacg

SEQ ID NO: 281408 - DNA, 55 bp, Artificial
  Synthetic oligonucleotide
tgaccatggaattaacttaccacgtccttaccaggggagtcatagcagagacctg

SEQ ID NO: 281409 - DNA, 60 bp, Artificial
  Synthetic oligonucleotide
gattccctgtgcgctagtcagcatactatggattgccacgtagattatccctccaaaacg

SEQ ID NO: 281410 - DNA, 55 bp, Artificial
  Synthetic oligonucleotide
aaggcacctcgcttcgagactgtatcaaacttcgacaaaagtcagcacggactcc

SEQ ID NO: 281411 - DNA, 55 bp, Artificial
  Synthetic oligonucleotide
aaggcactatcctatatagagtaccgaggtagtctgcttgtatatatagactacc

SEQ ID NO: 281412 - DNA, 55 bp, Artificial
  Synthetic oligonucleotide
tgacagttcaaccgtctctatgaccccgccaaatcttgtcgccctagtaatggct

SEQ ID NO: 281413 - DNA, 55 bp, Artificial
  Synthetic oligonucleotide
tgacaccaccccattcgccccagtcttagtcttgaccaccgcatcgacagtgtcc

SEQ ID NO: 281414 - DNA, 55 bp, Artificial
  Synthetic oligonucleotide
ttgctcacgtccgacaacgcgacttattgctcttcgtttcatacccacaggccac

SEQ ID NO: 281415 - DNA, 55 bp, Artificial
  Synthetic oligonucleotide
ttgctagacacaatcacctggcatgctgtccgtgcaacaggcactatcttccggc

SEQ ID NO: 281416 - DNA, 55 bp, Artificial
  Synthetic oligonucleotide
ttgcgtgttccctacgttcgctggaaggtcattgctgtggactgcttgggaccgt

SEQ ID NO: 281417 - DNA, 55 bp, Artificial
  Synthetic oligonucleotide
ttgcgtcagtccatatatcattgtagtcggcacaaaggattggggatctcgtaca

SEQ ID NO: 281418 - DNA, 55 bp, Artificial
  Synthetic oligonucleotide
aaaggcacatacctaatacgggacgacaatgatgcaagcgtgcaagccctgactg

SEQ ID NO: 281419 - DNA, 55 bp, Artificial
  Synthetic oligonucleotide
ttgccttgtgtgctgtcttgacagcaaccttgattgtctactccgtcggattagg

SEQ ID NO: 281420 - DNA, 59 bp, Artificial
  Synthetic oligonucleotide
ggttcaccacactcaacgcacaattttgagaggaagtaggccaggtcgagacttggctc

SEQ ID NO: 281421 - DNA, 55 bp, Artificial
  Synthetic oligonucleotide
aaagggataggaatctgcaaatcgagataaccaccttgccacctagaacttacac

SEQ ID NO: 281422 - DNA, 55 bp, Artificial
  Synthetic oligonucleotide
aaaggtcccagggcgattgctcctccatccattagccagacccctcgcaagggcc

SEQ ID NO: 281423 - DNA, 55 bp, Artificial
  Synthetic oligonucleotide
ttgagggaaatgcgccttctacagcaggtttctggagggagattcgactatcagg

SEQ ID NO: 281424 - DNA, 55 bp, Artificial
  Synthetic oligonucleotide
ttgaccataaactctaaaggatgcactgattttgtgaggcacggatcggagtaga

SEQ ID NO: 281425 - DNA, 55 bp, Artificial
  Synthetic oligonucleotide
ttgacacaatctggaaggagtctgtagctcgctcaactgagataatcgattgtct

SEQ ID NO: 281426 - DNA, 54 bp, Artificial
  Synthetic oligonucleotide
ttgaacccgaagcgactagctcgggacagggaggacttcgccggagggacttgg

SEQ ID NO: 281427 - DNA, 55 bp, Artificial
  Synthetic oligonucleotide
ttcttgttgctaatgatggtcgacaggacgtatgtaaattgctcagctacccagc

SEQ ID NO: 281428 - DNA, 55 bp, Artificial
  Synthetic oligonucleotide
ttcttgcccttccgtcctctggggcgcaagatacgtgcctccactgggcgttggt

SEQ ID NO: 281429 - DNA, 55 bp, Artificial
  Synthetic oligonucleotide
aaatcaggacttcggtcctcacactccgatgtgtcatggtgtccctctcttgcct

SEQ ID NO: 281430 - DNA, 55 bp, Artificial
  Synthetic oligonucleotide
aaatccggttctgacacactactgcgtcgaattataagctccagggcattcaaag

SEQ ID NO: 281431 - DNA, 60 bp, Artificial
  Synthetic oligonucleotide
ctacattgctttaagatagaacgcttatttgggcacgacgctcgtgtgtggaatacatta

SEQ ID NO: 281432 - DNA, 55 bp, Artificial
  Synthetic oligonucleotide
ttcgcggtctgcttgttcgcaatgttcaagggcttcacaggctggaccggagcag

SEQ ID NO: 281433 - DNA, 54 bp, Artificial
  Synthetic oligonucleotide
ttcgccggcctaggaaaacgccattttcaagtcggtgttccagcaatcctaggg

SEQ ID NO: 281434 - DNA, 55 bp, Artificial
  Synthetic oligonucleotide
aaattgagtgcctttcgattggcattgaggcagcacatgtcgaacaatacccagc

SEQ ID NO: 281435 - DNA, 55 bp, Artificial
  Synthetic oligonucleotide
ttcgccaatgggacttacgtcaaccatcgtccgcctacccaaagccacgaggcgg

SEQ ID NO: 281436 - DNA, 55 bp, Artificial
  Synthetic oligonucleotide
ttttgcggtctggacttataccccggccgtcaagaatgatttcgataggatagtg

SEQ ID NO: 281437 - DNA, 55 bp, Artificial
  Synthetic oligonucleotide
tttggaggcacgactgtccaggttagaattcggctccttgcatcggtccccgcgg

SEQ ID NO: 281438 - DNA, 55 bp, Artificial
  Synthetic oligonucleotide
aaaatggtcgccagaatgtttccgatcacaatggcgacgatagcctgccaccaag

SEQ ID NO: 281439 - DNA, 55 bp, Artificial
  Synthetic oligonucleotide
aaaatggtgggatagcatccgatacctagatcagacccatgcagtaacacgctgg

SEQ ID NO: 281440 - DNA, 55 bp, Artificial
  Synthetic oligonucleotide
tttatggactggtcggacaacttaattattagtagttaatgagaacttgagttgc

SEQ ID NO: 281441 - DNA, 55 bp, Artificial
  Synthetic oligonucleotide
tttatccgagacatcgtgagcatattcctaaccccatccaaaagttttcccatgc

SEQ ID NO: 281442 - DNA, 60 bp, Artificial
  Synthetic oligonucleotide
tccggagcttcgtcgatcaagcatatcctcgagatcagcgtctgtcggccatttaaggcg

SEQ ID NO: 281443 - DNA, 53 bp, Artificial
  Synthetic oligonucleotide
aaacccattacgataaccttctacgaggtcaccatacccgggcgtgataatac

SEQ ID NO: 281444 - DNA, 55 bp, Artificial
  Synthetic oligonucleotide
tttagaagccaaacaccgactaccaagctaatattatcatctaggtctccggctc

SEQ ID NO: 281445 - DNA, 55 bp, Artificial
  Synthetic oligonucleotide
tttactctggcggcgttgttgcctgaacgcgtatagccagtggatccatagcaag

SEQ ID NO: 281446 - DNA, 55 bp, Artificial
  Synthetic oligonucleotide
tttacgccacgcgggctacaaatggaagcgtcctgtcttctgcttcggggccgtt

SEQ ID NO: 281447 - DNA, 55 bp, Artificial
  Synthetic oligonucleotide
ttgtgtgagcgcaagtgttcctgtaagcgtgctggacggttgaaggccttcgtgc

SEQ ID NO: 281448 - DNA, 55 bp, Artificial
  Synthetic oligonucleotide
ttggtctgagttcgggcaagtccaacccctattagaaccaaaccactgcagtttc

SEQ ID NO: 281449 - DNA, 55 bp, Artificial
  Synthetic oligonucleotide
ttggtaggcgggctgaggggattgcaggttctggccataatgcggctggccgtag

SEQ ID NO: 281450 - DNA, 55 bp, Artificial
  Synthetic oligonucleotide
aaactgcttcgcatcatcggctccgtttcagggcgagtaaatgttggccccgaaa

SEQ ID NO: 281451 - DNA, 55 bp, Artificial
  Synthetic oligonucleotide
aaactggacacggaggacagtgagtgacaatcccaagttgaacctgtgaaaaccc

SEQ ID NO: 281452 - DNA, 55 bp, Artificial
  Synthetic oligonucleotide
aaactgtggtctgcaggtacgaggataatggccggtctggaaagactagcgccgc

SEQ ID NO: 281453 - DNA, 58 bp, Artificial
  Synthetic oligonucleotide
gattgactatcgttagttgcgggacaagaatagccagggcccttccgtgtcaatttca

SEQ ID NO: 281454 - DNA, 55 bp, Artificial
  Synthetic oligonucleotide
aaagacccgacgaatggtggcatgggtttcatcaggaaagtaagactcggtgtgg

SEQ ID NO: 281455 - DNA, 55 bp, Artificial
  Synthetic oligonucleotide
ttggcacacaggggtcccagctcgcagaatccccggtcgtagtgttcacaagggg

SEQ ID NO: 281456 - DNA, 54 bp, Artificial
  Synthetic oligonucleotide
ttggaggggatcggattaagtccggaacggagagggaccctcgttcttcaatca

SEQ ID NO: 281457 - DNA, 55 bp, Artificial
  Synthetic oligonucleotide
ttggacggaagggagcgaatgtagtcggccggacctaaaaggtgctgaattccag

SEQ ID NO: 281458 - DNA, 55 bp, Artificial
  Synthetic oligonucleotide
ttgctcgtggaacttgggctcccagcggagagcatacccggcgacagagacgagt

SEQ ID NO: 281459 - DNA, 55 bp, Artificial
  Synthetic oligonucleotide
aaagccctcgcgccgtattgtcgttcgcggggaggctgctgaatgaaggggcaca

SEQ ID NO: 281460 - DNA, 55 bp, Artificial
  Synthetic oligonucleotide
ttaagccatcgccgtggactctagcttaggctacttgcctttcctagacccagtg

SEQ ID NO: 281461 - DNA, 55 bp, Artificial
  Synthetic oligonucleotide
aacccagcagtgagcaagaacaagcggtcgattagtccgtcaacccgttacaccg

SEQ ID NO: 281462 - DNA, 55 bp, Artificial
  Synthetic oligonucleotide
tgttcgggttctggtggtcagtctggaagatgtctacaatcggtctcagcatagg

SEQ ID NO: 281463 - DNA, 55 bp, Artificial
  Synthetic oligonucleotide
tgttatgatctgggctagctgggaacctccagcaactacgagtacagagcccaca

SEQ ID NO: 281464 - DNA, 60 bp, Artificial
  Synthetic oligonucleotide
accaccttccatgaactccatgacaacccacaactcgttgctctgctcctgcaggaaaga

SEQ ID NO: 281465 - DNA, 55 bp, Artificial
  Synthetic oligonucleotide
tgttactggggttagtataatgtaggcacctaatcctaggcacgaagacgacccc

SEQ ID NO: 281466 - DNA, 55 bp, Artificial
  Synthetic oligonucleotide
tgttaaaggctctagtatactctactaacaagcgcaacatgcaatctcctagcag

SEQ ID NO: 281467 - DNA, 55 bp, Artificial
  Synthetic oligonucleotide
tgtgtctccaacattgccttgtaaaaggctgccacatcgagtgggatgctatgga

SEQ ID NO: 281468 - DNA, 55 bp, Artificial
  Synthetic oligonucleotide
tgtgtagcccactaatcggtactagaaatcggctagtttcccgatcccgccgaac

SEQ ID NO: 281469 - DNA, 55 bp, Artificial
  Synthetic oligonucleotide
tgtgggctgttagggccggttgagtgtacttccgtgttgcaatgttcgggtgggt

SEQ ID NO: 281470 - DNA, 55 bp, Artificial
  Synthetic oligonucleotide
tgtgcagcgaactaactacagcttagactcaatcttgcacggagcggagttccat

SEQ ID NO: 281471 - DNA, 55 bp, Artificial
  Synthetic oligonucleotide
tgtgcaatgaggatatcacaagtagaaatcgagttgcaatgcaggtcgttagggg

SEQ ID NO: 281472 - DNA, 55 bp, Artificial
  Synthetic oligonucleotide
tgtgagacctcgcagtcgcccatattagatgacggttctcagctagacagccacg

SEQ ID NO: 281473 - DNA, 55 bp, Artificial
  Synthetic oligonucleotide
tgtctcctccgctgatgtcgcagtagactatctgatcgcgagaacgagtcgccac

SEQ ID NO: 281474 - DNA, 55 bp, Artificial
  Synthetic oligonucleotide
tgtcgcttgtatcgccagtggggtgggcttcgctccaccactacttgtttggtct

SEQ ID NO: 281475 - DNA, 60 bp, Artificial
  Synthetic oligonucleotide
tatagtgcgagagtcacgttctggactacgattgcaccaaagaatgtgtgtaggctaagt

SEQ ID NO: 281476 - DNA, 60 bp, Artificial
  Synthetic oligonucleotide
tccccttgcaccgcgtctgccgcttgtagtatttctatatcgccactataggacggggca

SEQ ID NO: 281477 - DNA, 55 bp, Artificial
  Synthetic oligonucleotide
tgtccggaggagtctgtcgcttagcgatccgaattccaactgttcgagtccgcat

SEQ ID NO: 281478 - DNA, 55 bp, Artificial
  Synthetic oligonucleotide
aaccgagtccgccatcagtcggcgctacttaccccatccatgggagaagatgcgt

SEQ ID NO: 281479 - DNA, 55 bp, Artificial
  Synthetic oligonucleotide
tgtcatgcataaagggatgaatggcgtgttttctgcagacacaacatttacactg

SEQ ID NO: 281480 - DNA, 55 bp, Artificial
  Synthetic oligonucleotide
tgtcagcaaccgatacatcccatcactaggccgcacgttccattatctcatcgga

SEQ ID NO: 281481 - DNA, 55 bp, Artificial
  Synthetic oligonucleotide
tgtattgccaggagcgtccaatagatcctagtaagtagtgatgggtccagccggg

SEQ ID NO: 281482 - DNA, 55 bp, Artificial
  Synthetic oligonucleotide
tgtataggcgaagatttatattcgtgccgacacctacccaaccacagagtgatcg

SEQ ID NO: 281483 - DNA, 55 bp, Artificial
  Synthetic oligonucleotide
tgtaccggcccatggttgtcgttacagtacgagagagtggcattcggcgagctgt

SEQ ID NO: 281484 - DNA, 55 bp, Artificial
  Synthetic oligonucleotide
tgtacagatgatcgaatgtgagtcaggcggtacgtccaatactaaaggggaggag

SEQ ID NO: 281485 - DNA, 55 bp, Artificial
  Synthetic oligonucleotide
ttcgatacttgtagggcacggagctattgcgccattacgaaggaagcgggttgaa

SEQ ID NO: 281486 - DNA, 55 bp, Artificial
  Synthetic oligonucleotide
ttcgacgcgcgattcatatatcgtcggtcacacttcggtgatgcaattgtccaga

SEQ ID NO: 281487 - DNA, 60 bp, Artificial
  Synthetic oligonucleotide
ccttgcctgatgccacgcaagagggtctcccgtgtgcgcgcctattctaccgccaggaga

SEQ ID NO: 281488 - DNA, 55 bp, Artificial
  Synthetic oligonucleotide
ttcgaagcctgcccagggaccacaccccgtttcacagctgaccgcaagcctagtc

SEQ ID NO: 281489 - DNA, 55 bp, Artificial
  Synthetic oligonucleotide
ttcgaagagtacttcgaagctcgcccacttacgcctaaggagctccgcgatcccc

SEQ ID NO: 281490 - DNA, 54 bp, Artificial
  Synthetic oligonucleotide
ttccctctataattcgtcacggaccgcttctgggacgtccttataactttctag

SEQ ID NO: 281491 - DNA, 55 bp, Artificial
  Synthetic oligonucleotide
ttcccgcagcaaataaattactcgcccactccatctcagctcttcatgtgaacgc

SEQ ID NO: 281492 - DNA, 55 bp, Artificial
  Synthetic oligonucleotide
ttccccacaatccgacgcgtatggtccagcaaccagtaaatcctcagtacctcac

SEQ ID NO: 281493 - DNA, 55 bp, Artificial
  Synthetic oligonucleotide
ttccaattccccgttggtggtgtttgcgtcatattcatcccattatgcggctaca

SEQ ID NO: 281494 - DNA, 55 bp, Artificial
  Synthetic oligonucleotide
ttcatttgccaatgatcaggtagaattccctcggttcagctggtttgggtccacc

SEQ ID NO: 281495 - DNA, 55 bp, Artificial
  Synthetic oligonucleotide
ttcatgtcttggctaccacagtatgtcacacccactctttcagccaatccctgag

SEQ ID NO: 281496 - DNA, 55 bp, Artificial
  Synthetic oligonucleotide
ttcagtttgatcagtaggggatgaccttatgcgcactatggacccgttttctcgg

SEQ ID NO: 281497 - DNA, 55 bp, Artificial
  Synthetic oligonucleotide
ttcaaagcgtccgtcgcactgtacggcttttgcggtctgacatatcgttttcccc

SEQ ID NO: 281498 - DNA, 59 bp, Artificial
  Synthetic oligonucleotide
tccccttgctaatgtccgtcccaaaaaagactgattgataaggcacgataagacagcga

SEQ ID NO: 281499 - DNA, 55 bp, Artificial
  Synthetic oligonucleotide
ttatttagttaccatatggctgactccgcatcttgtcctaggctgcaagcgtcac

SEQ ID NO: 281500 - DNA, 55 bp, Artificial
  Synthetic oligonucleotide
ttatgtgagttggctctagtatccttgcgaaatttgagcccatttaggcgatctt

SEQ ID NO: 281501 - DNA, 55 bp, Artificial
  Synthetic oligonucleotide
ttatcgtcgagagcggtgttgagtgataggaagaatctgcttggaacggataatg

SEQ ID NO: 281502 - DNA, 55 bp, Artificial
  Synthetic oligonucleotide
ttatccttagacagctctaattgcttaagagcgcttagcgatataaccacacccc

SEQ ID NO: 281503 - DNA, 55 bp, Artificial
  Synthetic oligonucleotide
ttagtgtgacctggtactttgcctatgcacggaagcatttcacgggcccaccaat

SEQ ID NO: 281504 - DNA, 55 bp, Artificial
  Synthetic oligonucleotide
ttagtgctggattagggccgacacaggggccgaaaagtggaccggatgtcctgtt

SEQ ID NO: 281505 - DNA, 55 bp, Artificial
  Synthetic oligonucleotide
ttagccgccccggaggctcacattcctgctagccgtccgcaatccacccgcctac

SEQ ID NO: 281506 - DNA, 55 bp, Artificial
  Synthetic oligonucleotide
ttactatacgatccaatcccgcaagatagaatcgagtcccatgctgtttcccacg

SEQ ID NO: 281507 - DNA, 55 bp, Artificial
  Synthetic oligonucleotide
ttacgccgggctatcacccgctctctgctcatcgtccctctccttatggcaaccg

SEQ ID NO: 281508 - DNA, 55 bp, Artificial
  Synthetic oligonucleotide
ttaaggtgttggccagaaaaagggtacctagaatatggagtgagcgcgctggtac

SEQ ID NO: 281509 - DNA, 58 bp, Artificial
  Synthetic oligonucleotide
accaatggcattcaaactcgattcgacaggacggccagtataccagtcccgtaatgac

SEQ ID NO: 281510 - DNA, 55 bp, Artificial
  Synthetic oligonucleotide
acctactgctcgcgtccggtttcaactctgtatcaggaagaggtagcagaccgga

SEQ ID NO: 281511 - DNA, 55 bp, Artificial
  Synthetic oligonucleotide
tatgatcctgaataagccagaactgtcagcttgtgttgacaaggcgaaagtggaa

SEQ ID NO: 281512 - DNA, 55 bp, Artificial
  Synthetic oligonucleotide
tatctattgacgagctcattgcacactgctcgcatcttgcgcatatttggcacgc

SEQ ID NO: 281513 - DNA, 55 bp, Artificial
  Synthetic oligonucleotide
acctatctgacttcgtgaccccttgaggaagtaccaggtagattacagtaccaag

SEQ ID NO: 281514 - DNA, 55 bp, Artificial
  Synthetic oligonucleotide
acctatgaggggtagtgagttgtatgatatctagaccgagtgaacattgcagcgc

SEQ ID NO: 281515 - DNA, 55 bp, Artificial
  Synthetic oligonucleotide
tatctacgtctttctcaaaatcctcccagctcgctgcatcggtaccgttggggcg

SEQ ID NO: 281516 - DNA, 55 bp, Artificial
  Synthetic oligonucleotide
tatcgagcttgtgattagccgaactaattttccgcatagaactgccaagaagatc

SEQ ID NO: 281517 - DNA, 55 bp, Artificial
  Synthetic oligonucleotide
tatatttgggtgggaagcgcctataccctggcctacgcagccattacgccggtat

SEQ ID NO: 281518 - DNA, 55 bp, Artificial
  Synthetic oligonucleotide
tatatgaaggttatcgggaaacgaccagatgggctaatacgttcggattgaattc

SEQ ID NO: 281519 - DNA, 55 bp, Artificial
  Synthetic oligonucleotide
acctcggtagtgcatccctcgctctccagactaacggtcgagctagaattaaggg

SEQ ID NO: 281520 - DNA, 54 bp, Artificial
  Synthetic oligonucleotide
accaacccggcccttctcgtttgccatttggccgttttgttcagctgcctattc

SEQ ID NO: 281521 - DNA, 55 bp, Artificial
  Synthetic oligonucleotide
acctctgagcaatgcgaaccaggagcctcgtcgcatgccctctggtgcccgatct

SEQ ID NO: 281522 - DNA, 55 bp, Artificial
  Synthetic oligonucleotide
acctgagcatctgcttgttcgtccaattgaagacagtccacgggagcctcccact

SEQ ID NO: 281523 - DNA, 55 bp, Artificial
  Synthetic oligonucleotide
acctgcaaccgacagttgtcggggagggagcgcttctctttgatgtggatagggg

SEQ ID NO: 281524 - DNA, 55 bp, Artificial
  Synthetic oligonucleotide
tatactccaataggtccagaggaggcagaggcgccccgcgccactgtgcgcttga

SEQ ID NO: 281525 - DNA, 55 bp, Artificial
  Synthetic oligonucleotide
acctgtccgtctgaagctgtcatgagtttaacagggtggtcgacagggcaagacg

SEQ ID NO: 281526 - DNA, 55 bp, Artificial
  Synthetic oligonucleotide
accttaagagtcgcgctccaagttaactgcgtgaaatcgtttaggcctctgtggt

SEQ ID NO: 281527 - DNA, 55 bp, Artificial
  Synthetic oligonucleotide
tataattccggagggagtcgaaactctatacagcgcaaactcgcttagcaaccgg

SEQ ID NO: 281528 - DNA, 55 bp, Artificial
  Synthetic oligonucleotide
accttcatacgatcctgaaagggctctatcggggacttcaagactaatggtctac

SEQ ID NO: 281529 - DNA, 55 bp, Artificial
  Synthetic oligonucleotide
accttgtacgatcaactggctacttagttattgtacgccgtgctaccgcagctgg

SEQ ID NO: 281530 - DNA, 55 bp, Artificial
  Synthetic oligonucleotide
acgaacaggactcgtcagtgaactaccggcaagaaacggcatcgcgtagggcact

SEQ ID NO: 281531 - DNA, 60 bp, Artificial
  Synthetic oligonucleotide
tcccgcagacgagaaacggcagcgcaagaagctccaaaaccgagtaaatcagagagcacg

SEQ ID NO: 281532 - DNA, 55 bp, Artificial
  Synthetic oligonucleotide
tataatgatccacccttcgtctgtgagatctctagtaactcttcgactgtccggc

SEQ ID NO: 281533 - DNA, 55 bp, Artificial
  Synthetic oligonucleotide
tcagccacgcttgcagtcgagtgccaatgtaagaagggagtgatgtttcgggtgg

SEQ ID NO: 281534 - DNA, 55 bp, Artificial
  Synthetic oligonucleotide
tcagactaaatgcaactctatccttacttaggcaacacatggttatcctgctccc

SEQ ID NO: 281535 - DNA, 55 bp, Artificial
  Synthetic oligonucleotide
tcactgcgttattccagtatttatagtgtccgaaggtgatggatatccgggcggc

SEQ ID NO: 281536 - DNA, 55 bp, Artificial
  Synthetic oligonucleotide
tcacggggaagggacgattccgcacgcgcaccgaggatgaatactcgaactgggg

SEQ ID NO: 281537 - DNA, 55 bp, Artificial
  Synthetic oligonucleotide
tcaccttatgggtaagctgacgctggtactaaccaaggcaaaagagtcctggtac

SEQ ID NO: 281538 - DNA, 55 bp, Artificial
  Synthetic oligonucleotide
accgccggcccgtagtatagaatgccattatgacccgtccagatactaaacagcg

SEQ ID NO: 281539 - DNA, 55 bp, Artificial
  Synthetic oligonucleotide
tcaccctcgaggtgctcactgtgcgtcgggtcgggactgttcgggaaggttaggg

SEQ ID NO: 281540 - DNA, 55 bp, Artificial
  Synthetic oligonucleotide
tcaagtttccgtggccatcggcttctcttttcttgcgcttcacaaccacacaaac

SEQ ID NO: 281541 - DNA, 55 bp, Artificial
  Synthetic oligonucleotide
tcaaggagtagacatccgtatctaccgccgccaatttgaggacaggtatagtctc

SEQ ID NO: 281542 - DNA, 57 bp, Artificial
  Synthetic oligonucleotide
tcccgcccgattgtctcttcaatttgcctcagtggtcctgttggccttggtaccgtc

SEQ ID NO: 281543 - DNA, 55 bp, Artificial
  Synthetic oligonucleotide
tcaacttgtatgcttcttcgaatgacttgacgtgcatcatctccatagcgacgac

SEQ ID NO: 281544 - DNA, 55 bp, Artificial
  Synthetic oligonucleotide
tcaaccgcatacttactcgcacagtacggtcccaatcccggcactcccagggccc

SEQ ID NO: 281545 - DNA, 55 bp, Artificial
  Synthetic oligonucleotide
tattgatcctccgtgggcgcgcgacaggaggggtgccatcgcacaggatacgagt

SEQ ID NO: 281546 - DNA, 55 bp, Artificial
  Synthetic oligonucleotide
tattcgcgaaggccaagagtttgaccatcattctccgaacccagttgaagcgccg

SEQ ID NO: 281547 - DNA, 54 bp, Artificial
  Synthetic oligonucleotide
accggtatacgttgtccaatttgaccatgttcgaccgaaagtcgtcgagtagcg

SEQ ID NO: 281548 - DNA, 55 bp, Artificial
  Synthetic oligonucleotide
accggtctaggctcaaccacctcgctttcgttactactagtcctctggataccgc

SEQ ID NO: 281549 - DNA, 55 bp, Artificial
  Synthetic oligonucleotide
accgtaactgatcaatttgagtgcgctataactggcatttcccggggagtcggag

SEQ ID NO: 281550 - DNA, 55 bp, Artificial
  Synthetic oligonucleotide
tattactactctataagctcgctatgcagtctactgaacgccgatgcaaaccctc

SEQ ID NO: 281551 - DNA, 55 bp, Artificial
  Synthetic oligonucleotide
tatgttctgtaatgtcacatccgagagtcccagtgccgctatcccgtattagacc

SEQ ID NO: 281552 - DNA, 55 bp, Artificial
  Synthetic oligonucleotide
tatgtacagaaataacgcaagatctcaatgcccgttcttgaatcgggtttaatgc

SEQ ID NO: 281553 - DNA, 56 bp, Artificial
  Synthetic oligonucleotide
gatctagttcttgctaattaaataggcgttatactacgcgtagtaaggaaatatta

SEQ ID NO: 281554 - DNA, 54 bp, Artificial
  Synthetic oligonucleotide
accgtggggagccgcgatagggcctcgtaccggatatccgtcccagacccaaga

SEQ ID NO: 281555 - DNA, 55 bp, Artificial
  Synthetic oligonucleotide
tatgctgtgccttaaccggctcacatctcgacgaatcgacatggttttcttaacg

SEQ ID NO: 281556 - DNA, 55 bp, Artificial
  Synthetic oligonucleotide
acgctggttccacgtagccaggaacttatcctctttgcaacgtacatatccttcc

SEQ ID NO: 281557 - DNA, 55 bp, Artificial
  Synthetic oligonucleotide
tagcctggggctttcattttctacacgctatttctggtgtctagagccgagggat

SEQ ID NO: 281558 - DNA, 55 bp, Artificial
  Synthetic oligonucleotide
acggaagtcctgctgggatacgagattaacgtgcctcgatgatgattaccactcg

SEQ ID NO: 281559 - DNA, 55 bp, Artificial
  Synthetic oligonucleotide
acggacagagcagtcactcgatatcagagagtatgtccattcgaaagacacggat

SEQ ID NO: 281560 - DNA, 55 bp, Artificial
  Synthetic oligonucleotide
tagcctctctgtaatagctagctatctgataaagtgcttacgcttctaactcttc

SEQ ID NO: 281561 - DNA, 55 bp, Artificial
  Synthetic oligonucleotide
tagcctattattcaacggagccatccattcactaacgtatttccctaccgagtcg

SEQ ID NO: 281562 - DNA, 54 bp, Artificial
  Synthetic oligonucleotide
acgggacctaggcggtgtactaatcatttcacaggaaaaccctaacagagcaag

SEQ ID NO: 281563 - DNA, 55 bp, Artificial
  Synthetic oligonucleotide
tagagttcgatccagctcttggggtgatattgtatgagcagctgggtgatgtgac

SEQ ID NO: 281564 - DNA, 60 bp, Artificial
  Synthetic oligonucleotide
acatgtgattgctctcaacgcgtcgcgtccaggcatcttcgacggtggtcggggtttatc

SEQ ID NO: 281565 - DNA, 55 bp, Artificial
  Synthetic oligonucleotide
tagacttcacggaagtacccatctatcggtaactaagattagcgtctgacgaagg

SEQ ID NO: 281566 - DNA, 55 bp, Artificial
  Synthetic oligonucleotide
acgtactcccgcactagattaccggtcggaggtactgtgtagcttgaccccagga

SEQ ID NO: 281567 - DNA, 55 bp, Artificial
  Synthetic oligonucleotide
tagaatcattcgagaaccgtagggaggcgcacaagacaaagggtaaggcggagcg

SEQ ID NO: 281568 - DNA, 55 bp, Artificial
  Synthetic oligonucleotide
acgtcatgtgttagttctgcgaatgctagcactatacctgattcggactagtgcc

SEQ ID NO: 281569 - DNA, 55 bp, Artificial
  Synthetic oligonucleotide
tacttgcggcgtattcagcaatcctccgtggggcctctcgtgtgtactctgttga

SEQ ID NO: 281570 - DNA, 55 bp, Artificial
  Synthetic oligonucleotide
tacttatgattttggttaatatggaatccgttttcatgtggtgacgtagacccgg

SEQ ID NO: 281571 - DNA, 55 bp, Artificial
  Synthetic oligonucleotide
acgtcttatgacgtattccggaaagctctgaccgaatggcggactctggtctact

SEQ ID NO: 281572 - DNA, 55 bp, Artificial
  Synthetic oligonucleotide
tactcggtccagtgatcaagtcagcgatggctgtatacctcaggcctccactgtt

SEQ ID NO: 281573 - DNA, 55 bp, Artificial
  Synthetic oligonucleotide
tactcgagaggccctcccacagaccacatccccgcgaatcggatccccatcatgc

SEQ ID NO: 281574 - DNA, 55 bp, Artificial
  Synthetic oligonucleotide
acgtgcatgtctgcgggaccaaaccctctaatctcgaggggttgttatctgctcc

SEQ ID NO: 281575 - DNA, 60 bp, Artificial
  Synthetic oligonucleotide
tcccgccgtatgatttccttccatactactgcccagcgtctagctgactgagccaggggc

SEQ ID NO: 281576 - DNA, 53 bp, Artificial
  Synthetic oligonucleotide
actacggtccctgttcctaactttacagtgccttccgaacagttcgtctgtcc

SEQ ID NO: 281577 - DNA, 55 bp, Artificial
  Synthetic oligonucleotide
actaggttaatgatagatagaagacaaacggcagaggcttggttcatgaaccgtg

SEQ ID NO: 281578 - DNA, 55 bp, Artificial
  Synthetic oligonucleotide
actagtagctttcttccctgctctatcgctcctctctggctggtccaacgctcca

SEQ ID NO: 281579 - DNA, 53 bp, Artificial
  Synthetic oligonucleotide
actatacaccggattgcaaaaccggggaggattggaaaatatgtacactaacc

SEQ ID NO: 281580 - DNA, 49 bp, Artificial
  Synthetic oligonucleotide
tagtttaccccgggcgattcccgtaccataccgtaagggtaacgattgg

SEQ ID NO: 281581 - DNA, 55 bp, Artificial
  Synthetic oligonucleotide
acgactgagtaggcaactgtcactgctaaggtactcctacccctgcaccgaccgg

SEQ ID NO: 281582 - DNA, 55 bp, Artificial
  Synthetic oligonucleotide
tagttgcaatgcgccgctatctcaggtcgtactgaacctctcctcggacacaatg

SEQ ID NO: 281583 - DNA, 55 bp, Artificial
  Synthetic oligonucleotide
tagttctgggtacccatactaccctgtaccttcctatttaggcaataatctacag

SEQ ID NO: 281584 - DNA, 55 bp, Artificial
  Synthetic oligonucleotide
acgaggcgcacgctagacccgaatggggcaactcggtcgtcattgtccgagagtc

SEQ ID NO: 281585 - DNA, 55 bp, Artificial
  Synthetic oligonucleotide
acgaggtgtgttttgatgttccggtcgctagaatgttggttatgatgcggagtcg

SEQ ID NO: 281586 - DNA, 54 bp, Artificial
  Synthetic oligonucleotide
gagattctaataatagaagacctaatagaaatagagaaccttttaaccctaata

SEQ ID NO: 281587 - DNA, 57 bp, Artificial
  Synthetic oligonucleotide
agtggagccagcgaaactagggtgaaaggagtcaacggcagtgacaagattattcgg

SEQ ID NO: 281588 - DNA, 55 bp, Artificial
  Synthetic oligonucleotide
tagtctctcaatcagcagacggcgccggataaagtaggatccgaccgctttcccc

SEQ ID NO: 281589 - DNA, 55 bp, Artificial
  Synthetic oligonucleotide
tagtacggatcaacaggcaacgagactcgcataacaaagacctcattatctattt

SEQ ID NO: 281590 - DNA, 55 bp, Artificial
  Synthetic oligonucleotide
tagtaataacgagattcttcgctggaggatgcgtctccattcttgccaatacctc

SEQ ID NO: 281591 - DNA, 55 bp, Artificial
  Synthetic oligonucleotide
taggtttgctgcagagagccccgtttgctaaccacatctgcggctgaatagggcc

SEQ ID NO: 281592 - DNA, 53 bp, Artificial
  Synthetic oligonucleotide
taggtgagtggtgggtgtgaattgggttctttaatcccgcggttacttacgag

SEQ ID NO: 281593 - DNA, 55 bp, Artificial
  Synthetic oligonucleotide
taggtcttacaggttagtgtccggtggttggtcgcttcatttgggttggagattg

SEQ ID NO: 281594 - DNA, 55 bp, Artificial
  Synthetic oligonucleotide
taggtagagggttactcacaccgacacaagccaccacttattacagtccttagtg

SEQ ID NO: 281595 - DNA, 55 bp, Artificial
  Synthetic oligonucleotide
acgcattacgctaggacgaccgtgtttatgtcgtcgggacgcacgacagacggcg

SEQ ID NO: 281596 - DNA, 55 bp, Artificial
  Synthetic oligonucleotide
tagggcagacagccgcatgttatgcaggttcagtgtgcacgatggagagtcgaga

SEQ ID NO: 281597 - DNA, 55 bp, Artificial
  Synthetic oligonucleotide
acgccccttgtggtacagcgacattgcatgctacctacaggtcgcccgcgcacag

SEQ ID NO: 281598 - DNA, 60 bp, Artificial
  Synthetic oligonucleotide
tcccgctattcattctgccaggtggctgttttgcacgcatcacgcgataagcccccgagc

SEQ ID NO: 281599 - DNA, 55 bp, Artificial
  Synthetic oligonucleotide
taggccccggtactattgaggcaccgtcgcacatcgaatctgctgctagagcaga

SEQ ID NO: 281600 - DNA, 55 bp, Artificial
  Synthetic oligonucleotide
tagctcccctgacaacgaaacttccctagtgtcacatagccgaggggaatctggg

SEQ ID NO: 281601 - DNA, 55 bp, Artificial
  Synthetic oligonucleotide
tagcgttagacttcaaggtacgatattttctcagtaacgatcgtgaactagcgac

SEQ ID NO: 281602 - DNA, 55 bp, Artificial
  Synthetic oligonucleotide
acgctagatgtccctgaggtaattggtcctggacgaccgatccctattcaacccc

SEQ ID NO: 281603 - DNA, 55 bp, Artificial
  Synthetic oligonucleotide
aatgggccgcttagccctcgcagaggccgcccatgcagcaggcaaaagagtcgtt

SEQ ID NO: 281604 - DNA, 55 bp, Artificial
  Synthetic oligonucleotide
tcgggcccatcgtgtgccccagccacattctcatcgagcgtcaagcacacgggat

SEQ ID NO: 281605 - DNA, 55 bp, Artificial
  Synthetic oligonucleotide
tcgggaagatgcatagccagctgttcagtatcctgtctgcgcttgctacgcgcca

SEQ ID NO: 281606 - DNA, 55 bp, Artificial
  Synthetic oligonucleotide
aattgacaagacgggcaaacgtagggacggagagccgtccgagagagaggacgca

SEQ ID NO: 281607 - DNA, 55 bp, Artificial
  Synthetic oligonucleotide
tcggccattgcgggtatgacggcacatgttattcgacaaggccagagcctaggga

SEQ ID NO: 281608 - DNA, 55 bp, Artificial
  Synthetic oligonucleotide
aatttactccccatcacttccgtgtgatcctggcccgcgagaccagtcttgccgg

SEQ ID NO: 281609 - DNA, 60 bp, Artificial
  Synthetic oligonucleotide
gatcttgacacctcatccctcactttggtctacgtaccctaatactatcaagattcatcc

SEQ ID NO: 281610 - DNA, 55 bp, Artificial
  Synthetic oligonucleotide
tcggaggcgtgggccactcagaaattgagaccgcatatacgagggatgagcgggg

SEQ ID NO: 281611 - DNA, 55 bp, Artificial
  Synthetic oligonucleotide
tcgcgtgcgcggagaaggcaactaccgcaacccaccgggcaatgccgtggatttg

SEQ ID NO: 281612 - DNA, 55 bp, Artificial
  Synthetic oligonucleotide
tcgcggtctgaatgtgtataagcgctgcaagtgatcggcaaagtgacaagaagtc

SEQ ID NO: 281613 - DNA, 55 bp, Artificial
  Synthetic oligonucleotide
acaaggtcggtgccagtgctcatgttgcgtagtaccatccacattccggggcccc

SEQ ID NO: 281614 - DNA, 55 bp, Artificial
  Synthetic oligonucleotide
acaatgcatctattgcgacatataattgggtcgctgtcggcttgcattccgggaa

SEQ ID NO: 281615 - DNA, 55 bp, Artificial
  Synthetic oligonucleotide
acacaaggctgctgcctactggcgtctacctctagaccaaacctacaagtaggcc

SEQ ID NO: 281616 - DNA, 55 bp, Artificial
  Synthetic oligonucleotide
tcgcatggagcacgagggtggtggctctcccaccgataagcgtctcccgcctaat

SEQ ID NO: 281617 - DNA, 55 bp, Artificial
  Synthetic oligonucleotide
acaccgcgtaaaggtgcaagtcttgtccaggtgttgcacacaggacccgtgcaac

SEQ ID NO: 281618 - DNA, 55 bp, Artificial
  Synthetic oligonucleotide
acacgactgattgattgctatatgggatagcgtttaagcgcggtgtctgtcttac

SEQ ID NO: 281619 - DNA, 55 bp, Artificial
  Synthetic oligonucleotide
tcgaacccaatgagtggtagccaacagtgggtctgtggtccttcataaggggcga

SEQ ID NO: 281620 - DNA, 60 bp, Artificial
  Synthetic oligonucleotide
gatgactagaagaagtccctcctggaaacggccattagcctgccactccttcaagctata

SEQ ID NO: 281621 - DNA, 55 bp, Artificial
  Synthetic oligonucleotide
tcctcgcacgcgtgacgaccccttgtaataggccagtcgtaaaaggtcgaggagt

SEQ ID NO: 281622 - DNA, 55 bp, Artificial
  Synthetic oligonucleotide
acagacgaggactatgcgttgttgtatgcttatagtaagtcgagactatgccgcg

SEQ ID NO: 281623 - DNA, 55 bp, Artificial
  Synthetic oligonucleotide
tctctggttgaggacactcctctgtcgctccgggcggcacctaagtccacgctta

SEQ ID NO: 281624 - DNA, 55 bp, Artificial
  Synthetic oligonucleotide
tctctctgcagaaagataccttccacattctttgggtgacagccgccacgtcgtt

SEQ ID NO: 281625 - DNA, 55 bp, Artificial
  Synthetic oligonucleotide
aatcagatattacgtgactacgtctcggatggaacgaagtcaatatgcagtctat

SEQ ID NO: 281626 - DNA, 55 bp, Artificial
  Synthetic oligonucleotide
tctcgggacgctttcttgcgggagagcatctttctgtgtcgcggatctggcctgt

SEQ ID NO: 281627 - DNA, 55 bp, Artificial
  Synthetic oligonucleotide
aatccgttctaggttcgcttatgatccgccgcaacgcgtatcaacgcgtcttcgg

SEQ ID NO: 281628 - DNA, 55 bp, Artificial
  Synthetic oligonucleotide
aatcgatggcctgcacctagatacgagcttcctcacagacgaatcaatgaacgac

SEQ ID NO: 281629 - DNA, 55 bp, Artificial
  Synthetic oligonucleotide
tctacttacgcttaggcctctgaatgatcgtacgactcgaaaacagccgggaaac

SEQ ID NO: 281630 - DNA, 55 bp, Artificial
  Synthetic oligonucleotide
aatgaactctgcagcttgtcgcacgctggaaagagaggcttgatccattggtacc

SEQ ID NO: 281631 - DNA, 59 bp, Artificial
  Synthetic oligonucleotide
tcccggactgaagcattaaaccctcggaactatacatgtcagttctctgccgatttgta

SEQ ID NO: 281632 - DNA, 55 bp, Artificial
  Synthetic oligonucleotide
aatgacacacccaaaccatggagcccgcttacaaagcgattgtggtctggctata

SEQ ID NO: 281633 - DNA, 55 bp, Artificial
  Synthetic oligonucleotide
aatgactccgagatggggaattgtaggcttacttctccttcgtgggatcctccac

SEQ ID NO: 281634 - DNA, 55 bp, Artificial
  Synthetic oligonucleotide
aatgatcgaaacctgggtagcgactactaaagctgtgccgtaagcgtctagagcg

SEQ ID NO: 281635 - DNA, 55 bp, Artificial
  Synthetic oligonucleotide
aatgatttcctacattatcacatgtcagtcatccacccgagaaccaactcccgcg

SEQ ID NO: 281636 - DNA, 55 bp, Artificial
  Synthetic oligonucleotide
aatgcactttatgtccgccattataggaaaagcgtcgattatagacccaccagaa

SEQ ID NO: 281637 - DNA, 55 bp, Artificial
  Synthetic oligonucleotide
tcgttgcaagcacaccgttaagggaggcatacataggaaagcccatcatctccct

SEQ ID NO: 281638 - DNA, 55 bp, Artificial
  Synthetic oligonucleotide
tcgtctgatcatggctcttttgcattcggcccatgccctctcaattccagtccgc

SEQ ID NO: 281639 - DNA, 55 bp, Artificial
  Synthetic oligonucleotide
tcgtcggagtctcttgttccgccgactcaaacaccaacactccttctttctggcg

SEQ ID NO: 281640 - DNA, 55 bp, Artificial
  Synthetic oligonucleotide
aatgctcggggccgctagaaggcttgacagggtctccccgtcgatataacgccgg

SEQ ID NO: 281641 - DNA, 55 bp, Artificial
  Synthetic oligonucleotide
aatggacctggtgtttgagtaggtagggcaagggataaatacaggcctcgtcagt

SEQ ID NO: 281642 - DNA, 56 bp, Artificial
  Synthetic oligonucleotide
tcccggccacgccgactcaaaccccgtgtcgaatcccaacgaccaattctcatcga

SEQ ID NO: 281643 - DNA, 55 bp, Artificial
  Synthetic oligonucleotide
tcgtccaacgggcatactgggccgaatctgggaggggcctcttccacgactgttc

SEQ ID NO: 281644 - DNA, 55 bp, Artificial
  Synthetic oligonucleotide
aatggcggcctcatgtttcgctcatgagtcaacgagcgcatcggatcagacatgg

SEQ ID NO: 281645 - DNA, 55 bp, Artificial
  Synthetic oligonucleotide
tcgtaaaagccattcccaacgggcaattgagagatccactcgtggggaaatctgg

SEQ ID NO: 281646 - DNA, 55 bp, Artificial
  Synthetic oligonucleotide
tccaggtctgactcggtgagctggtagggtgtattcaatgtgtcgtaaacggtgg

SEQ ID NO: 281647 - DNA, 55 bp, Artificial
  Synthetic oligonucleotide
tccaggcttcgtgtggtaagccaggctttttaacggtccacaatggcacagcaag

SEQ ID NO: 281648 - DNA, 55 bp, Artificial
  Synthetic oligonucleotide
tccagacgaagcgagcggcagtagagaagacgcattgaactgggtctactgcggt

SEQ ID NO: 281649 - DNA, 55 bp, Artificial
  Synthetic oligonucleotide
tccactgcctggggattcagtgtcgtcgtcaaactcccattactcatgggaacca

SEQ ID NO: 281650 - DNA, 55 bp, Artificial
  Synthetic oligonucleotide
tccacgtagtcgggtccgggaataggacctcgagatatgattccgattcttgccc

SEQ ID NO: 281651 - DNA, 55 bp, Artificial
  Synthetic oligonucleotide
tccaagtcacgaggaatacccacttgcagcacgcagctcgtattctcgactcgcg

SEQ ID NO: 281652 - DNA, 55 bp, Artificial
  Synthetic oligonucleotide
acccacgcagaagccgagtccggaatatgtcgattgtatgcgtcggttacaggcg

SEQ ID NO: 281653 - DNA, 59 bp, Artificial
  Synthetic oligonucleotide
tcccgttgaatcctcatcccgcggagtctcccagcccacaccaattcgaggcctcacta

SEQ ID NO: 281654 - DNA, 55 bp, Artificial
  Synthetic oligonucleotide
acccagcaatcttttctccggcctctcactcatttgcttcctaggtataccgcgg

SEQ ID NO: 281655 - DNA, 55 bp, Artificial
  Synthetic oligonucleotide
acccatcaggatcatatgcacccataacgtcgagtcctagagatccggtcagctg

SEQ ID NO: 281656 - DNA, 55 bp, Artificial
  Synthetic oligonucleotide
tcattcggtgcatcaaccgcttcccacgacccgtcgctgttgtactttgtccacc

SEQ ID NO: 281657 - DNA, 55 bp, Artificial
  Synthetic oligonucleotide
tcatgtgaccctctcaaactggatcctacgggaaaagcctattatccatgcgggc

SEQ ID NO: 281658 - DNA, 55 bp, Artificial
  Synthetic oligonucleotide
tcatgccggacttgctgggtcccggaatcggagtctttcccgcgcagttgggttc

SEQ ID NO: 281659 - DNA, 55 bp, Artificial
  Synthetic oligonucleotide
tcatcgcccagtaatgttaatccggttgttgtgagatgatagtgctgtgctggtg

SEQ ID NO: 281660 - DNA, 55 bp, Artificial
  Synthetic oligonucleotide
tcatcccgtcaggggaatgatggaaaaccgtagcacgaatgaagtatgcgacccg

SEQ ID NO: 281661 - DNA, 55 bp, Artificial
  Synthetic oligonucleotide
acccgccaaacggtgcaaacacccaactgaggctagtgtctgccgggcggtgaga

SEQ ID NO: 281662 - DNA, 55 bp, Artificial
  Synthetic oligonucleotide
tcatagagccaccataggattcccacccgggggatcgaagcaactgagtccgttc

SEQ ID NO: 281663 - DNA, 55 bp, Artificial
  Synthetic oligonucleotide
tcagtcacaggagcgcatgcccattaggcagccgagaggccccatgcccgagaaa

SEQ ID NO: 281664 - DNA, 58 bp, Artificial
  Synthetic oligonucleotide
tccctaccgtattcgagtctctcgacacattctctgttgactaggcttcccccgacgc

SEQ ID NO: 281665 - DNA, 54 bp, Artificial
  Synthetic oligonucleotide
accctgttgggccatcctgggatcggatcacctggaactttgtttagaaggttg

SEQ ID NO: 281666 - DNA, 55 bp, Artificial
  Synthetic oligonucleotide
tcagggttgagctgccgagttgccggaacgaaatggccgtttggacaagtgtagc

SEQ ID NO: 281667 - DNA, 55 bp, Artificial
  Synthetic oligonucleotide
tcctactgcatcgattgcacaatatgccagctaacaggtatctagccgtggacgt

SEQ ID NO: 281668 - DNA, 55 bp, Artificial
  Synthetic oligonucleotide
tccggcgggagatagaaaggtcggggttctcttggacgcgcttcttgtatgcgtc

SEQ ID NO: 281669 - DNA, 55 bp, Artificial
  Synthetic oligonucleotide
acagccgtgcagggaagccctcgggaagatgcatagccagctgttcagtatcctg

SEQ ID NO: 281670 - DNA, 55 bp, Artificial
  Synthetic oligonucleotide
acagctgtacttcgtggtttgccattggtagcattcccgggtgcatcaacccaac

SEQ ID NO: 281671 - DNA, 55 bp, Artificial
  Synthetic oligonucleotide
tccgccggcaatagttgcattatagagccatctgaccgatagcagggaagaacag

SEQ ID NO: 281672 - DNA, 55 bp, Artificial
  Synthetic oligonucleotide
tccgatctcaagtctggaacggtgcagggcttgtgtgcacacacggcttattact

SEQ ID NO: 281673 - DNA, 55 bp, Artificial
  Synthetic oligonucleotide
acagtatcatactggtgcggatgcgttctatgtgagtgactccggttgcgaacgg

SEQ ID NO: 281674 - DNA, 55 bp, Artificial
  Synthetic oligonucleotide
acagtgacaatggtatcattcgcactttggatcagacagtctacctcgtcaaagt

SEQ ID NO: 281675 - DNA, 60 bp, Artificial
  Synthetic oligonucleotide
acatcggagtatccgagggaacgattgtagtgtgtagcagtaggcgtgcggagggtgcag

SEQ ID NO: 281676 - DNA, 55 bp, Artificial
  Synthetic oligonucleotide
tccgaatggtaactctattctaacgggatctggaagtcgtgaaaacattgcggac

SEQ ID NO: 281677 - DNA, 55 bp, Artificial
  Synthetic oligonucleotide
acagtgtgtcctgtatctctgggctctgaagatctggtatccgaatacgctttgg

SEQ ID NO: 281678 - DNA, 55 bp, Artificial
  Synthetic oligonucleotide
acatcacttcgacattataatcgagatagtattcggaagaagtaaccgggctggc

SEQ ID NO: 281679 - DNA, 55 bp, Artificial
  Synthetic oligonucleotide
acatcccactttcaatcatgcaataagagtacccgggcagtaatggctaagactg

SEQ ID NO: 281680 - DNA, 55 bp, Artificial
  Synthetic oligonucleotide
acatccctcgcggggcgaggtgagtctagctatgtgtcgtactgcctcgagtgca

SEQ ID NO: 281681 - DNA, 55 bp, Artificial
  Synthetic oligonucleotide
acatccgattccctcagcctggtgacgacatccaatataatggcgagcctagcaa

SEQ ID NO: 281682 - DNA, 55 bp, Artificial
  Synthetic oligonucleotide
acatggctcttcattaagcgtgccatcggaccgcgggaagaaacgaggcatctcg

SEQ ID NO: 281683 - DNA, 55 bp, Artificial
  Synthetic oligonucleotide
tcccgctggaactgatccacttgttcaagacttccgtgaaacgaatgcattagcc

SEQ ID NO: 281684 - DNA, 55 bp, Artificial
  Synthetic oligonucleotide
accaaattcctctccgcgtagggttacatgcgtgaatattggagcagtgtaccgg

SEQ ID NO: 281685 - DNA, 55 bp, Artificial
  Synthetic oligonucleotide
tcccgaaacacaaaagctcgctcgtccgttggaccgcaagaccgcagtgctatca

SEQ ID NO: 281686 - DNA, 60 bp, Artificial
  Synthetic oligonucleotide
agtggaggtacaagagctataactattgctagaggactaccccatacagatctataggag

SEQ ID NO: 281687 - DNA, 55 bp, Artificial
  Synthetic oligonucleotide
tccccgtcctcagaggagatcgttttccgttactcaccgatatccacaagaagta

SEQ ID NO: 281688 - DNA, 55 bp, Artificial
  Synthetic oligonucleotide
tccattttacgagccaacatttaatgatccgaaaatcagggatacataccggctg

SEQ ID NO: 281689 - DNA, 55 bp, Artificial
  Synthetic oligonucleotide
tccattcacccaagggagtctaacacgacccagagcgcaagagatcaacatgcgg

SEQ ID NO: 281690 - DNA, 55 bp, Artificial
  Synthetic oligonucleotide
tccagtaggactggggcgaacttcccagaaccagcctcgggaagcgctgtgggtt

SEQ ID NO: 281691 - DNA, 55 bp, Artificial
  Synthetic oligonucleotide
cactcccgagtctctccagatcatttgtctcgcacgaaatctgtatctgcgagcg

SEQ ID NO: 281692 - DNA, 55 bp, Artificial
  Synthetic oligonucleotide
ccagtggcagcgagcccgcgtgtttggtaacattttcggaatgtaatctggcagg

SEQ ID NO: 281693 - DNA, 55 bp, Artificial
  Synthetic oligonucleotide
ccagtctcctctggcaagattcgtgttgattgttccaggatgtaggctgaccgag

SEQ ID NO: 281694 - DNA, 55 bp, Artificial
  Synthetic oligonucleotide
ccagtcctgtatcccgtgtctaggccactcaaactctaattagctcatccgaacc

SEQ ID NO: 281695 - DNA, 55 bp, Artificial
  Synthetic oligonucleotide
cactcgaagcacgaatcgcgtcggagcagccgtccatattatcgctcagacgggc

SEQ ID NO: 281696 - DNA, 55 bp, Artificial
  Synthetic oligonucleotide
ccagtcccctggtattgtcgagtgctcgagttggcaaagcgtgtgaacggggtga

SEQ ID NO: 281697 - DNA, 60 bp, Artificial
  Synthetic oligonucleotide
ctagtgcggatggaaaggagacctggcttgttgcgatgaactggacaacggatgcagtcg

SEQ ID NO: 281698 - DNA, 57 bp, Artificial
  Synthetic oligonucleotide
tccctctgccgcgtttccggttcaccagttctccaacccacccggagatctgataca

SEQ ID NO: 281699 - DNA, 55 bp, Artificial
  Synthetic oligonucleotide
cactcgctgaagacgctggctaatccgcggtgggaggatttctcgtatgagtatg

SEQ ID NO: 281700 - DNA, 55 bp, Artificial
  Synthetic oligonucleotide
cactcggaatctcctccgtaactccgagagcccaacaggaggtccaaccacgtct

SEQ ID NO: 281701 - DNA, 55 bp, Artificial
  Synthetic oligonucleotide
cactctagaatgtcagtcacgcttttccgctttgggtgtacgtgttcccatccaa

SEQ ID NO: 281702 - DNA, 55 bp, Artificial
  Synthetic oligonucleotide
ccagtcatcgagtaggttaatcagtcgttcccgagacgattcattgcatgctcaa

SEQ ID NO: 281703 - DNA, 55 bp, Artificial
  Synthetic oligonucleotide
ccagtacacagtcgaactccaacatggcgtcgtcagtgagcctacttccgccgct

SEQ ID NO: 281704 - DNA, 55 bp, Artificial
  Synthetic oligonucleotide
ccaggtcgagacatgactatgggccacaaggtatccaaacaccatttcaacgtcg

SEQ ID NO: 281705 - DNA, 53 bp, Artificial
  Synthetic oligonucleotide
cactgatgttcaggccttgggttgtccctccggtgtaccccgttaggtacacg

SEQ ID NO: 281706 - DNA, 55 bp, Artificial
  Synthetic oligonucleotide
cactgcagcaaccgagatacgaaaccttgctcccaaagtgaccaatcacagccga

SEQ ID NO: 281707 - DNA, 55 bp, Artificial
  Synthetic oligonucleotide
cactgccaaacatgactcccctgacgtcctcctacttcgcttcttacgcgctcgc

SEQ ID NO: 281708 - DNA, 55 bp, Artificial
  Synthetic oligonucleotide
cactgctagcctatccacagccatactagtacagggattactagcccgcggggcc

SEQ ID NO: 281709 - DNA, 60 bp, Artificial
  Synthetic oligonucleotide
ggcactgcatgaggagggatcaaggctttacgtcacaccagtctcgagacaatttccttt

SEQ ID NO: 281710 - DNA, 55 bp, Artificial
  Synthetic oligonucleotide
ccaggtagcaatcaagtagacagcagcggggaagaaccctgcttctaaggctccg

SEQ ID NO: 281711 - DNA, 55 bp, Artificial
  Synthetic oligonucleotide
ccatccgtgaacacgggttctttctcccccgcgcagcccccaagctaggtgtatc

SEQ ID NO: 281712 - DNA, 54 bp, Artificial
  Synthetic oligonucleotide
cacgtacttcgcctagggtgggaatctttggttccgtgtaccatctgctcccgg

SEQ ID NO: 281713 - DNA, 55 bp, Artificial
  Synthetic oligonucleotide
ggtgaggagtcaacacactagcaatgtgagaacccgccgatgttgcagacgctac

SEQ ID NO: 281714 - DNA, 55 bp, Artificial
  Synthetic oligonucleotide
ccatactgctagcctaagagaactcgtagccaatcgaggaacgcattaaaggcgg

SEQ ID NO: 281715 - DNA, 55 bp, Artificial
  Synthetic oligonucleotide
cacgtgcggtcatccacatgagagatattttcgagaagacagtccagactcagac

SEQ ID NO: 281716 - DNA, 55 bp, Artificial
  Synthetic oligonucleotide
cacgtgggccaatcatacgccgtcgtaccatcctggcgacccggctcttactgaa

SEQ ID NO: 281717 - DNA, 55 bp, Artificial
  Synthetic oligonucleotide
cactaagagcctcggtattggctcgctcactaccatgctcctctccgcatttacc

SEQ ID NO: 281718 - DNA, 55 bp, Artificial
  Synthetic oligonucleotide
cactacccctctagctttgaccatagccggctgaacgcaaccgcccggggagtag

SEQ ID NO: 281719 - DNA, 55 bp, Artificial
  Synthetic oligonucleotide
cactacgtcacgatcgctcaaggaggactagtaagggatctggatccgagagctt

SEQ ID NO: 281720 - DNA, 60 bp, Artificial
  Synthetic oligonucleotide
ctcgcttttcagcagggcgagtcgctctctcaaaattctcggacgaatactggcacagct

SEQ ID NO: 281721 - DNA, 55 bp, Artificial
  Synthetic oligonucleotide
cactcaaacaagcggaacaactctgctcgtcccagatttgtctaggatgatcagc

SEQ ID NO: 281722 - DNA, 55 bp, Artificial
  Synthetic oligonucleotide
cactcaacggcttgcaattgatctatacttgttggagaagccccagcgatgcgcg

SEQ ID NO: 281723 - DNA, 55 bp, Artificial
  Synthetic oligonucleotide
cactcaagcaaatggttctcaggcaagccaggcactgcatgaggagggatcaagg

SEQ ID NO: 281724 - DNA, 55 bp, Artificial
  Synthetic oligonucleotide
cactcccagcaacttcgcgtgcccttgcggacttttctccgctttgtctggggac

SEQ ID NO: 281725 - DNA, 55 bp, Artificial
  Synthetic oligonucleotide
ggtgaggccattgcgggtgaatgtaagtggacgccatattctaagctgggatgga

SEQ ID NO: 281726 - DNA, 55 bp, Artificial
  Synthetic oligonucleotide
ccatacccgaactatcagcgtttgcctgtcccctgaagttaatggtagcagttcg

SEQ ID NO: 281727 - DNA, 55 bp, Artificial
  Synthetic oligonucleotide
ccagttgacggttagattcgagagcataacagtcgattgaacagtgtacccctga

SEQ ID NO: 281728 - DNA, 55 bp, Artificial
  Synthetic oligonucleotide
cactcccattatggacgctgagttggagggtcactggaaaaggtctgattgaccc

SEQ ID NO: 281729 - DNA, 55 bp, Artificial
  Synthetic oligonucleotide
cagaatgcatccctggtatggtttagaattcaatacaacggcccatcgtacacaa

SEQ ID NO: 281730 - DNA, 55 bp, Artificial
  Synthetic oligonucleotide
ccactcatgtcttaaggcttagggcgaataacactaagcgcattcgaaggaaggc

SEQ ID NO: 281731 - DNA, 60 bp, Artificial
  Synthetic oligonucleotide
attggcacgttgtatatcactctgagatgcgtcgtacagttgttgccagtcttgaatggc

SEQ ID NO: 281732 - DNA, 55 bp, Artificial
  Synthetic oligonucleotide
cagacagcgagtcgagaccatacgaatgcatgggtcgatgtaaatccagttggcc

SEQ ID NO: 281733 - DNA, 55 bp, Artificial
  Synthetic oligonucleotide
cagacataccgacctgtatcgtacaaccgtacctgagggtttcccgaggccgcaa

SEQ ID NO: 281734 - DNA, 55 bp, Artificial
  Synthetic oligonucleotide
ccacgtcgttgtggggtgaattagagtgtcggattttgttgactctatggtacga

SEQ ID NO: 281735 - DNA, 55 bp, Artificial
  Synthetic oligonucleotide
gtaatttgaatggaagggactggttgtacccaggctaggtgtaccctgcagcacg

SEQ ID NO: 281736 - DNA, 55 bp, Artificial
  Synthetic oligonucleotide
cagacgccatgggttccctccatacgatggccgcaacgcgttatcaccttgcgcg

SEQ ID NO: 281737 - DNA, 55 bp, Artificial
  Synthetic oligonucleotide
ccacggggtatcaggagacgagacccctcgaccaattactttctcggtgagtgac

SEQ ID NO: 281738 - DNA, 55 bp, Artificial
  Synthetic oligonucleotide
gtaattgatggtctcggctcgcgatagtgttttagctatgctttaacgaggttca

SEQ ID NO: 281739 - DNA, 55 bp, Artificial
  Synthetic oligonucleotide
cagagcttgcagtcaacactacgtctggtttcgcacagggagtgagtctagcctt

SEQ ID NO: 281740 - DNA, 55 bp, Artificial
  Synthetic oligonucleotide
ggtgccctccttaacttgcacggcgagtctacaaccgatgataagggacacaagg

SEQ ID NO: 281741 - DNA, 53 bp, Artificial
  Synthetic oligonucleotide
ccacgcggaataagttaccctcctcgtgtcgccccgaagttaattggcctcca

SEQ ID NO: 281742 - DNA, 60 bp, Artificial
  Synthetic oligonucleotide
caatcccacaaaacatactattactagtattgatgacatcttaagcgataaggagcttaa

SEQ ID NO: 281743 - DNA, 55 bp, Artificial
  Synthetic oligonucleotide
ggtgcgcgcaacggactatcctcaatagttgaccaccctcggttgatacggttct

SEQ ID NO: 281744 - DNA, 55 bp, Artificial
  Synthetic oligonucleotide
cagagtcgattcggtagatggaagagtaaaacttacatggcagcggtgtgacggg

SEQ ID NO: 281745 - DNA, 55 bp, Artificial
  Synthetic oligonucleotide
gtaatcaggccaagtaggaggcttgccatggaccaacacgtactgggtatgaggc

SEQ ID NO: 281746 - DNA, 55 bp, Artificial
  Synthetic oligonucleotide
ggtgcgctgtgatcattgaaatctatcatgaacttaagacaaccaactaccgcct

SEQ ID NO: 281747 - DNA, 54 bp, Artificial
  Synthetic oligonucleotide
ccaggggaactgcagcagttagactcgtgccaacggggttccaaggtacgtacg

SEQ ID NO: 281748 - DNA, 55 bp, Artificial
  Synthetic oligonucleotide
ccaggctgaatgttcgaggacttccaatcgtggtctactcatctgtatcgagggt

SEQ ID NO: 281749 - DNA, 55 bp, Artificial
  Synthetic oligonucleotide
cactggcatccgctcatgctacgcctgctaaataaaatgcctacgtgcgtaacaa

SEQ ID NO: 281750 - DNA, 55 bp, Artificial
  Synthetic oligonucleotide
cactggtatggcgttggtgtgattgggatttaggctcgctcatttccgctcttgc

SEQ ID NO: 281751 - DNA, 55 bp, Artificial
  Synthetic oligonucleotide
cactgtaactgagcatggacaacgtgtttgtggatggatcgcccgtgataagact

SEQ ID NO: 281752 - DNA, 55 bp, Artificial
  Synthetic oligonucleotide
ggtgcacagtgggatccgtggcgcacgtcaagaaataccgatctcaatacggtgg

SEQ ID NO: 281753 - DNA, 60 bp, Artificial
  Synthetic oligonucleotide
attggattagatgaccaaattgcactgcgaaacactgacatggcccagttgaataataac

SEQ ID NO: 281754 - DNA, 55 bp, Artificial
  Synthetic oligonucleotide
ccaggacatgtctcagtacctcaggagtgagtagtgctttccgcacaacatgcgc

SEQ ID NO: 281755 - DNA, 55 bp, Artificial
  Synthetic oligonucleotide
ccagcgaccacctcacgcccaagttttcatacagcggtagggacgccaacaccat

SEQ ID NO: 281756 - DNA, 55 bp, Artificial
  Synthetic oligonucleotide
ccagccgcccatagataagtatgcagccaagatccttgtcaaccgccagtcctag

SEQ ID NO: 281757 - DNA, 55 bp, Artificial
  Synthetic oligonucleotide
gtacagccagcctgttgcgaaggcaaacaacgaggttacaactccctccagctct

SEQ ID NO: 281758 - DNA, 55 bp, Artificial
  Synthetic oligonucleotide
ccagcattctcatacgtaatgactttccgataggtatcccatggtgactcctgcc

SEQ ID NO: 281759 - DNA, 55 bp, Artificial
  Synthetic oligonucleotide
ggtgccatcactcgacgaactctagtgacgaacgggatattctttgccctttaca

SEQ ID NO: 281760 - DNA, 55 bp, Artificial
  Synthetic oligonucleotide
ccagaggaaacaacgacaaaacagactgaccgtccaccccacctccaatagacgc

SEQ ID NO: 281761 - DNA, 55 bp, Artificial
  Synthetic oligonucleotide
cacttgccagctttgaaacccctttgacagtaacgcacagcgcacaaacatcctc

SEQ ID NO: 281762 - DNA, 55 bp, Artificial
  Synthetic oligonucleotide
ccagaccctagtcacccgcgaactgagattgctgacagggatggtacctgccaag

SEQ ID NO: 281763 - DNA, 55 bp, Artificial
  Synthetic oligonucleotide
ccagaatacccgttcaaccattcacagacatactggctcgagagtcgactgttca

SEQ ID NO: 281764 - DNA, 55 bp, Artificial
  Synthetic oligonucleotide
gtataaactcaccccatgcccttatacatccccacggcaactttattccccgctc

SEQ ID NO: 281765 - DNA, 55 bp, Artificial
  Synthetic oligonucleotide
gtacacctcccaatccaggcaattagctagctacagatacttgtggatagatcgc

SEQ ID NO: 281766 - DNA, 55 bp, Artificial
  Synthetic oligonucleotide
ccacttttcggggagaatcgtttggcagctctcgaatcgaaattgccgtgatcca

SEQ ID NO: 281767 - DNA, 55 bp, Artificial
  Synthetic oligonucleotide
ggtcgattgccgatagactcagcccctccggccgaattgactctgccttgctgac

SEQ ID NO: 281768 - DNA, 55 bp, Artificial
  Synthetic oligonucleotide
gtacttgatcaattgtcttttacctttgccttctaagattttggtctgtgacacc

SEQ ID NO: 281769 - DNA, 55 bp, Artificial
  Synthetic oligonucleotide
cacccacgacttcagtaccgtcactctgacaacatcgcacttttcttccgattcc

SEQ ID NO: 281770 - DNA, 55 bp, Artificial
  Synthetic oligonucleotide
gtacttcgtacaggctatagataatcgcgccttggcgtaaacgccctcacttcaa

SEQ ID NO: 281771 - DNA, 55 bp, Artificial
  Synthetic oligonucleotide
caccccttagtgaaaaccaccccagtgcttatcagcggcataaaatagaggtcgg

SEQ ID NO: 281772 - DNA, 55 bp, Artificial
  Synthetic oligonucleotide
cccagctagacatagtccagaacgaccgcagcgataaaagatcagacatattcgc

SEQ ID NO: 281773 - DNA, 55 bp, Artificial
  Synthetic oligonucleotide
cccagcgttacgatttagtcatcgccagtctggagtggaacgggtccccaggcac

SEQ ID NO: 281774 - DNA, 55 bp, Artificial
  Synthetic oligonucleotide
ggtcggctagcttgaggcccctcaattcgttgtcacgctggtccgtagctgccct

SEQ ID NO: 281775 - DNA, 53 bp, Artificial
  Synthetic oligonucleotide
cttaaccactcttcttaaccactcttcttaaccactcttcttaaccactcttc

SEQ ID NO: 281776 - DNA, 55 bp, Artificial
  Synthetic oligonucleotide
gtactctagtgcattccctcggattcaacggtatcgaggctaccttcctgtgtgc

SEQ ID NO: 281777 - DNA, 55 bp, Artificial
  Synthetic oligonucleotide
cacccttcgatgcccgagacctcaggttttgcggctgtgcaaaggatactgcacc

SEQ ID NO: 281778 - DNA, 55 bp, Artificial
  Synthetic oligonucleotide
cccagcacgttgtgtctaaggagatcttcttcaatgggaggcacttattgcgtgc

SEQ ID NO: 281779 - DNA, 55 bp, Artificial
  Synthetic oligonucleotide
gtactattttgggtagcgtacggtatggagaggtcattatgtacgaacctccgcc

SEQ ID NO: 281780 - DNA, 55 bp, Artificial
  Synthetic oligonucleotide
caccgacaaaccatgaacaccctgtcatacgccattcgattctggtccaagggcg

SEQ ID NO: 281781 - DNA, 55 bp, Artificial
  Synthetic oligonucleotide
ggtcggtgatagacttagattgaaccgctcagttcagactgaaaggggaccagca

SEQ ID NO: 281782 - DNA, 55 bp, Artificial
  Synthetic oligonucleotide
cccacttggaggccgaattggaaatcaggtggatgtcaaccatgcaaggctggcc

SEQ ID NO: 281783 - DNA, 55 bp, Artificial
  Synthetic oligonucleotide
cccacggcaaaggacgtaagattgaatgatgacgccagcccacagcagtgaatct

SEQ ID NO: 281784 - DNA, 55 bp, Artificial
  Synthetic oligonucleotide
caccgccctatggtcgtattcagaatgctagtgatctaagcctatcatgaatctc

SEQ ID NO: 281785 - DNA, 55 bp, Artificial
  Synthetic oligonucleotide
ggtccatgagcatctaaaggacacagcgggtgttcccatgcttttgcgagtcgca

SEQ ID NO: 281786 - DNA, 57 bp, Artificial
  Synthetic oligonucleotide
cttaactaacattgagtggttgcgcgtaaatgacgacgggacaacgaagcagttgac

SEQ ID NO: 281787 - DNA, 55 bp, Artificial
  Synthetic oligonucleotide
cacacatctcggcctcctccttatgcctgcgcaagtactcaagttcccatggcag

SEQ ID NO: 281788 - DNA, 55 bp, Artificial
  Synthetic oligonucleotide
gtagacttgggttgaacgctgaacacgacaatatgacgacgtcacgatgatgatt

SEQ ID NO: 281789 - DNA, 55 bp, Artificial
  Synthetic oligonucleotide
ccccaccagacacggttagttactagggaaacgcacatgatcatgaggggagcac

SEQ ID NO: 281790 - DNA, 55 bp, Artificial
  Synthetic oligonucleotide
ggtcccctgacagccgtgcagggaagccctcgggaagatgcatagccagctgttc

SEQ ID NO: 281791 - DNA, 55 bp, Artificial
  Synthetic oligonucleotide
cccatggatgtacggcaccgagagtctgaccgagtcgagacgaatgttccagtgc

SEQ ID NO: 281792 - DNA, 55 bp, Artificial
  Synthetic oligonucleotide
cacagtgtttcagctcaactcgtgtggaggtcggaggatcctggtgttgtgcccc

SEQ ID NO: 281793 - DNA, 55 bp, Artificial
  Synthetic oligonucleotide
cacatacccttataggcaaaagagaccatttgcgaccaggctagcgtcgaggcga

SEQ ID NO: 281794 - DNA, 55 bp, Artificial
  Synthetic oligonucleotide
cacatcaaggcacaaggagcttccgaaaggcaagatggaggcgctatcaccccgg

SEQ ID NO: 281795 - DNA, 55 bp, Artificial
  Synthetic oligonucleotide
cccatggaaagtatctctgaaaggtacaacggggctactcgacacaaccgctacc

SEQ ID NO: 281796 - DNA, 55 bp, Artificial
  Synthetic oligonucleotide
cacatcatattgtgctaacactcggagataatcacagctacattaacctccagtc

SEQ ID NO: 281797 - DNA, 60 bp, Artificial
  Synthetic oligonucleotide
cttacattgaccctggaataccgtccagcctgcttcggatgtagtaatgccatatatata

SEQ ID NO: 281798 - DNA, 55 bp, Artificial
  Synthetic oligonucleotide
cacatggctactttaggcagttcagatccacgtggcagctgccctttcgaggtgc

SEQ ID NO: 281799 - DNA, 55 bp, Artificial
  Synthetic oligonucleotide
cccatgccgctaggtccatatctttctcaggcttatctgagcgcgcacaggactt

SEQ ID NO: 281800 - DNA, 55 bp, Artificial
  Synthetic oligonucleotide
cccatgatgggtgatatgccgagccgagagtggctttcgacttagggtctcgact

SEQ ID NO: 281801 - DNA, 55 bp, Artificial
  Synthetic oligonucleotide
cccatgacgactaggagatactacacgaagcgatgtgtatcgagcagacgtctag

SEQ ID NO: 281802 - DNA, 55 bp, Artificial
  Synthetic oligonucleotide
cccatcttgacgccccactacatccctctgacatcgcgaggggttgtccctcatc

SEQ ID NO: 281803 - DNA, 55 bp, Artificial
  Synthetic oligonucleotide
ggtccgagcactctcaaacgagtctacagttcctagaaaccccatccgcctcgcc

SEQ ID NO: 281804 - DNA, 55 bp, Artificial
  Synthetic oligonucleotide
gtacttggtagcagtatccttggcaaccgcgtcacaggcatccacccaatccgag

SEQ ID NO: 281805 - DNA, 55 bp, Artificial
  Synthetic oligonucleotide
cccagtgattaggcgcgctggggcctagtaggctgagagaccgtagtccgagaga

SEQ ID NO: 281806 - DNA, 55 bp, Artificial
  Synthetic oligonucleotide
ggtctcgtgaccctaaacagcaatatgaagacagccaattgaaggcgattgagtg

SEQ ID NO: 281807 - DNA, 55 bp, Artificial
  Synthetic oligonucleotide
ccatgtataagtcccttaatggcgatgagagagacttccaagcattctgtgcgtc

SEQ ID NO: 281808 - DNA, 58 bp, Artificial
  Synthetic oligonucleotide
tatatatagactacctagaatatattaatagctccctaactactattttatcctccca

SEQ ID NO: 281809 - DNA, 60 bp, Artificial
  Synthetic oligonucleotide
ctcgccacccgttgcatgacttccgcggagtacttctgcgcaggggcccacgcagagtcc

SEQ ID NO: 281810 - DNA, 55 bp, Artificial
  Synthetic oligonucleotide
gtacctcgttgccggcaccacactgtggtctggacttagctatgtcttctcgaac

SEQ ID NO: 281811 - DNA, 55 bp, Artificial
  Synthetic oligonucleotide
ccatggtgggaatagcgcactcacggtcactaggcgaattgtcgacaggctggag

SEQ ID NO: 281812 - DNA, 55 bp, Artificial
  Synthetic oligonucleotide
ccatgctgcgagtgagtatgctctttgatgttcggagggcttatggagcgggagg

SEQ ID NO: 281813 - DNA, 55 bp, Artificial
  Synthetic oligonucleotide
ggtctggctactgttcggatccatggagagggaccatcgatgagactggacgagg

SEQ ID NO: 281814 - DNA, 55 bp, Artificial
  Synthetic oligonucleotide
cacggactctgatcgaccactccgtgttcgttgcaggtctggctcggtggctcga

SEQ ID NO: 281815 - DNA, 55 bp, Artificial
  Synthetic oligonucleotide
cacggatgcgatagagtcccagcttacgctgtccatctttgttctagcctacgcc

SEQ ID NO: 281816 - DNA, 55 bp, Artificial
  Synthetic oligonucleotide
gtaccgctgagaacaagaagccttcttcgcagagtgagctttcggagctgctggg

SEQ ID NO: 281817 - DNA, 53 bp, Artificial
  Synthetic oligonucleotide
cacgggaaggttagtagctgttaatttaactagatggggttagtcactttgga

SEQ ID NO: 281818 - DNA, 55 bp, Artificial
  Synthetic oligonucleotide
cacgggtccaaggtttaactacgccaagtggcagagcctcccatacgaatcttgg

SEQ ID NO: 281819 - DNA, 55 bp, Artificial
  Synthetic oligonucleotide
cacggtgaatgagcagccaatgaaggtagttgaggcgtgagactgccggatcgct

SEQ ID NO: 281820 - DNA, 58 bp, Artificial
  Synthetic oligonucleotide
cttactcttcgactcggtaagcttagcacagaatccgaaatcggctaagaggtcgtca

SEQ ID NO: 281821 - DNA, 55 bp, Artificial
  Synthetic oligonucleotide
cacgtactcattcggccaggtgctctatccagagttccttggtagtcaaaccctc

SEQ ID NO: 281822 - DNA, 55 bp, Artificial
  Synthetic oligonucleotide
ggtgactggattagactaggggactcgtaaggcagcggactagttaaattaattg

SEQ ID NO: 281823 - DNA, 55 bp, Artificial
  Synthetic oligonucleotide
ccatcgttgagtgccactatgtccaccgaccagaaatcggagtcgagccatctcg

SEQ ID NO: 281824 - DNA, 53 bp, Artificial
  Synthetic oligonucleotide
cccaccgaattcgccacctaccactcggacccagacccagactccgacccaaa

SEQ ID NO: 281825 - DNA, 55 bp, Artificial
  Synthetic oligonucleotide
caccggatatcccgctcaatcgcagcctccacagttccaggttcccgcaagtact

SEQ ID NO: 281826 - DNA, 55 bp, Artificial
  Synthetic oligonucleotide
cccaatcgtgactctagctcatgatatccactcctgaatggccctctgaccctgg

SEQ ID NO: 281827 - DNA, 55 bp, Artificial
  Synthetic oligonucleotide
ggtctactctgaatgtgagaaccctttatctgagccatgcgttcatggagcgctg

SEQ ID NO: 281828 - DNA, 55 bp, Artificial
  Synthetic oligonucleotide
ggtctagatccatgagttatctggcaacttgtggtaatgttggtcttttagcctt

SEQ ID NO: 281829 - DNA, 55 bp, Artificial
  Synthetic oligonucleotide
ggtctcgtatagagagggtctagggcaagccatcctgtcgaatgctttgacggac

SEQ ID NO: 281830 - DNA, 55 bp, Artificial
  Synthetic oligonucleotide
cccaaacttcaacacataccatacctgcaagaattgggacacgtttcttgcgttg

SEQ ID NO: 281831 - DNA, 60 bp, Artificial
  Synthetic oligonucleotide
agcacgtacgtcttgcatccgatatgcattggactgtacggtgtaatgctcgtggggtgg

SEQ ID NO: 281832 - DNA, 55 bp, Artificial
  Synthetic oligonucleotide
caccttcagtattatggctggagataccgcaccctgtctacagttttcgcaacgg

SEQ ID NO: 281833 - DNA, 55 bp, Artificial
  Synthetic oligonucleotide
ccatttcagggcacaatgccttgggtggaagttctctgctggccagggcctagta

SEQ ID NO: 281834 - DNA, 55 bp, Artificial
  Synthetic oligonucleotide
caccttcctttcattcatgtgcctacactctctgttgcaaaatgctcacctgagc

SEQ ID NO: 281835 - DNA, 55 bp, Artificial
  Synthetic oligonucleotide
ccattggctctgtaggtcgcgtagggtctgatagagctcgggatctgatagatgc

SEQ ID NO: 281836 - DNA, 55 bp, Artificial
  Synthetic oligonucleotide
gtacgaaatcgaacaatgaactcgaggggcgcaaggacaaattccgccggtaatc

SEQ ID NO: 281837 - DNA, 55 bp, Artificial
  Synthetic oligonucleotide
cacgacctgtgcccgccgcatgcacattgtttcctcgtcatgattagtagtcgaa

SEQ ID NO: 281838 - DNA, 53 bp, Artificial
  Synthetic oligonucleotide
cacgaggcttagcctgtttgctatgtttacctaactattggttaaccgaaacc

SEQ ID NO: 281839 - DNA, 55 bp, Artificial
  Synthetic oligonucleotide
gtaccttaccggacagtaatctggccctgcgccgtaaggttgtctcgtgtgccca

SEQ ID NO: 281840 - DNA, 55 bp, Artificial
  Synthetic oligonucleotide
ccatgtctcgccagccctgccataggtgtcgggcctcatccgtaacacgcagtga

SEQ ID NO: 281841 - DNA, 55 bp, Artificial
  Synthetic oligonucleotide
cacgcagaatgaacctaccattctctgcggatctgagcgtcctccaaacgacaac

SEQ ID NO: 281842 - DNA, 60 bp, Artificial
  Synthetic oligonucleotide
gttgatgttccctgttcctcgcacacccgagtctacatgggccattgcaacataaagacc

SEQ ID NO: 281843 - DNA, 55 bp, Artificial
  Synthetic oligonucleotide
cattgagacatgactaaatgttgtggctgctgtcttgccttcttggagcggatta

SEQ ID NO: 281844 - DNA, 55 bp, Artificial
  Synthetic oligonucleotide
cagtgtcagcctttgtccgcgacataataagattgaacactacgttcgggtagcg

SEQ ID NO: 281845 - DNA, 55 bp, Artificial
  Synthetic oligonucleotide
ggttcggggtcccttctagctcggggcgccattcctcaaagcagcggataattgc

SEQ ID NO: 281846 - DNA, 55 bp, Artificial
  Synthetic oligonucleotide
ggttcctggggatcccaatattactcgtatacgatgaactgcaagtgctatgcga

SEQ ID NO: 281847 - DNA, 52 bp, Artificial
  Synthetic oligonucleotide
ggtgggctattttcggcgtcgttttagtcgctagtagaaacgggcggaacga

SEQ ID NO: 281848 - DNA, 55 bp, Artificial
  Synthetic oligonucleotide
cagttcgtagatcggaatttagaccgcaaccggcctcaggaacaggaggtcgagt

SEQ ID NO: 281849 - DNA, 55 bp, Artificial
  Synthetic oligonucleotide
cattctagactactgaccttcattaacacagtatcgcaggtactgcaagcgcggt

SEQ ID NO: 281850 - DNA, 55 bp, Artificial
  Synthetic oligonucleotide
cattcgtaccacagagcatgatctttgtctacattcggctgcaaatggagtgtat

SEQ ID NO: 281851 - DNA, 55 bp, Artificial
  Synthetic oligonucleotide
cattcaagcacgccactagcgttttcgcagactggaccgttctcccacagtccgg

SEQ ID NO: 281852 - DNA, 55 bp, Artificial
  Synthetic oligonucleotide
cagttctgtagacgggtggatgaagttctctatcgacgggcataaactgaccgtc

SEQ ID NO: 281853 - DNA, 55 bp, Artificial
  Synthetic oligonucleotide
aggcccgggggccttgttagaagtcgaactcgttaagacgatgacattctgcact

SEQ ID NO: 281854 - DNA, 55 bp, Artificial
  Synthetic oligonucleotide
cagttgacaggctgtctaattggccgacgagctaggattggtcgtgaatgcgtcc

SEQ ID NO: 281855 - DNA, 55 bp, Artificial
  Synthetic oligonucleotide
cattattaccacctgcaatgcggaccccaatccaacaaccgtctcccagtctcac

SEQ ID NO: 281856 - DNA, 55 bp, Artificial
  Synthetic oligonucleotide
ggtggtattcctagacgtgtcgcgatatcgatttacgatgtggagaacaaccagt

SEQ ID NO: 281857 - DNA, 55 bp, Artificial
  Synthetic oligonucleotide
cattacacaaagggactgcagagcacgaatgtgtccgcgaccgtcaaacatttca

SEQ ID NO: 281858 - DNA, 55 bp, Artificial
  Synthetic oligonucleotide
ggtgtccactctgacgaagcaatcctcgagaataaggggccgacagttatgacac

SEQ ID NO: 281859 - DNA, 55 bp, Artificial
  Synthetic oligonucleotide
catgtgtgctctgttctattgcgctgagtgtctgcaggggtactaccaggccgcg

SEQ ID NO: 281860 - DNA, 55 bp, Artificial
  Synthetic oligonucleotide
cataaagccttgcaatatatgtcatctcagatgtccgtatcgcagcggatcctcg

SEQ ID NO: 281861 - DNA, 55 bp, Artificial
  Synthetic oligonucleotide
catgtgtaaaagacggttctagccatttgcaaggatcgtggttagtggtttcctc

SEQ ID NO: 281862 - DNA, 55 bp, Artificial
  Synthetic oligonucleotide
caggttcgagcgtcaatggatggcatattacacccaagggatgccactgtaacgg

SEQ ID NO: 281863 - DNA, 55 bp, Artificial
  Synthetic oligonucleotide
cagtaaagaccacgataatgaataatgactatttggtgcccttcttgttagaagc

SEQ ID NO: 281864 - DNA, 58 bp, Artificial
  Synthetic oligonucleotide
cttataattctagatctggtgaacctatagtgttagttaaatcttcttatgtacctgc

SEQ ID NO: 281865 - DNA, 55 bp, Artificial
  Synthetic oligonucleotide
cagtaatcgttccacaacctagggacagagcatcgacggctcctaatgcatgact

SEQ ID NO: 281866 - DNA, 55 bp, Artificial
  Synthetic oligonucleotide
ccaaagagttccctatctagttcgtcctcactctccgattcggtctcagagccgg

SEQ ID NO: 281867 - DNA, 55 bp, Artificial
  Synthetic oligonucleotide
ccaaacactcgagcgaatgcatcccgcagaagcaatccaacgcagggatgagagt

SEQ ID NO: 281868 - DNA, 55 bp, Artificial
  Synthetic oligonucleotide
cagtagataactctaagcccacccggccagggttctaattaaggttgtgagatcc

SEQ ID NO: 281869 - DNA, 54 bp, Artificial
  Synthetic oligonucleotide
catttgtcgcaatttttgggctggccggggtgggttttggtcggaggccatgcg

SEQ ID NO: 281870 - DNA, 55 bp, Artificial
  Synthetic oligonucleotide
ggttgcagtcgttggagcattcgcgattccacattgctagactgggaagttggta

SEQ ID NO: 281871 - DNA, 55 bp, Artificial
  Synthetic oligonucleotide
cagtgactgatgttttctcgagtgtggacggacgaagtacattatgcgtgctgag

SEQ ID NO: 281872 - DNA, 55 bp, Artificial
  Synthetic oligonucleotide
cagtgagactagtgatatagcgaatcacagtggattcatgggtgttgaacgggtc

SEQ ID NO: 281873 - DNA, 55 bp, Artificial
  Synthetic oligonucleotide
cagtggacgataccctggatccactaggcccgctcggggacaaagccgacgaaac

SEQ ID NO: 281874 - DNA, 53 bp, Artificial
  Synthetic oligonucleotide
catttgcttacgtacagggaatcgcgacgtaaacggtacgttggatggaccct

SEQ ID NO: 281875 - DNA, 60 bp, Artificial
  Synthetic oligonucleotide
gtgcacagttgtggagcagttgctcatgtttcaaccaatccactgcctggatccctagta

SEQ ID NO: 281876 - DNA, 55 bp, Artificial
  Synthetic oligonucleotide
cattgtattgttcctcatactagttgcggtaagcatgagcatgagggctgacaat

SEQ ID NO: 281877 - DNA, 55 bp, Artificial
  Synthetic oligonucleotide
cattgcgttgcgcgctctattgttacgtatctgacgctattgtactccaactacg

SEQ ID NO: 281878 - DNA, 55 bp, Artificial
  Synthetic oligonucleotide
ggttgagcccggtcgacaatcgtctcttcaagttagaggttggtctctggtttcc

SEQ ID NO: 281879 - DNA, 55 bp, Artificial
  Synthetic oligonucleotide
cattgccgccatgtcaagcaggtgacacattgaaccttctcactcttgtgtgggg

SEQ ID NO: 281880 - DNA, 55 bp, Artificial
  Synthetic oligonucleotide
cattgaggagtagttgcgcatatgatctttctcctagcagcatgtcacctacccc

SEQ ID NO: 281881 - DNA, 55 bp, Artificial
  Synthetic oligonucleotide
catatactcggtggagcgcttacgcaatgcggccataagttagcgcgtagccacg

SEQ ID NO: 281882 - DNA, 55 bp, Artificial
  Synthetic oligonucleotide
ggttaaatagaaaataattcgtcggcgcgcgcacgctcattgcgcgcgaggggtc

SEQ ID NO: 281883 - DNA, 55 bp, Artificial
  Synthetic oligonucleotide
catctagcccgcggaaacatgcaaggttagcccgaagtgaatctatagtggcgtg

SEQ ID NO: 281884 - DNA, 55 bp, Artificial
  Synthetic oligonucleotide
catctagccaaaactcaccggaacataatcgtcgactcgattatgctagagtgcc

SEQ ID NO: 281885 - DNA, 55 bp, Artificial
  Synthetic oligonucleotide
catctacgtacaggacccgggtactccgcaagtgtctcgcacacacatttacgcc

SEQ ID NO: 281886 - DNA, 60 bp, Artificial
  Synthetic oligonucleotide
caatgctgactcccggtatacttacctgcatgctcagcttatgggggctagattacacag

SEQ ID NO: 281887 - DNA, 55 bp, Artificial
  Synthetic oligonucleotide
ggttacgcatcttcctcctgcaacagttgacaatggctccccaaaagcaacttgt

SEQ ID NO: 281888 - DNA, 55 bp, Artificial
  Synthetic oligonucleotide
catcaccgcaggatatgataacaccttcagaattgctatcccgtggctcctggtc

SEQ ID NO: 281889 - DNA, 55 bp, Artificial
  Synthetic oligonucleotide
catctacaaaactccatgaccgtacatcaggttattctgtgtacgactctgatgc

SEQ ID NO: 281890 - DNA, 55 bp, Artificial
  Synthetic oligonucleotide
catcactgtacgagaggagatttggacctttcttcgtcagtcccgtcgttgcggg

SEQ ID NO: 281891 - DNA, 55 bp, Artificial
  Synthetic oligonucleotide
catcgtacctgtaaggtcgccagagctttgcctctgggtaagcgcagtcaacact

SEQ ID NO: 281892 - DNA, 55 bp, Artificial
  Synthetic oligonucleotide
catcgcctagatgacaaggttagtgatgcttgggccttttccgaccattgttagt

SEQ ID NO: 281893 - DNA, 55 bp, Artificial
  Synthetic oligonucleotide
ggttacacagtcaacgccgtgtcttaggcttctatccttcggtggacaactccgg

SEQ ID NO: 281894 - DNA, 55 bp, Artificial
  Synthetic oligonucleotide
catcagaattgatcctacccttaatgagtccattcaagaaactcgctcaaacccg

SEQ ID NO: 281895 - DNA, 55 bp, Artificial
  Synthetic oligonucleotide
catcccacgcggatgcccactcccgtgtcaggtcgataccatggtaggtgtgttt

SEQ ID NO: 281896 - DNA, 55 bp, Artificial
  Synthetic oligonucleotide
catccctctttcgctgaagcgcctgtttagactgcaattgagccaacagatgcga

SEQ ID NO: 281897 - DNA, 60 bp, Artificial
  Synthetic oligonucleotide
attgctggcatagggatcatgttggaaagctggtgtcatgttcgggtcaagattgagact

SEQ ID NO: 281898 - DNA, 55 bp, Artificial
  Synthetic oligonucleotide
catccgtgagatggacagcaaccgcacagaaggacccaaggatggctgccgctcc

SEQ ID NO: 281899 - DNA, 55 bp, Artificial
  Synthetic oligonucleotide
catccttaccgtatacccaggggtcagatgagagttcatgctatggtatactccc

SEQ ID NO: 281900 - DNA, 55 bp, Artificial
  Synthetic oligonucleotide
catgtctacacagcctgtatcaccccaatcatgctatgctatacgcggcctcagt

SEQ ID NO: 281901 - DNA, 55 bp, Artificial
  Synthetic oligonucleotide
catgtatgccacttccgaagtcatcttgtagtgataaagctagcagatagcttga

SEQ ID NO: 281902 - DNA, 55 bp, Artificial
  Synthetic oligonucleotide
catgtataagggtatcgctacataattaacaagataatcctccacatagtgcccc

SEQ ID NO: 281903 - DNA, 55 bp, Artificial
  Synthetic oligonucleotide
cataaccggagcatagtacagagccatttgcttaaacccaagagccccgacaaag

SEQ ID NO: 281904 - DNA, 55 bp, Artificial
  Synthetic oligonucleotide
ggtgtgaccctcagcaaccatacgcttctcgatctcaacggcagaggcacgggtc

SEQ ID NO: 281905 - DNA, 55 bp, Artificial
  Synthetic oligonucleotide
catgggcgcagaactttgcgctcgatctagctcacgttcaagttgccatcacgct

SEQ ID NO: 281906 - DNA, 55 bp, Artificial
  Synthetic oligonucleotide
catgggaggctcacgtgtgcttgctattcttggaccacgagcgaatccgagcacc

SEQ ID NO: 281907 - DNA, 55 bp, Artificial
  Synthetic oligonucleotide
catgctactggatgggtcttacgtaccctctacctgcgaagcaccggctgtcctc

SEQ ID NO: 281908 - DNA, 60 bp, Artificial
  Synthetic oligonucleotide
agcacaggtactgacttgtcatacagtttggtagctggataacttacagtccaacgagaa

SEQ ID NO: 281909 - DNA, 55 bp, Artificial
  Synthetic oligonucleotide
catgctaatcccgatgtgagtatcgcgtaaataacgagttctgtacttcaccacg

SEQ ID NO: 281910 - DNA, 55 bp, Artificial
  Synthetic oligonucleotide
ggtgtgtggcgttgctgtcatgtcgaaaatgatagcggcacgataatgagccctg

SEQ ID NO: 281911 - DNA, 55 bp, Artificial
  Synthetic oligonucleotide
catacgtagagacataggaaagtggtatatgcaatgtgcgtacccagcaatcagg

SEQ ID NO: 281912 - DNA, 55 bp, Artificial
  Synthetic oligonucleotide
catgcgacagatcaatcggatgtcaatcacggcacataaccttggtagtagtgta

SEQ ID NO: 281913 - DNA, 55 bp, Artificial
  Synthetic oligonucleotide
catgcatagtactaacttttctagacccgatgcgagcgctgtgttgacgcacccg

SEQ ID NO: 281914 - DNA, 55 bp, Artificial
  Synthetic oligonucleotide
catgaggagtggaggttgaatagtgtagcgtggttgtgtcgcgcgtgtcatagtt

SEQ ID NO: 281915 - DNA, 55 bp, Artificial
  Synthetic oligonucleotide
catgacggggcagatgacatgccgctgtcccaacgtcgcgcaatgttatcccagc

SEQ ID NO: 281916 - DNA, 55 bp, Artificial
  Synthetic oligonucleotide
catcttaagaccgatcggatatttcatgcttgatcagaattgaggtaagggtact

SEQ ID NO: 281917 - DNA, 55 bp, Artificial
  Synthetic oligonucleotide
catagaggaccggtatttctcgccaaacacttccgataatgggtaaaactgccat

SEQ ID NO: 281918 - DNA, 55 bp, Artificial
  Synthetic oligonucleotide
ggttaggacgataccctggcgcggagaaagccagaacggccagcgaccagcgtat

SEQ ID NO: 281919 - DNA, 59 bp, Artificial
  Synthetic oligonucleotide
agtattggtaataactgcagtgacttggtccagacatgaggttccacacggattattta

SEQ ID NO: 281920 - DNA, 57 bp, Artificial
  Synthetic oligonucleotide
cttcatgctgatagaggcgagattttttttcgtagtaaggtttcgtaagaagacaga

SEQ ID NO: 281921 - DNA, 55 bp, Artificial
  Synthetic oligonucleotide
ccacatttctctataaccccggaacgctaatatagcacccagtttagcggcatcc

SEQ ID NO: 281922 - DNA, 55 bp, Artificial
  Synthetic oligonucleotide
cagccccacgcctactcagtgctcctctaacgcgaatgatgagcctgaaatctgg

SEQ ID NO: 281923 - DNA, 55 bp, Artificial
  Synthetic oligonucleotide
ccacagcttgatataggtttgcccggccccattactgcctattcttagagcgagc

SEQ ID NO: 281924 - DNA, 55 bp, Artificial
  Synthetic oligonucleotide
ccacagcgctccagccgagatcagaggcttgggcgtagtaggttattgcgccgac

SEQ ID NO: 281925 - DNA, 55 bp, Artificial
  Synthetic oligonucleotide
cagccgggaagcacatgaatttcccgcccgtatatcgaaatgattcgagccgaac

SEQ ID NO: 281926 - DNA, 55 bp, Artificial
  Synthetic oligonucleotide
gtaacattgtgagggtaatgattgcagctgtactctaaacatccctgttgtctca

SEQ ID NO: 281927 - DNA, 55 bp, Artificial
  Synthetic oligonucleotide
cagccgtgcaagtagtctgtaccaatctttggaggaagtgccgttcttggccaag

SEQ ID NO: 281928 - DNA, 55 bp, Artificial
  Synthetic oligonucleotide
gtaaagaatgactgtaatagatgggaaatggcatcccttcgagcagactgtccac

SEQ ID NO: 281929 - DNA, 55 bp, Artificial
  Synthetic oligonucleotide
gtaaaccttgccagcacgttgtatataccctgaattaagatggtatcggagtgtc

SEQ ID NO: 281930 - DNA, 55 bp, Artificial
  Synthetic oligonucleotide
ggttttgcctcggatctgcgagcaatgacggacggagttttgtgtacccaatcga

SEQ ID NO: 281931 - DNA, 53 bp, Artificial
  Synthetic oligonucleotide
gttggggatggacattttgggtaaggagaggggagtcccgctttggtattgag

SEQ ID NO: 281932 - DNA, 55 bp, Artificial
  Synthetic oligonucleotide
cagcgagctgggagaaacctgcgcaaggcatagcatctcactcaccatgcactgc

SEQ ID NO: 281933 - DNA, 55 bp, Artificial
  Synthetic oligonucleotide
cagcgagtgggcggcgactgaaactttcgtgcatcttgctcctaagtccaaaggt

SEQ ID NO: 281934 - DNA, 55 bp, Artificial
  Synthetic oligonucleotide
cagcggctaacaccgcacctgcaacataccctagcgcggctatgtagtcggctcg

SEQ ID NO: 281935 - DNA, 55 bp, Artificial
  Synthetic oligonucleotide
cagcgggttcacgggagttagcgtaattcaccacgacctttgcaccgagtcgtcc

SEQ ID NO: 281936 - DNA, 55 bp, Artificial
  Synthetic oligonucleotide
ccacacttaggcgtaacatcggacaaacaacctgaatgggccattcccaccacat

SEQ ID NO: 281937 - DNA, 55 bp, Artificial
  Synthetic oligonucleotide
ccacacgataaacaaacgagggtcaacctctcgagtaatctaacgggctcgctgg

SEQ ID NO: 281938 - DNA, 55 bp, Artificial
  Synthetic oligonucleotide
ccacaccctcgatgactgagacgtgcattgctatggtgaaaccgacccttccacc

SEQ ID NO: 281939 - DNA, 55 bp, Artificial
  Synthetic oligonucleotide
cagataaggcacttgtcttccgagcgccattcggaccctatggttcatgggtcgc

SEQ ID NO: 281940 - DNA, 55 bp, Artificial
  Synthetic oligonucleotide
ccacgagtagatcaggggtgctatagtctgttagcttgggtcgtttgcgcggttc

SEQ ID NO: 281941 - DNA, 55 bp, Artificial
  Synthetic oligonucleotide
cagatcgaatgggccttcccgaagcctggcacatccgcagggagacatccgttcg

SEQ ID NO: 281942 - DNA, 56 bp, Artificial
  Synthetic oligonucleotide
cttcatgttgtagtaggcggattctgcgaccgcgaaaacgtggggtgggacttcga

SEQ ID NO: 281943 - DNA, 55 bp, Artificial
  Synthetic oligonucleotide
cagatctgtacttgcgcctacacatcttgtcggtactcaggtcaagcatatcggg

SEQ ID NO: 281944 - DNA, 55 bp, Artificial
  Synthetic oligonucleotide
cagatcttgctacctgccaacttctcagtcggatacaataccctaggtagcccac

SEQ ID NO: 281945 - DNA, 55 bp, Artificial
  Synthetic oligonucleotide
cagatgcgggatggcactagcggtggcccggcggagtgtctggacatacgaaatg

SEQ ID NO: 281946 - DNA, 55 bp, Artificial
  Synthetic oligonucleotide
cagatggggtagtagtgtccaatggctagtttggacgggtaacatacagaggtcc

SEQ ID NO: 281947 - DNA, 55 bp, Artificial
  Synthetic oligonucleotide
gtaatacctagtcggcaggaaccgacagcttcctctgattagcctgatcatggtc

SEQ ID NO: 281948 - DNA, 52 bp, Artificial
  Synthetic oligonucleotide
gtaagtttaccccggaagtgactccacccacactcgtgttatttagtaactc

SEQ ID NO: 281949 - DNA, 55 bp, Artificial
  Synthetic oligonucleotide
cagcaatcaactacgagggaaacctgcagtacgaaacgagtgggttgcggcctct

SEQ ID NO: 281950 - DNA, 55 bp, Artificial
  Synthetic oligonucleotide
gtaagactgctactactctgtgaatactgtactactctctgtgaatccagtctag

SEQ ID NO: 281951 - DNA, 55 bp, Artificial
  Synthetic oligonucleotide
ggtgcgtgctctgtcgacatacccagtagtctccttcttgattgtcgttgcgcgt

SEQ ID NO: 281952 - DNA, 55 bp, Artificial
  Synthetic oligonucleotide
ccaccgtcttgaagctcacttgaatgtagtgtagcttgtactccgcgaggagtag

SEQ ID NO: 281953 - DNA, 55 bp, Artificial
  Synthetic oligonucleotide
atttaaagctctttctaagctatattaaagactctctacctctccgattttctct

SEQ ID NO: 281954 - DNA, 53 bp, Artificial
  Synthetic oligonucleotide
gtaacctccagtcaactcctacggggtaatcaactaacttcggtatagacgta

SEQ ID NO: 281955 - DNA, 55 bp, Artificial
  Synthetic oligonucleotide
gtaacctagatcggcgcctaatctattaacatgcaggcctcgactcacttgagac

SEQ ID NO: 281956 - DNA, 55 bp, Artificial
  Synthetic oligonucleotide
cagcatagcttggcggagtataccagaagcgatgttgagtcggacactatggtcc

SEQ ID NO: 281957 - DNA, 55 bp, Artificial
  Synthetic oligonucleotide
ccaccggaacttgccttgcttcaaggtctgcacgactcccaatggcatgagctcc

SEQ ID NO: 281958 - DNA, 55 bp, Artificial
  Synthetic oligonucleotide
cagcatcctctcaggcacgatacaccaatcacaccgtctgcaaagaacaggaatc

SEQ ID NO: 281959 - DNA, 55 bp, Artificial
  Synthetic oligonucleotide
cagccaccctgcaggtcttgaggattcggctaatgtacaccggcagacgctctca

SEQ ID NO: 281960 - DNA, 55 bp, Artificial
  Synthetic oligonucleotide
caggataatcggccaaaggctgcccctctgaggctttgactagatttcgtgtctc

SEQ ID NO: 281961 - DNA, 55 bp, Artificial
  Synthetic oligonucleotide
ggttgggaagcgacttacctgcagttcaggcacgcctcatgtgaacgcaacctcc

SEQ ID NO: 281962 - DNA, 55 bp, Artificial
  Synthetic oligonucleotide
caggcaggctgcctaactgtggcgattcgaatactccagccgtctgcagtggagt

SEQ ID NO: 281963 - DNA, 55 bp, Artificial
  Synthetic oligonucleotide
caggcggaaaactcacatgctcctggtgttcaacggtgttttatgttcaacgttg

SEQ ID NO: 281964 - DNA, 60 bp, Artificial
  Synthetic oligonucleotide
ctggtcagtggttggatggtagactcgatcttagaatcgatgatcttgtttcgcgtcaga

SEQ ID NO: 281965 - DNA, 53 bp, Artificial
  Synthetic oligonucleotide
ggtggacgttagccctgcaacggggcaaaactaccccaaaccgagatcagacc

SEQ ID NO: 281966 - DNA, 55 bp, Artificial
  Synthetic oligonucleotide
caggctattcataccggtatgtactccgggaatgctctcccttcggttatgtgct

SEQ ID NO: 281967 - DNA, 55 bp, Artificial
  Synthetic oligonucleotide
ccaagagagattgaggaccgcctggttgcccatgactccatcacggaagcgagtg

SEQ ID NO: 281968 - DNA, 55 bp, Artificial
  Synthetic oligonucleotide
caggcttcttggatactaattatccctcaccagctgacaaatctctccactatct

SEQ ID NO: 281969 - DNA, 55 bp, Artificial
  Synthetic oligonucleotide
cagggcaaactagtataggtaggctctatagacaggatgtagctccgaggcatcc

SEQ ID NO: 281970 - DNA, 55 bp, Artificial
  Synthetic oligonucleotide
ccaagacctgcccctccgatagcccctgactgaagcagccacgtgtgtcttaccg

SEQ ID NO: 281971 - DNA, 55 bp, Artificial
  Synthetic oligonucleotide
ccaagaccactatctgcgggaagcctatacccttttaggccaccatccagtatgg

SEQ ID NO: 281972 - DNA, 55 bp, Artificial
  Synthetic oligonucleotide
ccaacggaggcacacttgcctacgcgtcatctgcatttgcgaacatgcacccgca

SEQ ID NO: 281973 - DNA, 55 bp, Artificial
  Synthetic oligonucleotide
ggttggccggactgtaagcccgttagcgtctgagatacgccggatgacacgaacc

SEQ ID NO: 281974 - DNA, 55 bp, Artificial
  Synthetic oligonucleotide
ccaaccttcttgctcctcccataactctagctgctaccgggcttaatctaagcac

SEQ ID NO: 281975 - DNA, 59 bp, Artificial
  Synthetic oligonucleotide
gttactgtgactaggatcacgaggtgtattcgtttattggagatgcaaagcggttcgtc

SEQ ID NO: 281976 - DNA, 55 bp, Artificial
  Synthetic oligonucleotide
ggttggaaatcccaaatcaggtggttgttacgacgtcagcatgggatagacagcc

SEQ ID NO: 281977 - DNA, 55 bp, Artificial
  Synthetic oligonucleotide
cagggttgtatgcaccgacgtacatatttgtgcggacctgttgctcgcaccttcc

SEQ ID NO: 281978 - DNA, 55 bp, Artificial
  Synthetic oligonucleotide
ccaacaatcgggattatgcggttatgcacttgactggacataaatcagggccgag

SEQ ID NO: 281979 - DNA, 55 bp, Artificial
  Synthetic oligonucleotide
ccacaaggcttggaccatagtgaatgtagggttgtggacatcaaatgaatccata

SEQ ID NO: 281980 - DNA, 55 bp, Artificial
  Synthetic oligonucleotide
cagcgtctctttccgggcggttaatccgtccgtgcgattcgtggctgtcagcgtc

SEQ ID NO: 281981 - DNA, 55 bp, Artificial
  Synthetic oligonucleotide
cagctaacctaatcttctgcaatagactcgatctcacctctgcggagtccgaaac

SEQ ID NO: 281982 - DNA, 55 bp, Artificial
  Synthetic oligonucleotide
ggttgtatccaaacgaagactcgatctcttcggcaaagtgagcggtgggccgaag

SEQ ID NO: 281983 - DNA, 55 bp, Artificial
  Synthetic oligonucleotide
ccaattagcctttgcatgctcaccctccaacggcccgtctggtaaactcacaaag

SEQ ID NO: 281984 - DNA, 55 bp, Artificial
  Synthetic oligonucleotide
cagctaggggacagtcaatgaacattatgttccataccggcaatgggttcagccc

SEQ ID NO: 281985 - DNA, 55 bp, Artificial
  Synthetic oligonucleotide
ccaatccctcacacccatttgtcataaaccaggagtaaagtgtgcattgattcgc

SEQ ID NO: 281986 - DNA, 60 bp, Artificial
  Synthetic oligonucleotide
ctggtgagagcgagaggtttccaagcacccgtcacagacgacacgtcatttgcaacaggg

SEQ ID NO: 281987 - DNA, 55 bp, Artificial
  Synthetic oligonucleotide
ccaatcccatcagaggtccatctattaggactaccttcgaatcgccgatcggaag

SEQ ID NO: 281988 - DNA, 55 bp, Artificial
  Synthetic oligonucleotide
cagctcacagaatcagcatctatctagaaattagccgcgcttcaagtcacaccaa

SEQ ID NO: 281989 - DNA, 55 bp, Artificial
  Synthetic oligonucleotide
cagctgaatcgaaaggttcgaagcctgcagaatagccttaatagaaagcggcagc

SEQ ID NO: 281990 - DNA, 55 bp, Artificial
  Synthetic oligonucleotide
cagcttctaaccgacccaccaggtggaaaatgttgttcaaccagctagggatgcc

SEQ ID NO: 281991 - DNA, 55 bp, Artificial
  Synthetic oligonucleotide
ccaatacccggtacagatcctgaaggcccatctcatggattgtccatcacctgcc

SEQ ID NO: 281992 - DNA, 55 bp, Artificial
  Synthetic oligonucleotide
caggacgataatcacgcgactcctgacgctagaactcggcgcgacagaagcctcc

SEQ ID NO: 281993 - DNA, 55 bp, Artificial
  Synthetic oligonucleotide
ggtggaaagtcgagtttccgaacgacaagcttagtccgttttggcggcgctctga

SEQ ID NO: 281994 - DNA, 55 bp, Artificial
  Synthetic oligonucleotide
ccaagtgcgtctcttacatgagtttggttgaactatgcagctaacaagtccaggg

SEQ ID NO: 281995 - DNA, 55 bp, Artificial
  Synthetic oligonucleotide
ccaagtcgagtgaggtgtctaagaagcgccacaatttgctagatatgctggtgcg

SEQ ID NO: 281996 - DNA, 55 bp, Artificial
  Synthetic oligonucleotide
caggactcacggtggtggttccattgtgatgggtgttatcgacacaaacagctcg

SEQ ID NO: 281997 - DNA, 60 bp, Artificial
  Synthetic oligonucleotide
ctggtgctcgtgatacatcccaaatgaatgtgcgagctcatgagcaaaagtagtgacccg

SEQ ID NO: 281998 - DNA, 55 bp, Artificial
  Synthetic oligonucleotide
ccaaggccctgtgcagtaagttacgcataagctattgttccacagtatcacgcga

SEQ ID NO: 281999 - DNA, 55 bp, Artificial
  Synthetic oligonucleotide
ccaagcatttgacgaacatccctattcgcgacatggaacgttgggtgaatcgctc

SEQ ID NO: 282000 - DNA, 55 bp, Artificial
  Synthetic oligonucleotide
gtagcctcctgccttacccttaatgatcgcagtctcgcttccaagtatcaccagg

SEQ ID NO: 282001 - DNA, 55 bp, Artificial
  Synthetic oligonucleotide
cccgaaacatctttacccaagccgggctgcccagtggaccctagatatgcggcta

SEQ ID NO: 282002 - DNA, 55 bp, Artificial
  Synthetic oligonucleotide
caaccctatcggcttttctacgtgtcatactgagctgctctctagcttagagccg

SEQ ID NO: 282003 - DNA, 55 bp, Artificial
  Synthetic oligonucleotide
caaccactttgaacacactgaatgtacccctccttctgagtaatgacagttccag

SEQ ID NO: 282004 - DNA, 55 bp, Artificial
  Synthetic oligonucleotide
gtagcctgattgtcgaaggatggttagcgtgtgtttaagtggattagagcgaggg

SEQ ID NO: 282005 - DNA, 55 bp, Artificial
  Synthetic oligonucleotide
caaatcgtaatatatgatgctcgtaacccgtcttcacccacagtgcgtaggcgcc

SEQ ID NO: 282006 - DNA, 55 bp, Artificial
  Synthetic oligonucleotide
cccgacgtaagatactagttatcatctagcgcttagtcatatatacccggctcta

SEQ ID NO: 282007 - DNA, 55 bp, Artificial
  Synthetic oligonucleotide
caaatcccctgtctatgcagccagctcaatgcaagatgctcgatagatgactctc

SEQ ID NO: 282008 - DNA, 60 bp, Artificial
  Synthetic oligonucleotide
gtagatcatagggaacgaggattggatcttccgacagtgatttatcatctttcgaggtgc

SEQ ID NO: 282009 - DNA, 55 bp, Artificial
  Synthetic oligonucleotide
cccgagcgtccctatccacagtgccggatcagagctaattgaagtttattccgcg

SEQ ID NO: 282010 - DNA, 55 bp, Artificial
  Synthetic oligonucleotide
cccgagtctgctagcccggttccgaacccagacagcgcaaaagataccacaacaa

SEQ ID NO: 282011 - DNA, 55 bp, Artificial
  Synthetic oligonucleotide
caaaggaccacgaaccatatggttagcaaccacatcgaccataagatacatcccc

SEQ ID NO: 282012 - DNA, 55 bp, Artificial
  Synthetic oligonucleotide
gtaggagatgatgatataggagtatcctcatatattttagtatatgtaggggctg

SEQ ID NO: 282013 - DNA, 55 bp, Artificial
  Synthetic oligonucleotide
caaagaagtggctccctggccctacatggtagaagtgctgacagctcaccacatg

SEQ ID NO: 282014 - DNA, 55 bp, Artificial
  Synthetic oligonucleotide
cccgatgcaccgaagactgcgggacaatggaaacttaggaacggcatcgtacagc

SEQ ID NO: 282015 - DNA, 55 bp, Artificial
  Synthetic oligonucleotide
caaacacgtgtttcgatacgaagaccaagactacacgagttcaaaactacaccaa

SEQ ID NO: 282016 - DNA, 54 bp, Artificial
  Synthetic oligonucleotide
caaaacttcaaccctgataggctacggctagggaataaggtgctacgccaaagg

SEQ ID NO: 282017 - DNA, 55 bp, Artificial
  Synthetic oligonucleotide
caaaacggtagaggtttcgaccgaaggtgtgtaagaagggtcgcaggcatctcga

SEQ ID NO: 282018 - DNA, 55 bp, Artificial
  Synthetic oligonucleotide
attttgcgcagatagtacagagccattcgctccacgtctctggtcacggatgagt

SEQ ID NO: 282019 - DNA, 60 bp, Artificial
  Synthetic oligonucleotide
gttagaacacgtaatcagatcccaactgcgcttcacagacagtattgattttgacgatta

SEQ ID NO: 282020 - DNA, 55 bp, Artificial
  Synthetic oligonucleotide
attttccgaagatcaccgagtccatgactttcaatgtacgcaggggtcaaacccg

SEQ ID NO: 282021 - DNA, 55 bp, Artificial
  Synthetic oligonucleotide
attttcagccaatcacttccgacaccttgcataacggtccgaaatcatgtcccca

SEQ ID NO: 282022 - DNA, 55 bp, Artificial
  Synthetic oligonucleotide
gtaggtgagaatgatctccgccagggtttgatgtgaatcgcgcaatccggtgtgg

SEQ ID NO: 282023 - DNA, 55 bp, Artificial
  Synthetic oligonucleotide
atttgggatcgcacggggtgtagctgctccatccatcgcgtggtcttcaggggcc

SEQ ID NO: 282024 - DNA, 55 bp, Artificial
  Synthetic oligonucleotide
cccgattacaaaagaatgttaacctatgaccaaggctgcagaatttccctgaata

SEQ ID NO: 282025 - DNA, 55 bp, Artificial
  Synthetic oligonucleotide
cccgcaacgattgagttctccaagggcgctactttgtgcaatagctagttcgctg

SEQ ID NO: 282026 - DNA, 55 bp, Artificial
  Synthetic oligonucleotide
cccgcagactaggacgtattctgcaactccacattgtcatctcgtcgggtgggct

SEQ ID NO: 282027 - DNA, 54 bp, Artificial
  Synthetic oligonucleotide
ccccgttatctggaacaagtagcacataaccaacctagtagttttccatcctac

SEQ ID NO: 282028 - DNA, 55 bp, Artificial
  Synthetic oligonucleotide
caaggctgagacttggctgtgttggaggacgaaattatatccccttgaaacgcac

SEQ ID NO: 282029 - DNA, 55 bp, Artificial
  Synthetic oligonucleotide
ggtcaagccacctccattctctgttggggactcgagataaccaggcgagacagac

SEQ ID NO: 282030 - DNA, 60 bp, Artificial
  Synthetic oligonucleotide
gtatcaagatcggtctgccattctacactggtgcagttgtgtttggggaattcgattctt

SEQ ID NO: 282031 - DNA, 60 bp, Artificial
  Synthetic oligonucleotide
ctgtaaagcagcttgccatggaaagtcatagctatcgctcagcaatcgtatgtatcatac

SEQ ID NO: 282032 - DNA, 54 bp, Artificial
  Synthetic oligonucleotide
cccctccctactttctggcgggtggcaaccccgtttatcacgtgatcacgcgtc

SEQ ID NO: 282033 - DNA, 55 bp, Artificial
  Synthetic oligonucleotide
cccctctggcagtgtatacccctggagttggcctataataatcggagattgacag

SEQ ID NO: 282034 - DNA, 55 bp, Artificial
  Synthetic oligonucleotide
caaggagaagacaagccggtgttccgccatcgcttaacaggctggtatggaggtg

SEQ ID NO: 282035 - DNA, 55 bp, Artificial
  Synthetic oligonucleotide
caaggaacgactcgacctgcctctcatcgttgagcctcgaaaccgcagacagctc

SEQ ID NO: 282036 - DNA, 55 bp, Artificial
  Synthetic oligonucleotide
caagcgtccaactattgcaggtagtagcgctgatcacacttacagttcgagaggg

SEQ ID NO: 282037 - DNA, 55 bp, Artificial
  Synthetic oligonucleotide
caagcgcccttagctcctgctaagtactgacaggcaattacgatcagagacgcaa

SEQ ID NO: 282038 - DNA, 55 bp, Artificial
  Synthetic oligonucleotide
caagcccgtgcaatgagctagtcctttacaccgagcctacatcattatcaatccc

SEQ ID NO: 282039 - DNA, 55 bp, Artificial
  Synthetic oligonucleotide
caagcagtctgtctcgccctatggacacaagcaaccgacctgatatagaaagtca

SEQ ID NO: 282040 - DNA, 55 bp, Artificial
  Synthetic oligonucleotide
caagcacttagccgtgagagagcaggctgttgtctactgtgtctctgtcggaaga

SEQ ID NO: 282041 - DNA, 55 bp, Artificial
  Synthetic oligonucleotide
cccctgcaagttctatcagccgcagagttctacgtgtcctcgacaagtccctgtc

SEQ ID NO: 282042 - DNA, 59 bp, Artificial
  Synthetic oligonucleotide
gttagattacaaggtgcaggtagattatctaaacgttatactgcttcaagatctttaca

SEQ ID NO: 282043 - DNA, 55 bp, Artificial
  Synthetic oligonucleotide
cccctgcccgcccgatactccaatactggggttactgatggttgttggaactatc

SEQ ID NO: 282044 - DNA, 55 bp, Artificial
  Synthetic oligonucleotide
caagagcatgaacacttcttctccatgtcccagatgccatctgctagagctgcta

SEQ ID NO: 282045 - DNA, 55 bp, Artificial
  Synthetic oligonucleotide
cccctggccgtagtgacgcgaccagaaatcagcttaggctatcactctcagcact

SEQ ID NO: 282046 - DNA, 55 bp, Artificial
  Synthetic oligonucleotide
gtagcagtggagaaccagcagatatgcgtcattcctcggaaggatgatctaccga

SEQ ID NO: 282047 - DNA, 55 bp, Artificial
  Synthetic oligonucleotide
caacttcagggcataagggactgcatacaggatctcaatctcttggtggttcttg

SEQ ID NO: 282048 - DNA, 55 bp, Artificial
  Synthetic oligonucleotide
caactcacgatcatggcctagaatcaattcattcgagataccactctgcccctgt

SEQ ID NO: 282049 - DNA, 55 bp, Artificial
  Synthetic oligonucleotide
ggtattttccagtgacgaggtgggtcattgctcctcattcgttaacgaaggtact

SEQ ID NO: 282050 - DNA, 55 bp, Artificial
  Synthetic oligonucleotide
ccccttcagtctacacgtgtattggcgtgttgtctttcattgctcgcttgggtgc

SEQ ID NO: 282051 - DNA, 54 bp, Artificial
  Synthetic oligonucleotide
caacgtcccctccaccatatgaaacccacgaaggggaagacttgccagaggtcc

SEQ ID NO: 282052 - DNA, 55 bp, Artificial
  Synthetic oligonucleotide
ccccttcgcaagaccctccgcgatgagtcgccgtatgtccgcaagactgccgcga

SEQ ID NO: 282053 - DNA, 60 bp, Artificial
  Synthetic oligonucleotide
ctgtagactatgatgctatactgacttgcgttgactcttcgcagtagccactaggcggcc

SEQ ID NO: 282054 - DNA, 55 bp, Artificial
  Synthetic oligonucleotide
caacggtgagattgtactaatgtcccagaggataactggacctccatagacaacg

SEQ ID NO: 282055 - DNA, 55 bp, Artificial
  Synthetic oligonucleotide
caacgagagtagagaccaaggactttggctcacaaatcccatatgcggaaccacc

SEQ ID NO: 282056 - DNA, 55 bp, Artificial
  Synthetic oligonucleotide
caaccttaggattcataacacgcagttgatctagaggatgttgcctgtacactcc

SEQ ID NO: 282057 - DNA, 55 bp, Artificial
  Synthetic oligonucleotide
caacctgtgccgccggaacggactgaattagggcctccgcccatggtcatccaac

SEQ ID NO: 282058 - DNA, 55 bp, Artificial
  Synthetic oligonucleotide
ggtacttgacgctggtatcgtctacatgttcttaagtgtgctaacaacagtcgct

SEQ ID NO: 282059 - DNA, 55 bp, Artificial
  Synthetic oligonucleotide
attcaacacgggtgtcgacagtcaggagacttcgattgtcacggccactggtccc

SEQ ID NO: 282060 - DNA, 55 bp, Artificial
  Synthetic oligonucleotide
gtatagtactgatcccaacaggtggtcctggccccattcccgaaggaacaatgcg

SEQ ID NO: 282061 - DNA, 55 bp, Artificial
  Synthetic oligonucleotide
ccctcatcgcctgaaacgttaatggtgacacgacttggggttgtgagtgtatggc

SEQ ID NO: 282062 - DNA, 55 bp, Artificial
  Synthetic oligonucleotide
gtatagttcaacccatattaccaactacatgaaccaagggtatctcacgtgtcac

SEQ ID NO: 282063 - DNA, 55 bp, Artificial
  Synthetic oligonucleotide
ccctcgaagccgattcaatatactcctcctctgcaatgttgttgctagtagcttc

SEQ ID NO: 282064 - DNA, 60 bp, Artificial
  Synthetic oligonucleotide
attgtaactttgccagcattctcatacgtaatgactttccgataggtatcccatggtgac

SEQ ID NO: 282065 - DNA, 55 bp, Artificial
  Synthetic oligonucleotide
ggtacgtgttatgcccttcccactcacacaccggcatatagcccgacgaggatcg

SEQ ID NO: 282066 - DNA, 55 bp, Artificial
  Synthetic oligonucleotide
ggtacgcatctcatctcccctatgaatgcacactagctacctacctaccccgacc

SEQ ID NO: 282067 - DNA, 55 bp, Artificial
  Synthetic oligonucleotide
ccctctctttagggagatcttctaacctcctagtcagagcatcaggcttaactcc

SEQ ID NO: 282068 - DNA, 55 bp, Artificial
  Synthetic oligonucleotide
ccctctgaggcacgattaccttcaaacaccaccgagttcccggatatagactttc

SEQ ID NO: 282069 - DNA, 55 bp, Artificial
  Synthetic oligonucleotide
atgttgctccccgcatcctcctgtagcgtggactggtccattcgtcatcgacctc

SEQ ID NO: 282070 - DNA, 55 bp, Artificial
  Synthetic oligonucleotide
atgttcgttttacgcgtgcgatccttgcgtcgttgattatcagcgagcggtggtt

SEQ ID NO: 282071 - DNA, 55 bp, Artificial
  Synthetic oligonucleotide
atgttcgaatatggttgcctgaccagcgtgccagtactctccgtagtggactgtg

SEQ ID NO: 282072 - DNA, 55 bp, Artificial
  Synthetic oligonucleotide
ggtaccatctaggcgctgatatgtgtatccacggaattccatataatcaccgagg

SEQ ID NO: 282073 - DNA, 55 bp, Artificial
  Synthetic oligonucleotide
gtatctgcgtcgaagtaatatcatgacccttatttactaatgcgctcacccattg

SEQ ID NO: 282074 - DNA, 55 bp, Artificial
  Synthetic oligonucleotide
ccctctgtttaatctgacacatatcgtaccatactcttgactctatctcttctgc

SEQ ID NO: 282075 - DNA, 59 bp, Artificial
  Synthetic oligonucleotide
ctcggcgtacgtacctacactggttccaatgcacaggtccggcaaagatgcgatcggaa

SEQ ID NO: 282076 - DNA, 55 bp, Artificial
  Synthetic oligonucleotide
ggtaccactggcgtttgcagaggagagcatgacggcgcttatatactagcacagg

SEQ ID NO: 282077 - DNA, 55 bp, Artificial
  Synthetic oligonucleotide
atgtcgggcagaagacacacggcacagccccaggtgatggtatcatgcagcgggc

SEQ ID NO: 282078 - DNA, 55 bp, Artificial
  Synthetic oligonucleotide
gtatctgggcaagacccagcctccccgttgagtaatgagatgacatgactcggcg

SEQ ID NO: 282079 - DNA, 55 bp, Artificial
  Synthetic oligonucleotide
ccctgaggaagttctggtactattcaacggaccccatcatcattacgtgactccc

SEQ ID NO: 282080 - DNA, 55 bp, Artificial
  Synthetic oligonucleotide
ccctgcatgcagctaccaatggctttcgctgatactatgcatgggtgccgtgaga

SEQ ID NO: 282081 - DNA, 55 bp, Artificial
  Synthetic oligonucleotide
gtatctgtcgctagcgcatcctggtagcctaaatgaggggtacaaggctgtcact

SEQ ID NO: 282082 - DNA, 55 bp, Artificial
  Synthetic oligonucleotide
ccctgtaatgacaggaaacaaattatcactcctctgggtgctgatgcagaccaac

SEQ ID NO: 282083 - DNA, 55 bp, Artificial
  Synthetic oligonucleotide
ccctgtcatagtcattgtaccccagagtaaatgctaacgttcttctaggatcgca

SEQ ID NO: 282084 - DNA, 55 bp, Artificial
  Synthetic oligonucleotide
atgtcccgctcaccaggcagatatcatgcccaggaatcatgtcgagcgtcgcaac

SEQ ID NO: 282085 - DNA, 55 bp, Artificial
  Synthetic oligonucleotide
ccctgtccctaccatccccgctcagtgatttgatcctaccacgaagtcaatctgc

SEQ ID NO: 282086 - DNA, 60 bp, Artificial
  Synthetic oligonucleotide
gtgcctgatagtaagctgttgcatcgggcccgtagctgtgatgcatttcgtgagaatggt

SEQ ID NO: 282087 - DNA, 55 bp, Artificial
  Synthetic oligonucleotide
cccgcagcatccgatcttccgctctgagtttcaagacatggacttgggcatgagc

SEQ ID NO: 282088 - DNA, 55 bp, Artificial
  Synthetic oligonucleotide
ggtatgctgttcgtcgtagacactgtcaaatctgcacaactttgttaaatgccgt

SEQ ID NO: 282089 - DNA, 55 bp, Artificial
  Synthetic oligonucleotide
gtagtccgagtcatcgtaatagggatcacgatggcccatagagtgggatctgcgc

SEQ ID NO: 282090 - DNA, 55 bp, Artificial
  Synthetic oligonucleotide
cccgcatgtattaggcctggctctcgggtctgacaaccctcccaagatcaattca

SEQ ID NO: 282091 - DNA, 55 bp, Artificial
  Synthetic oligonucleotide
atttagtcaagatccaacgaatcagatgtcactacggcctcttagggctctccag

SEQ ID NO: 282092 - DNA, 55 bp, Artificial
  Synthetic oligonucleotide
cccgccagcagtcctagcacagtcccagcggtgattacggaacgctatctagcgg

SEQ ID NO: 282093 - DNA, 55 bp, Artificial
  Synthetic oligonucleotide
cccgccctgcgtgaatgggttctggttgcccactttatcctccttggcctcgtac

SEQ ID NO: 282094 - DNA, 55 bp, Artificial
  Synthetic oligonucleotide
gtagttggcatctgcacgacatctttgtcctccccaacatctcaattccgcccgc

SEQ ID NO: 282095 - DNA, 55 bp, Artificial
  Synthetic oligonucleotide
cccgcctttatcttctagcacgaccagagcaaacgcccagacctggttatcgtag

SEQ ID NO: 282096 - DNA, 53 bp, Artificial
  Synthetic oligonucleotide
cccgctccgcaagtaataccgacgaagggtctcttctaagtgggaaggttcca

SEQ ID NO: 282097 - DNA, 60 bp, Artificial
  Synthetic oligonucleotide
gttatagcgttgaactggtgagtgcttcagagggtgatcattaaacagccggttctgaca

SEQ ID NO: 282098 - DNA, 55 bp, Artificial
  Synthetic oligonucleotide
ggtagctgtccaaatatgatgatggcctgaagtgaagggctgcatcgcctcactc

SEQ ID NO: 282099 - DNA, 55 bp, Artificial
  Synthetic oligonucleotide
attgcggagtccacggtggatagtagatggtccataatcgaatcggcaccacacg

SEQ ID NO: 282100 - DNA, 55 bp, Artificial
  Synthetic oligonucleotide
attgccctagatgccgggaataacagcgaagctaccccgtacgtcttcactacgt

SEQ ID NO: 282101 - DNA, 55 bp, Artificial
  Synthetic oligonucleotide
cccggttctgggctctcgagctaattgacacgaaacttcctgcacctaaccacgg

SEQ ID NO: 282102 - DNA, 55 bp, Artificial
  Synthetic oligonucleotide
attgatgcctgcagcttctaatcgcctcgcaaagatggtaggtaacaggcgcatc

SEQ ID NO: 282103 - DNA, 55 bp, Artificial
  Synthetic oligonucleotide
gtatagggtaacaagctcaggatatgctttctttgccccgactattatcaagacc

SEQ ID NO: 282104 - DNA, 55 bp, Artificial
  Synthetic oligonucleotide
gtataggttggtgaactagaacatacgggtgagccagacggtaatgggcttcagg

SEQ ID NO: 282105 - DNA, 55 bp, Artificial
  Synthetic oligonucleotide
ggtagatactctagtaagttccttaggtattctagtaactcaggctattaggtct

SEQ ID NO: 282106 - DNA, 53 bp, Artificial
  Synthetic oligonucleotide
cccgtcactctccgcggttgggaaaaccaccctttcactctgggatgttacga

SEQ ID NO: 282107 - DNA, 55 bp, Artificial
  Synthetic oligonucleotide
cccgtccatctttggtgtccctgcggatcatctgtcgcgagtcattgagagcgcg

SEQ ID NO: 282108 - DNA, 60 bp, Artificial
  Synthetic oligonucleotide
ctgtcacatattagcttagtcgatcgatatgtacagatcgagctcggtttgcaattcaca

SEQ ID NO: 282109 - DNA, 55 bp, Artificial
  Synthetic oligonucleotide
attcgaaaacaggactccgttacaaaccttcttccgtctattctgaatgctcctc

SEQ ID NO: 282110 - DNA, 55 bp, Artificial
  Synthetic oligonucleotide
cccgtcccctactatttaactggataatagcgtaggcctttatgctaatgtgacc

SEQ ID NO: 282111 - DNA, 55 bp, Artificial
  Synthetic oligonucleotide
cccgttaactcgtggcagcgtaggaagggttccacggatgcggatccagtccttc

SEQ ID NO: 282112 - DNA, 55 bp, Artificial
  Synthetic oligonucleotide
cccgttgaacaaagggactgaaccgtcagttctacactttgacagggtacagcga

SEQ ID NO: 282113 - DNA, 55 bp, Artificial
  Synthetic oligonucleotide
ggtagaacattcgagctgctcgcaccactagcagtcgcgatgtaccgtgtcacgc

SEQ ID NO: 282114 - DNA, 55 bp, Artificial
  Synthetic oligonucleotide
attcacttttcgtcgaattgtcgcatggactccggctgatcgagactgacgtcgc

SEQ ID NO: 282115 - DNA, 54 bp, Artificial
  Synthetic oligonucleotide
caattgacgaaggtttctaaaggaagacgctgtgactacgtaggagggaggtct

SEQ ID NO: 282116 - DNA, 55 bp, Artificial
  Synthetic oligonucleotide
cacacagtgtactaacgtatatccagaattggttccagaatcgccgagcaaaggc

SEQ ID NO: 282117 - DNA, 55 bp, Artificial
  Synthetic oligonucleotide
caatttggcacgtggcttgaaaccaaaccaactcggcacttatacgaactataag

SEQ ID NO: 282118 - DNA, 55 bp, Artificial
  Synthetic oligonucleotide
ggtccaggaaccaaggacagtccccatacggcagcatatctcacccacccgagcc

SEQ ID NO: 282119 - DNA, 60 bp, Artificial
  Synthetic oligonucleotide
attgggttctcaaccctcaatcacgcgcacagagtctatggctaccttatcatcgagttg

SEQ ID NO: 282120 - DNA, 55 bp, Artificial
  Synthetic oligonucleotide
gtagataaccatgaaccacattgtcttgagagtcttgatgtcccgcacgttttcg

SEQ ID NO: 282121 - DNA, 55 bp, Artificial
  Synthetic oligonucleotide
ggtcaagttgtcaagaggtgcatcgtaaaagacgtcacggtaagtcgtgttctct

SEQ ID NO: 282122 - DNA, 55 bp, Artificial
  Synthetic oligonucleotide
caatgctgtcacattagttgcgcctgtacgtttctcgtcaacttgacagctgttc

SEQ ID NO: 282123 - DNA, 55 bp, Artificial
  Synthetic oligonucleotide
caagttctctgcaggagaccgctgcattaccaagttctctgcaggagaccgctgc

SEQ ID NO: 282124 - DNA, 55 bp, Artificial
  Synthetic oligonucleotide
ccccgcatcagagcaatctctcactttgtacgtaaactctacacattgtaccatg

SEQ ID NO: 282125 - DNA, 55 bp, Artificial
  Synthetic oligonucleotide
gtagagctaatcggctgagccctactagggacctgcctagatactgatctaccgc

SEQ ID NO: 282126 - DNA, 55 bp, Artificial
  Synthetic oligonucleotide
caatcgcttcccttattcacctccatctccgtcgttactttataactctctgtct

SEQ ID NO: 282127 - DNA, 55 bp, Artificial
  Synthetic oligonucleotide
cacaaccgatacctcatatattataaccagtttctatgctgtaagctagttgcct

SEQ ID NO: 282128 - DNA, 55 bp, Artificial
  Synthetic oligonucleotide
ccccattgctaatcagatcatcatgacaggcgagacagccaaacaaattttcgag

SEQ ID NO: 282129 - DNA, 55 bp, Artificial
  Synthetic oligonucleotide
cacacagctcttgcgatcgctcaaacatccgctgcaatgcattctcgtcccttgg

SEQ ID NO: 282130 - DNA, 60 bp, Artificial
  Synthetic oligonucleotide
caagtccctctatccccccatccagactgagtcgagctctatttgctgaaacctcgattg

SEQ ID NO: 282131 - DNA, 55 bp, Artificial
  Synthetic oligonucleotide
caatgagtatcactgcttgacgccaacacccactaaatacagatacagctctgcg

SEQ ID NO: 282132 - DNA, 55 bp, Artificial
  Synthetic oligonucleotide
caagttggaggcaacatacgtagactgaaactaaacgaggggcaattctccggtc

SEQ ID NO: 282133 - DNA, 55 bp, Artificial
  Synthetic oligonucleotide
caatcccatggaaccaaaccagacacgctctttggctatccacatgtggccacgt

SEQ ID NO: 282134 - DNA, 55 bp, Artificial
  Synthetic oligonucleotide
caatagggctgcttcacatatgtcgccttatccccaagagatggcagcaagcgta

SEQ ID NO: 282135 - DNA, 55 bp, Artificial
  Synthetic oligonucleotide
cacaatggctctaacgacaccgtaatgaccaataatggggatatcgaccccatga

SEQ ID NO: 282136 - DNA, 55 bp, Artificial
  Synthetic oligonucleotide
ggtcagtcaagaaaagtcgaagcaccgccatcaaatatggaacttgactagacag

SEQ ID NO: 282137 - DNA, 55 bp, Artificial
  Synthetic oligonucleotide
caaggttctgagtcgcacaagttcgtgtggaaggaggtcaaactagcttccactg

SEQ ID NO: 282138 - DNA, 55 bp, Artificial
  Synthetic oligonucleotide
gtagataggctgcgcatactacgactaagtctggatgtccactaacctggcacag

SEQ ID NO: 282139 - DNA, 55 bp, Artificial
  Synthetic oligonucleotide
caatctctcaactactaggcacattgaactactctactagtatcaatcgcgaagg

SEQ ID NO: 282140 - DNA, 55 bp, Artificial
  Synthetic oligonucleotide
gtagagagtcacacgtgtgcgcttagttttcgttagactggagtaagtggtgagg

SEQ ID NO: 282141 - DNA, 56 bp, Artificial
  Synthetic oligonucleotide
ggcataggtagtttcgttggcgtgatgttcctggtaggctctacacagccccgggg

SEQ ID NO: 282142 - DNA, 59 bp, Artificial
  Synthetic oligonucleotide
caagtctggtgagcagagttaacctaagattctagggatgtctattgacgaaaacacta

SEQ ID NO: 282143 - DNA, 55 bp, Artificial
  Synthetic oligonucleotide
caatcggcgtggccccaagcagtaatcttgaccctacgaggaagaatccgtcgct

SEQ ID NO: 282144 - DNA, 55 bp, Artificial
  Synthetic oligonucleotide
ccccgtggtagatgcaactcctgttactcgaaagctacactgggttgctcctcgc

SEQ ID NO: 282145 - DNA, 54 bp, Artificial
  Synthetic oligonucleotide
atgaccagtctaacacgcatggcggacctcaactgcgcgcttgggtatccagct

SEQ ID NO: 282146 - DNA, 54 bp, Artificial
  Synthetic oligonucleotide
acatgcgtttcctctgagactaatctcgagcttattgattcgtgcctacataag

SEQ ID NO: 282147 - DNA, 54 bp, Artificial
  Synthetic oligonucleotide
gaaggataggtaaaagtcgctctgtgtcgttagtcggattcctacagctccgaa

SEQ ID NO: 282148 - DNA, 54 bp, Artificial
  Synthetic oligonucleotide
ctacttgctacagagactagaagatccctccgctaactatacacaagtccagga

SEQ ID NO: 282149 - DNA, 54 bp, Artificial
  Synthetic oligonucleotide
ttcgtatacgtctcgtgctgtcaacgctacaagagaataacggatgcttgtgcc

SEQ ID NO: 282150 - DNA, 54 bp, Artificial
  Synthetic oligonucleotide
agaatgttgatgtcggtcttgtgattcgcgaagacagcggtgagacaagcttgg

SEQ ID NO: 282151 - DNA, 54 bp, Artificial
  Synthetic oligonucleotide
gaagtacgtaagtacgtagtcaatagtagctgtcggttcgggacttgcatcggg

SEQ ID NO: 282152 - DNA, 54 bp, Artificial
  Synthetic oligonucleotide
gctctgtggcggcatcatatgccctcgagtcagcctgtagtccattcctggcac

SEQ ID NO: 282153 - DNA, 57 bp, Artificial
  Synthetic oligonucleotide
ctgtctagaaatcgtcgaactgtaaccaggtcccaattcagcttaccactacgtagc

SEQ ID NO: 282154 - DNA, 54 bp, Artificial
  Synthetic oligonucleotide
gtctttcgggtcagtgcagtttcaaggatctgtgggcccatatacctacagtgt

SEQ ID NO: 282155 - DNA, 54 bp, Artificial
  Synthetic oligonucleotide
attggtaacagatcgccagccattgagattgcagcagcataaacactccgtttc

SEQ ID NO: 282156 - DNA, 54 bp, Artificial
  Synthetic oligonucleotide
cctactaaattcaagcaaggtcctgaattttgtcctggtcgggaggaactctta

SEQ ID NO: 282157 - DNA, 54 bp, Artificial
  Synthetic oligonucleotide
ccaataagacgctgtcgtcaggtgattcctccaacgcgcagaaacatgaacgat

SEQ ID NO: 282158 - DNA, 54 bp, Artificial
  Synthetic oligonucleotide
gtcatttagccgaccttcaatctactgaccatcgagggcttctgtacgaaaatc

SEQ ID NO: 282159 - DNA, 53 bp, Artificial
  Synthetic oligonucleotide
ggcctttcgcctcccggttggtctaagctccgttgggctggtcctagcggttc

SEQ ID NO: 282160 - DNA, 54 bp, Artificial
  Synthetic oligonucleotide
ggggtgatttatgttcgtcggcatggttaggtggcctcaagtcggcccgtggcg

SEQ ID NO: 282161 - DNA, 54 bp, Artificial
  Synthetic oligonucleotide
ggcagctcggcttactgtgttggcctagcttcgcacgaggggatgcaatgactt

SEQ ID NO: 282162 - DNA, 54 bp, Artificial
  Synthetic oligonucleotide
gcgacaaatggcacaattagcggagatgggtatcgctattccggaagaataccg

SEQ ID NO: 282163 - DNA, 54 bp, Artificial
  Synthetic oligonucleotide
accaccagctatggggcccaaagcagtgcggcactacacggggttgatgcagga

SEQ ID NO: 282164 - DNA, 60 bp, Artificial
  Synthetic oligonucleotide
ctgtctgggggcgctacattcgcttattaccactttggagtagtgcgagcgctactggat

SEQ ID NO: 282165 - DNA, 54 bp, Artificial
  Synthetic oligonucleotide
gatatccctggtgttggggactcggagtgggaaggcacctataagaagcctacg

SEQ ID NO: 282166 - DNA, 54 bp, Artificial
  Synthetic oligonucleotide
aggtctgatttcgggtgccgggaatgggtcgtttacgacggagcgactctgtgt

SEQ ID NO: 282167 - DNA, 54 bp, Artificial
  Synthetic oligonucleotide
cctatcgcactccaacgatgcatgagacatgggcaggactggtgtcagcctccc

SEQ ID NO: 282168 - DNA, 54 bp, Artificial
  Synthetic oligonucleotide
gaacgtgaccacaagagccaccttttcgccgtttgcattcaatcgtacctctca

SEQ ID NO: 282169 - DNA, 54 bp, Artificial
  Synthetic oligonucleotide
acattcttggatatggagatccggggcctttaggcgactccgcgctgttccgca

SEQ ID NO: 282170 - DNA, 54 bp, Artificial
  Synthetic oligonucleotide
gaagaacagactggccaagatcttgcggtacttgacagcgcggcggttgttcgg

SEQ ID NO: 282171 - DNA, 54 bp, Artificial
  Synthetic oligonucleotide
aacgcgcttgacagtcatgggccagtgtctggatattgtcgaaggccgaccgga

SEQ ID NO: 282172 - DNA, 54 bp, Artificial
  Synthetic oligonucleotide
accagtggggattttgacacctggattaaccagcagggcacaacatactaagtg

SEQ ID NO: 282173 - DNA, 54 bp, Artificial
  Synthetic oligonucleotide
acttgcacacaattccttcctcgtagcctattggcgatgaatgtgatcattcgc

SEQ ID NO: 282174 - DNA, 54 bp, Artificial
  Synthetic oligonucleotide
cgggtatgatatgatatagaataaacattgccgagagtttcacaggtactccgt

SEQ ID NO: 282175 - DNA, 60 bp, Artificial
  Synthetic oligonucleotide
attggctacgaaggatacatatatggttgacatgtacacaagtacttaaccgtgtcgatg

SEQ ID NO: 282176 - DNA, 54 bp, Artificial
  Synthetic oligonucleotide
cggtaaccatgctattcttccgcttgtcaaattcggtgcccttggttgcagacg

SEQ ID NO: 282177 - DNA, 54 bp, Artificial
  Synthetic oligonucleotide
agaaggtcgcaaaatcaatctcagtgtacgttcggccgactcaacccacccgtt

SEQ ID NO: 282178 - DNA, 54 bp, Artificial
  Synthetic oligonucleotide
ttcgtgatgcccaacggtattacgtggatcttaacagaccattagcgcactttt

SEQ ID NO: 282179 - DNA, 54 bp, Artificial
  Synthetic oligonucleotide
tcgagaaccgtagggaggcgcacaagacaaagggtaaggcggagcgataaagga

SEQ ID NO: 282180 - DNA, 54 bp, Artificial
  Synthetic oligonucleotide
cgacaaagttgtccagagactacagcctcaccacgaggacccgcgtctcaagtc

SEQ ID NO: 282181 - DNA, 54 bp, Artificial
  Synthetic oligonucleotide
cagcgctgtatttcacgagcttaaacgcccttcgaacgggtctcgttcaaacaa

SEQ ID NO: 282182 - DNA, 50 bp, Artificial
  Synthetic oligonucleotide
acaccccattttcggtaagggaccaccgtccattttccgacactatttaa

SEQ ID NO: 282183 - DNA, 54 bp, Artificial
  Synthetic oligonucleotide
cggttgcctcacgaaggcagctcggcttactgtgttggcctagcttcgcacgag

SEQ ID NO: 282184 - DNA, 54 bp, Artificial
  Synthetic oligonucleotide
taaagtaaacagtagatcaggtacttctggagtttttcgttatactgtaacagg

SEQ ID NO: 282185 - DNA, 54 bp, Artificial
  Synthetic oligonucleotide
atcgactgcagccccacgctatactagacgagtcccgctggcctgtgagtcgtg

SEQ ID NO: 282186 - DNA, 60 bp, Artificial
  Synthetic oligonucleotide
cacataagcatccgaatcccgagtacgtcaatggacgagtcctgcatgcgtggctaaaca

SEQ ID NO: 282187 - DNA, 54 bp, Artificial
  Synthetic oligonucleotide
cgaccttgcggaggaattccgtgccagcatcctcgttggacatgtctgctggca

SEQ ID NO: 282188 - DNA, 54 bp, Artificial
  Synthetic oligonucleotide
aagattgtcgtgccccgacgagatttgcccgccgatgctatatcaatcgactca

SEQ ID NO: 282189 - DNA, 54 bp, Artificial
  Synthetic oligonucleotide
gtaaccatcgaccactgaccccactcggtgattgcagtaacctggtcctgagca

SEQ ID NO: 282190 - DNA, 54 bp, Artificial
  Synthetic oligonucleotide
aacgccttgttttgtgagacactggacttcacgatatgtaatcaaaagcatggc

SEQ ID NO: 282191 - DNA, 54 bp, Artificial
  Synthetic oligonucleotide
cgcgtgattggtataggatacacaggtgcggcgctcgcttgtggaatacgttat

SEQ ID NO: 282192 - DNA, 54 bp, Artificial
  Synthetic oligonucleotide
agatctctgcgaaactctctcgttaaattctcatactcaatgatcaaatgaatc

SEQ ID NO: 282193 - DNA, 54 bp, Artificial
  Synthetic oligonucleotide
ggcgcaactagatgccatttgtcgcaatttttgggctggccggggtgggttttg

SEQ ID NO: 282194 - DNA, 54 bp, Artificial
  Synthetic oligonucleotide
acaagtgtgagccgaaggatttcgctctactgaccgctatcctgcagacttcgc

SEQ ID NO: 282195 - DNA, 54 bp, Artificial
  Synthetic oligonucleotide
gttgttgtagacggcatggaaagggctacagaggctatttgcgaatgaggcata

SEQ ID NO: 282196 - DNA, 54 bp, Artificial
  Synthetic oligonucleotide
gctatgttctcccgccatactcctcccttccaaagggatggccgtatgtcggct

SEQ ID NO: 282197 - DNA, 57 bp, Artificial
  Synthetic oligonucleotide
cttgactggtagtaggcctgataggggccgttccaatactggtagtaggcctgatag

SEQ ID NO: 282198 - DNA, 54 bp, Artificial
  Synthetic oligonucleotide
gatgtagtcgcatgccgtgttatttccaatgcaatccccatgacggtcgcactt

SEQ ID NO: 282199 - DNA, 54 bp, Artificial
  Synthetic oligonucleotide
gatgtgagggagcagcgtcctgatgtacgagacagcctttaacaccaccccagc

SEQ ID NO: 282200 - DNA, 54 bp, Artificial
  Synthetic oligonucleotide
cggtgatattggcaacacaatggctcggtaatgcacctcctgagcatgctgacc

SEQ ID NO: 282201 - DNA, 54 bp, Artificial
  Synthetic oligonucleotide
agaccgtcgaagtctttccgtcaaactatccccttgactctcaaacgagcacac

SEQ ID NO: 282202 - DNA, 54 bp, Artificial
  Synthetic oligonucleotide
ggcactctcgacactccggacaccaaccgtgccgtgggaggtagtgacaggatg

SEQ ID NO: 282203 - DNA, 54 bp, Artificial
  Synthetic oligonucleotide
tccggacgctcccttgccaggatattatagatcagccaactactagcgatatag

SEQ ID NO: 282204 - DNA, 54 bp, Artificial
  Synthetic oligonucleotide
atctaacattgtaccttcatgggctatatctgattctgaactaatatcttttgt

SEQ ID NO: 282205 - DNA, 54 bp, Artificial
  Synthetic oligonucleotide
tccggggttcgacgatctgcaacaatctctagcaagctctactgcgagcactcc

SEQ ID NO: 282206 - DNA, 54 bp, Artificial
  Synthetic oligonucleotide
atcgtggttgctggaatccgagattgactcctgcctagtcgactatcccagagc

SEQ ID NO: 282207 - DNA, 54 bp, Artificial
  Synthetic oligonucleotide
ctttgtggtcttatgcatccattgcgagttgtcgctgggaggtccggccttctt

SEQ ID NO: 282208 - DNA, 60 bp, Artificial
  Synthetic oligonucleotide
taaacctgggaattcattcgatgaaagaatatagtggtggcgtcatcaatccattacgga

SEQ ID NO: 282209 - DNA, 54 bp, Artificial
  Synthetic oligonucleotide
gggagagatcttcgatccagcgttaggaactaaaaccttcagatctgaaggtga

SEQ ID NO: 282210 - DNA, 54 bp, Artificial
  Synthetic oligonucleotide
acagaaacctcctataacgcaatagggtatttctccagagtccgataagaatgc

SEQ ID NO: 282211 - DNA, 54 bp, Artificial
  Synthetic oligonucleotide
gcaaaggcccccgatggtcatgcagtaggtacggtcccggaacgatgtgtgaat

SEQ ID NO: 282212 - DNA, 54 bp, Artificial
  Synthetic oligonucleotide
attgtgtagggtgtgtccacgaatggatctgttcgatagtgatatccaaccgga

SEQ ID NO: 282213 - DNA, 54 bp, Artificial
  Synthetic oligonucleotide
ctttgatgcatcatagtgtccctttcttgtctgcaggcttgggagtctccgtgg

SEQ ID NO: 282214 - DNA, 54 bp, Artificial
  Synthetic oligonucleotide
atcggtctaatacgggatagcggcactgggactctcggatgtgacattacagaa

SEQ ID NO: 282215 - DNA, 54 bp, Artificial
  Synthetic oligonucleotide
cggtggttgggggattgtgaaacacgatagtagtcatgattcgggtcattcatc

SEQ ID NO: 282216 - DNA, 54 bp, Artificial
  Synthetic oligonucleotide
ggcgacgcagagtatcaccaggccccaaatcagacgagacgtgcggcttccgga

SEQ ID NO: 282217 - DNA, 54 bp, Artificial
  Synthetic oligonucleotide
agagagggccttttagcggggatacgcctgtaaagggtgtggtactagctatca

SEQ ID NO: 282218 - DNA, 54 bp, Artificial
  Synthetic oligonucleotide
gctcgtgcgatcccccgtccacggcgggtagtagccagcggctcggtccaagtt

SEQ ID NO: 282219 - DNA, 55 bp, Artificial
  Synthetic oligonucleotide
agatactatcgagagccctgtctagggccctttctaagccctattaaagaccctc

SEQ ID NO: 282220 - DNA, 54 bp, Artificial
  Synthetic oligonucleotide
tttatcgacacaactacccggcttccgctaacaatcactagtcctgcgagaaaa

SEQ ID NO: 282221 - DNA, 54 bp, Artificial
  Synthetic oligonucleotide
acctgtgataaagcccgcagggtttcccacgacacatcgcgaatctaggttccg

SEQ ID NO: 282222 - DNA, 54 bp, Artificial
  Synthetic oligonucleotide
gacgcatggactggtcaggacaagttccagtgtaaaacctgtgtcgcaaccatg

SEQ ID NO: 282223 - DNA, 54 bp, Artificial
  Synthetic oligonucleotide
acggacctgccaaatagtaatggctgtacggtgattctagtcctgactgaccga

SEQ ID NO: 282224 - DNA, 54 bp, Artificial
  Synthetic oligonucleotide
agtcaataatccgcctaatggccccgaagctctcagcgacgctcagtgggcatt

SEQ ID NO: 282225 - DNA, 54 bp, Artificial
  Synthetic oligonucleotide
atggacctgcgtatgcaagcccagtccggtataccaacgctggccatcatacct

SEQ ID NO: 282226 - DNA, 54 bp, Artificial
  Synthetic oligonucleotide
cacagacacgttttgtgtcatccttatatattacttccgtcttcccataccgca

SEQ ID NO: 282227 - DNA, 54 bp, Artificial
  Synthetic oligonucleotide
aactcccatcggctttatggactcaaatagtacaatcaaatcacagcttagcta

SEQ ID NO: 282228 - DNA, 54 bp, Artificial
  Synthetic oligonucleotide
acctccgccagtcgctcccaagctgagcggctttggtacgcagggtcgctgctt

SEQ ID NO: 282229 - DNA, 54 bp, Artificial
  Synthetic oligonucleotide
tatcgatcatcccggcccatcgatgctgagagttgacattgattctaattagtt

SEQ ID NO: 282230 - DNA, 58 bp, Artificial
  Synthetic oligonucleotide
agatacgtccatatgatagtacaatttcaggggcaggacccttaggatctaataacta

SEQ ID NO: 282231 - DNA, 54 bp, Artificial
  Synthetic oligonucleotide
ttgtcccttacggattatgatcacttgagcgatgtgttgtattatgagtttgct

SEQ ID NO: 282232 - DNA, 54 bp, Artificial
  Synthetic oligonucleotide
atgctcgctcgctgatacaagtctacctatgtataccagataccgctctatcta

SEQ ID NO: 282233 - DNA, 54 bp, Artificial
  Synthetic oligonucleotide
ttgtccctgccccgacgtgcctgctgtggacgtggccgtctgcactacactctg

SEQ ID NO: 282234 - DNA, 54 bp, Artificial
  Synthetic oligonucleotide
tagacgatatccatagcgtatataagcagagaattccctccgtttcccatggtg

SEQ ID NO: 282235 - DNA, 54 bp, Artificial
  Synthetic oligonucleotide
atgctccactcgcgtaaggacggactacggaggtttccgtactggccactagcc

SEQ ID NO: 282236 - DNA, 54 bp, Artificial
  Synthetic oligonucleotide
cacaattcagccacaggaaacgggaggacaatgttagcgaaccgcatatcgtgg

SEQ ID NO: 282237 - DNA, 54 bp, Artificial
  Synthetic oligonucleotide
tatgcgattatctgacttgcactaaagggcttggacacgtccggctttcaatta

SEQ ID NO: 282238 - DNA, 54 bp, Artificial
  Synthetic oligonucleotide
aaacgttgacaatttcactggtgacagcgcggatgatagcactcttcttatcgt

SEQ ID NO: 282239 - DNA, 54 bp, Artificial
  Synthetic oligonucleotide
tggcctcacgtactgggaacacggtaacatcatcgaaaatggattaatgcccgc

SEQ ID NO: 282240 - DNA, 54 bp, Artificial
  Synthetic oligonucleotide
ccgctcagcgcgactgtcacgacatctcctaggaccacaacgcctcagctcact

SEQ ID NO: 282241 - DNA, 54 bp, Artificial
  Synthetic oligonucleotide
agataccttgggggcccctctacaacatgtctcgggaggagttggtcgtattaa

SEQ ID NO: 282242 - DNA, 54 bp, Artificial
  Synthetic oligonucleotide
acgcactatgaacattcgagcctgaggaaattcacaacattgtacgcatgcgat

SEQ ID NO: 282243 - DNA, 54 bp, Artificial
  Synthetic oligonucleotide
tggacttggcgggacggttgggtgctgagccgtggaatttccagacgcaggcag

SEQ ID NO: 282244 - DNA, 54 bp, Artificial
  Synthetic oligonucleotide
tttggcaggtctttggcctagcactaactagtaatacatgagtggtgtgcagcc

SEQ ID NO: 282245 - DNA, 54 bp, Artificial
  Synthetic oligonucleotide
tagtcggccttagtctagcagccgctacggtgagtctaaatcggtagaggatcc

SEQ ID NO: 282246 - DNA, 52 bp, Artificial
  Synthetic oligonucleotide
atggttggttccaccgtactttttgccccttcagtccatcggccgtgtttag

SEQ ID NO: 282247 - DNA, 54 bp, Artificial
  Synthetic oligonucleotide
acgagtcccgctggcctgtgagtcgtgtaggcaacggaagacgaaatgtagcgg

SEQ ID NO: 282248 - DNA, 54 bp, Artificial
  Synthetic oligonucleotide
catccagatgtcgccgtggaaaatacacattacgattgttctgaacaaccctgc

SEQ ID NO: 282249 - DNA, 54 bp, Artificial
  Synthetic oligonucleotide
catccaaggtcgaacagtaactcggtgatgcgcttagggtttgcggactataaa

SEQ ID NO: 282250 - DNA, 54 bp, Artificial
  Synthetic oligonucleotide
taggcttgagtgacttgcaatcgccgattgaagctctgacttcgactacgcaag

SEQ ID NO: 282251 - DNA, 54 bp, Artificial
  Synthetic oligonucleotide
tgcttcgcacatacccgaaatctgcattacgctcgacggacctatatgtgaccg

SEQ ID NO: 282252 - DNA, 53 bp, Artificial
  Synthetic oligonucleotide
accgttcggagaccctcggactcggaacggatacagttcggagagttgtataa

SEQ ID NO: 282253 - DNA, 60 bp, Artificial
  Synthetic oligonucleotide
gagcactagtaatggtgaacttcggatcggccgacgataagatcgactctaagatagcga

SEQ ID NO: 282254 - DNA, 59 bp, Artificial
  Synthetic oligonucleotide
aggcgtcaaccgagtgagtgacgaaatcagtacgacttctgcgtaccatggataactaa

SEQ ID NO: 282255 - DNA, 54 bp, Artificial
  Synthetic oligonucleotide
cggccccaatgggtccatccagcttcccatctacatccggcttctcgtacctgg

SEQ ID NO: 282256 - DNA, 54 bp, Artificial
  Synthetic oligonucleotide
ggccaacaccctgtgcctattgggctggcttttacatgccgcagtatttactgc

SEQ ID NO: 282257 - DNA, 54 bp, Artificial
  Synthetic oligonucleotide
tagctttctctcctggaagagttcacctgtaggcttctccttgcccacgtagcc

SEQ ID NO: 282258 - DNA, 54 bp, Artificial
  Synthetic oligonucleotide
aaaatcccgatttgaacgacgctccacgggcatctggttatttcggaggcgctt

SEQ ID NO: 282259 - DNA, 54 bp, Artificial
  Synthetic oligonucleotide
atggtaaaaggcgtaagacgcatgcttctcgacaatcggtctctgggcgtatag

SEQ ID NO: 282260 - DNA, 54 bp, Artificial
  Synthetic oligonucleotide
atgggccaggcagacggaatgtataaggtaaccatgatacctagcgctttgtct

SEQ ID NO: 282261 - DNA, 54 bp, Artificial
  Synthetic oligonucleotide
atggcggacctcaactgcgcgcttgggtatccagctcatgggacgcgtatcgag

SEQ ID NO: 282262 - DNA, 54 bp, Artificial
  Synthetic oligonucleotide
gacggctcccgtttcatctctaccttggcgaatcacccacccccacgtccaagt

SEQ ID NO: 282263 - DNA, 54 bp, Artificial
  Synthetic oligonucleotide
catatcgcaagctcctttcggactttgggtgttcgtcgcctggcgattgagttg

SEQ ID NO: 282264 - DNA, 54 bp, Artificial
  Synthetic oligonucleotide
gagacggagaattggcggctggcgcacaagttcctaccaccagctatggggccc

SEQ ID NO: 282265 - DNA, 58 bp, Artificial
  Synthetic oligonucleotide
cgcgattatactctcatcagaggatcaaccggtccccttgtctacccggccgcccatg

SEQ ID NO: 282266 - DNA, 54 bp, Artificial
  Synthetic oligonucleotide
tagcgacaaggttacaggtaaggatagtttacgtacatacaaagagggcattcg

SEQ ID NO: 282267 - DNA, 54 bp, Artificial
  Synthetic oligonucleotide
gtctcgtgtgtacctgagtatataggggactctaggggtccgcagagtatctgc

SEQ ID NO: 282268 - DNA, 54 bp, Artificial
  Synthetic oligonucleotide
gagtctggtttccctatgttcggtgtttcctccgaaattctcgctctgtccatg

SEQ ID NO: 282269 - DNA, 54 bp, Artificial
  Synthetic oligonucleotide
tacgagagctgaatagtgggacagacccatcaccaagtaccgtgcatgaaatcc

SEQ ID NO: 282270 - DNA, 54 bp, Artificial
  Synthetic oligonucleotide
tggctacgcaagtccatctgcttaatagccacctgcgtacggggaccgtactgc

SEQ ID NO: 282271 - DNA, 54 bp, Artificial
  Synthetic oligonucleotide
tcatccattattcaaatgcattccggcctaaagctacaagcaagtgcggctggt

SEQ ID NO: 282272 - DNA, 54 bp, Artificial
  Synthetic oligonucleotide
gaattgagcctgtcacaattctcgccaaagttcgacgtctgagcattccacgag

SEQ ID NO: 282273 - DNA, 54 bp, Artificial
  Synthetic oligonucleotide
taccttactaacctgtggcgcagtccaacacccggcatgatggaatcggctgca

SEQ ID NO: 282274 - DNA, 54 bp, Artificial
  Synthetic oligonucleotide
ctatgtcagagcgagtatactggttgcctttcgcaactcggaggaggctatgct

SEQ ID NO: 282275 - DNA, 54 bp, Artificial
  Synthetic oligonucleotide
gagttttgttatcgttatgggtataaaaagagctcggatacggactgcaccggg

SEQ ID NO: 282276 - DNA, 52 bp, Artificial
  Synthetic oligonucleotide
gggctagttagcaaggggtttcggttcgaaaggctgaacgggaattcgatac

SEQ ID NO: 282277 - DNA, 54 bp, Artificial
  Synthetic oligonucleotide
ttgcatgagacagacagcctgtcaatcccaggaaggcctaaatcccgtagctgg

SEQ ID NO: 282278 - DNA, 54 bp, Artificial
  Synthetic oligonucleotide
actgaggctgggttacacatgggaggggtaatgacgtatcttatcgacaattga

SEQ ID NO: 282279 - DNA, 54 bp, Artificial
  Synthetic oligonucleotide
acccgacctacgatagtagcctagcgcagtccacaacacggcagaactactccc

SEQ ID NO: 282280 - DNA, 54 bp, Artificial
  Synthetic oligonucleotide
ggttgcgctattccgtttgatttatgtcatgacgcaggttccacgtgacccttg

SEQ ID NO: 282281 - DNA, 54 bp, Artificial
  Synthetic oligonucleotide
aaaggcggaattggctgagcttcctgccaatattggcgcgtgggattctagcca

SEQ ID NO: 282282 - DNA, 54 bp, Artificial
  Synthetic oligonucleotide
actgcagtagtagtaagacagcgaactggacattactagcgggacgttatatta

SEQ ID NO: 282283 - DNA, 54 bp, Artificial
  Synthetic oligonucleotide
ccaaaagcatgcgccatatttgatgtacttttctccgagagctcctccggtgga

SEQ ID NO: 282284 - DNA, 54 bp, Artificial
  Synthetic oligonucleotide
attccgcgacagcgatcgactgcagccccacgctatactagacgagtcccgctg

SEQ ID NO: 282285 - DNA, 54 bp, Artificial
  Synthetic oligonucleotide
attcctgtacgttcccctgaatgagattccctgttatgtatagctagcttaact

SEQ ID NO: 282286 - DNA, 54 bp, Artificial
  Synthetic oligonucleotide
ggtagagaagtcctgtgagtgttcgctttgccggtgcgttggtgttgtccgtat

SEQ ID NO: 282287 - DNA, 60 bp, Artificial
  Synthetic oligonucleotide
cgcgaggatactcggatatgtcgcttggaaaccctcagatgagccctcgtgccgacgcac

SEQ ID NO: 282288 - DNA, 54 bp, Artificial
  Synthetic oligonucleotide
acgtcagcacagagtgcgcattcgtgatgcgagagggaggagtagggcgggtgg

SEQ ID NO: 282289 - DNA, 54 bp, Artificial
  Synthetic oligonucleotide
cggcaaggatttaggggcccgagtgtttcacacaaagatcggaacttggctgtc

SEQ ID NO: 282290 - DNA, 54 bp, Artificial
  Synthetic oligonucleotide
cccttttcgtatctcacgatatcagttaatggggtatcgagcaatgactccgtt

SEQ ID NO: 282291 - DNA, 54 bp, Artificial
  Synthetic oligonucleotide
ccgctaatggggctctctctagggctccctataaatactattagaggccccgtc

SEQ ID NO: 282292 - DNA, 54 bp, Artificial
  Synthetic oligonucleotide
ggctgctcctattttccgagccactgtgcattcgtacacaactctgccaaattc

SEQ ID NO: 282293 - DNA, 54 bp, Artificial
  Synthetic oligonucleotide
cgggcgtttctgcgaacagtggtgtcagttgggaggtatggaagacgaagcgac

SEQ ID NO: 282294 - DNA, 54 bp, Artificial
  Synthetic oligonucleotide
ggtgtacaaacgtgccctgatgcggagcagacataccgtccttccctctcgagg

SEQ ID NO: 282295 - DNA, 54 bp, Artificial
  Synthetic oligonucleotide
gcttctcaggggctattgcatttgctattcacttgacaaccgggttttgcgaca

SEQ ID NO: 282296 - DNA, 54 bp, Artificial
  Synthetic oligonucleotide
ggggtccagagcacgtgacatccacggagcgtcgatcccgcccgatatccgatt

SEQ ID NO: 282297 - DNA, 54 bp, Artificial
  Synthetic oligonucleotide
aaacttacataatccgagggtggcatggaccgatggcaaggtctagacgttgac

SEQ ID NO: 282298 - DNA, 60 bp, Artificial
  Synthetic oligonucleotide
agagtatttcgtttgaatatcccaggatacgtaatatatggatcgtaatgtcaggtgctg

SEQ ID NO: 282299 - DNA, 54 bp, Artificial
  Synthetic oligonucleotide
tactatcacggaacacgacatggaggatatgtgagtactccaggatactagtac

SEQ ID NO: 282300 - DNA, 54 bp, Artificial
  Synthetic oligonucleotide
gacaggttctgggtttggagtcaagcgctcggtcttggagactctcctccggga

SEQ ID NO: 282301 - DNA, 54 bp, Artificial
  Synthetic oligonucleotide
aactcgactatatcgctagcttaggggtagacgtcgtgtggctctgtcccatgt

SEQ ID NO: 282302 - DNA, 54 bp, Artificial
  Synthetic oligonucleotide
gacaggataatgggagtgtggtttctcgacgcaagggccgagacaatcgatgct

SEQ ID NO: 282303 - DNA, 54 bp, Artificial
  Synthetic oligonucleotide
tcaccactagtccgtctatttacttcagctactcgttggtaacttcgaggtacc

SEQ ID NO: 282304 - DNA, 54 bp, Artificial
  Synthetic oligonucleotide
ttggaggacttcgtagtgtgggcttttcacgaccgaggcgtatgctttcgtcga

SEQ ID NO: 282305 - DNA, 54 bp, Artificial
  Synthetic oligonucleotide
ggtgggcgcttgcattggaacacgaactgttgcccatcgtggatctacttcttg

SEQ ID NO: 282306 - DNA, 54 bp, Artificial
  Synthetic oligonucleotide
gacacagcctgttcctctagattcccgtaaagcaaaacaacagtcaagatgtga

SEQ ID NO: 282307 - DNA, 54 bp, Artificial
  Synthetic oligonucleotide
ccttggactagattatcgtcgtcatatcatggtgggcacctcccagtgagcgat

SEQ ID NO: 282308 - DNA, 54 bp, Artificial
  Synthetic oligonucleotide
ttacagcgacaacgatgttagtatagtccacctcatttcggacgaagggcacat

SEQ ID NO: 282309 - DNA, 56 bp, Artificial
  Synthetic oligonucleotide
agagtattacaagcgcaacgaggatcaggtccctttacaggtaagctacaaggaat

SEQ ID NO: 282310 - DNA, 52 bp, Artificial
  Synthetic oligonucleotide
ccccgggatttaagcccccgccgaaggctcctcgtctccgttcatgggacga

SEQ ID NO: 282311 - DNA, 54 bp, Artificial
  Synthetic oligonucleotide
ctggtcaaaatttcggtctccagaagagatagtatgggatatcccgtagacctc

SEQ ID NO: 282312 - DNA, 54 bp, Artificial
  Synthetic oligonucleotide
cgattatagaaagtagctagcactgggggcttattctacgacaaatcgaaagcg

SEQ ID NO: 282313 - DNA, 54 bp, Artificial
  Synthetic oligonucleotide
aggctaatattcgcagctccgtgggtggagcccaaatactcggacattctctcc

SEQ ID NO: 282314 - DNA, 54 bp, Artificial
  Synthetic oligonucleotide
cgagtctgcgtggatccaacgatttctcaaaatgcactacttgagggaacgggg

SEQ ID NO: 282315 - DNA, 54 bp, Artificial
  Synthetic oligonucleotide
tctaaacgatctaccgcctaagatcattcagaactactactgtgaccctagtga

SEQ ID NO: 282316 - DNA, 54 bp, Artificial
  Synthetic oligonucleotide
ccgtccacacttcatacccatcagatacctcagggtgggcgcttaatttaactt

SEQ ID NO: 282317 - DNA, 54 bp, Artificial
  Synthetic oligonucleotide
ttaatatgctgacatttagactcaaagtgacagccaaactgccgagttatcagg

SEQ ID NO: 282318 - DNA, 54 bp, Artificial
  Synthetic oligonucleotide
ccccgctgttacccaatcgacgaaaattcggacgactatgccattgtacggaca

SEQ ID NO: 282319 - DNA, 54 bp, Artificial
  Synthetic oligonucleotide
ctgagtccacgcagccacaaatcagatccggctcttgtagtcttaggggaggcc

SEQ ID NO: 282320 - DNA, 59 bp, Artificial
  Synthetic oligonucleotide
cttgcttcccgcgagggcttccagtacagcccaccagttattcgcagcgagcggatccc

SEQ ID NO: 282321 - DNA, 54 bp, Artificial
  Synthetic oligonucleotide
aatgaggcattctcggagatccgtttgatagcctccgcaaccttaccgttgggg

SEQ ID NO: 282322 - DNA, 53 bp, Artificial
  Synthetic oligonucleotide
cactccccaactcgtttatgtccgcaaaccactcgaccgggaaccctacggca

SEQ ID NO: 282323 - DNA, 54 bp, Artificial
  Synthetic oligonucleotide
ggggaaagttaactaactatacgagagcgatattcccatgatcacggtcagtcg

SEQ ID NO: 282324 - DNA, 54 bp, Artificial
  Synthetic oligonucleotide
atatgggatcaagcgggcttgagaactgggtaatacttgtgatttatacgtgtt

SEQ ID NO: 282325 - DNA, 54 bp, Artificial
  Synthetic oligonucleotide
gccctctactgacaataactcagctaatactcctagatggccgacttcgcatcg

SEQ ID NO: 282326 - DNA, 54 bp, Artificial
  Synthetic oligonucleotide
ctctttgctacgacccgtagtaaccacttcgatgtcacgggatacattacggcg

SEQ ID NO: 282327 - DNA, 54 bp, Artificial
  Synthetic oligonucleotide
gttcattgttccgaagggtcatcattggatacatagaaggggccctagttagat

SEQ ID NO: 282328 - DNA, 54 bp, Artificial
  Synthetic oligonucleotide
gcatagtccacaatccttaaacgcactacctgggtgactttaaccctgcagacg

SEQ ID NO: 282329 - DNA, 54 bp, Artificial
  Synthetic oligonucleotide
agctaaactacgatcgatcggcgggaatctccaactgtaacttaagcagtgaaa

SEQ ID NO: 282330 - DNA, 54 bp, Artificial
  Synthetic oligonucleotide
caccgcgcacgacactcaacccgcctattaaagtcctgcggcgccaccttccat

SEQ ID NO: 282331 - DNA, 60 bp, Artificial
  Synthetic oligonucleotide
taaatacagtactagatatagatagccgggagctcaataatttccgtccccagatcatag

SEQ ID NO: 282332 - DNA, 54 bp, Artificial
  Synthetic oligonucleotide
gttatgtaggcccaggagtagtgtaggatagctcgggccattcttatgagccta

SEQ ID NO: 282333 - DNA, 54 bp, Artificial
  Synthetic oligonucleotide
aatggcaagtacctcacttccatacgttctggcaggatacagacgcccagaaga

SEQ ID NO: 282334 - DNA, 54 bp, Artificial
  Synthetic oligonucleotide
ggtcaatcagaccttttccagtgaccctccaactcagcgtccataatgggagtg

SEQ ID NO: 282335 - DNA, 54 bp, Artificial
  Synthetic oligonucleotide
ttacggtaaccccgatccctgctggacgagtattgttacgactacagacgttga

SEQ ID NO: 282336 - DNA, 54 bp, Artificial
  Synthetic oligonucleotide
ggtcagtatagtttcaatgtgcagacgtaacaaggaagcgcaaacgtaccttct

SEQ ID NO: 282337 - DNA, 54 bp, Artificial
  Synthetic oligonucleotide
gcatctctagttgtgtagtggtcatacgtaggtagcccgcattgaggtagtacg

SEQ ID NO: 282338 - DNA, 54 bp, Artificial
  Synthetic oligonucleotide
cccctgccctgaatctcaaatcggaacgctaacttgggtacccgctgccaggca

SEQ ID NO: 282339 - DNA, 54 bp, Artificial
  Synthetic oligonucleotide
tgactgcatgattcgctgctcatctatcagtagccgtccatagacgtctagtta

SEQ ID NO: 282340 - DNA, 54 bp, Artificial
  Synthetic oligonucleotide
tcgtgagcttacgatatttgtaggctgagtcggagctctctgagattaagggtc

SEQ ID NO: 282341 - DNA, 54 bp, Artificial
  Synthetic oligonucleotide
gcatgctgtaccatttggttggacaggccttctcggatggtctttttctcgcgc

SEQ ID NO: 282342 - DNA, 56 bp, Artificial
  Synthetic oligonucleotide
caccaaagtcgcaagtcaaagcatcgcccacgttttccgcgggtgccaagaatacc

SEQ ID NO: 282343 - DNA, 54 bp, Artificial
  Synthetic oligonucleotide
tgagtcgattgatatagcatcggcgggcaaatctcatcggggcacgacaatctt

SEQ ID NO: 282344 - DNA, 54 bp, Artificial
  Synthetic oligonucleotide
ccaggtcccaaggcgctctagtgagctgcaggttagccagcagtagctacccga

SEQ ID NO: 282345 - DNA, 54 bp, Artificial
  Synthetic oligonucleotide
ccccttgatggtctctccacttcccaaccgtattacggaggctgacaacgaaaa

SEQ ID NO: 282346 - DNA, 54 bp, Artificial
  Synthetic oligonucleotide
ctggaacatcagtataccatactgactagacaagcgcgaccctggcgggggagt

SEQ ID NO: 282347 - DNA, 54 bp, Artificial
  Synthetic oligonucleotide
atatacgcacagggaatgaaccatcacgtggagcatgcggggagagaaagaggg

SEQ ID NO: 282348 - DNA, 54 bp, Artificial
  Synthetic oligonucleotide
gcgtagtgtagtgcgggtccgaagctgagtgtgttggtatagaactccgtcagg

SEQ ID NO: 282349 - DNA, 54 bp, Artificial
  Synthetic oligonucleotide
ctgctcgtccattgtagcccaattctctgtagatcgctgctcgctggaatcggg

SEQ ID NO: 282350 - DNA, 54 bp, Artificial
  Synthetic oligonucleotide
cgccctcaagcaaggaaaacggatctagttgggcagatccgatctctctagttg

SEQ ID NO: 282351 - DNA, 54 bp, Artificial
  Synthetic oligonucleotide
cgatgctaggaagaattagtggcgctctttacgaggacgaaacacacttactgg

SEQ ID NO: 282352 - DNA, 54 bp, Artificial
  Synthetic oligonucleotide
gccccagttcacgtagcctccttcgacgctgagattcactccgtaggccggggc

SEQ ID NO: 282353 - DNA, 60 bp, Artificial
  Synthetic oligonucleotide
ctcctcgtctgtgagtcccaagcagcgcgacgtcagagtacgaagagaatcgcgcgtcgt

SEQ ID NO: 282354 - DNA, 54 bp, Artificial
  Synthetic oligonucleotide
ctcgactgaggaattgtctggtccgttccaacaactaccgaatgttggtacgga

SEQ ID NO: 282355 - DNA, 54 bp, Artificial
  Synthetic oligonucleotide
agcgctagtccataaagagtcgggggtccagagcacgtgacatccacggagcgt

SEQ ID NO: 282356 - DNA, 54 bp, Artificial
  Synthetic oligonucleotide
atagttgactacaacatcgcactacgtactatctcgtactggtactactccgta

SEQ ID NO: 282357 - DNA, 54 bp, Artificial
  Synthetic oligonucleotide
agcgcctgcacttggccctggtcaaaataaccactccgcagcttctcgatgact

SEQ ID NO: 282358 - DNA, 54 bp, Artificial
  Synthetic oligonucleotide
tgtgtgctgggttctcgactgtacctgtatggaggcctattatcgttgcatagc

SEQ ID NO: 282359 - DNA, 54 bp, Artificial
  Synthetic oligonucleotide
ggcgtggctcctatcacgatatccgagctaggtaccgcatcaagaatgtatcta

SEQ ID NO: 282360 - DNA, 54 bp, Artificial
  Synthetic oligonucleotide
ggtgatgcctcgaagataccctcaagaggatgtgcaaggtctcgaaccagcggt

SEQ ID NO: 282361 - DNA, 53 bp, Artificial
  Synthetic oligonucleotide
ccagtcaacttcggttgcgaaagttttcgtcctccctaacacgcagtcctacc

SEQ ID NO: 282362 - DNA, 52 bp, Artificial
  Synthetic oligonucleotide
aacccgtcaaacggacatttcctagcgaactcaatccctactaaaccttgcc

SEQ ID NO: 282363 - DNA, 54 bp, Artificial
  Synthetic oligonucleotide
caaccgatcccaagatacagtctattggtaggaatcgatctctcaaacctataa

SEQ ID NO: 282364 - DNA, 60 bp, Artificial
  Synthetic oligonucleotide
cgacctcggttctgcttgtgtgctggctcgcaaggctccaacccctaccatcttagtcta

SEQ ID NO: 282365 - DNA, 60 bp, Artificial
  Synthetic oligonucleotide
cttggtcgtggctagccgaacccaaatgtcagacgtgcattacatctcacgtgttggaat

SEQ ID NO: 282366 - DNA, 54 bp, Artificial
  Synthetic oligonucleotide
gggcgtcagactggtcagacggatcgcaatgcagggaggacaagagctccaaga

SEQ ID NO: 282367 - DNA, 54 bp, Artificial
  Synthetic oligonucleotide
gcccgtagtcggtggatgtgagtgcttcaggtgcaaactagccaggagtcagac

SEQ ID NO: 282368 - DNA, 54 bp, Artificial
  Synthetic oligonucleotide
cgataggggagcgtcaattgacagcctgttctccctttttttccaactgatact

SEQ ID NO: 282369 - DNA, 54 bp, Artificial
  Synthetic oligonucleotide
aggcggcggagtcatcatttggcattgaaggcgcctcgagtactacaagtgacg

SEQ ID NO: 282370 - DNA, 54 bp, Artificial
  Synthetic oligonucleotide
tcttcagagtccacagctgggattataaatagccgagcttgaccaatgtattgc

SEQ ID NO: 282371 - DNA, 54 bp, Artificial
  Synthetic oligonucleotide
gtagccattcagaaccagtgccttcggtactagtatgaggagatcccgtatatt

SEQ ID NO: 282372 - DNA, 54 bp, Artificial
  Synthetic oligonucleotide
agcgacatttgatgaggagggtatattgaggttcgcaacggtgtttcgcacggc

SEQ ID NO: 282373 - DNA, 54 bp, Artificial
  Synthetic oligonucleotide
aacccccggaatcacagcaccaacgcaatagcgacagccacccgattcgaagat

SEQ ID NO: 282374 - DNA, 54 bp, Artificial
  Synthetic oligonucleotide
ggagccttttcacaacggaccgtgaccttggcttgcgagatcccagtaactaca

SEQ ID NO: 282375 - DNA, 54 bp, Artificial
  Synthetic oligonucleotide
gtgagtgaggccaactggacaggcccacgtggcaccaaagggagagacaccaca

SEQ ID NO: 282376 - DNA, 59 bp, Artificial
  Synthetic oligonucleotide
attctaccttggagtgccctcatgttaaatttatgatatagtctaactaatcatgttta

SEQ ID NO: 282377 - DNA, 54 bp, Artificial
  Synthetic oligonucleotide
tctcggtttactgaactttatgtacactccccagatagtgaccgggacgatcta

SEQ ID NO: 282378 - DNA, 54 bp, Artificial
  Synthetic oligonucleotide
gccagagccactgggacttccgaaccagaccaatagggtagcagactgtatatg

SEQ ID NO: 282379 - DNA, 54 bp, Artificial
  Synthetic oligonucleotide
aatccatgggcctcatggcccgtggcgaggtctatcaatgtctcaccaacgtag

SEQ ID NO: 282380 - DNA, 54 bp, Artificial
  Synthetic oligonucleotide
aagtttcgatcgtcacattcgaacccccatcttgctaacccgggcctatacaga

SEQ ID NO: 282381 - DNA, 54 bp, Artificial
  Synthetic oligonucleotide
aacgagtcgaaggtctcccgtggtcgcgtaggtgtgaagccaaccagtctcagc

SEQ ID NO: 282382 - DNA, 54 bp, Artificial
  Synthetic oligonucleotide
ctctcgcccggcaagagtatctcgtgtcattctttggcgatcgttaacaatccg

SEQ ID NO: 282383 - DNA, 54 bp, Artificial
  Synthetic oligonucleotide
cccctgatgggccattatagtgttaggggccttataacctgcctcactacctta

SEQ ID NO: 282384 - DNA, 54 bp, Artificial
  Synthetic oligonucleotide
gtagatgagttggtggagtccggaaccccgtacttgcccgagggggtgtggctg

SEQ ID NO: 282385 - DNA, 54 bp, Artificial
  Synthetic oligonucleotide
aagcttgaactgcctggcactctgccgagtagatggaagcttttcaagtgatac

SEQ ID NO: 282386 - DNA, 54 bp, Artificial
  Synthetic oligonucleotide
ggtgacacagagacggagaattggcggctggcgcacaagttcctaccaccagct

SEQ ID NO: 282387 - DNA, 60 bp, Artificial
  Synthetic oligonucleotide
taacagaatagcacaaatatttcgatacttgtagggcacggagctattgcgccattacga

SEQ ID NO: 282388 - DNA, 54 bp, Artificial
  Synthetic oligonucleotide
ctcccccattgggccacttccgcccgtcacttgtatacggccttcccagcctcc

SEQ ID NO: 282389 - DNA, 54 bp, Artificial
  Synthetic oligonucleotide
aattgtaatcagggacataggactgtagccctcatggggtaagcattcatttgg

SEQ ID NO: 282390 - DNA, 54 bp, Artificial
  Synthetic oligonucleotide
atccgtatgagatgggaccccgccaaggtagaggctggcatagaagagtagagt

SEQ ID NO: 282391 - DNA, 54 bp, Artificial
  Synthetic oligonucleotide
gtccctatcaaatccgctgcgacacaactttcccttccgatccatgagatagat

SEQ ID NO: 282392 - DNA, 54 bp, Artificial
  Synthetic oligonucleotide
agggcgacgacagcgctagtccataaagagtcgggggtccagagcacgtgacat

SEQ ID NO: 282393 - DNA, 54 bp, Artificial
  Synthetic oligonucleotide
ggcgcctgctaatcttcagaagttcggtgtgacaggcgtgcctggatggctgta

SEQ ID NO: 282394 - DNA, 54 bp, Artificial
  Synthetic oligonucleotide
gcagatgcaagcaggccctcgggtcgaccacaagggtgctgcacacccgttcat

SEQ ID NO: 282395 - DNA, 54 bp, Artificial
  Synthetic oligonucleotide
ggtcgtcagcatcaatctcccttggtcatcagacagctactcactaatcttgac

SEQ ID NO: 282396 - DNA, 52 bp, Artificial
  Synthetic oligonucleotide
aatttatgggctgcgggcgtgtctccccgaaactttgccgaccctaccaagt

SEQ ID NO: 282397 - DNA, 54 bp, Artificial
  Synthetic oligonucleotide
aatttgcaacatctagggcacaagcctgactctcagatcgctttctgacaaggt

SEQ ID NO: 282398 - DNA, 58 bp, Artificial
  Synthetic oligonucleotide
aggctccgtggttcctcctcgtccttatgaccctgatgcgactcgatcctcaacacgg

SEQ ID NO: 282399 - DNA, 53 bp, Artificial
  Synthetic oligonucleotide
ccgttacagcccggcttgacacaacccctggtacagccataccgacaaacccc

SEQ ID NO: 282400 - DNA, 54 bp, Artificial
  Synthetic oligonucleotide
tgacagagggggaagactgtggtccgatccttgccttgcagctctagcttgcga

SEQ ID NO: 282401 - DNA, 54 bp, Artificial
  Synthetic oligonucleotide
ggatcaaatggaaagagaccactcaaccaggcggactgtatattgcagcgtgta

SEQ ID NO: 282402 - DNA, 54 bp, Artificial
  Synthetic oligonucleotide
acaaacattgcggcgcagtcattagtttggcatgagcgagggctagcaaggagt

SEQ ID NO: 282403 - DNA, 54 bp, Artificial
  Synthetic oligonucleotide
cgagacgcctaggtactccctccgaatcttcgctatccactgttcgtctatcac

SEQ ID NO: 282404 - DNA, 54 bp, Artificial
  Synthetic oligonucleotide
cttaggatgtgtttctgtacgctaacgaatccgaagtcgtgggacggacagact

SEQ ID NO: 282405 - DNA, 54 bp, Artificial
  Synthetic oligonucleotide
gggcgtggaggcaaagaagccttgttgacagttagcgtcgtagtctatatttcc

SEQ ID NO: 282406 - DNA, 54 bp, Artificial
  Synthetic oligonucleotide
cgactttccgcacagtcttggtggatgctttgacctcgtcatatgcgacgaggc

SEQ ID NO: 282407 - DNA, 54 bp, Artificial
  Synthetic oligonucleotide
gcagacactggtttcgaacggtccgaatgaacacccgggtgctcggtatattgt

SEQ ID NO: 282408 - DNA, 54 bp, Artificial
  Synthetic oligonucleotide
agggccaattactcacaatgacgtgcttggattcgtaacggggctgagcaaagt

SEQ ID NO: 282409 - DNA, 60 bp, Artificial
  Synthetic oligonucleotide
aggctgatcactctgtgctcgatgtaagagcgcttggcgaatcgacggccctcgtagtgt

SEQ ID NO: 282410 - DNA, 54 bp, Artificial
  Synthetic oligonucleotide
agtttaagcacccccaatttgcgcaagccgcttacgggtctactgaccctccgc

SEQ ID NO: 282411 - DNA, 54 bp, Artificial
  Synthetic oligonucleotide
agggatatgggatgtttctgtattccaggatgtcaatctgacataacggtgctg

SEQ ID NO: 282412 - DNA, 54 bp, Artificial
  Synthetic oligonucleotide
ttcagtctgagtttaggtaagtctaacccctattagtggctaagctgctcagta

SEQ ID NO: 282413 - DNA, 54 bp, Artificial
  Synthetic oligonucleotide
cgctcatagcccgggctgtctgcgtgcgttgtgacgagagcgtcgtagatggct

SEQ ID NO: 282414 - DNA, 54 bp, Artificial
  Synthetic oligonucleotide
agctccgaccctctcgaaatgcaaatgtcccttgttacgtgaagatggactgtg

SEQ ID NO: 282415 - DNA, 54 bp, Artificial
  Synthetic oligonucleotide
gttcctacccatggaccccagccctactgcgtatgtgggaggaatggtcgcgac

SEQ ID NO: 282416 - DNA, 54 bp, Artificial
  Synthetic oligonucleotide
gcggcatggtttgcaaaggagtcggacaggtggccttcactctcgctgactgca

SEQ ID NO: 282417 - DNA, 54 bp, Artificial
  Synthetic oligonucleotide
atacacggctgctaccgaattaccgtatgtgccggggcacagcatcccagttga

SEQ ID NO: 282418 - DNA, 54 bp, Artificial
  Synthetic oligonucleotide
gcagtagacccgggtccatggacgtaccacgccagagaaaacggaccttgtccg

SEQ ID NO: 282419 - DNA, 54 bp, Artificial
  Synthetic oligonucleotide
cgtcgagatagttaagttccgatggagaggagtcaacctccgaatgaaagtggt

SEQ ID NO: 282420 - DNA, 60 bp, Artificial
  Synthetic oligonucleotide
cgcctgctgagctaataccaccaaggccacgacagacaaccatcgttgcgaagttaggag

SEQ ID NO: 282421 - DNA, 54 bp, Artificial
  Synthetic oligonucleotide
tgtcgttttcaaaccttgtttctgaccttgcgttcagagacgctcaggatgacc

SEQ ID NO: 282422 - DNA, 54 bp, Artificial
  Synthetic oligonucleotide
tgacctaatcagaggattgcaggcagtactatatcgtgtcgcgatagaggtggt

SEQ ID NO: 282423 - DNA, 54 bp, Artificial
  Synthetic oligonucleotide
ctccgccgcgctctattaggggttaccgctctcaccattgttgggtcaaccacg

SEQ ID NO: 282424 - DNA, 54 bp, Artificial
  Synthetic oligonucleotide
gttcgagagtgatcctgcaagatccttttgggcgtggcaacgctagcgcttact

SEQ ID NO: 282425 - DNA, 54 bp, Artificial
  Synthetic oligonucleotide
aacgccatgtgggctagcctgcgcattgaccgagtgttaaggcagatcggccct

SEQ ID NO: 282426 - DNA, 54 bp, Artificial
  Synthetic oligonucleotide
ccccgatggtcatgcagtaggtacggtcccggaacgatgtgtgaatcatttcca

SEQ ID NO: 282427 - DNA, 54 bp, Artificial
  Synthetic oligonucleotide
gcagtacttacttcctccgtaccactccactatatagataagcatgtgctcccg

SEQ ID NO: 282428 - DNA, 54 bp, Artificial
  Synthetic oligonucleotide
gccctttctatgttagttatggggcagcgcttgtccgtgttgatgttaaccggt

SEQ ID NO: 282429 - DNA, 54 bp, Artificial
  Synthetic oligonucleotide
aacattgaccaatcaggaggtagaaagcctttgactaatagccgtaacatcttg

SEQ ID NO: 282430 - DNA, 54 bp, Artificial
  Synthetic oligonucleotide
ccccgttcgattactctacaccattcatatatcgcttgcgatgacctgagatgg

SEQ ID NO: 282431 - DNA, 60 bp, Artificial
  Synthetic oligonucleotide
caatggaacaagataccaaccattcctatcaagccgctcccagtggatggtattggtgga

SEQ ID NO: 282432 - DNA, 53 bp, Artificial
  Synthetic oligonucleotide
acgagtaagcacaggcgtctcgatacagtgttcggcgcaggttaacagcgggt

SEQ ID NO: 282433 - DNA, 53 bp, Artificial
  Synthetic oligonucleotide
tgagtcagtgtctttttgtgtcagatataactcatatgatagtcgatctatcc

SEQ ID NO: 282434 - DNA, 53 bp, Artificial
  Synthetic oligonucleotide
tcacgtgccatgcgggaactgacacggcatacagactcaagaacggcatatca

SEQ ID NO: 282435 - DNA, 53 bp, Artificial
  Synthetic oligonucleotide
gcggcataacgatggctacgagggagcttgaggcgtaggcgattgaggcactg

SEQ ID NO: 282436 - DNA, 53 bp, Artificial
  Synthetic oligonucleotide
gcctcccttgcacgaccatcataccgtcgcgcgctcacacctgacccatgtag

SEQ ID NO: 282437 - DNA, 53 bp, Artificial
  Synthetic oligonucleotide
cccctatcgcccgtcccaagtcttcgtccggtcatcagcccatgggccaattc

SEQ ID NO: 282438 - DNA, 53 bp, Artificial
  Synthetic oligonucleotide
tagtatgcccctgagtatgcacgtccaatggaactaagactagttcgacttag

SEQ ID NO: 282439 - DNA, 53 bp, Artificial
  Synthetic oligonucleotide
tcaccgtcagccgacatcctggttagtcggtcgcagctaaggcaacattggga

SEQ ID NO: 282440 - DNA, 52 bp, Artificial
  Synthetic oligonucleotide
aaagaagggccggtggtaagccttctggagacggcttgtggagggacgaggg

SEQ ID NO: 282441 - DNA, 53 bp, Artificial
  Synthetic oligonucleotide
tgcggcgcgtatggaagttgcccgtggtagataccttgcgaactgagccatgc

SEQ ID NO: 282442 - DNA, 59 bp, Artificial
  Synthetic oligonucleotide
attgctgattgacggagttacggtcgagctgcttcaatctcgcgtccctaaaatctccc

SEQ ID NO: 282443 - DNA, 53 bp, Artificial
  Synthetic oligonucleotide
gccccaatattgcggcataacgatggctacgagggagcttgaggcgtaggcga

SEQ ID NO: 282444 - DNA, 53 bp, Artificial
  Synthetic oligonucleotide
aacgagatagaacagccaaccgtgatacacaacctgggaactcgtcggaattt

SEQ ID NO: 282445 - DNA, 53 bp, Artificial
  Synthetic oligonucleotide
ccggcgtgtccacggatctccgctccagatacgctgttctctccgttcatccg

SEQ ID NO: 282446 - DNA, 53 bp, Artificial
  Synthetic oligonucleotide
gacttcacggctgtgacgtcacgacttgttcgaacattttggggtcatggcgg

SEQ ID NO: 282447 - DNA, 53 bp, Artificial
  Synthetic oligonucleotide
tgtatgagcagctgggtgatgtgacacgatatcatatggctgcgcaaagacag

SEQ ID NO: 282448 - DNA, 53 bp, Artificial
  Synthetic oligonucleotide
tgaataggttggccgtgaacaggggatgagtagatagtcacactactgagggg

SEQ ID NO: 282449 - DNA, 53 bp, Artificial
  Synthetic oligonucleotide
tgtgcggagacggacgaaccagccacacgacatgctggcatttaatcgggggg

SEQ ID NO: 282450 - DNA, 53 bp, Artificial
  Synthetic oligonucleotide
gcttgtattgcggattcaacggcgcggctgtagctcgttgacgaatcacagca

SEQ ID NO: 282451 - DNA, 53 bp, Artificial
  Synthetic oligonucleotide
gccctgtcgttcaccagggatacctacctcgtcaaaataaattcccgtgtaca

SEQ ID NO: 282452 - DNA, 53 bp, Artificial
  Synthetic oligonucleotide
tggccaacagccgaatgtgtttcctaccgaccatgatcctgcacacaacccct

SEQ ID NO: 282453 - DNA, 60 bp, Artificial
  Synthetic oligonucleotide
attgcgtcaatcgcaagcacctctctcccgtatgtccttgcagcctataggaacccggga

SEQ ID NO: 282454 - DNA, 53 bp, Artificial
  Synthetic oligonucleotide
gagcaggtgtgacattgatgcggtggggagccaaacgggttgattatttcgtt

SEQ ID NO: 282455 - DNA, 53 bp, Artificial
  Synthetic oligonucleotide
gccctgggggaggtgcctagccggacctgggatacttatgcccaatccgaaaa

SEQ ID NO: 282456 - DNA, 53 bp, Artificial
  Synthetic oligonucleotide
tatccggaggaatgaagctcatttgcacgctcggggcaccttggatgtatcga

SEQ ID NO: 282457 - DNA, 53 bp, Artificial
  Synthetic oligonucleotide
acctgtcgtgtttacacacccaccctccggcgtgtccacggatctccgctcca

SEQ ID NO: 282458 - DNA, 53 bp, Artificial
  Synthetic oligonucleotide
tctttaccataaccatagaccccaggctaaagaattccgtgaatatgtgacga

SEQ ID NO: 282459 - DNA, 53 bp, Artificial
  Synthetic oligonucleotide
tatatagtgatgctgtgggccatcaaagggcggcacggaatcttccggcactg

SEQ ID NO: 282460 - DNA, 53 bp, Artificial
  Synthetic oligonucleotide
cctgccaaggccgcagtgtcaatgcaggtggctggtctcaatatggaagctcg

SEQ ID NO: 282461 - DNA, 53 bp, Artificial
  Synthetic oligonucleotide
tgacgcctgagactagcacggggccctacatttatccgcggagtcaggtcctg

SEQ ID NO: 282462 - DNA, 53 bp, Artificial
  Synthetic oligonucleotide
catgacaactttcccgtttactaatcctaattaggcgctctatattagcagat

SEQ ID NO: 282463 - DNA, 53 bp, Artificial
  Synthetic oligonucleotide
cattagtcccgtggggcgcgtggttgaacagggtatatgggcccaccatcctg

SEQ ID NO: 282464 - DNA, 60 bp, Artificial
  Synthetic oligonucleotide
cacaaattcatccaatcgctgaaggagcggtatccaaatgacaatcgcccacctgatgga

SEQ ID NO: 282465 - DNA, 53 bp, Artificial
  Synthetic oligonucleotide
ggggctgtcgctcttcgtggaagtgggccgtcaatcgtaggttgagtgttcct

SEQ ID NO: 282466 - DNA, 53 bp, Artificial
  Synthetic oligonucleotide
tctgatccaggcgagcagtaagacatggagcccattcgtctcgaggttatggc

SEQ ID NO: 282467 - DNA, 53 bp, Artificial
  Synthetic oligonucleotide
aacctacttctggccaaatatgtccaaagatatacgccgatttgtacggaact

SEQ ID NO: 282468 - DNA, 53 bp, Artificial
  Synthetic oligonucleotide
tgaggtcaccttacttagatggctgtacacataaaatttattactatgttaca

SEQ ID NO: 282469 - DNA, 52 bp, Artificial
  Synthetic oligonucleotide
aagtacggtagtggtacgtactcagcgacccgagataggaacgggaaggtcg

SEQ ID NO: 282470 - DNA, 53 bp, Artificial
  Synthetic oligonucleotide
tgtcgcacgacgtgtccttccggcgcttcggaattacagctcttggctcctta

SEQ ID NO: 282471 - DNA, 53 bp, Artificial
  Synthetic oligonucleotide
aaaagtatctctctggacggaattatgacgccgaaactcgcggtccaaaattg

SEQ ID NO: 282472 - DNA, 53 bp, Artificial
  Synthetic oligonucleotide
gcggattaacaagcgtagcgaccgcaggaataggagtggcggacgaatacgtg

SEQ ID NO: 282473 - DNA, 53 bp, Artificial
  Synthetic oligonucleotide
ccatgatctccacggaaggtacatgtagaacggcgagtaacggtgccacattg

SEQ ID NO: 282474 - DNA, 53 bp, Artificial
  Synthetic oligonucleotide
tgagaattcggtgattctgtatgccgcggtggtttcacaaacggagcgtaatc

SEQ ID NO: 282475 - DNA, 60 bp, Artificial
  Synthetic oligonucleotide
cagccgcatgttatgcaggttcagtgtgcacgatggagagtcgagaagtggacccagggt

SEQ ID NO: 282476 - DNA, 60 bp, Artificial
  Synthetic oligonucleotide
cttccttgtacagatatgctgcaattggtagacaggtctcacttaggatgagtaaagtat

SEQ ID NO: 282477 - DNA, 53 bp, Artificial
  Synthetic oligonucleotide
ttggtacgaggctgaggcgaggataatggtctcgttgaatgcggctagtccgt

SEQ ID NO: 282478 - DNA, 53 bp, Artificial
  Synthetic oligonucleotide
aagcttgatagcaggatggttacaatggggagggacaatgagaagttcatgtg

SEQ ID NO: 282479 - DNA, 53 bp, Artificial
  Synthetic oligonucleotide
tttcgtgattgagcttcgaggatgatagcactcgtttgaatctgacttatgcg

SEQ ID NO: 282480 - DNA, 53 bp, Artificial
  Synthetic oligonucleotide
ggggggtcaaggaactatcggagcagcgtacacttggtagcacacaatccgag

SEQ ID NO: 282481 - DNA, 53 bp, Artificial
  Synthetic oligonucleotide
ggagatagacatatctttctcaaccccgggggacccggaggtgtgttgagact

SEQ ID NO: 282482 - DNA, 53 bp, Artificial
  Synthetic oligonucleotide
aattgtctataaccagtgtggttacctggagtttgtcagtagggcggtttacg

SEQ ID NO: 282483 - DNA, 53 bp, Artificial
  Synthetic oligonucleotide
tcggccgagtacaagaatgcgaagctacttcgggaacaaggagcaaaggtaca

SEQ ID NO: 282484 - DNA, 53 bp, Artificial
  Synthetic oligonucleotide
aattgatctgcaggtgtctcctggcgcaactagatgccatttgtcgcaatttt

SEQ ID NO: 282485 - DNA, 53 bp, Artificial
  Synthetic oligonucleotide
tgcaaagtgaacggatgataggccttcgggacctcatcacgacccagtggagg

SEQ ID NO: 282486 - DNA, 53 bp, Artificial
  Synthetic oligonucleotide
ttatgagcagccacaagcagatctcaaaaagctagtagcagacgggacgaagg

SEQ ID NO: 282487 - DNA, 58 bp, Artificial
  Synthetic oligonucleotide
cttcgagcgtctctgacgccctagaccagggtgtctagagcaccaaccatccccctaa

SEQ ID NO: 282488 - DNA, 53 bp, Artificial
  Synthetic oligonucleotide
ccgcgtaccgggagactggagtgcccaatctctggctcatggtcggctatctc

SEQ ID NO: 282489 - DNA, 53 bp, Artificial
  Synthetic oligonucleotide
tgattgggcgccaccccccaccgggtgacgtgcacgggcccactacacgtgat

SEQ ID NO: 282490 - DNA, 53 bp, Artificial
  Synthetic oligonucleotide
cccgatccaggagtaaggtctgtaacgtggcgatgttcgtactgctgagccag

SEQ ID NO: 282491 - DNA, 53 bp, Artificial
  Synthetic oligonucleotide
gggtagatgccaagcctggttgccaagctgactagtgcgccgcggaggcgttc

SEQ ID NO: 282492 - DNA, 53 bp, Artificial
  Synthetic oligonucleotide
tccggattggaatgggggagcgttcccgatagtgagcccgggggctgtatccc

SEQ ID NO: 282493 - DNA, 53 bp, Artificial
  Synthetic oligonucleotide
ggtgctcgacggtcagatagattaattatcatgttatggattctgggcccttg

SEQ ID NO: 282494 - DNA, 53 bp, Artificial
  Synthetic oligonucleotide
tccgcgtcggtagatccgtgacattgcgggattgtagacgctgctgaacggat

SEQ ID NO: 282495 - DNA, 53 bp, Artificial
  Synthetic oligonucleotide
ggtatagatagagtagatgctccgtcttcgcacatacgtaggtattcagctgt

SEQ ID NO: 282496 - DNA, 53 bp, Artificial
  Synthetic oligonucleotide
aaattgtttgtcagagaactatcagaaaactataaccaaggccgcatttttgc

SEQ ID NO: 282497 - DNA, 53 bp, Artificial
  Synthetic oligonucleotide
cctacctctgttttcagttgtgctcaacacgccaaagcatctagagatgtttg

SEQ ID NO: 282498 - DNA, 59 bp, Artificial
  Synthetic oligonucleotide
gttgtctagtaatgggattcgaacgccattggggcagttgaatgagtgaccgacttgag

SEQ ID NO: 282499 - DNA, 53 bp, Artificial
  Synthetic oligonucleotide
aagatgagagtgtaattgatgcttgatgatgatgcttcattttgagcgaaaac

SEQ ID NO: 282500 - DNA, 53 bp, Artificial
  Synthetic oligonucleotide
ggcaagtaccaagtattttacgatctccggtagagaagggacccaggctaacg

SEQ ID NO: 282501 - DNA, 53 bp, Artificial
  Synthetic oligonucleotide
tccgataacaacgtggggccacccattggacgccagtaatccaattcacgagg

SEQ ID NO: 282502 - DNA, 53 bp, Artificial
  Synthetic oligonucleotide
aacatttgcatctgtgtgccaatagctcactttcccaaagggagtcaatacaa

SEQ ID NO: 282503 - DNA, 53 bp, Artificial
  Synthetic oligonucleotide
tccgagcatcgatcaattgtcaatcgggagatctatagtagaacggctagact

SEQ ID NO: 282504 - DNA, 53 bp, Artificial
  Synthetic oligonucleotide
cccgcttcaacaacttattcaacccaccgcccacaaaccccttcgtactctga

SEQ ID NO: 282505 - DNA, 53 bp, Artificial
  Synthetic oligonucleotide
aagcaggtggtagaacgatgtagaagggaattaacacggacagatacaggcgt

SEQ ID NO: 282506 - DNA, 53 bp, Artificial
  Synthetic oligonucleotide
tgggagccggaaatcctacaggggctagcccgactactcgagcaagcgacgaa

SEQ ID NO: 282507 - DNA, 53 bp, Artificial
  Synthetic oligonucleotide
ccaccacacaccactaacttggaggcattgaagcctagcccgtctgcatgctc

SEQ ID NO: 282508 - DNA, 53 bp, Artificial
  Synthetic oligonucleotide
gcacggggcattctgcgcccaacaatctgcatccgatggattatcggtggcac

SEQ ID NO: 282509 - DNA, 56 bp, Artificial
  Synthetic oligonucleotide
cttcgctactaatatataaccccgttatctggaacaagtagcacataaccaaccta

SEQ ID NO: 282510 - DNA, 53 bp, Artificial
  Synthetic oligonucleotide
acaattcgccaaagcacggggcattctgcgcccaacaatctgcatccgatgga

SEQ ID NO: 282511 - DNA, 53 bp, Artificial
  Synthetic oligonucleotide
ttccattctcggaggagacaatgctcgttgttgcaaattccgtcggtcgtccc

SEQ ID NO: 282512 - DNA, 53 bp, Artificial
  Synthetic oligonucleotide
aacacgaccgcatgggaactgtgaatgagttagagagacataagaccacagtg

SEQ ID NO: 282513 - DNA, 53 bp, Artificial
  Synthetic oligonucleotide
ttcactcatacggtattgatgctcaagattgacgactgattcgggatgagcgt

SEQ ID NO: 282514 - DNA, 53 bp, Artificial
  Synthetic oligonucleotide
acaacccgtcgatagatcggtatcacacaccctcttgactcgattggaagcaa

SEQ ID NO: 282515 - DNA, 53 bp, Artificial
  Synthetic oligonucleotide
tcggatgactctacacgctttatctaccaggctagcatgggctgttgcaccta

SEQ ID NO: 282516 - DNA, 53 bp, Artificial
  Synthetic oligonucleotide
tgggagaactgccaccgggagacccatgaggcacggaaggcgacgagacccag

SEQ ID NO: 282517 - DNA, 53 bp, Artificial
  Synthetic oligonucleotide
gccttcgtgtctggcctggaacgcgcatcttctacagacttggataatccgtt

SEQ ID NO: 282518 - DNA, 53 bp, Artificial
  Synthetic oligonucleotide
aatttttgggctggccggggtgggttttggtcggaggccatgcggtgtcaatg

SEQ ID NO: 282519 - DNA, 53 bp, Artificial
  Synthetic oligonucleotide
aatttgtgtccgactcctaccagcgtcaaattcaatggatcttaacaagtgtt

SEQ ID NO: 282520 - DNA, 54 bp, Artificial
  Synthetic oligonucleotide
cgcggcggtattaatcagtagtaatcggagtgaacccgtaacaagatacggtac

SEQ ID NO: 282521 - DNA, 53 bp, Artificial
  Synthetic oligonucleotide
gctccacttgttgcgacaacccccatagtatgcagtgactaatggtgtgtgac

SEQ ID NO: 282522 - DNA, 53 bp, Artificial
  Synthetic oligonucleotide
aacacaatcaatactgccaccatcacaacgatcgtcattgacatcatgaggga

SEQ ID NO: 282523 - DNA, 53 bp, Artificial
  Synthetic oligonucleotide
ggagacggtctcttgcatgatgagggggtcaccggcactaggtaataaaaggg

SEQ ID NO: 282524 - DNA, 53 bp, Artificial
  Synthetic oligonucleotide
ttcctgacttgcaggtaccatgtccaaagctccgctatcctggacctctgccc

SEQ ID NO: 282525 - DNA, 53 bp, Artificial
  Synthetic oligonucleotide
ttcctgggttaagacccgggtctttagtgtgttcgacacgagcgcatcttcat

SEQ ID NO: 282526 - DNA, 53 bp, Artificial
  Synthetic oligonucleotide
acactttgccgttcgccttttgcatgatgtcgggccttgaagtgctaggcgcc

SEQ ID NO: 282527 - DNA, 53 bp, Artificial
  Synthetic oligonucleotide
aacaaaaatcgacctctacacggagtcgaacagaccttcaaaagcgcatagga

SEQ ID NO: 282528 - DNA, 53 bp, Artificial
  Synthetic oligonucleotide
accatgctcaatacagtttgcatgcagccggacgttaatttcagtgactttaa

SEQ ID NO: 282529 - DNA, 53 bp, Artificial
  Synthetic oligonucleotide
tccacccaatcttccactcaatcttccacccaatcttccactcaatcttccac

SEQ ID NO: 282530 - DNA, 53 bp, Artificial
  Synthetic oligonucleotide
cctccaaggtatgttctggccagtatactgtgctcatgcgggggactgctgtt

SEQ ID NO: 282531 - DNA, 60 bp, Artificial
  Synthetic oligonucleotide
gtatacggccacgattcattttgtcaaaaccgtcactgataggtagcacccattcagcta

SEQ ID NO: 282532 - DNA, 53 bp, Artificial
  Synthetic oligonucleotide
tgatcctgatttctcggaaacaccgagctcggtctcgcaccgccctccattat

SEQ ID NO: 282533 - DNA, 53 bp, Artificial
  Synthetic oligonucleotide
gccacactacggcaagaactacaccagttgcgtacgcaacttattgaacagaa

SEQ ID NO: 282534 - DNA, 53 bp, Artificial
  Synthetic oligonucleotide
tctccgccgcttatacacatggtgttccctggaaggcttagcaccggctgcta

SEQ ID NO: 282535 - DNA, 53 bp, Artificial
  Synthetic oligonucleotide
gccagtattaacgtctgcatgcctctgacaggcgcttctacgagttgcttgtt

SEQ ID NO: 282536 - DNA, 53 bp, Artificial
  Synthetic oligonucleotide
ttgcgagtggccccatagggcgacgacagcgctagtccataaagagtcggggg

SEQ ID NO: 282537 - DNA, 53 bp, Artificial
  Synthetic oligonucleotide
ccgcatatacgagggatgagcgggggttcatctgccagggcgctaacagtcta

SEQ ID NO: 282538 - DNA, 53 bp, Artificial
  Synthetic oligonucleotide
gagtgtgacctgagcgacgaattgtcaccgaggaaggacccgacgtgtcggta

SEQ ID NO: 282539 - DNA, 53 bp, Artificial
  Synthetic oligonucleotide
acccgccgttaacctgcgccgaacactgtatcgagacgcctgtgcttactcgt

SEQ ID NO: 282540 - DNA, 53 bp, Artificial
  Synthetic oligonucleotide
ccctcaccaaccggaccgtttttgtatatcggccctcgaccgctatgttacgc

SEQ ID NO: 282541 - DNA, 53 bp, Artificial
  Synthetic oligonucleotide
tcatagacgcccaatactaggtccggatagagtcattccttattctagatctg

SEQ ID NO: 282542 - DNA, 51 bp, Artificial
  Synthetic oligonucleotide
gtttacaacacatcttccctttgttaaagacggttccccgtctacaaatag

SEQ ID NO: 282543 - DNA, 53 bp, Artificial
  Synthetic oligonucleotide
aatactcttttcgggtgcaaacgcaagtcccgcgtagtatagttggagtgggg

SEQ ID NO: 282544 - DNA, 53 bp, Artificial
  Synthetic oligonucleotide
tgcgcagaacacgaagacgggatgagacgtctcgaagtatataaggaatggct

SEQ ID NO: 282545 - DNA, 53 bp, Artificial
  Synthetic oligonucleotide
gagtcatgccgcgactctgcggcagcaggcagctacaggcagagggtctgtcc

SEQ ID NO: 282546 - DNA, 53 bp, Artificial
  Synthetic oligonucleotide
tcagtacccggaccaacccgtgctcatccgcgaagtctcctgccatcggatct

SEQ ID NO: 282547 - DNA, 53 bp, Artificial
  Synthetic oligonucleotide
ggggtcgtttggttcacgggcctagtgcaggccgcctatggtcttacggcttt

SEQ ID NO: 282548 - DNA, 53 bp, Artificial
  Synthetic oligonucleotide
tgcgccagacggagataccaagattaaagtcccagatccggaacaaagtccca

SEQ ID NO: 282549 - DNA, 53 bp, Artificial
  Synthetic oligonucleotide
ccgctaatatgaatatagactacaccccgctatccgtccttttgctatgtcta

SEQ ID NO: 282550 - DNA, 53 bp, Artificial
  Synthetic oligonucleotide
ttgctcaggaatgttcccgctaagattatgcccactatccagactatcttccc

SEQ ID NO: 282551 - DNA, 53 bp, Artificial
  Synthetic oligonucleotide
tcgtaaggtcgttgaacgcggcactctcgacactccggacaccaaccgtgccg

SEQ ID NO: 282552 - DNA, 53 bp, Artificial
  Synthetic oligonucleotide
aaattgagaccgcatatacgagggatgagcgggggttcatctgccagggcgct

SEQ ID NO: 282553 - DNA, 60 bp, Artificial
  Synthetic oligonucleotide
agatgccatctgctagagctgctatcagagatgttccttacgactatgccatgtttaaca

SEQ ID NO: 282554 - DNA, 53 bp, Artificial
  Synthetic oligonucleotide
aaattcgcaccgggcagaaccgtcaaccttcgcagtttccgacgcagtttgcc

SEQ ID NO: 282555 - DNA, 53 bp, Artificial
  Synthetic oligonucleotide
cccgaggggagggggaatctcggtgactcaggaaggtcaatccagacgcatga

SEQ ID NO: 282556 - DNA, 53 bp, Artificial
  Synthetic oligonucleotide
ccccgaggtagggaataaatctccctgaaacacaaactactgcacctacatcg

SEQ ID NO: 282557 - DNA, 53 bp, Artificial
  Synthetic oligonucleotide
tcgtcgaactggtgggcaaattgacgtggtgtgtcctggggtccacgcacaag

SEQ ID NO: 282558 - DNA, 53 bp, Artificial
  Synthetic oligonucleotide
ccgaggcactacctattggtttcgtggagaggcggtatgtcgcccatggggtc

SEQ ID NO: 282559 - DNA, 53 bp, Artificial
  Synthetic oligonucleotide
gcctgatatagattagctgcggtcgacttacacagtccacgtcgacatacctt

SEQ ID NO: 282560 - DNA, 53 bp, Artificial
  Synthetic oligonucleotide
ggaggggtagttccagtcatctagtaggctagtcagtcgttcccgagatgatt

SEQ ID NO: 282561 - DNA, 53 bp, Artificial
  Synthetic oligonucleotide
aaatcagcaggcagggtcgcatacattctacaccgaatccagaggttctctag

SEQ ID NO: 282562 - DNA, 53 bp, Artificial
  Synthetic oligonucleotide
accactattgtggccacatattgacatccatagtcctcctaggagccggcgct

SEQ ID NO: 282563 - DNA, 53 bp, Artificial
  Synthetic oligonucleotide
tgcctctgaacggagtatagtaaaggacggtctagctaggatatgctgtgtag

SEQ ID NO: 282564 - DNA, 60 bp, Artificial
  Synthetic oligonucleotide
cttctcgattggcaatccataacatccgcactatagcgaaagcagggcgtcattcgtcta

SEQ ID NO: 282565 - DNA, 53 bp, Artificial
  Synthetic oligonucleotide
gatattcaacgcaggaattgatcagcgaatcgaccttattgttaggcgcgggt

SEQ ID NO: 282566 - DNA, 53 bp, Artificial
  Synthetic oligonucleotide
aaatagtgtccaagccataccacgatgcttaatgcgatgcttaaggttgcaga

SEQ ID NO: 282567 - DNA, 53 bp, Artificial
  Synthetic oligonucleotide
cctattcttggagactgcctacctttactgggcgaagcccgataacgtcctgc

SEQ ID NO: 282568 - DNA, 53 bp, Artificial
  Synthetic oligonucleotide
ttaatagttttatagaagatccattcttcttgacacaaaccgtctcggtctcc

SEQ ID NO: 282569 - DNA, 53 bp, Artificial
  Synthetic oligonucleotide
aagacgcgtactgaggaaggataccaaacagcgcttattaacttgcggcagtt

SEQ ID NO: 282570 - DNA, 53 bp, Artificial
  Synthetic oligonucleotide
gcattgccaggtactttagcccccagtgcctagtcggaacgcattatatgaat

SEQ ID NO: 282571 - DNA, 53 bp, Artificial
  Synthetic oligonucleotide
ccaaatctctggcgcggttctgcctacggtacagactggaaatgccgcaggag

SEQ ID NO: 282572 - DNA, 53 bp, Artificial
  Synthetic oligonucleotide
gtccgtgagatctggcgggtgacataccattacggatttctcgtccattccat

SEQ ID NO: 282573 - DNA, 53 bp, Artificial
  Synthetic oligonucleotide
taccatctatgtgcgagcgaccagtcggccacactcggcttggatgtgtagct

SEQ ID NO: 282574 - DNA, 53 bp, Artificial
  Synthetic oligonucleotide
ctccgggggttgcgctgagaagctgcggatgagagcgccttaggtacaaacat

SEQ ID NO: 282575 - DNA, 60 bp, Artificial
  Synthetic oligonucleotide
cttctcgatttcaggcaatcatatagcatcttcgtgtgaggtcctgggagagctgaatcc

SEQ ID NO: 282576 - DNA, 53 bp, Artificial
  Synthetic oligonucleotide
atcagcgactaacgctgaagtggaaccgttctactgctcgcagaggacccaag

SEQ ID NO: 282577 - DNA, 53 bp, Artificial
  Synthetic oligonucleotide
gtgagggaacgaggcagctagcccgctccgatgagacttggctatctgtattc

SEQ ID NO: 282578 - DNA, 53 bp, Artificial
  Synthetic oligonucleotide
agccaggctcaaaccacggcgactccctagtgggcgtcactaagaccaggatg

SEQ ID NO: 282579 - DNA, 53 bp, Artificial
  Synthetic oligonucleotide
atcacctgttctttaggcttcaggctgccattccccggacggaagtcactcac

SEQ ID NO: 282580 - DNA, 53 bp, Artificial
  Synthetic oligonucleotide
gtgacgcaacgtacgtatgcattacttgcagccggtctttagacacctttgcg

SEQ ID NO: 282581 - DNA, 53 bp, Artificial
  Synthetic oligonucleotide
ggccgggctaggcaccgtgattatgaccttacggccggcataggcagtacctc

SEQ ID NO: 282582 - DNA, 53 bp, Artificial
  Synthetic oligonucleotide
ctccagtgggatctgacgactcgaaaggcgggtctccactgcagtcaaccgct

SEQ ID NO: 282583 - DNA, 53 bp, Artificial
  Synthetic oligonucleotide
gtacgcttgacaggggtatgccttggcacaaaacagccttcgagtaccttggt

SEQ ID NO: 282584 - DNA, 53 bp, Artificial
  Synthetic oligonucleotide
actttgccttcgccctacatgctgtcgtccttagcttcatcacgtatacacag

SEQ ID NO: 282585 - DNA, 53 bp, Artificial
  Synthetic oligonucleotide
agggcttcagacgccagggcgctaatcaccctggatactccccgctgagctcc

SEQ ID NO: 282586 - DNA, 60 bp, Artificial
  Synthetic oligonucleotide
cgaccatatgagtgactgcggtggctactttagctttactatctaatacgactggacgga

SEQ ID NO: 282587 - DNA, 60 bp, Artificial
  Synthetic oligonucleotide
gtttccgcgtgtccgtatagcttcaggtagtatgtgcgcgcgggaacaatccagtagctc

SEQ ID NO: 282588 - DNA, 53 bp, Artificial
  Synthetic oligonucleotide
cgtggagcttgtggcaggcatggtaggcgggcttcatatccagggtaaggtgc

SEQ ID NO: 282589 - DNA, 52 bp, Artificial
  Synthetic oligonucleotide
caacctaggtacgcgggaccccgaatagtgttttacctggcctgagttggta

SEQ ID NO: 282590 - DNA, 53 bp, Artificial
  Synthetic oligonucleotide
gaacttactcccacattctgacacgggctgtacgtgtcctgagggaggaatca

SEQ ID NO: 282591 - DNA, 53 bp, Artificial
  Synthetic oligonucleotide
cgtggcgttgtgaccacatgtggttgggcgatctcgatcggtactcctactac

SEQ ID NO: 282592 - DNA, 53 bp, Artificial
  Synthetic oligonucleotide
atataagaaattccccaaaggtaagacgggagctgactagagaatttccctct

SEQ ID NO: 282593 - DNA, 53 bp, Artificial
  Synthetic oligonucleotide
cgctgtaggtatatgggcccacaaatccttgaaactgcactgacccgaaagac

SEQ ID NO: 282594 - DNA, 53 bp, Artificial
  Synthetic oligonucleotide
gttctaaccaaggcactaagtcgcatgaatcgaaagaccaacaggtcgctcct

SEQ ID NO: 282595 - DNA, 53 bp, Artificial
  Synthetic oligonucleotide
agcagtggactgcagtattggctagacccgcggaaagcatgccgctaacgaga

SEQ ID NO: 282596 - DNA, 53 bp, Artificial
  Synthetic oligonucleotide
agccgctagatgcagcgtatgctagtggtgtcatcccatctgagcactttgtg

SEQ ID NO: 282597 - DNA, 53 bp, Artificial
  Synthetic oligonucleotide
cgccattactgatcttcatgctattgtatataggaaccgcccatcgccgcccg

SEQ ID NO: 282598 - DNA, 60 bp, Artificial
  Synthetic oligonucleotide
agatctcgtctcgaggtcactttgaatatgtgctaggcaatttgatctgtcagaagtccg

SEQ ID NO: 282599 - DNA, 53 bp, Artificial
  Synthetic oligonucleotide
ctggtccagcaccccacatcgggcaagcataagggcgatcccccctgagttca

SEQ ID NO: 282600 - DNA, 53 bp, Artificial
  Synthetic oligonucleotide
gacaacggtcgcgcaaacagcagaggaggaccggatacgaagggaaggcgaag

SEQ ID NO: 282601 - DNA, 53 bp, Artificial
  Synthetic oligonucleotide
gtccactcaacaacgtctcaccgtaaaggccgcctgcgcgggaccgtatttgc

SEQ ID NO: 282602 - DNA, 53 bp, Artificial
  Synthetic oligonucleotide
cgagtaggctcactgattatcggtgacccggtaagagccgccagttggtgctg

SEQ ID NO: 282603 - DNA, 53 bp, Artificial
  Synthetic oligonucleotide
agccctgcaacggggcaaaactaccccaaaccgagatcagacccctctccaac

SEQ ID NO: 282604 - DNA, 53 bp, Artificial
  Synthetic oligonucleotide
aggcctgctggacccgatacccacactgtctagcggagaccccaatcatcgat

SEQ ID NO: 282605 - DNA, 53 bp, Artificial
  Synthetic oligonucleotide
gttagctgcagctacggctactatcaatagatggtatatccgctcacgctaga

SEQ ID NO: 282606 - DNA, 53 bp, Artificial
  Synthetic oligonucleotide
gaattggatcccacggaactagagatactcccatgacggatgtgtcgaggtcc

SEQ ID NO: 282607 - DNA, 53 bp, Artificial
  Synthetic oligonucleotide
atttccggttggcgccagctgtgggatcggtgggcgagatcgtatgatagtac

SEQ ID NO: 282608 - DNA, 53 bp, Artificial
  Synthetic oligonucleotide
cgaggattcggaagcgggatgagaatagcccagcactcggattcgaagttcta

SEQ ID NO: 282609 - DNA, 57 bp, Artificial
  Synthetic oligonucleotide
cacactgctagtagtgttgacccctggtgggcttctcggtaggctccaacgccgaac

SEQ ID NO: 282610 - DNA, 53 bp, Artificial
  Synthetic oligonucleotide
cgtagggccgctgtggacggatcaacctcatgcactatagaccggcgggcact

SEQ ID NO: 282611 - DNA, 53 bp, Artificial
  Synthetic oligonucleotide
atcctacatcatcgaacaataccccttcccgaactaacaatccttcagtcttc

SEQ ID NO: 282612 - DNA, 53 bp, Artificial
  Synthetic oligonucleotide
agccataaccctcacatttcaagcccaatctggcgcagctatgacagctattg

SEQ ID NO: 282613 - DNA, 53 bp, Artificial
  Synthetic oligonucleotide
cctttctggtctctactatacctatgattgtacactatcatgctccgcgttcc

SEQ ID NO: 282614 - DNA, 53 bp, Artificial
  Synthetic oligonucleotide
taccgaattaccgtatgtgccggggcacagcatcccagttgaacctccgacgt

SEQ ID NO: 282615 - DNA, 53 bp, Artificial
  Synthetic oligonucleotide
gtccgcagctcgggggatccacatcgatctcaagctacgagcgcttatccccg

SEQ ID NO: 282616 - DNA, 53 bp, Artificial
  Synthetic oligonucleotide
caaacggcatgacacttaatctaatagagtaggtcttgtgggacttacgcatt

SEQ ID NO: 282617 - DNA, 53 bp, Artificial
  Synthetic oligonucleotide
gtagggctaccgtagtagaagacggcaatacgtggaccataacagcgaccgct

SEQ ID NO: 282618 - DNA, 52 bp, Artificial
  Synthetic oligonucleotide
cagtaccgggtaaatcttcggccccgccacagactataaacgaggaagtaaa

SEQ ID NO: 282619 - DNA, 53 bp, Artificial
  Synthetic oligonucleotide
tacccaactgcattagctactcattcaaccaggaagacgtgaaccggggatca

SEQ ID NO: 282620 - DNA, 60 bp, Artificial
  Synthetic oligonucleotide
ctcgaccctcttgggtatcttggtacaccggcctatgcacagtaatgctaacgcagcgtc

SEQ ID NO: 282621 - DNA, 53 bp, Artificial
  Synthetic oligonucleotide
agacgatagcaatgtcgttccctgtctatttcggtgtaatgcaagcgtgtacg

SEQ ID NO: 282622 - DNA, 53 bp, Artificial
  Synthetic oligonucleotide
agcaagtctgcccacttgtcgcccacaaagttaatctgctccccgattagata

SEQ ID NO: 282623 - DNA, 53 bp, Artificial
  Synthetic oligonucleotide
ctatgcatcgtgaacgtgtgttccacactacggtcgttctccccgatggaaaa

SEQ ID NO: 282624 - DNA, 53 bp, Artificial
  Synthetic oligonucleotide
ctaatcgttatcgacttgtagcgaacgctaagcaagggtggctatatcggcgg

SEQ ID NO: 282625 - DNA, 53 bp, Artificial
  Synthetic oligonucleotide
taagctccgcaggttggggagaaccctaagtaattgcctgatagggactcaca

SEQ ID NO: 282626 - DNA, 53 bp, Artificial
  Synthetic oligonucleotide
agacgcccgaggcccaaaccagctgtgccagtattcgtccgagaattgtgaga

SEQ ID NO: 282627 - DNA, 53 bp, Artificial
  Synthetic oligonucleotide
cttttgcccaagctgttactagaccataaactccgtctagttattttatgagc

SEQ ID NO: 282628 - DNA, 53 bp, Artificial
  Synthetic oligonucleotide
cacatccgcaccagactgtaacaattcgccaaagcacggggcattctgcgccc

SEQ ID NO: 282629 - DNA, 53 bp, Artificial
  Synthetic oligonucleotide
ctaatttacaatatactgttcttaactcaacttcacgtgttggagcttttggt

SEQ ID NO: 282630 - DNA, 53 bp, Artificial
  Synthetic oligonucleotide
cagcacgcttccaccagagaccgtcgggtcatatgtgcctgatagcgccgagc

SEQ ID NO: 282631 - DNA, 60 bp, Artificial
  Synthetic oligonucleotide
cacagcaccgtctctcttctttgttcgcatactggtaaacgcagagactattgacatacc

SEQ ID NO: 282632 - DNA, 53 bp, Artificial
  Synthetic oligonucleotide
cttcgccgctccatcgacttgtccggagtctcgtcaagcatcacggacggggt

SEQ ID NO: 282633 - DNA, 53 bp, Artificial
  Synthetic oligonucleotide
ctaccggggtccatatgcattactgtcaggtgagcgtgttagcatatcgctag

SEQ ID NO: 282634 - DNA, 53 bp, Artificial
  Synthetic oligonucleotide
ctttgccgtatatggagaagtgtccccgcagagtagttgttccagacaaggaa

SEQ ID NO: 282635 - DNA, 53 bp, Artificial
  Synthetic oligonucleotide
ctagtcggaaaatatcaggcgtcgacagatggggtaggtaattcagagcttcc

SEQ ID NO: 282636 - DNA, 53 bp, Artificial
  Synthetic oligonucleotide
caatcgtccccagctgcactgtgttagcacggatatcaagttaaaacctgggg

SEQ ID NO: 282637 - DNA, 53 bp, Artificial
  Synthetic oligonucleotide
agatgcgtgcgaacaatctacctggttcaaggaggtactcgtacacaaagaat

SEQ ID NO: 282638 - DNA, 53 bp, Artificial
  Synthetic oligonucleotide
agagagggggagctaaagtactaagccagctagtatagtacgtgccccgtgat

SEQ ID NO: 282639 - DNA, 53 bp, Artificial
  Synthetic oligonucleotide
cgcgtaactgtcagtccctcatgcggcggccaactgaagacaaagaccggggt

SEQ ID NO: 282640 - DNA, 53 bp, Artificial
  Synthetic oligonucleotide
agtctcggctcgtggggataacaaggacggggtggagtggccgatcagcatta

SEQ ID NO: 282641 - DNA, 53 bp, Artificial
  Synthetic oligonucleotide
gtctagctaggggaggttgtgtactccgtaccttggccgcggttatcggaata

SEQ ID NO: 282642 - DNA, 58 bp, Artificial
  Synthetic oligonucleotide
gtagaatgtttggataatttagacttactaatagctgaataccaagcgttggaagcaa

SEQ ID NO: 282643 - DNA, 53 bp, Artificial
  Synthetic oligonucleotide
ctagatagccggtagggctacccgtagcgagatgctaggatattagtataggg

SEQ ID NO: 282644 - DNA, 53 bp, Artificial
  Synthetic oligonucleotide
agtcagcgcgttgaggacagctttgctgatattatacgcgggcataggcgcaa

SEQ ID NO: 282645 - DNA, 53 bp, Artificial
  Synthetic oligonucleotide
agatcggaccagagccggttgatctttgcgaagcgctctccgatcaagccgta

SEQ ID NO: 282646 - DNA, 53 bp, Artificial
  Synthetic oligonucleotide
ctagctataacacgctctcttaaaccctcagccgtgttacagatttgacacgc

SEQ ID NO: 282647 - DNA, 53 bp, Artificial
  Synthetic oligonucleotide
agtccaatccttgcctcgccgtacatgctgcgtgtctaacccataaatagcgt

SEQ ID NO: 282648 - DNA, 53 bp, Artificial
  Synthetic oligonucleotide
cgcggcatgtcgagatccgaagctgcattagcaagctgcgagatgggtaaatc

SEQ ID NO: 282649 - DNA, 53 bp, Artificial
  Synthetic oligonucleotide
ctaggacccttcacctgaagcccctgaggggtagctattacgagcctatcgcc

SEQ ID NO: 282650 - DNA, 53 bp, Artificial
  Synthetic oligonucleotide
agaacacaatagttggatatagatcatctcgtgaaatgcgctagggatgcacg

SEQ ID NO: 282651 - DNA, 53 bp, Artificial
  Synthetic oligonucleotide
taattctctagccggagatcaggatttaaacgccagcagataattactccata

SEQ ID NO: 282652 - DNA, 53 bp, Artificial
  Synthetic oligonucleotide
cagagggcccgaagtaggttggcaaacgagtctctcccaagtgggctggctga

SEQ ID NO: 282653 - DNA, 59 bp, Artificial
  Synthetic oligonucleotide
cacagtatcgggagatcgtagccacggcagcgttccttctttgccactccgcctccagg

SEQ ID NO: 282654 - DNA, 53 bp, Artificial
  Synthetic oligonucleotide
atacctctcgaccacaatatatctggggataccctcacacatcgccagctata

SEQ ID NO: 282655 - DNA, 53 bp, Artificial
  Synthetic oligonucleotide
gtcgcgcgctcacacctgacccatgtagaccgagagtttcgggacccatccaa

SEQ ID NO: 282656 - DNA, 53 bp, Artificial
  Synthetic oligonucleotide
cgttgtaagcttatatgattaaagacactgcaaaccctaagtggaacaatcgg

SEQ ID NO: 282657 - DNA, 53 bp, Artificial
  Synthetic oligonucleotide
taatgcggctgcttaatgagtggagcaactctgcagaaagtgtaccctgcctt

SEQ ID NO: 282658 - DNA, 53 bp, Artificial
  Synthetic oligonucleotide
caggccggccatcaagcgaatacttgccggggcaaaacagcgaaacagatcct

SEQ ID NO: 282659 - DNA, 53 bp, Artificial
  Synthetic oligonucleotide
agttggaacggccacacacgtgatggaatcattaactcggccacgtgctgctt

SEQ ID NO: 282660 - DNA, 53 bp, Artificial
  Synthetic oligonucleotide
taatagtataggtaaattaagtacaggtattgtaactacttacgctctataca

SEQ ID NO: 282661 - DNA, 53 bp, Artificial
  Synthetic oligonucleotide
gtctgactgactgaaggcagcatagattgaagcatactctcgcagttgtcgac

SEQ ID NO: 282662 - DNA, 53 bp, Artificial
  Synthetic oligonucleotide
cgagagtctgcagggatgctatctcacaaacttaagcataacagaggatcaca

SEQ ID NO: 282663 - DNA, 53 bp, Artificial
  Synthetic oligonucleotide
agacagcgagacgttacggtgacatcatctcacatgcatccgttctctttcgt

SEQ ID NO: 282664 - DNA, 60 bp, Artificial
  Synthetic oligonucleotide
gggctagcgacattttcctccacatgtcagcgctccttttccctaaagaggtgcactgga

SEQ ID NO: 282665 - DNA, 53 bp, Artificial
  Synthetic oligonucleotide
caaggttccaatggaatctcgcgcacacacagcaacgcctctagcaacacaat

SEQ ID NO: 282666 - DNA, 53 bp, Artificial
  Synthetic oligonucleotide
cttagcgcctggcgtaaggcgtatatgcctcgagaagagattttatcggctga

SEQ ID NO: 282667 - DNA, 53 bp, Artificial
  Synthetic oligonucleotide
agttcgtacgctgacgcctccgggggttgcgctgagaagctgcggatgagagc

SEQ ID NO: 282668 - DNA, 53 bp, Artificial
  Synthetic oligonucleotide
agaccatgagcgtgtaactgtcgcccgcgtcttgtcaggtgattgcccgtaga

SEQ ID NO: 282669 - DNA, 53 bp, Artificial
  Synthetic oligonucleotide
gtctgacggcgttcttttggaattggtcgagaaaagggtctgcatccggctgg

SEQ ID NO: 282670 - DNA, 53 bp, Artificial
  Synthetic oligonucleotide
ctaagtacgtatgttaaccactgcagtaatctgatcactactgctacctagtc

SEQ ID NO: 282671 - DNA, 53 bp, Artificial
  Synthetic oligonucleotide
gaaacgtttatgaccaatgcgtggagggaacacatgggccccgttattgactc

SEQ ID NO: 282672 - DNA, 53 bp, Artificial
  Synthetic oligonucleotide
ggctgttccctgacaaaggagaattctccaggcgcctcgggggacgagaatgg

SEQ ID NO: 282673 - DNA, 53 bp, Artificial
  Synthetic oligonucleotide
agcaatatgcacaattattgagcgcctttgtcggaaaggccgttcctatcaag

SEQ ID NO: 282674 - DNA, 53 bp, Artificial
  Synthetic oligonucleotide
caccacaggcgaactcgggccctcttatggaaagacgggcggacagagctcta

SEQ ID NO: 282675 - DNA, 58 bp, Artificial
  Synthetic oligonucleotide
gtttgttttgtacgcgcggtgttaaggattcgactctcggctgtgataggagatgccg

SEQ ID NO: 282676 - DNA, 53 bp, Artificial
  Synthetic oligonucleotide
agacgataagttggcgaagcaagtatggaatgcagcaaagaaagtctccaaaa

SEQ ID NO: 282677 - DNA, 53 bp, Artificial
  Synthetic oligonucleotide
aggtttgatagaccttgaacagcccatgaacttaagtcgaaagggtcgcacgg

SEQ ID NO: 282678 - DNA, 53 bp, Artificial
  Synthetic oligonucleotide
acggggacaacctctacctgacaccagctgactacgaatacacctcaactagt

SEQ ID NO: 282679 - DNA, 53 bp, Artificial
  Synthetic oligonucleotide
gtatccccgctaagaggcccctctctagccctctaagactttctagcgatccc

SEQ ID NO: 282680 - DNA, 53 bp, Artificial
  Synthetic oligonucleotide
gtggatgagtacctcacccacctggccatgccccgaacggcaaactcagagcc

SEQ ID NO: 282681 - DNA, 53 bp, Artificial
  Synthetic oligonucleotide
gggatggttgctattcgtacgggtaggggagattctgcggaagcacacatccc

SEQ ID NO: 282682 - DNA, 53 bp, Artificial
  Synthetic oligonucleotide
acgggtctgtcgacggagaacagcagccttgcggaccagaatcacaggggcat

SEQ ID NO: 282683 - DNA, 53 bp, Artificial
  Synthetic oligonucleotide
gaccgaaggttcagaagtcgttcctatggctagctctcgttctgatctgtcga

SEQ ID NO: 282684 - DNA, 53 bp, Artificial
  Synthetic oligonucleotide
catacatacttggcggagtcaacaagcgactcactcattggttttactttgct

SEQ ID NO: 282685 - DNA, 53 bp, Artificial
  Synthetic oligonucleotide
atgcgactgactcggtaagacgcctcaagtcggtgcggcattctcacctcccg

SEQ ID NO: 282686 - DNA, 56 bp, Artificial
  Synthetic oligonucleotide
agctaatatgcaaagcaccacggaccttcgactagtggacgatacgtgacgggggg

SEQ ID NO: 282687 - DNA, 53 bp, Artificial
  Synthetic oligonucleotide
gaccatccaggtatacccggtcgattcggcaggtcacatacccgagatgaaca

SEQ ID NO: 282688 - DNA, 53 bp, Artificial
  Synthetic oligonucleotide
attagctgaccgagacgccttctatgactggtcgagtcaagtcgctactacta

SEQ ID NO: 282689 - DNA, 51 bp, Artificial
  Synthetic oligonucleotide
ctgacttaaacgcccgaaccacctcaccattgccccgggtcgaaactttct

SEQ ID NO: 282690 - DNA, 53 bp, Artificial
  Synthetic oligonucleotide
cggggcgaaacgttcatcgttagagcaggattatttcgaacagtttaatcgac

SEQ ID NO: 282691 - DNA, 53 bp, Artificial
  Synthetic oligonucleotide
gtgggctcgatcgccgtcctagttgcggtgcattttggattggggtaccatca

SEQ ID NO: 282692 - DNA, 53 bp, Artificial
  Synthetic oligonucleotide
cacggaaaagcaggacagccacggacacacagatagtgcagtagataccatcc

SEQ ID NO: 282693 - DNA, 53 bp, Artificial
  Synthetic oligonucleotide
atggccctagtactcgtgcggcgaaggatatggctcgcgacaattcgaggacg

SEQ ID NO: 282694 - DNA, 53 bp, Artificial
  Synthetic oligonucleotide
attcagcccaacatatagacgttaagcgtcgtgtgtccgttcagtacagtatc

SEQ ID NO: 282695 - DNA, 53 bp, Artificial
  Synthetic oligonucleotide
cataacagcttggtcccaaatgaggtctgccactctagtagccatctcagggt

SEQ ID NO: 282696 - DNA, 53 bp, Artificial
  Synthetic oligonucleotide
aggacacaattcttctccttactcgcctaccatcgtcatcttgcatgtagtag

SEQ ID NO: 282697 - DNA, 60 bp, Artificial
  Synthetic oligonucleotide
tatgccgtcgtaggtgcgattccccttcttcctccattagatcataaatatgtgactcct

SEQ ID NO: 282698 - DNA, 59 bp, Artificial
  Synthetic oligonucleotide
ctgaacgttttactactcctagcggagtacaagctacactacattcaagtgagcttcaa

SEQ ID NO: 282699 - DNA, 53 bp, Artificial
  Synthetic oligonucleotide
atgctgactcgctccccaggcgcgtcaggtctcatttttccgggtacacagtg

SEQ ID NO: 282700 - DNA, 53 bp, Artificial
  Synthetic oligonucleotide
cgggagacatcgcagggtcgagcattatgggaggattacggggcagacggggc

SEQ ID NO: 282701 - DNA, 53 bp, Artificial
  Synthetic oligonucleotide
tagccgacaagcggtggtaggcaggtatggacttcccgttagcgtcaggctaa

SEQ ID NO: 282702 - DNA, 53 bp, Artificial
  Synthetic oligonucleotide
gtatctgaattgggaaatttgctacgtatggtccgtctaaagactccgttgtt

SEQ ID NO: 282703 - DNA, 53 bp, Artificial
  Synthetic oligonucleotide
cgggcagatcgtcctacagatctactgtgggttcgacacctcgtcccatcagt

SEQ ID NO: 282704 - DNA, 53 bp, Artificial
  Synthetic oligonucleotide
tagcatatgctagtagtaaaagttgagatagctcattagtagagtttacacat

SEQ ID NO: 282705 - DNA, 53 bp, Artificial
  Synthetic oligonucleotide
tagcactaggcgcccatggccaacacacttcacacccacttgtcatggaccaa

SEQ ID NO: 282706 - DNA, 53 bp, Artificial
  Synthetic oligonucleotide
cgggcatcctctgagcgagcgagatcggttctactccacccatacccagaccc

SEQ ID NO: 282707 - DNA, 53 bp, Artificial
  Synthetic oligonucleotide
acggcttggcagcgaactgagggtgctgcaacatggcaggttggggagttgtg

SEQ ID NO: 282708 - DNA, 53 bp, Artificial
  Synthetic oligonucleotide
agcgtgtcttactgaaagcgctaccataattgcggtaacttggactttgcttc

SEQ ID NO: 282709 - DNA, 60 bp, Artificial
  Synthetic oligonucleotide
agcgtgttgaaatgtctcatggtgcttggactcacatgggtgctgcaccactgcatatcg

SEQ ID NO: 282710 - DNA, 53 bp, Artificial
  Synthetic oligonucleotide
cgatcgtaagtatgtgcggttttcacggttgacagacagtgtggcatacctga

SEQ ID NO: 282711 - DNA, 53 bp, Artificial
  Synthetic oligonucleotide
gacgggactgattctagggcaagacggtgccccgagccacttggacagtggaa

SEQ ID NO: 282712 - DNA, 53 bp, Artificial
  Synthetic oligonucleotide
ggttcccgtatatagatgcaaggttgcccataccggtcagagtagagggatgg

SEQ ID NO: 282713 - DNA, 53 bp, Artificial
  Synthetic oligonucleotide
tagagtcgactttgggcgttccaatcctgtctaggggaacccttgggataagt

SEQ ID NO: 282714 - DNA, 53 bp, Artificial
  Synthetic oligonucleotide
agcgaggaggcttatgctcgtgctgagaaggggctggatcacagtggacgggc

SEQ ID NO: 282715 - DNA, 53 bp, Artificial
  Synthetic oligonucleotide
atgttgttgtccgcagctcgggggatccacatcgatctcaagctacgagcgct

SEQ ID NO: 282716 - DNA, 53 bp, Artificial
  Synthetic oligonucleotide
acgcgtcgcgtccaggcatcttcgacggtggtcggggtttatcctacgaagca

SEQ ID NO: 282717 - DNA, 53 bp, Artificial
  Synthetic oligonucleotide
ggttccgagagttagccgtagatacagagtactactgaagatactcaggtatc

SEQ ID NO: 282718 - DNA, 53 bp, Artificial
  Synthetic oligonucleotide
atgaaggactcagccgaagcgcagatctttacagagactcttctatccagtgt

SEQ ID NO: 282719 - DNA, 53 bp, Artificial
  Synthetic oligonucleotide
atgtccgcaaaccactcgaccgggaaccctacggcagatccatggcacttgat

SEQ ID NO: 282720 - DNA, 60 bp, Artificial
  Synthetic oligonucleotide
gtggcttctcgtagggctcatcataaggactcatgcacggaagcgccgcaagttcgtaga

SEQ ID NO: 282721 - DNA, 53 bp, Artificial
  Synthetic oligonucleotide
aggataaccagacaccaacgatctcagactgtggacgactcgggttctttatt

SEQ ID NO: 282722 - DNA, 53 bp, Artificial
  Synthetic oligonucleotide
attctacttgctctcctgtctcatccggaggaattgttcggtccttctggaaa

SEQ ID NO: 282723 - DNA, 53 bp, Artificial
  Synthetic oligonucleotide
cggagcagattgcaacgtgcattgtctttgtcgtccttagagtctgaggatac

SEQ ID NO: 282724 - DNA, 53 bp, Artificial
  Synthetic oligonucleotide
cgatagcccctggatcggagatgccaatccacctgtcatggctccggtgcttc

SEQ ID NO: 282725 - DNA, 53 bp, Artificial
  Synthetic oligonucleotide
gtgccctgcagcacctaagtggtaaatcagagctaaacaccatggaataaacc

SEQ ID NO: 282726 - DNA, 53 bp, Artificial
  Synthetic oligonucleotide
cgataagccattcttccgggcgcgtcgcaatgtcaggatgtctagtcgcggga

SEQ ID NO: 282727 - DNA, 53 bp, Artificial
  Synthetic oligonucleotide
agcctagcgaagcatcaaatgcagcggtaggcgaaataggatccgatgacgaa

SEQ ID NO: 282728 - DNA, 53 bp, Artificial
  Synthetic oligonucleotide
atctctaatttcgaattggtctaatggacttgatacaaaatcaaagtgacgca

SEQ ID NO: 282729 - DNA, 53 bp, Artificial
  Synthetic oligonucleotide
actcacaagttcgagagtcactatgcattccgcctactattcgatgataaggt

SEQ ID NO: 282730 - DNA, 53 bp, Artificial
  Synthetic oligonucleotide
cgccagggcgctaatcaccctggatactccccgctgagctcctcgcatgtgga

SEQ ID NO: 282731 - DNA, 60 bp, Artificial
  Synthetic oligonucleotide
ctgaagctgacatgaggctgtagcctgattgtcgaaggatggttagcgtgtgtttaagtg

SEQ ID NO: 282732 - DNA, 53 bp, Artificial
  Synthetic oligonucleotide
gtgcagttgtaagactgggtgaacgaaacacggtgccactttgtaaagatgca

SEQ ID NO: 282733 - DNA, 53 bp, Artificial
  Synthetic oligonucleotide
gttaaagaaagcaagctcgcacggattcgaagactctgcttatagcagtgctt

SEQ ID NO: 282734 - DNA, 53 bp, Artificial
  Synthetic oligonucleotide
gttaacggtagactacttatttaccaattaagttgtgctgattcgaattcagc

SEQ ID NO: 282735 - DNA, 53 bp, Artificial
  Synthetic oligonucleotide
agcgcttcaacaaccagagacaccgtctccaatgggagggacctaaaagcaag

SEQ ID NO: 282736 - DNA, 53 bp, Artificial
  Synthetic oligonucleotide
cggggtgacaagcacctggacatgtttatagtatgtgtcatagctaattcggc

SEQ ID NO: 282737 - DNA, 53 bp, Artificial
  Synthetic oligonucleotide
catcataccgtcgcgcgctcacacctgacccatgtagaccgagagtttcggga

SEQ ID NO: 282738 - DNA, 53 bp, Artificial
  Synthetic oligonucleotide
gtacctaatgcaccaccattactgaaattccatcatgctacatcatgaggaat

SEQ ID NO: 282739 - DNA, 53 bp, Artificial
  Synthetic oligonucleotide
tactggtggaattcgtctcgaataaagagacacgactttgagcagctgtcgcg

SEQ ID NO: 282740 - DNA, 53 bp, Artificial
  Synthetic oligonucleotide
atgagaatctgcagagcttagttgacgccgaccggtggccgttttggttaggc

SEQ ID NO: 282741 - DNA, 53 bp, Artificial
  Synthetic oligonucleotide
atgacaagccataccacctgcacagttccctttccgtcccgagtccctcctga

SEQ ID NO: 282742 - DNA, 53 bp, Artificial
  Synthetic oligonucleotide
gtggcttggttacacaagtcctactttactttcccgtggaatgtgtaaagtaa

SEQ ID NO: 282743 - DNA, 53 bp, Artificial
  Synthetic oligonucleotide
gggcaaccttatgcggagctaatgcgatcaccttaacgtaagatacctacccg

SEQ ID NO: 282744 - DNA, 53 bp, Artificial
  Synthetic oligonucleotide
gacatttaaagctttgaccaagatcgcttcattatcacttgggcgctaactgt

SEQ ID NO: 282745 - DNA, 53 bp, Artificial
  Synthetic oligonucleotide
attcatacgtcgtgtcccatctagtctcaaccgaccaagctctaaccgacacg

SEQ ID NO: 282746 - DNA, 52 bp, Artificial
  Synthetic oligonucleotide
cactaccatccagaagcgtggtgattggggtacgattgttcttactggtatt

SEQ ID NO: 282747 - DNA, 52 bp, Artificial
  Synthetic oligonucleotide
ctgcaagctgtgcttttgcgtacaaagcgcagagtagaatgcccgaggacgg

SEQ ID NO: 282748 - DNA, 52 bp, Artificial
  Synthetic oligonucleotide
ctctgtcgatattcccaagccgcgctccggttttaccccgggcggtcgtgac

SEQ ID NO: 282749 - DNA, 52 bp, Artificial
  Synthetic oligonucleotide
tctggctagaccctatatcgacccccgttcccggcgccatgttagattgccc

SEQ ID NO: 282750 - DNA, 52 bp, Artificial
  Synthetic oligonucleotide
ctaggaggacttgcggtcgtcgccatattctttctgctagacgttcctccac

SEQ ID NO: 282751 - DNA, 52 bp, Artificial
  Synthetic oligonucleotide
cacgtcttggcaatacttttggccatttacagccggcatttccaagttcatg

SEQ ID NO: 282752 - DNA, 52 bp, Artificial
  Synthetic oligonucleotide
agtaggtagaatcggtagaaagtttatctactggctacggacacggttgtct

SEQ ID NO: 282753 - DNA, 59 bp, Artificial
  Synthetic oligonucleotide
gtaggtagatatgacggttggaggttattatagagtaaagcgaggctgctttctgcaag

SEQ ID NO: 282754 - DNA, 52 bp, Artificial
  Synthetic oligonucleotide
gtagaatccaacattctcttgcggttttgtcacactccgacgctcttcaaag

SEQ ID NO: 282755 - DNA, 52 bp, Artificial
  Synthetic oligonucleotide
ccagtggcgggtcaatggtgatataccgacggatcatgcggggtggacgacc

SEQ ID NO: 282756 - DNA, 52 bp, Artificial
  Synthetic oligonucleotide
aagaaagcgtccatcactcgctctccgcagccgggatgtgatcgggggtgtc

SEQ ID NO: 282757 - DNA, 52 bp, Artificial
  Synthetic oligonucleotide
gtctcggtgttatgacggaagtctcgtttcggccggacgtgcgcagacggcg

SEQ ID NO: 282758 - DNA, 52 bp, Artificial
  Synthetic oligonucleotide
agcggcttggaatgtgtcggccgtctgtctaattacgggtcagcggtggtgc

SEQ ID NO: 282759 - DNA, 52 bp, Artificial
  Synthetic oligonucleotide
ctgacgcagcagctaaactaccccccgcacaactgcgggaaatccgagaggc

SEQ ID NO: 282760 - DNA, 52 bp, Artificial
  Synthetic oligonucleotide
agtactagtactgtcggagtagtagtaagagtactaagtgcttgggaatgtg

SEQ ID NO: 282761 - DNA, 52 bp, Artificial
  Synthetic oligonucleotide
gtggggctgggtggcagcccagacagtaagattggcaattcccggggcggac

SEQ ID NO: 282762 - DNA, 52 bp, Artificial
  Synthetic oligonucleotide
ctaggtggcgttcttcataaaccgggggcgaacagagggtcggaggctacga

SEQ ID NO: 282763 - DNA, 52 bp, Artificial
  Synthetic oligonucleotide
aactattgtctcatcgcggttacagtgggcggttgtatctactgcgtgaggg

SEQ ID NO: 282764 - DNA, 58 bp, Artificial
  Synthetic oligonucleotide
agcgtctagagaaggtagtttagaatcattcgagaaccgtagggaggcgcacaagaca

SEQ ID NO: 282765 - DNA, 52 bp, Artificial
  Synthetic oligonucleotide
aacgtgatgaaccaacctgtgccgccggaacggactgaattagggcctccgc

SEQ ID NO: 282766 - DNA, 52 bp, Artificial
  Synthetic oligonucleotide
ctatgagagccgagtgccgggacctttagaggcaagaagacggttagcaaaa

SEQ ID NO: 282767 - DNA, 52 bp, Artificial
  Synthetic oligonucleotide
tctgtgacgggtgcttggaaacctctcgctctcaccagtgtaaagaaatggc

SEQ ID NO: 282768 - DNA, 52 bp, Artificial
  Synthetic oligonucleotide
tcttgtacatcatccggaacgaaacatgggtacgggaaggatatgggccaca

SEQ ID NO: 282769 - DNA, 52 bp, Artificial
  Synthetic oligonucleotide
ctcgtcgggacaagccatccggcccattcatcagccgacagccatccactca

SEQ ID NO: 282770 - DNA, 52 bp, Artificial
  Synthetic oligonucleotide
tgatggccgtgcttggtggctctgtaacccgagtttccgagacatggaggac

SEQ ID NO: 282771 - DNA, 52 bp, Artificial
  Synthetic oligonucleotide
ctccggtctctaactgcggtaatggcggctttgtacccttccgggctgggtc

SEQ ID NO: 282772 - DNA, 52 bp, Artificial
  Synthetic oligonucleotide
ggatccatcctattacgtatgtaagaagccgtggctataaaacagccccttg

SEQ ID NO: 282773 - DNA, 52 bp, Artificial
  Synthetic oligonucleotide
aggctaggctccgagtcccgcgatgtccatgcgccaaatacctggatagcag

SEQ ID NO: 282774 - DNA, 52 bp, Artificial
  Synthetic oligonucleotide
cgcagactccattctgtcaacacacaaccagctattgcgatgggttcaatcg

SEQ ID NO: 282775 - DNA, 59 bp, Artificial
  Synthetic oligonucleotide
gtgggaaatcttagtatcgttgcagtgccagctattggtgcggaccccgggaggacatg

SEQ ID NO: 282776 - DNA, 52 bp, Artificial
  Synthetic oligonucleotide
aggagcctccaccgccgtacacggagagtcctgctcaggagaatcccgatac

SEQ ID NO: 282777 - DNA, 52 bp, Artificial
  Synthetic oligonucleotide
cacgcaggaacgctgcggtactcccaccagctgtaggggaccaacttgcata

SEQ ID NO: 282778 - DNA, 52 bp, Artificial
  Synthetic oligonucleotide
gcctcggtccctcaaccaggggctaagctccaggtcataggtgcaggtctct

SEQ ID NO: 282779 - DNA, 52 bp, Artificial
  Synthetic oligonucleotide
ggctcggatcaagctcatgcgatatgtatgtcccgacagacagagtaaagtc

SEQ ID NO: 282780 - DNA, 52 bp, Artificial
  Synthetic oligonucleotide
aagcttggaaagttgcaagaggtgcttctcaactgccctatggatttgctcc

SEQ ID NO: 282781 - DNA, 52 bp, Artificial
  Synthetic oligonucleotide
cgcattgtcaacacgcgcgacaactgtcacttccttctcgtagtgatcctct

SEQ ID NO: 282782 - DNA, 52 bp, Artificial
  Synthetic oligonucleotide
gccggtcgctgaacagagagcatcctccgtccctctggactggtccttgttt

SEQ ID NO: 282783 - DNA, 52 bp, Artificial
  Synthetic oligonucleotide
cgcccgggagacagggtagtgaagaggcggagcatcggttggtgaatgtgag

SEQ ID NO: 282784 - DNA, 52 bp, Artificial
  Synthetic oligonucleotide
gtgcccatggcgtgatacctggggaggtagtggctgccatgcagaagagtgc

SEQ ID NO: 282785 - DNA, 52 bp, Artificial
  Synthetic oligonucleotide
gtgatggagcgataaacatgaccaagacatacagtcaaccgagcacatcccc

SEQ ID NO: 282786 - DNA, 53 bp, Artificial
  Synthetic oligonucleotide
cggacccgtactactattgtacaccgggggcccacagcgaaacagcacggaaa

SEQ ID NO: 282787 - DNA, 52 bp, Artificial
  Synthetic oligonucleotide
gggtgaaagcatactgttacgctacgaccgtgagcgacaagtcgatccatcg

SEQ ID NO: 282788 - DNA, 52 bp, Artificial
  Synthetic oligonucleotide
tgagccgaataagggagagatcttgttgttggagcacgggcggtcccactat

SEQ ID NO: 282789 - DNA, 52 bp, Artificial
  Synthetic oligonucleotide
tgagagggtcttcgtcgggctcacggctcagtggagacgtcggttgatcgga

SEQ ID NO: 282790 - DNA, 52 bp, Artificial
  Synthetic oligonucleotide
gtgcaactggcgtgcctacttgctattgcagccaagaaaacgcgacgcccta

SEQ ID NO: 282791 - DNA, 52 bp, Artificial
  Synthetic oligonucleotide
ctcgcattggtcaagactctggggaccccgcgctaccccgacattcaccccg

SEQ ID NO: 282792 - DNA, 52 bp, Artificial
  Synthetic oligonucleotide
gtggccgactggttatacttctatcatggcagactacggagtgtacaaccac

SEQ ID NO: 282793 - DNA, 52 bp, Artificial
  Synthetic oligonucleotide
ctattactccatagacgatggtgtggttattgtgtatgggggctcatttcaa

SEQ ID NO: 282794 - DNA, 52 bp, Artificial
  Synthetic oligonucleotide
caccagtgggatggaccaagccaaaccctgtactatcgcggaaacggcccac

SEQ ID NO: 282795 - DNA, 52 bp, Artificial
  Synthetic oligonucleotide
ctattctgtgcccgtgtcgagcattccgatcgccgattgttaatccacgaaa

SEQ ID NO: 282796 - DNA, 52 bp, Artificial
  Synthetic oligonucleotide
gcccttaaccccgcggcaccaactcagcaacactatcgtgtccatgtaccgc

SEQ ID NO: 282797 - DNA, 58 bp, Artificial
  Synthetic oligonucleotide
gtgctcggggaattcagactcatctggctgaaggaggtagccacgttgttggaggggt

SEQ ID NO: 282798 - DNA, 52 bp, Artificial
  Synthetic oligonucleotide
aagagatccggatcggttcccaatttcgaaagatcgagtaattttgtctgct

SEQ ID NO: 282799 - DNA, 52 bp, Artificial
  Synthetic oligonucleotide
aggtctgcccatgcagggcatagtcaaaccgctagctctacaaggcgggcag

SEQ ID NO: 282800 - DNA, 52 bp, Artificial
  Synthetic oligonucleotide
gtctgcatatggacaatattacctatcaagtactatagtttactttgtagca

SEQ ID NO: 282801 - DNA, 52 bp, Artificial
  Synthetic oligonucleotide
ggctgccatgcagaagagtgcaacgggaacaaatggagcccccaggagagcg

SEQ ID NO: 282802 - DNA, 52 bp, Artificial
  Synthetic oligonucleotide
agctgaacgcggtaagtcgaggtgccagcacaagaggggcactctaggctga

SEQ ID NO: 282803 - DNA, 52 bp, Artificial
  Synthetic oligonucleotide
agctgacgaggataccgtatccgtactcccacccttcgagaagcacttaggc

SEQ ID NO: 282804 - DNA, 52 bp, Artificial
  Synthetic oligonucleotide
ctcaccgaaacatggagaccggggatcagagaacacaatgcactcaggccac

SEQ ID NO: 282805 - DNA, 52 bp, Artificial
  Synthetic oligonucleotide
ggatagagtctcacccgtctcggaggcacacgcccggtaggtgtcttcaagt

SEQ ID NO: 282806 - DNA, 52 bp, Artificial
  Synthetic oligonucleotide
ctctcacctaaatagaaactcaaatagcgactacgaagatcagagcctcttt

SEQ ID NO: 282807 - DNA, 52 bp, Artificial
  Synthetic oligonucleotide
ctcagccacgttagtgtggtggataagcttgccttgtgccattccacatcag

SEQ ID NO: 282808 - DNA, 60 bp, Artificial
  Synthetic oligonucleotide
tcaggcgatagacgagattgatatcgaaagccagatctgtactacaccggatgatttcaa

SEQ ID NO: 282809 - DNA, 56 bp, Artificial
  Synthetic oligonucleotide
ctgacagtccggttaaaccgattcttatgcgctcccatatccttaaagggtcagta

SEQ ID NO: 282810 - DNA, 52 bp, Artificial
  Synthetic oligonucleotide
cgcaatacgtaccagccactcgaagtcagcgtatagaccaacaaaccggtct

SEQ ID NO: 282811 - DNA, 52 bp, Artificial
  Synthetic oligonucleotide
gtgaaggatccagaatggctaggtgggtttctcaatgggctcaaggagacac

SEQ ID NO: 282812 - DNA, 52 bp, Artificial
  Synthetic oligonucleotide
tgcagagaggcggtgttaccacatctagttaaggggaggatgttagtctggg

SEQ ID NO: 282813 - DNA, 52 bp, Artificial
  Synthetic oligonucleotide
gtactatagtccagtgaacaagggacaagactcacaccgtataaccgtagct

SEQ ID NO: 282814 - DNA, 52 bp, Artificial
  Synthetic oligonucleotide
ctctatacgggtaggctaattgaaacaggctacaagcgatcacagcgcgata

SEQ ID NO: 282815 - DNA, 52 bp, Artificial
  Synthetic oligonucleotide
cgccggagtcaaacagaaacggaaattctgagcgaagtgggcaggaacagac

SEQ ID NO: 282816 - DNA, 52 bp, Artificial
  Synthetic oligonucleotide
cggtgaggcccactaggcgccccctcgcgatggtagtcccgttcacgcggac

SEQ ID NO: 282817 - DNA, 52 bp, Artificial
  Synthetic oligonucleotide
gctctattctcctaaacatgactcatcactagggctgctaattaacttacgt

SEQ ID NO: 282818 - DNA, 52 bp, Artificial
  Synthetic oligonucleotide
cccggcccaaagtccgcgtacattcccaggtcgtctgccaagaactgcgtaa

SEQ ID NO: 282819 - DNA, 52 bp, Artificial
  Synthetic oligonucleotide
gtataccgccagaggtcggattgacaaccttattcggctccacaagatactc

SEQ ID NO: 282820 - DNA, 55 bp, Artificial
  Synthetic oligonucleotide
aggacggaactcaagcacaatggagcaattaccgaaaaagattccattaccggta

SEQ ID NO: 282821 - DNA, 52 bp, Artificial
  Synthetic oligonucleotide
cggtattctgtttactcaggccgagtattgtgagtggtccccgtgccatccc

SEQ ID NO: 282822 - DNA, 52 bp, Artificial
  Synthetic oligonucleotide
cccgggtactccgcaagtgtctcgcacacacatttacgccaattgaggcccc

SEQ ID NO: 282823 - DNA, 52 bp, Artificial
  Synthetic oligonucleotide
ttcggcctattttcggggccttttagtgcacctagcccgacgatggtttgga

SEQ ID NO: 282824 - DNA, 52 bp, Artificial
  Synthetic oligonucleotide
ttcggggtcgggaagggtatatggacgctcgtcgattcttcggccaagcttt

SEQ ID NO: 282825 - DNA, 52 bp, Artificial
  Synthetic oligonucleotide
gggagcgggaattggacagcgctcgcatgacgcttgctcgtctcaacgacca

SEQ ID NO: 282826 - DNA, 52 bp, Artificial
  Synthetic oligonucleotide
atctgtaccagcctcaactacgtgaagactggtctcacgagattcaattcgc

SEQ ID NO: 282827 - DNA, 52 bp, Artificial
  Synthetic oligonucleotide
atctgtctataccttgtaacccgtggacacgtgttatggtcgccctcgttag

SEQ ID NO: 282828 - DNA, 52 bp, Artificial
  Synthetic oligonucleotide
attcgcccctgaagcgagccataacgcgagtgtgagcgctgcacagatgaca

SEQ ID NO: 282829 - DNA, 52 bp, Artificial
  Synthetic oligonucleotide
cccgtcacgccttggtggggagccgttcactctagaagcaccgatacatcct

SEQ ID NO: 282830 - DNA, 52 bp, Artificial
  Synthetic oligonucleotide
atcctcgcagtagtgaacacgtgaagcccatactaaataacgcatgccgcga

SEQ ID NO: 282831 - DNA, 60 bp, Artificial
  Synthetic oligonucleotide
gtaggccaagcaattatacgcaaatgtcatagaaagaccattgcacgcgaccaatgtagc

SEQ ID NO: 282832 - DNA, 52 bp, Artificial
  Synthetic oligonucleotide
ggactgttcggaacctcgcttggagaatctgtaatgcgaagcgggtcttggt

SEQ ID NO: 282833 - DNA, 52 bp, Artificial
  Synthetic oligonucleotide
atttcccgagacgtaaatgccgcgcctccgcaaatggttgtgagtagagctt

SEQ ID NO: 282834 - DNA, 52 bp, Artificial
  Synthetic oligonucleotide
atcgacgagattgtgcaacagaacatgccctctcagagtggtgggcccggca

SEQ ID NO: 282835 - DNA, 52 bp, Artificial
  Synthetic oligonucleotide
cgtaaaaccaatccgtgcctgggtagatgcatgtccgcatttagtaacctcc

SEQ ID NO: 282836 - DNA, 52 bp, Artificial
  Synthetic oligonucleotide
cggactctccgtacttacgtaccgcactacatcctgtatgtatggtgcatac

SEQ ID NO: 282837 - DNA, 52 bp, Artificial
  Synthetic oligonucleotide
cggttcgaacaatgccggtgtgatacatatggttggtgtgggccgttggcgt

SEQ ID NO: 282838 - DNA, 52 bp, Artificial
  Synthetic oligonucleotide
cggactgaccgcgttaaccgtgataccatgagtctggcccagttccgtagcc

SEQ ID NO: 282839 - DNA, 52 bp, Artificial
  Synthetic oligonucleotide
atcgcctaccctgcacatcgtggtgtctttggggcactctacatggtcggct

SEQ ID NO: 282840 - DNA, 52 bp, Artificial
  Synthetic oligonucleotide
gctcggcccatctcgatatctatcccggcctgccaaacgtggcgcaaagtct

SEQ ID NO: 282841 - DNA, 52 bp, Artificial
  Synthetic oligonucleotide
cccgcgatacaataaagcacagaggtcacgccacaccgcgcaagacacacgg

SEQ ID NO: 282842 - DNA, 60 bp, Artificial
  Synthetic oligonucleotide
gtgggctatgtgcacgtgatggactgctatgaagacatctaactaacaagcgcaatagaa

SEQ ID NO: 282843 - DNA, 52 bp, Artificial
  Synthetic oligonucleotide
atcggataaaatctatcgatcgaggatttaatctacccttgccctactgtag

SEQ ID NO: 282844 - DNA, 52 bp, Artificial
  Synthetic oligonucleotide
atcggataattcagaccacctggcccgatagtcactctattaccacccagta

SEQ ID NO: 282845 - DNA, 52 bp, Artificial
  Synthetic oligonucleotide
atcggctgccaacacagtaaggccgccagccaggagtcgaatgtttcactga

SEQ ID NO: 282846 - DNA, 52 bp, Artificial
  Synthetic oligonucleotide
gtccaacagcgtaacatgccggcccggaacaccaatgatcggcctctcgaag

SEQ ID NO: 282847 - DNA, 52 bp, Artificial
  Synthetic oligonucleotide
atgtgcaaggtgcgaggcacatgaaagcagagtcatcgggggtggaggcacg

SEQ ID NO: 282848 - DNA, 52 bp, Artificial
  Synthetic oligonucleotide
gtattacttcgtaagtgacgccaactatacttgaaacgagcaaaactgaccg

SEQ ID NO: 282849 - DNA, 52 bp, Artificial
  Synthetic oligonucleotide
gcttttgaacgatagcaaccggttggtaaggactaggatactagacgtcaat

SEQ ID NO: 282850 - DNA, 52 bp, Artificial
  Synthetic oligonucleotide
atggagtcaatattagtgagatcttctgcaaattaactcaagatcttatact

SEQ ID NO: 282851 - DNA, 52 bp, Artificial
  Synthetic oligonucleotide
ccctggcaagtgcttcggcggtgccatctctagcctggggactaatgctgct

SEQ ID NO: 282852 - DNA, 52 bp, Artificial
  Synthetic oligonucleotide
gggcaaagattcgggttaccttgggctctagtagggcacccgcggagcaatg

SEQ ID NO: 282853 - DNA, 60 bp, Artificial
  Synthetic oligonucleotide
cggaaagataggcccatcgctcgtgagcatacatcgactaggggtgagttagtttgtaca

SEQ ID NO: 282854 - DNA, 52 bp, Artificial
  Synthetic oligonucleotide
aaaccacccctctgcagtagcgtggattgtgggctcgggggcactccgcata

SEQ ID NO: 282855 - DNA, 52 bp, Artificial
  Synthetic oligonucleotide
tttcaatccgtcacaagaaccagccgttgcctgtgccctcttagtggatcat

SEQ ID NO: 282856 - DNA, 52 bp, Artificial
  Synthetic oligonucleotide
tttcggcactggtaagttacccacagcatccactcatcgagtgcacctattg

SEQ ID NO: 282857 - DNA, 52 bp, Artificial
  Synthetic oligonucleotide
cccttattacgtctgtgtaccgtattgtcgggtgcttgctgtttacctgggt

SEQ ID NO: 282858 - DNA, 52 bp, Artificial
  Synthetic oligonucleotide
aaaatcaaccggaggcgcgtaaatgtgacccatatgtgcgtgaaaacaagat

SEQ ID NO: 282859 - DNA, 47 bp, Artificial
  Synthetic oligonucleotide
aaaatatagtccccccgcccctaaatcccttcgggttttgggcgagg

SEQ ID NO: 282860 - DNA, 52 bp, Artificial
  Synthetic oligonucleotide
atggtcaggtctatgcgtcgtgtatttcgtaaggctagatgtatctcgctga

SEQ ID NO: 282861 - DNA, 52 bp, Artificial
  Synthetic oligonucleotide
atggtcgcatgccgcgtcaccagaatcggccagggtgtctgcaaggacgcag

SEQ ID NO: 282862 - DNA, 52 bp, Artificial
  Synthetic oligonucleotide
cggccgggacagccaaacggcccagtcaaattcctcgccgtcggtcttttta

SEQ ID NO: 282863 - DNA, 52 bp, Artificial
  Synthetic oligonucleotide
ggacacgttggtcttgggtcgttccatagtttcgcgagagtgttttgattcc

SEQ ID NO: 282864 - DNA, 57 bp, Artificial
  Synthetic oligonucleotide
ctgaggtcttccgtggatcacacgactttcggactgactttccgttgtccctcctca

SEQ ID NO: 282865 - DNA, 52 bp, Artificial
  Synthetic oligonucleotide
gggaggacaagagctccaagactagtgcctcaagggaatttggcctgtggtg

SEQ ID NO: 282866 - DNA, 52 bp, Artificial
  Synthetic oligonucleotide
gggcatgacaaagacaaacccgtctgttgtcgactctgtttgtccgtggacc

SEQ ID NO: 282867 - DNA, 52 bp, Artificial
  Synthetic oligonucleotide
aaaggcctctcggtccttccttaccgactgcagaagatcgttgcactcaaca

SEQ ID NO: 282868 - DNA, 52 bp, Artificial
  Synthetic oligonucleotide
gctgtaggcacgcaatccagcgccttaatcgtgatcctctcagggcagctga

SEQ ID NO: 282869 - DNA, 52 bp, Artificial
  Synthetic oligonucleotide
attcaatgggaactgcattctcccaaccggacctgtttctgaatgctcgtct

SEQ ID NO: 282870 - DNA, 52 bp, Artificial
  Synthetic oligonucleotide
cggggagcctgttaagttgtttagttgctaaactcgactcgtttgggaagcg

SEQ ID NO: 282871 - DNA, 52 bp, Artificial
  Synthetic oligonucleotide
ttgctgccgagcatgggctggaattgaccccagacgggtgtcacttgcgctg

SEQ ID NO: 282872 - DNA, 52 bp, Artificial
  Synthetic oligonucleotide
ccctcggccttacccggacgaaccgtggcggtggctcccattcgcgctagat

SEQ ID NO: 282873 - DNA, 52 bp, Artificial
  Synthetic oligonucleotide
atgttgggcagagtatcatgatcactatttgtctcaaagattgtcgtgttat

SEQ ID NO: 282874 - DNA, 52 bp, Artificial
  Synthetic oligonucleotide
atgcgctgccccgggtcgtgtgagttagggccgcactgttggcaggatccat

SEQ ID NO: 282875 - DNA, 57 bp, Artificial
  Synthetic oligonucleotide
cggaaaatcaaagtagtggaatttatgggagctttgcagagaaaattgtaagcagga

SEQ ID NO: 282876 - DNA, 52 bp, Artificial
  Synthetic oligonucleotide
cgggcctatttgtcctacagaaggggaatgtttgattcaagtcgagcagagc

SEQ ID NO: 282877 - DNA, 52 bp, Artificial
  Synthetic oligonucleotide
gtcacctgtacgtggaagggagggatgctggcgtatgtgagtatgtatggga

SEQ ID NO: 282878 - DNA, 52 bp, Artificial
  Synthetic oligonucleotide
atgtggtgcagcggggagctgtgtggagtggttgggaagggcacaaaccggt

SEQ ID NO: 282879 - DNA, 52 bp, Artificial
  Synthetic oligonucleotide
ttgtctcaaggccgattcacttgtctcccaggcctcaataacgataccggat

SEQ ID NO: 282880 - DNA, 52 bp, Artificial
  Synthetic oligonucleotide
ggaccgagggttggattgaggctgtgcggcatctgcagtgttgtgatccgaa

SEQ ID NO: 282881 - DNA, 52 bp, Artificial
  Synthetic oligonucleotide
ttgtgctcgggtggtactagtccagggcaatgattcgatacggctggtatca

SEQ ID NO: 282882 - DNA, 52 bp, Artificial
  Synthetic oligonucleotide
tggggtgctctgggatgcatcggacgggtacacaggcaagtagtaattcgac

SEQ ID NO: 282883 - DNA, 52 bp, Artificial
  Synthetic oligonucleotide
agtgttatgcgcttagtcgaccttctctagatataccggagatctagctacc

SEQ ID NO: 282884 - DNA, 52 bp, Artificial
  Synthetic oligonucleotide
agtgttgctagagcattgttagtgacagagaccgtcaatcattcgtgcgatc

SEQ ID NO: 282885 - DNA, 52 bp, Artificial
  Synthetic oligonucleotide
aacctgggaaacagcgactaacctttgacaccgcacattctggcaagtctgc

SEQ ID NO: 282886 - DNA, 60 bp, Artificial
  Synthetic oligonucleotide
cgcttttaccacgcgaagctgcgaagaaggatagacacgcgcagggagctgcgttgctaa

SEQ ID NO: 282887 - DNA, 52 bp, Artificial
  Synthetic oligonucleotide
ccccggtgggacgtagaccccatcaacagtggcgccgcatgacactcgctgt

SEQ ID NO: 282888 - DNA, 52 bp, Artificial
  Synthetic oligonucleotide
agttaacgtatataaacgagcttgccaggcttaacgtttgatatttgctact

SEQ ID NO: 282889 - DNA, 52 bp, Artificial
  Synthetic oligonucleotide
caagttcgggtgcataggcgcgcacgaatcctctctgccgatccttcggccg

SEQ ID NO: 282890 - DNA, 52 bp, Artificial
  Synthetic oligonucleotide
tggttaaacgtccaattgatctgcctcgttacttagaagcgcatactcatcc

SEQ ID NO: 282891 - DNA, 52 bp, Artificial
  Synthetic oligonucleotide
cgctatgcggattctcatgggcttttgtgccgtctgccggagccgtatgtcc

SEQ ID NO: 282892 - DNA, 52 bp, Artificial
  Synthetic oligonucleotide
agttctgcagagggcccatggtaaaatcagcagcctggtgccatgatccgga

SEQ ID NO: 282893 - DNA, 52 bp, Artificial
  Synthetic oligonucleotide
ccgcctccactcatcaggagccttgagcacactgaccgaggtcagtcccggc

SEQ ID NO: 282894 - DNA, 52 bp, Artificial
  Synthetic oligonucleotide
cccctaattccaagctagcagttcctccaaacagtagtaatatactatactg

SEQ ID NO: 282895 - DNA, 52 bp, Artificial
  Synthetic oligonucleotide
agttgccgcgaatcggctttatcccgtccttgtcagtcgacgcgggcgccca

SEQ ID NO: 282896 - DNA, 52 bp, Artificial
  Synthetic oligonucleotide
ctaacaggtggatgcggactatgatcgaacatgccttagcaccaaactctcg

SEQ ID NO: 282897 - DNA, 59 bp, Artificial
  Synthetic oligonucleotide
ctgatcaataagtcaagaaagtatttatgctacagtacatggtatagtagtaaaccaaa

SEQ ID NO: 282898 - DNA, 52 bp, Artificial
  Synthetic oligonucleotide
tgtcaatggctaaaggacgtgagtataatcctgtactgaaagctgagactac

SEQ ID NO: 282899 - DNA, 52 bp, Artificial
  Synthetic oligonucleotide
ccccagatgctcatattgtatgtggatacgcgctgagcccgtggaacgaagg

SEQ ID NO: 282900 - DNA, 52 bp, Artificial
  Synthetic oligonucleotide
ggtcatcgtgctctcgtaccttattgtcactaatacgcctctcggtcgtacc

SEQ ID NO: 282901 - DNA, 52 bp, Artificial
  Synthetic oligonucleotide
ccccatctgcaatcttgggagcagtcgcagcgcaatttctctagcatccaag

SEQ ID NO: 282902 - DNA, 52 bp, Artificial
  Synthetic oligonucleotide
cgcggcattagtgactgcaaaactctttcggccgcctcggatccgccaacgg

SEQ ID NO: 282903 - DNA, 52 bp, Artificial
  Synthetic oligonucleotide
aacgcttggaatccccacgggatgtcgcctacctcgcttgtcgcaagaagca

SEQ ID NO: 282904 - DNA, 52 bp, Artificial
  Synthetic oligonucleotide
ggctggtatgtgtctgcgtcataatatagcacatgtactgacagtggtaggc

SEQ ID NO: 282905 - DNA, 52 bp, Artificial
  Synthetic oligonucleotide
ctagcagctttgcgaatgacgacacccgtaacgctgggaccaatccagttcg

SEQ ID NO: 282906 - DNA, 52 bp, Artificial
  Synthetic oligonucleotide
tggcgactccgaacggaatatgggcattatgataacgacggatgtcactctg

SEQ ID NO: 282907 - DNA, 52 bp, Artificial
  Synthetic oligonucleotide
agtgacggcacagctgcggcacccggagtcatcgactattgatcctccgtgg

SEQ ID NO: 282908 - DNA, 60 bp, Artificial
  Synthetic oligonucleotide
ctgatcgccgactcggcgaatgtgtataaacttggccgaactaatgttttcagtgcatcg

SEQ ID NO: 282909 - DNA, 52 bp, Artificial
  Synthetic oligonucleotide
ctaccttttattcttagtcgtggcctgtcatacacacgttttaacctcaacg

SEQ ID NO: 282910 - DNA, 52 bp, Artificial
  Synthetic oligonucleotide
ccgcgtcttgtcaggtgattgcccgtagagccgtgcttgacccaaaaaggct

SEQ ID NO: 282911 - DNA, 52 bp, Artificial
  Synthetic oligonucleotide
gtcggtgaaaggcggatagatctctgcctggatcaaacccctgatagcgtat

SEQ ID NO: 282912 - DNA, 52 bp, Artificial
  Synthetic oligonucleotide
tgggcgtcactaagaccaggatggtggacgttagccctgcaacggggcaaaa

SEQ ID NO: 282913 - DNA, 52 bp, Artificial
  Synthetic oligonucleotide
caatcccgactacgtgctacgctcgggcattatcaccagtatgatctccggg

SEQ ID NO: 282914 - DNA, 52 bp, Artificial
  Synthetic oligonucleotide
ccccgcctgcgtctccaatcaaaagatttgacttatcacttgaaaaggcacc

SEQ ID NO: 282915 - DNA, 52 bp, Artificial
  Synthetic oligonucleotide
gtcgggatggatcgaccgcactacctacttccgggccccaaccccgaacctc

SEQ ID NO: 282916 - DNA, 52 bp, Artificial
  Synthetic oligonucleotide
tggggaccccgcgctaccccgacattcaccccggactagtctgcctttaggc

SEQ ID NO: 282917 - DNA, 52 bp, Artificial
  Synthetic oligonucleotide
cgtgactctccccgaactcagctcacattcgcggcatcaggtggttcgcggc

SEQ ID NO: 282918 - DNA, 52 bp, Artificial
  Synthetic oligonucleotide
aaccagctgattctattggcaagcatgctgagaccaaatcctagtgctgcat

SEQ ID NO: 282919 - DNA, 59 bp, Artificial
  Synthetic oligonucleotide
gtatcgccagtggggtgggcttcgctccaccactacttgtttggtctgtctgagtcgac

SEQ ID NO: 282920 - DNA, 60 bp, Artificial
  Synthetic oligonucleotide
aggactctcatctgccgttcacgcaatccatcattgtccaagtttggtaattttcatcgc

SEQ ID NO: 282921 - DNA, 52 bp, Artificial
  Synthetic oligonucleotide
gcgtggacggtttacgaggagttgatcctgagggccgaagtccagtggggat

SEQ ID NO: 282922 - DNA, 52 bp, Artificial
  Synthetic oligonucleotide
gcgtggattgtgggctcgggggcactccgcatatacctcgctagtactaggg

SEQ ID NO: 282923 - DNA, 52 bp, Artificial
  Synthetic oligonucleotide
atcacgggattttcggtcgtaacggccgtaacggctctatcggtcatttaca

SEQ ID NO: 282924 - DNA, 52 bp, Artificial
  Synthetic oligonucleotide
gtagcgcagaggactagcaaggcctcggataaggctccgcaatcgcagcccg

SEQ ID NO: 282925 - DNA, 52 bp, Artificial
  Synthetic oligonucleotide
cggaaaccatggagcgaccccaagctcggcccatctcgatatctatcccggc

SEQ ID NO: 282926 - DNA, 52 bp, Artificial
  Synthetic oligonucleotide
ggagattcctggtgggggctaataaatacgagggtttcatttccctgggata

SEQ ID NO: 282927 - DNA, 52 bp, Artificial
  Synthetic oligonucleotide
gctaaaccccagagtgcaggtcgaccaacccagcaacattccgctcctagag

SEQ ID NO: 282928 - DNA, 52 bp, Artificial
  Synthetic oligonucleotide
gtagcgttccagtcattgattacgaaggcgttattctcctggctgcctatca

SEQ ID NO: 282929 - DNA, 52 bp, Artificial
  Synthetic oligonucleotide
ccgcacctgggagtctatgcaacgtgtcaagccgtgaacccaaagtagacct

SEQ ID NO: 282930 - DNA, 52 bp, Artificial
  Synthetic oligonucleotide
ccgcacatttcctttggccgccgattggcccagttcacacgcccgcgacgtc

SEQ ID NO: 282931 - DNA, 60 bp, Artificial
  Synthetic oligonucleotide
gtagtagatataataactatttagacgtgctctaagatatataaaatccaatatagtctc

SEQ ID NO: 282932 - DNA, 52 bp, Artificial
  Synthetic oligonucleotide
atcccgggtcttgcggtacgtgtcgaagtcggtaacctccgacaagtgctgg

SEQ ID NO: 282933 - DNA, 52 bp, Artificial
  Synthetic oligonucleotide
aacagtacccatccgcgactatcagcgtcgaggttgagaagcctgggcgtga

SEQ ID NO: 282934 - DNA, 52 bp, Artificial
  Synthetic oligonucleotide
cggacatggaggtgggacgcttcgtggtggtcgttccggacaagggacgccg

SEQ ID NO: 282935 - DNA, 52 bp, Artificial
  Synthetic oligonucleotide
atttcgctcgttgttctctctcacaccctcgttccccaagtgactgcggctc

SEQ ID NO: 282936 - DNA, 52 bp, Artificial
  Synthetic oligonucleotide
cccctcgcgatggtagtcccgttcacgcggacgatcccgattacggtcacgc

SEQ ID NO: 282937 - DNA, 52 bp, Artificial
  Synthetic oligonucleotide
agtttagcctgacctgcactaacaaatgagaaataccgcgacgggtcgcgac

SEQ ID NO: 282938 - DNA, 52 bp, Artificial
  Synthetic oligonucleotide
tgtccttatgggcccaaagccgtcacatcaagccaccacgctgccagtacgg

SEQ ID NO: 282939 - DNA, 52 bp, Artificial
  Synthetic oligonucleotide
ataactgtcgtcagccgacataggtgccagcccaagcgcactgaggtataca

SEQ ID NO: 282940 - DNA, 52 bp, Artificial
  Synthetic oligonucleotide
cgttaccgccgttgggcgtttaggccgctgcacaagactagggctgcgggta

SEQ ID NO: 282941 - DNA, 52 bp, Artificial
  Synthetic oligonucleotide
gtagcatgggatcccgcagtgagagagctagggaaggccgggtctcaccagg

SEQ ID NO: 282942 - DNA, 59 bp, Artificial
  Synthetic oligonucleotide
aggaaatacggaactatctacaggcttcttggatactaattatccctcaccagctgaca

SEQ ID NO: 282943 - DNA, 52 bp, Artificial
  Synthetic oligonucleotide
tgtggcaggcatggtaggcgggcttcatatccagggtaaggtgctcgctcgg

SEQ ID NO: 282944 - DNA, 52 bp, Artificial
  Synthetic oligonucleotide
atactctattcagaaaccccgttgtagtgtatggctttcctattcggcgacg

SEQ ID NO: 282945 - DNA, 52 bp, Artificial
  Synthetic oligonucleotide
tgtgttacacacagcccggatacatgaccctgctgcatcctatccgatgaca

SEQ ID NO: 282946 - DNA, 52 bp, Artificial
  Synthetic oligonucleotide
gcgtcagctagggtcgctgtactggcagttagaggacatctggcaagccccg

SEQ ID NO: 282947 - DNA, 52 bp, Artificial
  Synthetic oligonucleotide
atatcaggttgtatatgaatgccggatgatccctgcacaactagtatctcgt

SEQ ID NO: 282948 - DNA, 52 bp, Artificial
  Synthetic oligonucleotide
atatgattagcggagtgtcgaatgtagagatctgttgggatgtcacgtactc

SEQ ID NO: 282949 - DNA, 52 bp, Artificial
  Synthetic oligonucleotide
cgtgccatgagagcctccaaacgaagacgagtaacaggcgccgatcccattg

SEQ ID NO: 282950 - DNA, 52 bp, Artificial
  Synthetic oligonucleotide
cccgaccattacttgtagtctgcaattacatgccatgatatgccagtgtagg

SEQ ID NO: 282951 - DNA, 52 bp, Artificial
  Synthetic oligonucleotide
atatgtgtttgccaactagttgtttccaacagggtatcaacagggtatgttg

SEQ ID NO: 282952 - DNA, 52 bp, Artificial
  Synthetic oligonucleotide
actgtcgcccgcgtcttgtcaggtgattgcccgtagagccgtgcttgaccca

SEQ ID NO: 282953 - DNA, 58 bp, Artificial
  Synthetic oligonucleotide
atttggtgcccttcttgttagaagcctcgggaatatataacctgctttgcatgcggtg

SEQ ID NO: 282954 - DNA, 52 bp, Artificial
  Synthetic oligonucleotide
cctcaatccctggagcgatctccaatcgctctcacagagctattcgtcctaa

SEQ ID NO: 282955 - DNA, 52 bp, Artificial
  Synthetic oligonucleotide
gaagactatgtccacctgggcaagcgagagaacgcatttgtatcaaccaaga

SEQ ID NO: 282956 - DNA, 52 bp, Artificial
  Synthetic oligonucleotide
gaagaatgcgagacgcgccaggacgaattagcagtccactccccttcggcga

SEQ ID NO: 282957 - DNA, 52 bp, Artificial
  Synthetic oligonucleotide
ggcctccaaatctgcgaacctcaggaggtccgagcaccgctgtcagttaggg

SEQ ID NO: 282958 - DNA, 52 bp, Artificial
  Synthetic oligonucleotide
gatattattatactaactaattagtaatttaaacaatcgaactttcgattgc

SEQ ID NO: 282959 - DNA, 52 bp, Artificial
  Synthetic oligonucleotide
ggggcacatcggagcatgggtgcattttccagctctcagacctagggattat

SEQ ID NO: 282960 - DNA, 52 bp, Artificial
  Synthetic oligonucleotide
taattgctcgacgggagagccattaccaggtaagcccatgagtttgctccgc

SEQ ID NO: 282961 - DNA, 52 bp, Artificial
  Synthetic oligonucleotide
gatcgaataagcgcggctcgcaaatcacagcgacgactggattccggcccta

SEQ ID NO: 282962 - DNA, 52 bp, Artificial
  Synthetic oligonucleotide
gaactcgctcatcttactgctatatgccgagagggccattcgcggggttcta

SEQ ID NO: 282963 - DNA, 52 bp, Artificial
  Synthetic oligonucleotide
ccaagatatgcgtccgggaccacagtaacgccttgtcaagcccccaagaggc

SEQ ID NO: 282964 - DNA, 60 bp, Artificial
  Synthetic oligonucleotide
cggacacgtgtctcgacataagtttctccactcgctattcagaagtatcaatcagcaccg

SEQ ID NO: 282965 - DNA, 52 bp, Artificial
  Synthetic oligonucleotide
taatggctcataccttcgttgaggactgttgggacgcgtatctctccgtcgc

SEQ ID NO: 282966 - DNA, 52 bp, Artificial
  Synthetic oligonucleotide
cctagcgctcactcttctgtatccttctctgactatcgagctgtcacactca

SEQ ID NO: 282967 - DNA, 52 bp, Artificial
  Synthetic oligonucleotide
tcatccccacgggacaactttgctatctgaacggacgacagcggaagtggga

SEQ ID NO: 282968 - DNA, 52 bp, Artificial
  Synthetic oligonucleotide
tacgaaggctaccttgatacgcccagggatccgctcgctgcgaataactggt

SEQ ID NO: 282969 - DNA, 52 bp, Artificial
  Synthetic oligonucleotide
actcgtcacccggcgagatccgtcaacggtgtctttgctagggtacacacac

SEQ ID NO: 282970 - DNA, 52 bp, Artificial
  Synthetic oligonucleotide
actcgtgttttagcgaactcaaaggggtactgtgacacgggttgaaggttaa

SEQ ID NO: 282971 - DNA, 52 bp, Artificial
  Synthetic oligonucleotide
acccgcatgtcaagcacaccatcctatcgggggggtacacttagcagattgg

SEQ ID NO: 282972 - DNA, 52 bp, Artificial
  Synthetic oligonucleotide
acccctacttcctacaccgaaggtgagtcccctcgctaactgcagtcatgag

SEQ ID NO: 282973 - DNA, 50 bp, Artificial
  Synthetic oligonucleotide
acccccgaagtaacaatcggcgtactatcctcctcaacctttctacgttt

SEQ ID NO: 282974 - DNA, 52 bp, Artificial
  Synthetic oligonucleotide
actgccctggctccgccattgcccgatcccactggtccttaagtgcgcgtcc

SEQ ID NO: 282975 - DNA, 60 bp, Artificial
  Synthetic oligonucleotide
ctctatagaggtcaatttatgtgagttggctctagtatccttgcgaaatttgagcccatt

SEQ ID NO: 282976 - DNA, 52 bp, Artificial
  Synthetic oligonucleotide
actggatacatgaggcgccgagtctggtggcgtcgatgcgtttagggccaga

SEQ ID NO: 282977 - DNA, 52 bp, Artificial
  Synthetic oligonucleotide
gatactgtcatgggttaggagcagatttgtaacgaacgatagttattctagg

SEQ ID NO: 282978 - DNA, 52 bp, Artificial
  Synthetic oligonucleotide
cctcatgcaccgcgcgactgaaagctggggttggaaccgttagccagtcatt

SEQ ID NO: 282979 - DNA, 52 bp, Artificial
  Synthetic oligonucleotide
ccaaatacccaaggggtccaactgggctctacggcaagcccacaggcaacga

SEQ ID NO: 282980 - DNA, 52 bp, Artificial
  Synthetic oligonucleotide
gaagtatccgacgcaggtgtagatcagtcgatgcacgagtgtagatggatgc

SEQ ID NO: 282981 - DNA, 52 bp, Artificial
  Synthetic oligonucleotide
cgaaatgcacgcccctttgggaataagcgtgggggcctgacctacccgtcca

SEQ ID NO: 282982 - DNA, 52 bp, Artificial
  Synthetic oligonucleotide
tccaccctacagcgacgaggcaactcaactgggaggacagtcattgaccgct

SEQ ID NO: 282983 - DNA, 52 bp, Artificial
  Synthetic oligonucleotide
cttttccacagtgtatcccacgcgtcccgacggctctgggtaggtacgccca

SEQ ID NO: 282984 - DNA, 52 bp, Artificial
  Synthetic oligonucleotide
tccgtgcaaaggagcgaccgtctaacccgagctgcattacactgtgcccatg

SEQ ID NO: 282985 - DNA, 52 bp, Artificial
  Synthetic oligonucleotide
ccaatgccctccggcgggagatagaaaggtcggggttctcttggacgcgctt

SEQ ID NO: 282986 - DNA, 58 bp, Artificial
  Synthetic oligonucleotide
gtggagaatggaactgccccggatgctattattggaacagcctacgccaacttttcta

SEQ ID NO: 282987 - DNA, 52 bp, Artificial
  Synthetic oligonucleotide
tcctccccagtcggctcgtgatacagctagctaacagctcaacccagcggac

SEQ ID NO: 282988 - DNA, 52 bp, Artificial
  Synthetic oligonucleotide
ctttcggccgcctcggatccgccaacggtcacgcctagtgagctgagacctt

SEQ ID NO: 282989 - DNA, 52 bp, Artificial
  Synthetic oligonucleotide
tcctctgagttgggccagatcactcgttggccagaactatccgatcctgcag

SEQ ID NO: 282990 - DNA, 52 bp, Artificial
  Synthetic oligonucleotide
gcaacactagcgagcccttagcggcattgcatgctgagtcagccacggcgca

SEQ ID NO: 282991 - DNA, 52 bp, Artificial
  Synthetic oligonucleotide
cagcggtcctgcccaacgcccagcaacgggctgtgccaagcgagctatttga

SEQ ID NO: 282992 - DNA, 52 bp, Artificial
  Synthetic oligonucleotide
acactataccattctatccaccccgcaatgcagactcgggacggagggcctt

SEQ ID NO: 282993 - DNA, 52 bp, Artificial
  Synthetic oligonucleotide
acactaaatccaccagcaaccacgcaggaacgctgcggtactcccaccagct

SEQ ID NO: 282994 - DNA, 52 bp, Artificial
  Synthetic oligonucleotide
taacctactcgattggttcccgtgacgccaccaggcctgtaatcatctatct

SEQ ID NO: 282995 - DNA, 52 bp, Artificial
  Synthetic oligonucleotide
taacagtcagcgtgggaatgtcgctgccagtaccactttcgtgcctcaggct

SEQ ID NO: 282996 - DNA, 52 bp, Artificial
  Synthetic oligonucleotide
agaggtacacgatggcagctgtggacaaggtaccgagccagctgagaacttc

SEQ ID NO: 282997 - DNA, 60 bp, Artificial
  Synthetic oligonucleotide
gtggagacatcgatggccaatgcgagttctacccatccggattccacggctgctcccgtc

SEQ ID NO: 282998 - DNA, 52 bp, Artificial
  Synthetic oligonucleotide
agaggtggggccagattacatcccatcccgcgatgcttacatgcgacagcca

SEQ ID NO: 282999 - DNA, 52 bp, Artificial
  Synthetic oligonucleotide
tcccggcttggagtcaatgctccactcgcgtaaggacggactacggaggttt

SEQ ID NO: 283000 - DNA, 52 bp, Artificial
  Synthetic oligonucleotide
tccctcggggtaccaaaaatcaccgagctcgcgaacctatctatgatccttg

SEQ ID NO: 283001 - DNA, 52 bp, Artificial
  Synthetic oligonucleotide
taatagtccctccggattggaatgggggagcgttcccgatagtgagcccggg

SEQ ID NO: 283002 - DNA, 52 bp, Artificial
  Synthetic oligonucleotide
acatatcccgatgaactaaagccatccgattcagcatcacggccccggacgt

SEQ ID NO: 283003 - DNA, 52 bp, Artificial
  Synthetic oligonucleotide
agacatcacttgtaggtagagctgcgttgcttgctggcgtttactttccttg

SEQ ID NO: 283004 - DNA, 52 bp, Artificial
  Synthetic oligonucleotide
gaaaggttcttattaccgactcgactctcgaactgaacttcggtcgtcgtta

SEQ ID NO: 283005 - DNA, 52 bp, Artificial
  Synthetic oligonucleotide
gaaagcgaacgttaatcaacgcgcacttcgaccggacaacaaaagtacatac

SEQ ID NO: 283006 - DNA, 52 bp, Artificial
  Synthetic oligonucleotide
gatgggccactcggcggtaataatggctcacactctgggggcaactccgata

SEQ ID NO: 283007 - DNA, 52 bp, Artificial
  Synthetic oligonucleotide
acagtatggatcattctgtccgagctccaacactaacgctctgtttcatagc

SEQ ID NO: 283008 - DNA, 59 bp, Artificial
  Synthetic oligonucleotide
cggaccagcctgagccccagttcacgtagcctccttcgacgctgagattcactccgtag

SEQ ID NO: 283009 - DNA, 52 bp, Artificial
  Synthetic oligonucleotide
tccgcacaccgtgtatggcaacagggcaaagattcgggttaccttgggctct

SEQ ID NO: 283010 - DNA, 52 bp, Artificial
  Synthetic oligonucleotide
ccaatagataacaatcacttggttgacgcgtgggttcctgtggttcgtgtct

SEQ ID NO: 283011 - DNA, 52 bp, Artificial
  Synthetic oligonucleotide
tccgctccggatactgtgtagtactcgcatcgaattcgatccccgaccgagc

SEQ ID NO: 283012 - DNA, 52 bp, Artificial
  Synthetic oligonucleotide
gaaaccacattctccggaacaggatgcgtcgcaagcacaaactcagtggcaa

SEQ ID NO: 283013 - DNA, 52 bp, Artificial
  Synthetic oligonucleotide
cgaagtatatcccggaactactaaaataccgcatagtcaacatccgtgtatc

SEQ ID NO: 283014 - DNA, 52 bp, Artificial
  Synthetic oligonucleotide
tccggagcagggacggacctagcacggaggagaactcactggatgactggac

SEQ ID NO: 283015 - DNA, 52 bp, Artificial
  Synthetic oligonucleotide
gagagcgtaggattggttgctattcacgagtgggttggctgtgtcgtattca

SEQ ID NO: 283016 - DNA, 52 bp, Artificial
  Synthetic oligonucleotide
acggaccagagattgtttgtccgggagctctcattcagccttatggttgctc

SEQ ID NO: 283017 - DNA, 52 bp, Artificial
  Synthetic oligonucleotide
tagccccgtatcgcgccaactagccagtgacccaagcttagtctcttggggt

SEQ ID NO: 283018 - DNA, 52 bp, Artificial
  Synthetic oligonucleotide
tatagaaacgtaggcctgcatgtcttaactacgactgccacttcccagccaa

SEQ ID NO: 283019 - DNA, 60 bp, Artificial
  Synthetic oligonucleotide
ctctcaagcatgatataagcactaataatatggccaccagtgttgaattttcggagcacc

SEQ ID NO: 283020 - DNA, 52 bp, Artificial
  Synthetic oligonucleotide
acggcgactccctagtgggcgtcactaagaccaggatggtggacgttagccc

SEQ ID NO: 283021 - DNA, 52 bp, Artificial
  Synthetic oligonucleotide
ggggtaattggtatagtcggatagcatgttggggtgtgggatgagtgcggaa

SEQ ID NO: 283022 - DNA, 52 bp, Artificial
  Synthetic oligonucleotide
tagatcgagaggggcatttggcttacccgaggaacactgacgtagtagggag

SEQ ID NO: 283023 - DNA, 52 bp, Artificial
  Synthetic oligonucleotide
tatccttcacgggaaccggggtggaccttccactattcgtttgcgatgggga

SEQ ID NO: 283024 - DNA, 52 bp, Artificial
  Synthetic oligonucleotide
cctgcacggtcccctcccagttgagcgttccgttcgcattgtgcgagaggaa

SEQ ID NO: 283025 - DNA, 52 bp, Artificial
  Synthetic oligonucleotide
gagcactcaccttccaccttcagcctatgattttcggcctgtttagcgcccc

SEQ ID NO: 283026 - DNA, 52 bp, Artificial
  Synthetic oligonucleotide
tagacgtgcgtggggctgtgtctcagcatgtcgtgttatgacggctaggatg

SEQ ID NO: 283027 - DNA, 52 bp, Artificial
  Synthetic oligonucleotide
tagacacagaatgaccgccaaacggtcgagttgtaagaaccagcagtcatga

SEQ ID NO: 283028 - DNA, 52 bp, Artificial
  Synthetic oligonucleotide
cataaggtttctccaagcacacagaatcacaaacgaaagtcacccacccaga

SEQ ID NO: 283029 - DNA, 52 bp, Artificial
  Synthetic oligonucleotide
tagaatcttgatgcccacacgcgcacaagatctaccaacggagaactcggcg

SEQ ID NO: 283030 - DNA, 60 bp, Artificial
  Synthetic oligonucleotide
tcagtctgataggcccaattttgcgattatggatcgctcaggggttagataagtgccaca

SEQ ID NO: 283031 - DNA, 59 bp, Artificial
  Synthetic oligonucleotide
gtagtcccgtaaagtccacgtatgccagccgagcatttatggtcagcgtagccttctcg

SEQ ID NO: 283032 - DNA, 52 bp, Artificial
  Synthetic oligonucleotide
tatgtcttactaccaggctaaatagccaagtaacagaattatggcaagttgg

SEQ ID NO: 283033 - DNA, 52 bp, Artificial
  Synthetic oligonucleotide
catcctggggacgattgtcgctactgcggctgtcacgctccttgcgtctgag

SEQ ID NO: 283034 - DNA, 52 bp, Artificial
  Synthetic oligonucleotide
ggggctcggcaacactcgctgttgaggtcttgaaagcaaagggggtccctga

SEQ ID NO: 283035 - DNA, 52 bp, Artificial
  Synthetic oligonucleotide
gactgaggttgagggcccagtttgtgagcgctgcatcggcttgggttgcaac

SEQ ID NO: 283036 - DNA, 52 bp, Artificial
  Synthetic oligonucleotide
gactgtcccaaaggggcgtccccatagagagaccttgttcggggtgacgcag

SEQ ID NO: 283037 - DNA, 52 bp, Artificial
  Synthetic oligonucleotide
ggggctctgctagtggtgctttgtagtactagtcgacggtcaaaatgagtgt

SEQ ID NO: 283038 - DNA, 52 bp, Artificial
  Synthetic oligonucleotide
gactcggcctatgatgcgcggtcgcggacattgctcgaaagggttggtgctt

SEQ ID NO: 283039 - DNA, 52 bp, Artificial
  Synthetic oligonucleotide
catccttcgcaagaggagcctccaccgccgtacacggagagtcctgctcagg

SEQ ID NO: 283040 - DNA, 52 bp, Artificial
  Synthetic oligonucleotide
tagttctggaaggaccggacatggaggtgggacgcttcgtggtggtcgttcc

SEQ ID NO: 283041 - DNA, 52 bp, Artificial
  Synthetic oligonucleotide
taggaacgcctgttcctggtccctcgcagacgggccatgtggcatcaacttc

SEQ ID NO: 283042 - DNA, 57 bp, Artificial
  Synthetic oligonucleotide
cggaattgatcacaggcaagaacctgtgagtgaatcggggctgaagggccaaagggg

SEQ ID NO: 283043 - DNA, 52 bp, Artificial
  Synthetic oligonucleotide
tagttgtctgacaagttgcttacccaagatatagctacagtagagaggctag

SEQ ID NO: 283044 - DNA, 52 bp, Artificial
  Synthetic oligonucleotide
cctgttcctggtccctcgcagacgggccatgtggcatcaacttcccctttcc

SEQ ID NO: 283045 - DNA, 52 bp, Artificial
  Synthetic oligonucleotide
acgaaagtgtttcactagagaagtctgaatcagtatgtggggagctctgagc

SEQ ID NO: 283046 - DNA, 52 bp, Artificial
  Synthetic oligonucleotide
tagcggcgtgagggttgtcggtgaaagagaacgaaagcaccccatcacggaa

SEQ ID NO: 283047 - DNA, 52 bp, Artificial
  Synthetic oligonucleotide
accttctgtcacctttttcgagcatatgtcttgtcggtttcactcatagttc

SEQ ID NO: 283048 - DNA, 52 bp, Artificial
  Synthetic oligonucleotide
ccttaataaggaccgactgttctcttcgcctaggaagattgccctgactatc

SEQ ID NO: 283049 - DNA, 52 bp, Artificial
  Synthetic oligonucleotide
tatactacggggttcgcttgttgcttaggctctactatacagctcacaacaa

SEQ ID NO: 283050 - DNA, 52 bp, Artificial
  Synthetic oligonucleotide
accgagggaagatggctcggtcctcggtctgaaatgcggggttagcgtcagc

SEQ ID NO: 283051 - DNA, 52 bp, Artificial
  Synthetic oligonucleotide
tcagccggctatggtcaaagctagaggggtagtgctggattaggtcgccgga

SEQ ID NO: 283052 - DNA, 52 bp, Artificial
  Synthetic oligonucleotide
gagtatgagtcaagaaggatggtcgtaccatgcatttgagggggataggcgt

SEQ ID NO: 283053 - DNA, 60 bp, Artificial
  Synthetic oligonucleotide
cggaatataccaagtaagctcggatgatcgtaacttatcgtactcttacatcatatcatg

SEQ ID NO: 283054 - DNA, 52 bp, Artificial
  Synthetic oligonucleotide
tacgcaggcagcaatccacacccgtgagaccgagtcacctaccaccaggggc

SEQ ID NO: 283055 - DNA, 52 bp, Artificial
  Synthetic oligonucleotide
cagtgtatcccacgcgtcccgacggctctgggtaggtacgcccacgaaatcg

SEQ ID NO: 283056 - DNA, 52 bp, Artificial
  Synthetic oligonucleotide
actccaagcggccgggacagccaaacggcccagtcaaattcctcgccgtcgg

SEQ ID NO: 283057 - DNA, 52 bp, Artificial
  Synthetic oligonucleotide
tcagtataggtttcgaatattgactgctcatgcacgttccgccgcgccaact

SEQ ID NO: 283058 - DNA, 52 bp, Artificial
  Synthetic oligonucleotide
tcagtatgtgactaaaaaggctaattagctaccgtggcgtaacgggccattc

SEQ ID NO: 283059 - DNA, 52 bp, Artificial
  Synthetic oligonucleotide
cctccggccactgcgggtgtccagagggacagtctcgccgtactcggtaata

SEQ ID NO: 283060 - DNA, 52 bp, Artificial
  Synthetic oligonucleotide
tcatactcccgcgaccggtgctaacgaaagcagttctcgcccgaactcctct

SEQ ID NO: 283061 - DNA, 52 bp, Artificial
  Synthetic oligonucleotide
accctcgaggtgctcactgtgcgtcggtcgggactgttcgggaaggttaggg

SEQ ID NO: 283062 - DNA, 52 bp, Artificial
  Synthetic oligonucleotide
ccttgttgggttggtcattagctggagtgatcccgtcacagcgaacgaagaa

SEQ ID NO: 283063 - DNA, 52 bp, Artificial
  Synthetic oligonucleotide
actcggcaccactcgaagtagccttcctcgggcgtatcacgtccttcccgtc

SEQ ID NO: 283064 - DNA, 60 bp, Artificial
  Synthetic oligonucleotide
ggctactttatatattgtgttaaggtctaacaattgaactgcatttgtcatgcatcttct

SEQ ID NO: 283065 - DNA, 52 bp, Artificial
  Synthetic oligonucleotide
gagtgatcatcagagggaagaatatgacctgtcaacgagacgaggggaacag

SEQ ID NO: 283066 - DNA, 52 bp, Artificial
  Synthetic oligonucleotide
acccgtcccatccttcgcaagaggagcctccaccgccgtacacggagagtcc

SEQ ID NO: 283067 - DNA, 52 bp, Artificial
  Synthetic oligonucleotide
tatgtgcaccaggaaagttggcagcgtacacaaaccgtgcacccgaaggcaa

SEQ ID NO: 283068 - DNA, 52 bp, Artificial
  Synthetic oligonucleotide
cataaccaattggcggtcattgctctggccgacgggaaccatctaagggcca

SEQ ID NO: 283069 - DNA, 52 bp, Artificial
  Synthetic oligonucleotide
accgtaagcatcaccctgtttcagtttaactttccaaccataccatctcccg

SEQ ID NO: 283070 - DNA, 52 bp, Artificial
  Synthetic oligonucleotide
tattagcagggatcattaccgtcacatggaatgtggctgtgtgggatcttaa

SEQ ID NO: 283071 - DNA, 52 bp, Artificial
  Synthetic oligonucleotide
gagcttacccccggtgggacgtagaccccatcaacagtggcgccgcatgaca

SEQ ID NO: 283072 - DNA, 52 bp, Artificial
  Synthetic oligonucleotide
gacattgcatgctacctacaggtcgcccgcgcacagtgccactcgctactct

SEQ ID NO: 283073 - DNA, 52 bp, Artificial
  Synthetic oligonucleotide
gaggagacctgtgcgaccattctcgctcgtggcagttggtaaggcacggcat

SEQ ID NO: 283074 - DNA, 52 bp, Artificial
  Synthetic oligonucleotide
gacattaacgtccccatgcatctgccagcgcattgcaattcgagtatatcag

SEQ ID NO: 283075 - DNA, 60 bp, Artificial
  Synthetic oligonucleotide
ctctgccaagcataagtgcatatcccttttcagatcgttgcggatactaacaatgttcgt

SEQ ID NO: 283076 - DNA, 52 bp, Artificial
  Synthetic oligonucleotide
tacgtttccagctacaacaatcttgtatcgccttttatcggcgctcccaaat

SEQ ID NO: 283077 - DNA, 52 bp, Artificial
  Synthetic oligonucleotide
acgtttgataagccgggatgatgcctgcagccgcaaaagtgcccatgcacgc

SEQ ID NO: 283078 - DNA, 52 bp, Artificial
  Synthetic oligonucleotide
actaccgttgcatacacgcttccaagcttgcacggagcgaatggccttttcg

SEQ ID NO: 283079 - DNA, 52 bp, Artificial
  Synthetic oligonucleotide
gacagacgcgcaaattctatgttatatgcaaccacgccgcgactcagcatca

SEQ ID NO: 283080 - DNA, 52 bp, Artificial
  Synthetic oligonucleotide
cctcgcagacgggccatgtggcatcaacttcccctttccggcaaccacgtat

SEQ ID NO: 283081 - DNA, 52 bp, Artificial
  Synthetic oligonucleotide
actagggaagcattgcagacgtcagctgtatgatctaattgagctacaggtg

SEQ ID NO: 283082 - DNA, 52 bp, Artificial
  Synthetic oligonucleotide
gaggtagacaagtcagtcggaaacatgaccgaccaaggaaacggatcgagtc

SEQ ID NO: 283083 - DNA, 52 bp, Artificial
  Synthetic oligonucleotide
tcagaagcgcgagtcccaagataccatggcaagcgaggtagaaaaggcccgc

SEQ ID NO: 283084 - DNA, 52 bp, Artificial
  Synthetic oligonucleotide
gcatgttgtctctcgcgttttgtgtcttaggttagttctgcccgatcgtcgg

SEQ ID NO: 283085 - DNA, 52 bp, Artificial
  Synthetic oligonucleotide
gcatggtggttcggtcctggattgtttcgcgggagtaaatccgagccggctt

SEQ ID NO: 283086 - DNA, 60 bp, Artificial
  Synthetic oligonucleotide
ctctgcgcctacctcttccattagattccacttcagccgactaatgtaactgtatacagc

SEQ ID NO: 283087 - DNA, 52 bp, Artificial
  Synthetic oligonucleotide
gttaagaaccatgtagtcgtccgtcacaatcttgtagtaaccacccgaagaa

SEQ ID NO: 283088 - DNA, 52 bp, Artificial
  Synthetic oligonucleotide
cacttcatcgcaggacggcagacaatgtggccgattcgttccggggtccacg

SEQ ID NO: 283089 - DNA, 52 bp, Artificial
  Synthetic oligonucleotide
agccgagggaaggttcagcggtgcgcctgtctccgcatcgtcctccatgttc

SEQ ID NO: 283090 - DNA, 52 bp, Artificial
  Synthetic oligonucleotide
gcatgcattagtgactggccttccccctcgtcgtacgatcagtcatgcagga

SEQ ID NO: 283091 - DNA, 52 bp, Artificial
  Synthetic oligonucleotide
tcgtgatggatcgactagagcggatagaacggacacggaacctagggagtgt

SEQ ID NO: 283092 - DNA, 52 bp, Artificial
  Synthetic oligonucleotide
agcccgcttaaactgagcctcgccaccggggatcttatcatgtaggcggatc

SEQ ID NO: 283093 - DNA, 52 bp, Artificial
  Synthetic oligonucleotide
ccagacccaacacatccgtcccctgcgctgcgattgactgagcattatgcgg

SEQ ID NO: 283094 - DNA, 52 bp, Artificial
  Synthetic oligonucleotide
cagaatctgagaagtgagtggcgtgcaaaagcctgttaatggctggacctta

SEQ ID NO: 283095 - DNA, 52 bp, Artificial
  Synthetic oligonucleotide
cagacaggattcattgtgccaatctgcattggtagctagattagatttgcga

SEQ ID NO: 283096 - DNA, 52 bp, Artificial
  Synthetic oligonucleotide
gcatcaatgtccgctacattgctggccactcataagctcagttgcttaataa

SEQ ID NO: 283097 - DNA, 59 bp, Artificial
  Synthetic oligonucleotide
ctcgtggctcatccccgggatggatctgctctggggggtctttactttgctgcaatacc

SEQ ID NO: 283098 - DNA, 52 bp, Artificial
  Synthetic oligonucleotide
tcgtcagggcagctatactgggcccaaggctattgcgctggagagtagtgcg

SEQ ID NO: 283099 - DNA, 52 bp, Artificial
  Synthetic oligonucleotide
ggattttctagtaaaagcgccgtctatatcgaacctgttcccacccgactaa

SEQ ID NO: 283100 - DNA, 52 bp, Artificial
  Synthetic oligonucleotide
ccactaggcgccccctcgcgatggtagtcccgttcacgcggacgatcccgat

SEQ ID NO: 283101 - DNA, 52 bp, Artificial
  Synthetic oligonucleotide
ctgtcatgaccaccgtgtaagcagggatagtcgtgcctagatccatgttagc

SEQ ID NO: 283102 - DNA, 51 bp, Artificial
  Synthetic oligonucleotide
gttcccgctttaggttgtgtcaactctaccccccggcgtcttatcgaaaac

SEQ ID NO: 283103 - DNA, 52 bp, Artificial
  Synthetic oligonucleotide
tcggttagaccggggtacaggcctatttagggtcagcccgtccacagtgcga

SEQ ID NO: 283104 - DNA, 52 bp, Artificial
  Synthetic oligonucleotide
tcggggtcgaaagccatccagcctatcctggagatagggtctgagcgtgcat

SEQ ID NO: 283105 - DNA, 52 bp, Artificial
  Synthetic oligonucleotide
gttcctcctggaaatatgccccaaataaattggaggctcgagcatcatgtgg

SEQ ID NO: 283106 - DNA, 52 bp, Artificial
  Synthetic oligonucleotide
cgagcgacaggcctacaccacaaagagcttcaaatccgtaacccccatcgta

SEQ ID NO: 283107 - DNA, 52 bp, Artificial
  Synthetic oligonucleotide
aatgtaacaccccagcacagacgaacacccctcgaagatgccgacttgaata

SEQ ID NO: 283108 - DNA, 57 bp, Artificial
  Synthetic oligonucleotide
caaacaacttcaatgctgggagccggaaatcctacaggggctagcccgactactcga

SEQ ID NO: 283109 - DNA, 52 bp, Artificial
  Synthetic oligonucleotide
tcgggggccaccttgtctcgttcgtacaaaagaccacagttgtggcagagcg

SEQ ID NO: 283110 - DNA, 52 bp, Artificial
  Synthetic oligonucleotide
gttcgcggcggaccactttgagcattgccaggtactttagcccccagtgcct

SEQ ID NO: 283111 - DNA, 52 bp, Artificial
  Synthetic oligonucleotide
aattctcgtcgtcattattttacggggaggtgattagctgcgacatttcgca

SEQ ID NO: 283112 - DNA, 52 bp, Artificial
  Synthetic oligonucleotide
ggggacccccatctagcgcgaccacactccccaactcgtttatgtccgcaaa

SEQ ID NO: 283113 - DNA, 52 bp, Artificial
  Synthetic oligonucleotide
aattggagtggcccggggagagcgaattatagccagggaaaggggactccga

SEQ ID NO: 283114 - DNA, 52 bp, Artificial
  Synthetic oligonucleotide
cagataactacaaagtaataggtaacatcatagccccgggttagcctattac

SEQ ID NO: 283115 - DNA, 52 bp, Artificial
  Synthetic oligonucleotide
cttaatagctatgcacgatacagtaggatcaggtaatccattaggaatatca

SEQ ID NO: 283116 - DNA, 52 bp, Artificial
  Synthetic oligonucleotide
tctgctgcctccgtagaggcccatttcggttgactatcttgtcttaattgta

SEQ ID NO: 283117 - DNA, 52 bp, Artificial
  Synthetic oligonucleotide
ctgcaaggcacatactctcctgttgccagacgacataacacagtctcgaaaa

SEQ ID NO: 283118 - DNA, 52 bp, Artificial
  Synthetic oligonucleotide
gccccgcgtcgatgtctttcctcggcttccggtcggcaagtgcagcagagtg

SEQ ID NO: 283119 - DNA, 54 bp, Artificial
  Synthetic oligonucleotide
cggaagggttggataaccagattagttgcgaatgtaagaggaatcacaaaaggg

SEQ ID NO: 283120 - DNA, 52 bp, Artificial
  Synthetic oligonucleotide
ctgcagcccactcagtgttcgaacgtagtagtctgtcgcggctgtttgggcc

SEQ ID NO: 283121 - DNA, 52 bp, Artificial
  Synthetic oligonucleotide
ctgcaggcatattcgcccctgaagcgagccataacgcgagtgtgagcgctgc

SEQ ID NO: 283122 - DNA, 52 bp, Artificial
  Synthetic oligonucleotide
ctgcagtagcgtggattgtgggctcgggggcactccgcatatacctcgctag

SEQ ID NO: 283123 - DNA, 52 bp, Artificial
  Synthetic oligonucleotide
ctgccaaccatgctgtggtaaacatcttagctccaagggtaacttcaacgcc

SEQ ID NO: 283124 - DNA, 52 bp, Artificial
  Synthetic oligonucleotide
ctgccggcaatcctgcgactacataacgagccaacagccctatgtcgattgt

SEQ ID NO: 283125 - DNA, 52 bp, Artificial
  Synthetic oligonucleotide
gtggtgaacacgactgcgatattctgagttgccagtctcttggagacaagac

SEQ ID NO: 283126 - DNA, 52 bp, Artificial
  Synthetic oligonucleotide
cactgatactgtggaggcatggggctactatactatgtccataggccgttag

SEQ ID NO: 283127 - DNA, 52 bp, Artificial
  Synthetic oligonucleotide
ggcgttgactccatgtgcctaacgcggctaatctgaatcgatgtggcgactc

SEQ ID NO: 283128 - DNA, 52 bp, Artificial
  Synthetic oligonucleotide
gcccaacgcccagcaacgggctgtgccaagcgagctatttgaggatgcgacc

SEQ ID NO: 283129 - DNA, 52 bp, Artificial
  Synthetic oligonucleotide
agcgcggctcgcaaatcacagcgacgactggattccggccctatcgaatcgc

SEQ ID NO: 283130 - DNA, 60 bp, Artificial
  Synthetic oligonucleotide
ctcttattctaagatcggatatacctactaaagctatctaggcagtaagagaggcggcag

SEQ ID NO: 283131 - DNA, 52 bp, Artificial
  Synthetic oligonucleotide
ggatgctgtgcgttgccccacgcgcgacttctagcgccaaatggctagagca

SEQ ID NO: 283132 - DNA, 52 bp, Artificial
  Synthetic oligonucleotide
aatcagagcttccgcgtcctggctttgacagctacgccaggctcaacggtgg

SEQ ID NO: 283133 - DNA, 52 bp, Artificial
  Synthetic oligonucleotide
tctctcctggtttgggcaacttaacatgtagatctcgtgtttcgtgctatgt

SEQ ID NO: 283134 - DNA, 52 bp, Artificial
  Synthetic oligonucleotide
aatccacacccgtgagaccgagtcacctaccaccaggggccatgtcttgcgt

SEQ ID NO: 283135 - DNA, 52 bp, Artificial
  Synthetic oligonucleotide
aatccatcgtcctgctagagaaccacaacgagacacttcccttgaagaagag

SEQ ID NO: 283136 - DNA, 52 bp, Artificial
  Synthetic oligonucleotide
ggggaaacccgaaacatctttacccaagccgggctgcccagtggaccctaga

SEQ ID NO: 283137 - DNA, 52 bp, Artificial
  Synthetic oligonucleotide
ctggagccccgtcatgtggtggccctggaaccttatgggaaggaacgacggg

SEQ ID NO: 283138 - DNA, 52 bp, Artificial
  Synthetic oligonucleotide
agcgacgtcgtaaagtcagagcgcgagtgggttagtcagctggcccggcaat

SEQ ID NO: 283139 - DNA, 52 bp, Artificial
  Synthetic oligonucleotide
agcgacgaggcaactcaactgggaggacagtcattgaccgctccgccacgtt

SEQ ID NO: 283140 - DNA, 52 bp, Artificial
  Synthetic oligonucleotide
agcgaccccaagctcggcccatctcgatatctatcccggcctgccaaacgtg

SEQ ID NO: 283141 - DNA, 60 bp, Artificial
  Synthetic oligonucleotide
ggttgctgtgctcgctacgtgtccttcgtacgaagtcgcactgtgtccaccctaatgcca

SEQ ID NO: 283142 - DNA, 60 bp, Artificial
  Synthetic oligonucleotide
ctcttcacagttctatgccaattgctatacaatctgtgtcaataagagatttcttattat

SEQ ID NO: 283143 - DNA, 52 bp, Artificial
  Synthetic oligonucleotide
cactgctgtcgtcttaaccttccgaaccatcaggattgttgtagcgaaaacc

SEQ ID NO: 283144 - DNA, 52 bp, Artificial
  Synthetic oligonucleotide
tctccaaggcccacacggcattgcctaaatgtgattgcctacgcccggaaac

SEQ ID NO: 283145 - DNA, 52 bp, Artificial
  Synthetic oligonucleotide
ccaggatggtggacgttagccctgcaacggggcaaaactaccccaaaccgag

SEQ ID NO: 283146 - DNA, 52 bp, Artificial
  Synthetic oligonucleotide
agcctggccttttgacccagctgggctcgcactctcttaacacgttcccaag

SEQ ID NO: 283147 - DNA, 52 bp, Artificial
  Synthetic oligonucleotide
cactgtgcctccgtccttcacagtccaccaagcatcctcgagtgctcgtcct

SEQ ID NO: 283148 - DNA, 52 bp, Artificial
  Synthetic oligonucleotide
tctaagcatctagcgggagtattagccgtttcaagatagcgctaaagcactg

SEQ ID NO: 283149 - DNA, 52 bp, Artificial
  Synthetic oligonucleotide
cttcccagtcaggtggtggcactcgggacatatctccgggtcaggcccgatg

SEQ ID NO: 283150 - DNA, 52 bp, Artificial
  Synthetic oligonucleotide
agcaagtggaataccacgttatctgcgttgaccggatctatttgtcgaagcg

SEQ ID NO: 283151 - DNA, 52 bp, Artificial
  Synthetic oligonucleotide
tcggagatgccaatccacctgtcatggctccggtgcttctccttctgtcgca

SEQ ID NO: 283152 - DNA, 52 bp, Artificial
  Synthetic oligonucleotide
cttcgtgcaaacagcacaacgaatgggagactaccgcggaagcacgactacg

SEQ ID NO: 283153 - DNA, 57 bp, Artificial
  Synthetic oligonucleotide
ggctactgccgcaccagtatcaacggaggccaaggggtcaaggaagcaagcgacggg

SEQ ID NO: 283154 - DNA, 52 bp, Artificial
  Synthetic oligonucleotide
cttcaactgcctggaagtttgaaatcttagatcacgtctttcaaataccgac

SEQ ID NO: 283155 - DNA, 52 bp, Artificial
  Synthetic oligonucleotide
acaagccatccggcccattcatcagccgacagccatccactcatgcagtggg

SEQ ID NO: 283156 - DNA, 52 bp, Artificial
  Synthetic oligonucleotide
gtttcaccaatatgtggcggtgcgaataacaatctgcagatgaggcttgcta

SEQ ID NO: 283157 - DNA, 52 bp, Artificial
  Synthetic oligonucleotide
tcgctcatgtgcctctcgggatcgcacctgtcgggtctccatcatgttccaa

SEQ ID NO: 283158 - DNA, 52 bp, Artificial
  Synthetic oligonucleotide
gttgattgagacccattcaaccttggatgtagacccgcagtctgcacaccaa

SEQ ID NO: 283159 - DNA, 52 bp, Artificial
  Synthetic oligonucleotide
tcgcacaagtgacacttgacccgtagatcgtgtttcggagatcgtaccgttg

SEQ ID NO: 283160 - DNA, 52 bp, Artificial
  Synthetic oligonucleotide
cgacggggcccaacgccatcgcgtgagagtatgatgcagggcacggctgcta

SEQ ID NO: 283161 - DNA, 52 bp, Artificial
  Synthetic oligonucleotide
cagcccggtctgcttggaatctgtctgtcaggtgccggtccgaccatccttg

SEQ ID NO: 283162 - DNA, 52 bp, Artificial
  Synthetic oligonucleotide
ggggagatcgcttttcacacggacagctcctttaggtgcaccgtatgtgtcc

SEQ ID NO: 283163 - DNA, 52 bp, Artificial
  Synthetic oligonucleotide
agcagcgttgggcaatcgagcgacaaagcgaaagggccgcaatccacgaaat

SEQ ID NO: 283164 - DNA, 60 bp, Artificial
  Synthetic oligonucleotide
ctcttggacgcatattttaatgtccaagctctaagtctagtgcatatgagatgtaagtca

SEQ ID NO: 283165 - DNA, 51 bp, Artificial
  Synthetic oligonucleotide
tattacaaccaattcgacagctaccctgagggattgggcgacgccatcgtg

SEQ ID NO: 283166 - DNA, 51 bp, Artificial
  Synthetic oligonucleotide
tctctatgaagaaaggatattttttgctaataaggcttgttcctaggctgg

SEQ ID NO: 283167 - DNA, 51 bp, Artificial
  Synthetic oligonucleotide
ggggaaaggcccttgtctagtggacattgattttagttagggagtgtcgat

SEQ ID NO: 283168 - DNA, 51 bp, Artificial
  Synthetic oligonucleotide
ttctgaccgagcaatccgactgtaaagcgtggacccgtcattttcttaagt

SEQ ID NO: 283169 - DNA, 51 bp, Artificial
  Synthetic oligonucleotide
gggaggtttcgaccactgactccagtggccagcacagcttctggttcccta

SEQ ID NO: 283170 - DNA, 51 bp, Artificial
  Synthetic oligonucleotide
ttgcggactgtgcaccgtacctcgtcatctccgaaacgtcagtggcgaacg

SEQ ID NO: 283171 - DNA, 51 bp, Artificial
  Synthetic oligonucleotide
ttcgtcatcggatcctatttcgcctaccgctgcatttgatgcttcgctagg

SEQ ID NO: 283172 - DNA, 51 bp, Artificial
  Synthetic oligonucleotide
gggtgaaacgaaccagcattggcccaactgcgacgatcccttgaactaaaa

SEQ ID NO: 283173 - DNA, 51 bp, Artificial
  Synthetic oligonucleotide
ggcccactaagccggcaactgctctgctaccgatccctgatctccgaggtt

SEQ ID NO: 283174 - DNA, 51 bp, Artificial
  Synthetic oligonucleotide
tatgggaagtgtgctgatgcgtgggctagcagtctcggtcggcctacacaa

SEQ ID NO: 283175 - DNA, 60 bp, Artificial
  Synthetic oligonucleotide
cgctgtcttgtgacggttcatcaaggctgtggaatgataggatactatacgtttacctct

SEQ ID NO: 283176 - DNA, 51 bp, Artificial
  Synthetic oligonucleotide
tactttgtgccacaactggtccaagctttacgatacgatgcactgggctac

SEQ ID NO: 283177 - DNA, 51 bp, Artificial
  Synthetic oligonucleotide
gtggatccccaggttgcctcttgattagggcacccgatgcctcgacggata

SEQ ID NO: 283178 - DNA, 51 bp, Artificial
  Synthetic oligonucleotide
gtcagcagacgggtggcagggcacgacacgctcattaacctctaccacgct

SEQ ID NO: 283179 - DNA, 51 bp, Artificial
  Synthetic oligonucleotide
taacggtggaggccgaatcattgataagcatcgcgatacagacccaaccgc

SEQ ID NO: 283180 - DNA, 51 bp, Artificial
  Synthetic oligonucleotide
ggtcccgccctagtgcacaagctcggacactacggctacgtgtgcaaggag

SEQ ID NO: 283181 - DNA, 51 bp, Artificial
  Synthetic oligonucleotide
gtggatctgacttggcttgactgataggcttcggttcgaatactacgatat

SEQ ID NO: 283182 - DNA, 51 bp, Artificial
  Synthetic oligonucleotide
tagagcgctttccccctccaaggcgaggtctacaccgctcctttcgctcca

SEQ ID NO: 283183 - DNA, 51 bp, Artificial
  Synthetic oligonucleotide
tatcggacgaccgttggtccaggaaccaaggacagtccccatacggcagca

SEQ ID NO: 283184 - DNA, 51 bp, Artificial
  Synthetic oligonucleotide
tgacatccacgggacattgaatcggttcaggtcgcccaagaaacgagaacc

SEQ ID NO: 283185 - DNA, 51 bp, Artificial
  Synthetic oligonucleotide
ggggtagtctcgggttgacctcggggaaaagacctcaccgcagctaaaccg

SEQ ID NO: 283186 - DNA, 60 bp, Artificial
  Synthetic oligonucleotide
gtgtgcgcgtagtcatcgtccgtaagtcgtgaatgctgcccatctcacattagcactatg

SEQ ID NO: 283187 - DNA, 51 bp, Artificial
  Synthetic oligonucleotide
ggggagttcttgcgattggtgagtgaacggagaccgagggccttggtaatt

SEQ ID NO: 283188 - DNA, 51 bp, Artificial
  Synthetic oligonucleotide
ggctcagctttggtgtccggaggaaaagcgaggagtcctgcagctcgatga

SEQ ID NO: 283189 - DNA, 51 bp, Artificial
  Synthetic oligonucleotide
tgcggttggcacacggttcgtggggttcggaagtcgcaaatgggtgtcgaa

SEQ ID NO: 283190 - DNA, 51 bp, Artificial
  Synthetic oligonucleotide
ttgatacgtcggattatatctggcgaaaatacccctctgcttgtcacgggt

SEQ ID NO: 283191 - DNA, 51 bp, Artificial
  Synthetic oligonucleotide
ttgatagcaggccacgcactgcttatgcctgacacaagttgctaggaggac

SEQ ID NO: 283192 - DNA, 51 bp, Artificial
  Synthetic oligonucleotide
ttgatggctgtgcgatgtttggaagaagcgaccggggaggacagaacccga

SEQ ID NO: 283193 - DNA, 51 bp, Artificial
  Synthetic oligonucleotide
ggcgtagcctggagatccgacgaaagttccattcgctgcgatagcaagcag

SEQ ID NO: 283194 - DNA, 51 bp, Artificial
  Synthetic oligonucleotide
tgcgtacggaccatgcatcgatttcctagaccggcgcacggggtcaagaga

SEQ ID NO: 283195 - DNA, 51 bp, Artificial
  Synthetic oligonucleotide
ggttccgggcaccaggagcccagttcgggtcagacctggggggcttggaca

SEQ ID NO: 283196 - DNA, 51 bp, Artificial
  Synthetic oligonucleotide
tgggatagcaggtagtgcgccgttagctattggaggtggtgttctcaggta

SEQ ID NO: 283197 - DNA, 60 bp, Artificial
  Synthetic oligonucleotide
caacggtgttttatgttcaacgttgatgtgaacgttgattcaactttctgacatcattca

SEQ ID NO: 283198 - DNA, 51 bp, Artificial
  Synthetic oligonucleotide
tcaagtttcgcatctttctagcgtgttcctcaggggtcgttcctttcggtg

SEQ ID NO: 283199 - DNA, 51 bp, Artificial
  Synthetic oligonucleotide
tactggtttgagacccgaacgtccccatggcgagctaggcctctgcaacga

SEQ ID NO: 283200 - DNA, 51 bp, Artificial
  Synthetic oligonucleotide
ttctggcggttcgcgcaccctccgtccaggctttgacatgctaaattgggt

SEQ ID NO: 283201 - DNA, 51 bp, Artificial
  Synthetic oligonucleotide
tacttaagttcatgtgacccgctggatcgttagctgagtatatcgacgtac

SEQ ID NO: 283202 - DNA, 51 bp, Artificial
  Synthetic oligonucleotide
tcctggggacttcgttgtcttgtcctcagcattcatacgttcatttttcct

SEQ ID NO: 283203 - DNA, 51 bp, Artificial
  Synthetic oligonucleotide
ttgccacatcgggtcatgagcccactcatcaggacacggacgcgtgtttgg

SEQ ID NO: 283204 - DNA, 51 bp, Artificial
  Synthetic oligonucleotide
tcgataggagcagaggggacgaccaatggcagggatgaatcccccgtgccc

SEQ ID NO: 283205 - DNA, 51 bp, Artificial
  Synthetic oligonucleotide
tcttccgccgtagcgagaaccttgcgcctagggggacccatttctaacgta

SEQ ID NO: 283206 - DNA, 51 bp, Artificial
  Synthetic oligonucleotide
taggaggtgatccgcccgtattcgaaccctgcgatcttcggacacgcgttt

SEQ ID NO: 283207 - DNA, 51 bp, Artificial
  Synthetic oligonucleotide
taggcaataccgccgcgaaaccggagaggactgggtcgatccgtcgcccga

SEQ ID NO: 283208 - DNA, 57 bp, Artificial
  Synthetic oligonucleotide
gggcgtcctcgagtgcccacgtacctggactatggatacaccgacacttcctttcaa

SEQ ID NO: 283209 - DNA, 51 bp, Artificial
  Synthetic oligonucleotide
ggaccaggtgcttaaagcgctccccgatggccccaaatggtcggttgtgga

SEQ ID NO: 283210 - DNA, 51 bp, Artificial
  Synthetic oligonucleotide
tggatggatacgaggtgacggcggctgttgttagagttgctgcagaacctt

SEQ ID NO: 283211 - DNA, 51 bp, Artificial
  Synthetic oligonucleotide
tggaaaagagcgtcgtgggaatgatagggatctgggcgattcgggattcgt

SEQ ID NO: 283212 - DNA, 51 bp, Artificial
  Synthetic oligonucleotide
ggccaacagtgcgactccatacaccttggccgagcgagtgcccgtcctaag

SEQ ID NO: 283213 - DNA, 51 bp, Artificial
  Synthetic oligonucleotide
ggttaccatatctatcgggtctggatgaggcggaatgttgacaacaaccgc

SEQ ID NO: 283214 - DNA, 51 bp, Artificial
  Synthetic oligonucleotide
ggaccacgcggtgcgagtgagccgctcaggctgtttgaaccttgcagtcgc

SEQ ID NO: 283215 - DNA, 51 bp, Artificial
  Synthetic oligonucleotide
tttgcagaggtggtctgcgcaaggaagcattagacagctagaggcaacccc

SEQ ID NO: 283216 - DNA, 51 bp, Artificial
  Synthetic oligonucleotide
tcgatcatgtctccccgacatcgcatctcactcacaagaacagtcgatagt

SEQ ID NO: 283217 - DNA, 51 bp, Artificial
  Synthetic oligonucleotide
tagggtcagcccgtccacagtgcgaccaagtcggggatcacgaacatttcc

SEQ ID NO: 283218 - DNA, 51 bp, Artificial
  Synthetic oligonucleotide
ggtacattcgtcttgacatacaatactgcgcccattgactccaacgacaag

SEQ ID NO: 283219 - DNA, 60 bp, Artificial
  Synthetic oligonucleotide
atttagtgtgagaccgtcgagagggcatgccattcactttatctccctagaccatgcaga

SEQ ID NO: 283220 - DNA, 51 bp, Artificial
  Synthetic oligonucleotide
tttggaacacgctgttggcaggcctgtcctatagcagggaactggaaatct

SEQ ID NO: 283221 - DNA, 51 bp, Artificial
  Synthetic oligonucleotide
tagtctactagttagttagttgtggttgggcccttgtaagctgtaacgtat

SEQ ID NO: 283222 - DNA, 51 bp, Artificial
  Synthetic oligonucleotide
tcgatcgggcaaagcgagacttcagatacacaagcctatcatacggagtac

SEQ ID NO: 283223 - DNA, 51 bp, Artificial
  Synthetic oligonucleotide
tagtcagctaacttctgaagacctgctcctctgcatgttcgattatcctct

SEQ ID NO: 283224 - DNA, 51 bp, Artificial
  Synthetic oligonucleotide
ggtgaggttaagctatccgtgcactccgttctcggtagaatctcaatatcg

SEQ ID NO: 283225 - DNA, 51 bp, Artificial
  Synthetic oligonucleotide
tctgggagagacggtgatgcttcgtggaggccgatactttgggctaaccga

SEQ ID NO: 283226 - DNA, 51 bp, Artificial
  Synthetic oligonucleotide
tttggttgcggacttaggatttgcacctaaataggatggtcatgagccatc

SEQ ID NO: 283227 - DNA, 51 bp, Artificial
  Synthetic oligonucleotide
ttttactttgcagaaacccgcgcaggcgaacggggctgactgattgctgcg

SEQ ID NO: 283228 - DNA, 51 bp, Artificial
  Synthetic oligonucleotide
ttttgcgattggtcgacaacggtgccaagacaagtcactggatcgatcaat

SEQ ID NO: 283229 - DNA, 51 bp, Artificial
  Synthetic oligonucleotide
tctgcgggacaatgcggggcccgactccagggcttatctgcgacgtgaagt

SEQ ID NO: 283230 - DNA, 58 bp, Artificial
  Synthetic oligonucleotide
caactaggacggtgttatccagcgccgattgtgcgtcgatgaagaaaatagggaattg

SEQ ID NO: 283231 - DNA, 51 bp, Artificial
  Synthetic oligonucleotide
ttggatacatagaaggagccctagtcagagatctttgccagttcaatagaa

SEQ ID NO: 283232 - DNA, 51 bp, Artificial
  Synthetic oligonucleotide
tagaggacagtccacattggggcgaagagccatgccggcgggtagaaggcc

SEQ ID NO: 283233 - DNA, 51 bp, Artificial
  Synthetic oligonucleotide
ttggccgcgctttctagcgtttcccaagccttttggcgtctcccttgtcgt

SEQ ID NO: 283234 - DNA, 51 bp, Artificial
  Synthetic oligonucleotide
tagagggttcatcctgggacgctctgcttccaagactcggtaccttgagcc

SEQ ID NO: 283235 - DNA, 51 bp, Artificial
  Synthetic oligonucleotide
tcgacctttcatcagacggactgtcaccgtccgacctgacactgggagatc

SEQ ID NO: 283236 - DNA, 51 bp, Artificial
  Synthetic oligonucleotide
ttgggagacttcgctgtctgctgagacagttagtaaacgagcatgggtaat

SEQ ID NO: 283237 - DNA, 51 bp, Artificial
  Synthetic oligonucleotide
gtcagaatccaagtgtcaacacgccatcgactgtttcagacccattatctg

SEQ ID NO: 283238 - DNA, 51 bp, Artificial
  Synthetic oligonucleotide
ggcgtcttgtagactcgacctaacgcctgttagtgctgggcgggtgcagta

SEQ ID NO: 283239 - DNA, 51 bp, Artificial
  Synthetic oligonucleotide
tctctgggccgaatatgatcttaggaagaaccggaaagtcgtccgctatag

SEQ ID NO: 283240 - DNA, 51 bp, Artificial
  Synthetic oligonucleotide
ttgggatcgtcctgggtgcgattgcgctgtgtctagggttgaagaggcgca

SEQ ID NO: 283241 - DNA, 60 bp, Artificial
  Synthetic oligonucleotide
agccttgagtaccatggatgcaagacccaagggtccaattctcgcgacaggatgacattg

SEQ ID NO: 283242 - DNA, 51 bp, Artificial
  Synthetic oligonucleotide
ttgggtggcgtgtagaagcagagacgaacctgacccgaaccggtgggaata

SEQ ID NO: 283243 - DNA, 51 bp, Artificial
  Synthetic oligonucleotide
gtggttccctttcctccagtccagtcaaatcatcacatgtatacggagtag

SEQ ID NO: 283244 - DNA, 51 bp, Artificial
  Synthetic oligonucleotide
tctgaacagcgcagttccgaatttccggccggctatccgtcgtgaggtcaa

SEQ ID NO: 283245 - DNA, 51 bp, Artificial
  Synthetic oligonucleotide
tctgaatctccagcaagtaccagcggtcctgcccaacgcccagcaacgggc

SEQ ID NO: 283246 - DNA, 51 bp, Artificial
  Synthetic oligonucleotide
gtggccttctagccggcggggttacaccttgagtggactcagcccggttag

SEQ ID NO: 283247 - DNA, 51 bp, Artificial
  Synthetic oligonucleotide
tctttgcatgttggtcgcgactatgtctgttccgccctgactccccgctga

SEQ ID NO: 283248 - DNA, 51 bp, Artificial
  Synthetic oligonucleotide
tcgagcacctgcgtacggaccatgcatcgatttcctagaccggcgcacggg

SEQ ID NO: 283249 - DNA, 51 bp, Artificial
  Synthetic oligonucleotide
tcgagccctgccaagatatgcgtccgggaccacagtaacgccttgtcaagc

SEQ ID NO: 283250 - DNA, 51 bp, Artificial
  Synthetic oligonucleotide
tctgaatctgacactctatccacttcgctaatagccccccctgggaatgaa

SEQ ID NO: 283251 - DNA, 51 bp, Artificial
  Synthetic oligonucleotide
taaccagcatcggtaactagcgtaaagagctgatcgagtcggggatgtttg

SEQ ID NO: 283252 - DNA, 60 bp, Artificial
  Synthetic oligonucleotide
gagtgaaatcgacccaacgggggaagacagagagatcgcgacacatgcgagaattcggct

SEQ ID NO: 283253 - DNA, 60 bp, Artificial
  Synthetic oligonucleotide
gtgtggttgagatattggagttcaaaaattgataagatagtatgggatacaggcgtggcc

SEQ ID NO: 283254 - DNA, 51 bp, Artificial
  Synthetic oligonucleotide
tatacctattggagccgcgttgtaattgtatagtatactattcaagtcggt

SEQ ID NO: 283255 - DNA, 51 bp, Artificial
  Synthetic oligonucleotide
ggttagcctggacggctttagtccctgactagtagatactagagagtactt

SEQ ID NO: 283256 - DNA, 51 bp, Artificial
  Synthetic oligonucleotide
tgttccacgggtaagatttgaaaccgtacgggcatgtctcgcaccggtggt

SEQ ID NO: 283257 - DNA, 51 bp, Artificial
  Synthetic oligonucleotide
gttgatgccaggggattacgtcagtccgggcttggtttgaagtgcctgagg

SEQ ID NO: 283258 - DNA, 51 bp, Artificial
  Synthetic oligonucleotide
tgtaagtgccacttatatacctacttaggctgaggcggtgctacacgcaac

SEQ ID NO: 283259 - DNA, 51 bp, Artificial
  Synthetic oligonucleotide
gggaactagcttccccgtggttggatcccgctcgggcgtccattcagcggc

SEQ ID NO: 283260 - DNA, 51 bp, Artificial
  Synthetic oligonucleotide
tacaccacctagccctcctgctgcgataactccatgtctggagtggcagtc

SEQ ID NO: 283261 - DNA, 51 bp, Artificial
  Synthetic oligonucleotide
ttaactgtcgtggggtcctttctcaaagtccgaaaggaaagcgcacaagtg

SEQ ID NO: 283262 - DNA, 51 bp, Artificial
  Synthetic oligonucleotide
tgcacgtcacagaaactaacggtgaggcggttaggttcccccgacggcctc

SEQ ID NO: 283263 - DNA, 51 bp, Artificial
  Synthetic oligonucleotide
gtcggctcgcaggtgaacggccttcgcattggagacaccgtcggaatacag

SEQ ID NO: 283264 - DNA, 60 bp, Artificial
  Synthetic oligonucleotide
gtgcgattcggaaatccactgggctctggtggcggtatgtgccaaagaatttggctgcat

SEQ ID NO: 283265 - DNA, 51 bp, Artificial
  Synthetic oligonucleotide
tacatactccaggtgctgttagcacatgccggcggatcaatgtcggccgta

SEQ ID NO: 283266 - DNA, 51 bp, Artificial
  Synthetic oligonucleotide
taccaacccgtcactctccgcggttgggaaaaccaccctttcactctggga

SEQ ID NO: 283267 - DNA, 51 bp, Artificial
  Synthetic oligonucleotide
gtcctgcgctctgatccggtgggctgctgtggattgttcatagtcggcgcc

SEQ ID NO: 283268 - DNA, 51 bp, Artificial
  Synthetic oligonucleotide
ttacagtatcggctccctctcatccgtttcgcgatgattcctggtgatccc

SEQ ID NO: 283269 - DNA, 51 bp, Artificial
  Synthetic oligonucleotide
tccactatctacccattgcctctagccggttgttcgcatgactactcccag

SEQ ID NO: 283270 - DNA, 51 bp, Artificial
  Synthetic oligonucleotide
taccagcgacagtttcggagagattggagagcgcaattttgtcttcctgga

SEQ ID NO: 283271 - DNA, 51 bp, Artificial
  Synthetic oligonucleotide
ttacgaaggcagggaaatgcgacgcccagtccatatgcgccgggctgaggg

SEQ ID NO: 283272 - DNA, 51 bp, Artificial
  Synthetic oligonucleotide
tcggtggatttaacaaggccgttgaccacttgtcgaattaccggccgcgcg

SEQ ID NO: 283273 - DNA, 51 bp, Artificial
  Synthetic oligonucleotide
ggcttaccccgaggcactcccgcattcacataccaggagtctcccaccact

SEQ ID NO: 283274 - DNA, 51 bp, Artificial
  Synthetic oligonucleotide
gttccaatcactcttgcgatcactgagaacgtaaagtctgccatgtatacg

SEQ ID NO: 283275 - DNA, 56 bp, Artificial
  Synthetic oligonucleotide
gtagccactgccttggttcccgtgttggacccattgacgactaggggtccacagtg

SEQ ID NO: 283276 - DNA, 51 bp, Artificial
  Synthetic oligonucleotide
taagtccgagtaagcaccgatgcccctcagaactggtcatctgtcagacag

SEQ ID NO: 283277 - DNA, 51 bp, Artificial
  Synthetic oligonucleotide
ggcaaaggtgcgggtacggaaagctgcacccatggaacgcgaacatgtgag

SEQ ID NO: 283278 - DNA, 51 bp, Artificial
  Synthetic oligonucleotide
taagggtccaaagcttgtcatgccacaccaagccaggtgcgtcggctaggc

SEQ ID NO: 283279 - DNA, 51 bp, Artificial
  Synthetic oligonucleotide
ttaggtatcctgtctgttcttctgatcgccgttgcagctagcaagggtcgg

SEQ ID NO: 283280 - DNA, 51 bp, Artificial
  Synthetic oligonucleotide
tccaacgtggcagtatcggcaacctatgtcctgccaaatactttcacccgg

SEQ ID NO: 283281 - DNA, 51 bp, Artificial
  Synthetic oligonucleotide
gggcgggggagtactagcgggcctcccactgatcgacttttggggacagcc

SEQ ID NO: 283282 - DNA, 51 bp, Artificial
  Synthetic oligonucleotide
tgcgaagacgggccttgctgaggcggtgggttttggctagatcgcgaaaga

SEQ ID NO: 283283 - DNA, 51 bp, Artificial
  Synthetic oligonucleotide
taagttcacctcgtcagcagtacttgcagcaagccgctagaacgactcttc

SEQ ID NO: 283284 - DNA, 51 bp, Artificial
  Synthetic oligonucleotide
ggcagccctaactctcgaatgaccgcgtccagcacatccccgaggtcaact

SEQ ID NO: 283285 - DNA, 51 bp, Artificial
  Synthetic oligonucleotide
tgtatgctggatgctgtgcgttgccccacgcgcgacttctagcgccaaatg

SEQ ID NO: 283286 - DNA, 60 bp, Artificial
  Synthetic oligonucleotide
gtgttggacaatatacctcagaatagttacgattgcagacgttaatctgtcaactctatg

SEQ ID NO: 283287 - DNA, 51 bp, Artificial
  Synthetic oligonucleotide
gtaatgaacagcgttaccaaccagcagctacccatgtaacttaccgggctg

SEQ ID NO: 283288 - DNA, 51 bp, Artificial
  Synthetic oligonucleotide
gtcgctgtactggcagttagaggacatctggcaagccccgacttgggcggg

SEQ ID NO: 283289 - DNA, 51 bp, Artificial
  Synthetic oligonucleotide
taatgggcgggttcctcagtggggttgtcgtagcccaaccatttgacagta

SEQ ID NO: 283290 - DNA, 51 bp, Artificial
  Synthetic oligonucleotide
tcccgccggcaaacttgcatttgcgtgagagaagtaagctgaggctgcgta

SEQ ID NO: 283291 - DNA, 51 bp, Artificial
  Synthetic oligonucleotide
gtcgcgccgtcccgtgactcgagaactgtgccacacttagtcagtcccgga

SEQ ID NO: 283292 - DNA, 51 bp, Artificial
  Synthetic oligonucleotide
ggtcgaggctagattattcatgctggtaagagtatcagggtgttcaagtcc

SEQ ID NO: 283293 - DNA, 51 bp, Artificial
  Synthetic oligonucleotide
tcgggacagacgtgttcaacactgctcgagtcagctccggtccccacaagg

SEQ ID NO: 283294 - DNA, 51 bp, Artificial
  Synthetic oligonucleotide
tgtgccgtacgggcgagacaacataacacccctccggatgctagcgaggcc

SEQ ID NO: 283295 - DNA, 51 bp, Artificial
  Synthetic oligonucleotide
tgtacctccaagcgaataccgccaagaaggtctcgcacgtttgagcttgga

SEQ ID NO: 283296 - DNA, 51 bp, Artificial
  Synthetic oligonucleotide
tcgggcctcatccgtaacacgcagtgatataacccctccgggaccctgcat

SEQ ID NO: 283297 - DNA, 60 bp, Artificial
  Synthetic oligonucleotide
cgctgatagcccaacgtattctgactgtgaggcccgatcggggcatacatgtgatattgg

SEQ ID NO: 283298 - DNA, 51 bp, Artificial
  Synthetic oligonucleotide
ggggtgctacataaatactatgtctggcaagtagctacagcgtcatcgcaa

SEQ ID NO: 283299 - DNA, 51 bp, Artificial
  Synthetic oligonucleotide
gtcgaccacgttgaatgcaaggggcgctgaaccgtccgtgggagcgcttgc

SEQ ID NO: 283300 - DNA, 51 bp, Artificial
  Synthetic oligonucleotide
gtcgaatctgacgagagatagtcgctgggccaagaatgtcgctgaatcgcg

SEQ ID NO: 283301 - DNA, 51 bp, Artificial
  Synthetic oligonucleotide
tccccactggtcgaaacccaccggaagcccatagaacgaacagcagaccag

SEQ ID NO: 283302 - DNA, 51 bp, Artificial
  Synthetic oligonucleotide
tgcataggcgcgcacgaatcctctctgccgatccttcggccgacgctgagg

SEQ ID NO: 283303 - DNA, 51 bp, Artificial
  Synthetic oligonucleotide
tcccaacacacttgaagttcagtgcagttagtccgaaagtcgtttctctct

SEQ ID NO: 283304 - DNA, 51 bp, Artificial
  Synthetic oligonucleotide
tcggggcattaactaaccggccgctccgtgccttggtagcattgagtacct

SEQ ID NO: 283305 - DNA, 51 bp, Artificial
  Synthetic oligonucleotide
ggccttgagcatagcatccgagcacaaggcgtacaaatctgcacccgtgta

SEQ ID NO: 283306 - DNA, 51 bp, Artificial
  Synthetic oligonucleotide
gggactcagatctggttgtctcgctcgtggaactctggctgtcaacgtcct

SEQ ID NO: 283307 - DNA, 51 bp, Artificial
  Synthetic oligonucleotide
taagcgagcccgctgaggggagtgagaggctcggcatatcaatccgtccac

SEQ ID NO: 283308 - DNA, 60 bp, Artificial
  Synthetic oligonucleotide
atttacatacctggtatcaggcatgttagctaccggtgtgtccggcacgactgccacctg

SEQ ID NO: 283309 - DNA, 51 bp, Artificial
  Synthetic oligonucleotide
ggagggcggaggatccatgggaggtttcgaccactgactccagtggccagc

SEQ ID NO: 283310 - DNA, 51 bp, Artificial
  Synthetic oligonucleotide
gtacgacttgaagtatattcgttgaatgggaggatattgtccattcctggt

SEQ ID NO: 283311 - DNA, 51 bp, Artificial
  Synthetic oligonucleotide
ggactggtggtcctgtgtcgccctcatagatgctaattggaccgggatgca

SEQ ID NO: 283312 - DNA, 51 bp, Artificial
  Synthetic oligonucleotide
ttccttgcagccgttatgaggttctcgtggtcgtatgcgcacaacctatag

SEQ ID NO: 283313 - DNA, 51 bp, Artificial
  Synthetic oligonucleotide
gtccacctgttcggatgtctgaggcgcttccggggattcgttatcatccgg

SEQ ID NO: 283314 - DNA, 51 bp, Artificial
  Synthetic oligonucleotide
ggactggaaacgtgccaaccatggacacggcagctccggagcatatgggtc

SEQ ID NO: 283315 - DNA, 51 bp, Artificial
  Synthetic oligonucleotide
tgacttgcatagtttgggtgcaaacgatggttggtgtaacactcggggaaa

SEQ ID NO: 283316 - DNA, 51 bp, Artificial
  Synthetic oligonucleotide
tcgctacgaatcagactactacgcctatcggagtctcttcggcgcggggcg

SEQ ID NO: 283317 - DNA, 51 bp, Artificial
  Synthetic oligonucleotide
tcaggattcctggcagcgcatgggtcagtcgtgtctgtctggtgtgaccga

SEQ ID NO: 283318 - DNA, 51 bp, Artificial
  Synthetic oligonucleotide
tcagcggtgcgcctgtctccgcatcgtcctccatgttcgaagtagacatgg

SEQ ID NO: 283319 - DNA, 59 bp, Artificial
  Synthetic oligonucleotide
aggaggagaagtcaatacgaggtcatcattacccgcagatcctctgcggacccctagaa

SEQ ID NO: 283320 - DNA, 51 bp, Artificial
  Synthetic oligonucleotide
gtcggggaggcgtgcattcgccaccacctcaacgagtataggccgctagaa

SEQ ID NO: 283321 - DNA, 51 bp, Artificial
  Synthetic oligonucleotide
gtgcccactccgtcagtgtctccgcctccattcactcctggtcctgggtta

SEQ ID NO: 283322 - DNA, 51 bp, Artificial
  Synthetic oligonucleotide
tctacgccccctcggtatggcaatccgaccctgcgttatgattccagctgc

SEQ ID NO: 283323 - DNA, 51 bp, Artificial
  Synthetic oligonucleotide
tcagaccccacgttggtggctcttgcacaactggggacctaccgtctaggg

SEQ ID NO: 283324 - DNA, 51 bp, Artificial
  Synthetic oligonucleotide
ttcgcgaaacagccagccacccctctggcagtcgaaaggtcccatgcgaag

SEQ ID NO: 283325 - DNA, 51 bp, Artificial
  Synthetic oligonucleotide
tgcggtcagtgtaactgcaaggacgcggagcgatgggctttataccaatcc

SEQ ID NO: 283326 - DNA, 51 bp, Artificial
  Synthetic oligonucleotide
ggtcagtcaacagccgtgatgcacgtctacgccccagcactgagaccccga

SEQ ID NO: 283327 - DNA, 51 bp, Artificial
  Synthetic oligonucleotide
tacgcttgcggtgaggcccactaggcgccccctcgcgatggtagtcccgtt

SEQ ID NO: 283328 - DNA, 51 bp, Artificial
  Synthetic oligonucleotide
ggcgtactccgtccatgcgtcggagtaaaagggcccggcagggttccatag

SEQ ID NO: 283329 - DNA, 51 bp, Artificial
  Synthetic oligonucleotide
gtcgggtactaccggtcggagcacagctgactcgatactccgatagtacgt

SEQ ID NO: 283330 - DNA, 59 bp, Artificial
  Synthetic oligonucleotide
gtgcgatactgcgttgggctgaagcgggcgcccacgctgtaggaagactgagttgggtt

SEQ ID NO: 283331 - DNA, 51 bp, Artificial
  Synthetic oligonucleotide
tccaaagggccagaactaatcgtgggggctgtcgctcttcgtggaagtggg

SEQ ID NO: 283332 - DNA, 51 bp, Artificial
  Synthetic oligonucleotide
ggtctacgtgcttcctccacgggcaaacacccctcttatctctccgccccc

SEQ ID NO: 283333 - DNA, 51 bp, Artificial
  Synthetic oligonucleotide
tccgatcgaaacatcagccagaaggtgaacacgagaactgttttggggaga

SEQ ID NO: 283334 - DNA, 51 bp, Artificial
  Synthetic oligonucleotide
tgatcggtgcgatttatacgagttacctcgccatgcactattttcgccgat

SEQ ID NO: 283335 - DNA, 51 bp, Artificial
  Synthetic oligonucleotide
ggggactttggccgatggaccttattcttgggggcctgcgtgaataaaggc

SEQ ID NO: 283336 - DNA, 51 bp, Artificial
  Synthetic oligonucleotide
gtccgcgtgggatacgtgcagaggaccgttgcggccgattctggatagctc

SEQ ID NO: 283337 - DNA, 51 bp, Artificial
  Synthetic oligonucleotide
tcatggatgagatgcctctggatcagttttctactattgaacgaggtctca

SEQ ID NO: 283338 - DNA, 51 bp, Artificial
  Synthetic oligonucleotide
tcatgcacatcagtgagagggatatatgcgcctccgtattatttgggaagc

SEQ ID NO: 283339 - DNA, 51 bp, Artificial
  Synthetic oligonucleotide
taccggtcgcgattgcgtccgtcgtcccgtcttcgagagattgagctctta

SEQ ID NO: 283340 - DNA, 51 bp, Artificial
  Synthetic oligonucleotide
tacctgtgattatagtgttcttatcgtaggccaacactgcccaaacgctcc

SEQ ID NO: 283341 - DNA, 58 bp, Artificial
  Synthetic oligonucleotide
gttaaccgaaaggagtcagtttcagtcgagcctcgcctaagcgggcatgcaaagacag

SEQ ID NO: 283342 - DNA, 51 bp, Artificial
  Synthetic oligonucleotide
tcgtaggccagtccatctcgtcgacagaaccctactcccagtagagtcgct

SEQ ID NO: 283343 - DNA, 51 bp, Artificial
  Synthetic oligonucleotide
ttcacagcctctcggacagatgcaacgggacacaagtccttacggacggag

SEQ ID NO: 283344 - DNA, 51 bp, Artificial
  Synthetic oligonucleotide
tccgcgagcaagagaatccgtccgctgacgagcctgcaagttcgacgtttg

SEQ ID NO: 283345 - DNA, 51 bp, Artificial
  Synthetic oligonucleotide
gtcccgactggtcctgcgctctgatccggtgggctgctgtggattgttcat

SEQ ID NO: 283346 - DNA, 51 bp, Artificial
  Synthetic oligonucleotide
tgagtcgggggattgaggcagtgtgccaaaagtccacgcctgttcaatagt

SEQ ID NO: 283347 - DNA, 51 bp, Artificial
  Synthetic oligonucleotide
ttccaaacgccaacacgattgttgcagcctggacgcagaacgcaacggagc

SEQ ID NO: 283348 - DNA, 51 bp, Artificial
  Synthetic oligonucleotide
gttagcgggcatcgaatgcagattaagctgcggatagaacgaaagacagag

SEQ ID NO: 283349 - DNA, 51 bp, Artificial
  Synthetic oligonucleotide
tcgctgggctaggttgccgtgtctgcagggtaatcgcgtaggaggtcctcg

SEQ ID NO: 283350 - DNA, 51 bp, Artificial
  Synthetic oligonucleotide
tgaggctgttggagtggcgtgtgcggatggtcttttgctccgcggccatta

SEQ ID NO: 283351 - DNA, 51 bp, Artificial
  Synthetic oligonucleotide
tcatacttcccctatgataccctcgaagctaccgttgctcatcctcagcgt

SEQ ID NO: 283352 - DNA, 58 bp, Artificial
  Synthetic oligonucleotide
ctcggtcttgatatctccgactagactaggtagatagtcaactgttaccaaccaccga

SEQ ID NO: 283353 - DNA, 51 bp, Artificial
  Synthetic oligonucleotide
tggggtggcctctcattggtaagcggactccacccgaggtagagacccact

SEQ ID NO: 283354 - DNA, 51 bp, Artificial
  Synthetic oligonucleotide
ttccctctcggacaatctccagatccagaagcaagtcatcggcagagtcat

SEQ ID NO: 283355 - DNA, 51 bp, Artificial
  Synthetic oligonucleotide
cgaagctctcagcgacgctcagtgggcattactcgcttcgggggcctggaa

SEQ ID NO: 283356 - DNA, 51 bp, Artificial
  Synthetic oligonucleotide
atgtccggaccaggatactcggtatgtgtgggtagctgaggtgcggtgggg

SEQ ID NO: 283357 - DNA, 51 bp, Artificial
  Synthetic oligonucleotide
agcgagggcagtgacgcccgatagccggtcatcctacagaaagcgaacgtt

SEQ ID NO: 283358 - DNA, 51 bp, Artificial
  Synthetic oligonucleotide
cgacaccatgcaaaggtcggcttattttgcattggacgtcagcgaaggtag

SEQ ID NO: 283359 - DNA, 51 bp, Artificial
  Synthetic oligonucleotide
aatgccgtgtaattgagacacctgtccaccgatatgcctatccgggctcag

SEQ ID NO: 283360 - DNA, 51 bp, Artificial
  Synthetic oligonucleotide
acttaatagacttctagctaggagtagtttattaattatactagactacta

SEQ ID NO: 283361 - DNA, 51 bp, Artificial
  Synthetic oligonucleotide
cgagataggccccgggcccagtttattcggcccaaaccctctcgccgcaat

SEQ ID NO: 283362 - DNA, 51 bp, Artificial
  Synthetic oligonucleotide
acatccgtcccctgcgctgcgattgactgagcattatgcggtgggcttcgc

SEQ ID NO: 283363 - DNA, 60 bp, Artificial
  Synthetic oligonucleotide
tatgctcgagtacacactggaagtacacctcgtaatacaaaatttctcgggatgcgatac

SEQ ID NO: 283364 - DNA, 60 bp, Artificial
  Synthetic oligonucleotide
caggtatgtgtgtctccgctgcctcgtatgtgtggctactgaccaagatacagtatcaac

SEQ ID NO: 283365 - DNA, 60 bp, Artificial
  Synthetic oligonucleotide
ctgggtattgtactcagctagcgtgctcattcttgtgcggtcgatttaccgtcttatcga

SEQ ID NO: 283366 - DNA, 51 bp, Artificial
  Synthetic oligonucleotide
atggtagccgtgggcgtgcattcactgggaccgtatgggttcttgaggctg

SEQ ID NO: 283367 - DNA, 51 bp, Artificial
  Synthetic oligonucleotide
cgagctcccagcgtaggtccctcaggtataggacggtcgcgcaaccgattg

SEQ ID NO: 283368 - DNA, 51 bp, Artificial
  Synthetic oligonucleotide
cgagtggtgcacgcggcgcagtcaccctccgggacgcgattcattatagcg

SEQ ID NO: 283369 - DNA, 51 bp, Artificial
  Synthetic oligonucleotide
acatctgtggcgaatgaagcgaagagaggtaggtagcggtgttgactcgac

SEQ ID NO: 283370 - DNA, 51 bp, Artificial
  Synthetic oligonucleotide
cgcaagccgcttacgggtctactgaccctccgcattcatgccgtcaaggac

SEQ ID NO: 283371 - DNA, 51 bp, Artificial
  Synthetic oligonucleotide
cgcacatactttgtgattcctgccagcttcgctccctacctgtcgaaccac

SEQ ID NO: 283372 - DNA, 51 bp, Artificial
  Synthetic oligonucleotide
cgcagtcgtgccaatagccccgctcctccccgcaagcatcggcgagaccgc

SEQ ID NO: 283373 - DNA, 51 bp, Artificial
  Synthetic oligonucleotide
cgcattccgcctcgccagtcgtcggctgaaactcccaaagtcatcgcttta

SEQ ID NO: 283374 - DNA, 51 bp, Artificial
  Synthetic oligonucleotide
acatggctccgagactgagaatcacgcccagtgcgaccttggtgcgaccgt

SEQ ID NO: 283375 - DNA, 51 bp, Artificial
  Synthetic oligonucleotide
cgcgagcgcatttcacgaaccactttgcgaacacaagagcttcgcgcggca

SEQ ID NO: 283376 - DNA, 54 bp, Artificial
  Synthetic oligonucleotide
gttaactacccaactagtaaccactttgtactgaacagtcgtgctggtaaagac

SEQ ID NO: 283377 - DNA, 51 bp, Artificial
  Synthetic oligonucleotide
cgcgaggcggacgcaacatgtaatgctatcccctctccacccccaagctcg

SEQ ID NO: 283378 - DNA, 51 bp, Artificial
  Synthetic oligonucleotide
aaccaaaatgtctcaccgcggggtatggttggataggtgtcgggggctccg

SEQ ID NO: 283379 - DNA, 51 bp, Artificial
  Synthetic oligonucleotide
atggaatcccggagggaactcgtgtcttgagacgcccggcgacagaagccc

SEQ ID NO: 283380 - DNA, 51 bp, Artificial
  Synthetic oligonucleotide
acatgtaacatgtctaatgagtggatgggcataaacaggacactccatgac

SEQ ID NO: 283381 - DNA, 51 bp, Artificial
  Synthetic oligonucleotide
aacatgcccaaaatgcccgtaaatggaactgtgggagtgtgccctcttacc

SEQ ID NO: 283382 - DNA, 51 bp, Artificial
  Synthetic oligonucleotide
ccggttgtgttgaaagcagtccttcagtgcatacataagtcaatgctctac

SEQ ID NO: 283383 - DNA, 51 bp, Artificial
  Synthetic oligonucleotide
ccgtcgctgttctcgtgaggatcgactcttctcgggccatcgttggtccgc

SEQ ID NO: 283384 - DNA, 51 bp, Artificial
  Synthetic oligonucleotide
ccgttccgagtgtcgcgtggtggtggcaagctaatccgggtgtctggtgcg

SEQ ID NO: 283385 - DNA, 51 bp, Artificial
  Synthetic oligonucleotide
ccgttctcctagagcgctttccccctccaaggcgaggtctacaccgctcct

SEQ ID NO: 283386 - DNA, 51 bp, Artificial
  Synthetic oligonucleotide
ccgttgagtagcgatgcatggtcgtgtctgctcggtagggtcgttcgtgga

SEQ ID NO: 283387 - DNA, 54 bp, Artificial
  Synthetic oligonucleotide
ctgggtcaggggatgaaacgaatcgataaagcactagacgggggttagtcggta

SEQ ID NO: 283388 - DNA, 51 bp, Artificial
  Synthetic oligonucleotide
aaccccgcaatcactcactccctagcccgcacatgctcctgtgtagcgtgc

SEQ ID NO: 283389 - DNA, 51 bp, Artificial
  Synthetic oligonucleotide
aaccccctaccagcggtagaattccaagggggcacacattcctctggccgc

SEQ ID NO: 283390 - DNA, 51 bp, Artificial
  Synthetic oligonucleotide
attatctgtggcataatatatcttagttcgattctaggtatctaccctcac

SEQ ID NO: 283391 - DNA, 51 bp, Artificial
  Synthetic oligonucleotide
attagagggcagcaacctcgactctcagtcagagaccgatcttacccgatc

SEQ ID NO: 283392 - DNA, 51 bp, Artificial
  Synthetic oligonucleotide
attaccaaggcttggttcactaagaactttttagacgcggcgttcggtcta

SEQ ID NO: 283393 - DNA, 51 bp, Artificial
  Synthetic oligonucleotide
agaaacaatcgtgcgcatgcaagagcacccagagcgctcagaggtcacttc

SEQ ID NO: 283394 - DNA, 51 bp, Artificial
  Synthetic oligonucleotide
actttctggagcgtctgtccctgactgtcgtctgccctaggcacccctcga

SEQ ID NO: 283395 - DNA, 51 bp, Artificial
  Synthetic oligonucleotide
cctctcatgttaccgaggaggggtacctacctacactagtgctgacaagag

SEQ ID NO: 283396 - DNA, 51 bp, Artificial
  Synthetic oligonucleotide
cctggacaggtgtagtttagccaggcaagcactatcgcaagcaaagaatag

SEQ ID NO: 283397 - DNA, 51 bp, Artificial
  Synthetic oligonucleotide
cctggcctttttgcgaccctgcacgatcgagggaaggtggctaagcaaccc

SEQ ID NO: 283398 - DNA, 59 bp, Artificial
  Synthetic oligonucleotide
gttaatggtagactgttcgttttccatacgaagtgtgctgattcgaattcagctagccg

SEQ ID NO: 283399 - DNA, 51 bp, Artificial
  Synthetic oligonucleotide
cctggctgtggacggcggcagtgatggtcttccattgggcgatttgggcat

SEQ ID NO: 283400 - DNA, 51 bp, Artificial
  Synthetic oligonucleotide
cctgggtccatagcgagggcagtgacgcccgatagccggtcatcctacaga

SEQ ID NO: 283401 - DNA, 51 bp, Artificial
  Synthetic oligonucleotide
acagtgtacgaccctgagtgggcggtgccatagtagcctagcacaatgacg

SEQ ID NO: 283402 - DNA, 51 bp, Artificial
  Synthetic oligonucleotide
acttgcgcccatgcagatgtggcggtgccgaggcacgtgattgtcacgagc

SEQ ID NO: 283403 - DNA, 51 bp, Artificial
  Synthetic oligonucleotide
aaccataggccaacttcatcgcgaggcgcactgggcagccctatcggacga

SEQ ID NO: 283404 - DNA, 51 bp, Artificial
  Synthetic oligonucleotide
ccttcggccgacgctgaggcagaacgactggataatcaagcttcggagggc

SEQ ID NO: 283405 - DNA, 51 bp, Artificial
  Synthetic oligonucleotide
acagttgtcggggagggagcgcttctctttgatgtggatagggggcgccat

SEQ ID NO: 283406 - DNA, 51 bp, Artificial
  Synthetic oligonucleotide
cgaaaaggggtgccgcggaaccgacgctgtaggctctgttgtatccggttg

SEQ ID NO: 283407 - DNA, 51 bp, Artificial
  Synthetic oligonucleotide
cgaaccgcttagcagctgtatgggatagctacccctctgatctatgccggt

SEQ ID NO: 283408 - DNA, 51 bp, Artificial
  Synthetic oligonucleotide
cgaacggtgtgaggagggaggccatcggacatttgtcgtcaatcgtcgggc

SEQ ID NO: 283409 - DNA, 56 bp, Artificial
  Synthetic oligonucleotide
caacacgaaccattattactgttacaagaccgaaggcggtgaagctgacaacttac

SEQ ID NO: 283410 - DNA, 51 bp, Artificial
  Synthetic oligonucleotide
acttctccggcttgttcactccactaactgactccttcaggggtgtaagta

SEQ ID NO: 283411 - DNA, 51 bp, Artificial
  Synthetic oligonucleotide
atgcatcccagccaggtgtgtggaccgccagaggtacttgatcccgcctct

SEQ ID NO: 283412 - DNA, 51 bp, Artificial
  Synthetic oligonucleotide
cggggttcagtgttcccgtaaagggctggcactggtccatgtgggagatcc

SEQ ID NO: 283413 - DNA, 51 bp, Artificial
  Synthetic oligonucleotide
cggtggaggatccgacacggcaagcactaccctctgaaccccgtaagccgt

SEQ ID NO: 283414 - DNA, 51 bp, Artificial
  Synthetic oligonucleotide
atgaggggaaatcgaacttgggcctcgcttgctccaccaggtgagccgctt

SEQ ID NO: 283415 - DNA, 51 bp, Artificial
  Synthetic oligonucleotide
agcggtccggaccctctctggcgagatgtcctcaacgagcaccagactcgt

SEQ ID NO: 283416 - DNA, 51 bp, Artificial
  Synthetic oligonucleotide
atcttcgctattagagcggctttgtgaagtgaactccggatagattatgta

SEQ ID NO: 283417 - DNA, 51 bp, Artificial
  Synthetic oligonucleotide
cgtataggcaacgtgatgcatcccagccaggtgtgtggaccgccagaggta

SEQ ID NO: 283418 - DNA, 51 bp, Artificial
  Synthetic oligonucleotide
cgtatggtcataacatccccattctcgaccttcggacgattgccgtgcacc

SEQ ID NO: 283419 - DNA, 51 bp, Artificial
  Synthetic oligonucleotide
cgtcatttccggcccatcaatccacttcctcccggactccccacacgcacg

SEQ ID NO: 283420 - DNA, 55 bp, Artificial
  Synthetic oligonucleotide
gtagcgaggtttgacatcggggttacttgagtcgactgttactgaaggggggatg

SEQ ID NO: 283421 - DNA, 51 bp, Artificial
  Synthetic oligonucleotide
cgtctgtccctgactgtcgtctgccctaggcacccctcgacccgagtcgct

SEQ ID NO: 283422 - DNA, 51 bp, Artificial
  Synthetic oligonucleotide
atctgcaccttctttccgtcacactatgagcaagtgatctagtgtaggccc

SEQ ID NO: 283423 - DNA, 51 bp, Artificial
  Synthetic oligonucleotide
cgtgaataagcctcgaccgcgagactccgttggcctgacagacacgggtcc

SEQ ID NO: 283424 - DNA, 51 bp, Artificial
  Synthetic oligonucleotide
cgtgagggggtcggcgcttagcgtactagaagcttgccaatgccggttagc

SEQ ID NO: 283425 - DNA, 51 bp, Artificial
  Synthetic oligonucleotide
atctccggttttgtataggcggccacgtctaccagggtggcccaccgatcc

SEQ ID NO: 283426 - DNA, 51 bp, Artificial
  Synthetic oligonucleotide
accaggagcctcgtcgcatgccctctggtgcccgatctgttacaggaggct

SEQ ID NO: 283427 - DNA, 51 bp, Artificial
  Synthetic oligonucleotide
accaggatactcggtatgtgtgggtagctgaggtgcggtgggggctcgtcg

SEQ ID NO: 283428 - DNA, 51 bp, Artificial
  Synthetic oligonucleotide
agcgtatagccggtcctcgcagctcgcgtgtgtctgctcgtccagccatcg

SEQ ID NO: 283429 - DNA, 51 bp, Artificial
  Synthetic oligonucleotide
cgtgtctgccgtaccgaggttctgagggaaccagctcccgtactccgcggg

SEQ ID NO: 283430 - DNA, 51 bp, Artificial
  Synthetic oligonucleotide
accaggcccattccaccggtttcctggtatccccacgtagtggcacgacca

SEQ ID NO: 283431 - DNA, 60 bp, Artificial
  Synthetic oligonucleotide
cgcttgtagatgagagggatcttccaatgatcgagactactggtcctagcgaacagcccg

SEQ ID NO: 283432 - DNA, 51 bp, Artificial
  Synthetic oligonucleotide
ctaagtccagggattccaggcgacatattacttcggttggtcgcttcctgt

SEQ ID NO: 283433 - DNA, 51 bp, Artificial
  Synthetic oligonucleotide
ctaatggactcaacgatgtacccttctcggaccggtactgggtaaacgata

SEQ ID NO: 283434 - DNA, 51 bp, Artificial
  Synthetic oligonucleotide
ctaccttgccggcccgtgaccaatcagatccggcttctatacaattctaac

SEQ ID NO: 283435 - DNA, 51 bp, Artificial
  Synthetic oligonucleotide
ctaccttgtagtgaaataccaacctattttgagcagtcgaataaacgtgac

SEQ ID NO: 283436 - DNA, 51 bp, Artificial
  Synthetic oligonucleotide
ctagccgaccagatgccttgcctcgaaaggacgagagggtctcacgcccta

SEQ ID NO: 283437 - DNA, 51 bp, Artificial
  Synthetic oligonucleotide
aagccccaggcactatacagagtggtgcgcgtcctttttgttgcggcgctc

SEQ ID NO: 283438 - DNA, 51 bp, Artificial
  Synthetic oligonucleotide
agcgtgtcttggatctcctggggtaggctagcgcggagtcggttgaccgat

SEQ ID NO: 283439 - DNA, 51 bp, Artificial
  Synthetic oligonucleotide
accatcgtagcctaatagcttttcctacccgcgtaatgagccagcactctc

SEQ ID NO: 283440 - DNA, 51 bp, Artificial
  Synthetic oligonucleotide
cgctgtcgtctggcctatggttaccgtacgtgcctggtaaataacgtcagg

SEQ ID NO: 283441 - DNA, 51 bp, Artificial
  Synthetic oligonucleotide
cgcttcctctccagctgttcggcagagagcgacgtcactttacgcgcccca

SEQ ID NO: 283442 - DNA, 60 bp, Artificial
  Synthetic oligonucleotide
cgcttggctatccggtgaaagactagactcagaacgcgcatctcttatgagcttgcagtg

SEQ ID NO: 283443 - DNA, 51 bp, Artificial
  Synthetic oligonucleotide
cggacacccgtacccagtgattaggcgcgctggggcctagtaggctgagag

SEQ ID NO: 283444 - DNA, 51 bp, Artificial
  Synthetic oligonucleotide
cggacggtacgttagagccagacgcatcagtcggtcacctgtgcaggtcgg

SEQ ID NO: 283445 - DNA, 51 bp, Artificial
  Synthetic oligonucleotide
cggacgtgttgccgtgtcgcgccgtcccgtgactcgagaactgtgccacac

SEQ ID NO: 283446 - DNA, 51 bp, Artificial
  Synthetic oligonucleotide
actgcaagccgccgacactcagcgagacgacatgtggtacaggaacgggac

SEQ ID NO: 283447 - DNA, 51 bp, Artificial
  Synthetic oligonucleotide
cggagactgagcgcgagcccaaacgtgaccttgggcgcaaaaattcctatg

SEQ ID NO: 283448 - DNA, 51 bp, Artificial
  Synthetic oligonucleotide
cggagcatatctgcacgctgattgggggtgagtggcgagtttccaccggat

SEQ ID NO: 283449 - DNA, 51 bp, Artificial
  Synthetic oligonucleotide
cggagctcacgcaatcagccaagggggactgcatggtcggttccccgcatc

SEQ ID NO: 283450 - DNA, 51 bp, Artificial
  Synthetic oligonucleotide
cggatgcccccagaccgtgttattcgtccctcgaccttccgcgaacttgca

SEQ ID NO: 283451 - DNA, 51 bp, Artificial
  Synthetic oligonucleotide
atgctcaggtggcaaaggtgcgggtacggaaagctgcacccatggaacgcg

SEQ ID NO: 283452 - DNA, 51 bp, Artificial
  Synthetic oligonucleotide
atgctcactaggcaataccgccgcgaaaccggagaggactgggtcgatccg

SEQ ID NO: 283453 - DNA, 58 bp, Artificial
  Synthetic oligonucleotide
caaccccaggtacagctcagcgtttccgtcgaccacaaagtatgcagcccattatttc

SEQ ID NO: 283454 - DNA, 51 bp, Artificial
  Synthetic oligonucleotide
aatgaccgcgtccagcacatccccgaggtcaactgctgcgtctgcgtaata

SEQ ID NO: 283455 - DNA, 51 bp, Artificial
  Synthetic oligonucleotide
cggcgtaggcggaccttgacgggtaccataagcgaggctgctggtacgttg

SEQ ID NO: 283456 - DNA, 51 bp, Artificial
  Synthetic oligonucleotide
cggctcgaaccttttcgtcaccggtatccaccctcgtctgaccgagtccga

SEQ ID NO: 283457 - DNA, 51 bp, Artificial
  Synthetic oligonucleotide
accaatgtgtctccgaggcaccattgctcggtatagctggctgggaggcgg

SEQ ID NO: 283458 - DNA, 51 bp, Artificial
  Synthetic oligonucleotide
atgcggggaggactgctgccactttagccgcgcgccactatatcccaaaat

SEQ ID NO: 283459 - DNA, 51 bp, Artificial
  Synthetic oligonucleotide
aacaggatcgatctaccaccgtaggatgataagactccgtagtactagtag

SEQ ID NO: 283460 - DNA, 51 bp, Artificial
  Synthetic oligonucleotide
atgcgggcgtgcttcttaagcggccattgtccggagggctcgaatccgtag

SEQ ID NO: 283461 - DNA, 51 bp, Artificial
  Synthetic oligonucleotide
aatgaccagtaggcgcctccgctttgcggacaagagttggctcgctgccgc

SEQ ID NO: 283462 - DNA, 51 bp, Artificial
  Synthetic oligonucleotide
aagcaatctttagaataattgcgcccgcctccctattttcgttagtatcca

SEQ ID NO: 283463 - DNA, 51 bp, Artificial
  Synthetic oligonucleotide
actccctcaagatgtcgggcagaagacacacggcacagccccaggtgatgg

SEQ ID NO: 283464 - DNA, 57 bp, Artificial
  Synthetic oligonucleotide
ggctaagtcttctgggtattcgcacactctaggggaaggtagctcccctgttgcaaa

SEQ ID NO: 283465 - DNA, 51 bp, Artificial
  Synthetic oligonucleotide
cggggaggaacgctcctcgatgcccgtttggtcgccatctccgcagggtac

SEQ ID NO: 283466 - DNA, 51 bp, Artificial
  Synthetic oligonucleotide
agcggctatgctgatgcccaagatcccacgctcgccatgcaaacaatctga

SEQ ID NO: 283467 - DNA, 51 bp, Artificial
  Synthetic oligonucleotide
cgggggactgtatcggcgtaggcggaccttgacgggtaccataagcgaggc

SEQ ID NO: 283468 - DNA, 51 bp, Artificial
  Synthetic oligonucleotide
cgggggccagttggaggatcccataccaaggactctctcatggggcgaggt

SEQ ID NO: 283469 - DNA, 51 bp, Artificial
  Synthetic oligonucleotide
catgcggaactaatactctcattcacgcaagcatcagcgaaaaggtccttc

SEQ ID NO: 283470 - DNA, 51 bp, Artificial
  Synthetic oligonucleotide
catgggctcacacgtggagatcgaggatactgacgcgactacggtcggatc

SEQ ID NO: 283471 - DNA, 51 bp, Artificial
  Synthetic oligonucleotide
cagaacagtccgctgagggatatcttcctgtctagggtagatagttgcctt

SEQ ID NO: 283472 - DNA, 51 bp, Artificial
  Synthetic oligonucleotide
agattcccagtagcgcccctactatccgccgtggctcagtatcgcttgccc

SEQ ID NO: 283473 - DNA, 51 bp, Artificial
  Synthetic oligonucleotide
cattacgaacggagtcgcgagggagtgctgctcgctggggtcactctgcag

SEQ ID NO: 283474 - DNA, 51 bp, Artificial
  Synthetic oligonucleotide
cactgtgtgattcatgcaaatagaattgactctcctggcgctcaggtggag

SEQ ID NO: 283475 - DNA, 60 bp, Artificial
  Synthetic oligonucleotide
gagtgagctttcggagctgctgggttagcaacgccagaggagtcggctgactattcgaga

SEQ ID NO: 283476 - DNA, 60 bp, Artificial
  Synthetic oligonucleotide
aggagaccgctgcattaacaagttctctgcaggagaccgctgcattaccaagttctccgc

SEQ ID NO: 283477 - DNA, 51 bp, Artificial
  Synthetic oligonucleotide
cattctccggttcactaagatgcttggcaggtccgaaccaggccatggacg

SEQ ID NO: 283478 - DNA, 51 bp, Artificial
  Synthetic oligonucleotide
agattacgactaacattgtggctgttcatgaggctgatgccgtacggaatc

SEQ ID NO: 283479 - DNA, 51 bp, Artificial
  Synthetic oligonucleotide
agatggttggtgcgtaggggtaatgcaggcgcggtagactgccctaggccg

SEQ ID NO: 283480 - DNA, 51 bp, Artificial
  Synthetic oligonucleotide
cactggtccatgtgggagatcctatgggcagccgcgctgtgctttgtcgcc

SEQ ID NO: 283481 - DNA, 51 bp, Artificial
  Synthetic oligonucleotide
ccaaccgtattgttctaaccaagcgcccggacccatcgccggtgcacttca

SEQ ID NO: 283482 - DNA, 51 bp, Artificial
  Synthetic oligonucleotide
ccaagatggtgaggcaatcgggtcgcaggagctgcggtatggcttgcgcgt

SEQ ID NO: 283483 - DNA, 51 bp, Artificial
  Synthetic oligonucleotide
agatgccaccgaatcctggtgatccaaaccgaaccgcgctgtgagctcgtc

SEQ ID NO: 283484 - DNA, 51 bp, Artificial
  Synthetic oligonucleotide
cactgcgatcgtcacaacctcccctgtgaatatgcgcctctcgaaccgcgc

SEQ ID NO: 283485 - DNA, 51 bp, Artificial
  Synthetic oligonucleotide
ccacgatgcccaagcacgctcgcaggacacagtgagattgcgaagggaagc

SEQ ID NO: 283486 - DNA, 51 bp, Artificial
  Synthetic oligonucleotide
aaccttgggacgttgtgggctcgggtatatcgggacccgcatttggcaggc

SEQ ID NO: 283487 - DNA, 58 bp, Artificial
  Synthetic oligonucleotide
ctgcctcgtctgtccactattacgaggctgtacgtaagattatgttccccaacgagtc

SEQ ID NO: 283488 - DNA, 51 bp, Artificial
  Synthetic oligonucleotide
ccagcatttctggcccctcgtcagccgatatgtccaatgacacgcctcggg

SEQ ID NO: 283489 - DNA, 51 bp, Artificial
  Synthetic oligonucleotide
acaccacgagacggggcagcaatcgagataaccgggctagtgtacagcgcc

SEQ ID NO: 283490 - DNA, 51 bp, Artificial
  Synthetic oligonucleotide
ccagtatacaggcacatctattcacaccactctatctaacagcaactagta

SEQ ID NO: 283491 - DNA, 51 bp, Artificial
  Synthetic oligonucleotide
cacgccgtgtctcacgtttgcgcaccatgccgactatccccagtgtcaagg

SEQ ID NO: 283492 - DNA, 51 bp, Artificial
  Synthetic oligonucleotide
ccatacgccgaacgtcctggtacgggtgggagcgaccatgccgacacagcc

SEQ ID NO: 283493 - DNA, 51 bp, Artificial
  Synthetic oligonucleotide
acaccgaacctgctatcagcgcagcgcacggattccccaacccgctagcct

SEQ ID NO: 283494 - DNA, 51 bp, Artificial
  Synthetic oligonucleotide
ccatctccgcagggtacagttcctgggtggcagacgccaattctacccagc

SEQ ID NO: 283495 - DNA, 51 bp, Artificial
  Synthetic oligonucleotide
ccatctgccatctcgcaccatatctatctacattctgcatgactctacaca

SEQ ID NO: 283496 - DNA, 51 bp, Artificial
  Synthetic oligonucleotide
cacgagttgcgcaggggaggttgagacaaccgacggtccttcactatgcga

SEQ ID NO: 283497 - DNA, 51 bp, Artificial
  Synthetic oligonucleotide
ccatggtatcgtgaccaacgtccagaggccagcccatgcgaacggtaagga

SEQ ID NO: 283498 - DNA, 57 bp, Artificial
  Synthetic oligonucleotide
cgcttccgtttgtcaaggaacgactcgacctgcctctcatcgttgagcctcgaaacc

SEQ ID NO: 283499 - DNA, 51 bp, Artificial
  Synthetic oligonucleotide
cagcccggaagccgagacgacaccattgtacaagcagtcgccgactccaaa

SEQ ID NO: 283500 - DNA, 51 bp, Artificial
  Synthetic oligonucleotide
cagccgatgatcttcgttagtgcgttgcgcgaacccatggctgcctctccg

SEQ ID NO: 283501 - DNA, 51 bp, Artificial
  Synthetic oligonucleotide
cagccgtctgcagtggagtatgggatggagggggttgtgccgggaataccg

SEQ ID NO: 283502 - DNA, 51 bp, Artificial
  Synthetic oligonucleotide
agcaggtcgggtatctcgactcggtccctcgctaggtggggaaacgagcgt

SEQ ID NO: 283503 - DNA, 51 bp, Artificial
  Synthetic oligonucleotide
cagcagccgtgtcctggtcgcgtgtcgcgtagagtcggaactgcacgaaga

SEQ ID NO: 283504 - DNA, 51 bp, Artificial
  Synthetic oligonucleotide
cagcctccgacgagtcatctcacccagttttaggggccgcgctagacacct

SEQ ID NO: 283505 - DNA, 51 bp, Artificial
  Synthetic oligonucleotide
acaagcgtccggggcacaaaccctaaggtggaccctctcgcttagcagcac

SEQ ID NO: 283506 - DNA, 51 bp, Artificial
  Synthetic oligonucleotide
agcagctagcacacggaaaatttccgcctgcgttccttccgggacccctat

SEQ ID NO: 283507 - DNA, 51 bp, Artificial
  Synthetic oligonucleotide
cagcagcacctagtgcgaatttagaagcatcgcaactttgagactcaaaag

SEQ ID NO: 283508 - DNA, 51 bp, Artificial
  Synthetic oligonucleotide
cagcgtcgcttgaccacgcagtgttgagttcaggacatgacgtgtgtcgac

SEQ ID NO: 283509 - DNA, 60 bp, Artificial
  Synthetic oligonucleotide
ctgcgtcaacaaagcgcctcgcagggacatctgcgacaacaagcccctctagcccgtgca

SEQ ID NO: 283510 - DNA, 51 bp, Artificial
  Synthetic oligonucleotide
caggattcgagtgccaaaggccccaatgacgccgaccttttgagtgcggcg

SEQ ID NO: 283511 - DNA, 51 bp, Artificial
  Synthetic oligonucleotide
cagcaagcgacggaaaccatggagcgaccccaagctcggcccatctcgata

SEQ ID NO: 283512 - DNA, 51 bp, Artificial
  Synthetic oligonucleotide
cagggcgtctcggaaggtgtgtagttctggcacgaggtccgcgtgggatac

SEQ ID NO: 283513 - DNA, 51 bp, Artificial
  Synthetic oligonucleotide
cagcaactagtgaagtggcaggcccttcgtctccacagcccgccacctctc

SEQ ID NO: 283514 - DNA, 51 bp, Artificial
  Synthetic oligonucleotide
cagataggacgcggatgagagccgctcgttgcacggtacggaggtgtcgta

SEQ ID NO: 283515 - DNA, 51 bp, Artificial
  Synthetic oligonucleotide
agcacggtaaaatcgcccgaaaaggctcctaagccgtctccgcaggcacca

SEQ ID NO: 283516 - DNA, 51 bp, Artificial
  Synthetic oligonucleotide
cagataatgggtctgaaacagtcgatggcgtgttgacacttggattctgac

SEQ ID NO: 283517 - DNA, 51 bp, Artificial
  Synthetic oligonucleotide
cagtttcttgtctgagcttttcaaggtctgggccctttttggctatcatgc

SEQ ID NO: 283518 - DNA, 51 bp, Artificial
  Synthetic oligonucleotide
catagcgcagcgtacagggtctgaaaagggccacgatgcccaagcacgctc

SEQ ID NO: 283519 - DNA, 51 bp, Artificial
  Synthetic oligonucleotide
cagactagatggcgtgtgtttcagggtcggccttggtatcaagtaggccag

SEQ ID NO: 283520 - DNA, 60 bp, Artificial
  Synthetic oligonucleotide
aggagaccgctgcattaccaagttctccgcagcctaggccctgcgtcaacaaagcgcctc

SEQ ID NO: 283521 - DNA, 51 bp, Artificial
  Synthetic oligonucleotide
cagacggccggacccggcattgggtaatccttcatgcctccccagatactg

SEQ ID NO: 283522 - DNA, 51 bp, Artificial
  Synthetic oligonucleotide
catatctagccggaaggacacgtggtgaaaaaagtcagatatacgattaga

SEQ ID NO: 283523 - DNA, 51 bp, Artificial
  Synthetic oligonucleotide
agcaactaggctgcggctacagataggaatactaggtttcagggacgtata

SEQ ID NO: 283524 - DNA, 51 bp, Artificial
  Synthetic oligonucleotide
catcgagttgtgtgctggcatccttatggcagcgacgttaaagatgtcgga

SEQ ID NO: 283525 - DNA, 51 bp, Artificial
  Synthetic oligonucleotide
catctcggtcctcggccaagatggtgaggcaatcgggtcgcaggagctgcg

SEQ ID NO: 283526 - DNA, 51 bp, Artificial
  Synthetic oligonucleotide
caagactctggggaccccgcgctaccccgacattcaccccggactagtctg

SEQ ID NO: 283527 - DNA, 51 bp, Artificial
  Synthetic oligonucleotide
caagacatcagtatgagccccctctttcgcccgatgaatatcttacccctt

SEQ ID NO: 283528 - DNA, 51 bp, Artificial
  Synthetic oligonucleotide
ccctctcgaccaatactccgcccgctatgatccgaccgtgatccccgtagc

SEQ ID NO: 283529 - DNA, 51 bp, Artificial
  Synthetic oligonucleotide
ccctctgtggactggtatagatcggcccgcacgtgccatgtttgatcgcgg

SEQ ID NO: 283530 - DNA, 51 bp, Artificial
  Synthetic oligonucleotide
caactacttctgtaaatagttcgtcgtaccggatatcttctccatacggct

SEQ ID NO: 283531 - DNA, 58 bp, Artificial
  Synthetic oligonucleotide
cgcttaacgctagtcagagctagcttgagaaccggtgcgcttttagtctcttagttct

SEQ ID NO: 283532 - DNA, 51 bp, Artificial
  Synthetic oligonucleotide
caacgaacggaccaggtgcttaaagcgctccccgatggccccaaatggtcg

SEQ ID NO: 283533 - DNA, 51 bp, Artificial
  Synthetic oligonucleotide
cccttcctgcgagcagcccaattcaagcgccgggatattgtgtcgctcctg

SEQ ID NO: 283534 - DNA, 51 bp, Artificial
  Synthetic oligonucleotide
caaccaccgcaatgcctagctcgcgacaagtgcgaagcacatcggactggg

SEQ ID NO: 283535 - DNA, 51 bp, Artificial
  Synthetic oligonucleotide
ccgatatgggccgtcaatgtacgattatttgatcccgagaccagacgggag

SEQ ID NO: 283536 - DNA, 51 bp, Artificial
  Synthetic oligonucleotide
ccgcaggcaatcaattttaagcgagcccgctgaggggagtgagaggctcgg

SEQ ID NO: 283537 - DNA, 51 bp, Artificial
  Synthetic oligonucleotide
agccgcacccataccacgaaggaaggaaacggcacctacgggatccgaaga

SEQ ID NO: 283538 - DNA, 51 bp, Artificial
  Synthetic oligonucleotide
caaagtgcacacaaggcctgggacggatctgctccagtcggcgacgcaaga

SEQ ID NO: 283539 - DNA, 51 bp, Artificial
  Synthetic oligonucleotide
aactatcgactaaactaaaagtagtccttatccaagggccatgcgacatgg

SEQ ID NO: 283540 - DNA, 51 bp, Artificial
  Synthetic oligonucleotide
ccgcgactatcagcgtcgaggttgagaagcctgggcgtgagggtctgcaaa

SEQ ID NO: 283541 - DNA, 51 bp, Artificial
  Synthetic oligonucleotide
caaagacgacgtgaggagggaacatgcctccgttgtggaagtaaaggccac

SEQ ID NO: 283542 - DNA, 60 bp, Artificial
  Synthetic oligonucleotide
gtgtagaaggaggaattaatagcacgagacagagcagctttatacatgagctgaagctga

SEQ ID NO: 283543 - DNA, 51 bp, Artificial
  Synthetic oligonucleotide
caaacgtcggatcaggcgagataggccccgggcccagtttattcggcccaa

SEQ ID NO: 283544 - DNA, 51 bp, Artificial
  Synthetic oligonucleotide
ccgctcgcgactggtagtctttcgctgcgttgcacaccgttacgagatccc

SEQ ID NO: 283545 - DNA, 51 bp, Artificial
  Synthetic oligonucleotide
agacacagggacgggtggtctctggggcgcagttggaagagggaggccccg

SEQ ID NO: 283546 - DNA, 51 bp, Artificial
  Synthetic oligonucleotide
aacccggaacggaattcttcccatgaggccgaccccgtcactgctgcatct

SEQ ID NO: 283547 - DNA, 51 bp, Artificial
  Synthetic oligonucleotide
agcctcgaccgcgagactccgttggcctgacagacacgggtccgatatatg

SEQ ID NO: 283548 - DNA, 51 bp, Artificial
  Synthetic oligonucleotide
ccgggcgatgtcaaccaagccgaaatccctgtccagtgggggaccagacga

SEQ ID NO: 283549 - DNA, 51 bp, Artificial
  Synthetic oligonucleotide
agaagggccgacaccagcctgttattcgcacaggagtggccatctccgcaa

SEQ ID NO: 283550 - DNA, 51 bp, Artificial
  Synthetic oligonucleotide
acaggaagcgaccaaccgaagtaatatgtcgcctggaatccctggacttag

SEQ ID NO: 283551 - DNA, 51 bp, Artificial
  Synthetic oligonucleotide
attgcgaagggaagcaggcaactggaatgacgatcctccacagggacggcg

SEQ ID NO: 283552 - DNA, 51 bp, Artificial
  Synthetic oligonucleotide
attcggaccgcgagctgaagagagaccatgcagaagtgccgggccgtcaat

SEQ ID NO: 283553 - DNA, 52 bp, Artificial
  Synthetic oligonucleotide
ctggaaactagacccagtttcttgtctgagctttccaaaggtccggaccctt

SEQ ID NO: 283554 - DNA, 51 bp, Artificial
  Synthetic oligonucleotide
cccaaaggatgcggtaattgcagcctgccatgagcttgttcgggacctggg

SEQ ID NO: 283555 - DNA, 51 bp, Artificial
  Synthetic oligonucleotide
cccaagcacgctcgcaggacacagtgagattgcgaagggaagcaggcaact

SEQ ID NO: 283556 - DNA, 51 bp, Artificial
  Synthetic oligonucleotide
caccgaaaggaacgacccctgaggaacacgctagaaagatgcgaaacttga

SEQ ID NO: 283557 - DNA, 51 bp, Artificial
  Synthetic oligonucleotide
cacccgtaatgcggggaggactgctgccactttagccgcgcgccactatat

SEQ ID NO: 283558 - DNA, 51 bp, Artificial
  Synthetic oligonucleotide
aacggggagaatcccgtaggggcaccaaagcctcggccgtgcactatactg

SEQ ID NO: 283559 - DNA, 51 bp, Artificial
  Synthetic oligonucleotide
cccaggtcgattacgcttgcggtgaggcccactaggcgccccctcgcgatg

SEQ ID NO: 283560 - DNA, 51 bp, Artificial
  Synthetic oligonucleotide
cccatatggtgacaccatggatgcattggaccgaatggactctccgtcctt

SEQ ID NO: 283561 - DNA, 51 bp, Artificial
  Synthetic oligonucleotide
agccaggtgtgtggaccgccagaggtacttgatcccgcctctcaagatgcg

SEQ ID NO: 283562 - DNA, 51 bp, Artificial
  Synthetic oligonucleotide
caccagcactgatgttcaggccttgggttgtccctccggtgtaccccgtta

SEQ ID NO: 283563 - DNA, 51 bp, Artificial
  Synthetic oligonucleotide
ccccagccattcttaggtttcgcccgcccttcccaaagtccagtcgctact

SEQ ID NO: 283564 - DNA, 60 bp, Artificial
  Synthetic oligonucleotide
gtagccgagagtataagctatctcatgggtggtaagtggagttcaacgtcaagcgcagct

SEQ ID NO: 283565 - DNA, 51 bp, Artificial
  Synthetic oligonucleotide
ccccagttccagtggaaaccacacattcccttcgccagcgaatgcccagta

SEQ ID NO: 283566 - DNA, 51 bp, Artificial
  Synthetic oligonucleotide
ccccccgtgaaaacgcgcccaaggcggaacagattcgcagtctgggactgc

SEQ ID NO: 283567 - DNA, 51 bp, Artificial
  Synthetic oligonucleotide
ccccgattaaatgccagcatgtcgtgtggctggttcgtccgtctccgcaca

SEQ ID NO: 283568 - DNA, 51 bp, Artificial
  Synthetic oligonucleotide
ccccgggggtcaaagtgatgatgccactacggcattctcccccatcgcgat

SEQ ID NO: 283569 - DNA, 51 bp, Artificial
  Synthetic oligonucleotide
ccccgtccacggcgggtagtagccagcggctcggtccaagttatgctggca

SEQ ID NO: 283570 - DNA, 51 bp, Artificial
  Synthetic oligonucleotide
ccccgtcgatataacgccggctcgcctacggagggccaacttaacttgggt

SEQ ID NO: 283571 - DNA, 51 bp, Artificial
  Synthetic oligonucleotide
cccctcaatctggggtatcccgtggggaagaaccgacgtagcgctgttgct

SEQ ID NO: 283572 - DNA, 51 bp, Artificial
  Synthetic oligonucleotide
cacaggatagtgtcgtcgtcatcagtgagggtaatggcggagggtcgcttg

SEQ ID NO: 283573 - DNA, 51 bp, Artificial
  Synthetic oligonucleotide
cccgaaggggaccgatgcagaaacaacggggccgtaagggtgacgacaaag

SEQ ID NO: 283574 - DNA, 51 bp, Artificial
  Synthetic oligonucleotide
cccgatggacgatcgctcgagagccgcctcgatgtcagttcggatccagcg

SEQ ID NO: 283575 - DNA, 58 bp, Artificial
  Synthetic oligonucleotide
caacgactggcgagtcggaaagactgcctcacggccctgaataggtaagtgtagtcag

SEQ ID NO: 283576 - DNA, 51 bp, Artificial
  Synthetic oligonucleotide
agagacttgctcattactggatcagtccatcggtttgggtcaaatgtttcc

SEQ ID NO: 283577 - DNA, 51 bp, Artificial
  Synthetic oligonucleotide
agagacgctgcaagggattgcgggttagggcgttcgctgcaaacgtcatga

SEQ ID NO: 283578 - DNA, 51 bp, Artificial
  Synthetic oligonucleotide
cccgctatccgtaagactgctagtccggctacgtgccccgatctgtccgct

SEQ ID NO: 283579 - DNA, 51 bp, Artificial
  Synthetic oligonucleotide
cccgtaaagggctggcactggtccatgtgggagatcctatgggcagccgcg

SEQ ID NO: 283580 - DNA, 51 bp, Artificial
  Synthetic oligonucleotide
cccgtgaaagtagtgaagtgcgagacaaacgacctctacgtccccatgaat

SEQ ID NO: 283581 - DNA, 51 bp, Artificial
  Synthetic oligonucleotide
aggattcctgagcgtatagccggtcctcgcagctcgcgtgtgtctgctcgt

SEQ ID NO: 283582 - DNA, 51 bp, Artificial
  Synthetic oligonucleotide
gatgcacaacccaactggctaagtcggacccgggctcatagcccctgctcc

SEQ ID NO: 283583 - DNA, 51 bp, Artificial
  Synthetic oligonucleotide
agtgcgacggaaactcgtagtagtgcccccgcccatacaccggtcacttcg

SEQ ID NO: 283584 - DNA, 51 bp, Artificial
  Synthetic oligonucleotide
gcaagtaccagcggtcctgcccaacgcccagcaacgggctgtgccaagcga

SEQ ID NO: 283585 - DNA, 51 bp, Artificial
  Synthetic oligonucleotide
gcaatccagacagcaccaggcctaataacgagccgacaaaagcaccggtgt

SEQ ID NO: 283586 - DNA, 60 bp, Artificial
  Synthetic oligonucleotide
caggtccataaatgtacaatcccatggaaccacgcgctggataacacgacataatcatgc

SEQ ID NO: 283587 - DNA, 60 bp, Artificial
  Synthetic oligonucleotide
gtgtcatggtgtccctctcttgcctgcgggcttgagagtctccgtgacgacggctgtcgc

SEQ ID NO: 283588 - DNA, 51 bp, Artificial
  Synthetic oligonucleotide
gcacaatgtttggcctaaggcggacatctagaccacttgacctcgtgtttt

SEQ ID NO: 283589 - DNA, 51 bp, Artificial
  Synthetic oligonucleotide
gcacagtgttggaccacgcggtgcgagtgagccgctcaggctgtttgaacc

SEQ ID NO: 283590 - DNA, 51 bp, Artificial
  Synthetic oligonucleotide
gcacgtgattgtcacgagccgcaacggggcccccgccacagcccagtctta

SEQ ID NO: 283591 - DNA, 51 bp, Artificial
  Synthetic oligonucleotide
gcagtgcttccgacctgtcgtgtttacacacccaccctccggcgtgtccac

SEQ ID NO: 283592 - DNA, 51 bp, Artificial
  Synthetic oligonucleotide
gcataccggcgtaccatgcgcaactgcctactcatcctggagagcgttgct

SEQ ID NO: 283593 - DNA, 51 bp, Artificial
  Synthetic oligonucleotide
gcatactggtccgtcccacccaagagcgcccaatgctccgtctacaccaac

SEQ ID NO: 283594 - DNA, 51 bp, Artificial
  Synthetic oligonucleotide
gcatagtcaaaccgctagctctacaaggcgggcagcagtgtccgagcggta

SEQ ID NO: 283595 - DNA, 51 bp, Artificial
  Synthetic oligonucleotide
agtgaatgacctacatgtgtcggctttcgaggtggttgctagcgtcgattt

SEQ ID NO: 283596 - DNA, 51 bp, Artificial
  Synthetic oligonucleotide
acgcaaggcgagctctggcggagagtaaatgaagagtcccgaactaccagc

SEQ ID NO: 283597 - DNA, 51 bp, Artificial
  Synthetic oligonucleotide
gccaatcatgacacaaacatactcagtcacccgggctgagccatttaccgt

SEQ ID NO: 283598 - DNA, 59 bp, Artificial
  Synthetic oligonucleotide
ctggacgcggggtaggtaggcatgctatcgatctgttaagcaacctcggtttggtctgc

SEQ ID NO: 283599 - DNA, 51 bp, Artificial
  Synthetic oligonucleotide
gccacgagtgacggggtcggagtgagctccaaggggatcccgataaggcaa

SEQ ID NO: 283600 - DNA, 51 bp, Artificial
  Synthetic oligonucleotide
agtctccatggcgatgggtctctttccagccatcggctcgcaccgtccatt

SEQ ID NO: 283601 - DNA, 51 bp, Artificial
  Synthetic oligonucleotide
agtctacctggggaaccggtgcattaggctcgtacaacacttgcgcgcccg

SEQ ID NO: 283602 - DNA, 51 bp, Artificial
  Synthetic oligonucleotide
agtcgccgcatgaccggaccgtcggcaaaatgggcctcattgccttactag

SEQ ID NO: 283603 - DNA, 51 bp, Artificial
  Synthetic oligonucleotide
aggcctatttagggtcagcccgtccacagtgcgaccaagtcggggatcacg

SEQ ID NO: 283604 - DNA, 51 bp, Artificial
  Synthetic oligonucleotide
aaggcagaccgcgttgtcacgactgtggcccaggatagtagcacaagcgtg

SEQ ID NO: 283605 - DNA, 51 bp, Artificial
  Synthetic oligonucleotide
acgaggcccgacctcaactgcaagccgccgacactcagcgagacgacatgt

SEQ ID NO: 283606 - DNA, 51 bp, Artificial
  Synthetic oligonucleotide
aggcctggtcgcttcccgttatctccaagcaacggcgacactctctccgca

SEQ ID NO: 283607 - DNA, 51 bp, Artificial
  Synthetic oligonucleotide
gcctcgtggttccaatgcgggtcggttactggggcacgtccccggggctca

SEQ ID NO: 283608 - DNA, 51 bp, Artificial
  Synthetic oligonucleotide
gacgattgtcgctactgcggctgtcacgctccttgcgtctgaggcttggcg

SEQ ID NO: 283609 - DNA, 58 bp, Artificial
  Synthetic oligonucleotide
cgctgtgctgtaagagtctacctagccactgcgaggaacctaaattgaaaggtccggc

SEQ ID NO: 283610 - DNA, 51 bp, Artificial
  Synthetic oligonucleotide
gacgggataacgcaatcggttctgtagcgtgagcgtcgtcattttccaata

SEQ ID NO: 283611 - DNA, 51 bp, Artificial
  Synthetic oligonucleotide
gacgggtggtctctggggcgcagttggaagagggaggccccggtatggaga

SEQ ID NO: 283612 - DNA, 51 bp, Artificial
  Synthetic oligonucleotide
aggagaggaggctggctgggggaccgatctcggttgcgaggatgaggccgt

SEQ ID NO: 283613 - DNA, 51 bp, Artificial
  Synthetic oligonucleotide
ataaatcagactctcctcaaggccaccatccgacgcaacaaatggatcggc

SEQ ID NO: 283614 - DNA, 51 bp, Artificial
  Synthetic oligonucleotide
aggagcatgcgtcgtcattttagcgagtgattctacacggaaagcttgcag

SEQ ID NO: 283615 - DNA, 51 bp, Artificial
  Synthetic oligonucleotide
aggagccagggaccgcatatcatcacccaaacgagcgatgctccgacctct

SEQ ID NO: 283616 - DNA, 51 bp, Artificial
  Synthetic oligonucleotide
gacttcttcagcacagacatcacgtagctttccgtttaaaatgaaatcgtt

SEQ ID NO: 283617 - DNA, 51 bp, Artificial
  Synthetic oligonucleotide
gagaactaggttttggtacgaggggcaggaccaccaaacagctcggataag

SEQ ID NO: 283618 - DNA, 51 bp, Artificial
  Synthetic oligonucleotide
gagaactcgagcaccttgaattgcggaagcatcgttttggcgtctgggtac

SEQ ID NO: 283619 - DNA, 51 bp, Artificial
  Synthetic oligonucleotide
accgacgtaatgaagctcgcagcaccgatcagctcccctatggccaggcta

SEQ ID NO: 283620 - DNA, 59 bp, Artificial
  Synthetic oligonucleotide
agcgagaggtttccaagcacccgtcacagacgacacgtcatttgcaacaggggagctac

SEQ ID NO: 283621 - DNA, 51 bp, Artificial
  Synthetic oligonucleotide
aataacagacgccattagcggcactatcccttcgtcgcagggaaatacgta

SEQ ID NO: 283622 - DNA, 51 bp, Artificial
  Synthetic oligonucleotide
gagaccgagtcacctaccaccaggggccatgtcttgcgtcctcgggtgcgg

SEQ ID NO: 283623 - DNA, 51 bp, Artificial
  Synthetic oligonucleotide
gagagtagaacgcgactcagtagagctcgcggggccggcaaatccaaggcc

SEQ ID NO: 283624 - DNA, 51 bp, Artificial
  Synthetic oligonucleotide
gagatcttgaagccgcagtcccagacttaccgccgccccacttgtcccaat

SEQ ID NO: 283625 - DNA, 51 bp, Artificial
  Synthetic oligonucleotide
gagatgatacgagctcgcctgcaagatggtgccgaccgccataatagcggt

SEQ ID NO: 283626 - DNA, 51 bp, Artificial
  Synthetic oligonucleotide
gagcaccgctgaccagacagcttctcacgcgctcatcatcgctcccgctac

SEQ ID NO: 283627 - DNA, 51 bp, Artificial
  Synthetic oligonucleotide
agttacattgacgatactggacaaacggtcagccggggtagtcagtagtct

SEQ ID NO: 283628 - DNA, 51 bp, Artificial
  Synthetic oligonucleotide
gagccggagcggtcaagtatgtagcagtagccatgttacccggtcactggg

SEQ ID NO: 283629 - DNA, 51 bp, Artificial
  Synthetic oligonucleotide
accgatgagcggaacatccatactaccggcagttcgtcggtatctgtgcta

SEQ ID NO: 283630 - DNA, 51 bp, Artificial
  Synthetic oligonucleotide
gagtactaggcggtaagctaggtagctccaagacctacgtaccatcatcgg

SEQ ID NO: 283631 - DNA, 60 bp, Artificial
  Synthetic oligonucleotide
caacgatatagaaagagaaacttgcaattatcaggcagacgtaatggctgacattattgc

SEQ ID NO: 283632 - DNA, 51 bp, Artificial
  Synthetic oligonucleotide
gagtccacttctactaggatataaataacgtacccactatgcagcagatac

SEQ ID NO: 283633 - DNA, 51 bp, Artificial
  Synthetic oligonucleotide
gatactttcctcgtcttggctcggcgctatcctctggttattgccgtccgg

SEQ ID NO: 283634 - DNA, 51 bp, Artificial
  Synthetic oligonucleotide
acgccgcttagaggcgaaattagggacgggcagtggacctgtaggctcacc

SEQ ID NO: 283635 - DNA, 51 bp, Artificial
  Synthetic oligonucleotide
acgccgctgccacacattgttgggcgtagactacagcgggcatcctgggag

SEQ ID NO: 283636 - DNA, 51 bp, Artificial
  Synthetic oligonucleotide
gcgtttaggccgctgcacaagactagggctgcgggtacggaatagcctcgg

SEQ ID NO: 283637 - DNA, 51 bp, Artificial
  Synthetic oligonucleotide
gctaggagggagttgcggggttcagtgaggatacggacgagcagaggggtg

SEQ ID NO: 283638 - DNA, 51 bp, Artificial
  Synthetic oligonucleotide
gctaggcctgcggaacgcaagttggcccgcccacaatccagaggaacaata

SEQ ID NO: 283639 - DNA, 51 bp, Artificial
  Synthetic oligonucleotide
gctagtcccctgctcatcccgacacccatgacggcatagaggaggcctccg

SEQ ID NO: 283640 - DNA, 51 bp, Artificial
  Synthetic oligonucleotide
aaaattgataagatagtatgggatacaggcgtggccgactcgctttgaaaa

SEQ ID NO: 283641 - DNA, 51 bp, Artificial
  Synthetic oligonucleotide
aaaatgtctggcataagcactattactcagtaggaacaagacttcttaggc

SEQ ID NO: 283642 - DNA, 60 bp, Artificial
  Synthetic oligonucleotide
ctggcaactcttttggttggaagtagctagaaaatgtcagcgtgttgaaatgtctcatgg

SEQ ID NO: 283643 - DNA, 51 bp, Artificial
  Synthetic oligonucleotide
gctcggatcatccgagtcccatgcacctacacgtgatgcctctaccccgga

SEQ ID NO: 283644 - DNA, 51 bp, Artificial
  Synthetic oligonucleotide
gctcggtctcaccgaggtccaggcgtcagaaaaggcggaagggcgctgtct

SEQ ID NO: 283645 - DNA, 51 bp, Artificial
  Synthetic oligonucleotide
aggggagaacttatcgagtgcgtcagacacaagcctgctcgactctgcaga

SEQ ID NO: 283646 - DNA, 51 bp, Artificial
  Synthetic oligonucleotide
agggcgttcgctgcaaacgtcatgaccgcggccttatatccgctaaccccc

SEQ ID NO: 283647 - DNA, 51 bp, Artificial
  Synthetic oligonucleotide
gctgtcccgtcggcttctcacttcgtagtaagcggcaagcgagcagccccg

SEQ ID NO: 283648 - DNA, 51 bp, Artificial
  Synthetic oligonucleotide
aaggtgcgcaggaaaatcacacccccgtcgaacgaggcgacaccccagccc

SEQ ID NO: 283649 - DNA, 51 bp, Artificial
  Synthetic oligonucleotide
gcttaatggcaggggagcctaccttcactattggccatgttgttagtccaa

SEQ ID NO: 283650 - DNA, 51 bp, Artificial
  Synthetic oligonucleotide
gcttagatgcggagggatgtcgcggcaaaggtttcagccgctcacattatc

SEQ ID NO: 283651 - DNA, 51 bp, Artificial
  Synthetic oligonucleotide
gcttgacagggtctccccgtcgatataacgccggctcgcctacggagggcc

SEQ ID NO: 283652 - DNA, 51 bp, Artificial
  Synthetic oligonucleotide
gcttgtatggcaaggccccaatgccaacacgtccgcctaccagccccaaat

SEQ ID NO: 283653 - DNA, 60 bp, Artificial
  Synthetic oligonucleotide
caacgcgtcgtgacgcgtggggttaatgagttgacgataatggatgttgattgaaggcgc

SEQ ID NO: 283654 - DNA, 51 bp, Artificial
  Synthetic oligonucleotide
aaaagcgctcgcatgttttgcctaacctggcgcaagtcccacacgtgggct

SEQ ID NO: 283655 - DNA, 51 bp, Artificial
  Synthetic oligonucleotide
agggcggtattcttgaaagtacgatcgacttagcctcgaaggtattcgagc

SEQ ID NO: 283656 - DNA, 51 bp, Artificial
  Synthetic oligonucleotide
ggaacatactcaacgtagcagtcatcgtcatgcgggtatctcagctcagta

SEQ ID NO: 283657 - DNA, 51 bp, Artificial
  Synthetic oligonucleotide
agggcacgtgaccgactaacatggtttgggccaatggcgggaccgagtgga

SEQ ID NO: 283658 - DNA, 51 bp, Artificial
  Synthetic oligonucleotide
ggaactgcctcgcaggcagcaactagtgaagtggcaggcccttcgtctcca

SEQ ID NO: 283659 - DNA, 51 bp, Artificial
  Synthetic oligonucleotide
aaaaaatcaggacttcggtcctcacactccgttgtgtgatggtgtccatct

SEQ ID NO: 283660 - DNA, 51 bp, Artificial
  Synthetic oligonucleotide
gcctctccgccatgggccgtgatttgtcaaatccgcgtgcgtttaaggtgg

SEQ ID NO: 283661 - DNA, 51 bp, Artificial
  Synthetic oligonucleotide
aaggctacgatagactggccgctctaatggcccgcgaccccgggtcctcca

SEQ ID NO: 283662 - DNA, 51 bp, Artificial
  Synthetic oligonucleotide
agtacgatacgaggcccgacctcaactgcaagccgccgacactcagcgaga

SEQ ID NO: 283663 - DNA, 51 bp, Artificial
  Synthetic oligonucleotide
gcctgtcagttgggggcgcagtgttgccatttggccccgttgctatggcgg

SEQ ID NO: 283664 - DNA, 58 bp, Artificial
  Synthetic oligonucleotide
attcatcgcactggcccacacacatcttctttagtccaaataaggggcaaacgagtgg

SEQ ID NO: 283665 - DNA, 51 bp, Artificial
  Synthetic oligonucleotide
gccttgattggaatcctgatggtgggtaggctcgatgcgagaccgacggcg

SEQ ID NO: 283666 - DNA, 51 bp, Artificial
  Synthetic oligonucleotide
aaggctcccgtccccttgtgggcgagggatgttgtgagcgatctcaagtcc

SEQ ID NO: 283667 - DNA, 51 bp, Artificial
  Synthetic oligonucleotide
gcgacctcaggagccagggaccgcatatcatcacccaaacgagcgatgctc

SEQ ID NO: 283668 - DNA, 51 bp, Artificial
  Synthetic oligonucleotide
gcgagaaatgccattttgttggcgctcgtgggtgactttgcggtcgacgga

SEQ ID NO: 283669 - DNA, 51 bp, Artificial
  Synthetic oligonucleotide
gcgaggtgaccgcaatgggatgtctgacaggcccgggtataatcgacagcg

SEQ ID NO: 283670 - DNA, 51 bp, Artificial
  Synthetic oligonucleotide
aaaccgcgagcccctttgcgacacccgttcaagatccactaacgagcgagc

SEQ ID NO: 283671 - DNA, 51 bp, Artificial
  Synthetic oligonucleotide
gcgccagattctcgtgccgcatcgataaatgggagctggccgtgtaagcct

SEQ ID NO: 283672 - DNA, 51 bp, Artificial
  Synthetic oligonucleotide
acgaaggctagcgctaaccccactagctttgcaagggttcgtaggccggct

SEQ ID NO: 283673 - DNA, 51 bp, Artificial
  Synthetic oligonucleotide
aagtaggtaccaagctcggctgtccggtcaaagcagtatatcgccttaaca

SEQ ID NO: 283674 - DNA, 51 bp, Artificial
  Synthetic oligonucleotide
gcgcggagtcagggcaccccaagacgggtagttcgagaccgatgatctgca

SEQ ID NO: 283675 - DNA, 60 bp, Artificial
  Synthetic oligonucleotide
cacggatgaaccccattcgctgtacaaaacgcgacgtcagtctcagcgaatagcgaggtc

SEQ ID NO: 283676 - DNA, 51 bp, Artificial
  Synthetic oligonucleotide
aagggccgcgtcagcgctaggatactgaatacccccacataattggctgta

SEQ ID NO: 283677 - DNA, 51 bp, Artificial
  Synthetic oligonucleotide
gcgctagtcgggctgaatgaagcctgtctggccctccaacgaggcgactgc

SEQ ID NO: 283678 - DNA, 51 bp, Artificial
  Synthetic oligonucleotide
gcgctccactcacagctgacaatctcgcccaatacagagagggtgcccagc

SEQ ID NO: 283679 - DNA, 51 bp, Artificial
  Synthetic oligonucleotide
aggctgcttcgctcccttgtgcggcggtcacagcatggacggctctaaaca

SEQ ID NO: 283680 - DNA, 51 bp, Artificial
  Synthetic oligonucleotide
acctgtccacctggagtgtcccccatctgcaatcttgggagcagtcgcagc

SEQ ID NO: 283681 - DNA, 51 bp, Artificial
  Synthetic oligonucleotide
gcggcacccggagtcatcgactattgatcctccgtgggcgcgcgacaggag

SEQ ID NO: 283682 - DNA, 51 bp, Artificial
  Synthetic oligonucleotide
gcggccactctccttgacgcatgccagtagcacgggagactggtgaacgtc

SEQ ID NO: 283683 - DNA, 51 bp, Artificial
  Synthetic oligonucleotide
aggctgtactctgccggacttgaccgacggccagagtgtggagatacgggg

SEQ ID NO: 283684 - DNA, 51 bp, Artificial
  Synthetic oligonucleotide
accgtcatcggagaagggccgacaccagcctgttattcgcacaggagtggc

SEQ ID NO: 283685 - DNA, 51 bp, Artificial
  Synthetic oligonucleotide
gcgggtgtccagagggacagtctcgccgtactcggtaatacggctcactga

SEQ ID NO: 283686 - DNA, 58 bp, Artificial
  Synthetic oligonucleotide
cgcaccaccgcctttctggattctcatgggaccgaaccttagtagataccgctgcaaa

SEQ ID NO: 283687 - DNA, 51 bp, Artificial
  Synthetic oligonucleotide
gcgtccccgcaacacccaatcgagggcaatcagcacagcaaccaccccata

SEQ ID NO: 283688 - DNA, 51 bp, Artificial
  Synthetic oligonucleotide
gcgtccgggaccacagtaacgccttgtcaagcccccaagaggcacgagagt

SEQ ID NO: 283689 - DNA, 51 bp, Artificial
  Synthetic oligonucleotide
gcgtggtggtggcaagctaatccgggtgtctggtgcgtgcgctgtagatac

SEQ ID NO: 283690 - DNA, 51 bp, Artificial
  Synthetic oligonucleotide
aaggggaagaaaactgtccactgagggtggtcttgtcaaagttgtagatac

SEQ ID NO: 283691 - DNA, 51 bp, Artificial
  Synthetic oligonucleotide
aagcgagacctgccttaggaactgcgaacagctgacgtcccatggcttgcc

SEQ ID NO: 283692 - DNA, 51 bp, Artificial
  Synthetic oligonucleotide
ctggccgcacggtaccacaacctcgagatggcctgatcagggcactatgga

SEQ ID NO: 283693 - DNA, 51 bp, Artificial
  Synthetic oligonucleotide
ctttgttagggttcagtctgggcggcagcctattaaaggcctagaaacggg

SEQ ID NO: 283694 - DNA, 51 bp, Artificial
  Synthetic oligonucleotide
atcctatgggcagccgcgctgtgctttgtcgccctggtaagtgctcgctac

SEQ ID NO: 283695 - DNA, 51 bp, Artificial
  Synthetic oligonucleotide
ctggaacttgtttggtggaccgagtctactatggaatacggaatggtgcac

SEQ ID NO: 283696 - DNA, 51 bp, Artificial
  Synthetic oligonucleotide
gaaaatcacacccccgtcgaacgaggcgacaccccagcccgaaatggagat

SEQ ID NO: 283697 - DNA, 60 bp, Artificial
  Synthetic oligonucleotide
tcatatcggttctgggtcaatgatattcaatatgcgagcgagaccttaatttccctctgg

SEQ ID NO: 283698 - DNA, 58 bp, Artificial
  Synthetic oligonucleotide
gtgaatactgtccacgccttccactcttcgggccccacattcgccaggcgaagaacac

SEQ ID NO: 283699 - DNA, 51 bp, Artificial
  Synthetic oligonucleotide
gaaaccgggccgtatccacgtgacccgcagtggaaatagccgagccgaacc

SEQ ID NO: 283700 - DNA, 51 bp, Artificial
  Synthetic oligonucleotide
ctgctaacgttcatgacagatgcactacggagtagcgtacctcacttgtgc

SEQ ID NO: 283701 - DNA, 51 bp, Artificial
  Synthetic oligonucleotide
atccaaattgaccgactgaagacaaaacgaaagggtcgatgacctctcccc

SEQ ID NO: 283702 - DNA, 51 bp, Artificial
  Synthetic oligonucleotide
ctgcgtgccggaaagtgttagcatgtccctgggcagagtgcgcgctagata

SEQ ID NO: 283703 - DNA, 51 bp, Artificial
  Synthetic oligonucleotide
gaaaggacagtaagttagcagagaacgttataactaagatggggattgtga

SEQ ID NO: 283704 - DNA, 51 bp, Artificial
  Synthetic oligonucleotide
gaaatcaacgtaagctttaaaatgccattatatactataaaactactaatc

SEQ ID NO: 283705 - DNA, 51 bp, Artificial
  Synthetic oligonucleotide
atcctccacgactcgcaatgccgcggtccatagcgcagttgtcgtagcctg

SEQ ID NO: 283706 - DNA, 51 bp, Artificial
  Synthetic oligonucleotide
aagccgtatccccgcaagggcaagactcgcatgccacgaagactggtgcac

SEQ ID NO: 283707 - DNA, 51 bp, Artificial
  Synthetic oligonucleotide
ctgcgatggggcccgccaaatacggtagtctcttcgcgtcgcgctatcagc

SEQ ID NO: 283708 - DNA, 51 bp, Artificial
  Synthetic oligonucleotide
ctgcctcagcagtgtgctcggatctaaggtcgagggcgctctgtcacatcc

SEQ ID NO: 283709 - DNA, 60 bp, Artificial
  Synthetic oligonucleotide
cgcacactggtctgtgtctgctacgttgattcgatagagatatccattgagtcttgccaa

SEQ ID NO: 283710 - DNA, 51 bp, Artificial
  Synthetic oligonucleotide
acgggccgatgccaccactcgccagatggtggttctccccttctccgcgca

SEQ ID NO: 283711 - DNA, 51 bp, Artificial
  Synthetic oligonucleotide
ctgccagagttcgagacacggattgacgagccctggcatatgtgcggcggt

SEQ ID NO: 283712 - DNA, 51 bp, Artificial
  Synthetic oligonucleotide
ctgcaaccatcacaatgggacaaaaggcctcggtccctcaaccaggggcta

SEQ ID NO: 283713 - DNA, 51 bp, Artificial
  Synthetic oligonucleotide
agcttctcacgcgctcatcatcgctcccgctactgcgcaacacatgcacgc

SEQ ID NO: 283714 - DNA, 51 bp, Artificial
  Synthetic oligonucleotide
acgtccgtgctacatccatactccctctctaacgcggccatgcaccaatag

SEQ ID NO: 283715 - DNA, 51 bp, Artificial
  Synthetic oligonucleotide
ctgaatctaacactccattagctggcgaagagtcacacaaagtgttggaat

SEQ ID NO: 283716 - DNA, 51 bp, Artificial
  Synthetic oligonucleotide
cttaaccccctccgacgatgagattcctcaatgtggggcgtgcgaagcccc

SEQ ID NO: 283717 - DNA, 51 bp, Artificial
  Synthetic oligonucleotide
aaatcgaccatgaggggtagccgtaataacaatatcctgggggctgatgga

SEQ ID NO: 283718 - DNA, 51 bp, Artificial
  Synthetic oligonucleotide
cttagagttagtattacacgatatacatccatagtatcgggctatacagcg

SEQ ID NO: 283719 - DNA, 51 bp, Artificial
  Synthetic oligonucleotide
cttcacaagatcatccatagtgtaccctctgcgttatgaataatgtggaac

SEQ ID NO: 283720 - DNA, 60 bp, Artificial
  Synthetic oligonucleotide
cacgggccgcaatgcggaactcatgccatgcacagcatttcgccatcatgaggttacaag

SEQ ID NO: 283721 - DNA, 51 bp, Artificial
  Synthetic oligonucleotide
ctgttccctatcgcaggcatgattgctgcggaactaaaccgtactggccaa

SEQ ID NO: 283722 - DNA, 51 bp, Artificial
  Synthetic oligonucleotide
atccgaggtggggggttgaggcgcgcatactttgtcgcagtctttcgccag

SEQ ID NO: 283723 - DNA, 51 bp, Artificial
  Synthetic oligonucleotide
cttcatcgcgaggcgcactgggcagccctatcggacgaccgttggtccagg

SEQ ID NO: 283724 - DNA, 51 bp, Artificial
  Synthetic oligonucleotide
acggtaatggagtccgcagaacaccgtgacatgattgcggagacggagggg

SEQ ID NO: 283725 - DNA, 51 bp, Artificial
  Synthetic oligonucleotide
cttctgatatgggtgtgtgcggtgtgcgtcttgcttgttgcctagtctctc

SEQ ID NO: 283726 - DNA, 51 bp, Artificial
  Synthetic oligonucleotide
ctgtgatgactgggtcggggtcagtccacccgttcagggccaccctggatt

SEQ ID NO: 283727 - DNA, 51 bp, Artificial
  Synthetic oligonucleotide
atccgctgaagcggaaccgagtagcctccaaccggcctaagccctcacgag

SEQ ID NO: 283728 - DNA, 51 bp, Artificial
  Synthetic oligonucleotide
agctgacgttgaccagtcggacctgcacacccgcatggtacccctgtctac

SEQ ID NO: 283729 - DNA, 51 bp, Artificial
  Synthetic oligonucleotide
ctggttggtgagcgtcatccacgttcgcaagatccccacttagcgggccga

SEQ ID NO: 283730 - DNA, 51 bp, Artificial
  Synthetic oligonucleotide
acgggtgggcaagtcggctgtcatcaagacgtcgacccgccagactatcta

SEQ ID NO: 283731 - DNA, 53 bp, Artificial
  Synthetic oligonucleotide
cacggggagggattttctaagcccgttaatacctacagtctgcgatcgaacgg

SEQ ID NO: 283732 - DNA, 51 bp, Artificial
  Synthetic oligonucleotide
atcccccacaggcgattgcaattcatgccaaaccggaggaggctgtggtcg

SEQ ID NO: 283733 - DNA, 51 bp, Artificial
  Synthetic oligonucleotide
atccggcgtctttcatggtgcataggtgggattcgcgggaggagagggggc

SEQ ID NO: 283734 - DNA, 51 bp, Artificial
  Synthetic oligonucleotide
aaataccccgatggggcttgtcaacgggtgtggtgtcgcgggaaggcgcaa

SEQ ID NO: 283735 - DNA, 51 bp, Artificial
  Synthetic oligonucleotide
aaatggggaccgacatgaagaaagcgtccatcactcgctctccgcagccgg

SEQ ID NO: 283736 - DNA, 51 bp, Artificial
  Synthetic oligonucleotide
ctttatttctcacgccatcactatagccagtgacacccgattaaagtagtc

SEQ ID NO: 283737 - DNA, 51 bp, Artificial
  Synthetic oligonucleotide
acccagggcgacagtgagggcgtagctgcggacttcgtagacgtcatcggg

SEQ ID NO: 283738 - DNA, 51 bp, Artificial
  Synthetic oligonucleotide
ctgggcggaaaaccaagaacgtgatttgtcgcacaaccacgcggctgagcg

SEQ ID NO: 283739 - DNA, 51 bp, Artificial
  Synthetic oligonucleotide
ctggcttatgggcggcagagtgacgttatctgagcgtacatcactatctga

SEQ ID NO: 283740 - DNA, 51 bp, Artificial
  Synthetic oligonucleotide
gaagcacgaatccgcacttccacccgattcgacggcactctctcgctccat

SEQ ID NO: 283741 - DNA, 51 bp, Artificial
  Synthetic oligonucleotide
atagtcatgaataaatcaccttcatgtgcagttttataacttactaaagga

SEQ ID NO: 283742 - DNA, 57 bp, Artificial
  Synthetic oligonucleotide
gaattctatcggcgattccccaaagacccaatgtattgaacagtccaccttatctta

SEQ ID NO: 283743 - DNA, 51 bp, Artificial
  Synthetic oligonucleotide
aggaaaggccacggtatacgagggcacgaccccagggatgttctcttcttc

SEQ ID NO: 283744 - DNA, 51 bp, Artificial
  Synthetic oligonucleotide
ctcgggcgcagcattcaagaaccgcttccactagaccgcggaactcggaag

SEQ ID NO: 283745 - DNA, 51 bp, Artificial
  Synthetic oligonucleotide
atagcggataacatgtgacttgcgcccatgcagatgtggcggtgccgaggc

SEQ ID NO: 283746 - DNA, 51 bp, Artificial
  Synthetic oligonucleotide
gaatgacttctctctcggcaatacttggtcgctagtgtaaaggtccaggct

SEQ ID NO: 283747 - DNA, 51 bp, Artificial
  Synthetic oligonucleotide
gaattcttcccatgaggccgaccccgtcactgctgcatcttggtgcgtgct

SEQ ID NO: 283748 - DNA, 51 bp, Artificial
  Synthetic oligonucleotide
atagaataggcgctacttcgggtttagctgactacagaatccacgatccta

SEQ ID NO: 283749 - DNA, 51 bp, Artificial
  Synthetic oligonucleotide
atcgacagaaagtcctgcgaaacctggaccgtgctgggaggtggtagctgg

SEQ ID NO: 283750 - DNA, 51 bp, Artificial
  Synthetic oligonucleotide
ctcgggccatcgttggtccgcctcaatgtctctcgcgtctccgctttgtgt

SEQ ID NO: 283751 - DNA, 51 bp, Artificial
  Synthetic oligonucleotide
ctcgaggcaacaacatttaatagcgtacggagctattccccgccactaact

SEQ ID NO: 283752 - DNA, 51 bp, Artificial
  Synthetic oligonucleotide
gacaaggccgcgtgtatgagatgtaccacgtgcgagacataccccctggag

SEQ ID NO: 283753 - DNA, 60 bp, Artificial
  Synthetic oligonucleotide
gaattctgcggtcttgaaggatctggttattccgatagaagcattcccaccgatccatcg

SEQ ID NO: 283754 - DNA, 51 bp, Artificial
  Synthetic oligonucleotide
gacaaggttggccaacgactcagtccgtgcctctcgaggcaaaaaccgggc

SEQ ID NO: 283755 - DNA, 51 bp, Artificial
  Synthetic oligonucleotide
atactgggttccctacccagggggtggagcatactggcgctgagcaaggag

SEQ ID NO: 283756 - DNA, 51 bp, Artificial
  Synthetic oligonucleotide
ctcgagactaacgaatctacactaaaacatggggtagcggccatcccccgc

SEQ ID NO: 283757 - DNA, 51 bp, Artificial
  Synthetic oligonucleotide
ctccctttcactgctcctcgaacaagtgcccgaaccttctgccttccgcgc

SEQ ID NO: 283758 - DNA, 51 bp, Artificial
  Synthetic oligonucleotide
atacgctcacgtcttggggtggacgaggtggttaggccccgcaggacaact

SEQ ID NO: 283759 - DNA, 51 bp, Artificial
  Synthetic oligonucleotide
atcgcagcagaatggatgggggccactcactgcacctctatacagaagtat

SEQ ID NO: 283760 - DNA, 51 bp, Artificial
  Synthetic oligonucleotide
ctcacgtttgcgcaccatgccgactatccccagtgtcaagggtcagaccgg

SEQ ID NO: 283761 - DNA, 51 bp, Artificial
  Synthetic oligonucleotide
ctgaatccggcgcaggctaccaagtctaacctggcgggcatcgctcatgtt

SEQ ID NO: 283762 - DNA, 51 bp, Artificial
  Synthetic oligonucleotide
gaagaccgtatggaggcaacggaaagcgacgttgagctgaacacaatcctt

SEQ ID NO: 283763 - DNA, 51 bp, Artificial
  Synthetic oligonucleotide
atcctggtgatccaaaccgaaccgcgctgtgagctcgtccgcccacggatt

SEQ ID NO: 283764 - DNA, 60 bp, Artificial
  Synthetic oligonucleotide
ctcattgaatgctggcaaatcgagacccaaagactggataacttcagtcgggacaatgtc

SEQ ID NO: 283765 - DNA, 51 bp, Artificial
  Synthetic oligonucleotide
atatattttgggctccgagagttttgatagcagtagccaattaactagtag

SEQ ID NO: 283766 - DNA, 51 bp, Artificial
  Synthetic oligonucleotide
gaagaaccagtagatgaatccagccgtagaaagttcccagctggtgaaagc

SEQ ID NO: 283767 - DNA, 51 bp, Artificial
  Synthetic oligonucleotide
acggctagcctgatctaggacaaggcttaaaggcccccatcacccgggtgg

SEQ ID NO: 283768 - DNA, 51 bp, Artificial
  Synthetic oligonucleotide
acgtctaccagggtggcccaccgatccacgcagaagaaatggcgggtcata

SEQ ID NO: 283769 - DNA, 51 bp, Artificial
  Synthetic oligonucleotide
ctctgatttagggtccaaggttgattgctgagttcaccgcgtttgccctag

SEQ ID NO: 283770 - DNA, 50 bp, Artificial
  Synthetic oligonucleotide
tctcccacgggaggcgtcacccctcaccatggccatctcgcagctcaccc

SEQ ID NO: 283771 - DNA, 50 bp, Artificial
  Synthetic oligonucleotide
aagtatcatccgagggtgttcggtcatggagcggaggccggagggaggtc

SEQ ID NO: 283772 - DNA, 50 bp, Artificial
  Synthetic oligonucleotide
tcgctgaatcggtcgtatgttggtgcgaaccattcgtcgaatcgtgggag

SEQ ID NO: 283773 - DNA, 50 bp, Artificial
  Synthetic oligonucleotide
acaacacagacgcaaagccggggtactgtccgaagggccgtcgagcagca

SEQ ID NO: 283774 - DNA, 50 bp, Artificial
  Synthetic oligonucleotide
aatcgtcgtcactgggggaatcgaggtgcactttgtttccggggcgcacg

SEQ ID NO: 283775 - DNA, 60 bp, Artificial
  Synthetic oligonucleotide
cgcacacgaccaacagtagttcgactgcgaagggggtcatgctgcagtctagaatgagtc

SEQ ID NO: 283776 - DNA, 50 bp, Artificial
  Synthetic oligonucleotide
aatcggggcagcgcgattgggatgctgggtgggatcaccaaagctcgagg

SEQ ID NO: 283777 - DNA, 50 bp, Artificial
  Synthetic oligonucleotide
aatcggatggacctactccctctttccgtcggagcgtgccgcgtggaccg

SEQ ID NO: 283778 - DNA, 50 bp, Artificial
  Synthetic oligonucleotide
aatcgcagaagggaagctcatatatgctcgcggcgtgggctggggcaccc

SEQ ID NO: 283779 - DNA, 50 bp, Artificial
  Synthetic oligonucleotide
aatcgctacgaaactgcgggttcgacatcgctgacccactggcggtggag

SEQ ID NO: 283780 - DNA, 50 bp, Artificial
  Synthetic oligonucleotide
acaaaggcgggcggtgcacccaacgacatatcacccctgaccaaggtgtg

SEQ ID NO: 283781 - DNA, 50 bp, Artificial
  Synthetic oligonucleotide
aaggttggctggggtaagccgtcgcaggttcctacctccgtcgccctggc

SEQ ID NO: 283782 - DNA, 50 bp, Artificial
  Synthetic oligonucleotide
aattgtcatccggaccgacccccgggaattaaccctgggcgccacgagac

SEQ ID NO: 283783 - DNA, 50 bp, Artificial
  Synthetic oligonucleotide
aaggttttcaagcgcgcgatgagtccactagctgtgtgaccccgggtgct

SEQ ID NO: 283784 - DNA, 50 bp, Artificial
  Synthetic oligonucleotide
aatcgcgggattagggcaagagcgagctctcaagggggcggtcaggacag

SEQ ID NO: 283785 - DNA, 50 bp, Artificial
  Synthetic oligonucleotide
aagtaagttggcccactcgcttctcgaccgctctacgcccgacccgaggc

SEQ ID NO: 283786 - DNA, 58 bp, Artificial
  Synthetic oligonucleotide
ggctcttagttgataaaagccctcgcgccgtattgtcgttcgcggggaggctgctgaa

SEQ ID NO: 283787 - DNA, 50 bp, Artificial
  Synthetic oligonucleotide
aattggtcgtggtgcaatgcagcaacttggacgctaacgtctcccccgcc

SEQ ID NO: 283788 - DNA, 50 bp, Artificial
  Synthetic oligonucleotide
aaggtttcgcgcaaagaccggaatggaacgaggatcccgggcgtgctctg

SEQ ID NO: 283789 - DNA, 50 bp, Artificial
  Synthetic oligonucleotide
acaactgctgtcaagcacgggcccagcaaactcccggaacacgcagacgt

SEQ ID NO: 283790 - DNA, 50 bp, Artificial
  Synthetic oligonucleotide
aatctccgacagctcagcgtcccgggggatattggtaacccacacggcgg

SEQ ID NO: 283791 - DNA, 50 bp, Artificial
  Synthetic oligonucleotide
aatcgggggttcccaatgcggcatgctgtggttacggtggcccgcagagc

SEQ ID NO: 283792 - DNA, 50 bp, Artificial
  Synthetic oligonucleotide
aatctcggctagtgcttcttgcaggggtttccggcagtagtcgacccgga

SEQ ID NO: 283793 - DNA, 50 bp, Artificial
  Synthetic oligonucleotide
aaggtttcgccgccaggcagcagatttggtggtcaagacacggccagtct

SEQ ID NO: 283794 - DNA, 50 bp, Artificial
  Synthetic oligonucleotide
tctccgttcggcggtccactagggccgtttgatacacgcgatcatggtga

SEQ ID NO: 283795 - DNA, 50 bp, Artificial
  Synthetic oligonucleotide
acaaccgcatccgcgctcactttgactcttggctccggcgttcacgctcc

SEQ ID NO: 283796 - DNA, 50 bp, Artificial
  Synthetic oligonucleotide
aatcgacccggtgagggcgggtgaagctgactggtgactggttgatccgc

SEQ ID NO: 283797 - DNA, 60 bp, Artificial
  Synthetic oligonucleotide
tacgaatactggttatcggggcgaatcgcaacaggatgagcgtagggatgcgactcggga

SEQ ID NO: 283798 - DNA, 50 bp, Artificial
  Synthetic oligonucleotide
aatctctgctttacaggcgacaacacaggcccgatcggtggggatggggc

SEQ ID NO: 283799 - DNA, 50 bp, Artificial
  Synthetic oligonucleotide
acaacccaaacggtggcttagagccccgcaaccatccgtgaggcccgtac

SEQ ID NO: 283800 - DNA, 50 bp, Artificial
  Synthetic oligonucleotide
tcggagtcccatcgtcgcctttcttgtagcgactgagctttgcccgcgag

SEQ ID NO: 283801 - DNA, 50 bp, Artificial
  Synthetic oligonucleotide
acaacgttggtcgcggcgcaaaagtcgattcgcccaaaggggcagaagga

SEQ ID NO: 283802 - DNA, 50 bp, Artificial
  Synthetic oligonucleotide
aagtatacgcaaggagcgagggcatacaggccctaccgcgtcggacaccc

SEQ ID NO: 283803 - DNA, 50 bp, Artificial
  Synthetic oligonucleotide
aagtaccgatcaccgcggaacccccgagcaaccgggtcgagtagtcaccg

SEQ ID NO: 283804 - DNA, 50 bp, Artificial
  Synthetic oligonucleotide
tcggactcggaagcggtttgccgagccttctcgcaagcatgttggaccgc

SEQ ID NO: 283805 - DNA, 50 bp, Artificial
  Synthetic oligonucleotide
tcggatagcatgttggggtgtgggatgagtgcggaaatgcggggagagct

SEQ ID NO: 283806 - DNA, 50 bp, Artificial
  Synthetic oligonucleotide
acaacggcgtcttttccgcccaccagagctccaagtcgtccgcattgcgc

SEQ ID NO: 283807 - DNA, 50 bp, Artificial
  Synthetic oligonucleotide
tctatccatggttgcttaatcagctccagtaacgacgtcacgagggaaaa

SEQ ID NO: 283808 - DNA, 60 bp, Artificial
  Synthetic oligonucleotide
tcatcactactatataaccgcatattaggttggttccgcatatgctttgcggcactcaaa

SEQ ID NO: 283809 - DNA, 59 bp, Artificial
  Synthetic oligonucleotide
actcgcaacccggaattcaatgagaaacgcgcaatcagtggattcgacataacttgccc

SEQ ID NO: 283810 - DNA, 50 bp, Artificial
  Synthetic oligonucleotide
aatgccgcgcgtgtcagttcacttccccaaagggggacaccatcggccca

SEQ ID NO: 283811 - DNA, 50 bp, Artificial
  Synthetic oligonucleotide
aagttgcctggtgattcgccggggagaggaattgcagtggcgtgggagga

SEQ ID NO: 283812 - DNA, 50 bp, Artificial
  Synthetic oligonucleotide
aatgccccgtcgaaagacgagacggctctctcggcagtcaacgagcctgc

SEQ ID NO: 283813 - DNA, 50 bp, Artificial
  Synthetic oligonucleotide
aatggccttgtgggcgaagttcttgacaagcagacgaccggcccggagag

SEQ ID NO: 283814 - DNA, 50 bp, Artificial
  Synthetic oligonucleotide
tctgatctagatgttgactgacctatgctggagtcaactgatttggcgta

SEQ ID NO: 283815 - DNA, 50 bp, Artificial
  Synthetic oligonucleotide
aatgccatggccaaggggcacgattatgtcctgagggcggcgggttgcgg

SEQ ID NO: 283816 - DNA, 50 bp, Artificial
  Synthetic oligonucleotide
aatcccactccgggctgtcgctacaccccgggctatcttggttagctgcg

SEQ ID NO: 283817 - DNA, 50 bp, Artificial
  Synthetic oligonucleotide
aatggcgggctaggtgatcgggtctctcgtaggccctgtcacactcgggg

SEQ ID NO: 283818 - DNA, 50 bp, Artificial
  Synthetic oligonucleotide
aatgcagacagcttgcccgcgctagtctcgacgctcgacggattggttcg

SEQ ID NO: 283819 - DNA, 50 bp, Artificial
  Synthetic oligonucleotide
aatgggagcgggaatggaacgcatcaaccaacggcggtcacctgcggaaa

SEQ ID NO: 283820 - DNA, 60 bp, Artificial
  Synthetic oligonucleotide
tacgagcacgactggatattggaggtcatagtgaagaggggtcatacctttatgtcctac

SEQ ID NO: 283821 - DNA, 50 bp, Artificial
  Synthetic oligonucleotide
aatcccccgaccacgagttactcccgacgtagccttgctcgcgtgaccta

SEQ ID NO: 283822 - DNA, 50 bp, Artificial
  Synthetic oligonucleotide
aatgggcctaattggggccgggtggacttcagagcgcctcggtggatggg

SEQ ID NO: 283823 - DNA, 50 bp, Artificial
  Synthetic oligonucleotide
tcggtgggtgttaccgtcgcaatggtagccgtgggcgtgcattcactggg

SEQ ID NO: 283824 - DNA, 50 bp, Artificial
  Synthetic oligonucleotide
aatggggtcacctgtgccccgttagatggcgagtgctgtaatgtccgggg

SEQ ID NO: 283825 - DNA, 50 bp, Artificial
  Synthetic oligonucleotide
tcggtccgtcgggctgatcccgtaaggggctgccatgtgtcgaagggatg

SEQ ID NO: 283826 - DNA, 50 bp, Artificial
  Synthetic oligonucleotide
tcggtccgcgttgtccaccgcgcttactttggcgggctcgaaagttgatg

SEQ ID NO: 283827 - DNA, 50 bp, Artificial
  Synthetic oligonucleotide
aatggggttcccttccgctagatggcgggatcgaggttggacatcggcat

SEQ ID NO: 283828 - DNA, 50 bp, Artificial
  Synthetic oligonucleotide
tctgcagccaccttcagtactggctcaattgcctcgcccattgcatgcct

SEQ ID NO: 283829 - DNA, 50 bp, Artificial
  Synthetic oligonucleotide
aatggtacccctgcggcggtgaaatgcacccttgtcggcgcgatctgtaa

SEQ ID NO: 283830 - DNA, 50 bp, Artificial
  Synthetic oligonucleotide
aatacgagatgaccgcaaccgtggatcgggatgggcgagttccgagcaga

SEQ ID NO: 283831 - DNA, 60 bp, Artificial
  Synthetic oligonucleotide
tacgagccattgttgacttgcccgtgccaaccttcactggaattccgtacatatgcttgc

SEQ ID NO: 283832 - DNA, 50 bp, Artificial
  Synthetic oligonucleotide
aatacggctagcgcaaggtcctacagcgggcccacctaagagcctcagcg

SEQ ID NO: 283833 - DNA, 50 bp, Artificial
  Synthetic oligonucleotide
aatgcgaaacggtatgtcatgctgcggccgaaggggatagcagcgcctgc

SEQ ID NO: 283834 - DNA, 50 bp, Artificial
  Synthetic oligonucleotide
aatacctgagcgagacgagaggctgtagtggtcggggtggcagcgtcctg

SEQ ID NO: 283835 - DNA, 50 bp, Artificial
  Synthetic oligonucleotide
tctcttatgtcgaggctgcttcgctcccttgtgcggcggtcacagcatgg

SEQ ID NO: 283836 - DNA, 50 bp, Artificial
  Synthetic oligonucleotide
aatgcgcagcgcttaccggtcgccattgcctacccatccagtacagagga

SEQ ID NO: 283837 - DNA, 50 bp, Artificial
  Synthetic oligonucleotide
aatacgggcagctttgcgcacactagccgggttgtcagggatctgcgaga

SEQ ID NO: 283838 - DNA, 50 bp, Artificial
  Synthetic oligonucleotide
aatactctctggagaggcccagtcggggacctcaggctccagcagtgcat

SEQ ID NO: 283839 - DNA, 50 bp, Artificial
  Synthetic oligonucleotide
aatgcggcatgctgtggttacggtggcccgcagagcccataacgcagccc

SEQ ID NO: 283840 - DNA, 50 bp, Artificial
  Synthetic oligonucleotide
aatagtgcgggggagcatgggacgcggaggcatatggccgtacgctccat

SEQ ID NO: 283841 - DNA, 50 bp, Artificial
  Synthetic oligonucleotide
aataccgagtcggacgtggcgacacaggggtcagttgcatccgcccagga

SEQ ID NO: 283842 - DNA, 60 bp, Artificial
  Synthetic oligonucleotide
cgatttgtgcgatttgagcgggtgtctggtgagactataggagaggatatgttcttcctg

SEQ ID NO: 283843 - DNA, 50 bp, Artificial
  Synthetic oligonucleotide
aatgcgtagcgagacgggccaactcacgactgttccacctccacagtcgc

SEQ ID NO: 283844 - DNA, 50 bp, Artificial
  Synthetic oligonucleotide
aatgctgccacccctccgccgccaacgtctttccgtgcggactcccgacc

SEQ ID NO: 283845 - DNA, 50 bp, Artificial
  Synthetic oligonucleotide
aatggaggatttcccagacggcccttttggcgcggtagggggaggttcat

SEQ ID NO: 283846 - DNA, 50 bp, Artificial
  Synthetic oligonucleotide
aatggcacatcgggccccgagtcgggaaaggagatccatattggcgagga

SEQ ID NO: 283847 - DNA, 50 bp, Artificial
  Synthetic oligonucleotide
aatggccgcctagcggatggtagcccgcacaccaacgcgcactcgtcccg

SEQ ID NO: 283848 - DNA, 50 bp, Artificial
  Synthetic oligonucleotide
tcgtctgggggtgcggagtccgaggttcctgtacaccgtcatcggagaag

SEQ ID NO: 283849 - DNA, 50 bp, Artificial
  Synthetic oligonucleotide
aatcagatacccatctgacagcccacctcgccagccggtatagtggccgc

SEQ ID NO: 283850 - DNA, 50 bp, Artificial
  Synthetic oligonucleotide
aagttgtccctgtccgttcggacttcgtgtgcgtgctgcgtggtaccgac

SEQ ID NO: 283851 - DNA, 50 bp, Artificial
  Synthetic oligonucleotide
aatgagtccggtggataaggctcccgtccccttgtgggcgagggatgttg

SEQ ID NO: 283852 - DNA, 50 bp, Artificial
  Synthetic oligonucleotide
aagtcggatcgcggctcccattttgcgcattcaacggttgctcccccttc

SEQ ID NO: 283853 - DNA, 58 bp, Artificial
  Synthetic oligonucleotide
aggggaatcgactccaagaaataacgccaaattacctatgccgagtctgcagacgaca

SEQ ID NO: 283854 - DNA, 50 bp, Artificial
  Synthetic oligonucleotide
aatccgcactcaccggtgctctcccctctgtggcatgcgcatcgggtatg

SEQ ID NO: 283855 - DNA, 50 bp, Artificial
  Synthetic oligonucleotide
aagtcgcctctttggacccgatgggcacggcctctgcgtaatgcagtgta

SEQ ID NO: 283856 - DNA, 50 bp, Artificial
  Synthetic oligonucleotide
aattctccgaccgcgtaagggccgcagagacactgacaggctcggctgca

SEQ ID NO: 283857 - DNA, 50 bp, Artificial
  Synthetic oligonucleotide
aattctgccagcgaccgtgtctgcgcgtgttacctcgccgttggagggaa

SEQ ID NO: 283858 - DNA, 50 bp, Artificial
  Synthetic oligonucleotide
aagtcgagaagggtagctcgggtttagttcgggccaaccgacgggtgccg

SEQ ID NO: 283859 - DNA, 50 bp, Artificial
  Synthetic oligonucleotide
aagtcctcacaagaatggtgtccccctgcacgacccccggtccattggat

SEQ ID NO: 283860 - DNA, 50 bp, Artificial
  Synthetic oligonucleotide
aatgagaggtctgacgaccagcacaccacctgtttgagccgggggcccct

SEQ ID NO: 283861 - DNA, 50 bp, Artificial
  Synthetic oligonucleotide
aagtccgaagctttgaacccttagcccggagcaagccgcttggggcacta

SEQ ID NO: 283862 - DNA, 50 bp, Artificial
  Synthetic oligonucleotide
aattgactaggtatggactgcgtgcagccccggcttgggttcggcgagtg

SEQ ID NO: 283863 - DNA, 50 bp, Artificial
  Synthetic oligonucleotide
tctcgatggatagattcggtcttaagaagaaactccgcaaacagggtccc

SEQ ID NO: 283864 - DNA, 60 bp, Artificial
  Synthetic oligonucleotide
cgatttggctcagtctcgactgtgtggcacgcgttaagtctgtcacatgcggcactcgtt

SEQ ID NO: 283865 - DNA, 50 bp, Artificial
  Synthetic oligonucleotide
aattgctccgcggctgttggcggtatactcttgaacgccagggcccacaa

SEQ ID NO: 283866 - DNA, 50 bp, Artificial
  Synthetic oligonucleotide
aagtatgcttgaaattagggtccctagccaggcgccaccccgcgccggta

SEQ ID NO: 283867 - DNA, 50 bp, Artificial
  Synthetic oligonucleotide
aagtatcgccccttccccgaacgcccatccaagcactcaggcctgtccaa

SEQ ID NO: 283868 - DNA, 50 bp, Artificial
  Synthetic oligonucleotide
tctgtttatggacagggactccaccagtgaatctgtgttcgacgcagcac

SEQ ID NO: 283869 - DNA, 50 bp, Artificial
  Synthetic oligonucleotide
aatgacgttgatgggggacgggaaagctggcgcctgtcgggagtcttggc

SEQ ID NO: 283870 - DNA, 50 bp, Artificial
  Synthetic oligonucleotide
aagttccatccgtactccgtcccagcaagccgtgacccaatcgtccagcc

SEQ ID NO: 283871 - DNA, 50 bp, Artificial
  Synthetic oligonucleotide
aatgcacccaccgattacgcccttcggggctataccgcgtcacccacttt

SEQ ID NO: 283872 - DNA, 50 bp, Artificial
  Synthetic oligonucleotide
aagtgggactcagcgaggatcgatcagtaccacggggccagatgagggga

SEQ ID NO: 283873 - DNA, 50 bp, Artificial
  Synthetic oligonucleotide
aagtggaggtcttgacgttcttcggttgggtgtcttgcgcccggggagtg

SEQ ID NO: 283874 - DNA, 50 bp, Artificial
  Synthetic oligonucleotide
aatgtacagtatgcgcctggctcgtcggttcctgtccccgttgcgcaggt

SEQ ID NO: 283875 - DNA, 54 bp, Artificial
  Synthetic oligonucleotide
ggcccgagaggtgcttaataggggggccatattagcggggatacgcctgtaaag

SEQ ID NO: 283876 - DNA, 50 bp, Artificial
  Synthetic oligonucleotide
aagtgacacggcggaaatgcgcacaagtacctcgccaggacctgcggtgg

SEQ ID NO: 283877 - DNA, 50 bp, Artificial
  Synthetic oligonucleotide
aatgtaccagacgggtccgggggacgtgcgatgtccagtggttgtttccg

SEQ ID NO: 283878 - DNA, 50 bp, Artificial
  Synthetic oligonucleotide
aatcccgcaaaagaatggcgtgctaacagcggcggtcgtgcctcggagct

SEQ ID NO: 283879 - DNA, 50 bp, Artificial
  Synthetic oligonucleotide
aatgtgctatagcgtcggggcgtacctgcacctgggcacagcagtccgga

SEQ ID NO: 283880 - DNA, 50 bp, Artificial
  Synthetic oligonucleotide
tctgctcttgagcgtctgtgctcgaacgaccttgcacgcaccccagaggg

SEQ ID NO: 283881 - DNA, 50 bp, Artificial
  Synthetic oligonucleotide
aagtctgtaagcgccctgctagttcgcccgaccatgcccctttgggccca

SEQ ID NO: 283882 - DNA, 50 bp, Artificial
  Synthetic oligonucleotide
aatgcaatcggccgtcgctggtacacgcaaagaaagcgactggtgtcgga

SEQ ID NO: 283883 - DNA, 50 bp, Artificial
  Synthetic oligonucleotide
aatgtggacaaaacgggcggagagcgaatgtgcgcagaggaggcgtccgt

SEQ ID NO: 283884 - DNA, 50 bp, Artificial
  Synthetic oligonucleotide
aatccctgctatcagccacgaccgctttgtggcgcgtccattggcgcctt

SEQ ID NO: 283885 - DNA, 50 bp, Artificial
  Synthetic oligonucleotide
aatgttcctcgacgcagtcttaggaccacccctggttagccgcacagccc

SEQ ID NO: 283886 - DNA, 57 bp, Artificial
  Synthetic oligonucleotide
attcaagcgtacgtggtgtcctgaatcgatctatatacccccctcctggaagtatcc

SEQ ID NO: 283887 - DNA, 50 bp, Artificial
  Synthetic oligonucleotide
aatgttcgtgccctatggcgacccacgcgctccctatccacgaaaggcag

SEQ ID NO: 283888 - DNA, 50 bp, Artificial
  Synthetic oligonucleotide
aagtctcctccgcgtgcttagggcgtccaatggccacgactttcggggag

SEQ ID NO: 283889 - DNA, 50 bp, Artificial
  Synthetic oligonucleotide
aattcaacgcgctagccacgtccctcgcgtcgctgaaaacactcgccgtg

SEQ ID NO: 283890 - DNA, 50 bp, Artificial
  Synthetic oligonucleotide
aattcgctacctcgggtcgtcgcagcgtcaaccttccagcctcggacggg

SEQ ID NO: 283891 - DNA, 50 bp, Artificial
  Synthetic oligonucleotide
acccccggaggccccctggtgccatcttacacggacagatcttggaagat

SEQ ID NO: 283892 - DNA, 50 bp, Artificial
  Synthetic oligonucleotide
accccctgcggcctccaatgccgctcgtctctcgtctagttcttttcgcg

SEQ ID NO: 283893 - DNA, 50 bp, Artificial
  Synthetic oligonucleotide
accccgtgtgctgttccccagcgccaacaagcgtacaccggagccgcagg

SEQ ID NO: 283894 - DNA, 50 bp, Artificial
  Synthetic oligonucleotide
acccctcaattgctgcaccggctctctggtctcacccgcgcagtgccagt

SEQ ID NO: 283895 - DNA, 50 bp, Artificial
  Synthetic oligonucleotide
acccctccggtaacgttcagcgttgcgcccctaccaatctggcgagccac

SEQ ID NO: 283896 - DNA, 50 bp, Artificial
  Synthetic oligonucleotide
acccctcgtaaggtgggcaggacgtggaacgctggcgggttattgcacgg

SEQ ID NO: 283897 - DNA, 58 bp, Artificial
  Synthetic oligonucleotide
acttcctcatcttagcgggataggtaatagtatgtatactaactattcgttatgatta

SEQ ID NO: 283898 - DNA, 50 bp, Artificial
  Synthetic oligonucleotide
acccctggcgtcacggcctcactaacgagtccccaagacgggcacagaca

SEQ ID NO: 283899 - DNA, 50 bp, Artificial
  Synthetic oligonucleotide
tcatctaggtcaaacgccttgctcgggatcttatggcccaaaccaagtct

SEQ ID NO: 283900 - DNA, 50 bp, Artificial
  Synthetic oligonucleotide
acccctttacaacggccacagaggctggcgcgtttcgaatccccagtggc

SEQ ID NO: 283901 - DNA, 50 bp, Artificial
  Synthetic oligonucleotide
acccgacgacgacccaaacgccccggttgaacatgtaggagtaccaccgg

SEQ ID NO: 283902 - DNA, 50 bp, Artificial
  Synthetic oligonucleotide
tcatcctgctttgtgccaatacagagcataaaggagccgtttgacccaag

SEQ ID NO: 283903 - DNA, 50 bp, Artificial
  Synthetic oligonucleotide
acccgatagagcggccaggtgcaaaacatcggtgctctttgccccgtgtt

SEQ ID NO: 283904 - DNA, 50 bp, Artificial
  Synthetic oligonucleotide
acccgcctcatcgaccatcaagcgctctcgataatcatccccgggcccta

SEQ ID NO: 283905 - DNA, 50 bp, Artificial
  Synthetic oligonucleotide
acccgggggcgtctgaccggaactagggatctgaaagcacccgccctgta

SEQ ID NO: 283906 - DNA, 50 bp, Artificial
  Synthetic oligonucleotide
acccgtaacggtgctgactggggccgaccccaatgagaattggccgtgta

SEQ ID NO: 283907 - DNA, 50 bp, Artificial
  Synthetic oligonucleotide
acccgtcagggtaagtgaataggacgcgcgattgggatcctcagttagta

SEQ ID NO: 283908 - DNA, 54 bp, Artificial
  Synthetic oligonucleotide
ctcccttcgtttctgacctaggggctaatttcggtcatactagctaccaaccga

SEQ ID NO: 283909 - DNA, 50 bp, Artificial
  Synthetic oligonucleotide
acccgtgacaaggagacacagcgccgcgtagcggatcccaaacccccgac

SEQ ID NO: 283910 - DNA, 50 bp, Artificial
  Synthetic oligonucleotide
acccgtggcgaactccagtcttcccggcactgactgctccgtccatctgc

SEQ ID NO: 283911 - DNA, 50 bp, Artificial
  Synthetic oligonucleotide
accctccgaacgcccttcgccgacggagtactgtttcgatgaaccgggcc

SEQ ID NO: 283912 - DNA, 50 bp, Artificial
  Synthetic oligonucleotide
accctcgctatggcttgcgagtggggaatgactccaggacccccgttcag

SEQ ID NO: 283913 - DNA, 50 bp, Artificial
  Synthetic oligonucleotide
accctcgtggaaacttcgcgtgcatgtcagggtgcctggctacccggaga

SEQ ID NO: 283914 - DNA, 50 bp, Artificial
  Synthetic oligonucleotide
tcagtgaagatcccgagtacgatcatgcacacgtatctccttcgtctggt

SEQ ID NO: 283915 - DNA, 50 bp, Artificial
  Synthetic oligonucleotide
accctgcaggcacaccaatatgtcgggcccggtcctcctctctcgttcag

SEQ ID NO: 283916 - DNA, 50 bp, Artificial
  Synthetic oligonucleotide
accctgccgtcggggcatatagcgcctccaaggctgcgtttcgctgtaag

SEQ ID NO: 283917 - DNA, 50 bp, Artificial
  Synthetic oligonucleotide
accctgctacgcacggtcttgcagcagtccagggacccggtactgagttc

SEQ ID NO: 283918 - DNA, 50 bp, Artificial
  Synthetic oligonucleotide
accctgtacctaagcgttcgaccacggcaaccaggcgtatcccgagacgg

SEQ ID NO: 283919 - DNA, 54 bp, Artificial
  Synthetic oligonucleotide
gagtgtataaggtagttgtttgataacaatgaaacacctttattcgtttcctac

SEQ ID NO: 283920 - DNA, 55 bp, Artificial
  Synthetic oligonucleotide
tacattaatgggaagaacatttgtcctttattaggattaatttgatttactacta

SEQ ID NO: 283921 - DNA, 50 bp, Artificial
  Synthetic oligonucleotide
accgaacgggaggcaaccaccaacggccatccttttccgtccggctctta

SEQ ID NO: 283922 - DNA, 50 bp, Artificial
  Synthetic oligonucleotide
accgaattttgggcgcaatgccccctgtacttccggttggggacagacgc

SEQ ID NO: 283923 - DNA, 50 bp, Artificial
  Synthetic oligonucleotide
accagcgactggatgcgagaccagtcccttcgaacggccgaatcgggctg

SEQ ID NO: 283924 - DNA, 50 bp, Artificial
  Synthetic oligonucleotide
accagcgcaacgtcccctactggtctcccggcgtcaactgtccatccgga

SEQ ID NO: 283925 - DNA, 50 bp, Artificial
  Synthetic oligonucleotide
tccattgtgttgcgcccgcgtgtcgcagatggggttcctagtccacacta

SEQ ID NO: 283926 - DNA, 50 bp, Artificial
  Synthetic oligonucleotide
accagcgggccacacgactccaaaggcaagcctaggtcctccacgagttt

SEQ ID NO: 283927 - DNA, 50 bp, Artificial
  Synthetic oligonucleotide
accagctgaggtgcgccctctcgacgcgacccgctacttctcgcgagatc

SEQ ID NO: 283928 - DNA, 50 bp, Artificial
  Synthetic oligonucleotide
tccatagtctgcggtgacgatgaattactgagtataccgttcactcggga

SEQ ID NO: 283929 - DNA, 50 bp, Artificial
  Synthetic oligonucleotide
tccagtggccagcacagcttctggttccctacggcttctagcaggtgggc

SEQ ID NO: 283930 - DNA, 50 bp, Artificial
  Synthetic oligonucleotide
tccagtaccgaccacgacctttcgcaggacggcaaaggttgacccacgac

SEQ ID NO: 283931 - DNA, 60 bp, Artificial
  Synthetic oligonucleotide
acttcacagaagcctacgtacactcaagcaaatggttctcaggcaagccaggcactgcat

SEQ ID NO: 283932 - DNA, 50 bp, Artificial
  Synthetic oligonucleotide
accagtcattcggcgcctagccagggcccgaacatgcgtagcaagagcgc

SEQ ID NO: 283933 - DNA, 50 bp, Artificial
  Synthetic oligonucleotide
accagtcctagccgaaatgcgtctgtcccccggtggagctctcctgacga

SEQ ID NO: 283934 - DNA, 50 bp, Artificial
  Synthetic oligonucleotide
accagtgtctggctggctggaaccccgagtcattccacacgtcgggcatg

SEQ ID NO: 283935 - DNA, 50 bp, Artificial
  Synthetic oligonucleotide
accatcggctgccatcccgagttcctacggtgatctcaggacaagcgcgc

SEQ ID NO: 283936 - DNA, 50 bp, Artificial
  Synthetic oligonucleotide
accatgacgacgtcgcatagcgagcctacggttttcggtgcgcgcaaccc

SEQ ID NO: 283937 - DNA, 50 bp, Artificial
  Synthetic oligonucleotide
accatgatggtcactaaccagactcgtgctgcccgggacctcgctcgtgg

SEQ ID NO: 283938 - DNA, 50 bp, Artificial
  Synthetic oligonucleotide
accatgctgcagagcacgaccctcctcagcttgcatcttcgcccgaacac

SEQ ID NO: 283939 - DNA, 50 bp, Artificial
  Synthetic oligonucleotide
accatggccgcgccaggtcgtcactcgctaacactcatctctgcacagga

SEQ ID NO: 283940 - DNA, 50 bp, Artificial
  Synthetic oligonucleotide
acccaacaggcgagcctgcggtctcgagcaacctggatgcggcggtaact

SEQ ID NO: 283941 - DNA, 50 bp, Artificial
  Synthetic oligonucleotide
acccaagcacgcctttaaccccttacagtcgtgcggtgagtggcgggtcc

SEQ ID NO: 283942 - DNA, 60 bp, Artificial
  Synthetic oligonucleotide
acttatttatgtcggacatctgcgatggcttgaatatccaatctattacttcaacgatgg

SEQ ID NO: 283943 - DNA, 50 bp, Artificial
  Synthetic oligonucleotide
acccaaggccgattcgaaccgagccgcatctagtggaggatccgaggcca

SEQ ID NO: 283944 - DNA, 50 bp, Artificial
  Synthetic oligonucleotide
acccaatgcgcagccctcgataagggctctccctctccgttgtggggaac

SEQ ID NO: 283945 - DNA, 50 bp, Artificial
  Synthetic oligonucleotide
acccagacaaccgcggcccaactaacagcccaacaggctcgaagcctccg

SEQ ID NO: 283946 - DNA, 50 bp, Artificial
  Synthetic oligonucleotide
acccagacgttcggggctcctaccgttcatgcccaggtacttggccgtcg

SEQ ID NO: 283947 - DNA, 50 bp, Artificial
  Synthetic oligonucleotide
acccagtgagaacacctaccttctggtcggagggctgggcacaatcggcc

SEQ ID NO: 283948 - DNA, 50 bp, Artificial
  Synthetic oligonucleotide
acccagttcaatgaagccacacccgggtcgcccaaacgcaagcatcccac

SEQ ID NO: 283949 - DNA, 50 bp, Artificial
  Synthetic oligonucleotide
acccatcaggatgccacctaagtgtcggcgccagagcagagacgtgccgg

SEQ ID NO: 283950 - DNA, 50 bp, Artificial
  Synthetic oligonucleotide
accccaaccgctcgggacgaacgagttgcctcagaggatatggacgcccc

SEQ ID NO: 283951 - DNA, 50 bp, Artificial
  Synthetic oligonucleotide
accccaggggtcagcgcaatacagggacatccccatccagagtacgggtc

SEQ ID NO: 283952 - DNA, 50 bp, Artificial
  Synthetic oligonucleotide
accccataacgggtgtgtcctcgaagtatcgccccttccccgaacgccca

SEQ ID NO: 283953 - DNA, 58 bp, Artificial
  Synthetic oligonucleotide
acttagtactgtcgttgcagattatacctcctttgaaaggtcattctcgagtgtgtaa

SEQ ID NO: 283954 - DNA, 50 bp, Artificial
  Synthetic oligonucleotide
accggactcgacggggaaaagagaccaaccctgggctcgtatcagccccg

SEQ ID NO: 283955 - DNA, 50 bp, Artificial
  Synthetic oligonucleotide
accggcagcaagcaacgctgaacgcgggggcatacctccttcgaccgaat

SEQ ID NO: 283956 - DNA, 50 bp, Artificial
  Synthetic oligonucleotide
accggccgcgaccacatggttcgccttccttcaacgaaacgtcgttctga

SEQ ID NO: 283957 - DNA, 50 bp, Artificial
  Synthetic oligonucleotide
accggcgtacgtcacaagtgtctgtcctgccccgactgggactactgtgc

SEQ ID NO: 283958 - DNA, 50 bp, Artificial
  Synthetic oligonucleotide
accggcgtccgactttcagcaatgccagtgccattcacccccagttgggt

SEQ ID NO: 283959 - DNA, 50 bp, Artificial
  Synthetic oligonucleotide
accggggcgcgtaaagattctcgacggagcgattggcggacctctgtctg

SEQ ID NO: 283960 - DNA, 50 bp, Artificial
  Synthetic oligonucleotide
accgggtggagcacgacgtcatcaggaaccgccctcagcggtcaaccgtc

SEQ ID NO: 283961 - DNA, 50 bp, Artificial
  Synthetic oligonucleotide
accgggtggcgcaaggcccttcggtactattcaatccgggttgtgtgggg

SEQ ID NO: 283962 - DNA, 50 bp, Artificial
  Synthetic oligonucleotide
accggtaggcgtcgcaggatccacgttggccctgtctttggtttggtcgg

SEQ ID NO: 283963 - DNA, 50 bp, Artificial
  Synthetic oligonucleotide
accggtagtagacaccacctggcgacctcggatcaaacagccaggcccac

SEQ ID NO: 283964 - DNA, 60 bp, Artificial
  Synthetic oligonucleotide
gaagcgggatgaaacgccagcaatatggtatttgaactcattgtcccagatgcttagaca

SEQ ID NO: 283965 - DNA, 50 bp, Artificial
  Synthetic oligonucleotide
accggtcctccgactccccaaacatggcctgggttccgctctctgcccaa

SEQ ID NO: 283966 - DNA, 50 bp, Artificial
  Synthetic oligonucleotide
accgtagagtggcggactcaccgtacaccagggggcgagcccacgtgaag

SEQ ID NO: 283967 - DNA, 50 bp, Artificial
  Synthetic oligonucleotide
accgtatacgcgctcgaccatacggcccacacgccgcaccgttaggaaga

SEQ ID NO: 283968 - DNA, 50 bp, Artificial
  Synthetic oligonucleotide
accgtcaacgttgcattagggctctaccataaacgccgccccaccggggc

SEQ ID NO: 283969 - DNA, 50 bp, Artificial
  Synthetic oligonucleotide
accgtcacagacgcccggtcgggatatgaaaatgccgcccttgggtcagt

SEQ ID NO: 283970 - DNA, 50 bp, Artificial
  Synthetic oligonucleotide
accgtcccctagtgcaggcactatattcgctctaccacgcggacgtggcg

SEQ ID NO: 283971 - DNA, 50 bp, Artificial
  Synthetic oligonucleotide
accgtcccgtaaacaccaattgagcgctggcacagcccacgccagacaag

SEQ ID NO: 283972 - DNA, 50 bp, Artificial
  Synthetic oligonucleotide
accgtccgcctccctctgtagctggactctgcggttccgacgagggcccc

SEQ ID NO: 283973 - DNA, 50 bp, Artificial
  Synthetic oligonucleotide
accgtcgagactgaggccccgccaattgctctcagtaccctacttccgcc

SEQ ID NO: 283974 - DNA, 50 bp, Artificial
  Synthetic oligonucleotide
accgtctcgcgatgcccctgcttgaacctagcgcaaccgcgtatggcaca

SEQ ID NO: 283975 - DNA, 60 bp, Artificial
  Synthetic oligonucleotide
gaagcgtggaacgccgtctggatacgtcagcatgtataaggtagaccgaagggatacgca

SEQ ID NO: 283976 - DNA, 50 bp, Artificial
  Synthetic oligonucleotide
accgtgccgagcggctagtctcgtcgatgtttggagggtccgtcgcgtct

SEQ ID NO: 283977 - DNA, 50 bp, Artificial
  Synthetic oligonucleotide
accgtggaggatgacgagattgtcaagggcgttcgcaggcggggtcgaaa

SEQ ID NO: 283978 - DNA, 50 bp, Artificial
  Synthetic oligonucleotide
accgtgtcgctcctgggcctcactcccccacgagatggaccccaggatgt

SEQ ID NO: 283979 - DNA, 50 bp, Artificial
  Synthetic oligonucleotide
accgttccctgcatgctgcggactgaattgggcggatcgctgttggaagc

SEQ ID NO: 283980 - DNA, 50 bp, Artificial
  Synthetic oligonucleotide
acctacctcgcggcactgaccctaggaggcgtatggggattgtccgaggg

SEQ ID NO: 283981 - DNA, 50 bp, Artificial
  Synthetic oligonucleotide
acctacttggccgagactcgcaaccgcgctcttcgaccactcgaccagtc

SEQ ID NO: 283982 - DNA, 50 bp, Artificial
  Synthetic oligonucleotide
acctagcccccgttgggcatcacgaggcaaaccggggatccttccatctg

SEQ ID NO: 283983 - DNA, 50 bp, Artificial
  Synthetic oligonucleotide
acctagtctctgatccagaggacgacccagtccacctcacacgcgccccc

SEQ ID NO: 283984 - DNA, 50 bp, Artificial
  Synthetic oligonucleotide
acctatggagccggccgaagcgtctccggtgccttcagatgacgttggct

SEQ ID NO: 283985 - DNA, 50 bp, Artificial
  Synthetic oligonucleotide
accgacgcagtgtggaagcgacttgcggcgcctttcctaccgaactcgac

SEQ ID NO: 283986 - DNA, 54 bp, Artificial
  Synthetic oligonucleotide
acttaagcttaagtggcgcaagccgtaaacgttcgaatcgtttcttggatatat

SEQ ID NO: 283987 - DNA, 50 bp, Artificial
  Synthetic oligonucleotide
accgacgtacagaaacgtccccgccgtgaaagggaggagcatatcgcccc

SEQ ID NO: 283988 - DNA, 50 bp, Artificial
  Synthetic oligonucleotide
accgagaacgtctttgcgaccgtcatgctgttgcggcgcttccccaagtg

SEQ ID NO: 283989 - DNA, 50 bp, Artificial
  Synthetic oligonucleotide
accgagcgacttgctctcagttgcaccccaatgaggcagcgttgactcgc

SEQ ID NO: 283990 - DNA, 50 bp, Artificial
  Synthetic oligonucleotide
accgagggcgcgtggaatgtcttgtttccgagcccgcctgtcacagcgct

SEQ ID NO: 283991 - DNA, 50 bp, Artificial
  Synthetic oligonucleotide
accgatccgttctgggggcgggaaaagtctactcaccgggcttgcgccac

SEQ ID NO: 283992 - DNA, 50 bp, Artificial
  Synthetic oligonucleotide
tcagacaattggggcgaggatgctgtccgccagtcagtcgctcggctgac

SEQ ID NO: 283993 - DNA, 50 bp, Artificial
  Synthetic oligonucleotide
accgattcccatgtaacctgggaggtcggccaccctagcgccgtccgaga

SEQ ID NO: 283994 - DNA, 50 bp, Artificial
  Synthetic oligonucleotide
tcactgtgccagattgtgcggtcacgagttgcgcaggggaggttgagaca

SEQ ID NO: 283995 - DNA, 50 bp, Artificial
  Synthetic oligonucleotide
accgcagctcgggagctgagtgatctggagcgtcgcttgcgacaggcatg

SEQ ID NO: 283996 - DNA, 50 bp, Artificial
  Synthetic oligonucleotide
accgcatgacccacatcgtgccaccagacagtcagctcgggccgtgccgt

SEQ ID NO: 283997 - DNA, 59 bp, Artificial
  Synthetic oligonucleotide
cacgacgtaactattaaagtgcaagcagtaaagatctactgctaagtaggtactgaaca

SEQ ID NO: 283998 - DNA, 50 bp, Artificial
  Synthetic oligonucleotide
accgcatgccgtgggatagccatctacgccgggacagtcgcagcgtactt

SEQ ID NO: 283999 - DNA, 50 bp, Artificial
  Synthetic oligonucleotide
accgcattggggcgtgcttagggcatcctttcagggctggctggtccgtg

SEQ ID NO: 284000 - DNA, 50 bp, Artificial
  Synthetic oligonucleotide
accgccccaggagacagatgtccgattttccgctccgtagggaccgacga

SEQ ID NO: 284001 - DNA, 50 bp, Artificial
  Synthetic oligonucleotide
tcacgcccgttcaccactgaggaccatgcctgaaagaggtgcttaatacc

SEQ ID NO: 284002 - DNA, 50 bp, Artificial
  Synthetic oligonucleotide
accgccgatgacgcggcatgtgtcccgctctggcctatatgaagccgtcg

SEQ ID NO: 284003 - DNA, 50 bp, Artificial
  Synthetic oligonucleotide
accgccgggagagggaagcaacccgcacggtgcaaagacgtatcaccgac

SEQ ID NO: 284004 - DNA, 50 bp, Artificial
  Synthetic oligonucleotide
accgcctcgggtttggggatgaagggccccgtcctgcatgggacatatca

SEQ ID NO: 284005 - DNA, 50 bp, Artificial
  Synthetic oligonucleotide
accgcggacaggaaccccgtcgggtgctaaagcctccaccactggagcgc

SEQ ID NO: 284006 - DNA, 50 bp, Artificial
  Synthetic oligonucleotide
accgcggccccgtatatcacagtcgccgctagagcacagacggcaagaac

SEQ ID NO: 284007 - DNA, 50 bp, Artificial
  Synthetic oligonucleotide
accgcgggcacggcaaacgaaggaagtggttctgggctcctagcgaatcg

SEQ ID NO: 284008 - DNA, 56 bp, Artificial
  Synthetic oligonucleotide
gaaggcagcgggctcttagttgataaaagccctcgcgccgtattgtcgttcgcggg

SEQ ID NO: 284009 - DNA, 50 bp, Artificial
  Synthetic oligonucleotide
accgcgtcatcccaaagtccctggatgccgttcccgacaacgtccctgtt

SEQ ID NO: 284010 - DNA, 50 bp, Artificial
  Synthetic oligonucleotide
accgcgttccatgcttgttggttggccggaggagactgtagcggtgcgag

SEQ ID NO: 284011 - DNA, 50 bp, Artificial
  Synthetic oligonucleotide
accgctatgcgagacgacctctcttggcgaacggagacgggacaagccga

SEQ ID NO: 284012 - DNA, 50 bp, Artificial
  Synthetic oligonucleotide
accgctcaaccaccggagacagccccggaccaacgtcgtctgaaggacct

SEQ ID NO: 284013 - DNA, 50 bp, Artificial
  Synthetic oligonucleotide
accgctcagggcttgattacttccggcctccgcgagggacagcagccatt

SEQ ID NO: 284014 - DNA, 50 bp, Artificial
  Synthetic oligonucleotide
accgctgcatgttcaccgtggggcccaaccagcaatgtgcaccctttgct

SEQ ID NO: 284015 - DNA, 50 bp, Artificial
  Synthetic oligonucleotide
accggaccagccggtcaccttaaagtccgttcgcgtgtctccgagcgttc

SEQ ID NO: 284016 - DNA, 50 bp, Artificial
  Synthetic oligonucleotide
acacgctactctccccgaccctcgtcacgacaccctctgggccctttgcc

SEQ ID NO: 284017 - DNA, 50 bp, Artificial
  Synthetic oligonucleotide
acacggcatttgtgtcagaacggccggagacccgacagcttgctcggtct

SEQ ID NO: 284018 - DNA, 50 bp, Artificial
  Synthetic oligonucleotide
acacggccgtttcctaatgcaacccgctattggcgcccagtaagcgacgc

SEQ ID NO: 284019 - DNA, 60 bp, Artificial
  Synthetic oligonucleotide
cacgagcggacttgatcgcgaagaagttcagtcgttcattttcgtctatcatgtaatcta

SEQ ID NO: 284020 - DNA, 50 bp, Artificial
  Synthetic oligonucleotide
acacgggagtccaaatggcgggctaggtgatcgggtctctcgtaggccct

SEQ ID NO: 284021 - DNA, 50 bp, Artificial
  Synthetic oligonucleotide
acacggtttgccgactgcaaccttcgggttccgtggaggtggagcactcg

SEQ ID NO: 284022 - DNA, 50 bp, Artificial
  Synthetic oligonucleotide
acactcaggaagccgccgcatcagtttgcttcctctgccgcggaaccgta

SEQ ID NO: 284023 - DNA, 50 bp, Artificial
  Synthetic oligonucleotide
acactcgttttcttgcttgacgccgtgtggcggggcacaacccgctctgg

SEQ ID NO: 284024 - DNA, 50 bp, Artificial
  Synthetic oligonucleotide
tccttgggtagtgtgcggaaacagaaggggtaagtatgatgtcaaacctt

SEQ ID NO: 284025 - DNA, 50 bp, Artificial
  Synthetic oligonucleotide
acactcttctccacgcgtccactgaacgccgctgcgcctcctggtacctg

SEQ ID NO: 284026 - DNA, 50 bp, Artificial
  Synthetic oligonucleotide
tccttcagacggggctggctacatgcctcccggtgtgagcagtggttatg

SEQ ID NO: 284027 - DNA, 50 bp, Artificial
  Synthetic oligonucleotide
acactcttgcttcttgcgaccccgcacggagcgaactcacgtctctccct

SEQ ID NO: 284028 - DNA, 50 bp, Artificial
  Synthetic oligonucleotide
acactggagtcgctcgcgcacaggatccgggctgaaccctcggaaggttg

SEQ ID NO: 284029 - DNA, 50 bp, Artificial
  Synthetic oligonucleotide
acacttcagacccttggtggtggcccgtcgccagtcgttggcacctcaca

SEQ ID NO: 284030 - DNA, 58 bp, Artificial
  Synthetic oligonucleotide
gagtgttgggcgccctctctagtcgactaattagatgttggcgcttatataactaagg

SEQ ID NO: 284031 - DNA, 59 bp, Artificial
  Synthetic oligonucleotide
cggagctgggttcgcgcccatggcggggtgttgacttcgctgttctctactgttgcttc

SEQ ID NO: 284032 - DNA, 50 bp, Artificial
  Synthetic oligonucleotide
acacttttgacggccccatgttgatcgcagccgcgtaagaccggctgact

SEQ ID NO: 284033 - DNA, 50 bp, Artificial
  Synthetic oligonucleotide
acagacgactctgcatcgggagctgctgacgggtgggaatccgatggcag

SEQ ID NO: 284034 - DNA, 50 bp, Artificial
  Synthetic oligonucleotide
tcctccacgcaaaacatctggcacgtcctgtcgatcccctctccgctcag

SEQ ID NO: 284035 - DNA, 50 bp, Artificial
  Synthetic oligonucleotide
acagacgatctccccttatggaccgctacctctcgcgcaagaggccgcac

SEQ ID NO: 284036 - DNA, 50 bp, Artificial
  Synthetic oligonucleotide
acagacgcgctaaacagcagccgtgtcctggtcgcgtgtcgcgtagagtc

SEQ ID NO: 284037 - DNA, 50 bp, Artificial
  Synthetic oligonucleotide
acagacgtcggttctcgtccgagcagccacctgagcacgttcggactccc

SEQ ID NO: 284038 - DNA, 50 bp, Artificial
  Synthetic oligonucleotide
acagagccgcgtcgccactcccaatacaagagcgcgatatcacgtgccca

SEQ ID NO: 284039 - DNA, 50 bp, Artificial
  Synthetic oligonucleotide
acagagtacggtgcaacgactcaacgaggcccgggggttggtgggacaga

SEQ ID NO: 284040 - DNA, 50 bp, Artificial
  Synthetic oligonucleotide
acagagtcaccgcttggaccagtagcagcctgggcaccagtgttggcaac

SEQ ID NO: 284041 - DNA, 50 bp, Artificial
  Synthetic oligonucleotide
tccgtcgttattcctaccaaaccagtaccccagcacagcgatcacgcgaa

SEQ ID NO: 284042 - DNA, 58 bp, Artificial
  Synthetic oligonucleotide
cacgagtgttggttagccatcgtgactaacagaagctaggcggcctagtttcttgtac

SEQ ID NO: 284043 - DNA, 50 bp, Artificial
  Synthetic oligonucleotide
tccgtcgtaccatactgcgggaggggaaacaccgaacacatgccccgtat

SEQ ID NO: 284044 - DNA, 50 bp, Artificial
  Synthetic oligonucleotide
acagattggggcgggttttaggcttagctgatgggcccgggcgtttcacg

SEQ ID NO: 284045 - DNA, 50 bp, Artificial
  Synthetic oligonucleotide
tccgtcagtttcgcagctagcagttcagcgtcacgctcagacaccacgcc

SEQ ID NO: 284046 - DNA, 50 bp, Artificial
  Synthetic oligonucleotide
tccgtcagcggggaatagtcgagtacttcgccccagtttccgcggtcaac

SEQ ID NO: 284047 - DNA, 50 bp, Artificial
  Synthetic oligonucleotide
acagcacgcagccagtggtgtaacgcttcctcgcgtcggtctaaggccag

SEQ ID NO: 284048 - DNA, 50 bp, Artificial
  Synthetic oligonucleotide
acaagaacgggtaggacttgtgcggccagacgctctctacgtagcgcggg

SEQ ID NO: 284049 - DNA, 50 bp, Artificial
  Synthetic oligonucleotide
acaagcccgcacagagggtttcctccccggtatcacactgcgtctaccct

SEQ ID NO: 284050 - DNA, 50 bp, Artificial
  Synthetic oligonucleotide
acaaggccgtcgctggtaattgcatgacagcgcgcgattcgggggtgact

SEQ ID NO: 284051 - DNA, 50 bp, Artificial
  Synthetic oligonucleotide
acaaggcggcgggacagttgtgcatcaagccaccgtcccaacagtacccg

SEQ ID NO: 284052 - DNA, 50 bp, Artificial
  Synthetic oligonucleotide
acaagggaggggcatggacggcaatggaagcgatatcgtcactgggccgg

SEQ ID NO: 284053 - DNA, 60 bp, Artificial
  Synthetic oligonucleotide
cacgcaatgcagacgcatcgcaatttctatgcatttcggatcacactttcaatttcactt

SEQ ID NO: 284054 - DNA, 50 bp, Artificial
  Synthetic oligonucleotide
acaagggcgacagtcgacgcatggtgggatctagcgggcagagacagcga

SEQ ID NO: 284055 - DNA, 50 bp, Artificial
  Synthetic oligonucleotide
acaagggcgcccgactggagaggcaactgaatgcgttacggcgtgcctaa

SEQ ID NO: 284056 - DNA, 50 bp, Artificial
  Synthetic oligonucleotide
tcgcgcacgatatcgaacgatagacagggccacggggtgctgagagtgtg

SEQ ID NO: 284057 - DNA, 50 bp, Artificial
  Synthetic oligonucleotide
acaatccccgtctagccctcgcgctgtccaatgcgaaacgagcctccgtc

SEQ ID NO: 284058 - DNA, 50 bp, Artificial
  Synthetic oligonucleotide
acaatgttacactatgcggactgttctcgcaggctatcaatgtcccctgt

SEQ ID NO: 284059 - DNA, 50 bp, Artificial
  Synthetic oligonucleotide
tcgcccgcctggttaatcacaaaagtgcggggaaccgtgccatacgatga

SEQ ID NO: 284060 - DNA, 50 bp, Artificial
  Synthetic oligonucleotide
tcgcccgccggtctagattgcctacgcctgcttcaaattgggggccattc

SEQ ID NO: 284061 - DNA, 50 bp, Artificial
  Synthetic oligonucleotide
acacaaccacgacatacagggccatggcgactgcgatcagcgagctcgta

SEQ ID NO: 284062 - DNA, 50 bp, Artificial
  Synthetic oligonucleotide
acacaccgtacgacctcccactgaccccgcatcgatcgagttctggcggt

SEQ ID NO: 284063 - DNA, 50 bp, Artificial
  Synthetic oligonucleotide
acacacggtgcgggggttactcgatcgactcgcgggaaaggggccaagca

SEQ ID NO: 284064 - DNA, 60 bp, Artificial
  Synthetic oligonucleotide
taccatcttcctggaggattgctatatcctcaaatagatggactacacgagagattgggg

SEQ ID NO: 284065 - DNA, 50 bp, Artificial
  Synthetic oligonucleotide
tcgcaggcatgtgaattacagcgtgtcccggtccaccgtcgggtatgagg

SEQ ID NO: 284066 - DNA, 50 bp, Artificial
  Synthetic oligonucleotide
tcgcagctcgcgtgtgtctgctcgtccagccatcgatcgaccgatacctg

SEQ ID NO: 284067 - DNA, 50 bp, Artificial
  Synthetic oligonucleotide
tcgcaccccgggagagcttgtctcgtggattccgttgcccttctacccaa

SEQ ID NO: 284068 - DNA, 50 bp, Artificial
  Synthetic oligonucleotide
acacagcccgccaaacaacggacggtcggggcattgaacgcggaagtagg

SEQ ID NO: 284069 - DNA, 50 bp, Artificial
  Synthetic oligonucleotide
acacataccgccccgtacgcaggtcgaattcaggaggcgcggactcgggt

SEQ ID NO: 284070 - DNA, 50 bp, Artificial
  Synthetic oligonucleotide
acaccacaacacgccagagtgggctgcagttagggtttgtggctgcggtg

SEQ ID NO: 284071 - DNA, 50 bp, Artificial
  Synthetic oligonucleotide
acaccattgggcctgcccgttgtgcaaccgtaccgcaataggttgccccg

SEQ ID NO: 284072 - DNA, 50 bp, Artificial
  Synthetic oligonucleotide
acacccgcaacaagccgttcacgcggcctcactccaaaaccccgaggcat

SEQ ID NO: 284073 - DNA, 50 bp, Artificial
  Synthetic oligonucleotide
acaccgtcgttagctagcgcatcccagggtggccatcgtgcgttgccttg

SEQ ID NO: 284074 - DNA, 50 bp, Artificial
  Synthetic oligonucleotide
acacgaagagcgctcggtcagctagggaaccttcgcgagagtcccagcgg

SEQ ID NO: 284075 - DNA, 53 bp, Artificial
  Synthetic oligonucleotide
tacccaaacctatccagaggtagttctgggtacccatactaccctgtaccttc

SEQ ID NO: 284076 - DNA, 50 bp, Artificial
  Synthetic oligonucleotide
acacgcaactgttggcgactgcatcctcccgtccgccgcttctacccaag

SEQ ID NO: 284077 - DNA, 50 bp, Artificial
  Synthetic oligonucleotide
acatatggcggtcgcggcctagtcgtcaacccatctggcgggctgatctc

SEQ ID NO: 284078 - DNA, 50 bp, Artificial
  Synthetic oligonucleotide
acatccaggcatgaggctacgggtttaggggctggcaaaaggcgcgatgg

SEQ ID NO: 284079 - DNA, 50 bp, Artificial
  Synthetic oligonucleotide
tccctcgtgtggcggctccgcctctagcattccgcgtatttccaatcctg

SEQ ID NO: 284080 - DNA, 50 bp, Artificial
  Synthetic oligonucleotide
acatcgaagacacggacgacgggggtagcgaatcgttgggtgtagcgcgg

SEQ ID NO: 284081 - DNA, 50 bp, Artificial
  Synthetic oligonucleotide
acatctccgattgcgatcgagcgacgagtccgcgtggggacagcgcacat

SEQ ID NO: 284082 - DNA, 50 bp, Artificial
  Synthetic oligonucleotide
acatgcggcggtcctcgctattcggcgccctcgggactatattcgtggcc

SEQ ID NO: 284083 - DNA, 50 bp, Artificial
  Synthetic oligonucleotide
acatgcgtctgctccaacgagcacatgggatcctacgggcacggcttcct

SEQ ID NO: 284084 - DNA, 50 bp, Artificial
  Synthetic oligonucleotide
acatggctcccggccgaatatcagcccacccgcaacctagatcagcgctg

SEQ ID NO: 284085 - DNA, 50 bp, Artificial
  Synthetic oligonucleotide
acatgggcgcacgctgacgcctcaacacggtcggcagtcctcaccaaagc

SEQ ID NO: 284086 - DNA, 59 bp, Artificial
  Synthetic oligonucleotide
attccggacgaaaccaggttgttcaactgcacaagctgattagcattgacactttacga

SEQ ID NO: 284087 - DNA, 50 bp, Artificial
  Synthetic oligonucleotide
acatgggcgcctgttgccgtagagcctggaaggccgagtccgagcgggga

SEQ ID NO: 284088 - DNA, 50 bp, Artificial
  Synthetic oligonucleotide
acatgtattgccacgttggcacacaggctccctcgggccccgctagtggg

SEQ ID NO: 284089 - DNA, 50 bp, Artificial
  Synthetic oligonucleotide
acatgttggggcgtgtgagatgtgtccgcgctgcttgcgtcctgcgcatt

SEQ ID NO: 284090 - DNA, 50 bp, Artificial
  Synthetic oligonucleotide
acattccaactcacggacccgtcctgcaacacgcctgggtgcccgttcgc

SEQ ID NO: 284091 - DNA, 50 bp, Artificial
  Synthetic oligonucleotide
tcccgcaaaaccacgtcgaaggaagtatggatggaaacgcaccggcacga

SEQ ID NO: 284092 - DNA, 50 bp, Artificial
  Synthetic oligonucleotide
accaacgacccccaccgtcgcatgatcagcctgtggtcagtgcaaggagg

SEQ ID NO: 284093 - DNA, 50 bp, Artificial
  Synthetic oligonucleotide
tcccgaagttgaggtgggcgcttcgccgtattatgtttgccgttgaggcc

SEQ ID NO: 284094 - DNA, 50 bp, Artificial
  Synthetic oligonucleotide
accaagttcgggagatccattctgcacgcgggtcgctggtgtgtcggacg

SEQ ID NO: 284095 - DNA, 50 bp, Artificial
  Synthetic oligonucleotide
accaccgccaacgcgtattaggctgcccctttatccctgtcagcaacgga

SEQ ID NO: 284096 - DNA, 50 bp, Artificial
  Synthetic oligonucleotide
accacgcgcgagcatagtgtggggagacaacgaacacccacgtccgaagg

SEQ ID NO: 284097 - DNA, 60 bp, Artificial
  Synthetic oligonucleotide
gtgaccaccctcgtcataccaattttcaacgaacgatggcgtatgatcatgggtcgcata

SEQ ID NO: 284098 - DNA, 50 bp, Artificial
  Synthetic oligonucleotide
accactgaggcctgcaaacggggttccaaggttagcgggttgtctccccc

SEQ ID NO: 284099 - DNA, 50 bp, Artificial
  Synthetic oligonucleotide
tcccctcactcgaacctaggcacaagccccggaagtacctcgtggctcca

SEQ ID NO: 284100 - DNA, 50 bp, Artificial
  Synthetic oligonucleotide
accagaccccaatcgtctaccgctgcctagcaaggcatacgccggagagc

SEQ ID NO: 284101 - DNA, 50 bp, Artificial
  Synthetic oligonucleotide
accagactcaaccaggtacgtgccataagagtcacacttcgaatggggag

SEQ ID NO: 284102 - DNA, 50 bp, Artificial
  Synthetic oligonucleotide
tccccatacctcaccttagccccgcccgttattttcccggccctctacaa

SEQ ID NO: 284103 - DNA, 50 bp, Artificial
  Synthetic oligonucleotide
accagaggcacgggagactcctccgacgggcggaccgacacaggttgttc

SEQ ID NO: 284104 - DNA, 50 bp, Artificial
  Synthetic oligonucleotide
accagatgcgagcctagactgcccgtggcacctgtaaccagcacgcagtg

SEQ ID NO: 284105 - DNA, 50 bp, Artificial
  Synthetic oligonucleotide
tcccacgcgtcgcctcaattgcagtctgcatccacagagccgtcctacca

SEQ ID NO: 284106 - DNA, 50 bp, Artificial
  Synthetic oligonucleotide
tcccaagccttttggcgtctcccttgtcgtggacgaagtggtgtggctcg

SEQ ID NO: 284107 - DNA, 50 bp, Artificial
  Synthetic oligonucleotide
tccgtatgcgccctgcaagaatgacttgtccagcgaatcatgcggcggtt

SEQ ID NO: 284108 - DNA, 60 bp, Artificial
  Synthetic oligonucleotide
gaataggccggctactattcgtatactaaagcacttaccagagcttcgttcttgtgctca

SEQ ID NO: 284109 - DNA, 50 bp, Artificial
  Synthetic oligonucleotide
acagcagggctcacagctcctcccgtacccgaccgtgcagaaagagcccg

SEQ ID NO: 284110 - DNA, 50 bp, Artificial
  Synthetic oligonucleotide
acagccccgttggtcgtggactgttgacgggtagatacgtcacgcgcgag

SEQ ID NO: 284111 - DNA, 50 bp, Artificial
  Synthetic oligonucleotide
acagcccgcgtagccattaccgcgaacggtccccaattcccatgcgccgg

SEQ ID NO: 284112 - DNA, 50 bp, Artificial
  Synthetic oligonucleotide
acagccctattcggccaaacctcggcgcagcgcactcgcgcaaccctcac

SEQ ID NO: 284113 - DNA, 50 bp, Artificial
  Synthetic oligonucleotide
acagccggttcgtacccctgtattgggcccgaccctccacaggcgcacag

SEQ ID NO: 284114 - DNA, 50 bp, Artificial
  Synthetic oligonucleotide
acagccgtctattgccgaacgtggggagccccgcatttctcccgcacttc

SEQ ID NO: 284115 - DNA, 50 bp, Artificial
  Synthetic oligonucleotide
acagcggactactgctcacccgcccactatgccggacgaggaacccacgc

SEQ ID NO: 284116 - DNA, 50 bp, Artificial
  Synthetic oligonucleotide
acagcggggatgtcaaggatcggaatacggtggctacgcagtcgaccccg

SEQ ID NO: 284117 - DNA, 50 bp, Artificial
  Synthetic oligonucleotide
acagctaatccgagtctgcctgcgtacatggccccgcctcagccgacgat

SEQ ID NO: 284118 - DNA, 50 bp, Artificial
  Synthetic oligonucleotide
tccggactccagattcccgccgctacattcggtgacaagtataaactcta

SEQ ID NO: 284119 - DNA, 60 bp, Artificial
  Synthetic oligonucleotide
gaatcagtccgaccaagcagtcaccccgacctatgacatctggcagcgtcactggagctc

SEQ ID NO: 284120 - DNA, 50 bp, Artificial
  Synthetic oligonucleotide
acagctcgtcagagtcatcatccctggcgggctccgtctgaggaacggga

SEQ ID NO: 284121 - DNA, 50 bp, Artificial
  Synthetic oligonucleotide
acagctgtctgatgaggcgacagtttgctcctcacacgttcggggcgggg

SEQ ID NO: 284122 - DNA, 50 bp, Artificial
  Synthetic oligonucleotide
acagcttgcctactctgcctccgccggtttctccacagcccatgggatcc

SEQ ID NO: 284123 - DNA, 50 bp, Artificial
  Synthetic oligonucleotide
acaggagcgatgatttcgtcaagccctccagctacccagccaccaccccc

SEQ ID NO: 284124 - DNA, 50 bp, Artificial
  Synthetic oligonucleotide
acaggcgactacccagcctcaatgcgggctcaactcggggaccgtctacc

SEQ ID NO: 284125 - DNA, 50 bp, Artificial
  Synthetic oligonucleotide
tccgccgtataaccccggtctcatacggctttccaccagatggactaaag

SEQ ID NO: 284126 - DNA, 50 bp, Artificial
  Synthetic oligonucleotide
acaggcggtctcatggcggcgtggaggctgtacaccacaccagtgttgaa

SEQ ID NO: 284127 - DNA, 50 bp, Artificial
  Synthetic oligonucleotide
acagggaacatgacgtgcaggaaccacaaagaggcacgcgcttcggggca

SEQ ID NO: 284128 - DNA, 50 bp, Artificial
  Synthetic oligonucleotide
acaggggctccgatagctcccgcaaggttatcgtacccgcccacgtcggg

SEQ ID NO: 284129 - DNA, 50 bp, Artificial
  Synthetic oligonucleotide
acagggtcggagtcacgcaagattccccagagtgaggagggcgcttcgac

SEQ ID NO: 284130 - DNA, 55 bp, Artificial
  Synthetic oligonucleotide
ctccagagcccctggaagctcaaaacagaccctcggccggtcggatcaaccccca

SEQ ID NO: 284131 - DNA, 50 bp, Artificial
  Synthetic oligonucleotide
acaggtccaatccaccgctgcttgtcaccgggactcggacgcaatcgcgg

SEQ ID NO: 284132 - DNA, 49 bp, Artificial
  Synthetic oligonucleotide
acaggtcctacactttggggtaacctcgggtgcggaaagtcccccgcgt

SEQ ID NO: 284133 - DNA, 50 bp, Artificial
  Synthetic oligonucleotide
acagtcgaagagccggaatcggacggccatgagatagctgcccctacgcg

SEQ ID NO: 284134 - DNA, 50 bp, Artificial
  Synthetic oligonucleotide
tccgagggtccaaagcgatgttactgacgcgcaagcactacccccgtcat

SEQ ID NO: 284135 - DNA, 50 bp, Artificial
  Synthetic oligonucleotide
acagtcgggattgcacgcctttggcagcgtccgtctcctcgccacacttc

SEQ ID NO: 284136 - DNA, 50 bp, Artificial
  Synthetic oligonucleotide
tccgacacagttcggcgtcacagaggatctctccagctacccgcgcactt

SEQ ID NO: 284137 - DNA, 50 bp, Artificial
  Synthetic oligonucleotide
acagtgtgtctgtctgcgaccacttgctgccacgggccggttggttcaaa

SEQ ID NO: 284138 - DNA, 50 bp, Artificial
  Synthetic oligonucleotide
acatagtagccaaaatcggatagtggtcccacgtgagccaggatgatccc

SEQ ID NO: 284139 - DNA, 50 bp, Artificial
  Synthetic oligonucleotide
aacacgcctatcggtggactgagagagtatgcggcgtcagacccaggggg

SEQ ID NO: 284140 - DNA, 50 bp, Artificial
  Synthetic oligonucleotide
ttccagtagctggggtctgaggcaacgccgcagtcttgggagctgcgggt

SEQ ID NO: 284141 - DNA, 54 bp, Artificial
  Synthetic oligonucleotide
cagtaactcctccgtgacgttagagccaacggctttcccctcttcagcggggta

SEQ ID NO: 284142 - DNA, 55 bp, Artificial
  Synthetic oligonucleotide
tactgacttgcgcaaactttgacctttccgtaactttcaagttacgccgcggagc

SEQ ID NO: 284143 - DNA, 50 bp, Artificial
  Synthetic oligonucleotide
aacacgctgtcaggagtgctgtgctgtcgactgttgccctgccttgctct

SEQ ID NO: 284144 - DNA, 50 bp, Artificial
  Synthetic oligonucleotide
aacacgtccgccaaccaaccctgactccgtgcaccactgactcgcttcaa

SEQ ID NO: 284145 - DNA, 50 bp, Artificial
  Synthetic oligonucleotide
aacacgtgaatcctctggtccggtcgccctgggctcttttcacctgcact

SEQ ID NO: 284146 - DNA, 50 bp, Artificial
  Synthetic oligonucleotide
aacagaggcacgcgtgggcgctaggcctaattgggatcccgtggtcaaca

SEQ ID NO: 284147 - DNA, 50 bp, Artificial
  Synthetic oligonucleotide
aacagattggacttgggcgcagcttcagtggtcgcggagagacccacagc

SEQ ID NO: 284148 - DNA, 50 bp, Artificial
  Synthetic oligonucleotide
aacagcagcctcatgccggccaagcatctgggtttgataccgagggagct

SEQ ID NO: 284149 - DNA, 50 bp, Artificial
  Synthetic oligonucleotide
aacagcaggtgccctcgcggacgcaaattgaccctttcgtcgccgatagg

SEQ ID NO: 284150 - DNA, 50 bp, Artificial
  Synthetic oligonucleotide
aacagcccaacagtgtggggtattgggacaacgggggtcgctggtcccgc

SEQ ID NO: 284151 - DNA, 50 bp, Artificial
  Synthetic oligonucleotide
aacagcccactgcgggcgctcagtgactcggccataaccggggaactcgc

SEQ ID NO: 284152 - DNA, 50 bp, Artificial
  Synthetic oligonucleotide
aacagcgccgaaacctctccacgcgtcgggagccctgctccgctcctcgg

SEQ ID NO: 284153 - DNA, 54 bp, Artificial
  Synthetic oligonucleotide
cactccctaataaccttcgggtcttcgcatttcgcacgctcgtagttataccgt

SEQ ID NO: 284154 - DNA, 50 bp, Artificial
  Synthetic oligonucleotide
aacagcgtcatgggcgcgctctgtccgattctggtcaaccagcccgatgt

SEQ ID NO: 284155 - DNA, 50 bp, Artificial
  Synthetic oligonucleotide
aacagcgtccagctctagcccctccgtcaacccctgcccctacgttggca

SEQ ID NO: 284156 - DNA, 50 bp, Artificial
  Synthetic oligonucleotide
ttcacaccaacaagcgagactgctggtcggcccagagtcagctgaacgcc

SEQ ID NO: 284157 - DNA, 50 bp, Artificial
  Synthetic oligonucleotide
aacaggcgacccaaaccccgggcatgttcacacccctcttcggccgcgtg

SEQ ID NO: 284158 - DNA, 50 bp, Artificial
  Synthetic oligonucleotide
aacaggggtcgtgtacccgtcttcgtcggacccgctggtgtagcccgggc

SEQ ID NO: 284159 - DNA, 50 bp, Artificial
  Synthetic oligonucleotide
aacagggtcttcgcaggtctcttcagccactgcacctagcgtggcagcga

SEQ ID NO: 284160 - DNA, 50 bp, Artificial
  Synthetic oligonucleotide
aacaggtcctgtcctttgggcaccggcctccgagctgtacgggcggcgag

SEQ ID NO: 284161 - DNA, 50 bp, Artificial
  Synthetic oligonucleotide
aacagtcgtcgccatctgtcgctacgcctgctgccgagtcctctccgcgg

SEQ ID NO: 284162 - DNA, 50 bp, Artificial
  Synthetic oligonucleotide
aacagtggacgtatattggggttgggagggatgatggccacgaggcggga

SEQ ID NO: 284163 - DNA, 50 bp, Artificial
  Synthetic oligonucleotide
aacagttcccggtgcccccagaccaccctctgcactggcgagtcgggatt

SEQ ID NO: 284164 - DNA, 60 bp, Artificial
  Synthetic oligonucleotide
acgtcgttcactatcgcggtccctttcaagccgctcagcgcgactgtcacgacatctcct

SEQ ID NO: 284165 - DNA, 50 bp, Artificial
  Synthetic oligonucleotide
aacataccacaggatcgtacgcgggccctccaacagtaggctgctccgga

SEQ ID NO: 284166 - DNA, 50 bp, Artificial
  Synthetic oligonucleotide
aacatcgagcgcgctactgccgttggtaccctcgctgaggtcatcactgg

SEQ ID NO: 284167 - DNA, 50 bp, Artificial
  Synthetic oligonucleotide
aacatctcccggtggacctgacgcgaggacatgattgcgccctggatccg

SEQ ID NO: 284168 - DNA, 50 bp, Artificial
  Synthetic oligonucleotide
aacatggatgatcgtgggaggaatcggggctagtccacgggcagtggctc

SEQ ID NO: 284169 - DNA, 50 bp, Artificial
  Synthetic oligonucleotide
aacatgtccgggggagcttcgtatttagccagcgaggaacggcgagagcc

SEQ ID NO: 284170 - DNA, 50 bp, Artificial
  Synthetic oligonucleotide
aaattcctatcgctcccgatcgcccccacgcagagcacggggagggtctc

SEQ ID NO: 284171 - DNA, 50 bp, Artificial
  Synthetic oligonucleotide
aaattcgtattctgcacccggcctagcagcctcgggtccccgttaccctt

SEQ ID NO: 284172 - DNA, 50 bp, Artificial
  Synthetic oligonucleotide
aaattgactgaccgcggggttggacctcgggagttccggcaaacctggtt

SEQ ID NO: 284173 - DNA, 50 bp, Artificial
  Synthetic oligonucleotide
aaattggcctgcgtccagccttcttaaggcgcccggatcttccttcgcga

SEQ ID NO: 284174 - DNA, 50 bp, Artificial
  Synthetic oligonucleotide
aaatttaagcttaagtatagtaagcttgatctaataaagaagcagctctc

SEQ ID NO: 284175 - DNA, 57 bp, Artificial
  Synthetic oligonucleotide
gaccacaaaggactaagcgctcttccacgggccacataccgtatcaaaagcggacca

SEQ ID NO: 284176 - DNA, 50 bp, Artificial
  Synthetic oligonucleotide
aacaaagcagacgctcgctctcacgactcgccaaaccctctccgctggcc

SEQ ID NO: 284177 - DNA, 50 bp, Artificial
  Synthetic oligonucleotide
aacaaatgcattgtctgtcgcaggggcgtcagccaactccagggccgcta

SEQ ID NO: 284178 - DNA, 50 bp, Artificial
  Synthetic oligonucleotide
aacaacacggtgtgcccctctcgcattccccagcaccgtatgcgcaatac

SEQ ID NO: 284179 - DNA, 50 bp, Artificial
  Synthetic oligonucleotide
aacaaccgtattgctggtcccattggctccagtccgactggctgggtggg

SEQ ID NO: 284180 - DNA, 50 bp, Artificial
  Synthetic oligonucleotide
aacaacggcccccgatcaagtgccagctcctacacgcgagaccctccgct

SEQ ID NO: 284181 - DNA, 50 bp, Artificial
  Synthetic oligonucleotide
ttcctttccgccaccagatgagcaggtagtgtatgtggctaaagctcgat

SEQ ID NO: 284182 - DNA, 50 bp, Artificial
  Synthetic oligonucleotide
aacaacggggtctcgtcagggtacagtcggccttggtacagcacacgccc

SEQ ID NO: 284183 - DNA, 50 bp, Artificial
  Synthetic oligonucleotide
aacaagccgagttcgtctgggtcagcaagcccagcttccacggaagcgca

SEQ ID NO: 284184 - DNA, 50 bp, Artificial
  Synthetic oligonucleotide
aacaagcgcggtctctgtcccagcgacgccccatgagaacccggaaaccg

SEQ ID NO: 284185 - DNA, 50 bp, Artificial
  Synthetic oligonucleotide
aacaagggcgcgtcaacaaaccgaccgccatacggcgtaacatgcctcat

SEQ ID NO: 284186 - DNA, 59 bp, Artificial
  Synthetic oligonucleotide
cactccttccggtggaaaggcctaccatgtataggcatgtggtcatcaaaagcgaagcg

SEQ ID NO: 284187 - DNA, 50 bp, Artificial
  Synthetic oligonucleotide
aacaaggtacacgggaggaagatttgcgtctcgctccgcgcgcagaggca

SEQ ID NO: 284188 - DNA, 50 bp, Artificial
  Synthetic oligonucleotide
aacaatgctagccctcccgcgagcactaggctaggcagctggccatactt

SEQ ID NO: 284189 - DNA, 50 bp, Artificial
  Synthetic oligonucleotide
aacaatggcgcacgcagcagcccatttggcctaccttcacggtgagctcg

SEQ ID NO: 284190 - DNA, 50 bp, Artificial
  Synthetic oligonucleotide
aacacacactaggggcgccaccggcttacctcgcttctgcactctgtgct

SEQ ID NO: 284191 - DNA, 50 bp, Artificial
  Synthetic oligonucleotide
aacaccaagggcggagccacgatcttgtccggtccagcgagtgtgccacc

SEQ ID NO: 284192 - DNA, 50 bp, Artificial
  Synthetic oligonucleotide
aacaccacgcgatgggaggtgtaggcgacgcagtcagattggcctgtcga

SEQ ID NO: 284193 - DNA, 50 bp, Artificial
  Synthetic oligonucleotide
aacacccacgccatctgctccaagaggcacgtcaaaggtgacaccgggat

SEQ ID NO: 284194 - DNA, 50 bp, Artificial
  Synthetic oligonucleotide
aacaccgcagctaaaccaccggccttgctcctcacctactgagagccctc

SEQ ID NO: 284195 - DNA, 50 bp, Artificial
  Synthetic oligonucleotide
aacaccgcggcggcctagttcctagagggccaacgttgatgtcctacggc

SEQ ID NO: 284196 - DNA, 50 bp, Artificial
  Synthetic oligonucleotide
aacacctgtcgcgccctccttataaccgtccgacggtctagctccccagc

SEQ ID NO: 284197 - DNA, 56 bp, Artificial
  Synthetic oligonucleotide
attatttcggcatctgtcgaagcacttcaaccctcattaagaaatggtaaccgtgg

SEQ ID NO: 284198 - DNA, 50 bp, Artificial
  Synthetic oligonucleotide
ttcccagaacccgatgctaccgctccaggacccgtactcccagctgaagc

SEQ ID NO: 284199 - DNA, 50 bp, Artificial
  Synthetic oligonucleotide
aacacgactcccacaatgcggaccccgtcgggctttaccagcggtgtcgc

SEQ ID NO: 284200 - DNA, 50 bp, Artificial
  Synthetic oligonucleotide
aacccatctcgcgtctccaaaaccgccgctcgctcattcccgtactacgg

SEQ ID NO: 284201 - DNA, 50 bp, Artificial
  Synthetic oligonucleotide
aaccccaaacgggatcttagcgagctggaccgccccagggctaagcgaag

SEQ ID NO: 284202 - DNA, 50 bp, Artificial
  Synthetic oligonucleotide
aaccccaagtgtcaacacctgcacacgacgggacgggcggctagaatccc

SEQ ID NO: 284203 - DNA, 50 bp, Artificial
  Synthetic oligonucleotide
aaccccagatcaggccagcggtacctccatcggtcaaaccttgctcgagc

SEQ ID NO: 284204 - DNA, 50 bp, Artificial
  Synthetic oligonucleotide
aaccccatgattcgctcgcttgcgcggactctccccaagcacccacagct

SEQ ID NO: 284205 - DNA, 50 bp, Artificial
  Synthetic oligonucleotide
aaccccatgcagcgtcgccagtcgcttatgccatttgtcggccagggagg

SEQ ID NO: 284206 - DNA, 50 bp, Artificial
  Synthetic oligonucleotide
aacccccgctagacatcaacgacgtggatctcctgacggccggcacagag

SEQ ID NO: 284207 - DNA, 50 bp, Artificial
  Synthetic oligonucleotide
aaccccgccatcctatctcttccgagcgcatctgtataacgggcggtgcc

SEQ ID NO: 284208 - DNA, 57 bp, Artificial
  Synthetic oligonucleotide
ctcaactagactaaaacacggaattctagcagtagcccggcgcttaacacctgacta

SEQ ID NO: 284209 - DNA, 50 bp, Artificial
  Synthetic oligonucleotide
aacccctccagcacaacggcaaatgacatcccaaatcccacggtccgcca

SEQ ID NO: 284210 - DNA, 50 bp, Artificial
  Synthetic oligonucleotide
aaccccttgccaagggccctccttggtcttatgacgtttggccccgatga

SEQ ID NO: 284211 - DNA, 50 bp, Artificial
  Synthetic oligonucleotide
aacccgaacgacgaatcgtacccctggaccactcaggcgacagtgggtct

SEQ ID NO: 284212 - DNA, 50 bp, Artificial
  Synthetic oligonucleotide
aacccgagctccaaagcgtgaccgaggatgtacttgggcgcatcctgtga

SEQ ID NO: 284213 - DNA, 50 bp, Artificial
  Synthetic oligonucleotide
aacccgatggcccgtttctcctctgacttgggatggggagttcagccggg

SEQ ID NO: 284214 - DNA, 50 bp, Artificial
  Synthetic oligonucleotide
aacccgcactctcctggtccgctagctcctctagggatcgcgtacgtccc

SEQ ID NO: 284215 - DNA, 50 bp, Artificial
  Synthetic oligonucleotide
aacccgcccgatatcccctttcacggctctgccaacgtatcggcttacga

SEQ ID NO: 284216 - DNA, 50 bp, Artificial
  Synthetic oligonucleotide
aacccgctgtagcgttaccgctgggactcggccggcacatgtgggatatt

SEQ ID NO: 284217 - DNA, 49 bp, Artificial
  Synthetic oligonucleotide
aacccggaaggacggaatgggagggtttctatacgggtacccaggccgc

SEQ ID NO: 284218 - DNA, 50 bp, Artificial
  Synthetic oligonucleotide
aacccggtattctggcgccggggcattggtagtatgctcgtgcagagcgg

SEQ ID NO: 284219 - DNA, 60 bp, Artificial
  Synthetic oligonucleotide
cgatggaccaaagggggctaagtagtatgatgaggtcagcgattgtatctataggttgtc

SEQ ID NO: 284220 - DNA, 50 bp, Artificial
  Synthetic oligonucleotide
aaccctacctcctccgccggttactactgggcatcggctcaaacccgtca

SEQ ID NO: 284221 - DNA, 50 bp, Artificial
  Synthetic oligonucleotide
tgtggacggcgtgtagcgtggcactcccgtagcactatacaggagctcgg

SEQ ID NO: 284222 - DNA, 50 bp, Artificial
  Synthetic oligonucleotide
aaccctcgccccctctcacgggtgttccttgccattccgagatccgagtc

SEQ ID NO: 284223 - DNA, 50 bp, Artificial
  Synthetic oligonucleotide
aaccctcggtgtctcattatgccgtgcgatccgaccccagctcatcgcat

SEQ ID NO: 284224 - DNA, 50 bp, Artificial
  Synthetic oligonucleotide
aaccctcttcccgcagccctacccgcgtgctctggattcacgtggtcggg

SEQ ID NO: 284225 - DNA, 50 bp, Artificial
  Synthetic oligonucleotide
aaccctgccttgagggcaatccgcgctgtgagaccatcatagaccccggg

SEQ ID NO: 284226 - DNA, 50 bp, Artificial
  Synthetic oligonucleotide
aaccctggctttagccgggcgcccccattggttcaattatgcagcctcaa

SEQ ID NO: 284227 - DNA, 50 bp, Artificial
  Synthetic oligonucleotide
aaccctgtgagctcggaagaggagtctgcgggagaatccgagtcgcccaa

SEQ ID NO: 284228 - DNA, 50 bp, Artificial
  Synthetic oligonucleotide
aacccttagcccggagcaagccgcttggggcactagaagcctcgttctaa

SEQ ID NO: 284229 - DNA, 50 bp, Artificial
  Synthetic oligonucleotide
aacattgacttcgcccttgttgagactgctgggggcgtgcactcgccggg

SEQ ID NO: 284230 - DNA, 55 bp, Artificial
  Synthetic oligonucleotide
tactttagcacttacggccgagcaccttagtacaccgtgtacttcgtactttgtg

SEQ ID NO: 284231 - DNA, 50 bp, Artificial
  Synthetic oligonucleotide
aacattgccctgttggcgagagaggcgtaaccactgctgggggttctccg

SEQ ID NO: 284232 - DNA, 50 bp, Artificial
  Synthetic oligonucleotide
aaccaaatacccgtctcgtcgcttagcctccccacctagcggttgggagt

SEQ ID NO: 284233 - DNA, 50 bp, Artificial
  Synthetic oligonucleotide
aaccaacgttccgacagaggctcggcgcccctatacaagcgcacgagtgt

SEQ ID NO: 284234 - DNA, 50 bp, Artificial
  Synthetic oligonucleotide
aaccaaggcccgctcctctgcactgcgcgcacagatctcgttcgcccacg

SEQ ID NO: 284235 - DNA, 50 bp, Artificial
  Synthetic oligonucleotide
aaccaagggatttgcgactggattcggtggtcccccagcctgctggttgg

SEQ ID NO: 284236 - DNA, 50 bp, Artificial
  Synthetic oligonucleotide
aaccaagggtcaacgccccaggcagaggcttgtccggaaacgacgttgaa

SEQ ID NO: 284237 - DNA, 50 bp, Artificial
  Synthetic oligonucleotide
ttactggctcgctctatatcacccattatggccaaatgctcgtgtttctc

SEQ ID NO: 284238 - DNA, 50 bp, Artificial
  Synthetic oligonucleotide
aaccaataggagagcctaacggggccgcagtcacgtggcatgtcggcgat

SEQ ID NO: 284239 - DNA, 50 bp, Artificial
  Synthetic oligonucleotide
aaccaatccgacgccagcgcaggtaaccccgctaggtcttcagttgcgac

SEQ ID NO: 284240 - DNA, 50 bp, Artificial
  Synthetic oligonucleotide
aaccaatcctcgacagggaggtatgggcagtcccgggttgagaggctggg

SEQ ID NO: 284241 - DNA, 60 bp, Artificial
  Synthetic oligonucleotide
aggtatgatatgctttgtgttgtgtaggttggtttggacgtgcatgtgtgtattgatgtt

SEQ ID NO: 284242 - DNA, 50 bp, Artificial
  Synthetic oligonucleotide
aaccacaaggtagcgaccgttcggtttcgacccaatggccccctccagcg

SEQ ID NO: 284243 - DNA, 50 bp, Artificial
  Synthetic oligonucleotide
aaccacacataccgcgaaggccgacacaggtctagctcacactcgcagcg

SEQ ID NO: 284244 - DNA, 50 bp, Artificial
  Synthetic oligonucleotide
ttacgactccaacccctaagcaacgactgtagcctgcatggttacaccat

SEQ ID NO: 284245 - DNA, 50 bp, Artificial
  Synthetic oligonucleotide
aaccagcccttcctagccaaccggcgtctattcgcaatggccgatagcgg

SEQ ID NO: 284246 - DNA, 50 bp, Artificial
  Synthetic oligonucleotide
aaccagcgcagcgatattcccgacggcacacaccctgaactccgggcgat

SEQ ID NO: 284247 - DNA, 50 bp, Artificial
  Synthetic oligonucleotide
aaccagcggggagcggccaacatgaaaggagactggttcctgacaagccg

SEQ ID NO: 284248 - DNA, 50 bp, Artificial
  Synthetic oligonucleotide
aaccagcggtaccaggtctatccccaaaatgggagcgccgcccgaaaggt

SEQ ID NO: 284249 - DNA, 50 bp, Artificial
  Synthetic oligonucleotide
aaccagggtgcccgcctaacgaaggaggtggaagtgcggcgttgacagat

SEQ ID NO: 284250 - DNA, 50 bp, Artificial
  Synthetic oligonucleotide
aaccatgcgtcttgcgcgaaagcgattgagcatcttgcgacggcccacgc

SEQ ID NO: 284251 - DNA, 50 bp, Artificial
  Synthetic oligonucleotide
aaccatggtttggcgagagttatgccccgcttctcaaggccctcgcgtca

SEQ ID NO: 284252 - DNA, 56 bp, Artificial
  Synthetic oligonucleotide
cagtaagcaagtcacccagcaaacaactacgtaactaccgtgtggacaccggacag

SEQ ID NO: 284253 - DNA, 55 bp, Artificial
  Synthetic oligonucleotide
attattcttctatattagtaccttaaatttggccacgtcaaactgtattatctaa

SEQ ID NO: 284254 - DNA, 50 bp, Artificial
  Synthetic oligonucleotide
aaccattgggacagccaccccatttccggtgtacgggcacctcagcttcc

SEQ ID NO: 284255 - DNA, 50 bp, Artificial
  Synthetic oligonucleotide
aacccaagatgaacgccgctaccgctctgcgggccagaatggccacctct

SEQ ID NO: 284256 - DNA, 50 bp, Artificial
  Synthetic oligonucleotide
aacccaagccccggcagcatgctccgacttcaggacccggtcatgagccc

SEQ ID NO: 284257 - DNA, 50 bp, Artificial
  Synthetic oligonucleotide
aacccacgaagccccagtcacgtgttaccgtgttcctcaaccgcgtctga

SEQ ID NO: 284258 - DNA, 50 bp, Artificial
  Synthetic oligonucleotide
aacccagaacgcggcttgacggaggctcgacatgtaccagcgggactcga

SEQ ID NO: 284259 - DNA, 50 bp, Artificial
  Synthetic oligonucleotide
aacccatccccgtcactttgggaacggagtcacgggttcctgggagcttg

SEQ ID NO: 284260 - DNA, 50 bp, Artificial
  Synthetic oligonucleotide
tttaacacagctgattgacagcctactccgtacagattttcttaccacga

SEQ ID NO: 284261 - DNA, 50 bp, Artificial
  Synthetic oligonucleotide
aaacctgaccgagtcctctgccgcgaagcaaacacaggccaagcgtgcat

SEQ ID NO: 284262 - DNA, 50 bp, Artificial
  Synthetic oligonucleotide
aaacgacgccgagtacccgaaatacgtgcccttggcgtagtagggcgtgc

SEQ ID NO: 284263 - DNA, 50 bp, Artificial
  Synthetic oligonucleotide
ttgttgacccgccattcgattctggcgcggagctttccacggtacgtcgc

SEQ ID NO: 284264 - DNA, 60 bp, Artificial
  Synthetic oligonucleotide
gaccatcatgttgtatactgcacttgcaacagtgcgtgttcggaccgatcccgcgttcct

SEQ ID NO: 284265 - DNA, 50 bp, Artificial
  Synthetic oligonucleotide
aaacgagcacaagcccgtactcacagctcgcaacacccgaggcgctcgat

SEQ ID NO: 284266 - DNA, 50 bp, Artificial
  Synthetic oligonucleotide
aaacgagctacggatgtcgccgcggattggaccgtccttccccaagcagc

SEQ ID NO: 284267 - DNA, 50 bp, Artificial
  Synthetic oligonucleotide
aaacgccggggtagccaacggacttccgatatctccattcgctccgctgg

SEQ ID NO: 284268 - DNA, 50 bp, Artificial
  Synthetic oligonucleotide
aaacgccgtgtgattggcattcgaccagtgagacgcgcattcctggacgc

SEQ ID NO: 284269 - DNA, 50 bp, Artificial
  Synthetic oligonucleotide
ttgtgcggtcacgagttgcgcaggggaggttgagacaaccgacggtcctt

SEQ ID NO: 284270 - DNA, 50 bp, Artificial
  Synthetic oligonucleotide
aaacgcctctcagccagaatctccctgcgatggccaccagagcccccatt

SEQ ID NO: 284271 - DNA, 50 bp, Artificial
  Synthetic oligonucleotide
ttgtccggcctctccttgacgatttttgggtggctggccccgatggaagg

SEQ ID NO: 284272 - DNA, 50 bp, Artificial
  Synthetic oligonucleotide
aaacgcctgacagtattggcgcaggcccaaggaggcaacaaagctcgcgc

SEQ ID NO: 284273 - DNA, 50 bp, Artificial
  Synthetic oligonucleotide
aaacgcgaccctcccagctatggaatcggtctaaggcgagcagccgcgta

SEQ ID NO: 284274 - DNA, 50 bp, Artificial
  Synthetic oligonucleotide
ttgtactctttcctgtagacactttcttcatagtacaagttattcgctta

SEQ ID NO: 284275 - DNA, 59 bp, Artificial
  Synthetic oligonucleotide
ctattggcgcctgacagccgtcttagaccaatctaagagattgggtacctatggcttgt

SEQ ID NO: 284276 - DNA, 50 bp, Artificial
  Synthetic oligonucleotide
ttgtaaacagagctaagctactactgcatgcctatatgataaatgtagaa

SEQ ID NO: 284277 - DNA, 50 bp, Artificial
  Synthetic oligonucleotide
aaacgggctagtcccaatatggcaccgaggcaggcgtctacgtgagtcag

SEQ ID NO: 284278 - DNA, 50 bp, Artificial
  Synthetic oligonucleotide
ttggtcgcatcccaagcttcggcatactggaagcggcgtgtgccaattgg

SEQ ID NO: 284279 - DNA, 50 bp, Artificial
  Synthetic oligonucleotide
aaacggtctaagggtgggctcgcggagcaagccagagcagagaacgatcg

SEQ ID NO: 284280 - DNA, 50 bp, Artificial
  Synthetic oligonucleotide
aaacgtttgcccggttcgaatcaaccggcttcagcaagctccgcaggcgg

SEQ ID NO: 284281 - DNA, 50 bp, Artificial
  Synthetic oligonucleotide
aaactacccagcccgtttccacacggagacggcgccaaatcccgccccgt

SEQ ID NO: 284282 - DNA, 50 bp, Artificial
  Synthetic oligonucleotide
aaactagtgtgcccctgaccggagcttagctgcaccatgacccgcgggct

SEQ ID NO: 284283 - DNA, 50 bp, Artificial
  Synthetic oligonucleotide
aaactcccgaaatgattgccccgttctgccccgttcggctccacgttcca

SEQ ID NO: 284284 - DNA, 50 bp, Artificial
  Synthetic oligonucleotide
aaactgaccccggccccaagagtgaagagccctctgatcgacactgcgga

SEQ ID NO: 284285 - DNA, 50 bp, Artificial
  Synthetic oligonucleotide
aaactgatcgggctcgcgggctggaggtacagacgggtggttgtgctatc

SEQ ID NO: 284286 - DNA, 58 bp, Artificial
  Synthetic oligonucleotide
tagaatgtttagattatctagacagattaatagttaaacaccaaacgttggaagcata

SEQ ID NO: 284287 - DNA, 50 bp, Artificial
  Synthetic oligonucleotide
aaactgcccattggggctaaactagtgttgcgcaatgcgacggtggcgcg

SEQ ID NO: 284288 - DNA, 50 bp, Artificial
  Synthetic oligonucleotide
aaactgttccgctaaccaggtcatttcctccgccgaccctgtggggaccg

SEQ ID NO: 284289 - DNA, 50 bp, Artificial
  Synthetic oligonucleotide
aaagaagagcgcgcttgacgtggaggcacaacagggccgcttttagcgtc

SEQ ID NO: 284290 - DNA, 50 bp, Artificial
  Synthetic oligonucleotide
ttttggataccgacggttctaattatgggttaacttactagttccgtagg

SEQ ID NO: 284291 - DNA, 50 bp, Artificial
  Synthetic oligonucleotide
aaaacatggcccgacttaatgcgacgccagcgaagagggtcgatgcccgg

SEQ ID NO: 284292 - DNA, 50 bp, Artificial
  Synthetic oligonucleotide
aaaactctgtggacatgtgcaacaatgggtgttacggttctccaaacact

SEQ ID NO: 284293 - DNA, 50 bp, Artificial
  Synthetic oligonucleotide
aaaagagtgacgtcctccccgtcataaaggacatcgataacagtcgtcgc

SEQ ID NO: 284294 - DNA, 50 bp, Artificial
  Synthetic oligonucleotide
aaaagctctgggaccgatccacccagacatggcctcgaaccggggctcat

SEQ ID NO: 284295 - DNA, 50 bp, Artificial
  Synthetic oligonucleotide
aaaaggcgatgccccatggcccagaacccgcgctttctcagtgacgttgc

SEQ ID NO: 284296 - DNA, 50 bp, Artificial
  Synthetic oligonucleotide
aaaagggcacgaagccacgccacttgaagtgcgatagaacacggcggcgg

SEQ ID NO: 284297 - DNA, 57 bp, Artificial
  Synthetic oligonucleotide
acggttggaacgaggtcacgcggataacgcggctgtacatgaaactagtggagccaa

SEQ ID NO: 284298 - DNA, 50 bp, Artificial
  Synthetic oligonucleotide
aaaaggtgcttcgcaggataggtctgcgtcatcaatacgtctcgcagggg

SEQ ID NO: 284299 - DNA, 50 bp, Artificial
  Synthetic oligonucleotide
aaaatgggtccaccggaatgggctggggtgctgttcgcggagtatcggtg

SEQ ID NO: 284300 - DNA, 50 bp, Artificial
  Synthetic oligonucleotide
tttgccgaggagatgccaccgaatcctggtgatccaaaccgaaccgcgct

SEQ ID NO: 284301 - DNA, 50 bp, Artificial
  Synthetic oligonucleotide
aaacaccaattgagcgctggcacagcccacgccagacaagacagtcctga

SEQ ID NO: 284302 - DNA, 50 bp, Artificial
  Synthetic oligonucleotide
tttcgcagctagcagttcagcgtcacgctcagacaccacgccatgtgcga

SEQ ID NO: 284303 - DNA, 50 bp, Artificial
  Synthetic oligonucleotide
aaacaggcgatgtcgcaacccgccgctctgtggagaccgctgggctaggg

SEQ ID NO: 284304 - DNA, 50 bp, Artificial
  Synthetic oligonucleotide
aaacagtggccagcggacctgcgtgaagagcggaaggatacccgtgaact

SEQ ID NO: 284305 - DNA, 50 bp, Artificial
  Synthetic oligonucleotide
aaacatgagggcagcggtatgataggcagcgtcgtgagcgaccggggtgg

SEQ ID NO: 284306 - DNA, 50 bp, Artificial
  Synthetic oligonucleotide
tttcatggtgcataggtgggattcgcgggaggagagggggcaaccgaagc

SEQ ID NO: 284307 - DNA, 50 bp, Artificial
  Synthetic oligonucleotide
aaacatgtgttcaaaacattggccacgtgcctctgcttgggacgaaggtg

SEQ ID NO: 284308 - DNA, 56 bp, Artificial
  Synthetic oligonucleotide
tagacacaatagattaagtaggtacggaaagggcgtttgcctattacacaggctac

SEQ ID NO: 284309 - DNA, 50 bp, Artificial
  Synthetic oligonucleotide
tttcaagcagccataagcactgaagtctctggactaaccggaaaatcagt

SEQ ID NO: 284310 - DNA, 50 bp, Artificial
  Synthetic oligonucleotide
aaacattacgtcggcaacggggctcctaccagttgcgcggttgtgcgtca

SEQ ID NO: 284311 - DNA, 50 bp, Artificial
  Synthetic oligonucleotide
aaaccagcaccggtgacgcatggcctcgccatgactaacgtgctcaatgc

SEQ ID NO: 284312 - DNA, 50 bp, Artificial
  Synthetic oligonucleotide
aaaccatccgacccacctacgggacaggacacccgaggctagcctagcta

SEQ ID NO: 284313 - DNA, 50 bp, Artificial
  Synthetic oligonucleotide
aaaccccatagacttccgcctgtgatccagcgacgtgtgcccggtgtgcg

SEQ ID NO: 284314 - DNA, 50 bp, Artificial
  Synthetic oligonucleotide
aaacccgactcggagtacccatatgcagccaatcgagaggcgcgcgtggt

SEQ ID NO: 284315 - DNA, 50 bp, Artificial
  Synthetic oligonucleotide
aaaccgactctccgggccaatgctcgacctaccaccaatccttcccagcg

SEQ ID NO: 284316 - DNA, 50 bp, Artificial
  Synthetic oligonucleotide
aaaccgcaagcccagcgcactacgagaacccgcgccaaaagagcttgtat

SEQ ID NO: 284317 - DNA, 50 bp, Artificial
  Synthetic oligonucleotide
aaaccggacggtgttgcttgagaacgggcgatgggcgtcgcatctccatc

SEQ ID NO: 284318 - DNA, 50 bp, Artificial
  Synthetic oligonucleotide
aaaccgtcatcagactgataagggctggcactaaggcggcggagtgcgga

SEQ ID NO: 284319 - DNA, 56 bp, Artificial
  Synthetic oligonucleotide
gacccatacctcaaatgactggttagccttctccggaaactctatctagcggggta

SEQ ID NO: 284320 - DNA, 50 bp, Artificial
  Synthetic oligonucleotide
aaagggcccactctggctctcattcttggaaggtcgccccaagaacggcg

SEQ ID NO: 284321 - DNA, 50 bp, Artificial
  Synthetic oligonucleotide
aaaggggaacaaccgtttggacagctgggttgacggcccagggctcttgt

SEQ ID NO: 284322 - DNA, 50 bp, Artificial
  Synthetic oligonucleotide
aaagggtggatgccatcggaccgtgagcggttgaaggccgatcgagctag

SEQ ID NO: 284323 - DNA, 50 bp, Artificial
  Synthetic oligonucleotide
aaaggtaccgcaagtggagtttacggtctccgagactccccggcagcgct

SEQ ID NO: 284324 - DNA, 50 bp, Artificial
  Synthetic oligonucleotide
aaaggtccagtgtggactcccggacttggtacaagggcgctcggtagcct

SEQ ID NO: 284325 - DNA, 50 bp, Artificial
  Synthetic oligonucleotide
aaagtcaccgcgaagcttcggcaccgctcacattcgctgggttgtcggtg

SEQ ID NO: 284326 - DNA, 50 bp, Artificial
  Synthetic oligonucleotide
aaagtccgaccgcagagcgaggtagccatccgccacagttgcgagagctc

SEQ ID NO: 284327 - DNA, 50 bp, Artificial
  Synthetic oligonucleotide
aaagtcgcctctcgtcaactgaagcggcgcagtggggtctcgggcagtta

SEQ ID NO: 284328 - DNA, 50 bp, Artificial
  Synthetic oligonucleotide
ttgacgggtaccataagcgaggctgctggtacgttgggtgggtgaaccga

SEQ ID NO: 284329 - DNA, 50 bp, Artificial
  Synthetic oligonucleotide
aaagtctgttgccagagcacgacccaacagttcctccgcggggccgtagt

SEQ ID NO: 284330 - DNA, 55 bp, Artificial
  Synthetic oligonucleotide
acggtcgagggaccaacccctaagctgcttggaatacgtatcatggtaggttcca

SEQ ID NO: 284331 - DNA, 50 bp, Artificial
  Synthetic oligonucleotide
aaagtctttggcaactggctctcgcgcgcaaagggggtccgggatgaaat

SEQ ID NO: 284332 - DNA, 50 bp, Artificial
  Synthetic oligonucleotide
aaagtgacctgtcaacccgccatgtagggcagccccgtgactaagccgcg

SEQ ID NO: 284333 - DNA, 50 bp, Artificial
  Synthetic oligonucleotide
aaagtgcgcttctggactacgccagttgtcgttgccagcaagcatgccct

SEQ ID NO: 284334 - DNA, 50 bp, Artificial
  Synthetic oligonucleotide
aaagtggaccgcaagccactcccccaggtcgcaaggcacatcggacaatc

SEQ ID NO: 284335 - DNA, 50 bp, Artificial
  Synthetic oligonucleotide
aaataatagagcaaacaatcctatccatcctaatataaatactagaagta

SEQ ID NO: 284336 - DNA, 50 bp, Artificial
  Synthetic oligonucleotide
ttgaaataaacacctcgcgtagtcctgtcaatcagtttctatccttggat

SEQ ID NO: 284337 - DNA, 50 bp, Artificial
  Synthetic oligonucleotide
aaatatagctcatgtcccatgccaccgcacccctagcaccactcgcccga

SEQ ID NO: 284338 - DNA, 50 bp, Artificial
  Synthetic oligonucleotide
aaatatcctcgggacgtgagtggccaacgctccctgtaacctggggcgcc

SEQ ID NO: 284339 - DNA, 50 bp, Artificial
  Synthetic oligonucleotide
aaatcccgtggcacgtccgaatccaacggcattggctgcaagcggactgt

SEQ ID NO: 284340 - DNA, 50 bp, Artificial
  Synthetic oligonucleotide
aaatcccgttcacagactccttcccgtcttggctctggggccatccgcaa

SEQ ID NO: 284341 - DNA, 54 bp, Artificial
  Synthetic oligonucleotide
gacccggagcttttacgcttttgcgtccccttcggacgtgttgccgtgtcgcgc

SEQ ID NO: 284342 - DNA, 50 bp, Artificial
  Synthetic oligonucleotide
aaatcggatgcgcttggttgcgacaaggcggctgcgtgttgctttcccgg

SEQ ID NO: 284343 - DNA, 50 bp, Artificial
  Synthetic oligonucleotide
aaatctccccctgtccgcaacattgggcggggttcccgtctgccgagcat

SEQ ID NO: 284344 - DNA, 50 bp, Artificial
  Synthetic oligonucleotide
aaatgagcgtgcagaagccaccacatcctgtcacctccaccacgggagga

SEQ ID NO: 284345 - DNA, 50 bp, Artificial
  Synthetic oligonucleotide
aaatgcggagtcccgtgacttggtctaagcccgaggttgtgctccccgtg

SEQ ID NO: 284346 - DNA, 50 bp, Artificial
  Synthetic oligonucleotide
aaatggcatgtacgggctgtatggagtgggcagtccggtgcgaggtccat

SEQ ID NO: 284347 - DNA, 50 bp, Artificial
  Synthetic oligonucleotide
aaatggccggagaagggccagactagcccggataaggctagaggcgtcgc

SEQ ID NO: 284348 - DNA, 50 bp, Artificial
  Synthetic oligonucleotide
aaattccgagtcccgttcgtcccaacgtccgctatccagccgagctcgta

SEQ ID NO: 284349 - DNA, 50 bp, Artificial
  Synthetic oligonucleotide
aaagacgaccttgaaagcgtacgcaccctggcttggggtcacctgcgggg

SEQ ID NO: 284350 - DNA, 50 bp, Artificial
  Synthetic oligonucleotide
aaagagcgctaaagtgcgccgctccacagtccaacgctgtgcctacaggg

SEQ ID NO: 284351 - DNA, 50 bp, Artificial
  Synthetic oligonucleotide
aaagcacgccgtccgtgcaagccggagtctaggcggttggtcgataagta

SEQ ID NO: 284352 - DNA, 56 bp, Artificial
  Synthetic oligonucleotide
tagactccgaaattcgagtagagacgggatatggtgaatgggggttgttgcggacg

SEQ ID NO: 284353 - DNA, 50 bp, Artificial
  Synthetic oligonucleotide
aaagcaggtatgggcgcctcgatgtctcccccgccgagctttgactcagc

SEQ ID NO: 284354 - DNA, 50 bp, Artificial
  Synthetic oligonucleotide
aaagcatggctgcgaatactcgctaccaacccgctcctcagcgcgactcg

SEQ ID NO: 284355 - DNA, 50 bp, Artificial
  Synthetic oligonucleotide
aaagccacgtgatgagtcgcagccacgggaacagcccaacgatctcgctt

SEQ ID NO: 284356 - DNA, 50 bp, Artificial
  Synthetic oligonucleotide
aaagccccgctcttcctgttgccgtggatacggtcgcgcaactttcatga

SEQ ID NO: 284357 - DNA, 50 bp, Artificial
  Synthetic oligonucleotide
aaagcccctgccgcgtcaagtgcaagccctgaggctactcgtgagccctc

SEQ ID NO: 284358 - DNA, 50 bp, Artificial
  Synthetic oligonucleotide
aaagcccggaccaaagggactgggcgccgtcaagcacgaaaacttgttcc

SEQ ID NO: 284359 - DNA, 50 bp, Artificial
  Synthetic oligonucleotide
ttgctcggtatagctggctgggaggcgggcgtatgcagtcggaacttgta

SEQ ID NO: 284360 - DNA, 50 bp, Artificial
  Synthetic oligonucleotide
aaagccggcccgagtgccaagccggaatgccatgcgatcttgaccatgac

SEQ ID NO: 284361 - DNA, 50 bp, Artificial
  Synthetic oligonucleotide
aaagccggcggaaggagtgctgaagagcaacgggcgacgatcggagtcaa

SEQ ID NO: 284362 - DNA, 50 bp, Artificial
  Synthetic oligonucleotide
aaagccggggaagctgaaccaaccccctgagggccatgcatcgagtcctg

SEQ ID NO: 284363 - DNA, 60 bp, Artificial
  Synthetic oligonucleotide
tcatccggattatgacttctcccatgtgctgcgcccatcggacttccatcgtgaacggaa

SEQ ID NO: 284364 - DNA, 56 bp, Artificial
  Synthetic oligonucleotide
acggtaccaagttgggctgtgtatagagcacggggccagtaaacaccggcgcaaga

SEQ ID NO: 284365 - DNA, 50 bp, Artificial
  Synthetic oligonucleotide
ttgctaccgcgggacttgacggctcaatgtccggaccaggatactcggta

SEQ ID NO: 284366 - DNA, 50 bp, Artificial
  Synthetic oligonucleotide
aaagcctggtctagaagctcggggaccggggcgtttggattccgtcgcat

SEQ ID NO: 284367 - DNA, 50 bp, Artificial
  Synthetic oligonucleotide
aaagcgaactggggagccgaacgaaattggcgcttgggcagaggaatcgc

SEQ ID NO: 284368 - DNA, 50 bp, Artificial
  Synthetic oligonucleotide
aaagcgccaagccccacatgacttcccaatcggttcaggcactctgccgg

SEQ ID NO: 284369 - DNA, 50 bp, Artificial
  Synthetic oligonucleotide
aaagcgtcaggcgcagaaacactcttctccacgcgtccactgaacgccgc

SEQ ID NO: 284370 - DNA, 50 bp, Artificial
  Synthetic oligonucleotide
aaagctcatcctgctccgtggcccccatccaccgttgtcacgtggcattg

SEQ ID NO: 284371 - DNA, 50 bp, Artificial
  Synthetic oligonucleotide
aaaggatgcgtgaggaacgaacgagggtcgttgggccgcttgcgacgcgt

SEQ ID NO: 284372 - DNA, 50 bp, Artificial
  Synthetic oligonucleotide
aaaggcacacagcgaggcagcgaggatcctgagcgatagtagcgcggctc

SEQ ID NO: 284373 - DNA, 50 bp, Artificial
  Synthetic oligonucleotide
aaaggcatcccgcaatgcataccggatcaggttagtgcgtagcccgccct

SEQ ID NO: 284374 - DNA, 50 bp, Artificial
  Synthetic oligonucleotide
aaaggcccaacattcaccgccaggaccctcttgaggactctcgcgcactg

SEQ ID NO: 284375 - DNA, 60 bp, Artificial
  Synthetic oligonucleotide
tagactgttagcctactccgtgcccgactatgggatgttcactcaccggcacgcattgta

SEQ ID NO: 284376 - DNA, 50 bp, Artificial
  Synthetic oligonucleotide
aaaggcgagaccgaagtcgacgctaggaaacgggcacagaactgtgcgga

SEQ ID NO: 284377 - DNA, 50 bp, Artificial
  Synthetic oligonucleotide
aaaggcgcgttagcagcatgcaatctgcgggcagactctcgctggacctt

SEQ ID NO: 284378 - DNA, 50 bp, Artificial
  Synthetic oligonucleotide
ttgcaaattcgatgatatgtacgaaccatacttttgcggcgttgctttct

SEQ ID NO: 284379 - DNA, 50 bp, Artificial
  Synthetic oligonucleotide
aaaggcttcttgtgaccgctcgctgtggcgtacgggggaaatcccgggta

SEQ ID NO: 284380 - DNA, 50 bp, Artificial
  Synthetic oligonucleotide
ttgcaaatcgatacatccaaccctgctccggctatacctccccgtcgata

SEQ ID NO: 284381 - DNA, 50 bp, Artificial
  Synthetic oligonucleotide
aagatgctccaccatctgcgtgcgagggaagtccttgccgggtcccaatg

SEQ ID NO: 284382 - DNA, 50 bp, Artificial
  Synthetic oligonucleotide
aagattcggagactgacgaggatgggcctgagtcgcccacgcgcaaccga

SEQ ID NO: 284383 - DNA, 50 bp, Artificial
  Synthetic oligonucleotide
aagattgcgtcgcaccacagagacgaaggcagagtcggcgatgatcgggg

SEQ ID NO: 284384 - DNA, 50 bp, Artificial
  Synthetic oligonucleotide
aagcaaccagccctcgcacaggccacgagctattaggtaatgggcaccga

SEQ ID NO: 284385 - DNA, 50 bp, Artificial
  Synthetic oligonucleotide
aagcagcccccagacaagtatcgaggccggcatgctaacgagatggagga

SEQ ID NO: 284386 - DNA, 60 bp, Artificial
  Synthetic oligonucleotide
tacgcgcacacccacaattgaattacgggagccattatgacgaatttgactgcattcgta

SEQ ID NO: 284387 - DNA, 50 bp, Artificial
  Synthetic oligonucleotide
aagcaggagggggtctagtactgaaagcggggttacagggggtgtgggct

SEQ ID NO: 284388 - DNA, 50 bp, Artificial
  Synthetic oligonucleotide
aagcagtgcggcgtcaattcggagccctgagctacgcagtccggacatga

SEQ ID NO: 284389 - DNA, 50 bp, Artificial
  Synthetic oligonucleotide
aagcatcccaacgccgccccgcagttggtggtccagggacaaccgtgctg

SEQ ID NO: 284390 - DNA, 50 bp, Artificial
  Synthetic oligonucleotide
aagcatgcccgcgcaaccaagtctacctcagacgtgcacgcccctgcttc

SEQ ID NO: 284391 - DNA, 50 bp, Artificial
  Synthetic oligonucleotide
aagcatggatggtattgcagagcgccctgggtggctcaacacttgctgga

SEQ ID NO: 284392 - DNA, 50 bp, Artificial
  Synthetic oligonucleotide
aagccaacgtaagcgaaagactttgcgcggtcggagggaggcgcgctcta

SEQ ID NO: 284393 - DNA, 50 bp, Artificial
  Synthetic oligonucleotide
aagccaatcgaacgcgctacccgttccccgggcacctcgtcaccaactgt

SEQ ID NO: 284394 - DNA, 50 bp, Artificial
  Synthetic oligonucleotide
aagccaggtatctccacggtggcacttgggcaattgtacgcttcccgcgc

SEQ ID NO: 284395 - DNA, 50 bp, Artificial
  Synthetic oligonucleotide
aagcccaatcagaccatcgggagaggaaggctgcccgacttcggaaacga

SEQ ID NO: 284396 - DNA, 50 bp, Artificial
  Synthetic oligonucleotide
aagcccgctctccttgtgtggccattcgccccgtatgtagcgctgcagag

SEQ ID NO: 284397 - DNA, 54 bp, Artificial
  Synthetic oligonucleotide
ctcacccggtaacacagttttcgcgcggagaatttgagtcggcctttcgctacc

SEQ ID NO: 284398 - DNA, 50 bp, Artificial
  Synthetic oligonucleotide
aagcccggttggtacgacgttcgacacttgcagctcaaccgcaccacagg

SEQ ID NO: 284399 - DNA, 50 bp, Artificial
  Synthetic oligonucleotide
aagccgagccctccggtcggaaacaccgagacccaaaacagctccctagc

SEQ ID NO: 284400 - DNA, 50 bp, Artificial
  Synthetic oligonucleotide
aagccgagccggaactcaaaggtcttcccgaggtccactccccaaccaga

SEQ ID NO: 284401 - DNA, 50 bp, Artificial
  Synthetic oligonucleotide
aagccggtagcagcgtcaccgtccatccagccgttacaaacggacccaga

SEQ ID NO: 284402 - DNA, 50 bp, Artificial
  Synthetic oligonucleotide
aagccggttgcgagcccccatcagagtacctagcaaggctgctactgtgg

SEQ ID NO: 284403 - DNA, 50 bp, Artificial
  Synthetic oligonucleotide
aagccgtggcagtttagtgcatttcgctctcgcaaacgggctgcgccaat

SEQ ID NO: 284404 - DNA, 50 bp, Artificial
  Synthetic oligonucleotide
aagcctccggttctagtcgcaaatcatcgcacgtaaatcggcaatcacta

SEQ ID NO: 284405 - DNA, 50 bp, Artificial
  Synthetic oligonucleotide
aagcctcgcatgtatgaggacggctgggagcctcccgcgattcttacgga

SEQ ID NO: 284406 - DNA, 50 bp, Artificial
  Synthetic oligonucleotide
aagcctggcgggactcgtgccctgcggtgaggccatacgggtatctaggt

SEQ ID NO: 284407 - DNA, 50 bp, Artificial
  Synthetic oligonucleotide
aagcctgtggccctgttcgtggaataggctatcgtcccgtttgctgcccc

SEQ ID NO: 284408 - DNA, 60 bp, Artificial
  Synthetic oligonucleotide
actatcatcctgttcatgtcgttagttgaagtctgtctaataatggggagcgtctcgcaa

SEQ ID NO: 284409 - DNA, 50 bp, Artificial
  Synthetic oligonucleotide
aagcgaaagggcggatttgtcgagacgcaaaaggctgatatgcccccgga

SEQ ID NO: 284410 - DNA, 50 bp, Artificial
  Synthetic oligonucleotide
aagcgcccccttgctcggatcaacgccatagatcccatacgcgtcctcca

SEQ ID NO: 284411 - DNA, 50 bp, Artificial
  Synthetic oligonucleotide
aactcaagcaactgcctcccggaacgagaaacctttggggcccgccttgt

SEQ ID NO: 284412 - DNA, 50 bp, Artificial
  Synthetic oligonucleotide
aactccaagctgtgctgacatgaagcctccgctggagagcccagagacgg

SEQ ID NO: 284413 - DNA, 50 bp, Artificial
  Synthetic oligonucleotide
aactccagagctaccagtagccgatatacttgggcggctcgcggtgcccc

SEQ ID NO: 284414 - DNA, 50 bp, Artificial
  Synthetic oligonucleotide
aactcctgaagtcagtcgcgggtggcattgggatctgcggtgggtcaagg

SEQ ID NO: 284415 - DNA, 50 bp, Artificial
  Synthetic oligonucleotide
aactcgcttggggcgggtggctcgcttctttggaatcggcgtctcacctt

SEQ ID NO: 284416 - DNA, 50 bp, Artificial
  Synthetic oligonucleotide
aactgccaggtccagctgaccgggatgcgattgactcggacggtgtcgac

SEQ ID NO: 284417 - DNA, 50 bp, Artificial
  Synthetic oligonucleotide
aagaacacgaacagaggcggggttgctgacacgagcgtctgggcactcga

SEQ ID NO: 284418 - DNA, 50 bp, Artificial
  Synthetic oligonucleotide
aagaacacggcccctgttccctacacttgctcgtccgcagcagttgacct

SEQ ID NO: 284419 - DNA, 60 bp, Artificial
  Synthetic oligonucleotide
gacacagcactctctcactacccaggaatggcactccaacgcagaatatactaagtacta

SEQ ID NO: 284420 - DNA, 50 bp, Artificial
  Synthetic oligonucleotide
tgcgcacaaacttgcgtcacctgatcactcccagaaggccaaattgtcgc

SEQ ID NO: 284421 - DNA, 50 bp, Artificial
  Synthetic oligonucleotide
aagacagagcaagcctcggcatcgcaataaagcgccggtcctacaggcct

SEQ ID NO: 284422 - DNA, 50 bp, Artificial
  Synthetic oligonucleotide
aagaccacctgcgccggtaccactaacagcccggcccaagagaaagacgg

SEQ ID NO: 284423 - DNA, 50 bp, Artificial
  Synthetic oligonucleotide
aagacccggcctcggcatctcagatggctgatcggagcttcacaactcgc

SEQ ID NO: 284424 - DNA, 50 bp, Artificial
  Synthetic oligonucleotide
aagaccgaagcgcccgcgcgtacacaaccatagtcccaagtccagcagct

SEQ ID NO: 284425 - DNA, 50 bp, Artificial
  Synthetic oligonucleotide
aagacggtcgcggaaaaccaacgccgaaccccgtctgccaatccgatctg

SEQ ID NO: 284426 - DNA, 50 bp, Artificial
  Synthetic oligonucleotide
aagagaccccgtaactccaaacgggcgcccaagcagtcatgttaccccgg

SEQ ID NO: 284427 - DNA, 50 bp, Artificial
  Synthetic oligonucleotide
aagagacgggcgggattggtgcgcataagagcgtggtatcggatctccgc

SEQ ID NO: 284428 - DNA, 50 bp, Artificial
  Synthetic oligonucleotide
aagagattgagcgcaacgtagtagaaagcgggatccgcgggctccgagga

SEQ ID NO: 284429 - DNA, 50 bp, Artificial
  Synthetic oligonucleotide
aagagccacgctcgcaaccagagctgctcctactccagacccatcctcgg

SEQ ID NO: 284430 - DNA, 57 bp, Artificial
  Synthetic oligonucleotide
gtaccgcgcctcaggccggaaggcctttgctagcttctcgagaagggccgagtgagg

SEQ ID NO: 284431 - DNA, 50 bp, Artificial
  Synthetic oligonucleotide
aagagccatgcgacacgcgaggggcaacaggtcagacacactccccaagc

SEQ ID NO: 284432 - DNA, 50 bp, Artificial
  Synthetic oligonucleotide
aagagcggcggtgcaaagcaaagggcgaagggtacacgcaaacccaagac

SEQ ID NO: 284433 - DNA, 50 bp, Artificial
  Synthetic oligonucleotide
aagagcttcgggtatagcttcggcgcgatgagccggacacagaccgcgaa

SEQ ID NO: 284434 - DNA, 50 bp, Artificial
  Synthetic oligonucleotide
aagaggtattcggtccgttgagctcttgtgccgtctgcccttgggcgtcc

SEQ ID NO: 284435 - DNA, 50 bp, Artificial
  Synthetic oligonucleotide
aagagtgcggaagtgccagggcggggtttcagctcctgtgtgccgttagt

SEQ ID NO: 284436 - DNA, 50 bp, Artificial
  Synthetic oligonucleotide
aagatcctgcattcaacgtggctgcggccggttacgaagcgaccgtccgt

SEQ ID NO: 284437 - DNA, 50 bp, Artificial
  Synthetic oligonucleotide
tgcatctcagagagggtctacatcaaccacccccaagcctgagcggggcg

SEQ ID NO: 284438 - DNA, 50 bp, Artificial
  Synthetic oligonucleotide
aagcttcgcctggctaggctgggacggcgagcataccggtacttgcgtga

SEQ ID NO: 284439 - DNA, 50 bp, Artificial
  Synthetic oligonucleotide
aaggaaggcggctcatgggcactgaaacagccgtccgtatgggctaccat

SEQ ID NO: 284440 - DNA, 50 bp, Artificial
  Synthetic oligonucleotide
aaggaggcctccaagtccaacaatcgtcccgtgactcctaccggccccat

SEQ ID NO: 284441 - DNA, 60 bp, Artificial
  Synthetic oligonucleotide
ctcacccacgatgaatgtgggtcagctgaatcctccctggcaactaagcctgttcgatct

SEQ ID NO: 284442 - DNA, 50 bp, Artificial
  Synthetic oligonucleotide
aaggagtcgatcctgatgttcgctgcaggagggggtcagagcctgccctc

SEQ ID NO: 284443 - DNA, 50 bp, Artificial
  Synthetic oligonucleotide
aaggatcgagcatggtttgcgcttcgcggtccgggtcttgcatgtacccg

SEQ ID NO: 284444 - DNA, 50 bp, Artificial
  Synthetic oligonucleotide
aaggatgctcggttggccggaatgcttgtctccctcgcgcctgcgtacct

SEQ ID NO: 284445 - DNA, 50 bp, Artificial
  Synthetic oligonucleotide
aaggcaaatggtcgactcccaacttgtgctcagttactacgaatcctatg

SEQ ID NO: 284446 - DNA, 50 bp, Artificial
  Synthetic oligonucleotide
aaggcaccaactgtttgcgcccactcgccacttttggccccggtgcgttg

SEQ ID NO: 284447 - DNA, 50 bp, Artificial
  Synthetic oligonucleotide
aaggcacttatcggcactcgtctcccccgatcgccgcaggagtcaagcgt

SEQ ID NO: 284448 - DNA, 50 bp, Artificial
  Synthetic oligonucleotide
aaggccacgagacctgcaacggctcatctgtcacccggcccttgtttccg

SEQ ID NO: 284449 - DNA, 50 bp, Artificial
  Synthetic oligonucleotide
aaggcccacggtgaaattcgtcgaggcatgcgcggatgggaagggtttca

SEQ ID NO: 284450 - DNA, 50 bp, Artificial
  Synthetic oligonucleotide
aaggcctagagcgcacaaccgagaataaaggacaagcggcgtctgatggg

SEQ ID NO: 284451 - DNA, 50 bp, Artificial
  Synthetic oligonucleotide
aaggcgtccggtttgggagagtccaccctcgagtctaagttgcggagccc

SEQ ID NO: 284452 - DNA, 60 bp, Artificial
  Synthetic oligonucleotide
tacgctgcaatggaggcctctcttgggctctccgttcttgtcaatctcgcagagtcctgc

SEQ ID NO: 284453 - DNA, 50 bp, Artificial
  Synthetic oligonucleotide
aagggataaccggccgtgaatccacgagttgggcggggagctgagatgtc

SEQ ID NO: 284454 - DNA, 50 bp, Artificial
  Synthetic oligonucleotide
aagggatcgcatatcatcctgggccccacgatcaacacgcaacggtcccc

SEQ ID NO: 284455 - DNA, 50 bp, Artificial
  Synthetic oligonucleotide
aagggcaactggggagacccgggagctgtagacggtcgctccgccgaagg

SEQ ID NO: 284456 - DNA, 50 bp, Artificial
  Synthetic oligonucleotide
aagggcgctaagatcggttacccgagtggctctcccaggcggatccaccc

SEQ ID NO: 284457 - DNA, 50 bp, Artificial
  Synthetic oligonucleotide
tgaacctttagacaagcccaaagatcctatgtccggtatggacgtgcaat

SEQ ID NO: 284458 - DNA, 50 bp, Artificial
  Synthetic oligonucleotide
aagggcgtcggcctttagcgggcgttggagctttagaaaccacaggcgtc

SEQ ID NO: 284459 - DNA, 50 bp, Artificial
  Synthetic oligonucleotide
aaggggccaaggggctgcgttgcaggggtaaagagggccactccttctgc

SEQ ID NO: 284460 - DNA, 50 bp, Artificial
  Synthetic oligonucleotide
aaggggcctcgtcggtcgaacctggtttggttagctggtgtcttctggcg

SEQ ID NO: 284461 - DNA, 50 bp, Artificial
  Synthetic oligonucleotide
aaggggccttgccgtcatcaagacatggggcggtcacggtatcaactcgg

SEQ ID NO: 284462 - DNA, 50 bp, Artificial
  Synthetic oligonucleotide
aaggtctagcccacgccttgcctgctaatctttcccagtcgacccggcta

SEQ ID NO: 284463 - DNA, 59 bp, Artificial
  Synthetic oligonucleotide
actaggcaaggatcactactgttctggtgtacctgaagtattcaaggatgagggactag

SEQ ID NO: 284464 - DNA, 50 bp, Artificial
  Synthetic oligonucleotide
tcttggggtggacgaggtggttaggccccgcaggacaactgctgtgcccc

SEQ ID NO: 284465 - DNA, 50 bp, Artificial
  Synthetic oligonucleotide
aaggttcctcgggggacacaacggcagcttccccgttaggttgcgcgaaa

SEQ ID NO: 284466 - DNA, 50 bp, Artificial
  Synthetic oligonucleotide
aaggttcttgccagccgattccctgtgggcactcgccatggcttccaatg

SEQ ID NO: 284467 - DNA, 50 bp, Artificial
  Synthetic oligonucleotide
tcttctcaagtcccggtggggcgctgaaattagttgcgttgcctcgccag

SEQ ID NO: 284468 - DNA, 50 bp, Artificial
  Synthetic oligonucleotide
aagcgcccggtccggatgttttaggtcgtttccctcccgagtcgcgtaag

SEQ ID NO: 284469 - DNA, 50 bp, Artificial
  Synthetic oligonucleotide
aagcgcgggaaagtagcccagaaaaacgccggtttcccaaagcgtcaccg

SEQ ID NO: 284470 - DNA, 50 bp, Artificial
  Synthetic oligonucleotide
tgaggttcctcgcatggttccattgtgttgcgcccgcgtgtcgcagatgg

SEQ ID NO: 284471 - DNA, 50 bp, Artificial
  Synthetic oligonucleotide
aagcgctcgggacaagagacagggggcctaagtctaccgtagctgcgacg

SEQ ID NO: 284472 - DNA, 50 bp, Artificial
  Synthetic oligonucleotide
aagcgcttaaggtcgttgggcgggccacgctccatctagaggctgactcc

SEQ ID NO: 284473 - DNA, 50 bp, Artificial
  Synthetic oligonucleotide
aagcggaacctgaccgcggaattctccgattctcgaggacagctggccct

SEQ ID NO: 284474 - DNA, 60 bp, Artificial
  Synthetic oligonucleotide
gagcgccctgaactgtagagcgttacagaagactgtcagcggtcgacacaatgtagctgg

SEQ ID NO: 284475 - DNA, 54 bp, Artificial
  Synthetic oligonucleotide
atgtgtgcgtgggacaagtcaagacggttttgggagaaacggccgatttttcta

SEQ ID NO: 284476 - DNA, 60 bp, Artificial
  Synthetic oligonucleotide
actaggaggacagtgattagaatggcattgacaaacgaaggggctgccatgatcgtacgc

SEQ ID NO: 284477 - DNA, 50 bp, Artificial
  Synthetic oligonucleotide
aagcggcccccataactccgttccgacaccagacgccgaatttgccgcct

SEQ ID NO: 284478 - DNA, 50 bp, Artificial
  Synthetic oligonucleotide
aagcggcctccaagccgaccctcttgatccaaccacactccgcgggcacg

SEQ ID NO: 284479 - DNA, 50 bp, Artificial
  Synthetic oligonucleotide
aagcggcgggacgcaatccagagtcgagtcgctatcccccgaacgagccg

SEQ ID NO: 284480 - DNA, 50 bp, Artificial
  Synthetic oligonucleotide
aagcgggttgcgaaagccgagccactatggctagacggagcggactgaaa

SEQ ID NO: 284481 - DNA, 50 bp, Artificial
  Synthetic oligonucleotide
aagcggtgtgtatgccagtgcggctgggtgttagataggacggtcgcgtt

SEQ ID NO: 284482 - DNA, 50 bp, Artificial
  Synthetic oligonucleotide
aagcgtagtgctttcgccgctatatgtgggccagccaccgtccgcattct

SEQ ID NO: 284483 - DNA, 50 bp, Artificial
  Synthetic oligonucleotide
aagcgtcgaacggctccctcgcgtccccgtcttacaaggcgggtctctca

SEQ ID NO: 284484 - DNA, 50 bp, Artificial
  Synthetic oligonucleotide
aagcgtcgggcctcatgcgcctcattgtgacggagataacaggcgccctg

SEQ ID NO: 284485 - DNA, 50 bp, Artificial
  Synthetic oligonucleotide
aagcgtgcaagtcaaccgaggacgcgctcagtcagcggcgaagctcgcga

SEQ ID NO: 284486 - DNA, 50 bp, Artificial
  Synthetic oligonucleotide
aagctatctaggcagtaagagaggcggcagaatagctgccacctcgtaag

SEQ ID NO: 284487 - DNA, 57 bp, Artificial
  Synthetic oligonucleotide
gacaccgcgcgtggcattagtgacgaaacccctttgacattatggtcaactaaagcg

SEQ ID NO: 284488 - DNA, 50 bp, Artificial
  Synthetic oligonucleotide
aagctcccaacccagcattgccccctagactcacccctgcaggctctatt

SEQ ID NO: 284489 - DNA, 50 bp, Artificial
  Synthetic oligonucleotide
aagctctcaacgccggcccttgcagatcccactattcagcaaatggcgcg

SEQ ID NO: 284490 - DNA, 50 bp, Artificial
  Synthetic oligonucleotide
aagctgaaccaaccccctgagggccatgcatcgagtcctggtgctgtcga

SEQ ID NO: 284491 - DNA, 50 bp, Artificial
  Synthetic oligonucleotide
aagctgactccggggttcgtcactggcccggaatatgtggcctgaggcaa

SEQ ID NO: 284492 - DNA, 50 bp, Artificial
  Synthetic oligonucleotide
tgactccatccagtccccattgttgacccgccattcgattctggcgcgga

SEQ ID NO: 284493 - DNA, 50 bp, Artificial
  Synthetic oligonucleotide
tgacgtttagatgtagcgagatgtaaccaatgatcgacggtagccgaaca

SEQ ID NO: 284494 - DNA, 50 bp, Artificial
  Synthetic oligonucleotide
aagctggataacacccagaaggtaaggtgaggcgcctctgcttactaggg

SEQ ID NO: 284495 - DNA, 50 bp, Artificial
  Synthetic oligonucleotide
tgacgctgagaagcaagtggaggcgcggaggcgaagactccaggagccac

SEQ ID NO: 284496 - DNA, 50 bp, Artificial
  Synthetic oligonucleotide
aagctgggccgttgggaatagccgccgctgggaactgttagagcgtacct

SEQ ID NO: 284497 - DNA, 50 bp, Artificial
  Synthetic oligonucleotide
aagctggtgcctgacaggacaactcgagcccgaatgattctggcggggca

SEQ ID NO: 284498 - DNA, 60 bp, Artificial
  Synthetic oligonucleotide
cgattcagcaacggatcgacgagattgtgcaacagaacatgccctctcagagtggtgggc

SEQ ID NO: 284499 - DNA, 50 bp, Artificial
  Synthetic oligonucleotide
aagctggtgggcaatggttgcgccaagtgtcatcggctagtggcttggta

SEQ ID NO: 284500 - DNA, 50 bp, Artificial
  Synthetic oligonucleotide
aagcttatacttcgccgtggaagtgggtcgcagacaacaggcgcgcgacc

SEQ ID NO: 284501 - DNA, 50 bp, Artificial
  Synthetic oligonucleotide
aaccgtgacgagatcccctgaagaaccatctctgccacgccgggactgca

SEQ ID NO: 284502 - DNA, 50 bp, Artificial
  Synthetic oligonucleotide
aaccgtgccacacccgccggctacggactagggtcattccgcagctcaca

SEQ ID NO: 284503 - DNA, 50 bp, Artificial
  Synthetic oligonucleotide
aaccgtgccccggcagtctctgacacagcgataaacgcctttcccgagtg

SEQ ID NO: 284504 - DNA, 50 bp, Artificial
  Synthetic oligonucleotide
aaccgttctctcggacgtgggagctcgggggtgttagcaggcctgatagg

SEQ ID NO: 284505 - DNA, 50 bp, Artificial
  Synthetic oligonucleotide
aacctatcctcagcccaaaagcggcggtggactggggcctcattgcgtcc

SEQ ID NO: 284506 - DNA, 50 bp, Artificial
  Synthetic oligonucleotide
aacctcccggatcggttcccgctgacaatcggcaagtcgcattcacccca

SEQ ID NO: 284507 - DNA, 50 bp, Artificial
  Synthetic oligonucleotide
tggtggtcaagacacggccagtctaggaactgcctcgcaggcagcaacta

SEQ ID NO: 284508 - DNA, 50 bp, Artificial
  Synthetic oligonucleotide
tggtctcgaatgaccttggggtctctggtgaagcgtgccagggcgtggat

SEQ ID NO: 284509 - DNA, 60 bp, Artificial
  Synthetic oligonucleotide
tacggtctactactagatgattctccatagtctaacctcgttgagtatgcatgtaatagc

SEQ ID NO: 284510 - DNA, 50 bp, Artificial
  Synthetic oligonucleotide
aacctccgggcttcaactcaacgcatcctcgtctgtgcctgatctgccct

SEQ ID NO: 284511 - DNA, 50 bp, Artificial
  Synthetic oligonucleotide
aacctcggtggtgaatcgactcagggccgagcttccgtatggccggtggg

SEQ ID NO: 284512 - DNA, 50 bp, Artificial
  Synthetic oligonucleotide
aacctctccacgcgtcgggagccctgctccgctcctcggttccgaacgca

SEQ ID NO: 284513 - DNA, 50 bp, Artificial
  Synthetic oligonucleotide
aacctcttactccagatgagccggcacagaatcggcgtgccccaagccac

SEQ ID NO: 284514 - DNA, 50 bp, Artificial
  Synthetic oligonucleotide
aacctggcaagatgtctacgcacagttctccttgcggccggagagtcccg

SEQ ID NO: 284515 - DNA, 50 bp, Artificial
  Synthetic oligonucleotide
aacctgtgaagcggggccagccattgacctcgggggccaaagacccaacc

SEQ ID NO: 284516 - DNA, 50 bp, Artificial
  Synthetic oligonucleotide
aaccttgcaccagtggtgatgcttgtcggttcttgggctgccggggctgt

SEQ ID NO: 284517 - DNA, 50 bp, Artificial
  Synthetic oligonucleotide
tgggtctttgctcgcactcggttccttgttgtcttatgagctcttagagt

SEQ ID NO: 284518 - DNA, 50 bp, Artificial
  Synthetic oligonucleotide
aaccttgttattggtgtcccacggccgagcgagggggtacctgtcgggtc

SEQ ID NO: 284519 - DNA, 50 bp, Artificial
  Synthetic oligonucleotide
aacgaacatggcctcacggtccgagagccagcatacatctggccgtggtt

SEQ ID NO: 284520 - DNA, 57 bp, Artificial
  Synthetic oligonucleotide
gtcttgccttcttggagcggattaagccaacatggtacgccctgtctaaaaagccca

SEQ ID NO: 284521 - DNA, 50 bp, Artificial
  Synthetic oligonucleotide
aacgaagttcgccaattcgtggcccgtgctcgtacctaccgcccactggt

SEQ ID NO: 284522 - DNA, 50 bp, Artificial
  Synthetic oligonucleotide
aacgaccatagagcggctccaaaacaccctgcacctcacggccaagagct

SEQ ID NO: 284523 - DNA, 50 bp, Artificial
  Synthetic oligonucleotide
aacgacggccactgaccggtcatgtcttggaccaagcttgcgccttggag

SEQ ID NO: 284524 - DNA, 50 bp, Artificial
  Synthetic oligonucleotide
aacgagcaggggtcccggccacatccattgtaggccgtacgggatccgat

SEQ ID NO: 284525 - DNA, 50 bp, Artificial
  Synthetic oligonucleotide
aacgagctattgaaaggccccgttgacccagcacttcgggcctacgggcg

SEQ ID NO: 284526 - DNA, 50 bp, Artificial
  Synthetic oligonucleotide
tggggaactctcccctcgaggaaatcgtagagcgggcatgacggcaggtg

SEQ ID NO: 284527 - DNA, 50 bp, Artificial
  Synthetic oligonucleotide
aacgagtgcacccggcttgtatggcacgtagtgccactcctcatcacggc

SEQ ID NO: 284528 - DNA, 50 bp, Artificial
  Synthetic oligonucleotide
tgggctggcggcgaggctttagcaatgcggaggagtagcccaacgtaggg

SEQ ID NO: 284529 - DNA, 50 bp, Artificial
  Synthetic oligonucleotide
aacgatccacagaaggcaggattgggcctcactcagcgggacgtgcgtgc

SEQ ID NO: 284530 - DNA, 50 bp, Artificial
  Synthetic oligonucleotide
aaccgaacctcgcttgttcccggggtactgtgccgatcactaccgcgtct

SEQ ID NO: 284531 - DNA, 60 bp, Artificial
  Synthetic oligonucleotide
gacagagaccatattcggaccgaatcggaccagggggccatatttgcgatgcagcgccgt

SEQ ID NO: 284532 - DNA, 50 bp, Artificial
  Synthetic oligonucleotide
aaccgaattctccccggcctaaccgtcccctgatccgtctgcgtaccact

SEQ ID NO: 284533 - DNA, 50 bp, Artificial
  Synthetic oligonucleotide
aaccgaccgattctcgggttccgattagggttaggcaccacgggttgccc

SEQ ID NO: 284534 - DNA, 50 bp, Artificial
  Synthetic oligonucleotide
aaccgacgattacccagcggtgcttgtggggtggtggcaaacccccagtc

SEQ ID NO: 284535 - DNA, 50 bp, Artificial
  Synthetic oligonucleotide
aaccgactgagatgcggcccgccaagagacgcgcgctaaacccaaagtag

SEQ ID NO: 284536 - DNA, 50 bp, Artificial
  Synthetic oligonucleotide
aaccgagccatctgccccgtcttcgccccctttgagcgtgacggatatgg

SEQ ID NO: 284537 - DNA, 50 bp, Artificial
  Synthetic oligonucleotide
aaccgagcttgaaccatccagtacaggtcacggaagcgccagggtgcgag

SEQ ID NO: 284538 - DNA, 50 bp, Artificial
  Synthetic oligonucleotide
tgtcgaattaccggccgcgcgagcaaggggaaagagaccaatctggcgtt

SEQ ID NO: 284539 - DNA, 50 bp, Artificial
  Synthetic oligonucleotide
aaccgaggaatgcccctcatgctcagatgccaatgcgcgatccgtgttgc

SEQ ID NO: 284540 - DNA, 50 bp, Artificial
  Synthetic oligonucleotide
aaccgaggcggtccggagatgtgacagcatgacaggccagctagcgtcgc

SEQ ID NO: 284541 - DNA, 50 bp, Artificial
  Synthetic oligonucleotide
aaccgaggctcgcgccgtttagtgtacgccggaactgcagcgtttctgaa

SEQ ID NO: 284542 - DNA, 60 bp, Artificial
  Synthetic oligonucleotide
cggatcaagtatagatcctcgatgcgcttgacagtcacgccttcaatcaaagtccttagc

SEQ ID NO: 284543 - DNA, 50 bp, Artificial
  Synthetic oligonucleotide
aaccgagggaacacgcttgtgagagcaaccggtatgcgtggtggggtgcc

SEQ ID NO: 284544 - DNA, 50 bp, Artificial
  Synthetic oligonucleotide
aaccgatgagggaaagcgcccagtttgccagcgttgtgcgcagtgttcta

SEQ ID NO: 284545 - DNA, 50 bp, Artificial
  Synthetic oligonucleotide
aaccgatgcggtaatgtctgtgcgaagacccaatccgctccgccgcgtaa

SEQ ID NO: 284546 - DNA, 50 bp, Artificial
  Synthetic oligonucleotide
aaccgcacacgacatatcgctgccgcgtcctctcatttggcgactctgga

SEQ ID NO: 284547 - DNA, 50 bp, Artificial
  Synthetic oligonucleotide
tgtcacgagccgcaacggggcccccgccacagcccagtcttatcccaggg

SEQ ID NO: 284548 - DNA, 50 bp, Artificial
  Synthetic oligonucleotide
aaccgcaccattccgaggcctaatgggacttgcaggtggcccaatgaccc

SEQ ID NO: 284549 - DNA, 50 bp, Artificial
  Synthetic oligonucleotide
aaccgcaccggacagtgaggcgtgttggcaggtagcaggaacagtgaacc

SEQ ID NO: 284550 - DNA, 50 bp, Artificial
  Synthetic oligonucleotide
aaccgcagcttgggcggcgagaagcagtaacgacccgtgcctttctaggg

SEQ ID NO: 284551 - DNA, 50 bp, Artificial
  Synthetic oligonucleotide
aaccgccggccgtcctcacagggtatcagcgagctatcaagagtctggga

SEQ ID NO: 284552 - DNA, 50 bp, Artificial
  Synthetic oligonucleotide
aaccgcctaggggcgttagggttccgtcctccgcgtttcaggagcaacca

SEQ ID NO: 284553 - DNA, 52 bp, Artificial
  Synthetic oligonucleotide
acgtttccgaaatcgcggtttcaacactcgaccggccgactataacaagaac

SEQ ID NO: 284554 - DNA, 50 bp, Artificial
  Synthetic oligonucleotide
aaccgcgggtggctgttccgaagcgtcgtggagctttagctcgatcgttt

SEQ ID NO: 284555 - DNA, 50 bp, Artificial
  Synthetic oligonucleotide
aaccggcagacgccgactttccgtacgaagttgccaggctccaagtcgca

SEQ ID NO: 284556 - DNA, 50 bp, Artificial
  Synthetic oligonucleotide
aaccggccatcctcacacacagctacgaacgcagtaccggatggctcctg

SEQ ID NO: 284557 - DNA, 50 bp, Artificial
  Synthetic oligonucleotide
tgtactaagtaggtagtcgtagtagtgactagttaccctgcgccctaacg

SEQ ID NO: 284558 - DNA, 50 bp, Artificial
  Synthetic oligonucleotide
aaccggtacgcttggcggagcgcattgcatccacagcaaatccggctggg

SEQ ID NO: 284559 - DNA, 50 bp, Artificial
  Synthetic oligonucleotide
aaccgtctgcgggatcgacagtctgcctgttggtgccgtcgccaaggtaa

SEQ ID NO: 284560 - DNA, 50 bp, Artificial
  Synthetic oligonucleotide
aacggagtcggatgtggttcgcagctcggcggtcgctaagcgagggcggc

SEQ ID NO: 284561 - DNA, 50 bp, Artificial
  Synthetic oligonucleotide
aacggcacaggcgtaagtccttggaagccggagtttgcctggtcgagacg

SEQ ID NO: 284562 - DNA, 50 bp, Artificial
  Synthetic oligonucleotide
tggatggcccagaaaccgtcccatggttggactcagcctctccacggtta

SEQ ID NO: 284563 - DNA, 50 bp, Artificial
  Synthetic oligonucleotide
aacggccatggtccaaaggcatccgacttcaatgaggcgtggcaaggcgg

SEQ ID NO: 284564 - DNA, 55 bp, Artificial
  Synthetic oligonucleotide
tactaacccttatacggccagtcgaaatcgaatcgacacacttcgtgtggaaaac

SEQ ID NO: 284565 - DNA, 50 bp, Artificial
  Synthetic oligonucleotide
aacggcccctctgtaagcgacacgccactcagctacgacttccccgaagg

SEQ ID NO: 284566 - DNA, 50 bp, Artificial
  Synthetic oligonucleotide
aacggcgggggacaagaaggtcaccatacaagttcaggaggacagcccga

SEQ ID NO: 284567 - DNA, 50 bp, Artificial
  Synthetic oligonucleotide
aacggcggtggggatttcgtccaactggatctgggtaagcctgcctgcaa

SEQ ID NO: 284568 - DNA, 50 bp, Artificial
  Synthetic oligonucleotide
aacgggcagaaaccaagggtcccgccgtctggtgactatatggcgagggc

SEQ ID NO: 284569 - DNA, 50 bp, Artificial
  Synthetic oligonucleotide
aacgggccagtgtctcacggagccacgggaacggaggacgattctgagcc

SEQ ID NO: 284570 - DNA, 50 bp, Artificial
  Synthetic oligonucleotide
aacgggccttgggtgacagcactgtgttccgccattatttcgcccgcgtg

SEQ ID NO: 284571 - DNA, 50 bp, Artificial
  Synthetic oligonucleotide
aacggggagtcgcagtcgtcgatgcaacggagaccggtgtctcattgccc

SEQ ID NO: 284572 - DNA, 50 bp, Artificial
  Synthetic oligonucleotide
aacggggccccatagccaagagtgccggagatcagagctgggtgggccaa

SEQ ID NO: 284573 - DNA, 50 bp, Artificial
  Synthetic oligonucleotide
aacgggtcctgacgatatgggataacgcgcgccgggttacgaaagagcgc

SEQ ID NO: 284574 - DNA, 50 bp, Artificial
  Synthetic oligonucleotide
aacgggtcggtgctcattccgaagttgcgtggctgttgtagggctagcgg

SEQ ID NO: 284575 - DNA, 60 bp, Artificial
  Synthetic oligonucleotide
tactacagtttaatatagtctacaactgatgccataatgagtcacttggattaatatgct

SEQ ID NO: 284576 - DNA, 50 bp, Artificial
  Synthetic oligonucleotide
tgcttggactcgataggtagttccgacggcggcttaggttgaggctagaa

SEQ ID NO: 284577 - DNA, 50 bp, Artificial
  Synthetic oligonucleotide
aacggtccttttctagtgcgagaagccgtggcgacgccaatccaccgaga

SEQ ID NO: 284578 - DNA, 50 bp, Artificial
  Synthetic oligonucleotide
aacggtgttagggagccggtcgtgcgtgttctgcgcgctttggaggaaga

SEQ ID NO: 284579 - DNA, 50 bp, Artificial
  Synthetic oligonucleotide
aacgtcccgtcgggcctgagtcccggaaagtcggcgatcaacataacggc

SEQ ID NO: 284580 - DNA, 50 bp, Artificial
  Synthetic oligonucleotide
aacgtcctccgcacacggctacaggcccagggcactattctccaccccgc

SEQ ID NO: 284581 - DNA, 50 bp, Artificial
  Synthetic oligonucleotide
aacgtgcaagcaagggggacataaaattgaacgcatgtgtacttttgacc

SEQ ID NO: 284582 - DNA, 50 bp, Artificial
  Synthetic oligonucleotide
tgctccattaccacgatgtagtctgatgatgtagtatactagatatgtca

SEQ ID NO: 284583 - DNA, 50 bp, Artificial
  Synthetic oligonucleotide
aacgtgcgctgtgtgcaatctcccagagagcaccggaaaagctcgctccg

SEQ ID NO: 284584 - DNA, 50 bp, Artificial
  Synthetic oligonucleotide
aacgtttgtgggcgggctcggggcacctttgtcttcatagggacaccggc

SEQ ID NO: 284585 - DNA, 50 bp, Artificial
  Synthetic oligonucleotide
aactaatcgcgtggatcgcgtgtaggatcgaatgaggcgcccccggtgga

SEQ ID NO: 284586 - DNA, 60 bp, Artificial
  Synthetic oligonucleotide
tcatcgctccgttatggaaggcctagaggccacggttccctggcaagcagtcgctggatt

SEQ ID NO: 284587 - DNA, 50 bp, Artificial
  Synthetic oligonucleotide
tactattaagggccccgtctaaggccctttctaggccctatttaaggccc

SEQ ID NO: 284588 - DNA, 50 bp, Artificial
  Synthetic oligonucleotide
tgcgtgggatacggaacgatcaccatgctcccggtggctcacgcgaagtt

SEQ ID NO: 284589 - DNA, 50 bp, Artificial
  Synthetic oligonucleotide
aactatgggccgacctttcggggcctggaccgcatcactgtctccaggga

SEQ ID NO: 284590 - DNA, 50 bp, Artificial
  Synthetic oligonucleotide
aacgcaaatcgcacccaccgacgaatgggcatttgtgcttcgcaacgcac

SEQ ID NO: 284591 - DNA, 50 bp, Artificial
  Synthetic oligonucleotide
aacgcagagaagctctaggtcggaccgcagaggtaccgcgcagctgacat

SEQ ID NO: 284592 - DNA, 50 bp, Artificial
  Synthetic oligonucleotide
aacgcataacccgcgtcccgaggattatcccgtgatgccctgcgagacga

SEQ ID NO: 284593 - DNA, 50 bp, Artificial
  Synthetic oligonucleotide
aacgccccggatgctctctgtgtgtaaggagggggtcgaggtgcgtctat

SEQ ID NO: 284594 - DNA, 50 bp, Artificial
  Synthetic oligonucleotide
aacgccggcccttgcagatcccactattcagcaaatggcgcgacgccgct

SEQ ID NO: 284595 - DNA, 50 bp, Artificial
  Synthetic oligonucleotide
aacgccgggcattttggaccccgaactcctccctacgaagcacaacaccg

SEQ ID NO: 284596 - DNA, 50 bp, Artificial
  Synthetic oligonucleotide
aacgccgttcgtccctttgcgctgggtcctgatgccagtgcgccgacaac

SEQ ID NO: 284597 - DNA, 50 bp, Artificial
  Synthetic oligonucleotide
aacgccttattgcgtcaagaatggctctcttgggcccctggtccctccgg

SEQ ID NO: 284598 - DNA, 60 bp, Artificial
  Synthetic oligonucleotide
gacatcgctctcaggacaggctgagaaccccgcagcttggagagttcgatacgcagcatt

SEQ ID NO: 284599 - DNA, 50 bp, Artificial
  Synthetic oligonucleotide
aacgcgcacagaagtatgtcgaacaacgcgcacggggagcctatctggcg

SEQ ID NO: 284600 - DNA, 50 bp, Artificial
  Synthetic oligonucleotide
aacgcgcctactgcgtccagaatcccatccacgggaacatctcgtccaga

SEQ ID NO: 284601 - DNA, 50 bp, Artificial
  Synthetic oligonucleotide
aacgcgcgggggagacagcgagtgatgctgcgtcgggattgttccagggg

SEQ ID NO: 284602 - DNA, 50 bp, Artificial
  Synthetic oligonucleotide
aacgcgggggaaccgagtgaaggcttgtttcctaacgccacggccgtcaa

SEQ ID NO: 284603 - DNA, 50 bp, Artificial
  Synthetic oligonucleotide
aacgcgtatgtgtcgcaggggtactggcctagggttcggcggtaactccg

SEQ ID NO: 284604 - DNA, 50 bp, Artificial
  Synthetic oligonucleotide
aacgcgtcatctacagccccaggcgttgctggtccacttgcgtcttccgc

SEQ ID NO: 284605 - DNA, 50 bp, Artificial
  Synthetic oligonucleotide
aacgctaaccgtcctagtttggggtccgggctcccgctcccgattgtaca

SEQ ID NO: 284606 - DNA, 50 bp, Artificial
  Synthetic oligonucleotide
aacgctcattctacgtgcaagcgatgccagtttggaggcccccggaaagc

SEQ ID NO: 284607 - DNA, 50 bp, Artificial
  Synthetic oligonucleotide
aacgctcgggacttgacgtctgtttgggtggcgcccgttcgccatgtgtc

SEQ ID NO: 284608 - DNA, 50 bp, Artificial
  Synthetic oligonucleotide
tggcgcggagctttccacggtacgtcgcatggcgttctctgcattccgaa

SEQ ID NO: 284609 - DNA, 60 bp, Artificial
  Synthetic oligonucleotide
tactcaagagtaaatagtatatccgagcagttgctgcccgacgataaatcatgcgcgaca

SEQ ID NO: 284610 - DNA, 50 bp, Artificial
  Synthetic oligonucleotide
aacgctgacaggggaactacaggctgccgctccgcgtagctatcgagata

SEQ ID NO: 284611 - DNA, 50 bp, Artificial
  Synthetic oligonucleotide
tggcctgcccagtcgaatcagtctcgttccctggaagcgccctgacagag

SEQ ID NO: 284612 - DNA, 50 bp, Artificial
  Synthetic oligonucleotide
aacgctggaaaatctcaagcccgccaaacccaggccttctcaccgaaccc

SEQ ID NO: 284613 - DNA, 50 bp, Artificial
  Synthetic oligonucleotide
aacgcttcggtgactcgagggtcgggggtgaggtgtggtactgatgtccc

SEQ ID NO: 284614 - DNA, 50 bp, Artificial
  Synthetic oligonucleotide
tggccgctctaatggcccgcgaccccgggtcctccatctatcgaagtttt

SEQ ID NO: 284615 - DNA, 50 bp, Artificial
  Synthetic oligonucleotide
aacggaaaggcgtctcgcccgacccccatcagtacggatcgctcgagaga

SEQ ID NO: 284616 - DNA, 50 bp, Artificial
  Synthetic oligonucleotide
tggccgaagttgctcaccattgctattggcaagtgttttgctcacatagc

SEQ ID NO: 284617 - DNA, 50 bp, Artificial
  Synthetic oligonucleotide
aacggactgaggatcctcgactctctgggcgtgtacagccgcatccgacc

SEQ ID NO: 284618 - DNA, 50 bp, Artificial
  Synthetic oligonucleotide
aacggactgctccagcgctacccctgtcccattcgggcgtggtagaggta

SEQ ID NO: 284619 - DNA, 50 bp, Artificial
  Synthetic oligonucleotide
aacggagatcggggcagggcccgaagttgcgtgactctatagggttcgga

SEQ ID NO: 284620 - DNA, 59 bp, Artificial
  Synthetic oligonucleotide
aggggtgtgcctcataaaatcgctgtatcagtcctttactggaatgacagcattagggg

SEQ ID NO: 284621 - DNA, 50 bp, Artificial
  Synthetic oligonucleotide
catgacaccgattgtcgcgggacaacgagggcgctaataacgtgggcggg

SEQ ID NO: 284622 - DNA, 50 bp, Artificial
  Synthetic oligonucleotide
cattaattcagtctcgactcctcactcctccgcgctgtcataccacaagt

SEQ ID NO: 284623 - DNA, 50 bp, Artificial
  Synthetic oligonucleotide
cattaccggctaatgctcatgtacgcggaccataccatcatgagttatga

SEQ ID NO: 284624 - DNA, 50 bp, Artificial
  Synthetic oligonucleotide
cattattgtcggaatttcgacagcataaaccagtggacgaaagaaaatgg

SEQ ID NO: 284625 - DNA, 50 bp, Artificial
  Synthetic oligonucleotide
cattctccgaccctcgttagacgggccgatgccaccactcgccagatggt

SEQ ID NO: 284626 - DNA, 50 bp, Artificial
  Synthetic oligonucleotide
ggtgggattcgcgggaggagagggggcaaccgaagcagttgagtgacatt

SEQ ID NO: 284627 - DNA, 50 bp, Artificial
  Synthetic oligonucleotide
ccaaagagcggtgggaactccgcgcgatacccttcgggtgccatgtgagc

SEQ ID NO: 284628 - DNA, 50 bp, Artificial
  Synthetic oligonucleotide
ccaacacgattgttgcagcctggacgcagaacgcaacggagcgtctcgtc

SEQ ID NO: 284629 - DNA, 50 bp, Artificial
  Synthetic oligonucleotide
ccaatatcaagatagacctgtgaaccctggactaagtagtactcctccgc

SEQ ID NO: 284630 - DNA, 50 bp, Artificial
  Synthetic oligonucleotide
ccaccgttgtcacgtggcattgacagggatctggccgcatctcggactga

SEQ ID NO: 284631 - DNA, 57 bp, Artificial
  Synthetic oligonucleotide
agggtgagcgaaaggatgcgagaattaatagataggcaacaaagtggtcataaagtt

SEQ ID NO: 284632 - DNA, 50 bp, Artificial
  Synthetic oligonucleotide
ggtgcgagtgagccgctcaggctgtttgaaccttgcagtcgcgcaatgat

SEQ ID NO: 284633 - DNA, 50 bp, Artificial
  Synthetic oligonucleotide
ggtgcgacgcgattaagagacttcaggcgctggagggagttccatgcggc

SEQ ID NO: 284634 - DNA, 50 bp, Artificial
  Synthetic oligonucleotide
ccacgcggcgatgtgcggtactgagcaccattgcgaccaaaaggacctga

SEQ ID NO: 284635 - DNA, 50 bp, Artificial
  Synthetic oligonucleotide
ccacttacggaaccttggccgcgccacagcgatcaataacaggtggcagc

SEQ ID NO: 284636 - DNA, 50 bp, Artificial
  Synthetic oligonucleotide
ccagcactctgtccttatgggcccaaagccgtcacatcaagccaccacgc

SEQ ID NO: 284637 - DNA, 50 bp, Artificial
  Synthetic oligonucleotide
ccaggagttccaccagtcacttttagtctggaatattctgctcatctctg

SEQ ID NO: 284638 - DNA, 50 bp, Artificial
  Synthetic oligonucleotide
ccagtccccattgttgacccgccattcgattctggcgcggagctttccac

SEQ ID NO: 284639 - DNA, 50 bp, Artificial
  Synthetic oligonucleotide
ccatcagccgactctttccactggcgccccggtgtagcagccataggttc

SEQ ID NO: 284640 - DNA, 50 bp, Artificial
  Synthetic oligonucleotide
ggtgaagttccggggaagcgtcgagatgacaagaagcggggaaggcggga

SEQ ID NO: 284641 - DNA, 50 bp, Artificial
  Synthetic oligonucleotide
ccatgctatatcgaggtatctatgctgtactccgtatttgcagacgaaag

SEQ ID NO: 284642 - DNA, 60 bp, Artificial
  Synthetic oligonucleotide
gtactgagtcggtggcatgtctatttcgtggcttggatctatttccactgcaggcggctc

SEQ ID NO: 284643 - DNA, 50 bp, Artificial
  Synthetic oligonucleotide
cccaactttctggcccctaatggtaccccggagattcccagtagcgcccc

SEQ ID NO: 284644 - DNA, 50 bp, Artificial
  Synthetic oligonucleotide
cccaccagccggagcatgcattcagggagcaacagtggtcccatcacaac

SEQ ID NO: 284645 - DNA, 50 bp, Artificial
  Synthetic oligonucleotide
cccacggggaactgtcttggggcactacagccgtttcatagcggactgcg

SEQ ID NO: 284646 - DNA, 50 bp, Artificial
  Synthetic oligonucleotide
cccagaccagtggaacgcactcagggcagcgcgcacaacagacatgcaat

SEQ ID NO: 284647 - DNA, 50 bp, Artificial
  Synthetic oligonucleotide
cagagggttaagatgtctggtggccgcgcttcgtaaccgcggatgcgacg

SEQ ID NO: 284648 - DNA, 50 bp, Artificial
  Synthetic oligonucleotide
cagagtggtgcgcgtcctttttgttgcggcgctcgtgtagctgacccact

SEQ ID NO: 284649 - DNA, 50 bp, Artificial
  Synthetic oligonucleotide
cagagtgtgttcgctaccgggactaatgaccaagtcgaacctgacatcga

SEQ ID NO: 284650 - DNA, 50 bp, Artificial
  Synthetic oligonucleotide
cagcaccccacgagtcagcgtccatagttgggaggccaatgagcatgccc

SEQ ID NO: 284651 - DNA, 50 bp, Artificial
  Synthetic oligonucleotide
cagcagcgtccggggtgtttgcattgagatccgcccgtgcgagtagttgg

SEQ ID NO: 284652 - DNA, 50 bp, Artificial
  Synthetic oligonucleotide
gtaacaagagtagttgtctcccaaccaagacagaaagcattgaggttacg

SEQ ID NO: 284653 - DNA, 56 bp, Artificial
  Synthetic oligonucleotide
cacccggtaccttaaatatatgtgggttaccatagaagaacatattatgtctccca

SEQ ID NO: 284654 - DNA, 50 bp, Artificial
  Synthetic oligonucleotide
gtaaagacgattgcatattagttgcgactattaaggtgcgatccttcgcg

SEQ ID NO: 284655 - DNA, 50 bp, Artificial
  Synthetic oligonucleotide
cagcctggaggactcccggaggttctatatccgagggtgctcgcagtgcc

SEQ ID NO: 284656 - DNA, 50 bp, Artificial
  Synthetic oligonucleotide
cagcgagatacgaggtgcccgcttggcctgcagtgacgcctgcaagctgc

SEQ ID NO: 284657 - DNA, 50 bp, Artificial
  Synthetic oligonucleotide
ggtttgcgcgactacgtccatcgggactgtgcgacctctcagtgacacgg

SEQ ID NO: 284658 - DNA, 50 bp, Artificial
  Synthetic oligonucleotide
cagctagcaagctggacgcttccccgaagattgtccccagcgagcctcag

SEQ ID NO: 284659 - DNA, 50 bp, Artificial
  Synthetic oligonucleotide
cagggccaggcatcaagttcccccgccctgaggccacaacactagactat

SEQ ID NO: 284660 - DNA, 50 bp, Artificial
  Synthetic oligonucleotide
cagggttaacggcccggacccggaatcctcggacgcctctcggaggtccg

SEQ ID NO: 284661 - DNA, 50 bp, Artificial
  Synthetic oligonucleotide
cagtccccatacggcagcatatctcacccacccgagccttcagtcgcgca

SEQ ID NO: 284662 - DNA, 50 bp, Artificial
  Synthetic oligonucleotide
cagtctaaccggggtccctggcaagtgcttcggcggtgccatctctagcc

SEQ ID NO: 284663 - DNA, 50 bp, Artificial
  Synthetic oligonucleotide
cagtggcagccgtaccaggaccccttgatgggacgtcctgcgcagttcaa

SEQ ID NO: 284664 - DNA, 56 bp, Artificial
  Synthetic oligonucleotide
attcgggaacctgacgtaggtggatattaccgtctccaacgctatagattaaatga

SEQ ID NO: 284665 - DNA, 50 bp, Artificial
  Synthetic oligonucleotide
ggttgactacctctggaacggcaccggaggagtctggcccgagggcccgc

SEQ ID NO: 284666 - DNA, 50 bp, Artificial
  Synthetic oligonucleotide
cagtgtcaggtctgagtccgtctagtgtggcttggcccggggcgttcaaa

SEQ ID NO: 284667 - DNA, 50 bp, Artificial
  Synthetic oligonucleotide
cagttacatcaggctgggtgggagtttgcggtgggccggttagcatggta

SEQ ID NO: 284668 - DNA, 50 bp, Artificial
  Synthetic oligonucleotide
cagttagcccttatggcacgacgagccccggaattccgctacctgcaggc

SEQ ID NO: 284669 - DNA, 50 bp, Artificial
  Synthetic oligonucleotide
cagtttcgtgcacgactccgactccatttctgctttgatgggctgcgagt

SEQ ID NO: 284670 - DNA, 50 bp, Artificial
  Synthetic oligonucleotide
catactccctactcactaactaactaggtactagatggacgactaggatg

SEQ ID NO: 284671 - DNA, 50 bp, Artificial
  Synthetic oligonucleotide
catagtcggcgccacacagatcgttagtgtctctgcttgaaggcttgacc

SEQ ID NO: 284672 - DNA, 50 bp, Artificial
  Synthetic oligonucleotide
catatccggtgagagcaatgtgccctcttctccgaccggccctccgcgct

SEQ ID NO: 284673 - DNA, 50 bp, Artificial
  Synthetic oligonucleotide
catccaactcaaagaaaaacattgccgacgcgagaatggtcctcacaagc

SEQ ID NO: 284674 - DNA, 50 bp, Artificial
  Synthetic oligonucleotide
catcgcgatattttacgggcgccttgtgactttatcggattaaaggagga

SEQ ID NO: 284675 - DNA, 58 bp, Artificial
  Synthetic oligonucleotide
caccctgtctgggcaaactaccgtgccctctgccttatggctatatctccgtccgtta

SEQ ID NO: 284676 - DNA, 50 bp, Artificial
  Synthetic oligonucleotide
ccgccagcgtagactccgctcccatactctttgtcacaggtccccgtgga

SEQ ID NO: 284677 - DNA, 50 bp, Artificial
  Synthetic oligonucleotide
ccgcccatatcgactctgtcctgtccgtttctgcgctgaaccctgaggcg

SEQ ID NO: 284678 - DNA, 50 bp, Artificial
  Synthetic oligonucleotide
ccgccccaagcgggaacgtagtgagcgacgcaaaagcattgtggctgcta

SEQ ID NO: 284679 - DNA, 50 bp, Artificial
  Synthetic oligonucleotide
ccgccggaaatcataccgctcacacactcctcgcctcgcccatgggaacg

SEQ ID NO: 284680 - DNA, 50 bp, Artificial
  Synthetic oligonucleotide
ccgcgtttaggcacaccccctggtgttatccacccgtggcgtatcaccat

SEQ ID NO: 284681 - DNA, 50 bp, Artificial
  Synthetic oligonucleotide
ccgctacccacatgcggtggcctggttgctagtcggacaaccgagcacgg

SEQ ID NO: 284682 - DNA, 50 bp, Artificial
  Synthetic oligonucleotide
ccgctagacttgcagttgagcatagttgccccacggcctgtgaggtaaat

SEQ ID NO: 284683 - DNA, 50 bp, Artificial
  Synthetic oligonucleotide
ccgctcttctaggggtctctacctgtcgcaacggggccaggattgacgca

SEQ ID NO: 284684 - DNA, 50 bp, Artificial
  Synthetic oligonucleotide
ccgctgccgacccgcttaagacccactggcgcatcgtggattaatgttga

SEQ ID NO: 284685 - DNA, 50 bp, Artificial
  Synthetic oligonucleotide
ccgctgtggtacctgtaggtccccggcaggagggcggttggacggcttcg

SEQ ID NO: 284686 - DNA, 59 bp, Artificial
  Synthetic oligonucleotide
agacgagcgagagagaacctcgccgaatatccgagcctgagggtcgagataagacttcc

SEQ ID NO: 284687 - DNA, 50 bp, Artificial
  Synthetic oligonucleotide
ccgcttgtcgggatcagggcgtcttgaacgcaacccgggaacgtatgcca

SEQ ID NO: 284688 - DNA, 50 bp, Artificial
  Synthetic oligonucleotide
ccggcaggctgaagggcatacagtctcggcgtttcggtatcgggagcatg

SEQ ID NO: 284689 - DNA, 50 bp, Artificial
  Synthetic oligonucleotide
ccggcatgcagctgacagcctcgcagacgaacatgataagcagcgggaga

SEQ ID NO: 284690 - DNA, 50 bp, Artificial
  Synthetic oligonucleotide
ccggcatgctcattcccttgtgagcgtccgaaaccgtgtggccatcctca

SEQ ID NO: 284691 - DNA, 50 bp, Artificial
  Synthetic oligonucleotide
ccggccaaggcgggtaatactcggtgatggccactgccatacctgacgga

SEQ ID NO: 284692 - DNA, 50 bp, Artificial
  Synthetic oligonucleotide
ccgggcacagcgaacgggaggatacgagtccacgggatggagaagctgta

SEQ ID NO: 284693 - DNA, 50 bp, Artificial
  Synthetic oligonucleotide
ccgggcactgctaacaaggagtcgaaccctgctcgccactcctacccaag

SEQ ID NO: 284694 - DNA, 50 bp, Artificial
  Synthetic oligonucleotide
gggtctgaaaagggccacgatgcccaagcacgctcgcaggacacagtgag

SEQ ID NO: 284695 - DNA, 50 bp, Artificial
  Synthetic oligonucleotide
ccgggctgcggttcgagtgtccaccgcgtggaggttaatctcgggcaaaa

SEQ ID NO: 284696 - DNA, 50 bp, Artificial
  Synthetic oligonucleotide
ccggggtaagagctccgcaatcccaccatcgcccgtggagcctttctcgg

SEQ ID NO: 284697 - DNA, 53 bp, Artificial
  Synthetic oligonucleotide
cgaaacatatatatctaaggagttcggggaactcgaatccctttatttcgatt

SEQ ID NO: 284698 - DNA, 57 bp, Artificial
  Synthetic oligonucleotide
taagctgactcgcgcacgaaccgatttggtcgttctcctgtaacctcgtccggtaca

SEQ ID NO: 284699 - DNA, 50 bp, Artificial
  Synthetic oligonucleotide
ccggtcgccagaaccgacgggggttcagtggtcagtgagagtcactgcag

SEQ ID NO: 284700 - DNA, 50 bp, Artificial
  Synthetic oligonucleotide
ccggtctcccggagtactgcgccgtctacgttaacgtgagctcgtctgct

SEQ ID NO: 284701 - DNA, 50 bp, Artificial
  Synthetic oligonucleotide
ccggttcccactggccggacgctgatcgggggtgtgcgaagagcagaggg

SEQ ID NO: 284702 - DNA, 50 bp, Artificial
  Synthetic oligonucleotide
cctacatccgcaaccgtggaggtgcagcgaacgggtccgggggttgccct

SEQ ID NO: 284703 - DNA, 50 bp, Artificial
  Synthetic oligonucleotide
cctacggtcgttataccgccaggtccgagctaggcgcagctgggtaagca

SEQ ID NO: 284704 - DNA, 50 bp, Artificial
  Synthetic oligonucleotide
cccagaccatcacgcttgcctcgttgtcggtccgcaagatgggccttcaa

SEQ ID NO: 284705 - DNA, 50 bp, Artificial
  Synthetic oligonucleotide
cccagatgtgtactccatatccgtttttgacatctgttctcgtcaacctc

SEQ ID NO: 284706 - DNA, 50 bp, Artificial
  Synthetic oligonucleotide
cccagcggacaggcgcccaagttcccagcgatgctttcgtgacgatgtaa

SEQ ID NO: 284707 - DNA, 50 bp, Artificial
  Synthetic oligonucleotide
cccaggctacgaaaagcgaccaccgcacctatccacacacccgatcaggg

SEQ ID NO: 284708 - DNA, 50 bp, Artificial
  Synthetic oligonucleotide
cccagggggtggagcatactggcgctgagcaaggagatcaacagatggga

SEQ ID NO: 284709 - DNA, 60 bp, Artificial
  Synthetic oligonucleotide
agacgacagagctgtgcaatgaggatatcacaagtagaaatcgagttgcaatgcaggtcg

SEQ ID NO: 284710 - DNA, 50 bp, Artificial
  Synthetic oligonucleotide
ccccacattggctgacacctccgccggacttgtgcagtgcaagcttgagt

SEQ ID NO: 284711 - DNA, 50 bp, Artificial
  Synthetic oligonucleotide
ccccactagcctggtcagaggcgtggtacagggcgcaagggtggtctgcc

SEQ ID NO: 284712 - DNA, 50 bp, Artificial
  Synthetic oligonucleotide
ccccgacgggcgcgtacgatttcgaccacaggactacccctgaggcagtc

SEQ ID NO: 284713 - DNA, 50 bp, Artificial
  Synthetic oligonucleotide
cccctcttgaggcctctagttcgctcatcaaccgacaaccgttgcccgga

SEQ ID NO: 284714 - DNA, 50 bp, Artificial
  Synthetic oligonucleotide
cccctggtgggcttctcggtaggctccaacgccgaacggggtttcattgg

SEQ ID NO: 284715 - DNA, 50 bp, Artificial
  Synthetic oligonucleotide
cccgaaagaaaccacccctctgcagtagcgtggattgtgggctcgggggc

SEQ ID NO: 284716 - DNA, 50 bp, Artificial
  Synthetic oligonucleotide
cccgatacgttccagcttgatgcggagcgaatgcactgccccgggccctc

SEQ ID NO: 284717 - DNA, 50 bp, Artificial
  Synthetic oligonucleotide
cccgcaggacaacaggacggatttttgccgttccacgcctagcgtgcctc

SEQ ID NO: 284718 - DNA, 50 bp, Artificial
  Synthetic oligonucleotide
cccgcgctgttggatggacgtcccgagaaaccaattcacggtgtcagcta

SEQ ID NO: 284719 - DNA, 50 bp, Artificial
  Synthetic oligonucleotide
cccgggggcgcttccccgcattgcgaggacttgacggaccagagctagac

SEQ ID NO: 284720 - DNA, 59 bp, Artificial
  Synthetic oligonucleotide
taaggacgaggagctcactaaataccgagaaagtcaaaatacgtcagatgtaggcagac

SEQ ID NO: 284721 - DNA, 50 bp, Artificial
  Synthetic oligonucleotide
ccctactccgattgagcggaaacggaccacttggcgctcctgggtccagt

SEQ ID NO: 284722 - DNA, 50 bp, Artificial
  Synthetic oligonucleotide
ccctcaccatggccatctcgcagctcacccccaggtcaatggtcacatgc

SEQ ID NO: 284723 - DNA, 50 bp, Artificial
  Synthetic oligonucleotide
ccctcggggcagtaccaactcaggctgcaacagtatggcgccggacgatt

SEQ ID NO: 284724 - DNA, 50 bp, Artificial
  Synthetic oligonucleotide
ggtaccttcttagctggccattcccacgtagccttgcctagccgcggagg

SEQ ID NO: 284725 - DNA, 50 bp, Artificial
  Synthetic oligonucleotide
ccctgacggagaagttgggactgagcggaaaggtcacggaggtggttcgc

SEQ ID NO: 284726 - DNA, 50 bp, Artificial
  Synthetic oligonucleotide
ccctgtgggttccgagggcttgcacgaacccaagtgtttaacgcaacggc

SEQ ID NO: 284727 - DNA, 50 bp, Artificial
  Synthetic oligonucleotide
ccgacagtccctggtcgctgaggttgccacggtccacaccatcgtcatgt

SEQ ID NO: 284728 - DNA, 50 bp, Artificial
  Synthetic oligonucleotide
ccgaccccgtcactgctgcatcttggtgcgtgctctgtcgacatacccag

SEQ ID NO: 284729 - DNA, 50 bp, Artificial
  Synthetic oligonucleotide
ccgcatttggcgagcgattgttgcagtaagaccgcttcgaggctgcacga

SEQ ID NO: 284730 - DNA, 50 bp, Artificial
  Synthetic oligonucleotide
atcctggggaagcttgttccgccaaggccccagtaaggtgcggacgcgtg

SEQ ID NO: 284731 - DNA, 60 bp, Artificial
  Synthetic oligonucleotide
gggctattgcttacatattctgtctccattgccggtgccgactcattcgcagcaccggta

SEQ ID NO: 284732 - DNA, 50 bp, Artificial
  Synthetic oligonucleotide
atcgccgtccgtaaggcctgagacgacagtgccgagaacgcttgcgcgcg

SEQ ID NO: 284733 - DNA, 50 bp, Artificial
  Synthetic oligonucleotide
atcgcgcctccggagaccggggttggaatactggccgagtccgactctcc

SEQ ID NO: 284734 - DNA, 50 bp, Artificial
  Synthetic oligonucleotide
atcgtgcggctcgagaggggttgggatgctgtccgtgggctgttccgcga

SEQ ID NO: 284735 - DNA, 50 bp, Artificial
  Synthetic oligonucleotide
atcgtggcccgcctagctgtcttgcgtgcagggggcgcctacatctctat

SEQ ID NO: 284736 - DNA, 50 bp, Artificial
  Synthetic oligonucleotide
atctaccgtggtagtcggccgctcgaccgctgactcgaaccgcctggacc

SEQ ID NO: 284737 - DNA, 50 bp, Artificial
  Synthetic oligonucleotide
atctagactaggcgcctctcactccctggagcggcgttgggccttggagc

SEQ ID NO: 284738 - DNA, 50 bp, Artificial
  Synthetic oligonucleotide
atctccatgtggatctccccagacacctgagagtcacccgcgccacggga

SEQ ID NO: 284739 - DNA, 50 bp, Artificial
  Synthetic oligonucleotide
atctccgcggggacagatgcctctgagatcacgggcaacaggcactgaca

SEQ ID NO: 284740 - DNA, 50 bp, Artificial
  Synthetic oligonucleotide
atctggcagaggttacccagctgacgtggcttaagtggagcgccccagca

SEQ ID NO: 284741 - DNA, 50 bp, Artificial
  Synthetic oligonucleotide
atcttacacggtaattggcttattcttccgagcccatcatttctagcgac

SEQ ID NO: 284742 - DNA, 57 bp, Artificial
  Synthetic oligonucleotide
gaaacgaataaaggtgtttcattgttatcaaacaactaccttatacactcgcaatca

SEQ ID NO: 284743 - DNA, 50 bp, Artificial
  Synthetic oligonucleotide
atgaagcgacgccttcggccgttagtatgtccaggcctcttgcgccactt

SEQ ID NO: 284744 - DNA, 50 bp, Artificial
  Synthetic oligonucleotide
atgagtcggtggttggccgcgatgccagctgaatccgctgagacaggcgt

SEQ ID NO: 284745 - DNA, 50 bp, Artificial
  Synthetic oligonucleotide
atgatcactcggcaacgtggttgacagggcagtcccaccgttcacgggcc

SEQ ID NO: 284746 - DNA, 50 bp, Artificial
  Synthetic oligonucleotide
atgcgatccccaatggtgcggtcatctgacaactcgccaagccgccctaa

SEQ ID NO: 284747 - DNA, 50 bp, Artificial
  Synthetic oligonucleotide
atgcgcggtatgggaccggcagagtggttggacgctatgcgggctgcagt

SEQ ID NO: 284748 - DNA, 50 bp, Artificial
  Synthetic oligonucleotide
atgcgcttttccacggcgcgtgggatcgtaatcgttgggaggccccggct

SEQ ID NO: 284749 - DNA, 50 bp, Artificial
  Synthetic oligonucleotide
atgcggagagtccctggcgaccccgtcagtctgcagacatgcattgagtg

SEQ ID NO: 284750 - DNA, 50 bp, Artificial
  Synthetic oligonucleotide
atgctcattcccttgcgagcgccccaaaccgtgtggccatcctcagacgt

SEQ ID NO: 284751 - DNA, 50 bp, Artificial
  Synthetic oligonucleotide
atgcttcaaaccaattggtggcccgggcttcatgtggatacggtaactaa

SEQ ID NO: 284752 - DNA, 50 bp, Artificial
  Synthetic oligonucleotide
atgcttcggtgaaggaccacagtcggaactgagaggatgaccggtatatt

SEQ ID NO: 284753 - DNA, 60 bp, Artificial
  Synthetic oligonucleotide
cgcctagactgctttgactttcccagcttgtaggactctttagcataggcttgtacaata

SEQ ID NO: 284754 - DNA, 50 bp, Artificial
  Synthetic oligonucleotide
atgcttgccttctgcttccgacgctgacactcggtgcatgcggtagccaa

SEQ ID NO: 284755 - DNA, 50 bp, Artificial
  Synthetic oligonucleotide
atggagcttcgttcccgccgactcagactttgcacgcaattagtgcatct

SEQ ID NO: 284756 - DNA, 50 bp, Artificial
  Synthetic oligonucleotide
atggagtatggtgtcgcggtccccaatgcaggtgtcgctactgggcatga

SEQ ID NO: 284757 - DNA, 50 bp, Artificial
  Synthetic oligonucleotide
atggatatactccaataggtccagaggaggcagaggcgccccgcgccact

SEQ ID NO: 284758 - DNA, 50 bp, Artificial
  Synthetic oligonucleotide
agtttgcggaggccagtgacgaaatctgcggcgctgttctcagtgtgcga

SEQ ID NO: 284759 - DNA, 50 bp, Artificial
  Synthetic oligonucleotide
ataacgtcgtccgcatagcagggttgcaggtaggtccactctcgttggaa

SEQ ID NO: 284760 - DNA, 50 bp, Artificial
  Synthetic oligonucleotide
atacccacagccgggagccaggtacagaagaccggattggaggggcgttt

SEQ ID NO: 284761 - DNA, 50 bp, Artificial
  Synthetic oligonucleotide
atacccgtcgaacctaccgctaccgggcttcctccacctagctcggagca

SEQ ID NO: 284762 - DNA, 50 bp, Artificial
  Synthetic oligonucleotide
atacgccagcattggcacgatcggcgaggattgactcgcgctgcaaagga

SEQ ID NO: 284763 - DNA, 50 bp, Artificial
  Synthetic oligonucleotide
gtcgatttggtcggttggcagatatctaaggtagttcgcttgttaatgga

SEQ ID NO: 284764 - DNA, 51 bp, Artificial
  Synthetic oligonucleotide
taagggaatacaattagggaagtcctaacagggggttaattctgggaatta

SEQ ID NO: 284765 - DNA, 50 bp, Artificial
  Synthetic oligonucleotide
atacggccgtatctgggtaggcgacggacgcagaggaccggaatcagcag

SEQ ID NO: 284766 - DNA, 50 bp, Artificial
  Synthetic oligonucleotide
atacgtgcaggccaaggtatacgcacgccatcccaatctcccaccacgct

SEQ ID NO: 284767 - DNA, 50 bp, Artificial
  Synthetic oligonucleotide
atactcctcgacaatattcctcctctcgcttgccaactcctctctgcgtc

SEQ ID NO: 284768 - DNA, 50 bp, Artificial
  Synthetic oligonucleotide
ataggcggccacgtctaccagggtggcccaccgatccacgcagaagaaat

SEQ ID NO: 284769 - DNA, 50 bp, Artificial
  Synthetic oligonucleotide
atatataagacctagtcggctcctctaagctagggcccgcggttagtcct

SEQ ID NO: 284770 - DNA, 50 bp, Artificial
  Synthetic oligonucleotide
atatgcagtctcccagggtaccgggccctatccggcgaccgtcggggcac

SEQ ID NO: 284771 - DNA, 50 bp, Artificial
  Synthetic oligonucleotide
atattatcatctaggtctccggctcaagaatgagcagggcaaaggccaaa

SEQ ID NO: 284772 - DNA, 50 bp, Artificial
  Synthetic oligonucleotide
atcaaggtgcatcaactggctgcccctttccagggaacgaccttggcgga

SEQ ID NO: 284773 - DNA, 50 bp, Artificial
  Synthetic oligonucleotide
atcaatcgtccacagtaatgcaagaccgacgcgagcccaaattgactcgt

SEQ ID NO: 284774 - DNA, 50 bp, Artificial
  Synthetic oligonucleotide
atccaacgcacgcggtccctggcgaacgggctgcaacagctattcggtct

SEQ ID NO: 284775 - DNA, 60 bp, Artificial
  Synthetic oligonucleotide
gaaactaataaagcctcactatgttaagggccagatatgaacgctcatcgagtgaaacac

SEQ ID NO: 284776 - DNA, 50 bp, Artificial
  Synthetic oligonucleotide
atccatggacttcatgtagtagtgtgctagacccgctgtcaaatgggcgg

SEQ ID NO: 284777 - DNA, 50 bp, Artificial
  Synthetic oligonucleotide
atcccgaggggattccgaaactaggccatcggctgtgctttccgcgtctt

SEQ ID NO: 284778 - DNA, 50 bp, Artificial
  Synthetic oligonucleotide
atccctccgttggcactccgtgcttccaatgggagttgcgcactgctcgt

SEQ ID NO: 284779 - DNA, 50 bp, Artificial
  Synthetic oligonucleotide
atccgaccatgggttgttgagcgctagtctgtgcagtccgggctccttcc

SEQ ID NO: 284780 - DNA, 50 bp, Artificial
  Synthetic oligonucleotide
gtccctcatgcggcggccaactgaagacaaagaccggggttggggtatcc

SEQ ID NO: 284781 - DNA, 50 bp, Artificial
  Synthetic oligonucleotide
atccggtgtcttccaacagacaggcagtgcgcctggctccagtcaatgcc

SEQ ID NO: 284782 - DNA, 50 bp, Artificial
  Synthetic oligonucleotide
atcctccacacgaaccggagatgggcctccccgctttctcagtccccttg

SEQ ID NO: 284783 - DNA, 50 bp, Artificial
  Synthetic oligonucleotide
atcctgggcagaggaccgttgttctggggcccgcgataccgtctgcatgg

SEQ ID NO: 284784 - DNA, 50 bp, Artificial
  Synthetic oligonucleotide
gtcccaacgactaccgtgacgccggaaacagtgcctcacgcacaaaacca

SEQ ID NO: 284785 - DNA, 50 bp, Artificial
  Synthetic oligonucleotide
caaccgtcggtccaggaaagagacctaatgcacataagtatgtggctcga

SEQ ID NO: 284786 - DNA, 60 bp, Artificial
  Synthetic oligonucleotide
taagtaactagctcagacacgtccttcaatggccatatctctccgcgaaagtatgtgcta

SEQ ID NO: 284787 - DNA, 50 bp, Artificial
  Synthetic oligonucleotide
caactcctccaagtcgtccatgaaggcttgcccctgggtcgggaggctgt

SEQ ID NO: 284788 - DNA, 50 bp, Artificial
  Synthetic oligonucleotide
caagccggctagacccaaggttgtgcacgcggtttcggccctctcgaaac

SEQ ID NO: 284789 - DNA, 50 bp, Artificial
  Synthetic oligonucleotide
caagccgtaatattatccggcaaagctcgcggtgccccggaatgcccagg

SEQ ID NO: 284790 - DNA, 50 bp, Artificial
  Synthetic oligonucleotide
caagtccaacaatcgtcccgtgactcctaccggccccatgacccctcggg

SEQ ID NO: 284791 - DNA, 50 bp, Artificial
  Synthetic oligonucleotide
caatgagtagtgggaggcatacgccgctgggtgtgagggagcagcatggg

SEQ ID NO: 284792 - DNA, 50 bp, Artificial
  Synthetic oligonucleotide
caattgaatcggagagcaagccattatgtcgagtcagtcgggagtcggaa

SEQ ID NO: 284793 - DNA, 50 bp, Artificial
  Synthetic oligonucleotide
cacaccacgactgccactcttggtgggttccaggtgcgtcagaggcatct

SEQ ID NO: 284794 - DNA, 50 bp, Artificial
  Synthetic oligonucleotide
caccacgaatcctggctggaaccatggtcctccccggacttccctcgcaa

SEQ ID NO: 284795 - DNA, 50 bp, Artificial
  Synthetic oligonucleotide
caccatcatcagaggcagagcagccaccgactcctacaccagcgacgcca

SEQ ID NO: 284796 - DNA, 50 bp, Artificial
  Synthetic oligonucleotide
caccccgctgacgtaaggtgggttaggggcatcgcccagttgatgggaag

SEQ ID NO: 284797 - DNA, 60 bp, Artificial
  Synthetic oligonucleotide
taagtacgctgaactagacgagttggaaggtcttggcgagcgtgcgttgtctaccgcaca

SEQ ID NO: 284798 - DNA, 50 bp, Artificial
  Synthetic oligonucleotide
cacccgccgaatagtgctagcgcaccatcaatggaacccagactgcggta

SEQ ID NO: 284799 - DNA, 50 bp, Artificial
  Synthetic oligonucleotide
caccggcacggctcacctggattaacaccctgcttgttccgtacggcgga

SEQ ID NO: 284800 - DNA, 50 bp, Artificial
  Synthetic oligonucleotide
cacctcggccgcttaatgcctccggagaccctgatgagtcaagccgcatg

SEQ ID NO: 284801 - DNA, 50 bp, Artificial
  Synthetic oligonucleotide
cacctgcttctaatatggctccctagaacaccagattagggactgccccc

SEQ ID NO: 284802 - DNA, 50 bp, Artificial
  Synthetic oligonucleotide
cacgaaccggagatgggcctccccgctttctcagtccccttgtcgcaaga

SEQ ID NO: 284803 - DNA, 50 bp, Artificial
  Synthetic oligonucleotide
cacgccgggccacttaaggcccacatcaactgtcgttttcgatcgcccgt

SEQ ID NO: 284804 - DNA, 50 bp, Artificial
  Synthetic oligonucleotide
cacgcggcgcagtcaccctccgggacgcgattcattatagcgaacgggat

SEQ ID NO: 284805 - DNA, 50 bp, Artificial
  Synthetic oligonucleotide
cacgcgtcttaatccctccgttccaccgagcactctccgccccgtgaccg

SEQ ID NO: 284806 - DNA, 50 bp, Artificial
  Synthetic oligonucleotide
cacggcttgtcgtagctgggtgggataggtagccaccggggcgagagtgt

SEQ ID NO: 284807 - DNA, 50 bp, Artificial
  Synthetic oligonucleotide
cactttagccgcgcgccactatatcccaaaatcccgcacagctggacgga

SEQ ID NO: 284808 - DNA, 60 bp, Artificial
  Synthetic oligonucleotide
ctactctcatgtgggattctcacggctattagcaaggatctgccaagtaaggctgagagg

SEQ ID NO: 284809 - DNA, 60 bp, Artificial
  Synthetic oligonucleotide
agacccacatgtagaagcatgtgatgaggtgccgaacgattggcttgagtaagatcagcc

SEQ ID NO: 284810 - DNA, 50 bp, Artificial
  Synthetic oligonucleotide
cagacataggctgtgacgtacggccgtaggaccgtggggacgacttcgga

SEQ ID NO: 284811 - DNA, 50 bp, Artificial
  Synthetic oligonucleotide
cagactgggcgctttgcggatggaacgcccctaacgcgccggtatactaa

SEQ ID NO: 284812 - DNA, 50 bp, Artificial
  Synthetic oligonucleotide
atggccatccaatccgttcggctcccctgagtcgggttcctggtatgagc

SEQ ID NO: 284813 - DNA, 50 bp, Artificial
  Synthetic oligonucleotide
atggcgggatttgctgcgtcacccggcctgaattgacctgttcccgacgt

SEQ ID NO: 284814 - DNA, 50 bp, Artificial
  Synthetic oligonucleotide
atggctggcaaaggaacccgtctcccgacagtcagagtgctggaagcgtc

SEQ ID NO: 284815 - DNA, 50 bp, Artificial
  Synthetic oligonucleotide
atgtccataccgaaactttgacggtgtatgttacgaatattgtaactatc

SEQ ID NO: 284816 - DNA, 50 bp, Artificial
  Synthetic oligonucleotide
atgtccccgctgcgtgtgtatcgtcggcggcaggagtgtctctctcgata

SEQ ID NO: 284817 - DNA, 50 bp, Artificial
  Synthetic oligonucleotide
atgtccgtctggaaacggctccaggctccgtcccccgagaccggtaatac

SEQ ID NO: 284818 - DNA, 50 bp, Artificial
  Synthetic oligonucleotide
atgtggagctggcttggtcgcctcccgggttggggtagttggcactactt

SEQ ID NO: 284819 - DNA, 50 bp, Artificial
  Synthetic oligonucleotide
atgtgtggtttggcgccgattggggcacgcgagtcttacgtgaggtttgg

SEQ ID NO: 284820 - DNA, 54 bp, Artificial
  Synthetic oligonucleotide
gaaactcgattaaaatattatgaccacccgtaccttccattatggtaattactg

SEQ ID NO: 284821 - DNA, 50 bp, Artificial
  Synthetic oligonucleotide
atgttaacagggctgtgtacccgcctggcgtaccgtatcggggtgcccga

SEQ ID NO: 284822 - DNA, 50 bp, Artificial
  Synthetic oligonucleotide
atgttagcgtactgagtagatctctactctcacatagtaccgaagagtgc

SEQ ID NO: 284823 - DNA, 50 bp, Artificial
  Synthetic oligonucleotide
atgtttcgcagatcggaggctctctggcgggactaatgaccgccgtggca

SEQ ID NO: 284824 - DNA, 50 bp, Artificial
  Synthetic oligonucleotide
atgtttgttgcggcggccattgtcatactgagcggatggactccggctga

SEQ ID NO: 284825 - DNA, 50 bp, Artificial
  Synthetic oligonucleotide
attcgcgcctcagccgactggctatggccctcaaatgtccagtttcgggg

SEQ ID NO: 284826 - DNA, 50 bp, Artificial
  Synthetic oligonucleotide
attcgttcgggatcccttcgctagcccagaggacattacccgcggttgga

SEQ ID NO: 284827 - DNA, 50 bp, Artificial
  Synthetic oligonucleotide
attggagccgtcgctccgaatctccaaccagcgcggatccctcggttgca

SEQ ID NO: 284828 - DNA, 50 bp, Artificial
  Synthetic oligonucleotide
attggatccacggccggcttttggcggggctcttgtcgagaccgtgtatc

SEQ ID NO: 284829 - DNA, 50 bp, Artificial
  Synthetic oligonucleotide
atttagtatactccaattcggttttgtagatgtgacgggtaggggataga

SEQ ID NO: 284830 - DNA, 50 bp, Artificial
  Synthetic oligonucleotide
atttccctgctagggcctcccgcacgcctaactcgcccaaaacttcctcg

SEQ ID NO: 284831 - DNA, 60 bp, Artificial
  Synthetic oligonucleotide
gtgagattgggtgtcaattaacataggatttgtgcaggctcgctaagttactcgggcgtg

SEQ ID NO: 284832 - DNA, 50 bp, Artificial
  Synthetic oligonucleotide
atttccgtgcaaactgcttatgggatgctaaagggcgtaagatctacggg

SEQ ID NO: 284833 - DNA, 50 bp, Artificial
  Synthetic oligonucleotide
atttctggagaacagcccacatgctgggtcccgattgttttggcttgatc

SEQ ID NO: 284834 - DNA, 50 bp, Artificial
  Synthetic oligonucleotide
gtagtacgataaacatcccgagattgccaagatgttgaccgagccgaaaa

SEQ ID NO: 284835 - DNA, 50 bp, Artificial
  Synthetic oligonucleotide
caaacggcacggcgcgtcctaagccggtctttcgcacgacctcacagccg

SEQ ID NO: 284836 - DNA, 50 bp, Artificial
  Synthetic oligonucleotide
caaagctcgcggtgccccggaatgcccaggctccatgacccaaacaagct

SEQ ID NO: 284837 - DNA, 50 bp, Artificial
  Synthetic oligonucleotide
caacagacctcacagcagggctcacagctcctcccgtacccgaccgtgca

SEQ ID NO: 284838 - DNA, 50 bp, Artificial
  Synthetic oligonucleotide
gacgtctgggttgcagatgcgaacgccgaagatgctcctggtaccgtcga

SEQ ID NO: 284839 - DNA, 50 bp, Artificial
  Synthetic oligonucleotide
gactaattggggcagccccgcggagcgagctagtcggtgggaacgctggg

SEQ ID NO: 284840 - DNA, 50 bp, Artificial
  Synthetic oligonucleotide
gactcaccacgagtcggatgtctccaggcacgagcgggttgccgatcttg

SEQ ID NO: 284841 - DNA, 50 bp, Artificial
  Synthetic oligonucleotide
gactgatacggccatccgcccggaatggtgcccacagagctcgagtacct

SEQ ID NO: 284842 - DNA, 57 bp, Artificial
  Synthetic oligonucleotide
aggcttcccttagaacattacgtccataatgttcggcttcagagactggaatagtct

SEQ ID NO: 284843 - DNA, 50 bp, Artificial
  Synthetic oligonucleotide
gacttcacgcggggcggaccaaccctttgggctgcgcagtatgatcatgg

SEQ ID NO: 284844 - DNA, 50 bp, Artificial
  Synthetic oligonucleotide
gagacagggcgggaggctgtataagggaccattttgccggggcacacgcc

SEQ ID NO: 284845 - DNA, 50 bp, Artificial
  Synthetic oligonucleotide
gagaccagtagcctgttgccccggagatggcgcatcccactgctaatcct

SEQ ID NO: 284846 - DNA, 50 bp, Artificial
  Synthetic oligonucleotide
gagcaaataatactaacaatcaatcatcaatgccttttggtaatgaaagc

SEQ ID NO: 284847 - DNA, 50 bp, Artificial
  Synthetic oligonucleotide
gagcaaggaacgcccacggggaactgtcttggggcactacagccgtttca

SEQ ID NO: 284848 - DNA, 50 bp, Artificial
  Synthetic oligonucleotide
gagcatccccgcgcttgtccactaccgaagcggagttcgagctcagagcg

SEQ ID NO: 284849 - DNA, 50 bp, Artificial
  Synthetic oligonucleotide
gagcccgctgaccctatcagcaggttcgcagttgacctctgcaccaagcg

SEQ ID NO: 284850 - DNA, 50 bp, Artificial
  Synthetic oligonucleotide
gagctggtcccagcggcatatcagtgggcaactagtagtcgggcaaccgg

SEQ ID NO: 284851 - DNA, 50 bp, Artificial
  Synthetic oligonucleotide
gatacgtgtatatcgcgtcgcccttccgaactcggtgatataagtgtctt

SEQ ID NO: 284852 - DNA, 50 bp, Artificial
  Synthetic oligonucleotide
gatatataaggtcccgagccctagtatcctgaccgaagtcgcttatatcg

SEQ ID NO: 284853 - DNA, 60 bp, Artificial
  Synthetic oligonucleotide
agaccacattgtatcctgaccacgggtatgatacccaatgcgcaatgcttctttatttct

SEQ ID NO: 284854 - DNA, 50 bp, Artificial
  Synthetic oligonucleotide
gatatcgccagtatcgtaacgcccccggaagaatgccccgcggtgtccat

SEQ ID NO: 284855 - DNA, 50 bp, Artificial
  Synthetic oligonucleotide
gatccgtcaaggtgcatttcacaatcaagcctctccagaggccgtccaga

SEQ ID NO: 284856 - DNA, 50 bp, Artificial
  Synthetic oligonucleotide
gatcgattggcagaagcatcctgccgtggcttcgggtaagtcccgcgagg

SEQ ID NO: 284857 - DNA, 50 bp, Artificial
  Synthetic oligonucleotide
gatgagccctactgtgccccgtatagtcggcgacgcgaggagaggatgcg

SEQ ID NO: 284858 - DNA, 50 bp, Artificial
  Synthetic oligonucleotide
gatgcacctctggttccaccacggggaggcccgccatcgcgacacctaag

SEQ ID NO: 284859 - DNA, 50 bp, Artificial
  Synthetic oligonucleotide
gattcgcagcccatcggatccccagtcgagccctcatccaggcagtcacc

SEQ ID NO: 284860 - DNA, 50 bp, Artificial
  Synthetic oligonucleotide
gatttgggagcagtaatctcgaatgatatcccttctcgcaggccactgac

SEQ ID NO: 284861 - DNA, 50 bp, Artificial
  Synthetic oligonucleotide
gcaaaggcgaagcctgtaggaaacaatgcggatcccgattcagtcatgat

SEQ ID NO: 284862 - DNA, 50 bp, Artificial
  Synthetic oligonucleotide
gcaaccctgcgtaacctggcaatccggcagcctcagttttgggctgttct

SEQ ID NO: 284863 - DNA, 50 bp, Artificial
  Synthetic oligonucleotide
gcagaggggtcactcggatcagctggggagtctgccgttccgggaatctc

SEQ ID NO: 284864 - DNA, 56 bp, Artificial
  Synthetic oligonucleotide
ctccgctacccttcgctttagaggggtcaacggtgagcctcacaatcgaggctcgt

SEQ ID NO: 284865 - DNA, 50 bp, Artificial
  Synthetic oligonucleotide
ggcaaggcaacatagcagatcagaagaccgattgaccgatggccatgata

SEQ ID NO: 284866 - DNA, 50 bp, Artificial
  Synthetic oligonucleotide
ggcgagtccccgttcctggaatgtaattctgcttcagcgtttctctcgac

SEQ ID NO: 284867 - DNA, 50 bp, Artificial
  Synthetic oligonucleotide
ctttcatggtgccacgtctcaaacaaaccctcctccagcgctgtcattga

SEQ ID NO: 284868 - DNA, 50 bp, Artificial
  Synthetic oligonucleotide
ctttccactggcgccccggtgtagcagccataggttccgttccagcatcg

SEQ ID NO: 284869 - DNA, 50 bp, Artificial
  Synthetic oligonucleotide
ctttcggtggcagatttccccgctacccacatgcggtggcctggttgcta

SEQ ID NO: 284870 - DNA, 50 bp, Artificial
  Synthetic oligonucleotide
gaaagacgaacctccgtgcggtggctagggtgtgcgtgaggtttctgcct

SEQ ID NO: 284871 - DNA, 50 bp, Artificial
  Synthetic oligonucleotide
gaaagcggtcccagagctctcacaaagacgtccgagtgcctcaaccccga

SEQ ID NO: 284872 - DNA, 50 bp, Artificial
  Synthetic oligonucleotide
gaaatggactcagtcgacgagtggctataggtcaagtcgagcttcatgac

SEQ ID NO: 284873 - DNA, 50 bp, Artificial
  Synthetic oligonucleotide
gaacaccctttcggcgaccgcctcactattgcttgtcagaccccggacct

SEQ ID NO: 284874 - DNA, 50 bp, Artificial
  Synthetic oligonucleotide
gaacgtagtatgggtcaggcaggtgatatgtaacatacctttgggcgaga

SEQ ID NO: 284875 - DNA, 59 bp, Artificial
  Synthetic oligonucleotide
agacatactttggcgaccgagccttttcaacccatcttgaaggtgctagcagacctcga

SEQ ID NO: 284876 - DNA, 50 bp, Artificial
  Synthetic oligonucleotide
gaagaaattccattgggcgctcatagactgcttcacctgtgggtgacatg

SEQ ID NO: 284877 - DNA, 50 bp, Artificial
  Synthetic oligonucleotide
ggcctaatccgcttctgtgcctctcgtccatattaaggcaaatgtgtgtg

SEQ ID NO: 284878 - DNA, 50 bp, Artificial
  Synthetic oligonucleotide
gaagaggggcgaaaaggggaggccgggttagcccatcaacagggcaacac

SEQ ID NO: 284879 - DNA, 50 bp, Artificial
  Synthetic oligonucleotide
gaatccagcgggagcgggaattggacagcgctcgcatgacgcttgctcgt

SEQ ID NO: 284880 - DNA, 50 bp, Artificial
  Synthetic oligonucleotide
gaatccggcgctcagatcagacgacaatgctacccccgttccgactggcc

SEQ ID NO: 284881 - DNA, 50 bp, Artificial
  Synthetic oligonucleotide
gaattggctgctagtagcccgtagtgggagaccgcgcagctggcgagccc

SEQ ID NO: 284882 - DNA, 50 bp, Artificial
  Synthetic oligonucleotide
ggcccccatccaccgttgtcacgtggcattgacagggatctggccgcatc

SEQ ID NO: 284883 - DNA, 50 bp, Artificial
  Synthetic oligonucleotide
gacaagtcggaacatatccaatcgcgtaagtttggtggcagtaacatgag

SEQ ID NO: 284884 - DNA, 50 bp, Artificial
  Synthetic oligonucleotide
gacacgtccgggtcatgcaacagcccgccaagcgacgcatattgaagccc

SEQ ID NO: 284885 - DNA, 50 bp, Artificial
  Synthetic oligonucleotide
gacagggccacggggtgctgagagtgtgcagcatgtcgtaagtagacgga

SEQ ID NO: 284886 - DNA, 60 bp, Artificial
  Synthetic oligonucleotide
caccatcattctcacctatcactctcgcccggcaagagtatctcgtgtcattctttggcg

SEQ ID NO: 284887 - DNA, 50 bp, Artificial
  Synthetic oligonucleotide
gaccaggttcaccccacattggctgacacctccgccggacttgtgcagtg

SEQ ID NO: 284888 - DNA, 50 bp, Artificial
  Synthetic oligonucleotide
gaccggccacgatggctcatacccaaccgtctcccacgggaggcgtcacc

SEQ ID NO: 284889 - DNA, 50 bp, Artificial
  Synthetic oligonucleotide
gacctgttccgtccaagagtgatgtcttacatctagctgtcaccgctata

SEQ ID NO: 284890 - DNA, 50 bp, Artificial
  Synthetic oligonucleotide
gacgggttctgtcggcgcccccacgaaataagagggtcctgacaccggac

SEQ ID NO: 284891 - DNA, 50 bp, Artificial
  Synthetic oligonucleotide
gcgcgaccacactccccaactcgtttatgtccgcaaaccactcgaccggg

SEQ ID NO: 284892 - DNA, 50 bp, Artificial
  Synthetic oligonucleotide
gcgcgtggggtccatggatggtcaatactccttccccgtagccttgggca

SEQ ID NO: 284893 - DNA, 50 bp, Artificial
  Synthetic oligonucleotide
gcggacttccagctcggggtcccagagaaggactggccacgaacagcaga

SEQ ID NO: 284894 - DNA, 50 bp, Artificial
  Synthetic oligonucleotide
gcggaggaaacctccctggacgaatcttcgctcacacactggcgcacagg

SEQ ID NO: 284895 - DNA, 50 bp, Artificial
  Synthetic oligonucleotide
gcggcttgcaaacaaccgacatttcagtgtccgaacgttgctgcgcggct

SEQ ID NO: 284896 - DNA, 50 bp, Artificial
  Synthetic oligonucleotide
gcggtccgcaatggctgcgaatacacgcgtcgagtaagtccccgaatccc

SEQ ID NO: 284897 - DNA, 60 bp, Artificial
  Synthetic oligonucleotide
taaccaatctcagtgcgctagttagcgtccatcaatcacatttgtgtgatcggagccgac

SEQ ID NO: 284898 - DNA, 50 bp, Artificial
  Synthetic oligonucleotide
gcgtgtttggatcgtggtatggtgcccccagtgtgtccggggagcgaatt

SEQ ID NO: 284899 - DNA, 50 bp, Artificial
  Synthetic oligonucleotide
gctaaccgattcgcgatcgtagtatgcaacattaaacttcaacgctctca

SEQ ID NO: 284900 - DNA, 50 bp, Artificial
  Synthetic oligonucleotide
gctatcagcgcagcgcacggattccccaacccgctagcctaatgcaggct

SEQ ID NO: 284901 - DNA, 50 bp, Artificial
  Synthetic oligonucleotide
ggagaagggccagactagcccggataaggctagaggcgtcgccagctgcc

SEQ ID NO: 284902 - DNA, 50 bp, Artificial
  Synthetic oligonucleotide
ggagaagccttgtgatttccgggtggcccatcttggaggcaacgcacaga

SEQ ID NO: 284903 - DNA, 50 bp, Artificial
  Synthetic oligonucleotide
gctcacgagctatccgcaggtccgggatgattcttccgggttcggaggta

SEQ ID NO: 284904 - DNA, 50 bp, Artificial
  Synthetic oligonucleotide
gctcatacccaaccgtctcccacgggaggcgtcacccctcaccatggcca

SEQ ID NO: 284905 - DNA, 50 bp, Artificial
  Synthetic oligonucleotide
gctcgaccactactgtcaacgtctggcaaagacttaacgtcacgggccaa

SEQ ID NO: 284906 - DNA, 50 bp, Artificial
  Synthetic oligonucleotide
gctgggccagcactaccacggacggggagaattcacttaccaggagctga

SEQ ID NO: 284907 - DNA, 50 bp, Artificial
  Synthetic oligonucleotide
ggacgtacgtacttcagaacgaacatgggcagatctccggtacgcattct

SEQ ID NO: 284908 - DNA, 60 bp, Artificial
  Synthetic oligonucleotide
agagcgtcggctctgcgtggctgaatcgagtgtcgctctcttgatgttttcgctgtgctg

SEQ ID NO: 284909 - DNA, 50 bp, Artificial
  Synthetic oligonucleotide
gctgggtgataatggtacggtgggtgagctcacggtagtcaaaactatgg

SEQ ID NO: 284910 - DNA, 50 bp, Artificial
  Synthetic oligonucleotide
gctggtcgccagctccaaatggtacgaatgcgccgacaagcatgcaggcg

SEQ ID NO: 284911 - DNA, 50 bp, Artificial
  Synthetic oligonucleotide
ggacgcaccagtctgcaggggtcgtccgtgtccttgggatgagttgtgtg

SEQ ID NO: 284912 - DNA, 50 bp, Artificial
  Synthetic oligonucleotide
gctttcgacatacctccccgtccacaagagggcttattaatgttcgccta

SEQ ID NO: 284913 - DNA, 50 bp, Artificial
  Synthetic oligonucleotide
ggaaaggtccctcggggcagtaccaactcaggctgcaacagtatggcgcc

SEQ ID NO: 284914 - DNA, 50 bp, Artificial
  Synthetic oligonucleotide
ggaaccccctgaatggattgactggttccaacggtcgcgggccgtggaaa

SEQ ID NO: 284915 - DNA, 50 bp, Artificial
  Synthetic oligonucleotide
ggaaccgtgctatcgtagaccgcagtcgtgccaatagccccgctcctccc

SEQ ID NO: 284916 - DNA, 50 bp, Artificial
  Synthetic oligonucleotide
ggaagcggtttgccgagccttctcgcaagcatgttggaccgccctccgag

SEQ ID NO: 284917 - DNA, 50 bp, Artificial
  Synthetic oligonucleotide
ggaaggctgccatgccaggtttggatcgtctggcgctcgtacgcagtgag

SEQ ID NO: 284918 - DNA, 50 bp, Artificial
  Synthetic oligonucleotide
gcatatgagtggggaactgtactaggcggcggtgcaactatgtaaagggg

SEQ ID NO: 284919 - DNA, 57 bp, Artificial
  Synthetic oligonucleotide
tcatgggacaaaccaggaatcctgaagtaatcccgccgacttccgaacagggagctc

SEQ ID NO: 284920 - DNA, 57 bp, Artificial
  Synthetic oligonucleotide
cacccacgaattgaaagaaacctcggcttgctatcccaatgctgaacgcccgtgaaa

SEQ ID NO: 284921 - DNA, 50 bp, Artificial
  Synthetic oligonucleotide
gcatgggctgcctaccatccagagttcccttggtcagttgctcctggggg

SEQ ID NO: 284922 - DNA, 50 bp, Artificial
  Synthetic oligonucleotide
gcatttcatgtaacactacgtctagtaatataaacacagggtatagaaaa

SEQ ID NO: 284923 - DNA, 50 bp, Artificial
  Synthetic oligonucleotide
gccaaccgcaggtacaccacagcgtttccgtcggccacaaagtctccaac

SEQ ID NO: 284924 - DNA, 50 bp, Artificial
  Synthetic oligonucleotide
gccaccactcgccagatggtggttctccccttctccgcgcacaaccagtc

SEQ ID NO: 284925 - DNA, 50 bp, Artificial
  Synthetic oligonucleotide
gccagtcgtccgcgcacgggaggatgccagagaaccagtcgtccgcgtag

SEQ ID NO: 284926 - DNA, 50 bp, Artificial
  Synthetic oligonucleotide
gccattgcgccctcactgatggccaagggaccaatcgtcccctgattgga

SEQ ID NO: 284927 - DNA, 50 bp, Artificial
  Synthetic oligonucleotide
ggatgctgtccgtgggctgttccgcgaagaggagttggcgttggcagagc

SEQ ID NO: 284928 - DNA, 50 bp, Artificial
  Synthetic oligonucleotide
gcccaaaggttccagtagctggggtctgaggcaacgccgcagtcttggga

SEQ ID NO: 284929 - DNA, 50 bp, Artificial
  Synthetic oligonucleotide
gcccagggtctaaatggtacccctgcggcggtgaaatgcacccttgtcgg

SEQ ID NO: 284930 - DNA, 50 bp, Artificial
  Synthetic oligonucleotide
gccccgacccattggactatacgcaaccaccgcaatgcctagctcgcgac

SEQ ID NO: 284931 - DNA, 58 bp, Artificial
  Synthetic oligonucleotide
taacgatcatcgggggactggccgtagccaccaagctcttgcttggccaaggggacgc

SEQ ID NO: 284932 - DNA, 50 bp, Artificial
  Synthetic oligonucleotide
gccccgggggtcacgtgtggggatgtacccgtgcctggccgaaggagcaa

SEQ ID NO: 284933 - DNA, 50 bp, Artificial
  Synthetic oligonucleotide
gcccgtctgccgtatcccgaggggattccgaaactaggccatcggctgtg

SEQ ID NO: 284934 - DNA, 50 bp, Artificial
  Synthetic oligonucleotide
gccgccattaaggtcatgtcgagcgatgtcgtctgccagtgtgccccctg

SEQ ID NO: 284935 - DNA, 50 bp, Artificial
  Synthetic oligonucleotide
gccggatgggtacgtcgacctaccgtgaactccgagccttgcaggttgtg

SEQ ID NO: 284936 - DNA, 50 bp, Artificial
  Synthetic oligonucleotide
ggatccactcgctgggaccgcatttctactccccgggcggttgcgttcag

SEQ ID NO: 284937 - DNA, 50 bp, Artificial
  Synthetic oligonucleotide
gccggcccggcagacttacgcaattgccactggaccacgcatggcctcgt

SEQ ID NO: 284938 - DNA, 50 bp, Artificial
  Synthetic oligonucleotide
gccgggatgatgcctgcagccgcaaaagtgcccatgcacgcatgaaacgc

SEQ ID NO: 284939 - DNA, 50 bp, Artificial
  Synthetic oligonucleotide
gccggggattcccccatcggcatctctgtgacgcgccagatcttaatgca

SEQ ID NO: 284940 - DNA, 50 bp, Artificial
  Synthetic oligonucleotide
gcctctgccctgcgggacaaagcccccggcatgctcattcccttgcgagc

SEQ ID NO: 284941 - DNA, 50 bp, Artificial
  Synthetic oligonucleotide
gcctgatctccttgcatgcagttagggggaaggcggaacgcgtaggtgca

SEQ ID NO: 284942 - DNA, 53 bp, Artificial
  Synthetic oligonucleotide
taacggaattctacccaaggcggccgagacttctacgtccgaatccaaggttg

SEQ ID NO: 284943 - DNA, 50 bp, Artificial
  Synthetic oligonucleotide
gcgaaaaggggaggccgggttagcccatcaacagggcaacactagttgcg

SEQ ID NO: 284944 - DNA, 50 bp, Artificial
  Synthetic oligonucleotide
gcgagctatacccctattctgattggctgccgttggggccagcgaacatc

SEQ ID NO: 284945 - DNA, 50 bp, Artificial
  Synthetic oligonucleotide
ggagtccgaggttcctgtacaccgtcatcggagaagggccgacaccagcc

SEQ ID NO: 284946 - DNA, 50 bp, Artificial
  Synthetic oligonucleotide
gcgccagcggtcatacgagcccccttcgtttcctgatagcgagcttgcac

SEQ ID NO: 284947 - DNA, 50 bp, Artificial
  Synthetic oligonucleotide
gcgcccctactatccgccgtggctcagtatcgcttgccccgtactccaca

SEQ ID NO: 284948 - DNA, 50 bp, Artificial
  Synthetic oligonucleotide
gcgccgtcagatgcataagagtcgcgcacgcctagaccgatcgcaatcgc

SEQ ID NO: 284949 - DNA, 50 bp, Artificial
  Synthetic oligonucleotide
cgatcgcttgactcgatgtacgtcggggcttggtgccgtaaaggtggcct

SEQ ID NO: 284950 - DNA, 50 bp, Artificial
  Synthetic oligonucleotide
cgattgtcgcgggacaacgagggcgctaataacgtgggcgggattccacc

SEQ ID NO: 284951 - DNA, 50 bp, Artificial
  Synthetic oligonucleotide
cgcactgggcagccctatcggacgaccgttggtccaggaaccaaggacag

SEQ ID NO: 284952 - DNA, 50 bp, Artificial
  Synthetic oligonucleotide
cgcatggttccattgtgttgcgcccgcgtgtcgcagatggggttcctagt

SEQ ID NO: 284953 - DNA, 51 bp, Artificial
  Synthetic oligonucleotide
agagaggggcccgggggtgcttaataggggggcctattagcggggatacgc

SEQ ID NO: 284954 - DNA, 50 bp, Artificial
  Synthetic oligonucleotide
cgccagtgggaccaactcactgatcatggccgttacctcctgcgtgagcg

SEQ ID NO: 284955 - DNA, 50 bp, Artificial
  Synthetic oligonucleotide
cgcctatccaagaaaagcaaatgactaccatcttggaccccaatgttcac

SEQ ID NO: 284956 - DNA, 50 bp, Artificial
  Synthetic oligonucleotide
cgcgcccgccatgattccatttgtatcctaggcgcggatggcccatctcc

SEQ ID NO: 284957 - DNA, 50 bp, Artificial
  Synthetic oligonucleotide
cgcgcctcttagttacaccctcccctcattgcttgtggaagacggcggga

SEQ ID NO: 284958 - DNA, 50 bp, Artificial
  Synthetic oligonucleotide
cgcgtagtgcggagatgagtatggcccggtggatcaagccgtaggcacgt

SEQ ID NO: 284959 - DNA, 50 bp, Artificial
  Synthetic oligonucleotide
gggcgttgtggtccgcatgtctctgcagtctgtgacggagggacgacaga

SEQ ID NO: 284960 - DNA, 50 bp, Artificial
  Synthetic oligonucleotide
cgctactgcggctgtcacgctccttgcgtctgaggcttggcgcggaagga

SEQ ID NO: 284961 - DNA, 50 bp, Artificial
  Synthetic oligonucleotide
cgctcctcgatgcccgtttggtcgccatctccgcagggtacagttcctgg

SEQ ID NO: 284962 - DNA, 50 bp, Artificial
  Synthetic oligonucleotide
cggaaccaagtaacgcagtggatttcgcccacacgcccccgctatgcaaa

SEQ ID NO: 284963 - DNA, 50 bp, Artificial
  Synthetic oligonucleotide
cggagacgtgtttcggaggagtgtcggttctcgcgggagcgtcagtggat

SEQ ID NO: 284964 - DNA, 55 bp, Artificial
  Synthetic oligonucleotide
cacccatagtaaagattgtaacggcaccgtggggagccgcgatagggcctcgtac

SEQ ID NO: 284965 - DNA, 50 bp, Artificial
  Synthetic oligonucleotide
cggagatgagtatggcccggtggatcaagccgtaggcacgtgtccggtgc

SEQ ID NO: 284966 - DNA, 50 bp, Artificial
  Synthetic oligonucleotide
cggaggcctgcacataatcgcctggaacctgcactttcccagcgcagtgg

SEQ ID NO: 284967 - DNA, 50 bp, Artificial
  Synthetic oligonucleotide
cggaggtagtcggctcgattactgcgttcggggccgattctcggcatccc

SEQ ID NO: 284968 - DNA, 50 bp, Artificial
  Synthetic oligonucleotide
cggccaagccaatactgacggggctgtgcctcggatacctggaagccagc

SEQ ID NO: 284969 - DNA, 50 bp, Artificial
  Synthetic oligonucleotide
cggcgctgtacctccatttctcctcgtacatattccacctagtcctatgg

SEQ ID NO: 284970 - DNA, 50 bp, Artificial
  Synthetic oligonucleotide
cggcggtttgaggttcctcgcatggttccattgtgttgcgcccgcgtgtc

SEQ ID NO: 284971 - DNA, 50 bp, Artificial
  Synthetic oligonucleotide
cggctctcacgccccctgttgggcgcttgtctaaacctggagggaatagc

SEQ ID NO: 284972 - DNA, 50 bp, Artificial
  Synthetic oligonucleotide
cgggaacgcactacgtatcccacttacggaaccttggccgcgccacagcg

SEQ ID NO: 284973 - DNA, 50 bp, Artificial
  Synthetic oligonucleotide
cgggccccaagtggtggatcatcagccggattccctacttccgcagcatt

SEQ ID NO: 284974 - DNA, 50 bp, Artificial
  Synthetic oligonucleotide
cgggcctcccactgatcgacttttggggacagccaccgattctgaggcag

SEQ ID NO: 284975 - DNA, 60 bp, Artificial
  Synthetic oligonucleotide
agagagcacgtcgtgagtcatttagaagccaaacaccgactaccaagctaatattatcat

SEQ ID NO: 284976 - DNA, 50 bp, Artificial
  Synthetic oligonucleotide
cctaggtttagatcccctcatccgtgttcggggtgtctgttgtctgcatg

SEQ ID NO: 284977 - DNA, 50 bp, Artificial
  Synthetic oligonucleotide
cctcagctcgaggccccggagtgactagcactgaggctggactgagcata

SEQ ID NO: 284978 - DNA, 50 bp, Artificial
  Synthetic oligonucleotide
cctcccaaagacgagggatccaccagctgccgtttctgctaggggttgct

SEQ ID NO: 284979 - DNA, 50 bp, Artificial
  Synthetic oligonucleotide
cctccgacgagcatcgctggagacgtcagttggctctgttctgtggcgga

SEQ ID NO: 284980 - DNA, 50 bp, Artificial
  Synthetic oligonucleotide
ggggtctctctgcagcgaacaagctatctgacctctctccaaatcgctat

SEQ ID NO: 284981 - DNA, 50 bp, Artificial
  Synthetic oligonucleotide
cctccgtacaactggtcggcgggaagcctaggtctgctctcgctctctgg

SEQ ID NO: 284982 - DNA, 50 bp, Artificial
  Synthetic oligonucleotide
cctcgggatcgttgcacggatatcagtgcgttgctgggcaagaggcagcg

SEQ ID NO: 284983 - DNA, 50 bp, Artificial
  Synthetic oligonucleotide
cctcgtactccacaccacgactgccactcttggtgggttccaggtgcgtc

SEQ ID NO: 284984 - DNA, 50 bp, Artificial
  Synthetic oligonucleotide
cctcgtgaattggattactggcgtccaatgggtggccccacgttgttatc

SEQ ID NO: 284985 - DNA, 50 bp, Artificial
  Synthetic oligonucleotide
cctgcatgggcgagcctcgttcactggttcacgggagctgttacgagtcc

SEQ ID NO: 284986 - DNA, 58 bp, Artificial
  Synthetic oligonucleotide
caccccgtcttgcgttgatgtaccgaggaaaccagagcgttagatcattcgagaaaga

SEQ ID NO: 284987 - DNA, 50 bp, Artificial
  Synthetic oligonucleotide
cctggcggggcccaggttatccggctataccaaccgtgagtgttctacga

SEQ ID NO: 284988 - DNA, 50 bp, Artificial
  Synthetic oligonucleotide
cctggtcagaggcgtggtacagggcgcaagggtggtctgccgtgtattca

SEQ ID NO: 284989 - DNA, 50 bp, Artificial
  Synthetic oligonucleotide
cctggtgtggtcccaacggactggtcattggtccggtgttcatgccgtcg

SEQ ID NO: 284990 - DNA, 50 bp, Artificial
  Synthetic oligonucleotide
cctgtcgtttccgggtctgggttgtctccgcgggtagatcgacgccgtga

SEQ ID NO: 284991 - DNA, 50 bp, Artificial
  Synthetic oligonucleotide
cctgttgaactacaatataggaatatagataccaccagaagcccagtagg

SEQ ID NO: 284992 - DNA, 50 bp, Artificial
  Synthetic oligonucleotide
ccttccgcattgtctttcgtttggctataacacaatctaacgtttatcag

SEQ ID NO: 284993 - DNA, 50 bp, Artificial
  Synthetic oligonucleotide
ccttgactgtaactggtacaccgtgcaggggtcctatgagctttcctgtt

SEQ ID NO: 284994 - DNA, 50 bp, Artificial
  Synthetic oligonucleotide
cgaagagcctccacggcttgtcgtagctgggtgggataggtagccaccgg

SEQ ID NO: 284995 - DNA, 50 bp, Artificial
  Synthetic oligonucleotide
cgaaggagctttatgtgcgctgtggggcatctcagatttcgggcggcaga

SEQ ID NO: 284996 - DNA, 50 bp, Artificial
  Synthetic oligonucleotide
cgaatcgccagatatggtctcgccgatctttgtggtgcagcttctcctag

SEQ ID NO: 284997 - DNA, 57 bp, Artificial
  Synthetic oligonucleotide
agagactcgcagacgtagagaacgagaacctccgcctcaaagaagaacaagaatccc

SEQ ID NO: 284998 - DNA, 50 bp, Artificial
  Synthetic oligonucleotide
cgacgctcatacacactttgctaggctacgcaaatggggttacaatactc

SEQ ID NO: 284999 - DNA, 50 bp, Artificial
  Synthetic oligonucleotide
cgagaacacgatgagcggttggtgccgcctgaggaacggttccggagtga

SEQ ID NO: 285000 - DNA, 50 bp, Artificial
  Synthetic oligonucleotide
cgagcacgttcgacatgttcggggttcgctctgacatgcaccagctgcta

SEQ ID NO: 285001 - DNA, 50 bp, Artificial
  Synthetic oligonucleotide
cgagcatcgggtcctccgatgagccctactgtgccccgtatagtcggcga

SEQ ID NO: 285002 - DNA, 50 bp, Artificial
  Synthetic oligonucleotide
cgaggtgctgcttggcttaccgtacgtgccctgtgttcttcgcactggca

SEQ ID NO: 285003 - DNA, 50 bp, Artificial
  Synthetic oligonucleotide
cgagttgttgagccacttccgctgccgacccgcttaagacccactggcgc

SEQ ID NO: 285004 - DNA, 50 bp, Artificial
  Synthetic oligonucleotide
ctcactagtatcgaagtactaccaaagcagtagtaccacgactggtagta

SEQ ID NO: 285005 - DNA, 50 bp, Artificial
  Synthetic oligonucleotide
ctcgggccccttgagagatctgagcggcagagagtgaggacgatggacct

SEQ ID NO: 285006 - DNA, 50 bp, Artificial
  Synthetic oligonucleotide
ctcgttagacgggccgatgccaccactcgccagatggtggttctcccctt

SEQ ID NO: 285007 - DNA, 50 bp, Artificial
  Synthetic oligonucleotide
ggctatggccctcaaatgtccagtttcggggcctcccagttgcagcctca

SEQ ID NO: 285008 - DNA, 56 bp, Artificial
  Synthetic oligonucleotide
ctttctactcgtatcattcgatcagtggaagttagttagataaagttcggattaaa

SEQ ID NO: 285009 - DNA, 50 bp, Artificial
  Synthetic oligonucleotide
ctctcatttccgtgggcgccaatggggaggtcgcggctgtgcgcacctga

SEQ ID NO: 285010 - DNA, 50 bp, Artificial
  Synthetic oligonucleotide
ctcttcgcaaaacaccaagggcggagccacgatcttgtccggtccagcga

SEQ ID NO: 285011 - DNA, 50 bp, Artificial
  Synthetic oligonucleotide
ctgcaaacgtcatgaccgcggccttatatccgctaacccccggacccaga

SEQ ID NO: 285012 - DNA, 50 bp, Artificial
  Synthetic oligonucleotide
ggcgttagagcggaggagcggcaatcaaggggaattcgaaaggaataaga

SEQ ID NO: 285013 - DNA, 50 bp, Artificial
  Synthetic oligonucleotide
ctgcgcagttgtctcgcatagggctcgggtcagcggatgaagcgacgaga

SEQ ID NO: 285014 - DNA, 50 bp, Artificial
  Synthetic oligonucleotide
ctgcgtcggggtactgtcgctgtgttcgccaacaggagtaccgggaatcg

SEQ ID NO: 285015 - DNA, 50 bp, Artificial
  Synthetic oligonucleotide
ctggctactggctgtgagcaagtcatctctcacggacatatctccgcata

SEQ ID NO: 285016 - DNA, 50 bp, Artificial
  Synthetic oligonucleotide
ctggggtggttcatcctggctcatagggcagggattgcgcgacgcttcat

SEQ ID NO: 285017 - DNA, 50 bp, Artificial
  Synthetic oligonucleotide
ggcggcctcgtagcctaaggcagagttgtgcgtcgtcagcttttagcgcg

SEQ ID NO: 285018 - DNA, 50 bp, Artificial
  Synthetic oligonucleotide
ctggtaaactctgcctccacacgggcccactgtttagcggggatccgccg

SEQ ID NO: 285019 - DNA, 59 bp, Artificial
  Synthetic oligonucleotide
cgcctcccacaggtttgcgatttcacggcgagacctggctctgtgatattcccacggga

SEQ ID NO: 285020 - DNA, 50 bp, Artificial
  Synthetic oligonucleotide
ctgtccgtattcactgactcacgatttgaccccggcgaatgggcaaacat

SEQ ID NO: 285021 - DNA, 50 bp, Artificial
  Synthetic oligonucleotide
ctgtggctgtgcgagtggatgaaaggctttgctgttgcaggtccaggcga

SEQ ID NO: 285022 - DNA, 50 bp, Artificial
  Synthetic oligonucleotide
ctgtgtgcatgccgcatagggtacgataatcggagaagctcgctgtcctt

SEQ ID NO: 285023 - DNA, 50 bp, Artificial
  Synthetic oligonucleotide
ctgttggattatggacgttgggttggacggggtgcgcggagtccgtgtgc

SEQ ID NO: 285024 - DNA, 50 bp, Artificial
  Synthetic oligonucleotide
cttaccgagtcgatttctaccggggccttaacgacgcgtgtcgcgtgcgc

SEQ ID NO: 285025 - DNA, 50 bp, Artificial
  Synthetic oligonucleotide
cttcgccctaaaccggacgtggcttaggagaccgccgggcataagcacta

SEQ ID NO: 285026 - DNA, 50 bp, Artificial
  Synthetic oligonucleotide
cttgaagactatgaagacgctcggctcgacaggcaacatttagcgaaccg

SEQ ID NO: 285027 - DNA, 50 bp, Artificial
  Synthetic oligonucleotide
cttgactagttcgtacaaaagtagtcgggcttgactaattgataccgatg

SEQ ID NO: 285028 - DNA, 50 bp, Artificial
  Synthetic oligonucleotide
cttggccagccctggcctaccctgctgggcctaattcgagccactgatta

SEQ ID NO: 285029 - DNA, 50 bp, Artificial
  Synthetic oligonucleotide
cgggctcgcacttatgcaggagtgccgcgaacgtgacttcttcaacggcc

SEQ ID NO: 285030 - DNA, 59 bp, Artificial
  Synthetic oligonucleotide
accccgatgagggtcgcttcgcaaacgaccggcgctctgctatacaaccattcttgcag

SEQ ID NO: 285031 - DNA, 60 bp, Artificial
  Synthetic oligonucleotide
ctttgcggaggactcggtaggcgatacgatttgatgacgcggcgtctataggctgtggca

SEQ ID NO: 285032 - DNA, 50 bp, Artificial
  Synthetic oligonucleotide
cggggacgacatgtttcttggacccgatggtgacctaccgagcgggatgg

SEQ ID NO: 285033 - DNA, 50 bp, Artificial
  Synthetic oligonucleotide
cggggatgtcatccaacgcacgcggtccctggcgaacgggctgcaacagc

SEQ ID NO: 285034 - DNA, 50 bp, Artificial
  Synthetic oligonucleotide
cggggcaagatctccgtgattattgcaacggaccgggcctcgcgtggtct

SEQ ID NO: 285035 - DNA, 50 bp, Artificial
  Synthetic oligonucleotide
cgggggaaactcccttctcgtcgtccgcctacaatcccgcatccgacacc

SEQ ID NO: 285036 - DNA, 50 bp, Artificial
  Synthetic oligonucleotide
cgggggtactgttgagacgaagaccctgagcacaacaggtcgcctccgct

SEQ ID NO: 285037 - DNA, 50 bp, Artificial
  Synthetic oligonucleotide
cggtaccggatgcgctctgcactggacgtgggctcgactaaggcggagat

SEQ ID NO: 285038 - DNA, 50 bp, Artificial
  Synthetic oligonucleotide
cggtatctgcacgtgcgcgaacatgggaaaacacggccacatccacagct

SEQ ID NO: 285039 - DNA, 50 bp, Artificial
  Synthetic oligonucleotide
cggttccacccattcgggcactaggcgcaaccctgggccatggttagtcg

SEQ ID NO: 285040 - DNA, 50 bp, Artificial
  Synthetic oligonucleotide
cggttgctggaaggcccgatccgagggtccaaagcgatgttactgacgcg

SEQ ID NO: 285041 - DNA, 50 bp, Artificial
  Synthetic oligonucleotide
cggtttccaggatcccgccgtagccgcgaggcatgcgtatctactgactg

SEQ ID NO: 285042 - DNA, 60 bp, Artificial
  Synthetic oligonucleotide
agagacatagtggcttggtgatgggtcatagacagttgagaagctctgcggagggtcagt

SEQ ID NO: 285043 - DNA, 50 bp, Artificial
  Synthetic oligonucleotide
cgtccccttcggacgtgttgccgtgtcgcgccgtcccgtgactcgagaac

SEQ ID NO: 285044 - DNA, 50 bp, Artificial
  Synthetic oligonucleotide
cgtccttatcgcgttgaacgagaatgtcgcaaagtacgtttccctcttct

SEQ ID NO: 285045 - DNA, 50 bp, Artificial
  Synthetic oligonucleotide
cgtgaacaccggtgtacccttgcgaaagacgaacctccgtgcggtggcta

SEQ ID NO: 285046 - DNA, 50 bp, Artificial
  Synthetic oligonucleotide
cgtgcaccgagcttatcctcaagcggggtgatcctgctcccatcgccatg

SEQ ID NO: 285047 - DNA, 50 bp, Artificial
  Synthetic oligonucleotide
cgtgctcccagtctcgggcgcagcattcaagaaccgcttccactagaccg

SEQ ID NO: 285048 - DNA, 50 bp, Artificial
  Synthetic oligonucleotide
cgtggcggtgtcagttcagggcccaagctggagtcattcagcagacagcg

SEQ ID NO: 285049 - DNA, 50 bp, Artificial
  Synthetic oligonucleotide
cgtggctccggctagttggggtggttacgtacagggcagcggtacctgcg

SEQ ID NO: 285050 - DNA, 50 bp, Artificial
  Synthetic oligonucleotide
cgttgcttgtgggctcagacgcacgtcgtgatcagcagcggacccgagga

SEQ ID NO: 285051 - DNA, 50 bp, Artificial
  Synthetic oligonucleotide
ggctggctacatgcctcccggtgtgagcagtggttatgagcctcctgcca

SEQ ID NO: 285052 - DNA, 50 bp, Artificial
  Synthetic oligonucleotide
ctatagatcctatactttctatagttagactgcgcgtataagccccctcg

SEQ ID NO: 285053 - DNA, 58 bp, Artificial
  Synthetic oligonucleotide
taagccagagccagacggagtttatacggagctggtggaaggccaacaggcttgaatt

SEQ ID NO: 285054 - DNA, 50 bp, Artificial
  Synthetic oligonucleotide
ctatcgggtaaatatagagcgtttctattacgaggtagggtatttacgct

SEQ ID NO: 285055 - DNA, 50 bp, Artificial
  Synthetic oligonucleotide
ctatcgtagaccgcagtcgtgccaatagccccgctcctccccgcaagcat

SEQ ID NO: 285056 - DNA, 50 bp, Artificial
  Synthetic oligonucleotide
ctatcttgcatccgcctctgccctgcgggacaaagcccccggcatgctca

SEQ ID NO: 285057 - DNA, 50 bp, Artificial
  Synthetic oligonucleotide
ctcaaatgtccagtttcggggcctcccagttgcagcctcaagccacgggg

SEQ ID NO: 285058 - DNA, 50 bp, Artificial
  Synthetic oligonucleotide
actcccccgtggtccatccatctaagtctggttcagggccggagagccgt

SEQ ID NO: 285059 - DNA, 50 bp, Artificial
  Synthetic oligonucleotide
tacgacagttcattcggcggttcgaaccagaacgagagaaacagttctat

SEQ ID NO: 285060 - DNA, 50 bp, Artificial
  Synthetic oligonucleotide
actccgccgaaagatcccggaggcgcacacggagggattccagcatgtgg

SEQ ID NO: 285061 - DNA, 50 bp, Artificial
  Synthetic oligonucleotide
actcgcgcatcttgaccctcacgacaactgggatgctccgctcggtccac

SEQ ID NO: 285062 - DNA, 50 bp, Artificial
  Synthetic oligonucleotide
actcgcgcggcaaggcttcaaatgttacgaccttgtgcggccacggaagc

SEQ ID NO: 285063 - DNA, 50 bp, Artificial
  Synthetic oligonucleotide
actcgggcggaacaagtctagaggggcactttgctcccacgagaggcggg

SEQ ID NO: 285064 - DNA, 60 bp, Artificial
  Synthetic oligonucleotide
ctttggtcggctccgcgtatcatattaccgcatcgggagatcgcctcgtgatctgctctt

SEQ ID NO: 285065 - DNA, 50 bp, Artificial
  Synthetic oligonucleotide
actcgtctcccccgatcgccgcaggagtcaagcgtagcaacacgcaagac

SEQ ID NO: 285066 - DNA, 50 bp, Artificial
  Synthetic oligonucleotide
actctcgacggtcccagcttgtgttcggcactgaggccgagtcggttccg

SEQ ID NO: 285067 - DNA, 50 bp, Artificial
  Synthetic oligonucleotide
actgacccggcgccatctatagctggccgcacaaggattcgccccggttg

SEQ ID NO: 285068 - DNA, 50 bp, Artificial
  Synthetic oligonucleotide
tacctgggacaccacgagacggggcagcaatcgagataaccgggctagtg

SEQ ID NO: 285069 - DNA, 50 bp, Artificial
  Synthetic oligonucleotide
actgagcggcccagtccgcctagcccaccaacaagcaggtacgaggcgtc

SEQ ID NO: 285070 - DNA, 50 bp, Artificial
  Synthetic oligonucleotide
taccgcggaggggtggctttgaaggtagtttcgcctcaggatggcagact

SEQ ID NO: 285071 - DNA, 50 bp, Artificial
  Synthetic oligonucleotide
actgcagacccaactaccacacctgcgctacaccatcctcgaggctcgcg

SEQ ID NO: 285072 - DNA, 50 bp, Artificial
  Synthetic oligonucleotide
actgcagacccgcatagaccgaaccggcatcgttagtgccgagcagctgc

SEQ ID NO: 285073 - DNA, 50 bp, Artificial
  Synthetic oligonucleotide
actgcagaggacgggttctctgcctcgaatatgggccgcgttccgggctt

SEQ ID NO: 285074 - DNA, 50 bp, Artificial
  Synthetic oligonucleotide
actgcgattgcgacccctctatctcgaccagcacagtggaggtgcgcctc

SEQ ID NO: 285075 - DNA, 59 bp, Artificial
  Synthetic oligonucleotide
ggcgaccgagccttttcaacccatcttgaaggtgctagcagacctcgaacgtgacgatc

SEQ ID NO: 285076 - DNA, 50 bp, Artificial
  Synthetic oligonucleotide
actgcgcctccccaattcagcagatggcggcctgagagtctttttcggga

SEQ ID NO: 285077 - DNA, 50 bp, Artificial
  Synthetic oligonucleotide
actgctcccgcggatacgatgagaagggcgctgaagaccaggttcgggtg

SEQ ID NO: 285078 - DNA, 50 bp, Artificial
  Synthetic oligonucleotide
actgctctgggtgacggggtccgctcagatgggaccggtggacaacccat

SEQ ID NO: 285079 - DNA, 50 bp, Artificial
  Synthetic oligonucleotide
actggatcgggggctcatgggagccatctgcgtgagaggtggttggtctg

SEQ ID NO: 285080 - DNA, 50 bp, Artificial
  Synthetic oligonucleotide
actgggagtgatcggcgtcttcgttggcctgccgcccattatgctaggcg

SEQ ID NO: 285081 - DNA, 50 bp, Artificial
  Synthetic oligonucleotide
actgggatgctccgctcggtccacgctaatcatgtcgccttgcagacccg

SEQ ID NO: 285082 - DNA, 50 bp, Artificial
  Synthetic oligonucleotide
acgtctatgtgtccgtctaattcgagagagtgctgcggccgaggatatca

SEQ ID NO: 285083 - DNA, 50 bp, Artificial
  Synthetic oligonucleotide
acgtcttgcgaggacgtgggaactcgggtgccgtggaagtgcgaaagagg

SEQ ID NO: 285084 - DNA, 50 bp, Artificial
  Synthetic oligonucleotide
acgtcttggggcgcctgtgtccgcctagcatcatggcccggccgtcccat

SEQ ID NO: 285085 - DNA, 50 bp, Artificial
  Synthetic oligonucleotide
acgtgcacgtatcctgctggccccttgaagcctggacccaaaatcggctc

SEQ ID NO: 285086 - DNA, 55 bp, Artificial
  Synthetic oligonucleotide
cttttccctaaagaggtgcactggatagaatttcgatttgtgcgatttgaccggg

SEQ ID NO: 285087 - DNA, 50 bp, Artificial
  Synthetic oligonucleotide
acgtgccccagagtggatacgcgtccggggaactccgttcgtttaccgga

SEQ ID NO: 285088 - DNA, 50 bp, Artificial
  Synthetic oligonucleotide
acgtgcccgtccacgttcgtgcagggtccctccccattcgccgagacttg

SEQ ID NO: 285089 - DNA, 50 bp, Artificial
  Synthetic oligonucleotide
acgtggcagaagtcgagaccgtgcactagaaggggcgctgctcgtgtcaa

SEQ ID NO: 285090 - DNA, 50 bp, Artificial
  Synthetic oligonucleotide
acgtggggagcgttttgagcggtggcgcagtaggaactctgagggcgtct

SEQ ID NO: 285091 - DNA, 50 bp, Artificial
  Synthetic oligonucleotide
tactaatagtcacccgagttgaacagtcgtctaagtggcgatgagtccag

SEQ ID NO: 285092 - DNA, 50 bp, Artificial
  Synthetic oligonucleotide
acgtgtaaccccgcagacagaagggtggaaaaccaacccggccacgagct

SEQ ID NO: 285093 - DNA, 50 bp, Artificial
  Synthetic oligonucleotide
acgttcgccgagtcaccgacacctagacctacacagccgatggcccatcc

SEQ ID NO: 285094 - DNA, 50 bp, Artificial
  Synthetic oligonucleotide
acgttgctccggaccggactggtagagctggaaggccgggtctgtcgacg

SEQ ID NO: 285095 - DNA, 50 bp, Artificial
  Synthetic oligonucleotide
actacactagctcagaaccgccgatgacgcggcatgtgtcccgctctggc

SEQ ID NO: 285096 - DNA, 50 bp, Artificial
  Synthetic oligonucleotide
actacggtgcctcgggctccaacgcatccattgtcgtcactcaaccgcct

SEQ ID NO: 285097 - DNA, 56 bp, Artificial
  Synthetic oligonucleotide
gtactggtttccacggtatacacgttatggttggaacagctttcttagctgtagga

SEQ ID NO: 285098 - DNA, 50 bp, Artificial
  Synthetic oligonucleotide
actagagtgtgtaccaagcccccgccatggaaccggactatcgtcggccg

SEQ ID NO: 285099 - DNA, 50 bp, Artificial
  Synthetic oligonucleotide
actagccaaaccggctcggcgcaaacgtacctgggcgcgattgcagaaga

SEQ ID NO: 285100 - DNA, 50 bp, Artificial
  Synthetic oligonucleotide
actagcctcgaccataatccatggcgggacccggaccctgttctgggacc

SEQ ID NO: 285101 - DNA, 50 bp, Artificial
  Synthetic oligonucleotide
tacggaacgatcaccatgctcccggtggctcacgcgaagttatcgccact

SEQ ID NO: 285102 - DNA, 50 bp, Artificial
  Synthetic oligonucleotide
actaggaagcccatccggtccgtcatttctaggagctcgggtgccggggg

SEQ ID NO: 285103 - DNA, 50 bp, Artificial
  Synthetic oligonucleotide
actaggccggatgtgtggctccggatacttgcgctgttttgcgccgtacc

SEQ ID NO: 285104 - DNA, 50 bp, Artificial
  Synthetic oligonucleotide
tacgcgggcgttccgtatgttgttgttcgccacatccgcgacgcagtcaa

SEQ ID NO: 285105 - DNA, 50 bp, Artificial
  Synthetic oligonucleotide
actcaagtcgattcccttcagacttgctcacctactagctccgacggtac

SEQ ID NO: 285106 - DNA, 50 bp, Artificial
  Synthetic oligonucleotide
actcacgggctcaagaagtgtgaccagtcggggtttggcgcccagctgaa

SEQ ID NO: 285107 - DNA, 50 bp, Artificial
  Synthetic oligonucleotide
tacgatgcctcgttcccttttatcagcccggctgctctctctggtcccgg

SEQ ID NO: 285108 - DNA, 60 bp, Artificial
  Synthetic oligonucleotide
agacgcgactgagcggtcttcaggaccgccaatcctacaatgactgctgtggtggagagt

SEQ ID NO: 285109 - DNA, 50 bp, Artificial
  Synthetic oligonucleotide
actcagaaccgctcccaccgcgcaaccgcgagaatgacacagggaccatc

SEQ ID NO: 285110 - DNA, 50 bp, Artificial
  Synthetic oligonucleotide
actcccagttagcgttgatggctcacggcgcgaccgcatcgcgtatgcag

SEQ ID NO: 285111 - DNA, 50 bp, Artificial
  Synthetic oligonucleotide
agacacacttcagcagcggcacatacaacaccgggcacgcggtgacctgg

SEQ ID NO: 285112 - DNA, 50 bp, Artificial
  Synthetic oligonucleotide
agacacccttccgccgttttcctcgactccctacgcccctcatgggttcg

SEQ ID NO: 285113 - DNA, 50 bp, Artificial
  Synthetic oligonucleotide
agacaccggcgggcctttgctcagagatgatgctcgcacggaaatcctgc

SEQ ID NO: 285114 - DNA, 50 bp, Artificial
  Synthetic oligonucleotide
agaccagcaataaggccggcgcaaggcagggtaagcacccagcccgagaa

SEQ ID NO: 285115 - DNA, 50 bp, Artificial
  Synthetic oligonucleotide
agaccatacgaagcccctccaccagcttaatcctgggctccgcacacgga

SEQ ID NO: 285116 - DNA, 50 bp, Artificial
  Synthetic oligonucleotide
agaccatgccggccacggatcagtcggtatcccaactgcgttgcatcgtg

SEQ ID NO: 285117 - DNA, 50 bp, Artificial
  Synthetic oligonucleotide
agaccccgcgatcaaccctacgctccctgggtacaagagaccggacccgt

SEQ ID NO: 285118 - DNA, 50 bp, Artificial
  Synthetic oligonucleotide
agaccctgcagtctgtcgcggttgcagagattgctcgacgcacgctcaat

SEQ ID NO: 285119 - DNA, 60 bp, Artificial
  Synthetic oligonucleotide
gaaaagctacgaggactgatcggagcccgatcattgccttactacgacagtatatcttgt

SEQ ID NO: 285120 - DNA, 50 bp, Artificial
  Synthetic oligonucleotide
agaccgaatagcggaacggatgggtaccgtccaaagcgccgtcgttgtgg

SEQ ID NO: 285121 - DNA, 50 bp, Artificial
  Synthetic oligonucleotide
agaccgcgtggagcgagtcaaggagtcttcgcgcatctacctccgcccaa

SEQ ID NO: 285122 - DNA, 50 bp, Artificial
  Synthetic oligonucleotide
agaccgcttgagcctgtaagggcacgagtaggccacgagtaggacccgac

SEQ ID NO: 285123 - DNA, 50 bp, Artificial
  Synthetic oligonucleotide
agaccgggataggcagggctccgacagtagaaccgactcggctcaagggt

SEQ ID NO: 285124 - DNA, 50 bp, Artificial
  Synthetic oligonucleotide
agaccttcggggaaagcacgtcgagtccgaggcaccccatttattcgccg

SEQ ID NO: 285125 - DNA, 50 bp, Artificial
  Synthetic oligonucleotide
agacgacggttggaaccggccacttggagtgtgcatacggattgcagggg

SEQ ID NO: 285126 - DNA, 50 bp, Artificial
  Synthetic oligonucleotide
agacgattgccccagaccgtgggagtcgacgtagcgattggcgctcggac

SEQ ID NO: 285127 - DNA, 50 bp, Artificial
  Synthetic oligonucleotide
agacgccagtgctacgctccggatcagacagcagggcaccgtagttgctg

SEQ ID NO: 285128 - DNA, 50 bp, Artificial
  Synthetic oligonucleotide
agactgaaccgaggcggagggctttaatgcgggaggtgacggtgtcaagg

SEQ ID NO: 285129 - DNA, 50 bp, Artificial
  Synthetic oligonucleotide
agagaaatgtccagatttgccgatacgtgccgtgccatgctatatgccat

SEQ ID NO: 285130 - DNA, 60 bp, Artificial
  Synthetic oligonucleotide
gtgacttgtggtgggatacgagctttccattcctggcatagcagtacagtctctcgctaa

SEQ ID NO: 285131 - DNA, 50 bp, Artificial
  Synthetic oligonucleotide
agagaatcccattttgcgcgcggggtcatgtaggtgccatgagcgagggg

SEQ ID NO: 285132 - DNA, 50 bp, Artificial
  Synthetic oligonucleotide
taagcagtgccaggggcttcccaatacacccatacgggcctaacgaggcg

SEQ ID NO: 285133 - DNA, 50 bp, Artificial
  Synthetic oligonucleotide
taagactatgaaagctccatcgcatctccgtttgtaggagcaatgaagct

SEQ ID NO: 285134 - DNA, 50 bp, Artificial
  Synthetic oligonucleotide
agagacacggcggtcatgggcacaaacaagttgacactaattcctcgcat

SEQ ID NO: 285135 - DNA, 50 bp, Artificial
  Synthetic oligonucleotide
agagaccccaccaagttcgggagatccattctgcacgcgggtcgctggtg

SEQ ID NO: 285136 - DNA, 50 bp, Artificial
  Synthetic oligonucleotide
agagaggctgtaggagagcgcgacaactacccgcaatccatggggtcgct

SEQ ID NO: 285137 - DNA, 50 bp, Artificial
  Synthetic oligonucleotide
agagatggtcagcgagcgaagcccaaggacagccggagtgccgcatacat

SEQ ID NO: 285138 - DNA, 50 bp, Artificial
  Synthetic oligonucleotide
agagattgggttggaggtgtcgttgtagacgttggcctgatgcccggcga

SEQ ID NO: 285139 - DNA, 50 bp, Artificial
  Synthetic oligonucleotide
actgggcaacgcaaccgcggggcctatgatgttctatactggggctgcca

SEQ ID NO: 285140 - DNA, 50 bp, Artificial
  Synthetic oligonucleotide
actgttcacgcgaatctccccatgcggcctgtccactgcgagaacctccg

SEQ ID NO: 285141 - DNA, 60 bp, Artificial
  Synthetic oligonucleotide
tcatgtctaaggtcgcatctaccttctcgcgtatgtggacacgatcttgctactgcagct

SEQ ID NO: 285142 - DNA, 54 bp, Artificial
  Synthetic oligonucleotide
taattcttgagtattaattagagtcccacgccccgaagtctcttcgggttttga

SEQ ID NO: 285143 - DNA, 50 bp, Artificial
  Synthetic oligonucleotide
acttactattggccgatgcagttatacggcccgacagaaaaaggcttgta

SEQ ID NO: 285144 - DNA, 50 bp, Artificial
  Synthetic oligonucleotide
acttcacggcgtggtacgttctcctcgtgcccatggctgcgggcctatag

SEQ ID NO: 285145 - DNA, 50 bp, Artificial
  Synthetic oligonucleotide
acttccgtcgacgcggcagtgttgatagcgctcggcatctgtgcaaccgt

SEQ ID NO: 285146 - DNA, 50 bp, Artificial
  Synthetic oligonucleotide
acttctgcgcttgctcgaggggcatgaggtcgaatgcgggggaggtgttc

SEQ ID NO: 285147 - DNA, 50 bp, Artificial
  Synthetic oligonucleotide
acttgcagccgcaaggatcctcaagccaccttcagtccccgcaccttcag

SEQ ID NO: 285148 - DNA, 50 bp, Artificial
  Synthetic oligonucleotide
acttgcggtcgaaccccgtctcagggggtatctctggggcggtacccggg

SEQ ID NO: 285149 - DNA, 50 bp, Artificial
  Synthetic oligonucleotide
acttggttcccgctccacggcacggcatactccgtaagccgccagccctt

SEQ ID NO: 285150 - DNA, 50 bp, Artificial
  Synthetic oligonucleotide
actttattataccatgaatatatatgtaagcagcgaatggtatttatagt

SEQ ID NO: 285151 - DNA, 50 bp, Artificial
  Synthetic oligonucleotide
tacactttattagcccactacggtgagttaggttgggtatgtcgatgtca

SEQ ID NO: 285152 - DNA, 50 bp, Artificial
  Synthetic oligonucleotide
actttgcggtgttgacccggggacgcccatgtaccctggagtgagcgggt

SEQ ID NO: 285153 - DNA, 53 bp, Artificial
  Synthetic oligonucleotide
agaaccaattgaagagaacgaaagcttccgtttccgggtcggtgttcgtgtga

SEQ ID NO: 285154 - DNA, 50 bp, Artificial
  Synthetic oligonucleotide
tacacaactttcgacatatgataagatagggagaccaattcaatacgtag

SEQ ID NO: 285155 - DNA, 50 bp, Artificial
  Synthetic oligonucleotide
agaaaacactgcacgaggtgccgtcactggcaacggagggcgaatggaca

SEQ ID NO: 285156 - DNA, 50 bp, Artificial
  Synthetic oligonucleotide
agaaacgttgctcctccatccattagccagacccctcgcaagggcctggc

SEQ ID NO: 285157 - DNA, 50 bp, Artificial
  Synthetic oligonucleotide
agaaagcgcgaagggtgctggggtatcagcctagggtcggcatgcaggaa

SEQ ID NO: 285158 - DNA, 50 bp, Artificial
  Synthetic oligonucleotide
agaaccaccgatcgctggaccgttccaccagtcccagaagggagactgca

SEQ ID NO: 285159 - DNA, 50 bp, Artificial
  Synthetic oligonucleotide
agaaccaggcccatctgcgccgtcagggccaaaagtccgacagggatgag

SEQ ID NO: 285160 - DNA, 50 bp, Artificial
  Synthetic oligonucleotide
agaacgccacaatccgctgcttacatgcaaacgctccatcgcagcaccga

SEQ ID NO: 285161 - DNA, 50 bp, Artificial
  Synthetic oligonucleotide
agaacgttggagatcgaggcaaagtcagtcggtcgcgagtcttgggcggc

SEQ ID NO: 285162 - DNA, 50 bp, Artificial
  Synthetic oligonucleotide
agaagctcgcggcttggggtacgatttgtggttacaggtcagccggggta

SEQ ID NO: 285163 - DNA, 50 bp, Artificial
  Synthetic oligonucleotide
agaaggccgtcgaccctaccactggtgcggtagtcgggtatgcgcgctgg

SEQ ID NO: 285164 - DNA, 58 bp, Artificial
  Synthetic oligonucleotide
gaactaggccgcttgcacttcgctttggaacggctccactgacaccgcagtggtaggg

SEQ ID NO: 285165 - DNA, 50 bp, Artificial
  Synthetic oligonucleotide
agaaggggctcgcttaggcattcgcgaggtgtgtggcgctgaaccatgat

SEQ ID NO: 285166 - DNA, 50 bp, Artificial
  Synthetic oligonucleotide
agaagttgggactgagcggaaaggtcacggaggtggttcgcgcaagggag

SEQ ID NO: 285167 - DNA, 50 bp, Artificial
  Synthetic oligonucleotide
agaatccacggcccagccaaaccaacggaacggggatcacctcccgattc

SEQ ID NO: 285168 - DNA, 50 bp, Artificial
  Synthetic oligonucleotide
agaatccccaaccgcgggcacggcaaacgaaggaagtggttctgggctcc

SEQ ID NO: 285169 - DNA, 50 bp, Artificial
  Synthetic oligonucleotide
agaatcggcacgtgaagggagggtgttggccgcggaagaatggagtggtt

SEQ ID NO: 285170 - DNA, 50 bp, Artificial
  Synthetic oligonucleotide
acgagcgcattgtccccctcaggcgacaactgtccccgcgaggtataggc

SEQ ID NO: 285171 - DNA, 50 bp, Artificial
  Synthetic oligonucleotide
acgaggtactgagcggactcttcgacctcaggcgggacatccgcggttga

SEQ ID NO: 285172 - DNA, 50 bp, Artificial
  Synthetic oligonucleotide
acgagttgcccaaggaggccacactctccgacgcgcgcaaactgttccat

SEQ ID NO: 285173 - DNA, 50 bp, Artificial
  Synthetic oligonucleotide
acgatagcggactcggtagctgaaccggagcatgggcgggaaatggcgta

SEQ ID NO: 285174 - DNA, 50 bp, Artificial
  Synthetic oligonucleotide
acgatccacctccaaactggtcaattgacagccggggccagcgatcggcg

SEQ ID NO: 285175 - DNA, 60 bp, Artificial
  Synthetic oligonucleotide
gaactgataactgaggtgactccgtgtttaagcgccaagctaagcatcaagaacagtcga

SEQ ID NO: 285176 - DNA, 50 bp, Artificial
  Synthetic oligonucleotide
acgatcctcctaccgctgcagctcgccccttcagcgaacccgcatacgat

SEQ ID NO: 285177 - DNA, 50 bp, Artificial
  Synthetic oligonucleotide
acgatcgcgagtcatcaggtgcagtatcccttgccagtgcagcctccgga

SEQ ID NO: 285178 - DNA, 50 bp, Artificial
  Synthetic oligonucleotide
acgatcgctccaaaccgtccgtccgactggggaaacgggcgaatgctgca

SEQ ID NO: 285179 - DNA, 50 bp, Artificial
  Synthetic oligonucleotide
acgattccattgccccattcggtggaattaccctcacgagccatgattcc

SEQ ID NO: 285180 - DNA, 50 bp, Artificial
  Synthetic oligonucleotide
tagtcgcacagagcatgccaaagcatcttcggcgttaccgcctgacggtt

SEQ ID NO: 285181 - DNA, 50 bp, Artificial
  Synthetic oligonucleotide
acgattgctcgtaggcgttcctctggttgggttgagtccatggcaacaga

SEQ ID NO: 285182 - DNA, 50 bp, Artificial
  Synthetic oligonucleotide
acgcaaacatgaacggaggaggcggataccaggcgtcgctcgaaaacggc

SEQ ID NO: 285183 - DNA, 50 bp, Artificial
  Synthetic oligonucleotide
acgcaaacccgacccccaacaacggatccacgggtctcggctccatcaga

SEQ ID NO: 285184 - DNA, 50 bp, Artificial
  Synthetic oligonucleotide
acgcaacgacccagcccaccctagtggcacgattctcccgcgacacctgc

SEQ ID NO: 285185 - DNA, 50 bp, Artificial
  Synthetic oligonucleotide
acgcacccaaagaccacaatgttgaggcgtagtccggacatgctcgggcg

SEQ ID NO: 285186 - DNA, 56 bp, Artificial
  Synthetic oligonucleotide
ctccgcaattccccttcccgcccttatcgataagcttggtatcctcttgagctacg

SEQ ID NO: 285187 - DNA, 50 bp, Artificial
  Synthetic oligonucleotide
acgcagacgtggcgctcgtatcccgctcacaatcggacccgacccaagcc

SEQ ID NO: 285188 - DNA, 50 bp, Artificial
  Synthetic oligonucleotide
acgcagcccccggcatgctcattcccttgtgagcgtccgaaaccgtgtgg

SEQ ID NO: 285189 - DNA, 50 bp, Artificial
  Synthetic oligonucleotide
taggttccatggcccacctgcggcccccatcggcgagtcacaaccggggg

SEQ ID NO: 285190 - DNA, 50 bp, Artificial
  Synthetic oligonucleotide
acgcaggcagcgtcgtgttaatcgctgggtcaacaacatgccggggtacc

SEQ ID NO: 285191 - DNA, 50 bp, Artificial
  Synthetic oligonucleotide
acgcaggcgtgctaggctcgcggacaatgcagaagggccagtcatgtgga

SEQ ID NO: 285192 - DNA, 50 bp, Artificial
  Synthetic oligonucleotide
acgcaggtaccaggtcgcaccaaccgtggccgagtcaggtcttagtggcg

SEQ ID NO: 285193 - DNA, 50 bp, Artificial
  Synthetic oligonucleotide
acgcatctcgttgtactccgctcgggtccaatctgcggcgcacatccaga

SEQ ID NO: 285194 - DNA, 50 bp, Artificial
  Synthetic oligonucleotide
acgccacaagctcacggtcgctgaattggtcgcgggcttgcacgaaatgg

SEQ ID NO: 285195 - DNA, 50 bp, Artificial
  Synthetic oligonucleotide
acgcccaaccacccgtcacccatgacgctgcggattttccatagggtccc

SEQ ID NO: 285196 - DNA, 50 bp, Artificial
  Synthetic oligonucleotide
acgcccggagtcgagaccctgctccgcacggactgcgtgggtgacactga

SEQ ID NO: 285197 - DNA, 58 bp, Artificial
  Synthetic oligonucleotide
gtgactcaataagctcgtgcgatcccccgtccacggcgggtagtagccagcggctcgg

SEQ ID NO: 285198 - DNA, 50 bp, Artificial
  Synthetic oligonucleotide
acgccgcccgagtatggggagtcaccctgtgaagacaatccgtcagcggc

SEQ ID NO: 285199 - DNA, 50 bp, Artificial
  Synthetic oligonucleotide
tatcgtggcttttactttgcagaaacccgcgcaggcgaacggggctgact

SEQ ID NO: 285200 - DNA, 50 bp, Artificial
  Synthetic oligonucleotide
acctcccgctcccgtgtgcttaactcctggcgtccggactactgtcgcaa

SEQ ID NO: 285201 - DNA, 50 bp, Artificial
  Synthetic oligonucleotide
acctcccggcgaggcattgtgtttgtcgcggtagaccgatggggttggcg

SEQ ID NO: 285202 - DNA, 50 bp, Artificial
  Synthetic oligonucleotide
acctccgccctacgcagtcaaggcaaaactgagccccatcaggcccatcc

SEQ ID NO: 285203 - DNA, 50 bp, Artificial
  Synthetic oligonucleotide
acctccgcgcaggggcccggcaaaccatctctgaacgaaggcaggcgtaa

SEQ ID NO: 285204 - DNA, 50 bp, Artificial
  Synthetic oligonucleotide
acctccgttcgctgtccgctagcctccagcctcggcttatggagaacgta

SEQ ID NO: 285205 - DNA, 50 bp, Artificial
  Synthetic oligonucleotide
tatccagccggaaactccagatgaagggcctagcaattcgtggccgtatg

SEQ ID NO: 285206 - DNA, 50 bp, Artificial
  Synthetic oligonucleotide
acctcctccgcaaactgggggtattgtctggtcccgcgtcgtacgccagg

SEQ ID NO: 285207 - DNA, 50 bp, Artificial
  Synthetic oligonucleotide
acctccttgggccccgttggtgcgccacgcttctttctcgcgccggagat

SEQ ID NO: 285208 - DNA, 60 bp, Artificial
  Synthetic oligonucleotide
gaagaccgacgttcgaggcaatggtccagaggaaagtggtccagatgcgagatcgcgagt

SEQ ID NO: 285209 - DNA, 50 bp, Artificial
  Synthetic oligonucleotide
acctcggaggccctcctgcggagtatttctcggcgtgggtttaatccgcg

SEQ ID NO: 285210 - DNA, 50 bp, Artificial
  Synthetic oligonucleotide
acctctacgatgaccccatggctcgctatgacaccggccgattggaccgc

SEQ ID NO: 285211 - DNA, 50 bp, Artificial
  Synthetic oligonucleotide
acctctcccggctgagggatccagtatttcgcctttccaccgcgctcgta

SEQ ID NO: 285212 - DNA, 50 bp, Artificial
  Synthetic oligonucleotide
acctgagaggcacccccgcggattccacgcgatactccaagtccaagggc

SEQ ID NO: 285213 - DNA, 50 bp, Artificial
  Synthetic oligonucleotide
acctgcaacggctcatctgtcacccggcccttgtttccgccgctaggatc

SEQ ID NO: 285214 - DNA, 50 bp, Artificial
  Synthetic oligonucleotide
acctggccgttcggaaagccgctctgaaggggataaccactcgcactccg

SEQ ID NO: 285215 - DNA, 50 bp, Artificial
  Synthetic oligonucleotide
acctggctttgcacagcaggtcgaagcagaggcgcatgatgtcgccagat

SEQ ID NO: 285216 - DNA, 50 bp, Artificial
  Synthetic oligonucleotide
acctggggccggacgtaccaccggaatttgggggaatgggtatgccactc

SEQ ID NO: 285217 - DNA, 50 bp, Artificial
  Synthetic oligonucleotide
acctgttcccaccgggcagctgaatgtgctctcctgtcttccccgagtct

SEQ ID NO: 285218 - DNA, 50 bp, Artificial
  Synthetic oligonucleotide
accttagcccggtcggcatcttttgcactggctgcgtcagccacatccag

SEQ ID NO: 285219 - DNA, 60 bp, Artificial
  Synthetic oligonucleotide
tacaatgatctagaacgcatggaggatcttgatccaacaagacgcaaggcattactcgtg

SEQ ID NO: 285220 - DNA, 50 bp, Artificial
  Synthetic oligonucleotide
accttaggcctaccaacggcgtctcgggaggggtaatgtttcgcgctccg

SEQ ID NO: 285221 - DNA, 50 bp, Artificial
  Synthetic oligonucleotide
acgaagcatgaggttccaggcctcgggatagccaggacatacgcgtccgc

SEQ ID NO: 285222 - DNA, 50 bp, Artificial
  Synthetic oligonucleotide
acgacgtgcttgacgtgggggtgccattcaacgccgctgggacctgcgtt

SEQ ID NO: 285223 - DNA, 50 bp, Artificial
  Synthetic oligonucleotide
acgacttgctttcgagaccccgggccaagaagcctcgtcggcccaaccgc

SEQ ID NO: 285224 - DNA, 50 bp, Artificial
  Synthetic oligonucleotide
acgagaaacctttggggcccgccttgtgtcggagcatactgccctccggt

SEQ ID NO: 285225 - DNA, 50 bp, Artificial
  Synthetic oligonucleotide
acgagatactgccattgcgaggtgtgggggacgcgatgctcgggcggaac

SEQ ID NO: 285226 - DNA, 50 bp, Artificial
  Synthetic oligonucleotide
acgagccactggcgaatcattgcaataaggccgcacggacttccgcgcaa

SEQ ID NO: 285227 - DNA, 50 bp, Artificial
  Synthetic oligonucleotide
acggcgtccaatacagctcaaacaccgccggtgagtctgggggaaatgcc

SEQ ID NO: 285228 - DNA, 50 bp, Artificial
  Synthetic oligonucleotide
tagattgatacacagcgattctgccaccccagcggcccatcggtgttgct

SEQ ID NO: 285229 - DNA, 50 bp, Artificial
  Synthetic oligonucleotide
acggctgctctgattgtcggatgtctgggggctcccctcactccaccctt

SEQ ID NO: 285230 - DNA, 57 bp, Artificial
  Synthetic oligonucleotide
acttttcgctagaactgaaatgactactactatccacttgcggtaccggtttatgca

SEQ ID NO: 285231 - DNA, 50 bp, Artificial
  Synthetic oligonucleotide
acgggagggatcgtatgaggggcttgttggagcggcaggggtttggtctg

SEQ ID NO: 285232 - DNA, 50 bp, Artificial
  Synthetic oligonucleotide
acgggatctggcatagttcccggaacagcagcccacggctgtaagcaggc

SEQ ID NO: 285233 - DNA, 50 bp, Artificial
  Synthetic oligonucleotide
acgggccgtattaccgcccggccatgggtgtttgcattgctctccaggtg

SEQ ID NO: 285234 - DNA, 50 bp, Artificial
  Synthetic oligonucleotide
acgggcctgggcgcagtgcctctcctcagaagccgccatcatatgtagct

SEQ ID NO: 285235 - DNA, 50 bp, Artificial
  Synthetic oligonucleotide
acgggctgttttgtaagtacttgggcgctaatagtggacgggggccgggc

SEQ ID NO: 285236 - DNA, 50 bp, Artificial
  Synthetic oligonucleotide
acggggcaagtctcggggagagaagcctggcctgtcggaaccttggttag

SEQ ID NO: 285237 - DNA, 50 bp, Artificial
  Synthetic oligonucleotide
acggggcaccaggatatgcacttcgtcaacgtcaacagggcgacggggta

SEQ ID NO: 285238 - DNA, 50 bp, Artificial
  Synthetic oligonucleotide
acgggtgcgctaagcggctgctgcaggtcactgcatacggtgtccgcagg

SEQ ID NO: 285239 - DNA, 50 bp, Artificial
  Synthetic oligonucleotide
acgggtgtgatgaaattagctgcgggctccgtcacatcgcacggcccacg

SEQ ID NO: 285240 - DNA, 50 bp, Artificial
  Synthetic oligonucleotide
acggtacccgtgccgtccctcaggaacgcaggcttgagagtcctcagctt

SEQ ID NO: 285241 - DNA, 60 bp, Artificial
  Synthetic oligonucleotide
actttggttgtcttggacaaaatgaactctgcagcttgtcgcacgctggaaagagaggct

SEQ ID NO: 285242 - DNA, 50 bp, Artificial
  Synthetic oligonucleotide
acggtatccgaccattgaaccctggaacgccgagggaggcagtgcacggc

SEQ ID NO: 285243 - DNA, 50 bp, Artificial
  Synthetic oligonucleotide
acggtcctgggtcgcccccaagtcggcaattatgcggggacagtaggttc

SEQ ID NO: 285244 - DNA, 50 bp, Artificial
  Synthetic oligonucleotide
acggtgggatggatctgtgccctcgccatcgagttagcagcctcggaggg

SEQ ID NO: 285245 - DNA, 50 bp, Artificial
  Synthetic oligonucleotide
acggttcgcgcccctacaagtgagtcagtatctctccggccatggtcccg

SEQ ID NO: 285246 - DNA, 50 bp, Artificial
  Synthetic oligonucleotide
acgtacaatgccaagcttcggcctaaactgccaggtccagctgaccggga

SEQ ID NO: 285247 - DNA, 50 bp, Artificial
  Synthetic oligonucleotide
acgtagattcgtttattgacgccaaacttatgcttcgttttaacttcctc

SEQ ID NO: 285248 - DNA, 50 bp, Artificial
  Synthetic oligonucleotide
acgtagttgtccagttgagggcacaagggccgctggggtcatggcgcaat

SEQ ID NO: 285249 - DNA, 50 bp, Artificial
  Synthetic oligonucleotide
tagaaggtcgctatatagccgaatttctctgcttcaaagtcgcactccag

SEQ ID NO: 285250 - DNA, 50 bp, Artificial
  Synthetic oligonucleotide
acgtatcccgtccaagggctatcagtggcgacgcacctgtgcctacgccg

SEQ ID NO: 285251 - DNA, 50 bp, Artificial
  Synthetic oligonucleotide
acgtcagccggccaggatcccagcaacacgggtccccgcgtatcagcgtg

SEQ ID NO: 285252 - DNA, 60 bp, Artificial
  Synthetic oligonucleotide
tattgtgtgcacggctttcctttctgttaagcatccacgtctttcatcctctcaggggga

SEQ ID NO: 285253 - DNA, 60 bp, Artificial
  Synthetic oligonucleotide
gaagaccgctaggtggagcgccgttcggccatgtttgtgcctgacgtccactctaaggca

SEQ ID NO: 285254 - DNA, 50 bp, Artificial
  Synthetic oligonucleotide
acgtcccccgccctcgccgctaacgcggattgaagggcagctcccagcat

SEQ ID NO: 285255 - DNA, 50 bp, Artificial
  Synthetic oligonucleotide
acgtcgccaaagcccccgctgagttcgtttcgcatggtagcttccacgcg

SEQ ID NO: 285256 - DNA, 50 bp, Artificial
  Synthetic oligonucleotide
tactgtcttcgagacaattcaagtatcaacgccgttaaatttgactagtt

SEQ ID NO: 285257 - DNA, 50 bp, Artificial
  Synthetic oligonucleotide
acgcgaaccgggtgagctacgcacgctggaccggggtagagcgacttacg

SEQ ID NO: 285258 - DNA, 50 bp, Artificial
  Synthetic oligonucleotide
acgcgaaggctgtttggtcctgaccgcgacgggccctcactgggagatag

SEQ ID NO: 285259 - DNA, 50 bp, Artificial
  Synthetic oligonucleotide
acgcgagtctgggagctacaagcgggctcgtctccttgctgccaaaccgc

SEQ ID NO: 285260 - DNA, 50 bp, Artificial
  Synthetic oligonucleotide
acgcgcgcttagttcggtcgcggcggacattaacaagcttttgagcccga

SEQ ID NO: 285261 - DNA, 50 bp, Artificial
  Synthetic oligonucleotide
acgcgcgggcgcattgggaggatggtgttcctcggatggacgcgatcacg

SEQ ID NO: 285262 - DNA, 50 bp, Artificial
  Synthetic oligonucleotide
tagctgttcctggtcttgcgttcattcccgagagcccccggtggttgata

SEQ ID NO: 285263 - DNA, 50 bp, Artificial
  Synthetic oligonucleotide
acgcgctcaaacgtgacgcctagctctgtcatgacccgcactgcggccag

SEQ ID NO: 285264 - DNA, 53 bp, Artificial
  Synthetic oligonucleotide
cacgaaacctacgggtagaggcgtaagcctttcactactaacttacgcacgtc

SEQ ID NO: 285265 - DNA, 50 bp, Artificial
  Synthetic oligonucleotide
acgcgcttcggggtgtgcagctgtttgcggaatgtggcgccgacccattg

SEQ ID NO: 285266 - DNA, 50 bp, Artificial
  Synthetic oligonucleotide
acgcgggactagggagaacgcgccccaaaaagctcactcccaaggcgcct

SEQ ID NO: 285267 - DNA, 50 bp, Artificial
  Synthetic oligonucleotide
acgcgtcgggagccctgctccgctcctcggttccgaacgcaagcgcacct

SEQ ID NO: 285268 - DNA, 50 bp, Artificial
  Synthetic oligonucleotide
acgctgaacggagcgtctcaggaggtaggccaataacggagctgggagcg

SEQ ID NO: 285269 - DNA, 50 bp, Artificial
  Synthetic oligonucleotide
acgcttcgactggcgccaccgggaaagagctgaatcctggggaggatacc

SEQ ID NO: 285270 - DNA, 50 bp, Artificial
  Synthetic oligonucleotide
acgcttgcgcagacggggagccaatgagtcggtagacgcgagccgaagag

SEQ ID NO: 285271 - DNA, 50 bp, Artificial
  Synthetic oligonucleotide
acgcttgtgggtgttgtatgggcgcatgccatcactggaccgggtatccc

SEQ ID NO: 285272 - DNA, 50 bp, Artificial
  Synthetic oligonucleotide
tagcctgggggtgacatactcacagccgatcgatggaggacgtcagacgc

SEQ ID NO: 285273 - DNA, 50 bp, Artificial
  Synthetic oligonucleotide
acggaagaacattccaactcacggacccgtcctgcaacacgcctgggtgc

SEQ ID NO: 285274 - DNA, 50 bp, Artificial
  Synthetic oligonucleotide
acggaccaggcaacggccttgggataaagacggagaccctgccagaggct

SEQ ID NO: 285275 - DNA, 60 bp, Artificial
  Synthetic oligonucleotide
actttgccgcagcgactctgcagacaaagcgaatcgatctgcctcgacagtgttcgagta

SEQ ID NO: 285276 - DNA, 50 bp, Artificial
  Synthetic oligonucleotide
acggaggaaggtgcagatagcccaggaggattgggagtcgaggccgctgc

SEQ ID NO: 285277 - DNA, 50 bp, Artificial
  Synthetic oligonucleotide
tagccgtgcgcagcaatttctgggatttcggtcccagtggcctcgtggtt

SEQ ID NO: 285278 - DNA, 50 bp, Artificial
  Synthetic oligonucleotide
acggcacgggaacccccttccgcgtctggtctcgtttgagtgacgagtcg

SEQ ID NO: 285279 - DNA, 50 bp, Artificial
  Synthetic oligonucleotide
acggccccattcgtatggactacgggtataacgtgcgggtcggggaaggc

SEQ ID NO: 285280 - DNA, 50 bp, Artificial
  Synthetic oligonucleotide
acggccccattgggagagcgggttgttctctgatagggttccgtcgtcgc

SEQ ID NO: 285281 - DNA, 50 bp, Artificial
  Synthetic oligonucleotide
tagccacgtatcacggagatgcccggcttatcaccaggccggctaagctt

SEQ ID NO: 285282 - DNA, 50 bp, Artificial
  Synthetic oligonucleotide
acggcccctgcgagaaccagagggaacgtacgaatcgaactcccgccttg

SEQ ID NO: 285283 - DNA, 50 bp, Artificial
  Synthetic oligonucleotide
acggccggtgcaatgttcccgcaaaacctgctctccgcgcggcatctctt

SEQ ID NO: 285284 - DNA, 50 bp, Artificial
  Synthetic oligonucleotide
tagcaagactactaagtagctaccacatataagatcggctgaattgcccc

SEQ ID NO: 285285 - DNA, 50 bp, Artificial
  Synthetic oligonucleotide
gtgctcgaggagagccttattaagtccgggaattggagtctaatgattac

SEQ ID NO: 285286 - DNA, 52 bp, Artificial
  Synthetic oligonucleotide
tacaccgggggcccacagcgaaacagcacggaaaaacgttttgggatacgga

SEQ ID NO: 285287 - DNA, 50 bp, Artificial
  Synthetic oligonucleotide
aggagaccgatgcagatatatcgggcgccggcacggcacttgaaagtgcc

SEQ ID NO: 285288 - DNA, 50 bp, Artificial
  Synthetic oligonucleotide
aggagcctcggggtccgcgccactggctgagccgttctccactcaattac

SEQ ID NO: 285289 - DNA, 50 bp, Artificial
  Synthetic oligonucleotide
aggaggtatgggccctccagcgggcaaacctagtacgagccctctgaccc

SEQ ID NO: 285290 - DNA, 50 bp, Artificial
  Synthetic oligonucleotide
aggagttggaacgctcgatcgcagtgcaatggctcccggaccagctctcg

SEQ ID NO: 285291 - DNA, 50 bp, Artificial
  Synthetic oligonucleotide
aggatcccgccgtagccgcgaggcatgcgtatctactgactgcagtttcc

SEQ ID NO: 285292 - DNA, 50 bp, Artificial
  Synthetic oligonucleotide
aggatggtgggcccatataccctattcaaccacacgccccacaggactaa

SEQ ID NO: 285293 - DNA, 50 bp, Artificial
  Synthetic oligonucleotide
aggcaacttcccggaggtatcttagctcgaatggccagcagaagccccga

SEQ ID NO: 285294 - DNA, 50 bp, Artificial
  Synthetic oligonucleotide
aggcagtcgagtccgtcaaagcacgctgtcaagccatgggttgtcccgca

SEQ ID NO: 285295 - DNA, 50 bp, Artificial
  Synthetic oligonucleotide
aggcatcaaggcccttctcgcacacgaagcttctcctacattccccgcga

SEQ ID NO: 285296 - DNA, 50 bp, Artificial
  Synthetic oligonucleotide
aggcatcccaattccgtcgatctaagctggccttgtctgacccggctgct

SEQ ID NO: 285297 - DNA, 60 bp, Artificial
  Synthetic oligonucleotide
tacagagcggccgtatgctgatgaccattcgaaacgatttatggctgaggtgtggcagag

SEQ ID NO: 285298 - DNA, 50 bp, Artificial
  Synthetic oligonucleotide
aggccaaccggccgaagctcggtagctggcagactgaaactcagagacgt

SEQ ID NO: 285299 - DNA, 50 bp, Artificial
  Synthetic oligonucleotide
gtgcatagtgggagcatccccgcgcttgtccactaccgaagcggagttcg

SEQ ID NO: 285300 - DNA, 50 bp, Artificial
  Synthetic oligonucleotide
aggcccaactgagggaacctgtgcgccaccagtcacagagaggcggcctg

SEQ ID NO: 285301 - DNA, 50 bp, Artificial
  Synthetic oligonucleotide
aggcccccgaatccgcctaccacgacgttattgtcacaggaacccaccac

SEQ ID NO: 285302 - DNA, 50 bp, Artificial
  Synthetic oligonucleotide
aggcccgagaaaccggggagaagcgagcactggagtcgacagtgacggtg

SEQ ID NO: 285303 - DNA, 50 bp, Artificial
  Synthetic oligonucleotide
aggcccggcaagtcgtagctcagaaaacccaagcaaaccgtgtgcgagta

SEQ ID NO: 285304 - DNA, 50 bp, Artificial
  Synthetic oligonucleotide
aggcccgttccctgggtcttaacaatcctcggtgcgacccttggtctcgc

SEQ ID NO: 285305 - DNA, 50 bp, Artificial
  Synthetic oligonucleotide
aggccgcaagtctaagcgggcagctgcgaagggagctcatgacactgttg

SEQ ID NO: 285306 - DNA, 50 bp, Artificial
  Synthetic oligonucleotide
aggcctccactggtcctggcattttggcctggctgtgtcgagcacgcgag

SEQ ID NO: 285307 - DNA, 50 bp, Artificial
  Synthetic oligonucleotide
aggcctcgtcctcttgagccgcggtttcgtggggagtggatgaccgacgg

SEQ ID NO: 285308 - DNA, 60 bp, Artificial
  Synthetic oligonucleotide
agggcaactatctctgatctactatacatgtcataatatatacagtactgtgtcttctca

SEQ ID NO: 285309 - DNA, 50 bp, Artificial
  Synthetic oligonucleotide
aggcctcttgcgccacttacggaggcgaccccggagttggacgagaaccg

SEQ ID NO: 285310 - DNA, 50 bp, Artificial
  Synthetic oligonucleotide
aggcgcgaccacttgcaccccagacccctcccgatcctcaaatgttgtcc

SEQ ID NO: 285311 - DNA, 50 bp, Artificial
  Synthetic oligonucleotide
aggcgcggcagccctgtcgggtgactcatgaggtacatccgtaacgtgta

SEQ ID NO: 285312 - DNA, 50 bp, Artificial
  Synthetic oligonucleotide
aggcgctgcttctgataccacagtaacgcccgcagcctactgtcgcagga

SEQ ID NO: 285313 - DNA, 50 bp, Artificial
  Synthetic oligonucleotide
agcgggtggaaacaaccgcatgtacacccctccgatcagatcgcccgtag

SEQ ID NO: 285314 - DNA, 50 bp, Artificial
  Synthetic oligonucleotide
agcggtatctcgacgggcgttaggggcacgcaccgaccccacatgaatcc

SEQ ID NO: 285315 - DNA, 50 bp, Artificial
  Synthetic oligonucleotide
agcggtcgtgaaggacacaagcgatgcctcgtgggtcggttcggagatca

SEQ ID NO: 285316 - DNA, 50 bp, Artificial
  Synthetic oligonucleotide
agcggtgcgtttctccgaaacaagcgtgcagccccgatcacggaaaacaa

SEQ ID NO: 285317 - DNA, 50 bp, Artificial
  Synthetic oligonucleotide
agcgtcaggcacctggcactccagagtacgaatgtcacgccaactgcggt

SEQ ID NO: 285318 - DNA, 50 bp, Artificial
  Synthetic oligonucleotide
agcgtcgagacaaacccgttgcaacccctccaagaatgggccagtgggcc

SEQ ID NO: 285319 - DNA, 51 bp, Artificial
  Synthetic oligonucleotide
acttggtaaagtccaacggacttaattcccgctccgtggcggagttattcg

SEQ ID NO: 285320 - DNA, 50 bp, Artificial
  Synthetic oligonucleotide
agcgtgagcgttcgtccgttcagcgtgcaaaccgaccggtgatcgacttg

SEQ ID NO: 285321 - DNA, 50 bp, Artificial
  Synthetic oligonucleotide
agctatgctcaatgtgacggtgagcccgtaccatacaagcgagaaggagg

SEQ ID NO: 285322 - DNA, 50 bp, Artificial
  Synthetic oligonucleotide
agctcagtgggaaagcgagccctgcaccaacgtagtctggggtcctgaca

SEQ ID NO: 285323 - DNA, 50 bp, Artificial
  Synthetic oligonucleotide
agctccgagaatccaaccaatcaccgctgcactgctcagccccgtgtggc

SEQ ID NO: 285324 - DNA, 50 bp, Artificial
  Synthetic oligonucleotide
agctcgccgcagatggcccaaattagtgcgcaccccaaacacaaagcgac

SEQ ID NO: 285325 - DNA, 50 bp, Artificial
  Synthetic oligonucleotide
gtggcctcacaccgccaccggctattccccgactgaactctcctggtatg

SEQ ID NO: 285326 - DNA, 50 bp, Artificial
  Synthetic oligonucleotide
agctctgcagccaatcgatagcgtgacggctgtccatagccgaggggata

SEQ ID NO: 285327 - DNA, 50 bp, Artificial
  Synthetic oligonucleotide
agctgagttgtagcacgctgaatggtcggaacgcaccgggtcagtccggg

SEQ ID NO: 285328 - DNA, 50 bp, Artificial
  Synthetic oligonucleotide
agctgcagattcggtgatgccagtgctccagacccctgtatcggagcgcg

SEQ ID NO: 285329 - DNA, 50 bp, Artificial
  Synthetic oligonucleotide
agctgttcggcagagagcgacgtcactttacgcgccccagcacgggactc

SEQ ID NO: 285330 - DNA, 55 bp, Artificial
  Synthetic oligonucleotide
acttggctctgtaggccacaaagtctccaaacaccccttcaacgtcgttgaaatc

SEQ ID NO: 285331 - DNA, 50 bp, Artificial
  Synthetic oligonucleotide
gtggatataatgtagcctggggtgtcggttgtctttatagtatatagccc

SEQ ID NO: 285332 - DNA, 50 bp, Artificial
  Synthetic oligonucleotide
agcttaccgccggggcaagatctccgtgattattgcaacggaccgggcct

SEQ ID NO: 285333 - DNA, 50 bp, Artificial
  Synthetic oligonucleotide
agcttgcacggcgctttctagacgctgcggtggagattgtcggggatact

SEQ ID NO: 285334 - DNA, 50 bp, Artificial
  Synthetic oligonucleotide
agctttgctccaatgcgccagtgaggagcttccgatgctgggtatgcagc

SEQ ID NO: 285335 - DNA, 50 bp, Artificial
  Synthetic oligonucleotide
aggaaccagttcgtgcgagcatcgggtcctccgatgagccctactgtgcc

SEQ ID NO: 285336 - DNA, 50 bp, Artificial
  Synthetic oligonucleotide
aggaacctcctagcgccacccaaccgcccactttcctccgctagaggagt

SEQ ID NO: 285337 - DNA, 50 bp, Artificial
  Synthetic oligonucleotide
aggaaggctctcgttccaccggcaggtctaccgtctgattcggtgctcgc

SEQ ID NO: 285338 - DNA, 50 bp, Artificial
  Synthetic oligonucleotide
aggaagtgcggagttgtcgtgaggtgtgtaggcgggcgctggaccggagg

SEQ ID NO: 285339 - DNA, 50 bp, Artificial
  Synthetic oligonucleotide
aggacacagtcatcgtcccaccaggcaaatggctccgagggcctctctgc

SEQ ID NO: 285340 - DNA, 50 bp, Artificial
  Synthetic oligonucleotide
agtcagaccattagctggctaaacggccaatcggggcaaatccccggcgt

SEQ ID NO: 285341 - DNA, 60 bp, Artificial
  Synthetic oligonucleotide
cgcattgacaatgagcgagcccggcagtgggagatcaaattgagcaatcttcacgctcgc

SEQ ID NO: 285342 - DNA, 50 bp, Artificial
  Synthetic oligonucleotide
agtcagctggaattgggcgcgatacgcagcgaagaaccttttgacggccc

SEQ ID NO: 285343 - DNA, 50 bp, Artificial
  Synthetic oligonucleotide
agtccctggcgaccccgtcagtctgcagacatgcattgagtgcgcgctag

SEQ ID NO: 285344 - DNA, 50 bp, Artificial
  Synthetic oligonucleotide
agtccgggacagtgactccgcccacccacgccggtcattgttgtgctacg

SEQ ID NO: 285345 - DNA, 50 bp, Artificial
  Synthetic oligonucleotide
agtccgtttcgcaggcatgtgaattacagcgtgtcccggtccaccgtcgg

SEQ ID NO: 285346 - DNA, 50 bp, Artificial
  Synthetic oligonucleotide
agtcgaccattgaccgcaccgagtcaggggagcatataaaccgcgagccg

SEQ ID NO: 285347 - DNA, 50 bp, Artificial
  Synthetic oligonucleotide
agtcgtacggtgctacccgcgactcagcgcacttcccgccacactgggag

SEQ ID NO: 285348 - DNA, 50 bp, Artificial
  Synthetic oligonucleotide
agtctcgttcagcagagacccatgttcttcccgggggcgcttccccgcat

SEQ ID NO: 285349 - DNA, 50 bp, Artificial
  Synthetic oligonucleotide
agtctgttctgcagactgggcgctttgcggatggaacgcccctaacgcgc

SEQ ID NO: 285350 - DNA, 50 bp, Artificial
  Synthetic oligonucleotide
agtgacaccaaaatcgacgccctaagcgctaccgtccaggaccacgccat

SEQ ID NO: 285351 - DNA, 50 bp, Artificial
  Synthetic oligonucleotide
agtgccgtactgagctcttgagcgccgagagtcgcgtgttcgctgagcct

SEQ ID NO: 285352 - DNA, 60 bp, Artificial
  Synthetic oligonucleotide
tacatagagcatctagaactgtatcaggccagctcttcataccgatcatctccagttttg

SEQ ID NO: 285353 - DNA, 50 bp, Artificial
  Synthetic oligonucleotide
gtcggttgaccgattcaagccacagtgcgaccgatgccggggcgtttgat

SEQ ID NO: 285354 - DNA, 50 bp, Artificial
  Synthetic oligonucleotide
agtgcgcgtgaccaggagctagactcggtgaccaaatcgcacgtggacct

SEQ ID NO: 285355 - DNA, 50 bp, Artificial
  Synthetic oligonucleotide
agtgcgctccattaggccccgatccgtgggacggctgtgcgtgagcgggt

SEQ ID NO: 285356 - DNA, 50 bp, Artificial
  Synthetic oligonucleotide
agtggccgggactgtatgccccggaagacgctttcattccacggcaggtt

SEQ ID NO: 285357 - DNA, 50 bp, Artificial
  Synthetic oligonucleotide
agtggggcattggtacgctcttgggggagctttaggtctcgccatgcggc

SEQ ID NO: 285358 - DNA, 50 bp, Artificial
  Synthetic oligonucleotide
agtgtatcgaccggctccgtcagtaggcgcggcagccctgtcgggtgact

SEQ ID NO: 285359 - DNA, 50 bp, Artificial
  Synthetic oligonucleotide
agtgtcaaccaacaacccatagccgatctccgggacccccgaagccactg

SEQ ID NO: 285360 - DNA, 50 bp, Artificial
  Synthetic oligonucleotide
agtgtcaatcgtaaacccttgccttgaggctttagtctctctgataaact

SEQ ID NO: 285361 - DNA, 50 bp, Artificial
  Synthetic oligonucleotide
agtgtctactcacccaagcgtcggctaacccctgtggcaccggctcaccc

SEQ ID NO: 285362 - DNA, 50 bp, Artificial
  Synthetic oligonucleotide
agttccattgtagcagacgggccagtcgtccgcgcacgggaggatgccag

SEQ ID NO: 285363 - DNA, 58 bp, Artificial
  Synthetic oligonucleotide
tatttaggaatccagcgactgcttgccagggaaccgtggcctctaggccttccataac

SEQ ID NO: 285364 - DNA, 58 bp, Artificial
  Synthetic oligonucleotide
gaagcccaccccaccggcgatacaagcgacacaaagtctcttttcgaatggctgccga

SEQ ID NO: 285365 - DNA, 50 bp, Artificial
  Synthetic oligonucleotide
agttggcgcactcctctttctcacgcccacagcggattttccttgcgcga

SEQ ID NO: 285366 - DNA, 50 bp, Artificial
  Synthetic oligonucleotide
agttgtcggatccaagtttgaggaagccggtgggtatgagcccggggtcg

SEQ ID NO: 285367 - DNA, 50 bp, Artificial
  Synthetic oligonucleotide
agttgttgccggcgtctcttccatgcgccaacagtcaacaacggacaggg

SEQ ID NO: 285368 - DNA, 50 bp, Artificial
  Synthetic oligonucleotide
aggctttcctgccccgtcgcggggaatccattcccatccatgctcccgtc

SEQ ID NO: 285369 - DNA, 50 bp, Artificial
  Synthetic oligonucleotide
agggagccggtcgtgcgtgttctgcgcgctttggaggaagatattgaccg

SEQ ID NO: 285370 - DNA, 50 bp, Artificial
  Synthetic oligonucleotide
agggagtggcgccgcctgtaacctttagctttggacgcgcaccagtgatg

SEQ ID NO: 285371 - DNA, 50 bp, Artificial
  Synthetic oligonucleotide
agggatggtacggctccgctccgactagacgcgagaaatcagacgccgcg

SEQ ID NO: 285372 - DNA, 50 bp, Artificial
  Synthetic oligonucleotide
agggcaagcgaacagcctagcgcacactctagtcggctccgagccttgaa

SEQ ID NO: 285373 - DNA, 50 bp, Artificial
  Synthetic oligonucleotide
agggccaaagcgcctatccaccggggacgattgcgaaactggtacgttct

SEQ ID NO: 285374 - DNA, 50 bp, Artificial
  Synthetic oligonucleotide
agggccgaataccacgttgcttgtgggctcagacgcacgtcgtgatcagc

SEQ ID NO: 285375 - DNA, 57 bp, Artificial
  Synthetic oligonucleotide
gaaatccaagtggtgccacgaagcgaacgacggggctcgcgccaaattactcaagag

SEQ ID NO: 285376 - DNA, 50 bp, Artificial
  Synthetic oligonucleotide
agggcgctaataacgtgggcgggattccacccttggtcgactaggggcac

SEQ ID NO: 285377 - DNA, 50 bp, Artificial
  Synthetic oligonucleotide
agggcggcattaagcggggatgtgagtaggaggacataggtgccaggccg

SEQ ID NO: 285378 - DNA, 50 bp, Artificial
  Synthetic oligonucleotide
agggcgtgcaaacagtgtcaggtctgagtccgtctagtgtggcttggccc

SEQ ID NO: 285379 - DNA, 50 bp, Artificial
  Synthetic oligonucleotide
agggctcatgaccctaagttttaggtgcaactcctaaatccgcaaccaaa

SEQ ID NO: 285380 - DNA, 50 bp, Artificial
  Synthetic oligonucleotide
aggggcactttgctcccacgagaggcggggtgtgcattgatttcggtcgt

SEQ ID NO: 285381 - DNA, 50 bp, Artificial
  Synthetic oligonucleotide
aggggcgcgaacagcggaatatgcgggcacgacctaatcaatcgcaggca

SEQ ID NO: 285382 - DNA, 50 bp, Artificial
  Synthetic oligonucleotide
agggggtatccgaagaaggcgtgtctactcttcgcggaggattgttcagt

SEQ ID NO: 285383 - DNA, 50 bp, Artificial
  Synthetic oligonucleotide
aggtaaccttcgcctcacctaagggcctcgaacccactccggacccgctc

SEQ ID NO: 285384 - DNA, 50 bp, Artificial
  Synthetic oligonucleotide
aggtcccgtatactcatccgctgctaaccacgcgccactcttccgcggaa

SEQ ID NO: 285385 - DNA, 50 bp, Artificial
  Synthetic oligonucleotide
gtctgcgatataagactatgtacatcgcaactacatggaggttataaact

SEQ ID NO: 285386 - DNA, 60 bp, Artificial
  Synthetic oligonucleotide
agacagagctagagctactgtatattactgtgctactaccagctagcgtagtatgtcttt

SEQ ID NO: 285387 - DNA, 50 bp, Artificial
  Synthetic oligonucleotide
aggtcgtgcacgtcagaggcgggcaataaggtttccgcaacccgcatgaa

SEQ ID NO: 285388 - DNA, 50 bp, Artificial
  Synthetic oligonucleotide
aggtgactttgccgctaacgtctggaatgaggtccccgtgcccactcacg

SEQ ID NO: 285389 - DNA, 50 bp, Artificial
  Synthetic oligonucleotide
aggtgcgccctctcgacgcgacccgctacttctcgcgagatcgaacatac

SEQ ID NO: 285390 - DNA, 50 bp, Artificial
  Synthetic oligonucleotide
aggtgtggcgagagtgcgtcgacgtggtgagggatgtaccctgacgcgac

SEQ ID NO: 285391 - DNA, 50 bp, Artificial
  Synthetic oligonucleotide
gtctctggagccgagggaaggttcagcggtgcgcctgtctccgcatcgtc

SEQ ID NO: 285392 - DNA, 50 bp, Artificial
  Synthetic oligonucleotide
aggttacccagctgacgtggcttaagtggagcgccccagcagcgtgtgac

SEQ ID NO: 285393 - DNA, 50 bp, Artificial
  Synthetic oligonucleotide
agtaataccacggctgtctcgcccgctggccctcatatcgttgccctggt

SEQ ID NO: 285394 - DNA, 50 bp, Artificial
  Synthetic oligonucleotide
agtaccattccaagacgccgcgaccactctttctgcggtgctccagctcg

SEQ ID NO: 285395 - DNA, 50 bp, Artificial
  Synthetic oligonucleotide
agtaggccacgagtaggacccgacctggcgtggaacaaccgcagtctggc

SEQ ID NO: 285396 - DNA, 50 bp, Artificial
  Synthetic oligonucleotide
agtatcattgagagtagcacatcctgtagggtcccgtctcgtccaaaatg

SEQ ID NO: 285397 - DNA, 58 bp, Artificial
  Synthetic oligonucleotide
agacacgcagactgagcctggaaacatatatcaacccctcgagaacatttttacctgg

SEQ ID NO: 285398 - DNA, 50 bp, Artificial
  Synthetic oligonucleotide
agattatggcgcgtcaccggagataacggataagaaaggtcggactgcat

SEQ ID NO: 285399 - DNA, 50 bp, Artificial
  Synthetic oligonucleotide
agattcaaccgcctgcttccctgtcggattccactgggcccaaacctcgc

SEQ ID NO: 285400 - DNA, 50 bp, Artificial
  Synthetic oligonucleotide
agattccctccggggcttgtcgggcctcgaagaagcgagcaataagtccg

SEQ ID NO: 285401 - DNA, 50 bp, Artificial
  Synthetic oligonucleotide
gttgtcagctagctagccagcgagatacgaggtgcccgcttggcctgcag

SEQ ID NO: 285402 - DNA, 50 bp, Artificial
  Synthetic oligonucleotide
agcaaacgttccgaccgagtttcacctctagccccctctagccgggcgtg

SEQ ID NO: 285403 - DNA, 50 bp, Artificial
  Synthetic oligonucleotide
agcacagaccaatttggacggcattgaaaccccactgtgcgaagactaaa

SEQ ID NO: 285404 - DNA, 50 bp, Artificial
  Synthetic oligonucleotide
agcacagctgggtcccggcctatgcaactgatgtaaagccgctcgggggc

SEQ ID NO: 285405 - DNA, 50 bp, Artificial
  Synthetic oligonucleotide
agcaccgcgtgctaggggctgcgacgaggaagcagagtgacattgtcatg

SEQ ID NO: 285406 - DNA, 50 bp, Artificial
  Synthetic oligonucleotide
agcacgagcgaaataggccaaggatcgccgaaccaaggtcacagtgcgcc

SEQ ID NO: 285407 - DNA, 50 bp, Artificial
  Synthetic oligonucleotide
gttgctgcgtgcgtaacttgctgcagtgagactgccgagaggtgctgggc

SEQ ID NO: 285408 - DNA, 59 bp, Artificial
  Synthetic oligonucleotide
caccgcactctgaggactcgtcgggacccttcgtggagtccctgtatcattcgactagc

SEQ ID NO: 285409 - DNA, 50 bp, Artificial
  Synthetic oligonucleotide
agcacgcgcgcaggttgccctattcagagttagtctcgcatggacgccta

SEQ ID NO: 285410 - DNA, 50 bp, Artificial
  Synthetic oligonucleotide
agcacgctcgggggtcttgggtcccatggagttgaccacatagggagtga

SEQ ID NO: 285411 - DNA, 50 bp, Artificial
  Synthetic oligonucleotide
agcactggggaagctagcggaggccaccagcggtactcgactcacaacgt

SEQ ID NO: 285412 - DNA, 50 bp, Artificial
  Synthetic oligonucleotide
agcagccacacgctctggtttacgcaccccggtggaacctcggagacgtt

SEQ ID NO: 285413 - DNA, 50 bp, Artificial
  Synthetic oligonucleotide
agcagcccacgcccctttcggggtgttggtcgggaggcaggggaccggag

SEQ ID NO: 285414 - DNA, 50 bp, Artificial
  Synthetic oligonucleotide
agcagcggattagtgggaaggcagcgcgagcttacacaacgagcctggag

SEQ ID NO: 285415 - DNA, 50 bp, Artificial
  Synthetic oligonucleotide
gttcttagcttcagtattacaaccggctgggttatccctaagatgcgacg

SEQ ID NO: 285416 - DNA, 50 bp, Artificial
  Synthetic oligonucleotide
agcaggaaggtaatccatgcgcacgagctcacgcgtcagcccgtcaaata

SEQ ID NO: 285417 - DNA, 50 bp, Artificial
  Synthetic oligonucleotide
agcaggacccgaacccctgcgcctccccacactactaacaaaactaccga

SEQ ID NO: 285418 - DNA, 50 bp, Artificial
  Synthetic oligonucleotide
agcaggtgtgcagtgtgatcagcagccacacgctctggtttacgcacccc

SEQ ID NO: 285419 - DNA, 59 bp, Artificial
  Synthetic oligonucleotide
gaacacggagttctgtccatctactatcatggactgtcgggtaagggtgtggtactcat

SEQ ID NO: 285420 - DNA, 50 bp, Artificial
  Synthetic oligonucleotide
agcataacagcatcgagccgagggaagctccaagcggggctcaagcatcg

SEQ ID NO: 285421 - DNA, 50 bp, Artificial
  Synthetic oligonucleotide
agcatgacttgtccgagccacactcctcgcctcgccacagatccatcgta

SEQ ID NO: 285422 - DNA, 50 bp, Artificial
  Synthetic oligonucleotide
agcattatcctcgccaaggagtaccaagattctgggcctggggtccccgc

SEQ ID NO: 285423 - DNA, 50 bp, Artificial
  Synthetic oligonucleotide
agcattcgtacatagccgcgcgaagcaccgcaactcctccaaccccctgt

SEQ ID NO: 285424 - DNA, 50 bp, Artificial
  Synthetic oligonucleotide
agcattgccccttttgcgcacttgcgtgccaacatgtcgggtcaagattg

SEQ ID NO: 285425 - DNA, 50 bp, Artificial
  Synthetic oligonucleotide
agcatttagttccgttgtttccgtcctcacacccgtgcgccatcgcccga

SEQ ID NO: 285426 - DNA, 50 bp, Artificial
  Synthetic oligonucleotide
agagcgaagctagcccggcttctgtaagcacggatgtcccgcagtcaacg

SEQ ID NO: 285427 - DNA, 50 bp, Artificial
  Synthetic oligonucleotide
agagcggagaaggaaccacaataaacgtggggccggttgtaaccgggcga

SEQ ID NO: 285428 - DNA, 50 bp, Artificial
  Synthetic oligonucleotide
agaggaatcgggggcgacaaagcgcgacgggggctcgtcagccacgggaa

SEQ ID NO: 285429 - DNA, 50 bp, Artificial
  Synthetic oligonucleotide
agaggcggagggttatgcacaacgaatccgcgctttggacgagagcgagg

SEQ ID NO: 285430 - DNA, 55 bp, Artificial
  Synthetic oligonucleotide
taataacgtatttcccagcgagcccccaccccaagcgagccgccacctcaatacg

SEQ ID NO: 285431 - DNA, 50 bp, Artificial
  Synthetic oligonucleotide
agagggaagccagactacgtgcaatcgcttcgggccacgttagaaccccc

SEQ ID NO: 285432 - DNA, 50 bp, Artificial
  Synthetic oligonucleotide
agagggacagtctcgccgtactcggtaatacggctcactgagcgggggca

SEQ ID NO: 285433 - DNA, 50 bp, Artificial
  Synthetic oligonucleotide
agaggggatccgtaccgctcagggcttgattacttccggcctccgcgagg

SEQ ID NO: 285434 - DNA, 50 bp, Artificial
  Synthetic oligonucleotide
agaggtattgcgacaaaccgacggtctgggggctggacggatgtcagcca

SEQ ID NO: 285435 - DNA, 50 bp, Artificial
  Synthetic oligonucleotide
agaggtcacgttaagggacattcgagcaggggcattgggggtctgagcga

SEQ ID NO: 285436 - DNA, 50 bp, Artificial
  Synthetic oligonucleotide
taacaagtctgcccagggcgaaggaatgaagacgagacatctaatgcaac

SEQ ID NO: 285437 - DNA, 50 bp, Artificial
  Synthetic oligonucleotide
agaggtcggcgcgaggacgcatcttccgaatgtgcgcggcaatcggacac

SEQ ID NO: 285438 - DNA, 50 bp, Artificial
  Synthetic oligonucleotide
agagtcaagagccggaccagagccaccatgcgaatgagcgatccacgcga

SEQ ID NO: 285439 - DNA, 50 bp, Artificial
  Synthetic oligonucleotide
agagtgcattgcgatcgagctcaaccggcccctgttgcccatcacatgcg

SEQ ID NO: 285440 - DNA, 50 bp, Artificial
  Synthetic oligonucleotide
agatactccggcatatgcgccttcccctgtacccagcgccgaacccaatc

SEQ ID NO: 285441 - DNA, 60 bp, Artificial
  Synthetic oligonucleotide
gaacatcgtcggagagggtctcagcgatcctagaaggattatgttagtcaccgtgacaag

SEQ ID NO: 285442 - DNA, 50 bp, Artificial
  Synthetic oligonucleotide
agatatacacccctttcggctcatgctccccgtgctcccttggtccggta

SEQ ID NO: 285443 - DNA, 50 bp, Artificial
  Synthetic oligonucleotide
agatcattaagtggcgtcgacaacggacgtgattctcagctgagccaccc

SEQ ID NO: 285444 - DNA, 50 bp, Artificial
  Synthetic oligonucleotide
agatccaccccgggcaaagtgcaggcaagcagtaatgcgccaacatcgct

SEQ ID NO: 285445 - DNA, 50 bp, Artificial
  Synthetic oligonucleotide
gtttgcgttccacgtgcaaccacccggggagagcatgccgcacaccgata

SEQ ID NO: 285446 - DNA, 50 bp, Artificial
  Synthetic oligonucleotide
agatccatggtgtatcgagggactaagctgtgcgcggcgtgacagtgcga

SEQ ID NO: 285447 - DNA, 50 bp, Artificial
  Synthetic oligonucleotide
agatccgggcagagtgggctgacatggggtcctgaagccatcacggattt

SEQ ID NO: 285448 - DNA, 50 bp, Artificial
  Synthetic oligonucleotide
agatcgtcggagagccacggcccacagtgtaaacgccatcggtatgcggc

SEQ ID NO: 285449 - DNA, 50 bp, Artificial
  Synthetic oligonucleotide
agatgattgaaataatctagatccagctttctggttcagattctgaacta

SEQ ID NO: 285450 - DNA, 50 bp, Artificial
  Synthetic oligonucleotide
agatgcaacaagacggggtccgacgtggcgttgggggatcgcacgcccgt

SEQ ID NO: 285451 - DNA, 50 bp, Artificial
  Synthetic oligonucleotide
agatgcgatcgccaacaggctccgacttcttgatggcaacgatgcgcagc

SEQ ID NO: 285452 - DNA, 60 bp, Artificial
  Synthetic oligonucleotide
cgccgctgactttcatttctactcgcagctgacttatgttgtctttactaaatctctact

SEQ ID NO: 285453 - DNA, 50 bp, Artificial
  Synthetic oligonucleotide
agcctacacgacctcgtccttcccggtggacctagtcgacgacaccgata

SEQ ID NO: 285454 - DNA, 50 bp, Artificial
  Synthetic oligonucleotide
agcctcacgagcacgcaacgctgcctaaccggaccctgcaaggcgtatcc

SEQ ID NO: 285455 - DNA, 50 bp, Artificial
  Synthetic oligonucleotide
agcctcgttgtccttacttgagccggagtgcggcacactatcgggccgtt

SEQ ID NO: 285456 - DNA, 50 bp, Artificial
  Synthetic oligonucleotide
agcctgggtatcggtcaacagcagcggattagtgggaaggcagcgcgagc

SEQ ID NO: 285457 - DNA, 50 bp, Artificial
  Synthetic oligonucleotide
agcctgtaagggcacgagtaggccacgagtaggacccgacctggcgtgga

SEQ ID NO: 285458 - DNA, 50 bp, Artificial
  Synthetic oligonucleotide
agccttccccgcagcgcgccacaaaaactctccaccacggatggaatttg

SEQ ID NO: 285459 - DNA, 50 bp, Artificial
  Synthetic oligonucleotide
agcctttccgaggccatccccactcgcattcccgtttggtttctagcgca

SEQ ID NO: 285460 - DNA, 50 bp, Artificial
  Synthetic oligonucleotide
agcgaccaacgcctctcccactaagctgaaccatccaggctgcaacgcca

SEQ ID NO: 285461 - DNA, 50 bp, Artificial
  Synthetic oligonucleotide
agcgaccaagatgagatgcaacaagacggggtccgacgtggcgttggggg

SEQ ID NO: 285462 - DNA, 50 bp, Artificial
  Synthetic oligonucleotide
agcgaccagggtgagcgattgacagcggatgcagtcctggtggactggaa

SEQ ID NO: 285463 - DNA, 58 bp, Artificial
  Synthetic oligonucleotide
gaaccatggacacatccatacccttggagggaaacggacatgtgttggcacgtgttat

SEQ ID NO: 285464 - DNA, 50 bp, Artificial
  Synthetic oligonucleotide
agcgacctcgagacgggcttgaccagaacacggacagacgggtcgggcac

SEQ ID NO: 285465 - DNA, 50 bp, Artificial
  Synthetic oligonucleotide
agcgaggctcaactaggggcgttcccttaaggccaaggcttccatcccta

SEQ ID NO: 285466 - DNA, 50 bp, Artificial
  Synthetic oligonucleotide
agcgatcacagcggggccgacatcggaaccactttcccgttacgatgctc

SEQ ID NO: 285467 - DNA, 50 bp, Artificial
  Synthetic oligonucleotide
agcgcagtacgtctcttaaggcgcgggactggacgggattttggcgaggg

SEQ ID NO: 285468 - DNA, 50 bp, Artificial
  Synthetic oligonucleotide
agcgcatggacgcaccaatatcggggccctccggggatggttccgcggtg

SEQ ID NO: 285469 - DNA, 50 bp, Artificial
  Synthetic oligonucleotide
agcgccctgccctccctaagcgtcgaccactctgcaccaaccgtattgtt

SEQ ID NO: 285470 - DNA, 50 bp, Artificial
  Synthetic oligonucleotide
agcgccgcttccgctatcccggacgcagttagccactcggcgtcctcaca

SEQ ID NO: 285471 - DNA, 50 bp, Artificial
  Synthetic oligonucleotide
agcgcctacgccaaacttcccagcgccttgtcgctatcagcagaaccgtc

SEQ ID NO: 285472 - DNA, 50 bp, Artificial
  Synthetic oligonucleotide
agcgcctccccttctgtgaggccggagtttgtatgggcagtgaacggtca

SEQ ID NO: 285473 - DNA, 50 bp, Artificial
  Synthetic oligonucleotide
agcgcgtcagctcccgttaactttcagcaagggggtactggcccggagta

SEQ ID NO: 285474 - DNA, 57 bp, Artificial
  Synthetic oligonucleotide
gaggagcgcggtcggacgttggtaatgggtagggttctcgtctcttccctgtgatca

SEQ ID NO: 285475 - DNA, 56 bp, Artificial
  Synthetic oligonucleotide
agaatgtgccgagagactcgaatacggtagggattccgtacgaggcctaagggaca

SEQ ID NO: 285476 - DNA, 50 bp, Artificial
  Synthetic oligonucleotide
agcggacagacgcaccctcatcgaattgcttagctgcgggaccctgtcac

SEQ ID NO: 285477 - DNA, 50 bp, Artificial
  Synthetic oligonucleotide
agcggacagagagacccatgtgaggaagctaggtgcgaaactgaaggaga

SEQ ID NO: 285478 - DNA, 50 bp, Artificial
  Synthetic oligonucleotide
agcggacgacttagtcggagtagcctggggcgcattcgccgggaggtcga

SEQ ID NO: 285479 - DNA, 50 bp, Artificial
  Synthetic oligonucleotide
agcggcacatgcagagtctgccgtggcaaagtccactcactccacggtct

SEQ ID NO: 285480 - DNA, 50 bp, Artificial
  Synthetic oligonucleotide
agcgggcagctgcgaagggagctcatgacactgttgcccagtatgcgtaa

SEQ ID NO: 285481 - DNA, 50 bp, Artificial
  Synthetic oligonucleotide
agccaacgttaggactggcaaagcaacggccccgtcggcaatctctctta

SEQ ID NO: 285482 - DNA, 50 bp, Artificial
  Synthetic oligonucleotide
agccaattctgcaaccctctcgacttctcccccgttaaccgcccctccgc

SEQ ID NO: 285483 - DNA, 50 bp, Artificial
  Synthetic oligonucleotide
agccacccagttgcgcttcatcccaaacccgcaacaacgcgccaaatgac

SEQ ID NO: 285484 - DNA, 50 bp, Artificial
  Synthetic oligonucleotide
agccacgacaacgctgaccttgcgaatgcgggtcagatcagggtagagga

SEQ ID NO: 285485 - DNA, 50 bp, Artificial
  Synthetic oligonucleotide
agccactcggcgtcctcacataccgtcctccgtgctctgtacacagtcct

SEQ ID NO: 285486 - DNA, 57 bp, Artificial
  Synthetic oligonucleotide
gaaccctgtcggcgacaacgttggttacagggcaaaacatccgagcaggctccgatg

SEQ ID NO: 285487 - DNA, 50 bp, Artificial
  Synthetic oligonucleotide
agccagggacggtcgctctactaggtggagccctagccactaaggagcta

SEQ ID NO: 285488 - DNA, 50 bp, Artificial
  Synthetic oligonucleotide
agccaggggtcatctccattctcccgtccaggagacgggcatcttccgta

SEQ ID NO: 285489 - DNA, 50 bp, Artificial
  Synthetic oligonucleotide
agccaggtagggccggatcctcaacgaggggaagtctgcggagatatgcc

SEQ ID NO: 285490 - DNA, 50 bp, Artificial
  Synthetic oligonucleotide
agccatgaccggttcagtgggctaaggggcatcctcagtggaccagcagg

SEQ ID NO: 285491 - DNA, 50 bp, Artificial
  Synthetic oligonucleotide
agccatgcagtccgagcccactccaagcaacgcggtagcagcggatactg

SEQ ID NO: 285492 - DNA, 50 bp, Artificial
  Synthetic oligonucleotide
agccatggtccctaccacacacgagcctcctgaagtgcccgaaccaaagc

SEQ ID NO: 285493 - DNA, 50 bp, Artificial
  Synthetic oligonucleotide
agccatgtcgacaccgtgcaatcagttccagaggtgaccagcgttcggga

SEQ ID NO: 285494 - DNA, 50 bp, Artificial
  Synthetic oligonucleotide
agcccacctctccaacgcggacgctgtcaaccctagttccgccaatcgcg

SEQ ID NO: 285495 - DNA, 50 bp, Artificial
  Synthetic oligonucleotide
agcccacgtccgcccggttccccaccaaatccctcgattcttagcaacta

SEQ ID NO: 285496 - DNA, 50 bp, Artificial
  Synthetic oligonucleotide
agcccagaactggggctagccaccatgacaccaccgctactcgcacgtcc

SEQ ID NO: 285497 - DNA, 60 bp, Artificial
  Synthetic oligonucleotide
gaacctaatggctcgacagtctaggcaatcaatggagctccctcatgtgccttgtagtag

SEQ ID NO: 285498 - DNA, 50 bp, Artificial
  Synthetic oligonucleotide
agcccagaccaagagctctgatggccgcccaagttgatactcggcgagac

SEQ ID NO: 285499 - DNA, 50 bp, Artificial
  Synthetic oligonucleotide
agccgaaagcccgcagtcctgccttgtccgactcgttgcaaccggagggc

SEQ ID NO: 285500 - DNA, 50 bp, Artificial
  Synthetic oligonucleotide
agccgaaatccctgtccagtgggggaccagacgagaaggtgtacccagga

SEQ ID NO: 285501 - DNA, 50 bp, Artificial
  Synthetic oligonucleotide
agccgaattcttcccttccattgtgggtttgcagcgtgtcccggtcagcc

SEQ ID NO: 285502 - DNA, 50 bp, Artificial
  Synthetic oligonucleotide
agccgagggaagctccaagcggggctcaagcatcgtccgcattgcgatga

SEQ ID NO: 285503 - DNA, 50 bp, Artificial
  Synthetic oligonucleotide
agccgccatggtctcttacgtcccctcctctgcccacggattaccacctc

SEQ ID NO: 285504 - DNA, 50 bp, Artificial
  Synthetic oligonucleotide
agccgccgctgggaactgttagagcgtacctagaccgccggagtcgctca

SEQ ID NO: 285505 - DNA, 50 bp, Artificial
  Synthetic oligonucleotide
agccgcgaggcatgcgtatctactgactgcagtttcccccggccaaggcg

SEQ ID NO: 285506 - DNA, 50 bp, Artificial
  Synthetic oligonucleotide
agccgcgtgaggtacgcatggaggatgcgcgaacccatctcgtcgttggg

SEQ ID NO: 285507 - DNA, 50 bp, Artificial
  Synthetic oligonucleotide
agccgtactctgcctgaatcccagtggtacgttagacgcaacatgatcct

SEQ ID NO: 285508 - DNA, 60 bp, Artificial
  Synthetic oligonucleotide
gaacctatagacctatggtagagctaatcggctgagccctactagggacctgcctagata

SEQ ID NO: 285509 - DNA, 50 bp, Artificial
  Synthetic oligonucleotide
agccgtcgcaggttcctacctccgtcgccctggcagtccaacaatcggga

SEQ ID NO: 285510 - DNA, 50 bp, Artificial
  Synthetic oligonucleotide
agccgtgcgaatggatatcagggtacagggccggcattttgctcgtggga

SEQ ID NO: 285511 - DNA, 54 bp, Artificial
  Synthetic oligonucleotide
cgccctccttataacctccactaacacgaattctacatccaggcgtcccctaaa

SEQ ID NO: 285512 - DNA, 60 bp, Artificial
  Synthetic oligonucleotide
gtacgctgtgagatgtaatccggtcatcgtgcttggcaatctattgttgaaatcggagat

SEQ ID NO: 285513 - DNA, 54 bp, Artificial
  Synthetic oligonucleotide
taatctactaagattacgttccaacacggccccctaggcgagggagtgttcgta

SEQ ID NO: 285514 - DNA, 55 bp, Artificial
  Synthetic oligonucleotide
taatgatagaagacctaatagtaatagagaccgttttaaccctaatagagatcct

SEQ ID NO: 285515 - DNA, 58 bp, Artificial
  Synthetic oligonucleotide
caccggcataaagtctcttagaaaccgcggaggctcaatgaagacgcagaaataggcc

SEQ ID NO: 285516 - DNA, 60 bp, Artificial
  Synthetic oligonucleotide
cgccctcatttgcaccatgacccaccagctcctgtatgcaatctctgagtggtcgactgc

SEQ ID NO: 285517 - DNA, 60 bp, Artificial
  Synthetic oligonucleotide
gagcgccgttcggccatgtttgtgcctgacgtccactctaaggcagggctgttctagtag

SEQ ID NO: 285518 - DNA, 60 bp, Artificial
  Synthetic oligonucleotide
cgaatcaccggatgagagctagctggaccggaagagggtgcgaccgcattgcaggtttga

SEQ ID NO: 285519 - DNA, 59 bp, Artificial
  Synthetic oligonucleotide
gaacgatgtttactgctacgacttatattgcgggctagcggataaaaagatgcggctgg

SEQ ID NO: 285520 - DNA, 60 bp, Artificial
  Synthetic oligonucleotide
caccgggctacttcaataaggtaagctatctcaatgacagtttgtgtgcgtatcgactaa

SEQ ID NO: 285521 - DNA, 55 bp, Artificial
  Synthetic oligonucleotide
agaacctccaaacactcccgtctcccaggaccaatccccaccaggcctcgacatg

SEQ ID NO: 285522 - DNA, 60 bp, Artificial
  Synthetic oligonucleotide
cggttcgtcctgaaaatgggcaagtttcagatattgcacccctgcaactctattgctcag

SEQ ID NO: 285523 - DNA, 60 bp, Artificial
  Synthetic oligonucleotide
ggatacctcattgcgacgcaaactcaagatgcatttgttattacgcatccacgatggaac

SEQ ID NO: 285524 - DNA, 57 bp, Artificial
  Synthetic oligonucleotide
tgcgtgaatgaggtcgagtgtagtcaaaaaccggaaggtatcgtggaagaactgcgt

SEQ ID NO: 285525 - DNA, 56 bp, Artificial
  Synthetic oligonucleotide
tgctacggacacgtttatataagttcgagtcttatatacgtctaacaattaaaata

SEQ ID NO: 285526 - DNA, 60 bp, Artificial
  Synthetic oligonucleotide
ggtatgctcaccccataagactccttcacttgcatatgcggagtataagaaatggatcat

SEQ ID NO: 285527 - DNA, 55 bp, Artificial
  Synthetic oligonucleotide
gtcaatgtaaaggcgggtgtagagcccgttgcctacacgcggacaggcctccggt

SEQ ID NO: 285528 - DNA, 60 bp, Artificial
  Synthetic oligonucleotide
atgctcagtggcgctgggtcgaagggagtgactggcgtattgaaggggccgacgagtcag

SEQ ID NO: 285529 - DNA, 60 bp, Artificial
  Synthetic oligonucleotide
cagctataccgcgatggctcctgctataccagcttcgctcctactacactataatagcta

SEQ ID NO: 285530 - DNA, 58 bp, Artificial
  Synthetic oligonucleotide
tgctatcggctcggtaacttcagacacgaaagagaatcggacccgtgcaccccacgcg

SEQ ID NO: 285531 - DNA, 60 bp, Artificial
  Synthetic oligonucleotide
ttctgtggtcgtctggcgacactataaacttatcaacgaggatctctgagagctgaaact

SEQ ID NO: 285532 - DNA, 59 bp, Artificial
  Synthetic oligonucleotide
cggggttacgcaaccagcagtgtgtctagacagcactccgtggaccgacaaaagagcaa

SEQ ID NO: 285533 - DNA, 56 bp, Artificial
  Synthetic oligonucleotide
aacgtgcttttcgtcaggacaaaagaccctgacctagcgctagcggcagtggaccc

SEQ ID NO: 285534 - DNA, 58 bp, Artificial
  Synthetic oligonucleotide
gcgataagtatatcatcgagcaaagcgttagccaaaataacttaggcaattaaataac

SEQ ID NO: 285535 - DNA, 54 bp, Artificial
  Synthetic oligonucleotide
ccgattagaatcggtttgtgtaaaggtgcttccgaaattgaggttagtattcac

SEQ ID NO: 285536 - DNA, 57 bp, Artificial
  Synthetic oligonucleotide
cccgcaactcgcaggcaggaccgcccaagcttagcgtgaactcccctaccgatgccg

SEQ ID NO: 285537 - DNA, 60 bp, Artificial
  Synthetic oligonucleotide
tgctgtcttgtgcatctccgcgtccaacctctcgatgttggatgcacaagtacagagccg

SEQ ID NO: 285538 - DNA, 56 bp, Artificial
  Synthetic oligonucleotide
aacgtattaggctataaacccccaagttgacttattatggagatctctcgatccca

SEQ ID NO: 285539 - DNA, 58 bp, Artificial
  Synthetic oligonucleotide
aacgtatgacgacggatacctgacaccggaacttgcctcgagcaagcgggctcgctac

SEQ ID NO: 285540 - DNA, 60 bp, Artificial
  Synthetic oligonucleotide
gaggcattcctacctcttgcgtctttcgagcgaattcaaggcaatatcggcagatatcaa

SEQ ID NO: 285541 - DNA, 60 bp, Artificial
  Synthetic oligonucleotide
tgcgattgagtcggtcgacgctggcaattatgcgcacgatttgaacggcatagagcacga

SEQ ID NO: 285542 - DNA, 56 bp, Artificial
  Synthetic oligonucleotide
ccggtcgttggggcggcctatttagcgacgtccattggctctgtagatcgcgtagg

SEQ ID NO: 285543 - DNA, 58 bp, Artificial
  Synthetic oligonucleotide
ggtgatataaagtatctctccctctattttcgtgttcccctgtccattctctcctcag

SEQ ID NO: 285544 - DNA, 60 bp, Artificial
  Synthetic oligonucleotide
atgacaatgcagagaggggatggcacggatctagccctcctagagtaatccgagtcggct

SEQ ID NO: 285545 - DNA, 56 bp, Artificial
  Synthetic oligonucleotide
aagaacagatccccgacaatgaaatgaagccttaccctggatgggggtttcatcca

SEQ ID NO: 285546 - DNA, 60 bp, Artificial
  Synthetic oligonucleotide
atgctcttttattcagctcgacgtatagcatcaaagtctcatcgtgcagtggcccgattt

SEQ ID NO: 285547 - DNA, 55 bp, Artificial
  Synthetic oligonucleotide
atgctcttgttcccctgcggggtaatcggacttgtgtgaccgtttcgattcctac

SEQ ID NO: 285548 - DNA, 58 bp, Artificial
  Synthetic oligonucleotide
cccgccccgatatacgtcatgcaacgtttagacttcaaaggcgcatgaacactcccac

SEQ ID NO: 285549 - DNA, 58 bp, Artificial
  Synthetic oligonucleotide
tgcgcgttccttgtaagctgactcgcgcacgaaccgatttggtcgttctcctgtaacc

SEQ ID NO: 285550 - DNA, 58 bp, Artificial
  Synthetic oligonucleotide
aacttcgtcttaacatcactcacccagtgaatccaatggtatcccggaaaggatgatc

SEQ ID NO: 285551 - DNA, 60 bp, Artificial
  Synthetic oligonucleotide
tcaaggcatgatatgtcacggaaactagaacttgacttggacatcgtaagcgcgaggttg

SEQ ID NO: 285552 - DNA, 60 bp, Artificial
  Synthetic oligonucleotide
atcgcatggtatcactatcattggcgcatctatcatacccaggtgtacatgcttcttcag

SEQ ID NO: 285553 - DNA, 54 bp, Artificial
  Synthetic oligonucleotide
ccgggttagtcccggtagtcgcaacgtatcatgtggggtggacgccgctaaaca

SEQ ID NO: 285554 - DNA, 60 bp, Artificial
  Synthetic oligonucleotide
tgcggctgggtattaacgtgcagaattgacattttccatggccagcaccaggcataacta

SEQ ID NO: 285555 - DNA, 60 bp, Artificial
  Synthetic oligonucleotide
ttcttttcaatgaagccgtcggactcgtaagtcacatcgactgcataatgacatatcgta

SEQ ID NO: 285556 - DNA, 54 bp, Artificial
  Synthetic oligonucleotide
ccgggtcggtagttgttactccgcagtgaacccttgagtctccaccgtaatcaa

SEQ ID NO: 285557 - DNA, 60 bp, Artificial
  Synthetic oligonucleotide
gctgcattaccaagttctccgcagcctaggctctgcgtccaacaactgtgtctcgcagga

SEQ ID NO: 285558 - DNA, 60 bp, Artificial
  Synthetic oligonucleotide
atatgagaggtatagataatatcgattaccgtatggtttattgcgatatagtagaatgtt

SEQ ID NO: 285559 - DNA, 56 bp, Artificial
  Synthetic oligonucleotide
aacgggaaaggaaacatcattctctctgcagaaagataccttccacattctttggg

SEQ ID NO: 285560 - DNA, 60 bp, Artificial
  Synthetic oligonucleotide
atatgtgatgatcattaccgcaatcacagtaaaatagctacgtagctagctgccaagtaa

SEQ ID NO: 285561 - DNA, 60 bp, Artificial
  Synthetic oligonucleotide
ccggctcattaatcccatgcacgcgatgtcctgagctcgacaccagaaccacccttgaat

SEQ ID NO: 285562 - DNA, 60 bp, Artificial
  Synthetic oligonucleotide
atgttgcaggacattatgtacacctcatgttgatttcggctagtggggcgttggatgtgc

SEQ ID NO: 285563 - DNA, 60 bp, Artificial
  Synthetic oligonucleotide
tggagtatctatcggccgataacacatctaagaatctctctgctgcatacctggtatctg

SEQ ID NO: 285564 - DNA, 51 bp, Artificial
  Synthetic oligonucleotide
gggaagtacatttgtccttttgtagggttaagttggtttataactatacta

SEQ ID NO: 285565 - DNA, 60 bp, Artificial
  Synthetic oligonucleotide
ttcgcgcgcgtgcagttagcacgctcgcgaggtaaggtcaatataatataaggttgacta

SEQ ID NO: 285566 - DNA, 60 bp, Artificial
  Synthetic oligonucleotide
ccatgtaatgatcactcgcaacttccatgcgaccagcatctagttgacgctgcaacgacc

SEQ ID NO: 285567 - DNA, 58 bp, Artificial
  Synthetic oligonucleotide
tggcacagctggtttgggcctcggcgttctagaattacctgtcttaccaatactacag

SEQ ID NO: 285568 - DNA, 53 bp, Artificial
  Synthetic oligonucleotide
cggggtctcctaaaccgaactcgagctttggaccgcggagggagaaacagagc

SEQ ID NO: 285569 - DNA, 60 bp, Artificial
  Synthetic oligonucleotide
tggcaggctataaaagtaagtaatctaggcaatctatccagagtactgccttattatgtg

SEQ ID NO: 285570 - DNA, 60 bp, Artificial
  Synthetic oligonucleotide
ccatgtccacctccgggcttgatatatcccaactctccgacagcgagaggtccgctctcg

SEQ ID NO: 285571 - DNA, 57 bp, Artificial
  Synthetic oligonucleotide
tggccctagcgcttgtaaaagaaggttagaacgagattagcgctggataattaaatc

SEQ ID NO: 285572 - DNA, 57 bp, Artificial
  Synthetic oligonucleotide
cgggattctggacgctggttctctatggcgacgtgatcgttacttggaccgggccac

SEQ ID NO: 285573 - DNA, 53 bp, Artificial
  Synthetic oligonucleotide
ctagcttgcggccacgcaaggggacaagttcccccctaggggctagttaaaga

SEQ ID NO: 285574 - DNA, 60 bp, Artificial
  Synthetic oligonucleotide
atatttgactaatagctagttgcattatgtacttgatctctcggataggcgagtctgttt

SEQ ID NO: 285575 - DNA, 59 bp, Artificial
  Synthetic oligonucleotide
atcaaaaagttgcccagattcgacgcccaaccgaattcgaacatcattgcagaccacat

SEQ ID NO: 285576 - DNA, 56 bp, Artificial
  Synthetic oligonucleotide
ggaggtttaaaaccgggccctctataagtgtatggataaagccgtcatatgagagc

SEQ ID NO: 285577 - DNA, 60 bp, Artificial
  Synthetic oligonucleotide
gcgcccagggagtagagatttagtaaagacaacataagtcagctgcgagtagaaatgaaa

SEQ ID NO: 285578 - DNA, 53 bp, Artificial
  Synthetic oligonucleotide
tggctccacccgtgggttaaaaatactcgtccattggagggcttaataataac

SEQ ID NO: 285579 - DNA, 59 bp, Artificial
  Synthetic oligonucleotide
aacggttccacccgccagctcattcactcttatcgccggattcgtgacgtctcaggaga

SEQ ID NO: 285580 - DNA, 60 bp, Artificial
  Synthetic oligonucleotide
tgcttagacatcgcttctcataagtgcggcgaacaccacggtaggcgagaatcctgggca

SEQ ID NO: 285581 - DNA, 57 bp, Artificial
  Synthetic oligonucleotide
aacggtgcgcctccgcaatcgttccttagcgggcagggtactgtgagtagccaccac

SEQ ID NO: 285582 - DNA, 56 bp, Artificial
  Synthetic oligonucleotide
cgtgcaacaggcactatcttccggctgtcccttaggcctcgtacggaatccctacc

SEQ ID NO: 285583 - DNA, 60 bp, Artificial
  Synthetic oligonucleotide
tgctttctccagatgttgaatatgcgcaataggactgctagaaagctgccgctttctatt

SEQ ID NO: 285584 - DNA, 56 bp, Artificial
  Synthetic oligonucleotide
tcaccgaacgagccgtgtccccttcaaggttagtggtgcctggtgatagtgttttc

SEQ ID NO: 285585 - DNA, 60 bp, Artificial
  Synthetic oligonucleotide
ttcgtcggtttcgcagacagttgctagacacaatcacctggcatgctgtccgtgcaacag

SEQ ID NO: 285586 - DNA, 58 bp, Artificial
  Synthetic oligonucleotide
ccgattgcgaaattcgccacacagaacgtccattcttcctggtaaggtaagtgatata

SEQ ID NO: 285587 - DNA, 60 bp, Artificial
  Synthetic oligonucleotide
gcgatggttctaggatatagccatcctacagtagagtaggcttgagtgacttgcaatcgc

SEQ ID NO: 285588 - DNA, 60 bp, Artificial
  Synthetic oligonucleotide
tggaaaggagttggatcgcattgacaatgagcgagcccggcagtgggagatcaaattgag

SEQ ID NO: 285589 - DNA, 60 bp, Artificial
  Synthetic oligonucleotide
atgacgggtattgcaatcaattacgtcgagtcaaccatgacctacaacgcgtgaagcgaa

SEQ ID NO: 285590 - DNA, 55 bp, Artificial
  Synthetic oligonucleotide
ttcgtagttagtttagttagtcagagagtcacttggtaacttagtagtacgtata

SEQ ID NO: 285591 - DNA, 58 bp, Artificial
  Synthetic oligonucleotide
tggacagcgataactaccaaggaaacctgaaacgccttctaatgcagaataaggagga

SEQ ID NO: 285592 - DNA, 60 bp, Artificial
  Synthetic oligonucleotide
gctcttttgcgcaacactattcgagtggtcacgatcatgcaccatctggcctactaagca

SEQ ID NO: 285593 - DNA, 60 bp, Artificial
  Synthetic oligonucleotide
cccgatgcatcccacatccggcatcgacctgacgtagataacatccggaggttactttca

SEQ ID NO: 285594 - DNA, 60 bp, Artificial
  Synthetic oligonucleotide
gctctgcgtcaacaactgtgtctcgcaggacaggctctgcgtcaacaactgtgtctcgca

SEQ ID NO: 285595 - DNA, 60 bp, Artificial
  Synthetic oligonucleotide
tcaccgtcccagcctggatcctacgaccatgttatcgcatctgttggctcaattgcagtc

SEQ ID NO: 285596 - DNA, 60 bp, Artificial
  Synthetic oligonucleotide
ccatgcattgcgacgaggtaaatttactctgaaccacaaagccagttccatctcagctaa

SEQ ID NO: 285597 - DNA, 51 bp, Artificial
  Synthetic oligonucleotide
tggactcccttctaccgttggacttgggagattacccctcgaacctacccg

SEQ ID NO: 285598 - DNA, 56 bp, Artificial
  Synthetic oligonucleotide
ccggcttacccccttgctgttcgcagcccctatctgtcttgttagtctacctctac

SEQ ID NO: 285599 - DNA, 56 bp, Artificial
  Synthetic oligonucleotide
ccgtcctgattgtaagacaagagtcaccgtgggatacctatcggaaagtcattacg

SEQ ID NO: 285600 - DNA, 52 bp, Artificial
  Synthetic oligonucleotide
cccggggaactcgaatccctttatttcgatttgcaatcgaaacgcagaaccc

SEQ ID NO: 285601 - DNA, 60 bp, Artificial
  Synthetic oligonucleotide
gctggtgatagagtgtcttggatccagtggaaccatcccgagatgccgtggacgggaact

SEQ ID NO: 285602 - DNA, 60 bp, Artificial
  Synthetic oligonucleotide
aaaggccgcccaggatacattgatacaggggtttgagtgtgtactgccatacatgcccag

SEQ ID NO: 285603 - DNA, 60 bp, Artificial
  Synthetic oligonucleotide
ccagaggatcttcgttaggagatgacggccggtgatgcattccggactccggacaatagc

SEQ ID NO: 285604 - DNA, 60 bp, Artificial
  Synthetic oligonucleotide
ggatatgagcttcctcagttcagctaatgctgactccgttatctatcgtcatgggtacca

SEQ ID NO: 285605 - DNA, 60 bp, Artificial
  Synthetic oligonucleotide
tgatctagtccacaggcagttacagtctcatggtaccatgcctcaacatagtccgagaca

SEQ ID NO: 285606 - DNA, 59 bp, Artificial
  Synthetic oligonucleotide
caggacaatgctaggccttgtggctatgggtctaatggagaaacccccgctcctcttgc

SEQ ID NO: 285607 - DNA, 55 bp, Artificial
  Synthetic oligonucleotide
cgggtggtccacctggtagtgaaggaggaacaccaagtggtccaaatggtccatc

SEQ ID NO: 285608 - DNA, 60 bp, Artificial
  Synthetic oligonucleotide
ccagagtaagtgagcgactgacactgactgagtgagctttgttgggcgtccctccgagga

SEQ ID NO: 285609 - DNA, 60 bp, Artificial
  Synthetic oligonucleotide
atgaatggtaggggcgagggtgcgacaagaggcttgccagtgccggagattactgctaac

SEQ ID NO: 285610 - DNA, 58 bp, Artificial
  Synthetic oligonucleotide
aagccgcgtgccagaaggaccaatcgactgccaagttgattgcctcccgactttttca

SEQ ID NO: 285611 - DNA, 60 bp, Artificial
  Synthetic oligonucleotide
tgatggtttggtcccagacaaaacctttagcagcatcagacgtaattggaattactatga

SEQ ID NO: 285612 - DNA, 60 bp, Artificial
  Synthetic oligonucleotide
tgattgacacccgggtaattcgagcatagcggcgtattcacggctataaacacaatgccc

SEQ ID NO: 285613 - DNA, 60 bp, Artificial
  Synthetic oligonucleotide
gcctgggagtgctgcatcaactcgttttgcgtgttccctacgttcgctggaaggtcattg

SEQ ID NO: 285614 - DNA, 53 bp, Artificial
  Synthetic oligonucleotide
gcctggggggttaggaggggatgcagacttaggttaggtctgtcgggtgtttc

SEQ ID NO: 285615 - DNA, 59 bp, Artificial
  Synthetic oligonucleotide
ggtgccaggagtcggcctatctcagtatacctcccatcatcttttctcagggttgaacc

SEQ ID NO: 285616 - DNA, 60 bp, Artificial
  Synthetic oligonucleotide
gctggggtggtgttaaaggctgtctcgtacatcaggacgctgctccctcacatccagatg

SEQ ID NO: 285617 - DNA, 52 bp, Artificial
  Synthetic oligonucleotide
caggagtaaaagaggcaaatcctttagactaataaaacctagataacttcgg

SEQ ID NO: 285618 - DNA, 59 bp, Artificial
  Synthetic oligonucleotide
atcgtcaatattttggttattactatctaatgctttatcttttagacgtgatactgcaa

SEQ ID NO: 285619 - DNA, 60 bp, Artificial
  Synthetic oligonucleotide
tgagagcctacacttaatcaccgatatccattgttcacggtcttctagctctgcttacaa

SEQ ID NO: 285620 - DNA, 51 bp, Artificial
  Synthetic oligonucleotide
atagataattttattggttccttaacctaacccggtaaagtgtgttcctga

SEQ ID NO: 285621 - DNA, 58 bp, Artificial
  Synthetic oligonucleotide
ccactctgagcccgcatgccaccggttccagccaaggcgcttacacccccaccaaatc

SEQ ID NO: 285622 - DNA, 60 bp, Artificial
  Synthetic oligonucleotide
cccggttgaaatgtgtttcactcgatgagcgttcatatctggcccttaacatagtgaggc

SEQ ID NO: 285623 - DNA, 60 bp, Artificial
  Synthetic oligonucleotide
tgaggatgaatgtgcggagggctgatactgtctataccatcttttagataattgctgggg

SEQ ID NO: 285624 - DNA, 60 bp, Artificial
  Synthetic oligonucleotide
tgaggcaaagcgttagtcaagaaggatggcggctcgataatacccgcatgagtctaactg

SEQ ID NO: 285625 - DNA, 60 bp, Artificial
  Synthetic oligonucleotide
ggtgccctagctgcgcggaattcgagtgacgcgtaaatcagccaagctacgggttgacca

SEQ ID NO: 285626 - DNA, 60 bp, Artificial
  Synthetic oligonucleotide
ccacttctgctcaggttcgagcgtcaatggatggcatattacacccaagggatgccactg

SEQ ID NO: 285627 - DNA, 60 bp, Artificial
  Synthetic oligonucleotide
ccacttgtgctggcgcagtctggtgtagcaaaggcggagccctaggtatccgctcaagct

SEQ ID NO: 285628 - DNA, 59 bp, Artificial
  Synthetic oligonucleotide
tatggaaggcctagaggccacggttccctggcaagcagtcgctggattcctaaatagtc

SEQ ID NO: 285629 - DNA, 60 bp, Artificial
  Synthetic oligonucleotide
tcacgtgtttgctactaagcctgatcaatgtcttattacaattgcttatgccgattgtcg

SEQ ID NO: 285630 - DNA, 56 bp, Artificial
  Synthetic oligonucleotide
cccggtgttgtatccgcgactgtgcaaatggaaacaacacgttcgtttatatcaaa

SEQ ID NO: 285631 - DNA, 60 bp, Artificial
  Synthetic oligonucleotide
tgagtcgatgccgtgaggtcgaatcacactgagagcgagacaatcttcggagactacgtc

SEQ ID NO: 285632 - DNA, 56 bp, Artificial
  Synthetic oligonucleotide
atagatgtatgacggagagcgccagtactgttcaaaaacccgttttgtacaaagac

SEQ ID NO: 285633 - DNA, 60 bp, Artificial
  Synthetic oligonucleotide
ttgcggtatttgattcacttccctagatactctgattccgagctaaccttgtgcactaga

SEQ ID NO: 285634 - DNA, 56 bp, Artificial
  Synthetic oligonucleotide
atagcacaaaagatcccaaaacctaatatcattgccccgtgagaacggactattcg

SEQ ID NO: 285635 - DNA, 59 bp, Artificial
  Synthetic oligonucleotide
ttgcgatcgatagtgttccggatcgattggacttggcgggacggttgggtgctgagccg

SEQ ID NO: 285636 - DNA, 58 bp, Artificial
  Synthetic oligonucleotide
tgagttgaccttttcaccttcatacgatcctgaaagggctctatcggggacttcaaga

SEQ ID NO: 285637 - DNA, 60 bp, Artificial
  Synthetic oligonucleotide
tgatagaatagaccttatctcatctggtccacgaaactcaatgatcagtaggacagaagt

SEQ ID NO: 285638 - DNA, 55 bp, Artificial
  Synthetic oligonucleotide
aaagtattataggggcccctctgccgtgtctgtcgctttggaccctgaaccataa

SEQ ID NO: 285639 - DNA, 58 bp, Artificial
  Synthetic oligonucleotide
tgcatgacttaaacattctttaggagctcgctactttttctgcccttagctccccctc

SEQ ID NO: 285640 - DNA, 57 bp, Artificial
  Synthetic oligonucleotide
gagggtagatagcttcggcgaaagtaactctgagaccctactttaagttgcgccaca

SEQ ID NO: 285641 - DNA, 60 bp, Artificial
  Synthetic oligonucleotide
gcgaagtaccctgtgctgtgtagccttgttatggttgatttgaataggctttacaccatg

SEQ ID NO: 285642 - DNA, 60 bp, Artificial
  Synthetic oligonucleotide
tgccctgagacctggtcagtgttactgagtctagggtgaatggacgtgatccaatgtccc

SEQ ID NO: 285643 - DNA, 59 bp, Artificial
  Synthetic oligonucleotide
tgcctccaagcttccggacatcttcccaacgtcacgatgtaaattacgatatctccgaa

SEQ ID NO: 285644 - DNA, 57 bp, Artificial
  Synthetic oligonucleotide
ccgagtgtggatacggggtcactccagtgggatctgacgactcgaaaggcgggtctc

SEQ ID NO: 285645 - DNA, 54 bp, Artificial
  Synthetic oligonucleotide
cggcttttatatactatctaaggaactttctttaacgttctcaatgggcaagtg

SEQ ID NO: 285646 - DNA, 60 bp, Artificial
  Synthetic oligonucleotide
tgcctggcaacatatttacgccggggatccgtagcggattctaccgcatcattgtgctga

SEQ ID NO: 285647 - DNA, 60 bp, Artificial
  Synthetic oligonucleotide
tgcctgtgagctccaaggcaaaccagctggatatatagggcccgtctgatactgattcag

SEQ ID NO: 285648 - DNA, 58 bp, Artificial
  Synthetic oligonucleotide
ttgagctcactggactttaccgggacccactggcccaagacgatggctatccttctcc

SEQ ID NO: 285649 - DNA, 60 bp, Artificial
  Synthetic oligonucleotide
gcgacaccaagttagtcgcctctatccatatccaagtggacacggagatcaagggcgaag

SEQ ID NO: 285650 - DNA, 57 bp, Artificial
  Synthetic oligonucleotide
ccaggtatggaagcgttgttgatatggagtaccggactggtccctcgtggctatccg

SEQ ID NO: 285651 - DNA, 60 bp, Artificial
  Synthetic oligonucleotide
accgcaactctggctgaagatgaaggtatggatcctagcccttttgcgccgctgcagcct

SEQ ID NO: 285652 - DNA, 60 bp, Artificial
  Synthetic oligonucleotide
cgggaacctcggctgcgtgtagcataaatggacactacgcaagctccaatctacgcgctt

SEQ ID NO: 285653 - DNA, 53 bp, Artificial
  Synthetic oligonucleotide
aagagacattgaaaaggcacttaaccccaaaacaccaacagacccccgtatga

SEQ ID NO: 285654 - DNA, 60 bp, Artificial
  Synthetic oligonucleotide
tgcgatacagcatagttctcaattgttctctcgatctcaaagtctattattcggtcaaga

SEQ ID NO: 285655 - DNA, 58 bp, Artificial
  Synthetic oligonucleotide
aagacgggatggtattatcgtgtcgttgaggagggttggattcaggaaggcatggaga

SEQ ID NO: 285656 - DNA, 58 bp, Artificial
  Synthetic oligonucleotide
atgcttaatacacctaaacaaccaagaagaattaatatatcagatatggttaattcac

SEQ ID NO: 285657 - DNA, 60 bp, Artificial
  Synthetic oligonucleotide
atgctgctagattgggagccatctggaacatatgaacagcctgcttgcaaaagtgcgaac

SEQ ID NO: 285658 - DNA, 57 bp, Artificial
  Synthetic oligonucleotide
tgcaagatccggcccaaacaagagtctacgtatggccggttagtaagctacttactc

SEQ ID NO: 285659 - DNA, 60 bp, Artificial
  Synthetic oligonucleotide
ttgcaaatgacgtgtcgtctgtgacgggtgcttggaaacctctcgctctcaccagtgtaa

SEQ ID NO: 285660 - DNA, 60 bp, Artificial
  Synthetic oligonucleotide
aagccaatcattctcatttgtgagacccctcatgcatataatttcactcgcagcatgtac

SEQ ID NO: 285661 - DNA, 60 bp, Artificial
  Synthetic oligonucleotide
tgcaatcccagggattcatatctctctggcgttcctctggcgcgtctcctttcatcgctc

SEQ ID NO: 285662 - DNA, 60 bp, Artificial
  Synthetic oligonucleotide
ctagctaggaccactatatagagtatcgcacgggcagttctaacaggtgcctatcggtgc

SEQ ID NO: 285663 - DNA, 60 bp, Artificial
  Synthetic oligonucleotide
ccagcctggatcctacgaccatgttatcgcatctgttggctcaattgcagtctaaacagg

SEQ ID NO: 285664 - DNA, 60 bp, Artificial
  Synthetic oligonucleotide
ccgtagtgcttaagagcgtcttcagctccaatcaaggtgacgctgaagaaagtggcttgt

SEQ ID NO: 285665 - DNA, 56 bp, Artificial
  Synthetic oligonucleotide
aagcatctaaacgcgaagcaaactttatgatacttttatacgtagtagaacactac

SEQ ID NO: 285666 - DNA, 60 bp, Artificial
  Synthetic oligonucleotide
ggatatagtacgcagggctgcactacacgctctgtggcggcatcatatgccctcgagtca

SEQ ID NO: 285667 - DNA, 59 bp, Artificial
  Synthetic oligonucleotide
tgcagaagtttgcccccgtcaaagagatcaaatcccagcgcccaaccgtcaccatgtta

SEQ ID NO: 285668 - DNA, 60 bp, Artificial
  Synthetic oligonucleotide
aagcaccgaggctgtcacaattcacggcaaccgatgctaccctcatgcgccacacaagtt

SEQ ID NO: 285669 - DNA, 60 bp, Artificial
  Synthetic oligonucleotide
tgcaggttcagtgtgcacgatggagagtcgagaagtggacccagggtgaatgtgcttccc

SEQ ID NO: 285670 - DNA, 54 bp, Artificial
  Synthetic oligonucleotide
gccttggccttaccttcctacggcttataaacttccttgttatagtcaagtagc

SEQ ID NO: 285671 - DNA, 55 bp, Artificial
  Synthetic oligonucleotide
aaagggttcctagcagaaccagcgaccacctcacgcccaagttttcatacagcgg

SEQ ID NO: 285672 - DNA, 57 bp, Artificial
  Synthetic oligonucleotide
atcgcgaacctgggtacaataagcgactgtgcaggcccggaaccaacggatgttctc

SEQ ID NO: 285673 - DNA, 60 bp, Artificial
  Synthetic oligonucleotide
ggggcaatggccagaatctgtttcgctgccacctcagggttatgcgagtcgctggaggtt

SEQ ID NO: 285674 - DNA, 56 bp, Artificial
  Synthetic oligonucleotide
ttgagtagaaggttctacgtttcgactgcaaattgaaatacagggattcgagttcc

SEQ ID NO: 285675 - DNA, 60 bp, Artificial
  Synthetic oligonucleotide
gctggacggctgagctggctcgaatgggaacatgctgacagttgacatctgtctcagcca

SEQ ID NO: 285676 - DNA, 56 bp, Artificial
  Synthetic oligonucleotide
aaaggttatcctacaccagtgttaagagcaaatgataaagctaatttacaatatac

SEQ ID NO: 285677 - DNA, 60 bp, Artificial
  Synthetic oligonucleotide
aagatcgcctaaatgggctcaaatttcgcaaggatactagagccaactcacataaattga

SEQ ID NO: 285678 - DNA, 58 bp, Artificial
  Synthetic oligonucleotide
atcccataagaaagttgccatttcgtctagatacagatccggtttcgtaaggagatgc

SEQ ID NO: 285679 - DNA, 56 bp, Artificial
  Synthetic oligonucleotide
gcgtattggttcgtgaagacgaggttcctgttccggttggtggcgatgagatccgg

SEQ ID NO: 285680 - DNA, 59 bp, Artificial
  Synthetic oligonucleotide
tgttaccgctgactttgactgtacgtacgcccgtcgcaacactataagtgtcaagtata

SEQ ID NO: 285681 - DNA, 60 bp, Artificial
  Synthetic oligonucleotide
ttcagtgtagttgacttcattctcgggacgctttcttgcgggagagcatctttctgtgtc

SEQ ID NO: 285682 - DNA, 60 bp, Artificial
  Synthetic oligonucleotide
gcgtcaacaactgtgtctcgcaggataggctctgcgtcaacaactgtgtctcgcaggata

SEQ ID NO: 285683 - DNA, 58 bp, Artificial
  Synthetic oligonucleotide
ccgcgtctgccgcttgtagtatttctatatcgccactataggacggggcagcccggaa

SEQ ID NO: 285684 - DNA, 60 bp, Artificial
  Synthetic oligonucleotide
caggatttacgagccatatcagaacaccctcacccatatgtcagctgcgatctgaacaac

SEQ ID NO: 285685 - DNA, 60 bp, Artificial
  Synthetic oligonucleotide
gtcccgggcctattcgactgtcgtccgcgagcaagagaatccgtccgctgacgagcctgc

SEQ ID NO: 285686 - DNA, 60 bp, Artificial
  Synthetic oligonucleotide
ttcagcctgaaggatcctcacacgaagatatcacgctccctcacgtatatagtttgggat

SEQ ID NO: 285687 - DNA, 60 bp, Artificial
  Synthetic oligonucleotide
tgttcaataataggatgcacagcacaccccatacacactgaagagatataacggatacac

SEQ ID NO: 285688 - DNA, 60 bp, Artificial
  Synthetic oligonucleotide
ggtcaagattcttctaatgatagaaattcttctaataatagaagagattctaatgataga

SEQ ID NO: 285689 - DNA, 55 bp, Artificial
  Synthetic oligonucleotide
ccccgcaattcttcgagcccccagaggacccatcttccgaagtccaacatagtat

SEQ ID NO: 285690 - DNA, 60 bp, Artificial
  Synthetic oligonucleotide
ggagccgtggagccaggtgcggaattctgagaaggtgaagactgtgcagatgacgagaat

SEQ ID NO: 285691 - DNA, 60 bp, Artificial
  Synthetic oligonucleotide
tgttgccggctattatggtgaatgagcgagtagacgcctcccgaatggctctagcaggac

SEQ ID NO: 285692 - DNA, 60 bp, Artificial
  Synthetic oligonucleotide
cgtatgggtattgattcattgcctggcacccttatcactgagtgaagagaacttagccga

SEQ ID NO: 285693 - DNA, 57 bp, Artificial
  Synthetic oligonucleotide
tgttggtacattgtagtagttccgtccggtgcgccgtccatttttgacatcgaaata

SEQ ID NO: 285694 - DNA, 60 bp, Artificial
  Synthetic oligonucleotide
tgttgtggcactgaacacaaggtgcagcaagctagctacccagtagtaccaaactaatct

SEQ ID NO: 285695 - DNA, 60 bp, Artificial
  Synthetic oligonucleotide
caggcacggaataagcaaagaatcgaatgattagccgattttgagggatagagtcgatac

SEQ ID NO: 285696 - DNA, 55 bp, Artificial
  Synthetic oligonucleotide
aaccccaactttaacatagaaggttgcaacctgaagacgtggatgacggaagcca

SEQ ID NO: 285697 - DNA, 60 bp, Artificial
  Synthetic oligonucleotide
tgtcttctcagagcccatacataaagccttgcaatatatgtcatctcagatgtccgtatc

SEQ ID NO: 285698 - DNA, 58 bp, Artificial
  Synthetic oligonucleotide
gcggtacaagcatgtttctcgtcggaagtgcaggtcctacgagcgaaaccgtggtcta

SEQ ID NO: 285699 - DNA, 60 bp, Artificial
  Synthetic oligonucleotide
atgcctcatgacgttgatcttatatggtaatcacatgacatgtttcactctagtactccc

SEQ ID NO: 285700 - DNA, 57 bp, Artificial
  Synthetic oligonucleotide
aacagactatttaggaatccagcgactgcttgccagggaaccgtggcctctaggcct

SEQ ID NO: 285701 - DNA, 60 bp, Artificial
  Synthetic oligonucleotide
gggaccaccaggtggatgaccaaacagacactcgtcctgcagacacccatggcttagtct

SEQ ID NO: 285702 - DNA, 59 bp, Artificial
  Synthetic oligonucleotide
tgtgcttatacgaaagacacactgggaatgaagatgggccttgtttaaggcgacgcgaa

SEQ ID NO: 285703 - DNA, 59 bp, Artificial
  Synthetic oligonucleotide
atccagtgctaacaagcactggaaccaacagtctaaacgcgctagcccaagtgttatac

SEQ ID NO: 285704 - DNA, 56 bp, Artificial
  Synthetic oligonucleotide
ttcatttaattgcttcttaaaaagggataggaatctgcaaatcgagataaccacct

SEQ ID NO: 285705 - DNA, 52 bp, Artificial
  Synthetic oligonucleotide
cgtccccggggtgtaggtcccgaatgtaagtgccacttatatacctacttag

SEQ ID NO: 285706 - DNA, 60 bp, Artificial
  Synthetic oligonucleotide
cggcaaagagagaacagtcacaacgatggcacaaggaagcatccagcataagtttgagcc

SEQ ID NO: 285707 - DNA, 60 bp, Artificial
  Synthetic oligonucleotide
gcgtaaaatacccaatatagcatgtgctgggtctgtcatacctgatgtgccgtgtcggca

SEQ ID NO: 285708 - DNA, 59 bp, Artificial
  Synthetic oligonucleotide
tgtggtttgggtaattgaagtaccgctgagaacaagaagccttcttcgcagagtgagct

SEQ ID NO: 285709 - DNA, 59 bp, Artificial
  Synthetic oligonucleotide
ggtcatcaaggctgggtgggggttcgtagtagagactaaccatccacttgctggctgat

SEQ ID NO: 285710 - DNA, 56 bp, Artificial
  Synthetic oligonucleotide
ccccctggtatgtgttgggaattgcctccgtttcagagatagcaacacgtaggtta

SEQ ID NO: 285711 - DNA, 60 bp, Artificial
  Synthetic oligonucleotide
tgtgtctcgcaggataggctctgcgatatcaactgtgtctcgcaggataggctctgcgtc

SEQ ID NO: 285712 - DNA, 59 bp, Artificial
  Synthetic oligonucleotide
gctatcgaaactgccactcttggacgcagccattaaggagggtatacgactaaccgcgc

SEQ ID NO: 285713 - DNA, 57 bp, Artificial
  Synthetic oligonucleotide
gcgttgccgaaacgtaatctactctattctggatcccaatccttcccgccgtatcaa

SEQ ID NO: 285714 - DNA, 59 bp, Artificial
  Synthetic oligonucleotide
ccgcgagtgtaaaaaggtgcttcgcaggataggtctgcgtgaacaacaatcctcgcagg

SEQ ID NO: 285715 - DNA, 58 bp, Artificial
  Synthetic oligonucleotide
ggagagaacgttcctgttttctaggcgtccgaatctgtaaatcaatcttcgagcattc

SEQ ID NO: 285716 - DNA, 60 bp, Artificial
  Synthetic oligonucleotide
gtcccttcgcgagcgtgcatactgcacgcacgcgttatctagtcccttcgggcctcgccc

SEQ ID NO: 285717 - DNA, 56 bp, Artificial
  Synthetic oligonucleotide
gacgctttgtatcaaacaggaatcatgaattctatccaagccccgtacgttggggg

SEQ ID NO: 285718 - DNA, 60 bp, Artificial
  Synthetic oligonucleotide
ttagaagatagataactatactcttattctaagatcggatatacctactaaagctatcta

SEQ ID NO: 285719 - DNA, 60 bp, Artificial
  Synthetic oligonucleotide
ttatgctaacgtatttcacaagcaagcaccgcgcctgtatattctatcgcatttttacac

SEQ ID NO: 285720 - DNA, 60 bp, Artificial
  Synthetic oligonucleotide
ttagccgtgtaccagattccaatgcggatgggctgttcgcgtcttgtgtaccacatgcta

SEQ ID NO: 285721 - DNA, 57 bp, Artificial
  Synthetic oligonucleotide
ttaggaagcataacaaagggggggccatcatattgccaaggcggacagggatccacg

SEQ ID NO: 285722 - DNA, 59 bp, Artificial
  Synthetic oligonucleotide
ccgcgaatcatcacaggttccttccctcgtgactgaaagccctcgtcaaatcattacaa

SEQ ID NO: 285723 - DNA, 58 bp, Artificial
  Synthetic oligonucleotide
cgtcacaagactcccgtaagaccctagccagtgacatcggtgtgaatgggccgagagg

SEQ ID NO: 285724 - DNA, 60 bp, Artificial
  Synthetic oligonucleotide
aacattgttcaggaccagaaggtatgaggggatgatgctactcagtaccagtcacgtcaa

SEQ ID NO: 285725 - DNA, 57 bp, Artificial
  Synthetic oligonucleotide
ggagatgagcagggaccagaagtagggaccgcgatattgggagaaggtcacgaaaac

SEQ ID NO: 285726 - DNA, 53 bp, Artificial
  Synthetic oligonucleotide
cgtatttcctaattgagcggccaccctaactaagcggccacctacccgctaat

SEQ ID NO: 285727 - DNA, 54 bp, Artificial
  Synthetic oligonucleotide
cccctaatatatccaagaaacgattcgaacgtttacggcttgcgccacttaagc

SEQ ID NO: 285728 - DNA, 58 bp, Artificial
  Synthetic oligonucleotide
cactttagtttctttgttagttctgtcataatatgccgggatggacatgcaccgggtg

SEQ ID NO: 285729 - DNA, 60 bp, Artificial
  Synthetic oligonucleotide
atccgagcagtgatgttcgaattgacattgtcaagtactactgctgtgcctctaaccccg

SEQ ID NO: 285730 - DNA, 53 bp, Artificial
  Synthetic oligonucleotide
ttatagttaggttacggttaaggtacagtggttgggttatgcaactctaagaa

SEQ ID NO: 285731 - DNA, 60 bp, Artificial
  Synthetic oligonucleotide
gctagacttaatgttgtacacttagattatagtatttgcggacgcaaaagaagcaatgat

SEQ ID NO: 285732 - DNA, 60 bp, Artificial
  Synthetic oligonucleotide
tgttgtgttatgttaaactctgagatactccgtcctgaggtggatcctaactctggtgga

SEQ ID NO: 285733 - DNA, 59 bp, Artificial
  Synthetic oligonucleotide
tgtttaagtggattagagcgagggtgagctgactgcatttgggggccgttccttgcttg

SEQ ID NO: 285734 - DNA, 60 bp, Artificial
  Synthetic oligonucleotide
ttcaatgtctgacgagcccctgctgtcccaggcagagtgtacgttatacgtacgtcgagg

SEQ ID NO: 285735 - DNA, 57 bp, Artificial
  Synthetic oligonucleotide
ttaagcaactcaaggtgaacgatatcgttcggggtttcgtcaggagggttgcagaca

SEQ ID NO: 285736 - DNA, 60 bp, Artificial
  Synthetic oligonucleotide
cgtcagggtctatataccaccatggccagtgaccgttcagatgtcaagactaaatacagt

SEQ ID NO: 285737 - DNA, 60 bp, Artificial
  Synthetic oligonucleotide
ttcaagcctgattatccgacaggcaccgagaaatgccgatgtctcgcgttgcttaatggc

SEQ ID NO: 285738 - DNA, 57 bp, Artificial
  Synthetic oligonucleotide
gggttggtgacgggtaccaacgtgcacgctgttgatacgttcaacgcattcgataac

SEQ ID NO: 285739 - DNA, 57 bp, Artificial
  Synthetic oligonucleotide
cgacaggccacagtttttcctatatgcggaaaccccgtgccgattgagtcgcttctc

SEQ ID NO: 285740 - DNA, 59 bp, Artificial
  Synthetic oligonucleotide
gtacacattcagactctttgtgagatttcacgcctaaactcaacaggtaaagacttcca

SEQ ID NO: 285741 - DNA, 60 bp, Artificial
  Synthetic oligonucleotide
ccccggattctatgtgaggatgcacgcccattaatcagtattggacgcaagcaagctgac

SEQ ID NO: 285742 - DNA, 52 bp, Artificial
  Synthetic oligonucleotide
ttaatcgcgtttttaggggtagtaaataactgtaagcgcgttctcaaactaa

SEQ ID NO: 285743 - DNA, 59 bp, Artificial
  Synthetic oligonucleotide
ttattatgtgaatgcagccagttattgaagcggagggttgggatacaaagtattaactc

SEQ ID NO: 285744 - DNA, 56 bp, Artificial
  Synthetic oligonucleotide
ttacacatccctttaacgcctgccaaggatcttcggtcttcgcgcccgacaccagg

SEQ ID NO: 285745 - DNA, 57 bp, Artificial
  Synthetic oligonucleotide
atgcaggtcgttagggggcagcaaaaatcaaccggaggcgcgtaaatgtgacccata

SEQ ID NO: 285746 - DNA, 60 bp, Artificial
  Synthetic oligonucleotide
gcgtgaaattgtccatcgctaatatgcccgtacggtgtcagatgcacacttatctttcaa

SEQ ID NO: 285747 - DNA, 60 bp, Artificial
  Synthetic oligonucleotide
gctagtatccttacattgagtctccgcaagaaggatcatcttatagatctgattcgaagg

SEQ ID NO: 285748 - DNA, 54 bp, Artificial
  Synthetic oligonucleotide
atccctagtattgggtcggattgaaggctgtggtcgccgttccaggtttaggcg

SEQ ID NO: 285749 - DNA, 60 bp, Artificial
  Synthetic oligonucleotide
ttatgttaggagcggtggcctaccatcagtgcgatactatatatagtggtcctagggatt

SEQ ID NO: 285750 - DNA, 60 bp, Artificial
  Synthetic oligonucleotide
atgcagccgaaccggttgcctcacgaaggcagctcggcttactgtgttggcctagcttcg

SEQ ID NO: 285751 - DNA, 60 bp, Artificial
  Synthetic oligonucleotide
cagaatctccacagaacgcaaaggtagcgaagtgcattatacgggtgcactaataggatc

SEQ ID NO: 285752 - DNA, 57 bp, Artificial
  Synthetic oligonucleotide
tggggtaactcatgctatacccgcccctcgatgccaatttgggatgggtttagctcc

SEQ ID NO: 285753 - DNA, 54 bp, Artificial
  Synthetic oligonucleotide
ttcgacggggacagaatacggtggaggtagttgttagtacccctctgggcaatg

SEQ ID NO: 285754 - DNA, 60 bp, Artificial
  Synthetic oligonucleotide
cccagatgggactagtgtatatttcatccttgattcctgaggctagtccacatttgtaag

SEQ ID NO: 285755 - DNA, 54 bp, Artificial
  Synthetic oligonucleotide
ggactccgggttacttcacccgaattcccacgtgcgtttagtgcgtcatttgcc

SEQ ID NO: 285756 - DNA, 60 bp, Artificial
  Synthetic oligonucleotide
cccagcacgatcttccctcctatccggcaatgatctcccttggcatacataatctctcac

SEQ ID NO: 285757 - DNA, 56 bp, Artificial
  Synthetic oligonucleotide
cgtctctctgaagcagacctaccccgccttcggggggttggcctgccacggctcaa

SEQ ID NO: 285758 - DNA, 59 bp, Artificial
  Synthetic oligonucleotide
tgggtgccgcctcgtaccctctcgtacaaccccgctgagcgtgccatcctggtcacctc

SEQ ID NO: 285759 - DNA, 59 bp, Artificial
  Synthetic oligonucleotide
aaccttctcgtcagtttgacgcgtacggccctatgcctgtgaacctgtatgacgacatg

SEQ ID NO: 285760 - DNA, 50 bp, Artificial
  Synthetic oligonucleotide
aaccttctaccccggcgcccccgtagtcaccggcgtcctatgggccaacg

SEQ ID NO: 285761 - DNA, 54 bp, Artificial
  Synthetic oligonucleotide
aacaacggtaccacgcaaccgtcaattgggctagggcgtagataaaccaactgc

SEQ ID NO: 285762 - DNA, 57 bp, Artificial
  Synthetic oligonucleotide
acgctgggaggactgttctcaatctttgcgcttggtatggccgttacatccctcccc

SEQ ID NO: 285763 - DNA, 60 bp, Artificial
  Synthetic oligonucleotide
tgggttcagggatagcgtcgggggaagcctagtcaacagagaatgtgccgagagactcga

SEQ ID NO: 285764 - DNA, 58 bp, Artificial
  Synthetic oligonucleotide
ccggaccatcctacacagtaaccttgatcttgcacgccaaagcctgacctccaaatcg

SEQ ID NO: 285765 - DNA, 56 bp, Artificial
  Synthetic oligonucleotide
atcgaaaaacgtgcttttcgtcaggacaaaagaccctgacctagcgctagcggcag

SEQ ID NO: 285766 - DNA, 58 bp, Artificial
  Synthetic oligonucleotide
ggtattcggtgtatccaacatcggccccgttgtcattgtatactgagtagtagaatcc

SEQ ID NO: 285767 - DNA, 59 bp, Artificial
  Synthetic oligonucleotide
atgcgcgacaggggaaggaggggcagcgggattacattctcccgtggccttatcgatca

SEQ ID NO: 285768 - DNA, 60 bp, Artificial
  Synthetic oligonucleotide
tggtccaaacgacctagcactgtcactattgggctatgtgcccgcgagaggtgacgagcc

SEQ ID NO: 285769 - DNA, 60 bp, Artificial
  Synthetic oligonucleotide
ggtattgtcacgcgagtccatctgctaggtactactggccgcagaatcctcacggataag

SEQ ID NO: 285770 - DNA, 53 bp, Artificial
  Synthetic oligonucleotide
aacctcgacccaaggtccttgttgactcgactaaaaaggcctatattcagtgt

SEQ ID NO: 285771 - DNA, 60 bp, Artificial
  Synthetic oligonucleotide
atcaacgctgaaccgattcttagagttcgatccagctcttggggtgatattgtatgagca

SEQ ID NO: 285772 - DNA, 60 bp, Artificial
  Synthetic oligonucleotide
tggcttcattgctgtggttatagtattctgatagttggaccgtggaagttataaatatca

SEQ ID NO: 285773 - DNA, 60 bp, Artificial
  Synthetic oligonucleotide
tagcgtggatgagaccctctcgacgccagatgataccccttctttgcatgttggtcgcga

SEQ ID NO: 285774 - DNA, 60 bp, Artificial
  Synthetic oligonucleotide
aacgcggatgtcatgcggatggaaactagcatgcctcaaccactcccagtggcctacgaa

SEQ ID NO: 285775 - DNA, 60 bp, Artificial
  Synthetic oligonucleotide
ccgcaatccaaaatccacatacctttccacagatggcaagcccttctcgccatacacaag

SEQ ID NO: 285776 - DNA, 49 bp, Artificial
  Synthetic oligonucleotide
cccaactacgatggtcccccgggaaaaaaggttcccgtgaacaaagtga

SEQ ID NO: 285777 - DNA, 53 bp, Artificial
  Synthetic oligonucleotide
cccaactctggctacggagtggcatcctacgtggtcttccttccccccccaag

SEQ ID NO: 285778 - DNA, 60 bp, Artificial
  Synthetic oligonucleotide
atcaagtaatacctggtccttcaaatagtcattctggtccttcatatagtcattctggtc

SEQ ID NO: 285779 - DNA, 60 bp, Artificial
  Synthetic oligonucleotide
gctctctcgtctgctggacgagagttattaaggccaatccaggactggttgtttcctgac

SEQ ID NO: 285780 - DNA, 54 bp, Artificial
  Synthetic oligonucleotide
ccggcaagaatcaggtggacccactggccgccttttgatcgcggtacccaacgg

SEQ ID NO: 285781 - DNA, 60 bp, Artificial
  Synthetic oligonucleotide
tgggccttcgctcatttgttcgccagacgcctagatggacgcagctccgagctgtgtcca

SEQ ID NO: 285782 - DNA, 60 bp, Artificial
  Synthetic oligonucleotide
cgggcggcaatgagtatagtctggaacggcgtcaatgttacgcaaggagctcagtgtcta

SEQ ID NO: 285783 - DNA, 59 bp, Artificial
  Synthetic oligonucleotide
tgggcgaataatgtctagtaatctttatatagtagcgtgcgttatctaatgtttaggta

SEQ ID NO: 285784 - DNA, 59 bp, Artificial
  Synthetic oligonucleotide
acgctcgcttctttccaagataatcggtcatacagctgccgggtgtgtttgcctgggag

SEQ ID NO: 285785 - DNA, 60 bp, Artificial
  Synthetic oligonucleotide
cccacgacttcccctccctaccatctctcctagccacatcctgatctgcgtctgtggtgg

SEQ ID NO: 285786 - DNA, 56 bp, Artificial
  Synthetic oligonucleotide
ccggattcccagcccaaaaaaaatcaggacttcggtcctcacactccgatgtgtca

SEQ ID NO: 285787 - DNA, 60 bp, Artificial
  Synthetic oligonucleotide
gcgcgcagctgagcgactcagcttcgcaactctactgaccacctatgccacactcatcgg

SEQ ID NO: 285788 - DNA, 60 bp, Artificial
  Synthetic oligonucleotide
atgcggaacaataccaatgcgcccgttctcactgtcattatagattcctgataccatcga

SEQ ID NO: 285789 - DNA, 58 bp, Artificial
  Synthetic oligonucleotide
cgtagctcgcgtaggatccattaataatcttctggaggtctcgtctggacgcggggta

SEQ ID NO: 285790 - DNA, 57 bp, Artificial
  Synthetic oligonucleotide
cgggcttcgcttggaggaagtcaaggaacttctatcagacggctggggtgttcagga

SEQ ID NO: 285791 - DNA, 59 bp, Artificial
  Synthetic oligonucleotide
gtcccgaatgcgttcttcaggggcgttccgagctgcctgctgtaactcggaaactatgc

SEQ ID NO: 285792 - DNA, 59 bp, Artificial
  Synthetic oligonucleotide
aacaccgtctagacgtcccaggacatactaagcataagcactagtaagtatttgagctg

SEQ ID NO: 285793 - DNA, 57 bp, Artificial
  Synthetic oligonucleotide
gggttatgggtattctagaatcattaccggaagggcggggcatgttgctagactgga

SEQ ID NO: 285794 - DNA, 60 bp, Artificial
  Synthetic oligonucleotide
tgtccaactctactcgggctagcgacatttccctccacatgtcagcgctccttttcccta

SEQ ID NO: 285795 - DNA, 60 bp, Artificial
  Synthetic oligonucleotide
acgctcaccgcagtactgtgccagtaaatgggcgatgcggggaatcatgcattccctgcg

SEQ ID NO: 285796 - DNA, 60 bp, Artificial
  Synthetic oligonucleotide
tgtcccgattgaagttcctgcgagtctcggtatcgcccacatccgaggacaccacagccg

SEQ ID NO: 285797 - DNA, 60 bp, Artificial
  Synthetic oligonucleotide
gctcaagcgccatgatggcaggctagagcctaaaagaaaccgactatatctacgtacgac

SEQ ID NO: 285798 - DNA, 57 bp, Artificial
  Synthetic oligonucleotide
gcgggaatcacttaggggatgggtagatctatccattgagatccgggccggcccctg

SEQ ID NO: 285799 - DNA, 60 bp, Artificial
  Synthetic oligonucleotide
gggaccaacctggcagataatggatcccaattctgtctcgctaggataaacagatggaaa

SEQ ID NO: 285800 - DNA, 57 bp, Artificial
  Synthetic oligonucleotide
ttccatgaatctttcattgatatttacatcaacctttgtaatcgattttacaaccct

SEQ ID NO: 285801 - DNA, 60 bp, Artificial
  Synthetic oligonucleotide
ggagctcagattgggctttgatagtgccaaggtcacatatcatgttgtctttgggtaggt

SEQ ID NO: 285802 - DNA, 60 bp, Artificial
  Synthetic oligonucleotide
gctattcgagcccgtgaatggagttgagatcttcgaggatctaaactcagcgctcgagtt

SEQ ID NO: 285803 - DNA, 60 bp, Artificial
  Synthetic oligonucleotide
tgtcggctccagttgcggcgtaggatctggcaagacatgccagcctgacaagggtgtgct

SEQ ID NO: 285804 - DNA, 60 bp, Artificial
  Synthetic oligonucleotide
atgcaagcgcggtgcttattttgggggtcgacatctgaagggcactgcgagagacggccg

SEQ ID NO: 285805 - DNA, 60 bp, Artificial
  Synthetic oligonucleotide
tgtctcatggtgcttggactcacatgggtgctgcaccactgcatatcgacctgtcaaaag

SEQ ID NO: 285806 - DNA, 59 bp, Artificial
  Synthetic oligonucleotide
gtctctctcatgcggtctcgcctcgtaactttgggtcgccccttgcgttctgaacctca

SEQ ID NO: 285807 - DNA, 59 bp, Artificial
  Synthetic oligonucleotide
aaccgacactagcctggcacagcttcggaacgctactggtgaaggaagtagcctagtca

SEQ ID NO: 285808 - DNA, 60 bp, Artificial
  Synthetic oligonucleotide
tgtctccccgcctttctctgtgcttcgcgcgaatatcccaagaaggttatgttgcgttga

SEQ ID NO: 285809 - DNA, 60 bp, Artificial
  Synthetic oligonucleotide
ggaggattctgtctcggttcacgtacaatcatctcatcgtgtccggaattggagattact

SEQ ID NO: 285810 - DNA, 59 bp, Artificial
  Synthetic oligonucleotide
cccagtgaaaacgggactgccgtgagaactcggttgcaccatgcaatcctagcgttgtc

SEQ ID NO: 285811 - DNA, 58 bp, Artificial
  Synthetic oligonucleotide
ttcctagcagaaccagcgaccacctcacgcccaagttttcatacagcggtagggacgc

SEQ ID NO: 285812 - DNA, 60 bp, Artificial
  Synthetic oligonucleotide
gtcaggtgaacctttatcttgtgaaccttctcgtaagcatcataaacctgatgaatctta

SEQ ID NO: 285813 - DNA, 58 bp, Artificial
  Synthetic oligonucleotide
cccatacgcaaccaagggatgatacccacccttctggaattgataattatccggctca

SEQ ID NO: 285814 - DNA, 60 bp, Artificial
  Synthetic oligonucleotide
tgtacaagaacattgagcagtcgcttgagtcccaatatgaatcggttctccgcctgtcag

SEQ ID NO: 285815 - DNA, 60 bp, Artificial
  Synthetic oligonucleotide
atcataatcccattacataagctacattaattacagctactgggcactaagtactcaaaa

SEQ ID NO: 285816 - DNA, 60 bp, Artificial
  Synthetic oligonucleotide
ttccgcgctaatctcaacttgttgggaatctgtctatcctgccaaggccgcagtgtcaat

SEQ ID NO: 285817 - DNA, 59 bp, Artificial
  Synthetic oligonucleotide
ggccagctagcagcctagcacagtattatcgttccccacgacttcccctccctaccatc

SEQ ID NO: 285818 - DNA, 58 bp, Artificial
  Synthetic oligonucleotide
tgtagggacaatgctccgggattcgatcctttcacgtcttgatagaactttgtgggct

SEQ ID NO: 285819 - DNA, 60 bp, Artificial
  Synthetic oligonucleotide
gcggcgtagaagagaggcgtaaagttctcggctgtagcagagtcgacaatggctccatgg

SEQ ID NO: 285820 - DNA, 60 bp, Artificial
  Synthetic oligonucleotide
tgtatcatacatacctctatccagatttttcgcatactttcccggcctttgtagacgaga

SEQ ID NO: 285821 - DNA, 60 bp, Artificial
  Synthetic oligonucleotide
cgtagatagccttgagttaccaagaataagtatcgcgacacttgtaacgccatcgatcga

SEQ ID NO: 285822 - DNA, 60 bp, Artificial
  Synthetic oligonucleotide
atcatcgcgtatttgttagtgtgttcgcagttgtcgcgtgcatatggttgtagtagtata

SEQ ID NO: 285823 - DNA, 55 bp, Artificial
  Synthetic oligonucleotide
gcggcttaagccctgctcctttaaagccgctgtaaatattagccgaagtaaagac

SEQ ID NO: 285824 - DNA, 60 bp, Artificial
  Synthetic oligonucleotide
tgtatttcatccattaatctaaatgtttcagcctttctattatgataagattctataata

SEQ ID NO: 285825 - DNA, 60 bp, Artificial
  Synthetic oligonucleotide
ttccgcccggtcttctcggagccataatgctgtacaagcgtgatcactaggttccttgcc

SEQ ID NO: 285826 - DNA, 60 bp, Artificial
  Synthetic oligonucleotide
atcatgcgaggagtactggaagtggctcatccttgtttacccgtatccctgcttgaatgg

SEQ ID NO: 285827 - DNA, 60 bp, Artificial
  Synthetic oligonucleotide
aacaccatttcaacgtcgatcgaatcatctcaacgcctatcaacgaggcagtgattatcg

SEQ ID NO: 285828 - DNA, 60 bp, Artificial
  Synthetic oligonucleotide
aggttacgtgtacagtgagattctttatcgaatgccatttctatcctgatctcgacagtc

SEQ ID NO: 285829 - DNA, 60 bp, Artificial
  Synthetic oligonucleotide
gtcgcggtcctctaggatgtgtatacattcactagcattcgtgcactatagcaggtttct

SEQ ID NO: 285830 - DNA, 60 bp, Artificial
  Synthetic oligonucleotide
gctttatggttccgagtaaacttacctcgtcgcaatgcatggctgtcagtttatgaagta

SEQ ID NO: 285831 - DNA, 59 bp, Artificial
  Synthetic oligonucleotide
tctgggtattcgcacactctaggggaaggtagctcccctgttgcaaatgacgtgtcgtc

SEQ ID NO: 285832 - DNA, 55 bp, Artificial
  Synthetic oligonucleotide
cggtaatgttattaaggagaggggaataactaatcaaatcgaacgcgatggatta

SEQ ID NO: 285833 - DNA, 60 bp, Artificial
  Synthetic oligonucleotide
aatgctagtagacgtgtatcatatggttctgtctgtatggtgattcacaagtacactaca

SEQ ID NO: 285834 - DNA, 60 bp, Artificial
  Synthetic oligonucleotide
gcccgagaacgcattgagttgaccgcagcattacattctgaagggtggatgcaaccaacc

SEQ ID NO: 285835 - DNA, 60 bp, Artificial
  Synthetic oligonucleotide
ttgtggcgtggaaacatacttagcatgtagagacaaaccttggtgcgcggcttcaggcgg

SEQ ID NO: 285836 - DNA, 56 bp, Artificial
  Synthetic oligonucleotide
atctaccgacaccaactctattccctccgtgtcggctccaaccgtctttcacaata

SEQ ID NO: 285837 - DNA, 60 bp, Artificial
  Synthetic oligonucleotide
tcgtcgatcaataaccaaagagtaattcgcttctagaagcctgtgatcacccttcatgat

SEQ ID NO: 285838 - DNA, 59 bp, Artificial
  Synthetic oligonucleotide
ttgttgcgactatctggtctcacacttctttaaacatatatccgccctgtttcccattc

SEQ ID NO: 285839 - DNA, 57 bp, Artificial
  Synthetic oligonucleotide
cagacagacggacgagtgggtggagagatttggtcctccggagtaatctctcggcgg

SEQ ID NO: 285840 - DNA, 60 bp, Artificial
  Synthetic oligonucleotide
tctggaggtctcgtctggacgcggggtaggtaggcatgctatcgatctgttaagcaacct

SEQ ID NO: 285841 - DNA, 57 bp, Artificial
  Synthetic oligonucleotide
cgttcgtcaggcctcaataacctaccaatagccactagatatacctattccgaggta

SEQ ID NO: 285842 - DNA, 58 bp, Artificial
  Synthetic oligonucleotide
tctgcgttaaaaccaataccagagcctactatggtctacaagcggtgccatattggtt

SEQ ID NO: 285843 - DNA, 60 bp, Artificial
  Synthetic oligonucleotide
aagtgccgactgtttacacgtcatagacagttatatgagatgaaacgtattaggcgatca

SEQ ID NO: 285844 - DNA, 58 bp, Artificial
  Synthetic oligonucleotide
ccctctggcaatgcccggactcgcaaattagctgcaattcgagcgggggtaacactct

SEQ ID NO: 285845 - DNA, 52 bp, Artificial
  Synthetic oligonucleotide
cgttgactgaacccgtttctttcctgccttgagtttcctgccctccccggtc

SEQ ID NO: 285846 - DNA, 58 bp, Artificial
  Synthetic oligonucleotide
agttgggacctccccgacgtagtgatgactgctcgtccgtggagtgattttgccgcag

SEQ ID NO: 285847 - DNA, 60 bp, Artificial
  Synthetic oligonucleotide
tctgccgttatgctacaagtggcttctagacataacacaagcatgtataggatgcactag

SEQ ID NO: 285848 - DNA, 60 bp, Artificial
  Synthetic oligonucleotide
tcgtctaaggtagggtgatgcacttcccagctggtacgataccccatgctgatatgcgtc

SEQ ID NO: 285849 - DNA, 60 bp, Artificial
  Synthetic oligonucleotide
cgttgagatgaagcggcccactccccagaaggcgggattagtctgcttactagagacagc

SEQ ID NO: 285850 - DNA, 55 bp, Artificial
  Synthetic oligonucleotide
ccaccatgagaggggcactgagacgacaccggtagggtgaaaatttactgcgacc

SEQ ID NO: 285851 - DNA, 55 bp, Artificial
  Synthetic oligonucleotide
cgtgagtgggtcccgatatggatttgacatcgtactgacgccaaagaagtacact

SEQ ID NO: 285852 - DNA, 55 bp, Artificial
  Synthetic oligonucleotide
cttgtctccccacgcacgtaatgtgcttgcccataccctagaggccctcagcctg

SEQ ID NO: 285853 - DNA, 55 bp, Artificial
  Synthetic oligonucleotide
ctttgatgcgtatgcgggaactgccgtacatgactttctgaatggctgtgagcca

SEQ ID NO: 285854 - DNA, 55 bp, Artificial
  Synthetic oligonucleotide
gccgaacgaggaaggccaaagtaaggtggattcttatgcaaagatcttcgcttac

SEQ ID NO: 285855 - DNA, 55 bp, Artificial
  Synthetic oligonucleotide
gctgcagagtgatatcctcattatgggcaaggtcaggaatgcgacggacgtgatg

SEQ ID NO: 285856 - DNA, 55 bp, Artificial
  Synthetic oligonucleotide
gcttaggagcgttgaaggtgttcccatcgcaccaatgttgttctctcgactcgag

SEQ ID NO: 285857 - DNA, 55 bp, Artificial
  Synthetic oligonucleotide
ggacaccggggatactacccgaatagaaccctgatacgtcaagatggaatttctg

SEQ ID NO: 285858 - DNA, 55 bp, Artificial
  Synthetic oligonucleotide
ggacagtctcgggcatcatctattagtagatctgaggtgactggtccttcaaagc

SEQ ID NO: 285859 - DNA, 55 bp, Artificial
  Synthetic oligonucleotide
ggagtgtattggtccgtaagggaggaacacggcgcgtagatcttgttctgttgcg

SEQ ID NO: 285860 - DNA, 55 bp, Artificial
  Synthetic oligonucleotide
gggaacatgactgaccgcgaggtatacccagaggtaaagcgggttcgaggtattc

SEQ ID NO: 285861 - DNA, 55 bp, Artificial
  Synthetic oligonucleotide
agagacgtgtagattgcgtaccgtgttctggtttcaggtatgagacttgacaccg

SEQ ID NO: 285862 - DNA, 55 bp, Artificial
  Synthetic oligonucleotide
gggagggtacaaaggttgaatgatggagagctatgtgactactctgaaacattga

SEQ ID NO: 285863 - DNA, 55 bp, Artificial
  Synthetic oligonucleotide
ggtgaggtctgttgcattctcgcaggatagcagccgagtcgtctctggatcggag

SEQ ID NO: 285864 - DNA, 55 bp, Artificial
  Synthetic oligonucleotide
ggtgccgaaaccatgcgccctgccgatgtctttcctaggcgcttaacaatagcgc

SEQ ID NO: 285865 - DNA, 55 bp, Artificial
  Synthetic oligonucleotide
caatgctgtgttcgtgaattgtcactgtaacgagcgtgatgcatgatggctccca

SEQ ID NO: 285866 - DNA, 55 bp, Artificial
  Synthetic oligonucleotide
actgaagaccttttggctatgcgcatgcagcaaatcctgcgtcgggacaagaaac

SEQ ID NO: 285867 - DNA, 54 bp, Artificial
  Synthetic oligonucleotide
agtcttcacagtgctccgctggccttgctactagggatagttgcgaatttctat

SEQ ID NO: 285868 - DNA, 53 bp, Artificial
  Synthetic oligonucleotide
gtggaacaatccacgcgatttggccatagaatctgctatatagtccatcaagc

SEQ ID NO: 285869 - DNA, 53 bp, Artificial
  Synthetic oligonucleotide
acagattgatgaccaattccgtcgcacccgtgaactcttggatttcattcagt

SEQ ID NO: 285870 - DNA, 51 bp, Artificial
  Synthetic oligonucleotide
cccatgtttcatagactgtccgattgtactgagatgcccctctgaatgaag

SEQ ID NO: 285871 - DNA, 51 bp, Artificial
  Synthetic oligonucleotide
tcgcttggactctatgctcgtcactaagtaaatgcattcgtgaatctgcca

SEQ ID NO: 285872 - DNA, 54 bp, Artificial
  Synthetic oligonucleotide
cccgatcacgagttactgtcccgaaaggatcttcgtggggaacggctattcacg

SEQ ID NO: 285873 - DNA, 51 bp, Artificial
  Synthetic oligonucleotide
tgattgaagcaccgcgttcaatttaccgttgtgtaagctgccacctccctc

SEQ ID NO: 285874 - DNA, 50 bp, Artificial
  Synthetic oligonucleotide
aacagactgggacgtggataagccttggcggaccattcgccgctgagacg

SEQ ID NO: 285875 - DNA, 50 bp, Artificial
  Synthetic oligonucleotide
aacagacagccacgaccacagatgaggacgtgcccccgacgatgggaaac

SEQ ID NO: 285876 - DNA, 50 bp, Artificial
  Synthetic oligonucleotide
aacagaaggaccgctgggctctcagatgctggaggcagaaagacggccgg

SEQ ID NO: 285877 - DNA, 50 bp, Artificial
  Synthetic oligonucleotide
aacactgcggtcccagcctccgtcggattgaatggagcggaccaggggag

SEQ ID NO: 285878 - DNA, 50 bp, Artificial
  Synthetic oligonucleotide
aaacgtcccccgcgagacgctcagagcttcccaagcgaagcagcagtcgt

SEQ ID NO: 285879 - DNA, 50 bp, Artificial
  Synthetic oligonucleotide
aaacggccatttgccctttgcatgtccccctcccagccatgtcccgcgaa

SEQ ID NO: 285880 - DNA, 50 bp, Artificial
  Synthetic oligonucleotide
aaacgctccacagacgggggcggcatcgtgaggggagccccttggtagaa

SEQ ID NO: 285881 - DNA, 50 bp, Artificial
  Synthetic oligonucleotide
aaacgcggtgtaaaataggggctaggcggcccatgttcctcggcaaacga

SEQ ID NO: 285882 - DNA, 50 bp, Artificial
  Synthetic oligonucleotide
aaacgccctccgattcagtgccacactcgcacagatatccaccgccgcta

SEQ ID NO: 285883 - DNA, 55 bp, Artificial
  Synthetic oligonucleotide
cccgtctgacggtccattgtacacacggattgataagtcatattctcctcgcgct

SEQ ID NO: 285884 - DNA, 50 bp, Artificial
  Synthetic oligonucleotide
aaacgcccgtttgagcctcggcttaggccttggagccccttcaaccccga

SEQ ID NO: 285885 - DNA, 50 bp, Artificial
  Synthetic oligonucleotide
aaaccctttgctgcggcagttcaccctaccgtcccgtccttgccagtgac

SEQ ID NO: 285886 - DNA, 50 bp, Artificial
  Synthetic oligonucleotide
aaacccgttgaacgaccgatcgtgcacaccatacccgcgccaaggaccta

SEQ ID NO: 285887 - DNA, 50 bp, Artificial
  Synthetic oligonucleotide
aaaccactccccctcaggcggctcagtcaagccaacacatccaaggtgga

SEQ ID NO: 285888 - DNA, 50 bp, Artificial
  Synthetic oligonucleotide
aaacacaacagaggggagaggcgccagtgccaaggggccttgcatgaggg

SEQ ID NO: 285889 - DNA, 50 bp, Artificial
  Synthetic oligonucleotide
aaacaacggacctcccaacgaaaggccgtctcctggaggagtacccccta

SEQ ID NO: 285890 - DNA, 50 bp, Artificial
  Synthetic oligonucleotide
aaaatttggcagtgggttgccgctccccacaagacgcgtcacacgaagcg

SEQ ID NO: 285891 - DNA, 50 bp, Artificial
  Synthetic oligonucleotide
aaaatgcctgcaagcacccccaataccccctgactcgtgggctcccaaga

SEQ ID NO: 285892 - DNA, 50 bp, Artificial
  Synthetic oligonucleotide
aaaatcgcaacggaagcgggcccagatcgttagggttggcctgggaagta

SEQ ID NO: 285893 - DNA, 50 bp, Artificial
  Synthetic oligonucleotide
aaaagggatgcgccgctgagcctccgcaactctgataggagacgctgaga

SEQ ID NO: 285894 - DNA, 55 bp, Artificial
  Synthetic oligonucleotide
cctccaccacactgagcttaccaactcttcaactgtgtgacgacctctggttacg

SEQ ID NO: 285895 - DNA, 50 bp, Artificial
  Synthetic oligonucleotide
aaaagactaggccctggcattctcaagcggtcccggtggcttagcgctct

SEQ ID NO: 285896 - DNA, 50 bp, Artificial
  Synthetic oligonucleotide
aaaacttacgtgcgtcgatggctgctcggtctgagccgactggagggcta

SEQ ID NO: 285897 - DNA, 50 bp, Artificial
  Synthetic oligonucleotide
aacacactcatgcatccgcacatacgtgctctggccaatgaggcggggta

SEQ ID NO: 285898 - DNA, 50 bp, Artificial
  Synthetic oligonucleotide
aacacacgtgccacgcccacgaaaggatcaacccctacctagtggcaccc

SEQ ID NO: 285899 - DNA, 50 bp, Artificial
  Synthetic oligonucleotide
aacaaggagcacccattctcaggtcttccgacaccaacgctcggcgctga

SEQ ID NO: 285900 - DNA, 50 bp, Artificial
  Synthetic oligonucleotide
aaatttggcagtgggttgccgctccccaagagtagccgtcatggggaggc

SEQ ID NO: 285901 - DNA, 50 bp, Artificial
  Synthetic oligonucleotide
aaattgcgtgctcagacccgcgaaagttcccctctgcaaagcggaccagg

SEQ ID NO: 285902 - DNA, 50 bp, Artificial
  Synthetic oligonucleotide
aaattcagcgtctaatcttcgagatggctgcgaggagccaccgcggagct

SEQ ID NO: 285903 - DNA, 50 bp, Artificial
  Synthetic oligonucleotide
aaatgcgtccgcagaggtaccgatcgaagagggacaaagcacccccgacg

SEQ ID NO: 285904 - DNA, 50 bp, Artificial
  Synthetic oligonucleotide
aaatgcaagcatcgggcctcgctcccgacagacgaagggaccaacgtgac

SEQ ID NO: 285905 - DNA, 55 bp, Artificial
  Synthetic oligonucleotide
cctctcttacagggcgcgttatggtaagcgtcaatcgactttgttttgtggacgc

SEQ ID NO: 285906 - DNA, 50 bp, Artificial
  Synthetic oligonucleotide
aaatccctccaaacgagacggggtgcgggcatgcagtgaggaagtcgggc

SEQ ID NO: 285907 - DNA, 50 bp, Artificial
  Synthetic oligonucleotide
aaagtccttgcttgaactagtggctcccggagcacgtccctgcagtccga

SEQ ID NO: 285908 - DNA, 50 bp, Artificial
  Synthetic oligonucleotide
aaagtccgtttgggaggagtgctgcgattggggagcgggggaatcgacga

SEQ ID NO: 285909 - DNA, 50 bp, Artificial
  Synthetic oligonucleotide
aaagtcactcatcggtgccccaacgcccctcactgcgcgttcctctcgaa

SEQ ID NO: 285910 - DNA, 50 bp, Artificial
  Synthetic oligonucleotide
aaaggtcggatggcccgccaggtcctacaacgcatcgtcttacgccgtct

SEQ ID NO: 285911 - DNA, 50 bp, Artificial
  Synthetic oligonucleotide
aaagggtcgcaatgtgtcacgaaccgccacactgtgcacccgcacgtgtg

SEQ ID NO: 285912 - DNA, 50 bp, Artificial
  Synthetic oligonucleotide
aaagcctccgtcagcgaagtaggctgtccgtccgagcggtcagctttggt

SEQ ID NO: 285913 - DNA, 50 bp, Artificial
  Synthetic oligonucleotide
aaactttaacgtggaggcgaggcgagcgtccaactgcatccagagcccct

SEQ ID NO: 285914 - DNA, 50 bp, Artificial
  Synthetic oligonucleotide
aaacgtgtcgaaccctgagcatgggagtatgggaggcggtcgtgtgctcc

SEQ ID NO: 285915 - DNA, 55 bp, Artificial
  Synthetic oligonucleotide
cctgcgatctctcagacttttggacgcttgagactctagcaaggcgaaaagagcg

SEQ ID NO: 285916 - DNA, 55 bp, Artificial
  Synthetic oligonucleotide
cgggatagtaggatttagaggcacgcggatttggacattattccctgttcaaagt

SEQ ID NO: 285917 - DNA, 55 bp, Artificial
  Synthetic oligonucleotide
cgtcgtgcaactaattactcaccagaactctcgcgataaggatattctgtcacac

SEQ ID NO: 285918 - DNA, 53 bp, Artificial
  Synthetic oligonucleotide
agtctggtctaccgcagtccttggggaaatgattgtcccttccctccggtaag

SEQ ID NO: 285919 - DNA, 55 bp, Artificial
  Synthetic oligonucleotide
ccctgtgcatgatacaactctccaacgtggttattctcaatcacaatgctccatc

SEQ ID NO: 285920 - DNA, 54 bp, Artificial
  Synthetic oligonucleotide
cctaccacggtagtctcttgataccagtatgggtgtaggtttggttaactgtaa

SEQ ID NO: 285921 - DNA, 55 bp, Artificial
  Synthetic oligonucleotide
cgtttgcggatctgaaactttggtctccagggttccattgcccactccagtcatg

SEQ ID NO: 285922 - DNA, 55 bp, Artificial
  Synthetic oligonucleotide
ctactaggatccatattcatttgtgaagagtggagagcattcactgcatatgccg

SEQ ID NO: 285923 - DNA, 55 bp, Artificial
  Synthetic oligonucleotide
ctctcaggtgtgaggtacccgtcctggagtactcgtatctgagaataagacaccg

SEQ ID NO: 285924 - DNA, 55 bp, Artificial
  Synthetic oligonucleotide
gatctgcttaggaggttgtgccatctaccttccaatcgctgctccaacctaggcg

SEQ ID NO: 285925 - DNA, 54 bp, Artificial
  Synthetic oligonucleotide
gcacggaaacagaaggggaggccgcgaccgacttatcatatcctaccgaaaccc

SEQ ID NO: 285926 - DNA, 55 bp, Artificial
  Synthetic oligonucleotide
gctagccattggtgagaaatgtagggctgacatatgaacaactttctgcacgccg

SEQ ID NO: 285927 - DNA, 55 bp, Artificial
  Synthetic oligonucleotide
gctggggtacttgtacgcgaggtcccatacccggattaagtatcaaggccgatgg

SEQ ID NO: 285928 - DNA, 55 bp, Artificial
  Synthetic oligonucleotide
gggatgtgcgcctgatgagtacaccttgcaagtgtgccttgcgggtatgccttac

SEQ ID NO: 285929 - DNA, 55 bp, Artificial
  Synthetic oligonucleotide
aggtcatgggtttcccacatgtaaccactttggatcatatgggtgctgatatgcg

SEQ ID NO: 285930 - DNA, 55 bp, Artificial
  Synthetic oligonucleotide
gtcccttcgtaatgtcgtgcctcatgaaccttgttggattatgttagtgcatagt

SEQ ID NO: 285931 - DNA, 55 bp, Artificial
  Synthetic oligonucleotide
gtgagaactggtctgtctccaaggtcaggtatagtaggccaaagattatccctcc

SEQ ID NO: 285932 - DNA, 55 bp, Artificial
  Synthetic oligonucleotide
taccacggggagcactttctactgaaaggaggggtagcgcattggaagacttccg

SEQ ID NO: 285933 - DNA, 55 bp, Artificial
  Synthetic oligonucleotide
tatgaggcggcatcatttgactcggttgccagcttttgagtaactagccggtgga

SEQ ID NO: 285934 - DNA, 55 bp, Artificial
  Synthetic oligonucleotide
ttatatgcaaggcacactctaaaggcatactcgccagatgcacgtcccatgactc

SEQ ID NO: 285935 - DNA, 54 bp, Artificial
  Synthetic oligonucleotide
ggggattgttgacctaacagagaacacggtcagtcacgggagatcccctccggt

SEQ ID NO: 285936 - DNA, 54 bp, Artificial
  Synthetic oligonucleotide
gttggtagcagaggatattgtcggcctaagattgctttatatggagagatcctc

SEQ ID NO: 285937 - DNA, 54 bp, Artificial
  Synthetic oligonucleotide
atagtcctccgtccgctctgccttgcgttcagagtatcaacgtagccaggccac

SEQ ID NO: 285938 - DNA, 53 bp, Artificial
  Synthetic oligonucleotide
catgcgggcttcctggatacctgcagggaccgacaggctttaggcatatgcca

SEQ ID NO: 285939 - DNA, 52 bp, Artificial
  Synthetic oligonucleotide
tcacgatctatattctcaggttccctggaaggctgttactggtcactgtgta

SEQ ID NO: 285940 - DNA, 55 bp, Artificial
  Synthetic oligonucleotide
atcagtcatctgagcagtctaaagggcatcataagacatcaggcgccaactgtgg

SEQ ID NO: 285941 - DNA, 51 bp, Artificial
  Synthetic oligonucleotide
aaacccgcccgagtgcccccactcaatgatctcgggacatccctgccgact

SEQ ID NO: 285942 - DNA, 50 bp, Artificial
  Synthetic oligonucleotide
aaaaccccagagccatcccctccagtaaggaggcacctcccgcttgatgc

SEQ ID NO: 285943 - DNA, 50 bp, Artificial
  Synthetic oligonucleotide
aaaacccctgagctatcccctccactaaggaggcatctcccacttgacgc

SEQ ID NO: 285944 - DNA, 50 bp, Artificial
  Synthetic oligonucleotide
aaaaccgaccgcccccgcacgtagccaagggttggccagagtcccagaat

SEQ ID NO: 285945 - DNA, 50 bp, Artificial
  Synthetic oligonucleotide
aaaacggcgcatgcaagaaagcatgacccgtcgagaaagggccggtaggc

SEQ ID NO: 285946 - DNA, 50 bp, Artificial
  Synthetic oligonucleotide
aaaatcgcagcgggggctatgtcggttcggggctattccgggaacgcaga

SEQ ID NO: 285947 - DNA, 50 bp, Artificial
  Synthetic oligonucleotide
aaacaagtccaaccaggtggtcgcaacccactatccgcacaggtggccat

SEQ ID NO: 285948 - DNA, 50 bp, Artificial
  Synthetic oligonucleotide
aaacatctccccttgacactcgtgctcgggggtggccaaaactcgggcgc

SEQ ID NO: 285949 - DNA, 50 bp, Artificial
  Synthetic oligonucleotide
aaacccacccaagcgcctccactcaatgatcccgggacaccccgctgact

SEQ ID NO: 285950 - DNA, 50 bp, Artificial
  Synthetic oligonucleotide
aaacccgcccgagtgcccccactcaatgatctcggaacaccccaccaacc

SEQ ID NO: 285951 - DNA, 55 bp, Artificial
  Synthetic oligonucleotide
aagcgtcacatagtgcgacgccaaacgattcaggagggcatccttcaatccagac

SEQ ID NO: 285952 - DNA, 50 bp, Artificial
  Synthetic oligonucleotide
aaacccgcctgagtgcccctactcaatgatcctgggataccctgccgact

SEQ ID NO: 285953 - DNA, 50 bp, Artificial
  Synthetic oligonucleotide
aaacgctggcgacaacagtggccgaacaccgctctcttgggctgctagca

SEQ ID NO: 285954 - DNA, 50 bp, Artificial
  Synthetic oligonucleotide
cagtgcacaagacccaaataagtcgaaccaagtggtcacaacccactatc

SEQ ID NO: 285955 - DNA, 50 bp, Artificial
  Synthetic oligonucleotide
aaacggccgctacgggtgggatattagcagtgccagggaccctgatcccc

SEQ ID NO: 285956 - DNA, 50 bp, Artificial
  Synthetic oligonucleotide
aaacttgctggcgctacgagccaacaccaaggaccgccacaacacttgga

SEQ ID NO: 285957 - DNA, 50 bp, Artificial
  Synthetic oligonucleotide
aaactttgagcgccattctcacccgacgaacctgcgagctgcagaccccc

SEQ ID NO: 285958 - DNA, 50 bp, Artificial
  Synthetic oligonucleotide
aaataattccaacaagatggtcacaacccactatccacacaggtagccat

SEQ ID NO: 285959 - DNA, 45 bp, Artificial
  Synthetic oligonucleotide
aaacaagtccaagtagatagtcgcaacctactatccgcacaggtg

SEQ ID NO: 285960 - DNA, 44 bp, Artificial
  Synthetic oligonucleotide
aaaccctcccgagtgcccccacctaatgatcccgggacaccctg

SEQ ID NO: 285961 - DNA, 55 bp, Artificial
  Synthetic oligonucleotide
atgagtctcccgtgtcatggcctaccgcttggaaagttgcagtaagcgtagtaaa

SEQ ID NO: 285962 - DNA, 55 bp, Artificial
  Synthetic oligonucleotide
attgtcgcagaactctcaccggccagtatgtttcccgcacttgaatttgaccgaa

SEQ ID NO: 285963 - DNA, 55 bp, Artificial
  Synthetic oligonucleotide
caccatcttggtagctccggaccgattctctggatacacatggctcataccaatg

SEQ ID NO: 285964 - DNA, 55 bp, Artificial
  Synthetic oligonucleotide
caccgatgaactgttaagacattgtatcgcacacaactcgctggtagaggtcatc

SEQ ID NO: 285965 - DNA, 55 bp, Artificial
  Synthetic oligonucleotide
ccacgcagaagactaaagtgtgctccaataatcacttagggaagctctcgagcgg

SEQ ID NO: 285966 - DNA, 60 bp, Artificial
  Synthetic oligonucleotide
agctgacagggctgtcggatcccatctatgttgaggccactacaagttacacccggcacg

SEQ ID NO: 285967 - DNA, 60 bp, Artificial
  Synthetic oligonucleotide
agacgtgagcctggtgttccaaagtccttggctcgcctatgtctctgggctcgcacacaa

SEQ ID NO: 285968 - DNA, 55 bp, Artificial
  Synthetic oligonucleotide
ggttgagtcattcgttgactggaatacaggatacatcagtaccaggcaccccgac

SEQ ID NO: 285969 - DNA, 55 bp, Artificial
  Synthetic oligonucleotide
ctgcagccacgaattgaagtatagtgtttgttcccgtcaatttatctgacagatg

SEQ ID NO: 285970 - DNA, 55 bp, Artificial
  Synthetic oligonucleotide
ctgcaggttgcaggcctaggccccttagctcggtccgaaacgtgtccacactgca

SEQ ID NO: 285971 - DNA, 55 bp, Artificial
  Synthetic oligonucleotide
ctgccaggtactttccatcccgtgaaaataccaacctttcgatcccatagtcgtg

SEQ ID NO: 285972 - DNA, 55 bp, Artificial
  Synthetic oligonucleotide
gtgcttgacagagcttccccacaccagtgcgtgcttgaacttcgcaagaatcccc

SEQ ID NO: 285973 - DNA, 55 bp, Artificial
  Synthetic oligonucleotide
gttcatggaattacagtgtccatatcccagggaagtactacaagggttgttcggg

SEQ ID NO: 285974 - DNA, 55 bp, Artificial
  Synthetic oligonucleotide
ctggaaccgcccatgtcctatcttcgacgatgtgtcgacaaacttgatcacaagc

SEQ ID NO: 285975 - DNA, 55 bp, Artificial
  Synthetic oligonucleotide
ggcgctctggtggtacacgatttcctacgaatccggaaacacacaggcaaagtca

SEQ ID NO: 285976 - DNA, 54 bp, Artificial
  Synthetic oligonucleotide
gttcaggcctagggatttagatcgtctgaattcggaaaacgactcgtcggtaaa

SEQ ID NO: 285977 - DNA, 55 bp, Artificial
  Synthetic oligonucleotide
ctggactgtacttcgagatagctgccagcgtgcttgagatgtttgtctcaagcgg

SEQ ID NO: 285978 - DNA, 58 bp, Artificial
  Synthetic oligonucleotide
agacctcgcttccattggaaacacacctcatccatcatccgggaccccaccgagagtc

SEQ ID NO: 285979 - DNA, 55 bp, Artificial
  Synthetic oligonucleotide
ctggagacaaacacccgtattgtgagctccctatcatgtatcctgtggcatacag

SEQ ID NO: 285980 - DNA, 55 bp, Artificial
  Synthetic oligonucleotide
gtggaagaatcagagggataccagcttggttctccggagtcttactgttctgcga

SEQ ID NO: 285981 - DNA, 55 bp, Artificial
  Synthetic oligonucleotide
ggcgaaaaggtatgaggagcgcaagcttcccttaataagagacatttacacgggg

SEQ ID NO: 285982 - DNA, 55 bp, Artificial
  Synthetic oligonucleotide
gttatctctaagttcggcccgaagtttcatctttggttcagcgacaactttccgc

SEQ ID NO: 285983 - DNA, 55 bp, Artificial
  Synthetic oligonucleotide
gtgtaacggagttcttgaggggataagaatcagcagacagggatttccgtctcgg

SEQ ID NO: 285984 - DNA, 55 bp, Artificial
  Synthetic oligonucleotide
ggcgccattcttctaatggacagggcactgatgatatcaggaaacctcttgatga

SEQ ID NO: 285985 - DNA, 55 bp, Artificial
  Synthetic oligonucleotide
ctgtatagcttcacagtgtccgtgatccttatcctcaggttgaatcttccgtccc

SEQ ID NO: 285986 - DNA, 55 bp, Artificial
  Synthetic oligonucleotide
ctgtcgctatagctccccaatgacagggcgtttagccccaatccgatttcatagg

SEQ ID NO: 285987 - DNA, 55 bp, Artificial
  Synthetic oligonucleotide
ctgtctactccaaagccccggtacaatactaatctccccatcacactctgcatcg

SEQ ID NO: 285988 - DNA, 55 bp, Artificial
  Synthetic oligonucleotide
cttgggaatctgtttctagattcgaagtttaatgtgaagataggagactttggcc

SEQ ID NO: 285989 - DNA, 60 bp, Artificial
  Synthetic oligonucleotide
tcaatcacagacgcactgaactcgcttatctcaacctgaggaatgctgttgtacacattc

SEQ ID NO: 285990 - DNA, 55 bp, Artificial
  Synthetic oligonucleotide
ggcgatcttttatcgagcatgtagggcatattaagtctactcttgtagacacgcc

SEQ ID NO: 285991 - DNA, 51 bp, Artificial
  Synthetic oligonucleotide
cttcttaacggagggatggaagccgttgggtcttagatggttttcggttgt

SEQ ID NO: 285992 - DNA, 55 bp, Artificial
  Synthetic oligonucleotide
cttcgaatgaagatagttgccgagtacgacataagactgtcgaaagagacagagc

SEQ ID NO: 285993 - DNA, 55 bp, Artificial
  Synthetic oligonucleotide
ctgtgtcttttccaagcttcggagcattggagtttccagacacatacactcttcg

SEQ ID NO: 285994 - DNA, 55 bp, Artificial
  Synthetic oligonucleotide
gtggggagccccgaactactgctattcttctggtaatattgcctgtgttatggct

SEQ ID NO: 285995 - DNA, 55 bp, Artificial
  Synthetic oligonucleotide
cttccaagcctagcatgggagtcgatggtgggcatctatgtcccaaaacacgctg

SEQ ID NO: 285996 - DNA, 55 bp, Artificial
  Synthetic oligonucleotide
ctattgggcttgtatgctgcgacgatagagatctccttgtggggaccctggagcc

SEQ ID NO: 285997 - DNA, 55 bp, Artificial
  Synthetic oligonucleotide
ctatgacgaataccagcacaagcttaagcataagaatctaaacatccgagctacc

SEQ ID NO: 285998 - DNA, 55 bp, Artificial
  Synthetic oligonucleotide
ctatctcaatcctcgtgcatccatagcttagcatcttactgaggtgtggacgcac

SEQ ID NO: 285999 - DNA, 55 bp, Artificial
  Synthetic oligonucleotide
ggggactacaatgatcttatgaagatgactgaagagcttatgagcggaatagttc

SEQ ID NO: 286000 - DNA, 60 bp, Artificial
  Synthetic oligonucleotide
ggattcaatagaagatagtccttaagcttgttccaggagtaatagtcatctgctacaacc

SEQ ID NO: 286001 - DNA, 55 bp, Artificial
  Synthetic oligonucleotide
ggggccttgtcgctgacataaaatacaccgttgtcttctagcagagggcggtatc

SEQ ID NO: 286002 - DNA, 55 bp, Artificial
  Synthetic oligonucleotide
gttgactcggagacttccgtaccctcctatcttcctaagctccagaaccccattg

SEQ ID NO: 286003 - DNA, 55 bp, Artificial
  Synthetic oligonucleotide
ggggcgaatcccttaatggagatcaggctgagctcgttcaaaagagagcactctc

SEQ ID NO: 286004 - DNA, 55 bp, Artificial
  Synthetic oligonucleotide
ggtctcgatcttgtctatccattgtgttcctccgtagtaccgttctcccactctc

SEQ ID NO: 286005 - DNA, 55 bp, Artificial
  Synthetic oligonucleotide
ctacgaagttcatagtattcatgcaccgtcggtggacaaaaccccaagatctcca

SEQ ID NO: 286006 - DNA, 55 bp, Artificial
  Synthetic oligonucleotide
ctaccgaggtctctccatcaaccttcatctttacatccagtcttttcttatcgtg

SEQ ID NO: 286007 - DNA, 55 bp, Artificial
  Synthetic oligonucleotide
ctaccaacgggatgtgtgttatccagccgtttgtaaggagggccatcaaaacggc

SEQ ID NO: 286008 - DNA, 55 bp, Artificial
  Synthetic oligonucleotide
ctaagttgttcatgggctacagattcacttgatccgttttgtcccgatccctacc

SEQ ID NO: 286009 - DNA, 55 bp, Artificial
  Synthetic oligonucleotide
ctaacggcgaagagtgtaggcggcacatctctcgaccaaacacctcgtttgcagg

SEQ ID NO: 286010 - DNA, 55 bp, Artificial
  Synthetic oligonucleotide
ggggttacagtgtgatgatgaggtctgaattctatgggaatccgatatttgacag

SEQ ID NO: 286011 - DNA, 59 bp, Artificial
  Synthetic oligonucleotide
gactatttttgtgtataaagaagccacaccatggtgagtccagtccttacctatcattc

SEQ ID NO: 286012 - DNA, 55 bp, Artificial
  Synthetic oligonucleotide
cgttccgtaccaggcagatctccgaaatcacaattgagttgcatgccacacacag

SEQ ID NO: 286013 - DNA, 55 bp, Artificial
  Synthetic oligonucleotide
gggtatctggccatctttagagagccgatgtcaaggctcagcataacgccaacag

SEQ ID NO: 286014 - DNA, 55 bp, Artificial
  Synthetic oligonucleotide
gttcgaacggaatagcagtgacgtgttcgcatcctgttttgtatacagactcgag

SEQ ID NO: 286015 - DNA, 55 bp, Artificial
  Synthetic oligonucleotide
ctcgtaccatgttgctcggagcgggattgagaagttgcttcggttgaggagtgtg

SEQ ID NO: 286016 - DNA, 55 bp, Artificial
  Synthetic oligonucleotide
gggagtccagggccttccctcatagatagaaagcccaagtgccaattctcccgtg

SEQ ID NO: 286017 - DNA, 55 bp, Artificial
  Synthetic oligonucleotide
ctcgatgcacccagacctgttcggaatcaagcacagccaagagatccagagatac

SEQ ID NO: 286018 - DNA, 55 bp, Artificial
  Synthetic oligonucleotide
ctcgaatcttgcatccggggatgtcttaggacatgtaaagatatgggagtaggtc

SEQ ID NO: 286019 - DNA, 55 bp, Artificial
  Synthetic oligonucleotide
ctcctgctaggtctagttgtgactttacaattcctagaaacagtcctaatgctgc

SEQ ID NO: 286020 - DNA, 55 bp, Artificial
  Synthetic oligonucleotide
ctcctgccatataaagctctctgtccttcagaagtgttgggtctatggtgttgag

SEQ ID NO: 286021 - DNA, 55 bp, Artificial
  Synthetic oligonucleotide
ctcctcccggcaatgttgaacccctggatgtacctcgaacactcttccacgctga

SEQ ID NO: 286022 - DNA, 55 bp, Artificial
  Synthetic oligonucleotide
tggctgcttggtaccccggaccccggaatctggccagcccctgtgttacttgccg

SEQ ID NO: 286023 - DNA, 55 bp, Artificial
  Synthetic oligonucleotide
ggtggaacgggtacaggaaattgttgacgtctctgaacatctcggtcccattgta

SEQ ID NO: 286024 - DNA, 55 bp, Artificial
  Synthetic oligonucleotide
ctccgagtataccaaatttatctcgggaagcaagaaggtgtataccttggttcta

SEQ ID NO: 286025 - DNA, 55 bp, Artificial
  Synthetic oligonucleotide
gggatcgatgggaacatacagctacattctgtgtggatcggagaagtccatggag

SEQ ID NO: 286026 - DNA, 55 bp, Artificial
  Synthetic oligonucleotide
ctcccggttggatggtgctgaagagatctacaaggggaacggctggattaggtcg

SEQ ID NO: 286027 - DNA, 55 bp, Artificial
  Synthetic oligonucleotide
ctcccatcccctctatccccgtaacccggaacatcaggtggtacacaactgggca

SEQ ID NO: 286028 - DNA, 55 bp, Artificial
  Synthetic oligonucleotide
ctccagagctacaagcgtgaagttcttcttattgatcttaagactggggaaaccc

SEQ ID NO: 286029 - DNA, 55 bp, Artificial
  Synthetic oligonucleotide
ctcatccgaaggagtgttgccagcgaggagagtatctcctcttcagcagctgaaa

SEQ ID NO: 286030 - DNA, 55 bp, Artificial
  Synthetic oligonucleotide
ggtcttcagacttgtcattccagggcaaccttttgattcgttttagaggcctccc

SEQ ID NO: 286031 - DNA, 55 bp, Artificial
  Synthetic oligonucleotide
gcatgtccttgggatgctcgtttatccatcccatgttcttcagattctcgaggac

SEQ ID NO: 286032 - DNA, 55 bp, Artificial
  Synthetic oligonucleotide
gcatcgtcaaaggatgataccgagagtctaagggcatacatcaatggagtgtgtg

SEQ ID NO: 286033 - DNA, 60 bp, Artificial
  Synthetic oligonucleotide
tatggagctgtgcaatgggcaggtggaattctttatgcttccggcatctgtccgagagcc

SEQ ID NO: 286034 - DNA, 55 bp, Artificial
  Synthetic oligonucleotide
gcatccagatgctaccaataggcttctggaggcaatgaaagatcttctggcccag

SEQ ID NO: 286035 - DNA, 55 bp, Artificial
  Synthetic oligonucleotide
gcagtgctagtaagcaagtctctgtaatcccgagaagtagggtttatccgaaaag

SEQ ID NO: 286036 - DNA, 55 bp, Artificial
  Synthetic oligonucleotide
gctctcagactcgatcacgcctattcttgacttgtggaacgggtatctggccatc

SEQ ID NO: 286037 - DNA, 55 bp, Artificial
  Synthetic oligonucleotide
gcagaataataacgtatatgactatgccaccgatctattcgacaacatgatcccc

SEQ ID NO: 286038 - DNA, 55 bp, Artificial
  Synthetic oligonucleotide
gcaactgttgctagccttggatcatcccatcccgacacaaatccgttatcgacgt

SEQ ID NO: 286039 - DNA, 55 bp, Artificial
  Synthetic oligonucleotide
gtatctcgtaatctttcctcctcagatgatctgccacattgaacatggtttccac

SEQ ID NO: 286040 - DNA, 55 bp, Artificial
  Synthetic oligonucleotide
gtccggggaaacctcccgaaacttgcacatctcggatataagtagacagttcgac

SEQ ID NO: 286041 - DNA, 55 bp, Artificial
  Synthetic oligonucleotide
gatggactcgttggagaataggaagggctagtgggagatagccttccacttaggt

SEQ ID NO: 286042 - DNA, 55 bp, Artificial
  Synthetic oligonucleotide
gtccggtgtacatcccctcagaagctggaaccatgcaatcgtcctccttaaagct

SEQ ID NO: 286043 - DNA, 55 bp, Artificial
  Synthetic oligonucleotide
gctgtagacattcatagctatatgacaggtgacgagatagaatattgcaacgcag

SEQ ID NO: 286044 - DNA, 60 bp, Artificial
  Synthetic oligonucleotide
actcgatgagtgcgaaaatctcacgtcggatgcacagcattgcctgaggagagttattga

SEQ ID NO: 286045 - DNA, 55 bp, Artificial
  Synthetic oligonucleotide
gatactgcctcagccctgtactccttgtggaccctgaaagcgcctggagtgttgt

SEQ ID NO: 286046 - DNA, 55 bp, Artificial
  Synthetic oligonucleotide
gagttccactagtatcgaggaccaacgtatgtaatgacccacatcgaaccttgga

SEQ ID NO: 286047 - DNA, 55 bp, Artificial
  Synthetic oligonucleotide
gcttacaatatgtcctagacaccttgcacaccttcgaaagtgcatcctggagggt

SEQ ID NO: 286048 - DNA, 55 bp, Artificial
  Synthetic oligonucleotide
gagtggcccatacaatgagctaacagcccttccacacctacactaggatctacca

SEQ ID NO: 286049 - DNA, 55 bp, Artificial
  Synthetic oligonucleotide
gcctctagaactctacgatggatatgctgaatctccatatgggaacggagatata

SEQ ID NO: 286050 - DNA, 55 bp, Artificial
  Synthetic oligonucleotide
gccgtcgcaggctacaagatgatctcgaatgactctggaacttccgacatccgcc

SEQ ID NO: 286051 - DNA, 55 bp, Artificial
  Synthetic oligonucleotide
gccggagaggcactcctccgttcccgaacatatcttcagccctggcacggacagt

SEQ ID NO: 286052 - DNA, 55 bp, Artificial
  Synthetic oligonucleotide
gcggcacatttccattaaggggttccatagatagttgtgttattcagagggatct

SEQ ID NO: 286053 - DNA, 55 bp, Artificial
  Synthetic oligonucleotide
gtcatccagaataagatacttgatgtggaagacatattcattttcgtccagctcg

SEQ ID NO: 286054 - DNA, 55 bp, Artificial
  Synthetic oligonucleotide
gcgtaccgccagtacattgcatgcaaacggactgtatctaaccctattggcctcg

SEQ ID NO: 286055 - DNA, 59 bp, Artificial
  Synthetic oligonucleotide
cccccagtcaatggacttgtcgcatgcctacctgcctcggtagcttcccttcgtccaga

SEQ ID NO: 286056 - DNA, 55 bp, Artificial
  Synthetic oligonucleotide
gccctgatgtgaggctttgcacagagtcggatataaatccgcagcgccactttaa

SEQ ID NO: 286057 - DNA, 55 bp, Artificial
  Synthetic oligonucleotide
gctactatggtgcagtccccggtcttaaggttgtcgctcccttcacagcaaagga

SEQ ID NO: 286058 - DNA, 55 bp, Artificial
  Synthetic oligonucleotide
gctcaacgacaggtattgcccatccgaaaagagtgctccgcctactgccccatgg

SEQ ID NO: 286059 - DNA, 55 bp, Artificial
  Synthetic oligonucleotide
gtcaggcctcggggagtcatgtgtccagtcccgctatgaggcagcagtaccagtc

SEQ ID NO: 286060 - DNA, 55 bp, Artificial
  Synthetic oligonucleotide
gccccggagtaagctcaagcatctcgtttctcgagtccctagttgagatcccaag

SEQ ID NO: 286061 - DNA, 55 bp, Artificial
  Synthetic oligonucleotide
gtcaatggagtctgtgcaatctaaacagcatataccatatcatgccacagcagaa

SEQ ID NO: 286062 - DNA, 55 bp, Artificial
  Synthetic oligonucleotide
gtcaacccaagagctttcattgcgattattgccgggatctcttcgttgaacatcg

SEQ ID NO: 286063 - DNA, 55 bp, Artificial
  Synthetic oligonucleotide
gccaggaactaggaagaactgctactctctcaaggcttgccacagagagtatgcc

SEQ ID NO: 286064 - DNA, 55 bp, Artificial
  Synthetic oligonucleotide
gtccccatagattctatcagctcgtagatgggctctggatgttcatcgaacccag

SEQ ID NO: 286065 - DNA, 55 bp, Artificial
  Synthetic oligonucleotide
gcattcttcggaaggactcgaaggatgtgaagaatagactcttcgcttcccatgc

SEQ ID NO: 286066 - DNA, 60 bp, Artificial
  Synthetic oligonucleotide
atccaaactgtttgcgggaggcctttgtctctctgcaccagacggatccagacttggcat

SEQ ID NO: 286067 - DNA, 55 bp, Artificial
  Synthetic oligonucleotide
gagatccaagttagaagcagaacctgggagtcttctatgctataataccgagggc

SEQ ID NO: 286068 - DNA, 55 bp, Artificial
  Synthetic oligonucleotide
gagacgctgtatatctttcactgcatgcttaggcatgttgtggatgtcgggtttt

SEQ ID NO: 286069 - DNA, 55 bp, Artificial
  Synthetic oligonucleotide
gagacatacaagcatgacgagaacttctacatcactccatactatgcaggacatg

SEQ ID NO: 286070 - DNA, 55 bp, Artificial
  Synthetic oligonucleotide
gagaatcactgtggatgagtgtatctcggacattggatggatagagaatcttctg

SEQ ID NO: 286071 - DNA, 55 bp, Artificial
  Synthetic oligonucleotide
gagaagcctgtggaaagcctagatttcacattcgacaacagatttataatctcgg

SEQ ID NO: 286072 - DNA, 55 bp, Artificial
  Synthetic oligonucleotide
gtacaacacatcgttgaagatactaagactcaggattcctcctcgaactccaacc

SEQ ID NO: 286073 - DNA, 55 bp, Artificial
  Synthetic oligonucleotide
ggcacgtgtatttgtgatctccctctatgactatctaagcaggacagtcttctat

SEQ ID NO: 286074 - DNA, 55 bp, Artificial
  Synthetic oligonucleotide
gtgattcgtataaggacgaggtttctgggcatagctgcatagggtccccaactag

SEQ ID NO: 286075 - DNA, 55 bp, Artificial
  Synthetic oligonucleotide
gacccttctgtggtccgaaattatggccatctaatggtggagctttctaaggttg

SEQ ID NO: 286076 - DNA, 55 bp, Artificial
  Synthetic oligonucleotide
gtaaactaccagacaatgtgccccttcgactttcctcctcaggagaggtactttc

SEQ ID NO: 286077 - DNA, 57 bp, Artificial
  Synthetic oligonucleotide
cagttaagcctgtgcgagcccggatagtactgaggcgggagaccactcgggaatccc

SEQ ID NO: 286078 - DNA, 60 bp, Artificial
  Synthetic oligonucleotide
gccgcactcccgtgatgttcgtcccgtcattcgacagcacaatcaccattaggctcccga

SEQ ID NO: 286079 - DNA, 55 bp, Artificial
  Synthetic oligonucleotide
gaccagatagaagaggaagctaacagcaggcgagggattcttcgatatttcaggg

SEQ ID NO: 286080 - DNA, 55 bp, Artificial
  Synthetic oligonucleotide
gacatctcggcatacgttgtagggaagagcattgggaagaggcctctttaccgcc

SEQ ID NO: 286081 - DNA, 55 bp, Artificial
  Synthetic oligonucleotide
ggcctcaatctggtatgaactatgtagtgccttttaattctactcaaggtaggca

SEQ ID NO: 286082 - DNA, 55 bp, Artificial
  Synthetic oligonucleotide
gtgctcaacaccacggattgtgtatgcgtcaaaggctgccagtagtgcctccacc

SEQ ID NO: 286083 - DNA, 55 bp, Artificial
  Synthetic oligonucleotide
gacataggtgctgttgcactaggaagtgtaatgcatgagaaatgtgaagattgct

SEQ ID NO: 286084 - DNA, 55 bp, Artificial
  Synthetic oligonucleotide
gacagctgtggattacttgcgagagaagtgacgtcatagtgcaaatagtcgatgc

SEQ ID NO: 286085 - DNA, 55 bp, Artificial
  Synthetic oligonucleotide
ggcctcttggatagctcctgagaaagaaggctcgaatactggtaaatatgctcca

SEQ ID NO: 286086 - DNA, 55 bp, Artificial
  Synthetic oligonucleotide
gcttagacctgtgaatataactgtccctattcctacagagtagatgcctgtcgag

SEQ ID NO: 286087 - DNA, 55 bp, Artificial
  Synthetic oligonucleotide
gcttctgatcctctcttttattgagctaaggatgggcccatctaccttcccattc

SEQ ID NO: 286088 - DNA, 55 bp, Artificial
  Synthetic oligonucleotide
gagtgccagtgtctcctttgtaacgaggccaggaagtcaagtgatagcattcccg

SEQ ID NO: 286089 - DNA, 59 bp, Artificial
  Synthetic oligonucleotide
tctccgttcggatacttgtggtcgtgggaatggagatatcctcctcctgtcttggagga

SEQ ID NO: 286090 - DNA, 55 bp, Artificial
  Synthetic oligonucleotide
gagtgaatctaagcgagcaaacggagctatgcgatctgatcggaagttatctccc

SEQ ID NO: 286091 - DNA, 55 bp, Artificial
  Synthetic oligonucleotide
gcttcttcgactagagtaagctattcttcggggaattctagatataccatcagat

SEQ ID NO: 286092 - DNA, 55 bp, Artificial
  Synthetic oligonucleotide
gagtcacttgccggggtatgcagatactggctggacatactaaagagcagaggag

SEQ ID NO: 286093 - DNA, 55 bp, Artificial
  Synthetic oligonucleotide
ggaacaggagaaccattgggaatgcaattgacatgaacactgcaagatctctggg

SEQ ID NO: 286094 - DNA, 55 bp, Artificial
  Synthetic oligonucleotide
gagtatgaggagaacgaggcgaactctctcaagctgcggaactttgttgaggacg

SEQ ID NO: 286095 - DNA, 55 bp, Artificial
  Synthetic oligonucleotide
gtctcgaaggggattctctcctcgggaattgtgtctatgttcgacctccacagtc

SEQ ID NO: 286096 - DNA, 55 bp, Artificial
  Synthetic oligonucleotide
gagctcagcgagactctactcggagtgtacaggacaaacaacgtctcacagtccc

SEQ ID NO: 286097 - DNA, 55 bp, Artificial
  Synthetic oligonucleotide
ggacctgcaagaagtcggactggtacaaatacgatatcgtcattagggttcagcc

SEQ ID NO: 286098 - DNA, 55 bp, Artificial
  Synthetic oligonucleotide
gagccccatgagcctacttccattccgttgcagcctcttccatatctatcctgct

SEQ ID NO: 286099 - DNA, 55 bp, Artificial
  Synthetic oligonucleotide
ggacgtgcggcaacactttcctaagtgcatctttaaacgctttgagtagccctgg

SEQ ID NO: 286100 - DNA, 57 bp, Artificial
  Synthetic oligonucleotide
atcttcacaggcggggggtgctttgcctggaggagaccctagaatatctacgtatgt

SEQ ID NO: 286101 - DNA, 55 bp, Artificial
  Synthetic oligonucleotide
gagcataagggctctctacgaggaagccaggactattggggatgactgcaggaaa

SEQ ID NO: 286102 - DNA, 55 bp, Artificial
  Synthetic oligonucleotide
gagattctcgcggagttactttcgcctctcgcggagttactttcgcctctcgcgg

SEQ ID NO: 286103 - DNA, 55 bp, Artificial
  Synthetic oligonucleotide
caagcctacttagtggagggcaaaaggctgtagtagcactgtctcttatatttag

SEQ ID NO: 286104 - DNA, 55 bp, Artificial
  Synthetic oligonucleotide
caacttggcgtaccatgaaattactcagtctctttgcgtctcctgttcttataag

SEQ ID NO: 286105 - DNA, 55 bp, Artificial
  Synthetic oligonucleotide
attttcctatgtctttagattccatggatgagctggacactagaagtagcatagg

SEQ ID NO: 286106 - DNA, 55 bp, Artificial
  Synthetic oligonucleotide
attcgagatgagcttctttcagatgtcgcagatatggttttcaggcggctgagct

SEQ ID NO: 286107 - DNA, 55 bp, Artificial
  Synthetic oligonucleotide
attcaacggttcaatgcagcaagaggcctaacgaccattttcataaagtccctga

SEQ ID NO: 286108 - DNA, 54 bp, Artificial
  Synthetic oligonucleotide
tcgatttaacgaaaagaaaggctcttgggttttcaaccctagactgtgtgtctc

SEQ ID NO: 286109 - DNA, 55 bp, Artificial
  Synthetic oligonucleotide
tcgcagtactttctgtcctcagagtcctcactgcggcacaggacatagtatatcg

SEQ ID NO: 286110 - DNA, 55 bp, Artificial
  Synthetic oligonucleotide
tcggcttttctggacggctcgcctgactgtctctgaagagaggcgtatcaatgcc

SEQ ID NO: 286111 - DNA, 60 bp, Artificial
  Synthetic oligonucleotide
tcgtccttggggcacaccttctcaaactgccttgccagggcatatgtcacggctctgtac

SEQ ID NO: 286112 - DNA, 55 bp, Artificial
  Synthetic oligonucleotide
atctcccgttcacagcataccgtccctttccaatgtctgtcctagtagccagttc

SEQ ID NO: 286113 - DNA, 55 bp, Artificial
  Synthetic oligonucleotide
atcgaccacgggcttgtgtgcaggaccaagagagtcattatggagaaggacctgt

SEQ ID NO: 286114 - DNA, 55 bp, Artificial
  Synthetic oligonucleotide
atcgacattcctggactcgacaagcttgtagatgtatgagctgtcctcgggcatc

SEQ ID NO: 286115 - DNA, 55 bp, Artificial
  Synthetic oligonucleotide
atccccttgctgatcgatagatgtgcaccaatcagtttcgtcattttggcagagc

SEQ ID NO: 286116 - DNA, 55 bp, Artificial
  Synthetic oligonucleotide
atcagggttccatcttggtgtataagctgtccttcgcaaatagcttttgaattcc

SEQ ID NO: 286117 - DNA, 55 bp, Artificial
  Synthetic oligonucleotide
atagtgaggactcccacatacgctccaatagcagtgcccttaatgaatcatatca

SEQ ID NO: 286118 - DNA, 55 bp, Artificial
  Synthetic oligonucleotide
tctctggagaggaatatgctacgagagaatggaatgggccttaagaaagttatac

SEQ ID NO: 286119 - DNA, 55 bp, Artificial
  Synthetic oligonucleotide
ataatgatgccgaatcttgtaatcaagccccacagcgagctagatctggaacagg

SEQ ID NO: 286120 - DNA, 55 bp, Artificial
  Synthetic oligonucleotide
tctgttttcgcttggggagtacgaaaattcatagaccaccggagacaaggaacac

SEQ ID NO: 286121 - DNA, 55 bp, Artificial
  Synthetic oligonucleotide
tcttcaaccaaaccccggtgcatacgttccagtaggtgctaagatctttcacgct

SEQ ID NO: 286122 - DNA, 54 bp, Artificial
  Synthetic oligonucleotide
ataccaccggcggcccaagggaccggaagagttgagctacaggaaggatcttcc

SEQ ID NO: 286123 - DNA, 55 bp, Artificial
  Synthetic oligonucleotide
agtgtgttcccttcagaaggtacaaccgtggatgcgggcagacgcaccaggcaag

SEQ ID NO: 286124 - DNA, 55 bp, Artificial
  Synthetic oligonucleotide
cataaggcttatccccaagtgcgattcgacatgcatgaaggggaggcttctggcg

SEQ ID NO: 286125 - DNA, 55 bp, Artificial
  Synthetic oligonucleotide
caggtaatggatactgttcttaacgatgtcctcaacttgggtagggtcaggagga

SEQ ID NO: 286126 - DNA, 54 bp, Artificial
  Synthetic oligonucleotide
cagcgcagttcaaccatcccctcgtaaaggtagtagataaaccagtaccgggga

SEQ ID NO: 286127 - DNA, 55 bp, Artificial
  Synthetic oligonucleotide
cagcaatgaccttcctcccactgaacatataccaccagctgtcgaggccatcaaa

SEQ ID NO: 286128 - DNA, 55 bp, Artificial
  Synthetic oligonucleotide
cagagggacacttatggatcttggaacaagccctgtagttacatccagccttata

SEQ ID NO: 286129 - DNA, 55 bp, Artificial
  Synthetic oligonucleotide
cactttgggcagtgtctgtagggacaataggttctttcgtgtccttcccgactgc

SEQ ID NO: 286130 - DNA, 55 bp, Artificial
  Synthetic oligonucleotide
tccaagatagttcaagtctcctcccggatatggataggttgccccaagttctgcg

SEQ ID NO: 286131 - DNA, 55 bp, Artificial
  Synthetic oligonucleotide
cactagctctgccaaaacgcatccaaacgaccagatgtcaagcgaatagtcgtaa

SEQ ID NO: 286132 - DNA, 55 bp, Artificial
  Synthetic oligonucleotide
tcccagagggctgcattgtgaagcaggaggggaaagtctttacattcgagggccc

SEQ ID NO: 286133 - DNA, 59 bp, Artificial
  Synthetic oligonucleotide
atgctttgcaaagtactgtgtggcgtagtctcctatcgataatgaacttagaaccactt

SEQ ID NO: 286134 - DNA, 55 bp, Artificial
  Synthetic oligonucleotide
cacggagctctatccgagcctgtttccttcctccggcattcggctccctgcttat

SEQ ID NO: 286135 - DNA, 55 bp, Artificial
  Synthetic oligonucleotide
cacggacaagagcgaggttatattttctgacgagggtgggattctgagtcttctg

SEQ ID NO: 286136 - DNA, 55 bp, Artificial
  Synthetic oligonucleotide
cacgaggtaccagaatctgccgtggacttaatcttgaggctaaatcccgaccatg

SEQ ID NO: 286137 - DNA, 55 bp, Artificial
  Synthetic oligonucleotide
caccttattggtgtgttgcgatctccccacactatcttaacacgttcgagtcccc

SEQ ID NO: 286138 - DNA, 55 bp, Artificial
  Synthetic oligonucleotide
cacccctctgatccccattctgagatgctcagactccatccgtacaaacatcaga

SEQ ID NO: 286139 - DNA, 55 bp, Artificial
  Synthetic oligonucleotide
tccctaagcggggcatcttattctgtagccaagggcttagatctcgactggtgcg

SEQ ID NO: 286140 - DNA, 55 bp, Artificial
  Synthetic oligonucleotide
cacatatgagcatgcctcggcactcataaaatatgcacattgggctgttgcagaa

SEQ ID NO: 286141 - DNA, 55 bp, Artificial
  Synthetic oligonucleotide
cacaggcctcaggtccagattgtatatctcgactatcattcctctagttaccgcg

SEQ ID NO: 286142 - DNA, 55 bp, Artificial
  Synthetic oligonucleotide
cacaatcgcctttagtagtagaaggacgactcaaatgcaataggagcgtgtcgga

SEQ ID NO: 286143 - DNA, 55 bp, Artificial
  Synthetic oligonucleotide
caatgcatgaagtcacacgtggttattccctttgatgtgctgaagaccagatcac

SEQ ID NO: 286144 - DNA, 59 bp, Artificial
  Synthetic oligonucleotide
ataactgcggctctatcctccaagtcgcttatgttataggtacacacctcgttgaagtg

SEQ ID NO: 286145 - DNA, 55 bp, Artificial
  Synthetic oligonucleotide
caatcgtcagctccctaagaatagactctcgcgcagcctcgattcccaaggtctc

SEQ ID NO: 286146 - DNA, 55 bp, Artificial
  Synthetic oligonucleotide
acctgtccaagtgggttacagacaacatcagggttcatgactcgtatgacacctg

SEQ ID NO: 286147 - DNA, 55 bp, Artificial
  Synthetic oligonucleotide
acctcgtggacactaagcatactggctatgcttgctatctcgttaacagccccat

SEQ ID NO: 286148 - DNA, 55 bp, Artificial
  Synthetic oligonucleotide
tgtggaagggctgttagctcattgtatgggccactctaagctaataaggacgtac

SEQ ID NO: 286149 - DNA, 55 bp, Artificial
  Synthetic oligonucleotide
tgttatgcctcctagtctagtatatatgctttctacagaataccctatgttgagg

SEQ ID NO: 286150 - DNA, 55 bp, Artificial
  Synthetic oligonucleotide
ttagaatcgtgtctttatgaggtactgaaatccgattccacttcagggaagaggg

SEQ ID NO: 286151 - DNA, 55 bp, Artificial
  Synthetic oligonucleotide
ttcagaaggtagggaggagctttcaattctcttcttgcagtatggacagaagggc

SEQ ID NO: 286152 - DNA, 55 bp, Artificial
  Synthetic oligonucleotide
ttcatcggctaaggagccttttccaatcaggtcatatagaaggttctatgccgta

SEQ ID NO: 286153 - DNA, 54 bp, Artificial
  Synthetic oligonucleotide
ttccccgtatacacacgaaaggggcccgggcctgccgaagcatggagacttacc

SEQ ID NO: 286154 - DNA, 55 bp, Artificial
  Synthetic oligonucleotide
aagttgtttccgtgatttacatcctgtacatctcgttgtgtctcctgaaggcttg

SEQ ID NO: 286155 - DNA, 60 bp, Artificial
  Synthetic oligonucleotide
gctcagagacctggatccaaactgtttgcgggaggcctttgtctctctgcaccagacgga

SEQ ID NO: 286156 - DNA, 54 bp, Artificial
  Synthetic oligonucleotide
ttccctttgctaacccaatgtccgagaccattccggttcctgggaagtagtctc

SEQ ID NO: 286157 - DNA, 55 bp, Artificial
  Synthetic oligonucleotide
aagctcaggatagtgtcgtttgaggacgtgtttggggtgacgatggatagggttg

SEQ ID NO: 286158 - DNA, 55 bp, Artificial
  Synthetic oligonucleotide
aagcctctcaagctccgcgtaggacatctcgtcgttgatatacttcctgaggcct

SEQ ID NO: 286159 - DNA, 55 bp, Artificial
  Synthetic oligonucleotide
ttcctatgcaaaagttcaatgccccactatgggccatctccactgaataagagta

SEQ ID NO: 286160 - DNA, 54 bp, Artificial
  Synthetic oligonucleotide
aagaggtcggctagcttacttcggactaaaagatgtcccttgtgaagtcttccc

SEQ ID NO: 286161 - DNA, 55 bp, Artificial
  Synthetic oligonucleotide
ttgccaggatggaacagttttcgttgatgcagtcttccgagggaattccgtcgta

SEQ ID NO: 286162 - DNA, 54 bp, Artificial
  Synthetic oligonucleotide
aacgggaacattaagcctagcaaagactaaatcaattggaatcccttgaaactc

SEQ ID NO: 286163 - DNA, 55 bp, Artificial
  Synthetic oligonucleotide
ttggactctacctgtagccagactcctaaataggggtgctagggacctagaacga

SEQ ID NO: 286164 - DNA, 53 bp, Artificial
  Synthetic oligonucleotide
aaatatcctttcaaaccgatggtatttgtccctcttcaagttccgaagtgtag

SEQ ID NO: 286165 - DNA, 55 bp, Artificial
  Synthetic oligonucleotide
tttcgggtcttcccgtgtctcttaagctggactgttcaaaatccctcaaggcaag

SEQ ID NO: 286166 - DNA, 60 bp, Artificial
  Synthetic oligonucleotide
gcccgtctttccgcaaatgcattctgaggaccatgggagcatgctttatatccggctatc

SEQ ID NO: 286167 - DNA, 55 bp, Artificial
  Synthetic oligonucleotide
agtgctgagtctgtatggctccgtcaagtaatacaggaagttctttgtgtctatc

SEQ ID NO: 286168 - DNA, 55 bp, Artificial
  Synthetic oligonucleotide
agtgaatacgaagggttttgtgtgaataagactatgaggcccaaggacctcgaaa

SEQ ID NO: 286169 - DNA, 55 bp, Artificial
  Synthetic oligonucleotide
agtacgaggggattcggttgatataacaaagggagcttcttcagcccaggtgatc

SEQ ID NO: 286170 - DNA, 55 bp, Artificial
  Synthetic oligonucleotide
aggtctcgaagtctccactgcggaacgaagacaatccaaactcccctagaacttc

SEQ ID NO: 286171 - DNA, 55 bp, Artificial
  Synthetic oligonucleotide
agggtcgctagcaaacaataccttaatggaaagccatctgagattgaatcgagaa

SEQ ID NO: 286172 - DNA, 55 bp, Artificial
  Synthetic oligonucleotide
aggggtcatggcctatagagggatatatgccattctcaaacgaaacatcggagag

SEQ ID NO: 286173 - DNA, 55 bp, Artificial
  Synthetic oligonucleotide
aggatagacggggcagagtctctaacatcaatactgttccgatggaaggataagg

SEQ ID NO: 286174 - DNA, 55 bp, Artificial
  Synthetic oligonucleotide
aggataacaagcgagggcgttgagcttcccgaggacgaggcaagcaacgaagagg

SEQ ID NO: 286175 - DNA, 55 bp, Artificial
  Synthetic oligonucleotide
aggactatccagggctactcaaagcgtttaaagatgcacttaggaaagtgttgcc

SEQ ID NO: 286176 - DNA, 55 bp, Artificial
  Synthetic oligonucleotide
tgcagctagcccgttgtcctacgaggatgggaaggccatatatcctgctgggctt

SEQ ID NO: 286177 - DNA, 57 bp, Artificial
  Synthetic oligonucleotide
gctcctcggaagaaaagagtgccagtgtctcctttgtaacgaggccaggaagtcaag

SEQ ID NO: 286178 - DNA, 55 bp, Artificial
  Synthetic oligonucleotide
agatgcttatctcaccatcagaggaaatgaaggcccggttggttcgggactttcc

SEQ ID NO: 286179 - DNA, 55 bp, Artificial
  Synthetic oligonucleotide
agatgcgcctggggtcaactacctgtgcctatcaacggcaattaagcctgtgcgc

SEQ ID NO: 286180 - DNA, 52 bp, Artificial
  Synthetic oligonucleotide
agatccctaccccttacctttacagtcaccgaatcgaccgtagactcgggaa

SEQ ID NO: 286181 - DNA, 55 bp, Artificial
  Synthetic oligonucleotide
agagccttccgagctgcctggacacgtcggactggtatcctattttgacgtacag

SEQ ID NO: 286182 - DNA, 55 bp, Artificial
  Synthetic oligonucleotide
agacactcctctgaaggcagaatatgttggaaaccaagcgaactttcttgaaaac

SEQ ID NO: 286183 - DNA, 55 bp, Artificial
  Synthetic oligonucleotide
tggcatttctacgttggatccacttaggctggtggtcctctgattccttaggaac

SEQ ID NO: 286184 - DNA, 55 bp, Artificial
  Synthetic oligonucleotide
agaaaactatgagccgtctctccctaaagctctaccatgctatcatcggatacct

SEQ ID NO: 286185 - DNA, 55 bp, Artificial
  Synthetic oligonucleotide
actacataaaggcaaaccatccacacatagatacgtttctgctccatggagaggg

SEQ ID NO: 286186 - DNA, 55 bp, Artificial
  Synthetic oligonucleotide
tgtgatagtccctgtgaaattggacctcacacccattgaggagatgattgtcaac

SEQ ID NO: 286187 - DNA, 55 bp, Artificial
  Synthetic oligonucleotide
cgaagaggttccatgtgagggttagcaaggagctaatgaggtcttatgccctgaa

SEQ ID NO: 286188 - DNA, 60 bp, Artificial
  Synthetic oligonucleotide
ccaagtcgggctccacgatgcgagacctatgcctcggtttggggcgtctctctgacagca

SEQ ID NO: 286189 - DNA, 59 bp, Artificial
  Synthetic oligonucleotide
agtgagttcaggatagtgtggaagaatcagagggataccagcttggttctccggagtct

SEQ ID NO: 286190 - DNA, 55 bp, Artificial
  Synthetic oligonucleotide
cctttcctccactgctctaagcatgattggtgccttgaacaagagcctagggtct

SEQ ID NO: 286191 - DNA, 55 bp, Artificial
  Synthetic oligonucleotide
tacatgaatccgatgaagtgtggcacagtaagcatcccttccatagaagagcatc

SEQ ID NO: 286192 - DNA, 55 bp, Artificial
  Synthetic oligonucleotide
ccttcgatctcctatcatggagagactgggtcatttgaagggtgccccgatttgt

SEQ ID NO: 286193 - DNA, 55 bp, Artificial
  Synthetic oligonucleotide
tacgaggattctggcggcaattaagtcgtttgagcagtcgaaggtatttctgagc

SEQ ID NO: 286194 - DNA, 55 bp, Artificial
  Synthetic oligonucleotide
cctgcctctacacctgtggttacatctgttgaggagactggatctacatctggag

SEQ ID NO: 286195 - DNA, 55 bp, Artificial
  Synthetic oligonucleotide
cctgcagacacccacgtcttcctacgcctcacggcagatagggattgccaggtga

SEQ ID NO: 286196 - DNA, 55 bp, Artificial
  Synthetic oligonucleotide
cctctccgtccaaagagccacttgcaatcagatatgaggagcagtcaactgctaa

SEQ ID NO: 286197 - DNA, 55 bp, Artificial
  Synthetic oligonucleotide
cctcggatatgtctgggtttcggtatcctcctggtgtccggtgtgaaatgacgag

SEQ ID NO: 286198 - DNA, 55 bp, Artificial
  Synthetic oligonucleotide
cctcgattctgcgtacttctttagtattctgactgtgtcgagagctagccgggaa

SEQ ID NO: 286199 - DNA, 55 bp, Artificial
  Synthetic oligonucleotide
cctcgagaaacacctcgcactctggatagatgttgaacaccagccttaccacatc

SEQ ID NO: 286200 - DNA, 60 bp, Artificial
  Synthetic oligonucleotide
tgaagctaaggcccaatctcgactatatgcttcggaggatctcgaagctgtatgagatcc

SEQ ID NO: 286201 - DNA, 55 bp, Artificial
  Synthetic oligonucleotide
cctcctcaaaccattcgattgccctttcaggccttctagacagctcccgggagag

SEQ ID NO: 286202 - DNA, 55 bp, Artificial
  Synthetic oligonucleotide
cctcagtatcttaatgtgctctcgacgatggacataattgtctgcaggtcgatcg

SEQ ID NO: 286203 - DNA, 54 bp, Artificial
  Synthetic oligonucleotide
cctagtaaacacaattcctagcttctcggggctaaacactccttcaagcccgag

SEQ ID NO: 286204 - DNA, 55 bp, Artificial
  Synthetic oligonucleotide
cctaaggattctgtcctgtgacggaagtatctatagtcttatagtccaaggcgtg

SEQ ID NO: 286205 - DNA, 55 bp, Artificial
  Synthetic oligonucleotide
ccgtatgtcttcaagtatctgtgctgcgagctgcttgcgatgaacatcaaggtcc

SEQ ID NO: 286206 - DNA, 55 bp, Artificial
  Synthetic oligonucleotide
ccgtaggaaagtacactggtgaatccccaggcacagatgaagataacagacttgc

SEQ ID NO: 286207 - DNA, 55 bp, Artificial
  Synthetic oligonucleotide
ccggaagaatccagcgcatatgcaatgcccttgcctgtgacttcgtacactagct

SEQ ID NO: 286208 - DNA, 55 bp, Artificial
  Synthetic oligonucleotide
ccgccattttcccttgatattgaggcccatgcacgatgtgagtagaccgagtcgc

SEQ ID NO: 286209 - DNA, 55 bp, Artificial
  Synthetic oligonucleotide
cgtgatttcggccaacgatgagaacaaggccatagcatatcctggggcaaagatc

SEQ ID NO: 286210 - DNA, 55 bp, Artificial
  Synthetic oligonucleotide
cgtctctgatggggttatgcgaaggctaagaaccagggttgttctgatgattgcg

SEQ ID NO: 286211 - DNA, 60 bp, Artificial
  Synthetic oligonucleotide
gatgttatagatgtagctgtccttctcactataaagactctgcaaagtattggtatcata

SEQ ID NO: 286212 - DNA, 55 bp, Artificial
  Synthetic oligonucleotide
cgtactgtcaagagacttgtactcagatagaaaactgtgttttgttcggagaatc

SEQ ID NO: 286213 - DNA, 55 bp, Artificial
  Synthetic oligonucleotide
cggtgggcctaatgggagagaagaatgtcctgggcgggaggtcctgagcggaaga

SEQ ID NO: 286214 - DNA, 55 bp, Artificial
  Synthetic oligonucleotide
gtttccatcaaagtgtcggaatagaagggagttgttccgtagatcatctcgtaga

SEQ ID NO: 286215 - DNA, 55 bp, Artificial
  Synthetic oligonucleotide
cggtataatgctgagaggcgtcacaacaagtactggcgcgcagtagtcatacttt

SEQ ID NO: 286216 - DNA, 55 bp, Artificial
  Synthetic oligonucleotide
gtttgtgatacttacaacgggtgtccgtgctatagcagcgtttcttgttgtggta

SEQ ID NO: 286217 - DNA, 55 bp, Artificial
  Synthetic oligonucleotide
cgggtctcttgtacttctgtttgtcattacgtcgatcgttctttctcccatgtcg

SEQ ID NO: 286218 - DNA, 55 bp, Artificial
  Synthetic oligonucleotide
cgggccaggacgtaggaagtgtgtatggccttacgttgagcacgtatctggtata

SEQ ID NO: 286219 - DNA, 54 bp, Artificial
  Synthetic oligonucleotide
cggatccacaaaataggcccaaggttatatgtgggacttcccgtatttgtccca

SEQ ID NO: 286220 - DNA, 55 bp, Artificial
  Synthetic oligonucleotide
taacacatacctctcctctgtaatcgctatccacaactcctcccaacttctttat

SEQ ID NO: 286221 - DNA, 55 bp, Artificial
  Synthetic oligonucleotide
cgctctctgtgttccatcggagggagtgtggtgctggatctgttgtagcgtgctg

SEQ ID NO: 286222 - DNA, 58 bp, Artificial
  Synthetic oligonucleotide
tcatggggttatctcttcgttaggcgggaggaaatgctcggacagtcggcatttggcc

SEQ ID NO: 286223 - DNA, 55 bp, Artificial
  Synthetic oligonucleotide
tacaatctccaaaagcgttatccccggccttatgatactctggaccttgtaccgc

SEQ ID NO: 286224 - DNA, 55 bp, Artificial
  Synthetic oligonucleotide
cgcctgtcagtgccaaacttcctccaaacgtgacgcttattcggaacaggattgc

SEQ ID NO: 286225 - DNA, 55 bp, Artificial
  Synthetic oligonucleotide
cgattcggggagtatgcatccaactaataaatcatatctcccgcctataaattgc

SEQ ID NO: 286226 - DNA, 55 bp, Artificial
  Synthetic oligonucleotide
cgaggataacctctggggcgcgatagtatcttgactgaacgtaaaagtgggaccc

SEQ ID NO: 286227 - DNA, 55 bp, Artificial
  Synthetic oligonucleotide
cgagctttgaatgtcccaaagaagaaccgtcctatctttactcccactgaccaga

SEQ ID NO: 286228 - DNA, 55 bp, Artificial
  Synthetic oligonucleotide
tacatcgtcatattctacatcaactatgcagttccctaagtcggtgatcaatggt

SEQ ID NO: 286229 - DNA, 55 bp, Artificial
  Synthetic oligonucleotide
cgacggtctcttccagaatgtaggacatcatcaccccaacttcctagtcctgctg

SEQ ID NO: 286230 - DNA, 55 bp, Artificial
  Synthetic oligonucleotide
cgacagtctgatgataggaacacctggaaagaacgggagtccatatgcaggccca

SEQ ID NO: 286231 - DNA, 55 bp, Artificial
  Synthetic oligonucleotide
ccacacctacactaggatctaccattcttaaacatagatgcttcgaatatgcctc

SEQ ID NO: 286232 - DNA, 55 bp, Artificial
  Synthetic oligonucleotide
taggccagaacacactcgaggtccctcctgagatagtaaaccgctctctcgtcac

SEQ ID NO: 286233 - DNA, 60 bp, Artificial
  Synthetic oligonucleotide
tcagcgctgcttcgtctcttaacaatccacaccgctacttcccctagttctgctctccta

SEQ ID NO: 286234 - DNA, 55 bp, Artificial
  Synthetic oligonucleotide
ccacattctccttaagacacgccccagaaagctgttatacatagcagttgatggg

SEQ ID NO: 286235 - DNA, 55 bp, Artificial
  Synthetic oligonucleotide
tcaccacgatcttctgtcgtgcattgcaaatggtgcaagcgttattctaatggag

SEQ ID NO: 286236 - DNA, 55 bp, Artificial
  Synthetic oligonucleotide
cccgaaggcataagagttatgaagaccattactaaaggaaagaacgagcttgtag

SEQ ID NO: 286237 - DNA, 55 bp, Artificial
  Synthetic oligonucleotide
ccacttgaggattgcccctctcttgcccacggaatacggctcgtcggcaggggta

SEQ ID NO: 286238 - DNA, 55 bp, Artificial
  Synthetic oligonucleotide
tagtgtcgagatctgttgaggaggcacttgtaaattccgaatagtcagtgcttcg

SEQ ID NO: 286239 - DNA, 55 bp, Artificial
  Synthetic oligonucleotide
tcacatcggatcactgctatttgactatgcggtaagtattcaacaaccaccagat

SEQ ID NO: 286240 - DNA, 55 bp, Artificial
  Synthetic oligonucleotide
cccctcgtttatgtactggtgccagaacctcatgaacgagttctgccctccgatg

SEQ ID NO: 286241 - DNA, 55 bp, Artificial
  Synthetic oligonucleotide
tagttatctcgggaaagcagtgctgagacttcgcttctgaaaccatataccgggc

SEQ ID NO: 286242 - DNA, 54 bp, Artificial
  Synthetic oligonucleotide
ccccgtggacctttctttccagagcaaaggacacggcactctttacaacagccg

SEQ ID NO: 286243 - DNA, 55 bp, Artificial
  Synthetic oligonucleotide
cccattactcgtcatttcacaccggacaccaggaggataccgaaacccagacata

SEQ ID NO: 286244 - DNA, 60 bp, Artificial
  Synthetic oligonucleotide
tcagatctccgcagttaagcctgtgcgagcccggatagtactgaggcgggagaccactcg

SEQ ID NO: 286245 - DNA, 55 bp, Artificial
  Synthetic oligonucleotide
cccatgaaaagcggcacaagaagttgaacaccaccccgcaaccatagacataccg

SEQ ID NO: 286246 - DNA, 55 bp, Artificial
  Synthetic oligonucleotide
tatcgtacacttccacttcagatagctctctaatgtcttccagagttgtctcctt

SEQ ID NO: 286247 - DNA, 55 bp, Artificial
  Synthetic oligonucleotide
tcaaatgaccgaagctggttcttggacacatcccatatatccctctcacgagaca

SEQ ID NO: 286248 - DNA, 55 bp, Artificial
  Synthetic oligonucleotide
ccagctatctcacaccattgacagatacctcctatcctcgagagccgcagtgtac

SEQ ID NO: 286249 - DNA, 55 bp, Artificial
  Synthetic oligonucleotide
ccataaatgtagcgcatcctgaggatatcaacactgacatgttcaatccacttgg

SEQ ID NO: 286250 - DNA, 55 bp, Artificial
  Synthetic oligonucleotide
ccaggctcctgctgcatccaagaatcctacagagtctaaacagctcctccatgtc

SEQ ID NO: 286251 - DNA, 55 bp, Artificial
  Synthetic oligonucleotide
catctgaagcaaacggactggagatgttctcgtgatttacagtagaaggtgaatc

SEQ ID NO: 286252 - DNA, 55 bp, Artificial
  Synthetic oligonucleotide
ccgagtccagcgctcgtcttagatgccaaccgccccgtacaaacaactgcggcac

SEQ ID NO: 286253 - DNA, 55 bp, Artificial
  Synthetic oligonucleotide
catgagcttaagaagaaatgcgaggacctttgctcgagatccggggtgtcctttg

SEQ ID NO: 286254 - DNA, 55 bp, Artificial
  Synthetic oligonucleotide
ccgaagacgatttaaagagaaccttctacacattgacaagcagagaggatctggc

SEQ ID NO: 286255 - DNA, 59 bp, Artificial
  Synthetic oligonucleotide
tgagctatgcagtaagaataccaccggcggcccaagggaccggaagagttgagctacag

SEQ ID NO: 286256 - DNA, 53 bp, Artificial
  Synthetic oligonucleotide
ccgaacaaagtagtccctggacggatgggattgcttccgttggataaaagggc

SEQ ID NO: 286257 - DNA, 55 bp, Artificial
  Synthetic oligonucleotide
tacgtggatcttgacatgtcctcgtgctccctgagtacaaacagcccgtatcccc

SEQ ID NO: 286258 - DNA, 55 bp, Artificial
  Synthetic oligonucleotide
tactcacaagactgacactgaacttccgtgggtcgttggaataaataagccagcc

SEQ ID NO: 286259 - DNA, 55 bp, Artificial
  Synthetic oligonucleotide
cccttcgaaggattcttctcagcacatatcccactccgtcattactgaagtcaac

SEQ ID NO: 286260 - DNA, 55 bp, Artificial
  Synthetic oligonucleotide
tcacttatcttcgagaaaatcaaatccaggatcctccaactgaaccactagctcc

SEQ ID NO: 286261 - DNA, 55 bp, Artificial
  Synthetic oligonucleotide
tactcgaagcccaagacctctctccgacaacctgagtcctaggtcttcgagctct

SEQ ID NO: 286262 - DNA, 55 bp, Artificial
  Synthetic oligonucleotide
ccctctatgagatacgatggtagatctccaggaagatatgacccgaggtttcccg

SEQ ID NO: 286263 - DNA, 55 bp, Artificial
  Synthetic oligonucleotide
ccctctatagagcatgttccggagaatctccgtggtcatcacgaggcaggatgcc

SEQ ID NO: 286264 - DNA, 55 bp, Artificial
  Synthetic oligonucleotide
ccctcatccaacttcgatgtttcttccctaagggttaggcacatgtggaatgaca

SEQ ID NO: 286265 - DNA, 55 bp, Artificial
  Synthetic oligonucleotide
tagcacggaccgctccagaattcccgtgtatcctggttactactccatggacagg

SEQ ID NO: 286266 - DNA, 58 bp, Artificial
  Synthetic oligonucleotide
tttggactctcggtggggtcccggatgatggatgaggtgtgtttccaatggaagcgag

SEQ ID NO: 286267 - DNA, 55 bp, Artificial
  Synthetic oligonucleotide
ccctaaactatgacttcgatcgcctcttgagtaaggtgcagtctatgtttacagg

SEQ ID NO: 286268 - DNA, 55 bp, Artificial
  Synthetic oligonucleotide
taggcagctgcccaatactcgaagtagaaggccatcttatcctcttcagaaccgc

SEQ ID NO: 286269 - DNA, 54 bp, Artificial
  Synthetic oligonucleotide
ggtctctcgctcatgggagcctcgtaacccgggaggagttcctccgagttcaga

SEQ ID NO: 286270 - DNA, 54 bp, Artificial
  Synthetic oligonucleotide
gtctcatggattgtactagcctcggatgtacgggtatcttgcctttcctcactt

SEQ ID NO: 286271 - DNA, 54 bp, Artificial
  Synthetic oligonucleotide
ttgttctcattgtaacgtaatatgcccttcctgtcttcaacgcagaatagagtt

SEQ ID NO: 286272 - DNA, 54 bp, Artificial
  Synthetic oligonucleotide
gtcctcatcaatcccaagcgaccatcttccgacagacctcagcacctgagttct

SEQ ID NO: 286273 - DNA, 54 bp, Artificial
  Synthetic oligonucleotide
gtgactccaaatgcatcagaccaaactgctaccagtcttttgggagttcaagcc

SEQ ID NO: 286274 - DNA, 54 bp, Artificial
  Synthetic oligonucleotide
tgtatccacaggattgactccagatgtgttttatgtcgggtgtgcagttaaaga

SEQ ID NO: 286275 - DNA, 54 bp, Artificial
  Synthetic oligonucleotide
gtaatatacaaaaccaccgatgtgtagaggaaattggttccaagacagaacact

SEQ ID NO: 286276 - DNA, 54 bp, Artificial
  Synthetic oligonucleotide
tccgtattgaagcaggcggatgggtaatcggctcgctttcagggactggcgatg

SEQ ID NO: 286277 - DNA, 59 bp, Artificial
  Synthetic oligonucleotide
gttgtacccgtgttgaactcctcagcaatcttagctctagtcgagctaggtacggatcc

SEQ ID NO: 286278 - DNA, 54 bp, Artificial
  Synthetic oligonucleotide
tggattctgacgcaagcatactggccgatgcaggcagagagccagagcactcga

SEQ ID NO: 286279 - DNA, 54 bp, Artificial
  Synthetic oligonucleotide
tccttatatctgaatgagaccacagaggttcctgttacaaaatccctcatttcc

SEQ ID NO: 286280 - DNA, 54 bp, Artificial
  Synthetic oligonucleotide
tgcatccgactgcccaaggtctgttgccttggcataccactccacagcccttgc

SEQ ID NO: 286281 - DNA, 54 bp, Artificial
  Synthetic oligonucleotide
tgagatatctgatgaagcttcttcccgagtacatgaggataggaggggagaggt

SEQ ID NO: 286282 - DNA, 54 bp, Artificial
  Synthetic oligonucleotide
gtccactatctccagagacgttccgtgtccgtcctcgttgacaagcccccgggt

SEQ ID NO: 286283 - DNA, 54 bp, Artificial
  Synthetic oligonucleotide
tctcggggtccgagtctctgtttccgatgacaaggtcgcaaagatacgacttcg

SEQ ID NO: 286284 - DNA, 54 bp, Artificial
  Synthetic oligonucleotide
gtgtctatctagtgacagctattacagagagtcggatgagatagattctgatgg

SEQ ID NO: 286285 - DNA, 54 bp, Artificial
  Synthetic oligonucleotide
tacgctagccatttcgaacagagaggccgacaagacgattgacaaaacgaacag

SEQ ID NO: 286286 - DNA, 54 bp, Artificial
  Synthetic oligonucleotide
ctgtactgcagaacgcggagtgcgtttgccacctgcctaaccgttgagaagccg

SEQ ID NO: 286287 - DNA, 54 bp, Artificial
  Synthetic oligonucleotide
ctggctcttcaggacctcgaccttccttgggcacccacggcgcctagatccgca

SEQ ID NO: 286288 - DNA, 60 bp, Artificial
  Synthetic oligonucleotide
aacaccaggcgcacttggattagatcgagcaataaccggatccctattcatactactctg

SEQ ID NO: 286289 - DNA, 54 bp, Artificial
  Synthetic oligonucleotide
ctggacgcccatgagggaccaaacaaaacaccttaaatacagatcgacctcgct

SEQ ID NO: 286290 - DNA, 54 bp, Artificial
  Synthetic oligonucleotide
atctgtcgagcatcttgtgagtttcctctgcaatgagctaatgacaacagggtc

SEQ ID NO: 286291 - DNA, 54 bp, Artificial
  Synthetic oligonucleotide
cgttgtggcggtggagctacctgtgtgattgctgtctcttctgagaattgttat

SEQ ID NO: 286292 - DNA, 54 bp, Artificial
  Synthetic oligonucleotide
atgcccccggaatggccgtggttcctccctggacacacggaaatagggagtcca

SEQ ID NO: 286293 - DNA, 54 bp, Artificial
  Synthetic oligonucleotide
caaggttgtttctcgagtctggtctaataaagctgagtccggtaccatcggata

SEQ ID NO: 286294 - DNA, 54 bp, Artificial
  Synthetic oligonucleotide
acgactcgcataagcccagcaaggcctttacttaagattttccggggccataca

SEQ ID NO: 286295 - DNA, 54 bp, Artificial
  Synthetic oligonucleotide
gccaactacgagatactcggaaatagcaatcggattgcagaactaatcaatatg

SEQ ID NO: 286296 - DNA, 54 bp, Artificial
  Synthetic oligonucleotide
acgaaagcagccggagaacggacgagcgaattatcggaagcattgaggactttc

SEQ ID NO: 286297 - DNA, 54 bp, Artificial
  Synthetic oligonucleotide
caagtcctcgtccttctatagagtgtatgtggacaggagcgacgtgctcagaag

SEQ ID NO: 286298 - DNA, 54 bp, Artificial
  Synthetic oligonucleotide
cgcggagtgcgtttgccacctgcctaaccgttgagaagccgataagcgactacg

SEQ ID NO: 286299 - DNA, 56 bp, Artificial
  Synthetic oligonucleotide
ggaatagaacttcctactcttagtgtattaagtaagtatacaggaggaatggtata

SEQ ID NO: 286300 - DNA, 56 bp, Artificial
  Synthetic oligonucleotide
cggccctggagcccaaatgcgaatattcttcctgccacctcaaactcgtttccctc

SEQ ID NO: 286301 - DNA, 54 bp, Artificial
  Synthetic oligonucleotide
acaatgacgtcgtttccatagtagctgcagctagacagaacctgcctgtagttc

SEQ ID NO: 286302 - DNA, 54 bp, Artificial
  Synthetic oligonucleotide
aatccacttacatcgaaacagtccccaccccatgttcgtccaagaccatacata

SEQ ID NO: 286303 - DNA, 54 bp, Artificial
  Synthetic oligonucleotide
cacttgagatatgtatgacatcgaaaattgctggtgtgaggaacagtccaccag

SEQ ID NO: 286304 - DNA, 54 bp, Artificial
  Synthetic oligonucleotide
aaaacgtttctccgacacatgtagctaaccctgctgtacacagtacgatgagtg

SEQ ID NO: 286305 - DNA, 54 bp, Artificial
  Synthetic oligonucleotide
ccccttgttgcatactctcccatgctgtcgaaagaaaaggcagcacatgagaag

SEQ ID NO: 286306 - DNA, 54 bp, Artificial
  Synthetic oligonucleotide
aaaggccgtcctgacatctcgaagaatcctctgtagtcgcgctctccaggattt

SEQ ID NO: 286307 - DNA, 54 bp, Artificial
  Synthetic oligonucleotide
cccgttgtctgctaccacaagggcccctgcatctgccatgtactctccggagac

SEQ ID NO: 286308 - DNA, 54 bp, Artificial
  Synthetic oligonucleotide
ggcccctctttatcgtaaggacccggacaagacacccaagctcctcgtcagact

SEQ ID NO: 286309 - DNA, 54 bp, Artificial
  Synthetic oligonucleotide
caggtccatgggtgttgtgtcggcggttagaactagcaggccctttgacccctc

SEQ ID NO: 286310 - DNA, 53 bp, Artificial
  Synthetic oligonucleotide
ccgcacccaaatgcccccggaatggccgtggttcctccctggacacacggaaa

SEQ ID NO: 286311 - DNA, 54 bp, Artificial
  Synthetic oligonucleotide
taaaatgcctggagtccgacacacacacctcaaacgacccgtccttaagttccc

SEQ ID NO: 286312 - DNA, 54 bp, Artificial
  Synthetic oligonucleotide
ccctttcgcgatagttgaggtcaactttgcgagcggtgttttgacacggttgtg

SEQ ID NO: 286313 - DNA, 54 bp, Artificial
  Synthetic oligonucleotide
cagagtgtaagagacgcagttgtcttgtcggacgacgtgtccaggattgacgag

SEQ ID NO: 286314 - DNA, 54 bp, Artificial
  Synthetic oligonucleotide
ggagatccagagctaaacgccagccagtgatttaatttgctactaaagccaggc

SEQ ID NO: 286315 - DNA, 53 bp, Artificial
  Synthetic oligonucleotide
tctttcgtgtccttcccgactgcatagatcacatacatcccttttaagagccc

SEQ ID NO: 286316 - DNA, 52 bp, Artificial
  Synthetic oligonucleotide
cccaagacgagccggactcccggggacctagggtgtcttcctatagaggcgg

SEQ ID NO: 286317 - DNA, 53 bp, Artificial
  Synthetic oligonucleotide
cacatgcgacccctttgcactcgcacacacatcacttctcataaccgcctccc

SEQ ID NO: 286318 - DNA, 53 bp, Artificial
  Synthetic oligonucleotide
tctggaggcaggatccgggggtacctgcttggaataacgatggagacgccctt

SEQ ID NO: 286319 - DNA, 53 bp, Artificial
  Synthetic oligonucleotide
atactgtctactgtggaccgagagctgctgaagccaaacactacagttgcgct

SEQ ID NO: 286320 - DNA, 53 bp, Artificial
  Synthetic oligonucleotide
cccgagcggtctcccttctcagtactacccaggctcgcacgggcttaacttcg

SEQ ID NO: 286321 - DNA, 53 bp, Artificial
  Synthetic oligonucleotide
ctaagggtgagcagatggatagtaatgtgcgaggaacaattcgattacttcca

SEQ ID NO: 286322 - DNA, 59 bp, Artificial
  Synthetic oligonucleotide
ctatattggattttgagaccccgtcgctttcataaagctcgaagtactgagtgtcgaca

SEQ ID NO: 286323 - DNA, 53 bp, Artificial
  Synthetic oligonucleotide
atgcaggcttccacttgaggattgcccctctcttgcccacggaatacggctcg

SEQ ID NO: 286324 - DNA, 53 bp, Artificial
  Synthetic oligonucleotide
tccgaatttatactgaggaaaacataaagaacgtaatcccgcacaatgttcga

SEQ ID NO: 286325 - DNA, 53 bp, Artificial
  Synthetic oligonucleotide
tacatcgagtatgtacttagtgagctagacatctgccgaagctctaccaagga

SEQ ID NO: 286326 - DNA, 53 bp, Artificial
  Synthetic oligonucleotide
cggtggccgtggcagggatcattgcataccagttgtgggtgctcagcagaagc

SEQ ID NO: 286327 - DNA, 53 bp, Artificial
  Synthetic oligonucleotide
cggtacccgaagggggacgaccttgcaacgatatgctacacaagcgggacgtc

SEQ ID NO: 286328 - DNA, 53 bp, Artificial
  Synthetic oligonucleotide
cggcagggggctcccgactttatgtactctgcccccacacctacggacaaatc

SEQ ID NO: 286329 - DNA, 52 bp, Artificial
  Synthetic oligonucleotide
ccctttccccacggcagggggctcccgactttatgtactctgcccccacacc

SEQ ID NO: 286330 - DNA, 53 bp, Artificial
  Synthetic oligonucleotide
taggacactagtaattacttatttccgacagccataagtaccgagatatgagc

SEQ ID NO: 286331 - DNA, 53 bp, Artificial
  Synthetic oligonucleotide
gggtgttgtgtcggcggttagaactagcaggccctttgacccctcgaggacac

SEQ ID NO: 286332 - DNA, 53 bp, Artificial
  Synthetic oligonucleotide
ggtacctcgttgccagtctccacgcctggtatgcaatacccccgaccactgca

SEQ ID NO: 286333 - DNA, 60 bp, Artificial
  Synthetic oligonucleotide
taagcggaggaaaagcatttgtcaactatgaaagagagctgtctgccttaaaagctattc

SEQ ID NO: 286334 - DNA, 53 bp, Artificial
  Synthetic oligonucleotide
ttttcgctcttcgatcctatcttccggaaccacttctagagctcttcgaactc

SEQ ID NO: 286335 - DNA, 53 bp, Artificial
  Synthetic oligonucleotide
ggcgggactttgtaatagtaaacctgccctagtatatacatgttgttaagggg

SEQ ID NO: 286336 - DNA, 53 bp, Artificial
  Synthetic oligonucleotide
ggcactctaagatgttagccaagtatgcagagagtagtatgcccctattaacc

SEQ ID NO: 286337 - DNA, 53 bp, Artificial
  Synthetic oligonucleotide
gtagagacaattcaagaaaaggcctaggttattcctcggagtcggatatcccc

SEQ ID NO: 286338 - DNA, 52 bp, Artificial
  Synthetic oligonucleotide
aagggttcgggatggaaccacggtcctggcatactccggggactcaaggccc

SEQ ID NO: 286339 - DNA, 53 bp, Artificial
  Synthetic oligonucleotide
aatgcagccggccgtggtctgtagcgggggagaagtcgagctgtgctcatttc

SEQ ID NO: 286340 - DNA, 53 bp, Artificial
  Synthetic oligonucleotide
acatataagactcgtgactttgaactttatgcttgggagaatgtctattgctt

SEQ ID NO: 286341 - DNA, 53 bp, Artificial
  Synthetic oligonucleotide
gctcagcgcacttccccagatggacttctactggaaggggacgaccgatggta

SEQ ID NO: 286342 - DNA, 53 bp, Artificial
  Synthetic oligonucleotide
gcggcctggagtctctctcgtagtatcccggaggctttgtcttcgacacaatc

SEQ ID NO: 286343 - DNA, 53 bp, Artificial
  Synthetic oligonucleotide
gatgggtgtaacggtggcgccatagaaactgggcccgagggaacggactcgaa

SEQ ID NO: 286344 - DNA, 54 bp, Artificial
  Synthetic oligonucleotide
cgcaacaccttctccgcaacaaaccgcccgaacagacacccgtatcaacgccct

SEQ ID NO: 286345 - DNA, 53 bp, Artificial
  Synthetic oligonucleotide
gatagtccgcttccctctttgggcttacaaaccgtgtgcgatcgtatcacagt

SEQ ID NO: 286346 - DNA, 51 bp, Artificial
  Synthetic oligonucleotide
actccaggcccccaagacgagccggactcccggggacctagggtgtcttcc

SEQ ID NO: 286347 - DNA, 53 bp, Artificial
  Synthetic oligonucleotide
tgtacgatgttgaggaggctttatagtagtatgcaagcatacctagacagcct

SEQ ID NO: 286348 - DNA, 53 bp, Artificial
  Synthetic oligonucleotide
gactggctgtacctcgggacgtccagccacacattccctacactcagcatcgc

SEQ ID NO: 286349 - DNA, 53 bp, Artificial
  Synthetic oligonucleotide
gacctcaaccaatgaaatacgcaggatagggtaaagggaacttcatctcacat

SEQ ID NO: 286350 - DNA, 53 bp, Artificial
  Synthetic oligonucleotide
gtgcagaagtagtaatcattcccagcctctataatagggcatgatgcaaactt

SEQ ID NO: 286351 - DNA, 53 bp, Artificial
  Synthetic oligonucleotide
agcttctgatgcctctcaaacctttacattcggaggaggagtaccataggatg

SEQ ID NO: 286352 - DNA, 53 bp, Artificial
  Synthetic oligonucleotide
gacatatggtgtgtgaaacggccattaagtatctggttatgttccttgaggca

SEQ ID NO: 286353 - DNA, 53 bp, Artificial
  Synthetic oligonucleotide
agctctagaggcagcattgaagcctcgtaaaagcaagtttcgatcgatctggt

SEQ ID NO: 286354 - DNA, 52 bp, Artificial
  Synthetic oligonucleotide
agtaagagctcttgctttgagcctgatctctatagatcaatcgacctatgga

SEQ ID NO: 286355 - DNA, 58 bp, Artificial
  Synthetic oligonucleotide
gggccaagcatcccgaggcttacgggaacagacggaatgtcgatgtgtgaaacaagtg

SEQ ID NO: 286356 - DNA, 52 bp, Artificial
  Synthetic oligonucleotide
ccattctctttactccaggcccccaagacgagccggactcccggggacctag

SEQ ID NO: 286357 - DNA, 52 bp, Artificial
  Synthetic oligonucleotide
ccagcactgacattgaaggattcgagattccctctcatggagatttgacaaa

SEQ ID NO: 286358 - DNA, 52 bp, Artificial
  Synthetic oligonucleotide
aggtgcttccctcgccgtaggtgcgcctaatcgttagatgcgtctcctcaga

SEQ ID NO: 286359 - DNA, 52 bp, Artificial
  Synthetic oligonucleotide
tcttcgataaccctgctgacctctatcccgggatccgctcttttcagctccc

SEQ ID NO: 286360 - DNA, 52 bp, Artificial
  Synthetic oligonucleotide
ttgccggggatgcaatgtacacagacaggaggccaagattcactgcctgggc

SEQ ID NO: 286361 - DNA, 52 bp, Artificial
  Synthetic oligonucleotide
catgcccttccggttagatcgatgcagttgtctccagatagctccgagctcc

SEQ ID NO: 286362 - DNA, 52 bp, Artificial
  Synthetic oligonucleotide
aacgtcgaagtctctcctgtatggcatataagaactgatagcgcctctgtaa

SEQ ID NO: 286363 - DNA, 52 bp, Artificial
  Synthetic oligonucleotide
ttctcccaacttgttcgtgatgttcgaaagcacgtctctcctgtgaatccgg

SEQ ID NO: 286364 - DNA, 52 bp, Artificial
  Synthetic oligonucleotide
aaggggtgctcccggatgcccgctgttagccctttggaccatatctgcacac

SEQ ID NO: 286365 - DNA, 52 bp, Artificial
  Synthetic oligonucleotide
tgccgctcagactcgacatagcggaataccccgagcatcagggcccctatgc

SEQ ID NO: 286366 - DNA, 55 bp, Artificial
  Synthetic oligonucleotide
aaggactctcctagtgggtgcccaattgtgtaccacctgatgttccgggttacag

SEQ ID NO: 286367 - DNA, 52 bp, Artificial
  Synthetic oligonucleotide
tcccgctatgaggcagcagtaccagtcatatcgtcggtgcctctcctgcacg

SEQ ID NO: 286368 - DNA, 52 bp, Artificial
  Synthetic oligonucleotide
aagtaggtcccggagctctagcgtggagaattccatctttgaaccatggaga

SEQ ID NO: 286369 - DNA, 52 bp, Artificial
  Synthetic oligonucleotide
tctaccagtttaagcttgagtatggcatggatgatcgcataaacaagactcg

SEQ ID NO: 286370 - DNA, 52 bp, Artificial
  Synthetic oligonucleotide
acggggccattattggcaggtagcctagccccaggcttcagtggattccgtc

SEQ ID NO: 286371 - DNA, 52 bp, Artificial
  Synthetic oligonucleotide
tgtagcatatcgttgcaaggtcgtcccccttcgggtaccgcttcctgccagc

SEQ ID NO: 286372 - DNA, 52 bp, Artificial
  Synthetic oligonucleotide
gccgaatgctttaatatgtttggatccacaggcctgagggtttgcttacttg

SEQ ID NO: 286373 - DNA, 52 bp, Artificial
  Synthetic oligonucleotide
gtcctacacacactctgagctgaatgccatcaagacgaacgcacccatcgca

SEQ ID NO: 286374 - DNA, 52 bp, Artificial
  Synthetic oligonucleotide
gagtgcatgaatgcagccggccgtggtctgtagcgggggagaagtcgagctg

SEQ ID NO: 286375 - DNA, 52 bp, Artificial
  Synthetic oligonucleotide
gctctctaccaggactcattggagatgtcataggattgccagacatacacac

SEQ ID NO: 286376 - DNA, 52 bp, Artificial
  Synthetic oligonucleotide
gcttgatctcgggaataacataatcgagcctgtgccattgtgcaacgttcat

SEQ ID NO: 286377 - DNA, 57 bp, Artificial
  Synthetic oligonucleotide
ttcccggggctcatagttgtcttgtggcaccggctcctcaacaagtttcacaaactc

SEQ ID NO: 286378 - DNA, 52 bp, Artificial
  Synthetic oligonucleotide
gtgtaatattgctgtgctaccaacagcaaagcacagcgacttgaggagaaac

SEQ ID NO: 286379 - DNA, 52 bp, Artificial
  Synthetic oligonucleotide
gtagctcaccgatgccagatcatccataagagaaacaggggttaaagaggtc

SEQ ID NO: 286380 - DNA, 52 bp, Artificial
  Synthetic oligonucleotide
ctgcggtctgtgacattgcaccgacgggtcttgagatgtctgcaacgtttgt

SEQ ID NO: 286381 - DNA, 52 bp, Artificial
  Synthetic oligonucleotide
ctcgtgcggaataagggttcgggatggaaccacggtcctggcatactccggg

SEQ ID NO: 286382 - DNA, 52 bp, Artificial
  Synthetic oligonucleotide
ggatggaaccacggtcctggcatactccggggactcaaggccctcaaccttg

SEQ ID NO: 286383 - DNA, 52 bp, Artificial
  Synthetic oligonucleotide
gggatcctcatcttacgcttgtaataccttgcaactcggtacatcctcgacg

SEQ ID NO: 286384 - DNA, 52 bp, Artificial
  Synthetic oligonucleotide
taattttcctgggcttgtacatgtctcccgtccccactggcctctcggccac

SEQ ID NO: 286385 - DNA, 52 bp, Artificial
  Synthetic oligonucleotide
cgagaactcggccggtgggcctaatgggagagaagaatgtcctgggcgggag

SEQ ID NO: 286386 - DNA, 52 bp, Artificial
  Synthetic oligonucleotide
gggtcagaattgttaatacggatctgccataccctaaccttggaatcatgac

SEQ ID NO: 286387 - DNA, 52 bp, Artificial
  Synthetic oligonucleotide
ggggcttgacattccgtatctcgacaccgttgtgaattacgacctatgtgac

SEQ ID NO: 286388 - DNA, 57 bp, Artificial
  Synthetic oligonucleotide
cgacgtcaaagtcttctcggaagggcatgtatgaaccgattaatccacgatacggat

SEQ ID NO: 286389 - DNA, 52 bp, Artificial
  Synthetic oligonucleotide
tagccgatctcttaagtattatagggataactgttgcaaagaggcgtctagt

SEQ ID NO: 286390 - DNA, 52 bp, Artificial
  Synthetic oligonucleotide
ccctataccggctctgtacggggttatggtatccataggggcaatgtccatc

SEQ ID NO: 286391 - DNA, 51 bp, Artificial
  Synthetic oligonucleotide
agttatgttaatcccgagcacttgtcttacttcaagtttgtcgggcgtatc

SEQ ID NO: 286392 - DNA, 51 bp, Artificial
  Synthetic oligonucleotide
ctggagtgtatgtgtctggagtgctaaacagcatagatccatacctcaact

SEQ ID NO: 286393 - DNA, 51 bp, Artificial
  Synthetic oligonucleotide
aaacgagctaagtatcagaaactctccgaacacaatgcaagcatgtggatc

SEQ ID NO: 286394 - DNA, 51 bp, Artificial
  Synthetic oligonucleotide
tgaaagacttgtggtaagagctctgtgtgcaggccttggaagcgaatcgac

SEQ ID NO: 286395 - DNA, 51 bp, Artificial
  Synthetic oligonucleotide
ctgtttgaaatacaggtcacttaggaccatggtatagttgcttcctccctc

SEQ ID NO: 286396 - DNA, 51 bp, Artificial
  Synthetic oligonucleotide
gtggctcacaacatattcaaccattgcgtcccggaacttgtttcctcggca

SEQ ID NO: 286397 - DNA, 51 bp, Artificial
  Synthetic oligonucleotide
cccctaactcctcgagatctgtgggacgaaacatcaggtggtacacaactg

SEQ ID NO: 286398 - DNA, 51 bp, Artificial
  Synthetic oligonucleotide
gaactcccacaattccccggctctttgtaacacagtagttgaggcttctcc
